United States Patent Application Publication US 2004/0259086 A1 - sequence listing, part 10

SEQ ID NO: 55213 - DNA, 584 bp, Homo sapiens
  misc_feature 28: n = A,T,C or G
cgggcccccccctcggaagtcttctagnaattaattaacgcggggggagatatacctagtgttgagtgacgagttgatgggtgcagcacaacaatgtggcacgtgtgtacatgtgtaacaaacctgcacgttgtgcacatgtaccctaaaacttaaagtttaaaaaaaaaaaaagaaatacagcttgacatatagcacattatacatttttaggtctgttggaaattttgtggtttcaaagccttcataacacatttgcaaaacagtagatagagtgttatttaagctttacttttaaaaaactcattttcactttttaatccatggtgttaaaaaaatccctccaatactgttaataagacaaaataagtttaatagtcaaggcctacatatggatcatagatcatattgtttaatttgctgcaagattacttgggaattccacatcagaatttgaaagaagctcattttctggttgtaaaagttttggggagggtctccatttttttgctggatcccacttgcttgaataaaatattttgaagaatgaactacaaaaattaagaattacattagtatatcga

SEQ ID NO: 55214 - DNA, 198 bp, Homo sapiens
cgggccccccctcgaaagtcttctagaattaattaacgcggggaggttctttggaatacaattgagctgtttctcctgggctggaaagtaggcaattggcacccactcaccctagaataaacttaacagtgtcccgtggtaaaaaaaaaaaaaaaaaaaaaaaaaaaaaaaaaaaaaaaaagaaaaaaaaaaaaaaaa

SEQ ID NO: 55215 - DNA, 535 bp, Homo sapiens
  misc_feature 441: n = A,T,C or G
cgggccccccctcgaaatacttctagaattaattaacgcggggggcaagttactgaaccctctgtcagagggttgttgtgaggactaaatgggttagtatgtgtgagtactttcaacactgcatggcacatagtaagggcacaataaatgttaataattatgatggtggtcatgatgatgatgatcatatgcttatcttccatcccgaattttcctggaaaatcctaagtaaaaaattagaggccaggcttattttcttaaatctttcttctggacccagaacacatactaattggtgtacattactagcttagttgtttttaagagttacagactgtaaaagtaagtaataaggacattttattttgtcatgaacaatctcctgtagccagactagtatatatatttttaatgtttttaggcagcagataatggcagctntaaactcccagactgccgtgcagttcccagcagtatgcagcccaacagtatccagggaactacgaacagcagcaaattctcatccgccagttgc

SEQ ID NO: 55216 - DNA, 469 bp, Homo sapiens
cgggccccccctcggaagtcttctagaattaattaacgcgggggttgtggtgagctgagatcacgccattgcactccagtcttggcaacaagagtgaaactacgtctcaaaaaaaaaaaagaaagaaatagatacaaacaaaagatatagtttcaaataatctacagtttttccatcagaatatactttatctcttcaggataggaagaaaaataaaataatattttccttatgaaatgtaaaagacattttattataggctttgaataaaataaacactcattttacattacaaagttaacatgaagaatttgctatcatgtgaaataatgttaatagttattaaagtttttttttttttacctctaataaataaaagtatctattaaactgtggactctttgtatcctccaaaccttttaattgtctggtaataaacaaaaatatgtcctgttaaaaaaaaaaaaaa

SEQ ID NO: 55217 - DNA, 603 bp, Homo sapiens
cgggccccccctcggaagtcttctagaattaattaacgcggggtgtaataatggtactgtagttatatattttttgatgtctatattaataacttttaatctaagaatagagttccctttttaagtgcttctttattaatttatttaaagaaactaggtaatttatctaagtgcccaagtgtcattttaacgtattcctttacccctcatatttcctgtgaactggtcagtagatctagaagcttggatagatccagattcaatttctttagtaagaacattccacaggtggtggtttatacttcttactggattacattaggaggcacgtatctgatcatcccacattttaagtcagttaagatacatactgaaggacttaattataaaatgatatgtctgagatttggtataaaatagtacagcaaaataacaacaaaaaagtatggagagatagattaaacaagaatggcagcatgttgaggctagttgaagactgctgataggtatgtcgcagtttaagtatttctaaaatattatttttttaaaaatctggctcctacctaaacctccaaaaagcctcatcccttggtcgggcacagt

SEQ ID NO: 55218 - DNA, 528 bp, Homo sapiens
cgggccccccctcgaaagtcttctagaattaattaacgcggggggaggtcttaaatctctcctccataaacacaccaaatatataaacaacccaggaatgacccccttaggagataacaacaccatccatttttacagagggacttacaagacccaaataaatggggaggcatatcatatttctagatttgaaaagtgactatggagaaaatgttcatttttccaacttagcacatgacttgaaccaattctaatcaaaatcctgagggaattttctttagaacttggaaaaatgattctaagtttcatctggaagaacaaatagataaaattgggcagaaaaatattgaagaaaggaatatcgtggtaaagaactaggcatattggctatgaaacttatttacacatctacaaaatttttaaaagtagtgttagtgcaagagcacacaagtcaataaagcagaatgtgtagccagatacaggtgctagtgtatgcaagaacttaatatcaaatcaaagctgcatcac

SEQ ID NO: 55219 - DNA, 588 bp, Homo sapiens
  misc_feature 25: n = A,T,C or G
gccccccctcgaaaatacttctagnaattaattaacgcgggccctctgttctgtaccaaatttctgatctaccgactgtaagctaatgaatgggtgttttttaagctgctaagcttgtggtaatttgttatacaacaatagaaaatgaatataatacaaaaaaggtacacataaattggcaaacatgtaggtaaatctaaacaaacattgtataaaaataaaaaaattatctacttgggtgtcctcaaaaaaagatgaagtaaaatttggagcaaaaaaatatatgtacaacttttatgaacccataaaaattaaaaagcaatttacaaaagcaaaaaaatttgagagaggctagccatagttaaaatattctaagatctttatatttggggggcaggaatttgcgggtgtggtatctcctaaaatctaaactaccctccttcttgggcaaatggccaccagccagagaccacagttccctgcctcccattttgactaggtgtggccatatctaaagttctaatcaatgtgagttggagtcatgtttgtgaccttcgctttttttgcttaaagggaaattgcttgcca

SEQ ID NO: 55220 - DNA, 576 bp, Homo sapiens
ccgggccccccctcggaagtcttctagaattaattaacgcgggcctattagtagattacattacgcctacatagaaaatcccaagaaattgacaataaaaatgcctaaaactaataaatgacttccataagtttgctgagtactaagtcaacaacaaaaaataattttatttctatatactagcaataaatacgtgaacattaaaattataattgtttgtaatattaaataggtatatttttaacaaaaattatgccatacttacatgctgataactacaaaatgctgtaaaataaatcaaagatgacctaaataaactaagagacataccgtgttaccgtgttcatggattagaagagttagtatagcagcaattccaattcctcccaaatggatttttcatggcttgtagggaggggtaggcatagaacaaaggaacagaatagagaactcagaaattgattacaaaattctgcccaacttatttctttaaaatgtgcaaaagcaattgaataggggaaagatagtattctcaacaaatagtgctagagcaatttaacacccattacaataaac

SEQ ID NO: 55221 - DNA, 548 bp, Homo sapiens
gggccccccctcgagaatacttctagaattaattaacgcggggtggggcacactgtgggctacaaagaaactggtaatgttctattcttaaactagtggtaggttctcagttattcgtgttaatgttattctttgtaccttatctacatagtataaatatttttgtgtagggtagcaaaaaaaattatcatagtttagattcatcatgattctaaagatatgactgcagaattataaacacagacaatggtagagaaggtagcataatagggtgctgactatagccacaaacttatttctcaagttaataaaattttttgtttaaaggcacatattcagcttgcagaccatagggacatacagagagtctaattcaccatttctaatatttaattcagtattgtgacattatacctgttattactgtgaaacacggttttctaatgttttattagcagaaggtacaaagggtcattaatatccatgcacaataaatattcttgtatctatagcattttctgtatatacaaacattcttgtatatatag

SEQ ID NO: 55222 - DNA, 609 bp, Homo sapiens
  misc_feature 16: n = A,T,C or G
taattaacgcgggggnatcaaggggaacctcaacaaacaaccccagccatggaggcggcggtgtctttgaagaccccatgagagcatcaaacaagggagagagcctggaacaaatcatggtagtaaaatggcggcagagagctagtaatgtgtctggaattggtgggttcttggtcgcactgacttcaagaatgaagccgcggaccctcacggctactcctgactgaccatcacataaaagaatacaaaacaatctgaaagtcaaccaaggaaatagtaatcaagaataattctgaatagacgtaatttctactttatgcatgactgtaaaccttaacttcactgaactagaccagggaattggctttcgcattgcttgttgggcttttaaaccagtgaatggaaagaataaaaagttttctccacacaacttctcggaagagatctgccctgtgatctgcaatgtcctgacgttcaaacttctaagtcatctgtggagaccgctcaactgattccaagtggaagtactaagactgtcatttcaggtcagctgcttcttaagcaccagctacctcaggccctaacagcctcatcttcctgtatatgctc

SEQ ID NO: 55223 - DNA, 440 bp, Homo sapiens
  misc_feature 28, 45, 46: n = A,T,C or G
ccgggccccccctcgaaagtcttctagnaattaattaacgcgggnnggtagaaaaaagaaaaaaaaaaaccctaaaccctaggaagtcaggaaaagaaaaagaaacaaagaagtgatgaaataaatagaaagcaaatggtaaaataggtttaaatccaaccatattcataattgcattaaatttaaacgttctaaacattccaattagaaagcagttattgtcagactcttaaaaagcaagacctggccaggcgtggtggcccacgcctgtaataatatttttgaagattactatgatatgttaaataggcatatggtaaactctagagcaagtagtaaaaaggtaaaataaggattaatagctaataagctgacagaaataaaatggagtacaaaaaaaaatactcaaggagggggtagaaaaaagaaaaaaaaaaaaa

SEQ ID NO: 55224 - DNA, 506 bp, Homo sapiens
cgggccccccctcggaagtcttctagaattaattaacgcggggtcttcacttgatattttttaaaaattatgttttaaaaaactgtagcaacattctctgtctctaggattcagcaaaaacactcagattgaataaaacaactgtggatcatttttatatgtgttttatttttattctgaagatctgagaatttgttcaaattgggtttggggaagaaattcaattaacttgtctggactattgctaatactggaagaaacagttacctgaaaagtctgctttgtgattgtctgtcttcctccttctcttcctcccttgctgcttccttcctgctttcctgcctttcttctttccttctttttctgttctctcctttatcttcttcctgtttcccccttttctttctccccattttcttattttttttataactctaaaattacaaccaatatcattaatgattgcctggtgacagagcaagactccatctaaaaaaaaaaaaaaa

SEQ ID NO: 55225 - DNA, 423 bp, Homo sapiens
  misc_feature 82, 196: n = A,T,C or G
cgggccccccctcgaaagtcttctagaattaattaacgcggggtgggttataaaaacccttttataaagccaattttaaacnaagaaaaaaacaaaaagtttacaaaagaaaaaaagatacagaaaaagaataacttgcttcatatgtcccaaaaagagaaaaaaataaacgggacaatgccaacatgctcaacantaaaaaaaaaaaaaaaaaaaaaaaaaaaaaaaaaaaaaaaaaaaaaaaaaaaaaaaaaaaaaaaaaaaaaaaaaaaaaaaaaaaaaaaaaaaaaaaaaaaaaaaaaaaaaagaaaaaaaaaaaaaaaaaagcggccccccccgggggggaaccccaatcccccctaaaggggggctatataccccccccccagggcccgttttttaaaacgttgtaatgggaaaaac

SEQ ID NO: 55226 - DNA, 652 bp, Homo sapiens
  misc_feature 25, 38: n = A,T,C or G
actgggtaccgcggccccccctcgnggatacttctagnattaattaacgcgggaaccattctatatagtactgtaatagtgaatacctaatgttatgaatttattgaaaccaatactgtacaacacaaagctcgaatcctaatacaatctatggaatttagttattattaacgaatcaatattgggtcatcatgtctaaaaatgtaccacagcagtacaagatgttactaataggagaaaggatgggttgaaagaggatgtgtaaaatgactctgtattacctgctcttattttaaatttgaaaagtaattgaaaaatcagtagagaagaaaaaattatcttgactatcccttttattatcaaataaaataaaaaaattcaggctaatgtttaaaattagcctgattaaaataaaaattctacagcttgaaaaataatggggtttatatcaagaatgcaaggttagtttcagatattacaattaatgccctttaccatgttaagagaatgtaagagaagcaagcataggatcatttaagtaaatgcaaataaagtgcttgaattttaaacaaattctatggaaaactcgttggaaaattagaaatagaaaaaaaatgctcagtgttgaagaaattaatgattttagcctaaa

SEQ ID NO: 55227 - DNA, 537 bp, Homo sapiens
  misc_feature 463: n = A,T,C or G
cccccctcgagagtcttctagaattaattaacgcgggggtttccgcttttgcttctgtctcattttctcttgccgcagccatgtaagaagtgccctttgcctcccaccatgattctggggcctccccagccaggtggaactgtaagtctaattaaaccccttattcttcccagtcttgggcacgtctttatcagcagcgtgaaaacggactaatacactccccacacagtttcccattgttgattgtgggtagcatttggggggctatgctttctgtttacacattccatcttgcttccaattttacttacatagagcaagcatcacttttgtaactacaaagataataaagaaaaaataataaatgttgcacaaaaaatggtgtggcaaatagaaaacggactgggcctaggcctccaggacgtgagttcacgtccagtaagacacgtctctgagcctcagnttctttatctgttgaaaatgcatgcactccttgcctccctcgtcagatcaggtgaaatagggaattgaaatgag

SEQ ID NO: 55228 - DNA, 625 bp, Homo sapiens
  misc_feature 28: n = A,T,C or G
cgggcccccccctcgaaagtcttctagnattaattaaatgagcaaaattgtaagtagcagactcttgtaaaatcacgagatgagaatctttatgtatttcctttctgaacagtcaaaggcatgcaaagatgttactgccaggttgagctgaacagtggcctacagaaagttccccagtcattcccagactctaatttgcttcctggagatcagctgtggaaatgagcaagagcaatcgccaattcccagattaattagcaggagggaaaagaggaggaacaggaaggaaaggaagggaaggaggtggggaggagaaatccttactgagcacttactttgtgccaagcattatcttattcaatctttccaacaactctatgaagaagtcattattattattcccattatatagatgagaaaactcagagagcttccatttcttagtcaagaccactcagccagtgtgtgccagagctgggtttggagcccaggttctctaacttaaatcccgcgggataactcatgggtctatgctgactcctagcaaacagcttagttaccttgacacatatttacatgtttcccattttgagttatgcctctagagtggcaaatcactttattc

SEQ ID NO: 55229 - DNA, 603 bp, Homo sapiens
cgggccccccctcggaagtcttctagaattaattaacgcgggagaccatcctggccaatacagtgaaaccctgtctctactaaaaatacaaaaattagccgggcgtggtggcgcgtgcctgtaatctcagctactcaggagactgaggcaagagaatcgcttgaacccgggaggcagaggttgcagtgagccgggattacgccactgcactccagcctggcaacagagtgagactccgtttcaaaaaaataaataaataaaaataaataaataaataaaaatttaaaaaataaaacaaaagtcatttctatttggctaattctggctcaggatactgaaaaaacgagtttccattcacaaagcatgcagtgaaatataatgggaaatatggtctagacaagactaagagaaagaatatgcagactcagcattcaaaaatccactgaatgttctgtgagttaccaggagtgtagaaataaaaaataaataaataaaccatccactggacgacatattctattcagtgaaaaatgcaggttgggcgcagtggctcacgccctgtatccagcactttggaagcagagcaggcggatcacctgagtc

SEQ ID NO: 55230 - DNA, 537 bp, Homo sapiens
  misc_feature 455, 511: n = A,T,C or G
cgggcccccccctcgaaatacttctaaaattaattaacgcggggtggggatgcaattacaaaatacataaataaaattacttaggaataattttaacaaatatgttaaatgtatataagaattaaatagaaaatttctgaaatatacaaatgtacacataagaagttacagcatggacttgggtaaaaaaaaatcaatattataaaaatcaattgctcataagctaatttataaatttaatttggttcaaatatagatacattcagttgggagttatggatgttattgcaagaatctcataggtgaaaacacaaataagaataatcaagaaaactctgaaaaagaacgaaatgagggtagctagtcttgtaagacatgttggttgatgggcagactgatagatgggtggagctcacaactcagaaatagactgcagtgcataagacacattacanagtgacaaaatcgattctttacaacacatagtaagataaaggtctgatttaaatanagctacatggcaaaaaaaaaaaaaag

SEQ ID NO: 55231 - DNA, 594 bp, Homo sapiens
  misc_feature 27: n = A,T,C or G
cgggccccccctcgaaagtcttctagnattaattaacgcggggttgcttgtttaattattatttcagaagtaatatatgttcatttcagaaaatttagaaaatagaaaaagaacaagataaaagggtgtttcatagccatattttttgtattacatatattcttgatttggctttgtttacaaaacgtgcaatataaaccagcatatcacctagaactgtttttccactcagtgtattacagcatctttccacgatacagtgcatattcttgttgtgactttgtctttaataacaacgtaatggtcagcccattgtctggttctatcatgacttatgtaattgatacatattatcaaatatttaattgtgggatgttgaactattcaaaattaccacattaatgatacgtaatcttatgtatattctgtgataaccatcttttgtggtttaatttttgcacacattcatgacatttttcttggacaggattctttttttaagagacagagtcttggccgggcgcggtggctcacgcctgtaatcccagcactttgggaggccgaggcgggcggatcacgaggtcaggagatcga

SEQ ID NO: 55232 - DNA, 327 bp, Homo sapiens
cgggcccccccctcggggtacttctataattaattaacgcgggggtttaaaaaaaaaaaaaaaaaaaaaaaaaaaaaaaaaaaaaaaaaaaaaaaaaaaaaaaaaaaaaaaaaaaaaaaaaaaaaaaaaaaaaaaaaaaattcgggcggcccctacgggggggctcctccccgcccctctttgggggtctttttacccccccttttgtggccgttttttaacgacccccttggggaaaccccgctggcccccccctttttccccttggggggcaataccccttttccccccgccgttttcctttaccaaagagccccccaacgggca

SEQ ID NO: 55233 - DNA, 623 bp, Homo sapiens
  misc_feature 40, 599, 607: n = A,T,C or G
agactggggtaccgggcccccccctcggggatcttctagnattaattaacgcgggatggggaacaaataaaaagcattaggtactaatagtgaattggagagaatcttacaaggattattttaaattatgaaatattctgaacaaacaatagagtgtagaaaatactggaagacatccagatttaggaagtatctaacaaaagtaacatgatttggtctttttaaaacttacagcaattcccgcacaagattctctgtattgttaataatcttggcaaaatctgatgacctgtgactcatttctgtgaaaggaaagataaacaacaataacaaatattccagctcaaaaccaaatgaacagaaatacctacgaaatttgcaagtaaacaacaatacagggaaatttcagttattctgcattcaaattgtgggccaaggctcacttagtttaggggaccatacaaactgattttcaaattgcaaacattttagctttatagtcatggcagaaggatttttcaagtggtacattcactgagcaagttatttattaatttatcactccgtgatgctctctgtgattcttcttaccatctctntctcacanacaggaatccatgtgc

SEQ ID NO: 55234 - DNA, 521 bp, Homo sapiens
cgggccccccctcgaaagtcttctagaattaattaacgcgggatatatatgtgcacacacatgtatatgtaaatatatatgagacagaataaaatatatatggaaagtatacttgaaatataaatagtcaagtatttggtctgagtccacagcctgagaaacaggagagccaataagtacccccgtaagtctctcctataaaaacagagtgtaaattccagttcaatggcaggagatcaacatatgatcaacatttcaacatgtgtacatatatatatatatatgtacacatatattcaggtatatacatgaatttgtacacatatataggtatggaatgtaccaatttaaagacatatttgtagatataatgtagataaatagaatactgaacttgaagtcacaatcagtcatcatggtcctcatatattgtccttaatgtattttttaagtgtcattttaatgatcttttactgacagttttatccctaaccaacattatcgtatgtgaattatcatga

SEQ ID NO: 55235 - DNA, 638 bp, Homo sapiens
  misc_feature 32, 563, 615: n = A,T,C or G
gtaccggggccccccctcgaaatacttctagnaattaattaacgcgggttctctaaaagagttgtctcactgattccataggaccatgatcacttgtgaagtgtgcactgccgcagtacactgaataaagttatattgtcatttttatatatgctgtagtgtattgtccttatctctatgttattttctcaggcattatttctaaaagaggagtaactatgatctcttcttgatcacttcttttcctttacttatctgaacacacacatacacacacatctactttacttaggttagtaattttattcagggaggataaataaataggtacactagattatcactatttctcaaattatcttccgtaacttagattacattcacctccatatagaattactctaccatcagaagacatggaaggatatttttctgatgacacagctcctcaggaaaaaaaatgtttcatattagaaaaataagggctactgctttgctttattcttaggaaattggatttcttgtataaaagagtaagatcatacacctcacatagacagcanaagaagtatttctgtcttctctctgaaattcctgatgagaactctctccagntgatcatgtcatcacaatctatt

SEQ ID NO: 55236 - DNA, 505 bp, Homo sapiens
ccgggccccccctcgaaagtcttctagaattaattaacgcgggggcactgataatataaaagtggaaaatgttacatcaatcaaattagctttcttgctctgaagttcacaaggggcctaatgataattctggtacattatttttgactctttgttggaaaattggtaaattagtaaaagcaaatggtgcaactgcaagatataaattgtgatgtttgttcagagaatattttgcacccagaatttacattctctagatattcatttaactgtgtttttctctaatttaaagtgcttgtaattacacagatagaatagtttgtctgaacacgtatatttaattatttaattcatgctttatcttttcttaaaatttaccaaagaacagaagaataataattttgataaaatttttctattagtttcttttctatgatttttaactaatacctaagtattgccacatctcaaaaaaacttgatctgatgaagactttttaaaaaaa

SEQ ID NO: 55237 - DNA, 570 bp, Homo sapiens
  misc_feature 84: n = A,T,C or G
ccgggccccccctcggaagtcttctagaattaattaacgcgggtagtttaatatttttatttgtaagccacagcttaaaccctntcagaaaaaagataaactacagtttctatgaccacagtttcagtccaggatttggtaccatagtagttaattatgtagtctttaaagtcagagataccttccctatcttggcttctgttgtgtatcagatatgtgatcttggacagattacttaatcttcactgtctcaggttgtttatctgtaatatggatataccagtagtgtctacttcatagattcagtgactactacaaggtagctagcacagtacctgttgtgtgagaagagctttttaaatgttaaccactatcgtcaacatcctccttatcatctctgaaagctcttaagacagtgctttgcttgctgattagcaaacatttttgctggggctgtttgaaagtgtatgtatactctcagttcaacaaagaagttcatcttccaatgtagtatttggttttaaatggttttctactgtgtctcccttgggctaaggtcctggtatatag

SEQ ID NO: 55238 - DNA, 624 bp, Homo sapiens
gggccccccctcgagggtacttctagaattaattaacgcgggactttatgctatgctttatactaaggggaatcagaaaatattaatcattcccaggatttttctaccacaaatcagttgagactatttaattattcagggtagtgtcagcacaggtcatatttaagtacatattacaaaagaatgtaagtgaatgttcatcttggaaaagagcacttgtgcaatcttccatctgcatggagcccttctaattgacaactcctgagcttgcaacagattttggatttaaggagccaaaaatctggaaaatgagctgtgatggttcctgaatttattaagaacaatgaattatttttataggttgtccaggaaagaataattattagaaattactagatatttgtatgtgtaacatattatcttgtgagtgacagcagcaagcttggaaactttctttgggaaattttatagtcactctacttttctgccaaaggcgactctgtttaaaatacaatttcttgtataccatgattagatagacaaattaatgttttaaaataacaaatttggccgggcgcggtggctcacgcctgtaatcccagcactttgggaggccgaggcggg

SEQ ID NO: 55239 - DNA, 414 bp, Homo sapiens
gggtccccccctcgaaagtcttctagaattaattaacgcgggctacgtatataggctatatacatataggcatatacgtatataggctatatacatataggtatatacgtatataacagttatatatatatgtatgtatatctaactgttatgaggcaattggcaaaattcttatttcaagttaggagcttagcattttccaatatatattatatatttttggcattttagcagagacttttagttaaataatcactttagatattataggtagaaacctgagctgagcagatatattcaaggcaattttctcacactaaaatggggcaaaaaagataaatagcacctggaaaaaatattatgtgtaaagaaaatgatgtcggggggcatgtcataatgggaaaacattggatg

SEQ ID NO: 55240 - DNA, 603 bp, Homo sapiens
ccgggccccccctcggaagtcttctagaattaattaacgcggggagctaaggggtctcttgtcttggtacagagctggatacagcttatgagagataagaggcaatgcataaaattagccaggcgtggtggcgcatgcctgtaatcccagctactcaggaggctgaggcaggagaatcgcttgaacccgggaagtggaggttgctgtgatctgagatcgtgccattgcactctagcctgggcgacaagatcaagactccatctcaaaaagcaaaacaaacaaacaaaaaaggcaatgcataaagtcaagaaagaaagtgccagagaaggattcaggttgcttcagggggtaaaacagcagtaagtagttttatttgaacaatggtatggtatggtattaaaagacaatgaggggaatagtacactaacttcagacactttctaagtgttgtagatcttttaaaatccatcatagtcttgctgacttctttagtgatggtttgagttttaattattcaattatgctgccaaaagtactgcaggttgtcaagtatcatttatccaaaatgctttgggacagaagtgttttggatcttggagtttt

SEQ ID NO: 55241 - DNA, 566 bp, Homo sapiens
ccccctcgggggtacttctagaattaattaacgcggggaggaaagttaagatgctgctctttaggatggacctgggcataccctagtatctgtttattttgctttttctggtgactatttaatccaggacaatatgtttagaaattttaaaccagttttagaaattggtttaaaatacattaatttcattttttcagctataattattatgtgtgtatatatgtaaaatatagatatcaagagtcattaactttagtcaccttagtcattgacagggctgagtttggattaagagagaaaaaataatagttctactgtacaatagtataatttttatgattgtaagtattttaaacctagactccaccttcgggggtgcaaaccatattgttttttaattactagtcttctgtgcttcaccatctacataatgaatcccagtatgaagcagaaacaagaagaaatcaaagagaatataaagaatagttctgtcccaagaagaactctgaagatgattcagccttctgcatctggatctcttgttggaagatgaaatgagctgtccg

SEQ ID NO: 55242 - DNA, 623 bp, Homo sapiens
gggccccccctcggaagtcttctagaattaattaacgcggggagaaggaaagtattattgttaaacaaaacacgaatacagaataaaaaatgattaaaacaaggcagtgaagattattttatgcaagctagataacacatgtgccaaatactaaaagtcgacaaaactataatcatttgaataacagaaagacattggtagaaacagtgttggtggttgattttaatatacctctacattcttggcaaagtaaataggggtggttaaatcagtctaagtagatgttaaaggcaactcctgcgaatgcatttgaatacagacttgaccctaaaacaacttggggattagcagtatcgactctgtgcagttgaaaatctgcatagaacttttgactcctccaaaacataactactagtaacctgttgaccagaaaccttactgataacataaacagttaatacatattttttatgttacgtgtattctgtacaacaaagtaagctagacaaaagaaaatgttatttgaaaagtcataaggaagagaaaacatatttactgttcattaagtggaggtggttttcataaaggtttacatccttgttgtctacacattgaatagactg

SEQ ID NO: 55243 - DNA, 621 bp, Homo sapiens
  misc_feature 31: n = A,T,C or G
taccgggcccccccctcgaaatacttctagnattaattaacgcggggcatggtagctcacacctgtaatcccagctctttgggaggccaaggcgggcggatcacttgagcccaggaatttgagactggtctgggcaacatggtgcaaccttgtctctatctctctctctacacacacacacacacacacacacacaaattagctgggcgtggtggcgtgtgcttacagtcacacacacacacaaaagatgctattcaaaacagggaaggtaaataagttttgaaagtctttaatttcacccctccaggaactctcgataatacttattttaatttttattgtttagagacagggtctcactgccttgctcagactggacttaaactcctgggttcaagtgatcctcccacatcagcctcccaagtagctgggactacaggcgtgtgccaccacacccagccattctggatgatactttgtaaacttttaaaacaaatacctctggaggtcttcaggtcctaatacctgcataacctgctcattcacatcttcattaatcagcctacagagttttccaacagtgcttactagcacacacaatgaggatgaactatctgcaaa

SEQ ID NO: 55244 - DNA, 575 bp, Homo sapiens
  misc_feature 543: n = A,T,C or G
gggccccccctcggaagtcttctagaattaattaatttatttattttaagatcaatactggtatcacttacagatctgcctttagttttcctagggcaacaatccagctttcactctgaagaactttacacagaaataggatgagacttggggccttattccacaggagtcctcctccactcagaaatagaatttcctctatttactaaatgctggccaagtgcaggaggattaatatccttattgtattataagagttcttagaaatcaataagaaaagagatgaacatttccagaatatgtacaaaaggccaataaacatataaaaaatgttcaatcgcactagcaacccaagggatacaagttaaaataaaaacgagatgccatttaatgatttgataattgacaaagactgaaaaacagttgagggtgtgaggaaatggaaactaccagaaactgttagtgagaaccataaattaatagaagttcctagaagaaaagtttacaatacatcacaaagactgtaaacttatgcataccctntgatctagcaattccatttttagaaatttatc

SEQ ID NO: 55245 - DNA, 621 bp, Homo sapiens
  misc_feature 589: n = A,T,C or G
cgggcccccccctcggaagtcttctagaattaattaacgcgggtctctgagaaggaagttgccatattacagaagtgaggtgaccaagcacttgttgtaggtctgtacatttagacattaatttatttgagtgtaaataacatattcttatgatttaggctatgattcacttttgattggaccattttccataattgcctctgatgggaaagaaaggagaaatatgtgtgttcctttgaaccatcctggcagtgattaataatggtatgatattttggaagaatttgctgattttagtacatttatctttcaacaaacatgctttcttctttttgtggtttttcccatggacattgttaaaactatattgttaatgttttcatctattgggaatgcagttccaaattttaaaatccttacttaccaggaaacagctttattttgtctcaactactcctatgaagcaataggaatttagcaatagaggcaaagctgtcaatatttgctctggtgtcaaacctagccaatctaaattcatttctcaactgccacaatcagcagaatccctactcttaactgcttgttgctntgctttataagcaagaggtgggctcacgcctg

SEQ ID NO: 55246 - DNA, 613 bp, Homo sapiens
cgggccccccctcgaaagtcttctagaattaattaacgcgggtaccatatagattcattctgagtgcttacagaagttcagttcaatagagtaagaccctgtatatgatggtccatacctttccttagctgttgacatccaacaggatatagtagcagattcaaaattgtcaattcaatgcaggaggattccaggttggcctcaagagggagcatccttttaaaaatagattccccttcaggtaaatgacttttgtgtatcacaaaaaaatgaacgggaagatacactagataacaaaatattaagacatttaggagcaggacctgattttcgtaatgctcccacagtagaaggcactaaagggtatgaaaacaaacaagcaggccctgacctttataaataagctttgggttaacaatgagaaagagacccagaatcaaatatatgcatgaaagtctgaactcatagcctttattttaccattggccattaacctttctatgacctacttagttttaagaatcaaatgaaataatgtgcacattcaaatttagtcatttttatctagcaccgagtaaaacaaattaatgttactggtaactgaaaaatactc

SEQ ID NO: 55247 - DNA, 591 bp, Homo sapiens
  misc_feature 37, 568: n = A,T,C or G
ctggggtaccgggcccccccctcggggatcttctagnattaattaaaaagtagatattataaatcataagactgggagcccaaagtaatctttattggttaattgcgtataaactcgccaaagcaaaacttttagttgtatccataaccattaatcaatcattctgactttctaaaagacataaataagctttgcctatacacacacacacacaaacacacacacacacaaacacacacacacacaaacacattagaaggagaaaaatagtttatcaaccaaagaatgcattcagacatcccatctaaataatatatactgggaccaattttcaaccaacactactgatttgcattctatgtgaaaactatagttttagcaattgttgtaaatacaaagatcacacagaaacagtctgctattttttatactccttggtgaaaaactgtttatcttagtttcactccttaatatgatataggaaaatttaaaatatactaaagttttaggatgaactacaggcagaaatggttttgagaacatgaataacctcagaaagggagaaganattaaatttaaagagaaagacct

SEQ ID NO: 55248 - DNA, 584 bp, Homo sapiens
  misc_feature 27: n = A,T,C or G
cgggccccccctcggaagtcttctagnattaattaacgcgggtattcagttgagtactctgaatatttgttttagatgtattcatttttatccgactagcacaaataatgacaatattttcaagcaaataattcatagaaaagcagcagaagatatctgaggtggtattctttataatgaatttgaaactttgtgtcatagaacaattctgccaaagttagagcttcttatgcatggttacataagtatgtttcatatatacatgtgtactctgatagaaagcaagagatgggggagtttttccttttatcaatataagtcacattaaggaggtacaaatactgtaccattatagaggacattatgtttagtggaaagacaaaataagcttatcattgttttctttaagcctctcatctttaaatatgaccaaaatacgtaattacagtttcttgttttttgacagattcagaaaaaactgtatacattagaagaacatcttagcaatgagatgcaagccaaagaagaactggaacagaagtgcaagtatgttttgtagataattaaatattacattataaaat

SEQ ID NO: 55249 - DNA, 596 bp, Homo sapiens
  misc_feature 28, 41, 57: n = A,T,C or G
agactgggataccgggcccccccctcgngggtacttctagnattaattaacgcgggnaacctaaataaatagtaagatacgctgcattcataatttagaattattcaacacaggtattgttgataagtgacttctactcaaactcatgtttagattccaaacaatactaatcaaaaccccaacagacttttcttgtagaaatgaataagctttatgtgtttgtgtggtaatgcaaataacctggaatgaccaaaacagtactgacaaaataagaacaaaaaatcaatatatcaaaaaagagtccagaaatagaccccccacatacagttgatctatttctactttggcaccaaaacaattcaatgggagagagttgagtcttttcgacaattgcggatacaataattagatatctatatgaaaagtatttgtaaaaggataatttctagaaaatatagcagtgccttacttaatatactaaaagtttggtggccttattatagaaatttccttttctctggaatattggctatatccttttaaaacactggcatttgggtttcactccaccacttactagccgtatgagctctttt

SEQ ID NO: 55250 - DNA, 622 bp, Homo sapiens
  misc_feature 559: n = A,T,C or G
gggccccccctcgaggtacttctagaattaattaacgcgggggaggaagcttcttagaagtctcaagatggctctgtcatgtaatccaggattttaattttaatcacttctttcctttgtatttcaaagtgtctactttaatggaccacaagtgtaaatctgaaacattagcaatcatttagtatataaccttttgatgatgttttctggctccaaacaggcctttgatacctttgttcatatgaagttttgaatttgttttgttttgttttgttgtctctttaatgcagacgaaatggtggaatgtttgagaattccattaaaataaattttgatgactgaagtttttgtgttgcaagaacaaatgagtgctcttcaagccaaactggatgaagaagagcataaaaacctaaagcttcagcagcatgttgacaaactggaacatcattctacccaaatgcaggagcttttctcatcagaaagaattgattggaccaaacagcaggaagagcttctctcacagttgaatgtccttgaaaagcagcttcaagagactcanactaaaaatgactttttgaaaagtgaggtacatgacctgcgagtagtccttcattctgctgac

SEQ ID NO: 55251 - DNA, 592 bp, Homo sapiens
cgggccccccctcgaaagtcttctagaattaattaacgcgggctctaatttccaggtggaggaactgagttataaagaaaagtggagtgaatttcccagtgtcaacatttcagttggctttagaatccatagctgtccggatgccagagtctggctctgcgccctgggaaacaatgcatcattcctattgttctcacatttctcttctaaaacttcatggaggtagtggagagagttaacacttttactgttgctggatattattttaggcacttggaaagtccttttttggcctttgcatcagccttgactctaatatatgcatatgttgaaattttgaagattcagacggtgacctttgaataaaataagatttcatacttcacctctcctttgatccttccctgattacttcatttacagaaatacctgctgagcaggaacaaaacaacaccagcatagtatataatgttgttaggctatttcagaatggacatgttctctgttgaaatggtctgcttttaatatgttcagtgtttagaaaataccttgtcttaagttgtagactttaagaaaaaaaaaaaaaaacttt

SEQ ID NO: 55252 - DNA, 565 bp, Homo sapiens
  misc_feature 515: n = A,T,C or G
cgggccccccctcgaaagtcttctagaattaattaaatgctttgtaatttgttacatgtaaggacttataaagactacagctttgtttagaatgaggtttccttcccttttcatattttttaaacctgtgtgagtgctcccaaacagatcaatttcttacatgccctatggaaaagtggaggaatccagggcaacataaggatgaaagggtgaggccaagaggaaggcttgatcacctggagccagaagaaagaaccaaacctttaagacatatttagcattttgaagatttgagaacactttatagtcacaggcctctaaatgtttagtgtttttttaaattgcaaaagtaaaactagctcattacaaaaaaattataaatgatcaatatttaagagaatgaaaattcacctctgcttcctcttccagctcccaccctggctagtttcactcctaaacacacctagttatcagttttgggggtaaggccctccagacgttttctctacaatggncaatgtgcccagagtatttagtttgaaaaattattattttgcagcttgct

SEQ ID NO: 55253 - DNA, 274 bp, Homo sapiens
cccccctcgaaagtcttctagaattaattaacgcggggagacctcatgggattacatcatctttcagtttccaacatcagatgcccccaaatggaccctcgttataaaatcctaaaaaaattaaacactttcttaccttcacacttgctctctcagttcacaaaacttcatgaacgcacaatttattaatacagttcaaatataataagcaattaaaatgtttcctgccattccactaaacaagtatttttaagttaccaaaaaaaaaaaaaaa

SEQ ID NO: 55254 - DNA, 642 bp, Homo sapiens
  misc_feature 11, 22, 35: n = A,T,C or G
tgggtaccggngccccccctcnaaatacttctagnattaattaatttaaatttaaatataaagagctacttgtggctggtggctagaacgtgggacagatcagacaaaactacaggaagtcctcagctaacatccccgatgggttcttggaaactgccacattttaagtgaaatgacacataacaataccatttttttcatcaaccttataaagaaatgatgttgaagaaaatgatgttatttgaggacttgctgtacatcttttgcttaaagtcacaatttctaagattctctgggtgatgttaattgaggacttactgtacagaaaagggtcaagtcagatgcaccctgaaggcctagttattgtgttaaaataaatttgacagattattaaaagagctcatctgtttttagaatagcaatatacatgagctcatgagagcaaacatacttcgaaaggaatctgcttacatgtgacagagccttgacataggaagtggtaatatcctgtacttaatttttaattgacaaataaaacttaaatatattatcatgtacattttttgaaatatgtatacattgtaaaatggctaaatcaaggtaattaacatatacattatcttacactcttactgttttttt

SEQ ID NO: 55255 - DNA, 487 bp, Homo sapiens
  misc_feature 37: n = A,T,C or G
ctggggtaccgggcccccccctcggagtacttctagnattaattaacgcggggatcctgagtttgaatccaagctttgagattatattgtaagtttctgggaggtattgggccagttacttaccttttctgaatataggtgtcctcctctgtaaaatggatttacaatattactaactgtatagagtagttgagaagcttaaatgagaagaggcaggtacgtttctcattacagagctttaagggttgttgcactttaaaagcaattttacatactttatttcatttagcctttttaacaatcatgtgaatgatacgtgattaactcaattttgtgtaccatagaactgagaaagaggaatttggaatcgaaaatatcataacttaagatagtgtgacaaaaatagtattccagtgtctaccaacttgctttctgaacttgtctaattgtaaagaccgagaatatttgaaggaaacatgcagcgcag

SEQ ID NO: 55256 - DNA, 595 bp, Homo sapiens
  misc_feature 44, 45: n = A,T,C or G
cgggccccccctcggaagtcttctagaatttaattaacgcgggnnactatgtaaaaagagtacaagttattgtatctcattttcttcatctgtaaaatggtggaaatgatggtacttactccatggtattattgtgaatactaaataaatgtttcatgtaaaacatttattacagtacctagcacataatcaatactcaacaaatatgtagattttagtttaactgtgaaaacttgacatttgctagcattcccttcatgattatcttctattatcttctttgatgtgttatttcaagtattcttaatgattcctgttgtttcaactgtcacttttttccaaacgacattttgtttcttctttcttaattaggattttaggctatagtaaaaaccaatggcatagtataatttttgagagttgtctcatatgcttcagtatttacttcttcctttttagcatatatgattactgtagcataataataagaaatcagtatgtcctgggatgtcaagtaaaaagtacgagagtcatcttacagttatatgacttcttagtaaagtgagaacccaccccccagccccgccaaaaaaaa

SEQ ID NO: 55257 - DNA, 340 bp, Homo sapiens
  misc_feature 18, 31: n = A,T,C or G
accgggcccccccctcgngaatacttctagnattaattaacgcggggttgtagacccactttctatgctgtagtcagtagcagaggtatagcacaaggaagagaggaaagaagaaaccacttgttaatgacaagactggataaccatggtcattttatacagtaaccaacaaaatcaggatggaggagagttaaaatctattgaggtacagtacataactgtttcttaagattggagcagtgtttatttgaaagctaagaacatattgtgggcattgacaaggcgctaaggccttccattctatcttgtaaagtgtgtagtctctaaaaaaaaaaaaaaa

SEQ ID NO: 55258 - DNA, 544 bp, Homo sapiens
ggccccccctcgaaagtcttctagaattaattaacgcgggtcttctctgggggtcctcagtatgtttcctccgtaattgattggatgaagccagtctatagcatggaaggcaatctttactcaaagtctactcatactattgttaatcacatcttaaaaatatctccacagcaagatctatactgggccccaaagacagtgcatatgtaaaattacccataagctaggaggtagaaggttctggcatttcaggaaaggagaactagcacggctcccatgcagccctggcacatggctggttgtcatttgtcaaggattccatttttgagggcaacaccatgccctatgcaaaccccgcaaacctaatcagcttcccctttgtaaaaatattaaaaataattctctagcttgtgtgatggtggacatggagtggaacagaaaatgtaggttgctccctagttgtctccagagtttatttaccctctcagagagaattcccacctcagaaacatgtaaggatgacatcgattaaaaaaaaaaaaaa

SEQ ID NO: 55259 - DNA, 595 bp, Homo sapiens
acttctagaattaattaacgccgggaatagttattatcattgtcaagtattatatactgtgcataattatattgctataattttatataactggccacacaatgggtgtgttttggcagcataactacaaacacatgaattatgtgttgtactataacattctaatggctacagtgtcacctggctgtacgaattttcagttccattacagtcttacgggaccaccaccttatgtgcggtcattgactgaaacatcatcatttggtgcatgaatgtgtcttctatgcacttcctgcctaaatcctctaaaactctgatttcaaagcacagaaacctggaatcaatccccatacaagataaaactttctattatctctgactatctaagacagtgacctcaatttaaacaggcctttaaattgaggatagaagaaatagacggagacttaaacctgttgctgagagatttaaaactagggttacaggctagatacaaatattttactcggtaagtgtagcagattgtgtcttctaaagttagacacaaaaatattttccataccatattcttactatgtaatacggatactctaac

SEQ ID NO: 55260 - DNA, 635 bp, Homo sapiens
cccccctgcggaagtcttctagaattaattaacgcgggtacactctgatgatggcaagattggagagaagaagagatgaagcctaggactcaccaaacatcaggaggctaaaagaagaatcaccacgtgagatatggaagaactgtgcctgatggtaaagatggagagaaataaactggtcattgagaagaagacatcaaggaaacttatcttgactttggcactaggtaaaagagagaaggaatttcccttgagaatgcataaccaaaaaataagctctcgtgggcctgtgatctaatccacaataactgagagtacaaaaacaaactcaaacttattttcaattcatcccaggttttcagtatctgcaagaaataaatgcgaaattactctgaaaaaaacacaatttcaatcaaattttcaaattaattccacaaacgacactccaaggaaaaagaccagcttgcagtcaaaacttagaaaatacacatgaaaataacatcatgagtgaagcaaagacaaaaatagcagaatcagatcaacaaagacttcagaattttgaattaacagatgcagaatataaaataactattatgaatgtttttaaaaaattgtttttgagataaaattcacat

SEQ ID NO: 55261 - DNA, 546 bp, Homo sapiens
cgggccccccctcggaagtcttctagaattaattaacgcggggacacagtatgagactcttacaatggtaaacatccatttcctcaaactcccctcctttgttctactgttatttcacaagtttataagccccagaaaacattattagttttactttaaaaagttgattatcctctaatttggaaaataatcagaaaatgtcttttgtatttacccatattctaattatttctagtgctcttcattcctctctgaacttgcaaattttcatctggtactatttttatttggcctagatagcttcctttaaaatttcttccagtgaaggtctcctggtgataaattctcacagtttttgtttgtccaaaattatttattttgccttcacttttgaaagatatttttcactgagcatataattctaggttgatggttttttcttttagccatttaaaactgtcgctctattgtcttctatctgtcatagtttctgttgagaaatctgctattaatttttaatctttgttctacataaaatctgtcttt

SEQ ID NO: 55262 - DNA, 351 bp, Homo sapiens
cccccctcgggggtacttctagaattaattaacgcggtatttggaaaaaaacttcattctcgtgagtcatttaaatgtgtacaatgtacacactggtacttagagtttctgtttgattcttttttaataaactactctttgatttaaaaaaaaaaaaaaaaaaaaaaaaaaaaaaaaaaaaaaaaaaaaaaaaaaaaaaaaaaaaaaaaaaaaaaaaaaaaaaaaaaaaaaaaaggggaaggggccgcaaggggaaagaaaaaacaaccaagagaaaggaaaaaaaacggggggcccccggcggggggggaaccaatgcccccccgggggggggccctgtccccccccccc

SEQ ID NO: 55263 - DNA, 359 bp, Homo sapiens
cgggcccccccctcgaaatacttctagaattaattaacgcggggtcccatcacaaacttcccatggcttcatgaatttttaacttaaaaatcagctaacaatcattaagcatttattttggggtaagcaatatactcaatgtttttcatgcataatttcattagttctcacagcaacactataaattggtttttctcagcagatacatgaagaaactaaggcttactcaaaataggttccttgcccaggatcacaaggatgtaataaccctacaatctggctccaaagcctgcacacttaacaatggggctaggttgtgttagtaagcaaatatgtacctgtttaaaaaaaaaaaaaaa

SEQ ID NO: 55264 - DNA, 582 bp, Homo sapiens
  misc_feature 28: n = A,T,C or G
cgggcccccccctcgaaatacttctagnaattaattaacgcggggtggggtgtaacagtatatataggaagattatcaaaaaactctttggctttagaaggaaaaccactagtctaataattgtctctaaatgtgcaggtgacaatcaggctgccatatctaaaatgttactgtctgacatcaaccaaaagatgccaggaaaccgttgatagttaaactcaaactgcaagaaaatattaatgctattcccaaaacacagcacagctcatcacaaaccagggtcacatgaaagccacagtcagttactggtgttattcagtctctttatgccaattaaaataaattgcctaggtttgttgtaatagttaagttctgggtttaaaaaaaaaaaccaggaagttgtcacattaaggcgtaaaataggactgcaaaaatcagcattgtgcgcaaatgaaagaaaaagatgccttaatatgttaaagtgcagttcctctttgcctaaagaggaaataactagtctaaatcagaggacaacaattttcgtcttgggcaatgctaggagaataaatcagtgaatgacac

SEQ ID NO: 55265 - DNA, 543 bp, Homo sapiens
cctcggaagtcttctagaattaattaacgcgggggtccaatgccctaaaataacctagtgaactgttcccagactcgccttattcttttaggtctcctttcctctgctcaaacttacacttactccctttccacaggctgaaatcttacccttaaaataatcagacacatgagcaaaagatatgtattaacagatgttcattgcaccatccagcaatggaggactggttaaaaatatcacaagatttatctctgcaatggaatatcacacagcaaactgatgctaatgtacgatgactgacagaaaggcaaccaccgtattaaatgaagaaaagcagaatatgaaagtgttttacgtatatatacttaccactttagcatcctaatctgaaaatccaaaatctgaaatactccaatgagcatttcctttgagagtcatgtcagtgcttaaaaagttagattttggagcgttttgagttttggaacatttaggttttttttttttttttctcttgaggcagagtccaaaaaaaaaaaaaaaagc

SEQ ID NO: 55266 - DNA, 599 bp, Homo sapiens
  misc_feature 552, 556, 576: n = A,T,C or G
ccgggccccccctcggaagtcttctagaattaattaacgcgggtctggtcaaataggaatagaattgtactagagtttatatttcttagaaataaacgtatacactttttcaataggtatatatttattaacatgttatatttcataatgtagcatatgtatttacatatcaattaataacttagaagtcttgatactctgaattttaagtcattcatacctctttcaaagtaaattatgcaatttataaacatttgaaaataagtttagtagagattgttttcctaaaatgccatcttcttagaagatatatttcttcccaagttctattttttcctttttctaaattgacacattatatttgtacatatttatggggtaccatttgattttcaatacatgtatacattgcataaatatcaaatcagggtagttagcatattcattacctcatgcatttatcatttctttgtgatgagaatgttcaaagacatcagtcctagctgttttgtaatgttaaaagaaaaatcttagacaaattcaatttaatanagtntaattgagcaaagaaccatntgcaaagcagggagccttctgag

SEQ ID NO: 55267 - DNA, 567 bp, Homo sapiens
  misc_feature 490, 550: n = A,T,C or G
cgggcccccccctcgaaagtcttctagaattaattaatattggggccaaaatgttcattagatactgtttttaatgatcagtttttatgcatatgatttatataagtcagaacttcaattcaatgtttggtagctgtttgatttttaggacattatatattgaaatgtacactgattatcctaaagttgtaaatatttaagaaactttacagcaaaaagtctaaaataaagatatatttatattatttccaaaacagaaaatttaaattgattccctagtcaaagaaactgtttgtaaataaaatgtaacaaactatatattccttggcccccagacagtttaaagtcacttttcctttttatatacatgttctaatattataaacagtgagctcaggaataccctaatttgtcttttgtatattttcagcagattgtgctgtttcaaattatattattttactccaattcttttgtttacatattgctntttttgctagcgtttttcatattttaaaatatattactatattgtatatagtaatattgngtttctctttcttcatg

SEQ ID NO: 55268 - DNA, 608 bp, Homo sapiens
  misc_feature 40: n = A,T,C or G
agactggggtacccgggccccccctcggggatcttctagnattaattaacgcgggaacctgctaattaaaaaacttgtagcttcctgcttaaagaccacccaatgcaggcttttctccttaccattctgataccttctcctgctttgcagtcctgccacaactttcaatagactaaggatgagccttacaaactttctttcatgataaactgccacaaatctccagccagtttccactggcttatagaggatatgcaaaaacctcctttgtgcccagtagttcaccatatgacatattgagccaaaatctcccttattttgatattgaaatcccactgcaaagtgaatgtagaatgtatgctacatacgttaagctgttacacaagtgcttaacttccctcaaaaatatacatagatttttcacaaactcctccacaaatctcttggtttttttgttaacactgtaaagcaagtatgcttaaaatgtttagtaaattaactgttaaaaatgaataattttggctgagaactggaaactataaaaaggaaattacacttttttctttttaaagagctgaattgaaactctggccaaaaaaaaaaaaaaa

SEQ ID NO: 55269 - DNA, 586 bp, Homo sapiens
cgggccccccctcggggtacttctagaattaattaacgcgggggaacaaagaattaaaaaaaaccaaggcctccaagatctttgggacaacataaaacaactgaatatgaaagttattaatattcctaaatgtgaggatagatcaaagcttagaaaatgtaatttaatgaaataacagatgaaaacttcccaagtctaccaagaggtttagacatccaaacacaagaggctcagtgatccaaagaaatagaatacaaaaaatcttcatcacagcacattataatataactgtctaaagtcagtgtgaacaatgatttttaaaaacagcaagagaaagtcatctatttacctattaaagaaaaactatccaactaacaatgaccctctcagcagaaacttcaaaggccagaaaataaatggatgatatgttcaaagtgtagaaagaaaaacaaccctgctgacggtgaatactatattcagcaatacttgccttcataaatgaagtataaataaagtctttcccatacaaatgctgaagggaatttgtcacgattagattggccctacaagaaatgctcaagaagtc

SEQ ID NO: 55270 - DNA, 579 bp, Homo sapiens
  misc_feature 20, 33: n = A,T,C or G
gtaccgggcccccccctcgngggtacttctagnattaattaacacgggtagcatttgaatatttatatctaagtcacaacctatgctaaaataaatgtcaactgactaaaagagttaaatgttaaaatgttgtttttagaaaacgtacaaatagaataaaggccttaataaatatttgaagaagagcaatatctcaaaatctatggaattagattatataaattttaaaacaaatacacaacaaaaactgccacaaataagtaggcaggctatgtgaaatatttgcaccaaataggacaaatgattaagatcattgttatataaataggaaaacttgacagtaaaccagaaatatgataattgaccagactcagtataatattcaacctaataaaatttgcaaatttaaaccatattgaagtttcatttgctacctattcaataaataaaaacaaacatttcagatttatttttatgaaatattttatttacatactattgtgaacgagcagtttggctatttatattgagaactgtgaaaacgggattctggaaatttatcccaaaaaaaaaaaaaaa

SEQ ID NO: 55271 - DNA, 573 bp, Homo sapiens
  misc_feature 24: n = A,T,C or G
gccccccctcggaagtcttctagnattaattaacgcggggtcccgatcttggctgaacagatctgccacagccaagcattcagtgttctaaactttcaatattttttgttatacactaacaaattagaaaacctagaggagatggataaatttctggagaggtacaacctaccaagattgaatcaaaaaaaaaaaatagaaaacctgaacagattaatagtaaataataatattgatattaataacattaataaaatgtttcccagcaaagaaaagcccaggacctggtggctttactgcttaattctatcaaactttttttttaacctcttccttgcagagcagtgttaacccctaggcactgtgctcagagtcagctaattctaccaaacttataaaaagaattaacactgattcttctcatactatcccaaaacattgaaagggagtgaactcttcctgacgcattatatgaggccaaaatgaccctaataccaaaaccagacaaggacataacagataacaacaagaaaaactgtctgccagtatccctgataaacatagatgcaaaaa

SEQ ID NO: 55272 - DNA, 520 bp, Homo sapiens
  misc_feature 29, 355: n = A,T,C or G
cgggcccccccctcgaaagtacttctagnaattaattaacgcggggaaggggcccttggccacaggtggaattaagaaatctggcaaaaagtaagctgttccttgtgcctgaggagatggtgaccctttatttcatctgtatttaaacctctctattccctgccataacatcttttgccacgtataactggaattaagtgttgtcttggagctgttgtacatttaagaataaacttttgtaaaaaaagaaaaagaaaaaaaaaaaaaaaaaaaaaaaaaaaaaaaaaaaaaaaaaaaaaaaaaaaaaaaaaaaaaaaaaaaaaaaaaaaaaaaaaaaaaagaaaaaaaaaaaaangggggcccccccccgggggggcccccaattcccccttatgggaggtgttttaccccccccccctggcccgttttttaaaacctggggaagggaaaaaccctggggttccccaaataaatccccttggaacaaatcccccttttccccaggggggaaaaaaaaaaa

SEQ ID NO: 55273 - DNA, 199 bp, Homo sapiens
  misc_feature 11: n = A,T,C or G
cccccctcggnagtcttctagaattaattaacgcgggggggcacacggtgagaaagtgcaggatacacaattgacacaaaaaggaaaataataaagtcaaactggtattcaaaaaaaaaaaaaaaaaaaaaaaaaaaaaaaaaaaaaaaaaaaaaaaaaaaaaaaaaaaaagaggacaccaccggggggggccccccct

SEQ ID NO: 55274 - DNA, 644 bp, Homo sapiens
  misc_feature 501, 520: n = A,T,C or G
ccgggccccccctcggaagtcttctagaattaattaacgcgggctcccgaatataacttggtagaatttgaacaactccatgtttctgtttaagtcactgaacacggaaagttgttttttgttgttgttgttttgttgttgttgtctttctttttttcagtataagacattgcttatttctacaatgctgacctcttttgcctagcatggctgaattagctaaacatcatatcctaaggaaaatagtgatattcattaatatacaatgattacataacatagtgtgaacaagccagcctataaattaaataaccacctcaggtaaacatctacccatcaaaaagatatttgctaataaaacgacacttaatacatgcacagtacagtgacacacaatttaaagaacatataataattgccttcacttatttaatctccataactagtactctgtggcaggtattatcattcccactttaaagacaaagaattaaggctcanagatccttagatgacattntatagatcaaaagctactaagacactggaatcagggtgtgagcaaagttattaaatcagagcacttaaacttgagggtcagacacatcttgatgagtaaccttgctgctccccagcagtgtgac

SEQ ID NO: 55275 - DNA, 277 bp, Homo sapiens
cccccctcgagagtcttctagaattaattaacgcggggtgggtggggatagtttctgggaagatggtttctgttactcatcacaggcaagagagacaaagaaaagttgagtttatatgactcccccaagttcacggaacaaatacctgaactgcgtgaactgcggtatctttttttttttcttgtagagatgggggtctcattacgttgaccaggctggtctcaaactcctggcctcaagggatcctcccatctctacaagaaaaaaaaaaaaaaaa

SEQ ID NO: 55276 - DNA, 543 bp, Homo sapiens
  misc_feature 28: n = A,T,C or G
cgggcccccccctcggggtacttctagnattaattaacgcgggtggatgatgaatcagatgaaaaagaagcaaactcaccttaaaatatctggattttctttgggcataacagtcagacttgttgataatatatatcaagtttttattattaatatgctgaggaacttgaagattaataaaatatgctcttcagagaatgatatataaatattgcatgtttgctttacctcatatgagttatttataacctcttgaatcatcttctgtacacgtggattttatccaaggatatttttatttttgtccctcatttcccatggctctttctttgcatatgtgtgaaggagtttaaaatacatttccccccatctaatttatttacttttttccatacaggaagaaacagaatgctttttagaatattctaaaatagctttttgtgaaatatctaaaactatttttactgaagtttttagcttaagaaacagctaaacaagtctgttttaaaaatggtatctggctactagcccccaattaagtag

SEQ ID NO: 55277 - DNA, 561 bp, Homo sapiens
  misc_feature 15: n = A,T,C or G
cgggccccccctcgngaatacttctagaattaattaactcaaagtgaacttataggggcttcaattacctttcacctttgctatataacctaacctaaccgtggacgtggcatccatcatgttcacagctcctgcctagactcaaagggaggggattacacaggatgtgtacaccaggggataggaatcttgtgggccatcttagtgttctgcctaccacaatctgaaatcaaatactaaagcaataaaacataacagacttacttattctgtaatggtgtcaaaattatatttttaaataaagagagaaactaagaaataataataatagacttggataaacataatggttgaatatatgtatatatctcttttatctttcccaaatgcatgcaaatgacagtaaaataataaaacatttcaatgttttttagataaggagaataggagagtatggacaagagatgttgataagcatttggaggatgcgaaatgaatagagatatgaacggccttgtagaagaaaaagaaattgaacccaaatgctggggagaggtaaat

SEQ ID NO: 55278 - DNA, 605 bp, Homo sapiens
cgggccccccctcggaagtcttctagaattaattaacgcgggtcaggtcttctccattaactaataccaactgtggacacttttcttttgcatctctgacattcataagtttcttaactccaagtttcctagcttcatagttgcaggtaaccaccaaatatttctgttgaacccctgtaaaaaatattttatgagaaacccaagcacaattgaagaaaacatttaaagatattattaattccgtattacatttgtctaaattgtaagacaatcagttttgataagaatcaaaagccctgtctcaattaaaaaaacatagcctccatatatcaaatctctataatgcagaaacattaggttttcaagctatctcctaattatgaattataatataccaatgtattatttttccataccccacttttaatctctagttgttttgtctccttgaagaaggaaagttattattaaataacaaaacactgaataacacagaattaaaagttagacgatagatcaattattcatatacaaaaggcaatctatgtattacatttctaaaatttaaaaatgaacctaaatcaatatattctatggaatcttca

SEQ ID NO: 55279 - DNA, 520 bp, Homo sapiens
ccgggtccccccctcggaagtcttctagaattaattaatttaaatttcaatagttatatgtagctagtggctacactattggacagcacagctctagataactacaaggaaaatctaaactaaaattttaaagattagacttttcaaaataatttttataacatgtacagcttatatatcatataatattaatattcaaattaactaggtaattcctacgttttaaggcttgacttaaaggacgatttctcttttttttttttgagatggagggtagatcacctgaggttgggaactcaagaccagcctgaccaacatggagaaaccccgtctctaccaaaaatacaaaatcagccgggtgtagtggcacatgcctgtaatcccagctgcttgggaagctgaggcaggcgaatcccttaaacctgggaggcagaggttgcagtgagcctagatcattgcaccactgcactccagcctgggcaacaacagcgaaactctgtctcaaaaaaaaaaaaaaaaa

SEQ ID NO: 55280 - DNA, 300 bp, Homo sapiens
ccgggccccccctcggaagtcttctagaattaattaacgcgggatagtaactgatttttctccagatgtgtttgaactatttgtaactctgacactttcttaggaattcattgttattttcccagaagtatgtgattattagaattgaactgtctatatatacatgttagtacaaagaacattttatctattatcattgttaaatctttgagacagagttctaggataatagtgcagagaatattgacaggaaaataaaagaaaagtctcttcaagcaatctcagaaaaaaaaaaaaaaa

SEQ ID NO: 55281 - DNA, 617 bp, Homo sapiens
cgggccccccctcggaagtcttctagaattaattaacgcgggcagcactgtaagtattgagattaataaaatgtgctcagcttctcggtgaaaagacacaatggaaatccaagttacaattgtgcttctcacttcattgaaaagggagaaagattgtcattcagagtatgctacagaactattttaagcctttagaacataataattagaacagcaaaattaaaggttctgtcacaattccacccaccaatcaaatgggaaaagagcagcagctaggaatttaaaagagtgtaattgctctctcagaacttaaaaaatgctacatgaattaaggataaaatgccttttatactctcaacttttaagtcttttattcaattattcagatgaaaccacataatccacgcatgcactaacatcatgggctcttcaaacaggaatagatttagagatcaattaatccaaagttctcaattacagctggtgaatttgaagccaggaatatagacaactccatagagtttccacagctagttagttatggaagctagttagttacagaactctatttatgatgtacaacatttattttatacattgttaaagatatcatatac

SEQ ID NO: 55282 - DNA, 250 bp, Homo sapiens
ccgggccccccctcggaagtcttctagaattaattaacgtgggttccattttaaataaacaaacaaaactttataatatccccatcctctttcagctgctttcccatttctctgctttctttaatagaaaatctattaaatatatctcctgagagaagtttctatacaattgtctccagttttatcgtcagtctttcctctattccactgtttttaaatccaggctgccatatccagtggtaactattat

SEQ ID NO: 55283 - DNA, 621 bp, Homo sapiens
  misc_feature 24: n = A,T,C or G
gccccccctcgaaagtcttctagnattaattaacgcggggggttggagaatgctatgtgcatttttcaaaatgaattccttctgcctccactgaaagcaatgtgttcacttgtttgataaaaagctactttattccagaggaatgaggcaagaatcaatgagctacttgtcagtgttctaaagctaaattgcaaattcagagtttctctaattcatgaggttctcacaatagtagtattgcatgagtaagaacaatagttgtgatcctgtattacatatgaggaatccaagcacataaagattaggtgacttaccactgtggcacagcaaactggatctggtgctcatcctctgagtcacagtccagggctctgtactctctactgtcttccgcttacctccaactgatgacagcttaccttgctacggagttaaatgggcaaaaacgaggtaaacatcttaaaaatacacacacgttatctatttctgagaatattttcacaaatttacagagattttgcataaaattataagtgcccccaaacagaaggataaagtacattgataaaaatggactataatgttctcattaagaatcatgtttcaaagaacacatagtgc

SEQ ID NO: 55284 - DNA, 501 bp, Homo sapiens
gggccccccctcggaagtcttctagaattaattaacgcgggactcatgttttagatatctaccattattaaagttttcatgggtaagactagatcttaaaacagattgattttttgatgaccagaaactgaactgaatttgaacaagtcccattgggactgaatttttagcatctcaaaagtggtgtttaaaaccacactactctgacaatgggaaaccaatgaacatagtacagccacaggatctttatatactgcaatgggtggaagtaaagtttccctaaaataaaattgatgttcctattatcaattatcccacaaggaagtaaatcctgagacaagaaaggagggcttgggaaatatatgtcagttactgaagacaaagagaacctctcccttttctaggtgagggactcatcttaatgagcaatgaagcctcaatactgtaacagccagtgctagtgactgggcatggggtgagttgcccccaaaaaaaaaaaaa

SEQ ID NO: 55285 - DNA, 529 bp, Homo sapiens
  misc_feature 44, 483: n = A,T,C or G
ccgggccccccctcggaagtcttctagaattaattaacgcgggngaatcaaaagttacacgtgaattttttaaattttaagattcataaaaatatttcataaatttgcatgtcatccttgcaaaggggccatgctcatcttctctatattgatccaaattcagtatatctgctgccgaagtgagcacacatggatttttgactgtgcaggtcagtgccactaacccctgcattgttcaagggtaaacggtatataatttcacccttaaatatttcagcatatgtctctagcagatgaggatcactataattcctctgtttttatttttaaatatgaatgattactgtagggattataatatacatttttaacttgtaactgacttcaggttgatattgaattaattataataaaacatagcaattttgctccaatatagttccatatctttttcccttttgtgttactcttgtcacatatatntatgttataatctcaacactatagtgctataattatctacttaaat

SEQ ID NO: 55286 - DNA, 521 bp, Homo sapiens
  misc_feature 13, 26, 414, 437: n = A,T,C or G
ggccccccctcgngggtacttctagnattaattaacgcgggagagtgccagagcctacaggctttaagtatttaggttaattgaagacaaaatcaaatgactgaacaattaaaattatcacaaaatcatgattaagttggaaacatcagtcagtgcagaacatgtgggaaatttgtgtctgtagaaagatcgagaacctttttaagaaacaaggctagacttagcacaagtttgaatgaaatcatccatcaaatatcaattattcctttcgaagtctataaaacaatagcctgaatattacctaaacataaatatataatacaaatttatttaccttaaattcaacaattgatcaattattttggagttcaattatgatgatacaaagtctagattttgttaatttgataattntttacatatgagtattttaattntaatcatttcactcatgatatacaaaataacctatcatagtttctattagagtaaaataaaatttctagtagactctcctctta

SEQ ID NO: 55287 - DNA, 477 bp, Homo sapiens
  misc_feature 12, 14, 26: n = A,T,C or G
ggccccccctcnanagtacttctagnaattaattaacgcgggcatggtattgaattaaagtactttgggtgtggtatggaagctgcagttagctgcagctcccaccactgccatctccctaaacccaagtgcacttaatctccctggcccctgaaggtatgtgagtttgtgatcactccaaagtgttagaacagcagttcctttaaaataactaacaagtttaaaaactttaaaattgtaatacaagcactatatataaaattccatttaaagggtattcaataaaggaaaattcccctcctcctctccagggccacagcaataaccatttctgtgtgtccttccagaaatgttctaagagtataggcccttaagatgccctttatgggcttcataaattacgtgcaaaactttatttttatgtatttatttatttgagatagagtggggctcttgacactcaaaaaaaaaaaaaaa

SEQ ID NO: 55288 - DNA, 549 bp, Homo sapiens
  misc_feature 23, 476, 501: n = A,T,C or G
ttctagaattaattaacgcgggnagtcaccttctcggtaaggcttttttaagattttaaatccacctttgcagtaagcctatttaaaattagaaattccccacacaccttcacagatttattttcaatagttctttcctcagtaattgaaacatatattctggtaatttattttgtctccttttccccatcagcataaaagatccatgaggacagagatttttgttttgctcactgctgtatcccatcacagtgcctggcacatgaaaggtactgagcaaatgtgttaactgagtgaatgaatatgagtgcttagatctgagatgagattttatggtcctatgaaatgtggttccagcttcacataatacacacaatgtcttgcactgttgttttcctgacctaaacagaagtcaaatataaaagacgacaaagcagactgggattttattttgttgctggttgttacctcagttnttacagcagatctaaaataagatanagctgggtgtagtggttcacaccctatatcccagaactttgggtggct

SEQ ID NO: 55289 - DNA, 609 bp, Homo sapiens
cgggccccccctcggaagtcttctagaattaattaacgcgggctctgagttttgattttatatcagaccctaaaatgaggccactcaacctaattctgtctttcaaaaagctcttcttataatgtccccagagtatacatagtagttactagagactgaggcacagcaacactttctttcagtataaaatgggggaaaatttctcggctgcttggaacctattctaatttgaaaaccagacagatttaatagaggttctagtgtcaagcataacactttagggaaaaatttccttagaagtctcaacaaaagggttttcaagtaaatagctcagaaagaccaggttaattcattttttcctttattttttcctttatttatgcattcattaatttaataaatatttgttgggcacctactacatgcaatgccaagccctgttctaggcatgggatacattactgcacaaaataattagagatcccaacttttgtaggtcttccattctaatagcaggagacagacaataagactaaccacaatatacgtagtatatttgtactatgaaacaaaagtagagcaaaattagagatcagggtgggttgcagt

SEQ ID NO: 55290 - DNA, 610 bp, Homo sapiens
ccgggccccccctcggaagtcttctagaattaattaacgcgggatgcaaagtgattatttatgatacgtatatatgtagtaataaaataaaaacatgaatggaaatagtaaattgccattttgggggcagcagttacttctgaaaagaaagagaaaagagattggagaaagttgtgcaagaagcttccaccacacctgtaatgatttatttctttaaataaaatctaaagcaaatattggcaaagtgtcaagattttatttaaagttgagtacgggtacatgactgttctctttgttgctatattcttctgtaaatttgaagtacttaactttaattagtaaaagaatgagtatataataaatcagctccatcatgtttatcttaaagatgagaaagaaatagtgagtgaaagatgttggttgggacaataagctcttaatttaagaacaacccccatgataacataatgtgttcagtgggctcagctcaagagacaatgatgagacttatgctgtcatgaacatacaacagagagaatgatgcctaatattagctgcagtgacagggtcagaagccattataccttaactattcctagcgaggaaggct

SEQ ID NO: 55291 - DNA, 589 bp, Homo sapiens
  misc_feature 579: n = A,T,C or G
ccgggccccccctcggggtacttctagaattaattaacgcgggttccctccaaaatctgctttttctacattctcccccgaagactaaatggcaactttcttctttcagttgctcagatcaaaagccttgaatttccactaaatgctatgaaactttgagatggaaaagcatcaattggcagagatatgtctcatataattcttactgattatcctttcctagaagctaatgactagaatctgaggcagggacatgagtcataccaaacctggctatgaataacaccctgttgtcttccttccccttgtccctgccttgtcacccctctgatttagtctttgacattagagctctgctttcttggcacctttttatcctttacttccctgtttcaagccacataggtctcaggagtggcacaaaatcttgtcagcagatgctatcattgatagcataatagccacagactattctgatacctgtgtaagttctgttatagaaataagcctaggagtaatttgtagctggggacacatattagaaattaaaataggctgggcgtggtggctcacacctgntatcccagca

SEQ ID NO: 55292 - DNA, 590 bp, Homo sapiens
  misc_feature 568, 577, 582: n = A,T,C or G
gccccccctcggggtacttctagaattaattaacgcggggtagaagggtcaatgaaacaaaagttggttcttcaaaaagataaaatagataaaccccttgctagactaaacaagaaaagacccaaataaaataggaaatgaaaaagacattacaactgatatcacagaaatacaaaagatcatcagagactattatgaatagctatatactaccaaactagaaaacctagaggaaatggataaattgctggaaacatacaactactgagattccagaagaaatagaaaatctgaacagatcagtaatgagcagtgtgattaactcagtaatgagaaccctcccaaaaaaagaaaagctcatgactgaatgaattcactgccaatttgaccaaccacataaagaagaactaatacccattctcctcaaactcttgcaaaaaaatcaaagaaaaaacaactcattctacaagaccaccatttccctgacaccaaactagacaaggacacacacacaaaaagagaactacaggccagtgtttctaaggaacctagacataaaaattctcanaaagaacanaaaanaaaaaaag

SEQ ID NO: 55293 - DNA, 596 bp, Homo sapiens
  misc_feature 41, 529, 553: n = A,T,C or G
agactgggttaccgggccccccccacggagatacttctagnattaattaacgcgggaagagatgtggaagacagctccctgaattcctcgcctgcctgtgaattatgctacaaataaagctcgcaggttggtagctgattaatcaatctctaagaatgttaataatgaaggctccagaaaaattcttgacagccttttgaaaggtacttacataatcaccatcctgagggataagtatgttcatttcagatgacttggcgctcacgatctcacagtctaatgcatcttcactgaggtatatgtggcaaccttctgtcttattaatggaaattgttggcactctccccattacctgaaataggaaaaaatacctgggaccaaagcaaagaaacagaaataacaatgccctcgaataaatacaatctcaattcctcttggctttagcttgggcttaaccaagcattagaattcactgggtcaaagctggggaggtgagttaatggcaaagtcttcaagcagaataggatangtgtcactcagggacagaatgaanagaccacacaagtggattctcaaacctcagtgtctctttcctg

SEQ ID NO: 55294 - DNA, 588 bp, Homo sapiens
cccccctcggaagtcttctagaattaattaacgcgggtatacctataaactagttgaactcaaattaactttatttgctgggtcctttgctgccaagctttataaaaaagctgagcactccatttcatatttgaaatcttttaaaatttctattttactttaccaatttaagactcgatccgtaaatggtagtcaaatgttaatcttcttttgattttccagaattaggattttcatgcctgttgtcagttaaaactgctaaaacctggaatataacatgcatttagacacaaaatttagaagtcaggattcaaacttaaatgcattctttatccaaacccttcagaaaaatgtgtgtgtgtgtgtgtgtgtgtgtgtgttgcacaactcttactcaagttaccttactttgtttccttatttttatactgtatatttctttttgattcacactcatttgttttcacatttcatgttatccggaccacatccaaattaaaggatatcactgtaaaatctgaaatgagatctaagaaaaactgtgcttttaaatttcacaaacgttgtcattgttcataatagaataaa

SEQ ID NO: 55295 - DNA, 462 bp, Homo sapiens
  misc_feature 39: n = A,T,C or G
agactgggtaccgggcccccccctcaaaatacttctagnattaattaacgcgggggcgcatgcctgtggtcccagctactctggaggctgaggcaggagaatcgcttgaacctgggaggtggaggtcgtggtgagctgaggtcacgccactgcactccagcctgggcaacaagagtgaaactctgtcaaaaaaaaaaaaaaaaaaaaaagcatcaaaatggcaaacaaagataaaagattttttctcatttctaaattttctaaaagataatttaaagtaagcacaaggtattatgggaactgtaacaggtcaaagtaaattataggataaccatacacagaagatagaaggaagttaaatggagcttcactgtgataaagttactacattttgaaataatatgaattcatggtagactgagaacttaaggatgcatatgataatctccagagtaatgactt

SEQ ID NO: 55296 - DNA, 514 bp, Homo sapiens
  misc_feature 23, 475: n = A,T,C or G
ccccccctcggaagtcttctagnattaattaacgcggggggcctgccaccagattgcaggcaggtaatcttacacgccaagccctgtgttcttcctttcagaatgacagttcatcagaaaatatcttttaggcatttaccatgtagccactattgtgctagagggaaaatagacatagatctggcatggctgattagagagagaaagaaaaacagagagagacaaaatagaagtaaataatatttgaaacagtaaagggaatataactgaagatatattacaaatttggaaattgtgagagagtaaaagaaccattttaataataatacattttaaaaagtagattaaatagacaaatcattaggaaagaaaacaagtttgaacattttctaataggaaaaatttccaaaacttccaatacaaaactgaagatttcaaggggacttgtaacattaagaactggatatatatatanttaattttttaatttttgaatatatatattggatatata

SEQ ID NO: 55297 - DNA, 557 bp, Homo sapiens
cgggcccccccctcggaatacttctagaattaattaacgcggggttgcttgtttaattattatttcagaagtaatatatgttcatttcagaaaatttagaaaatagaaaaagaacaagataaaagggtgtttcatagccatattttttgtattacatatattcttgatttggctttgtttacaaaacgtgcaatataaaccagcatatcacctagaactgtttttccactcagtgtattacagcatctttccacgatacagtgcatattcttgttgtgactttgtctttaataacaacgtaatggtcagcccattgtctggttctatcatgacttatgtaattgatacatattatcaaatatttaattgtgggatgttgaactattcaaaattaccacattaatgatacgtaatcttatgtatattctgtgataaccatcttttgtggtttaatttttgcacacattcatgacatttttcttggacaggattctttttttaagagacagagtcttggccgggcgcgggtggctcacgcctgtaatcccagcactttg

SEQ ID NO: 55298 - DNA, 601 bp, Homo sapiens
  misc_feature 14, 27: n = A,T,C or G
gggccccccctcgngggtacttctagnattaattaacgcgggatcttgtgttatacttattccatgagcttaaattaaatattccaaaattctttagcttcacatgtgttatttcatttgattctcacaacaacctttgaacaaaggtatctttttttatagttcagaaagaaattcagaagattgagtaatttgcacaaaagaagccagttctaactaagtagaacttaaattaaaccaatatattaggaaaaaggcaatgtcacaaaggcaaggaggcttacttttccttttatccttttccctgccccaaacaaaatcagtgacttaaagaagatcaaatctacttttctcatataacaatccagaggtgaatggttcatgaatagcaggattgctcacgtccttaaagtctattttctactcttagttcaagatttcaattgtctccttttctcagtcataaggaagcggaaaagaggagatactaacaattgctttatttgtaagtgttttatttttaacacagctatactccagctcatagtccaagaaccagaacatgatcatacctaattgcaacagaaaaaattctagttgt

SEQ ID NO: 55299 - DNA, 592 bp, Homo sapiens
  misc_feature 28, 537, 564: n = A,T,C or G
cgggcccccccctcggaagtcttctagnattaattaacgcgggttcataccacagattggaaatctatgcaagactaatatttttcttctgaaaatataaatattagatagtgacattggcttttgataaccattattttagtccaatttctatcccaataaaaacatccaatttccccacacttgaaacattactagtattattattatttttgagaccccgtctcaaaagaaaaaagaaaagaaaaataattggtgaaacagcaatgatttcacaccactgcctagctttcctgtttcagtccagaggcgcttgatataacagcatctttttaaagattatctgaaacccgagggccctaagtcagattttgcttatgtcactgaccactttggatggttagaatactttgtcatttaatattctcgctttttgcctttcttttttctctttctctccctgttcagatgaagtcataacatctcatggtgcaattgaaccagataaagacaacgtacgccaagaaccgtattctntgccacagggttttatgtgggacactntagacttgagtgatgccgaagtggtgag

SEQ ID NO: 55300 - DNA, 561 bp, Homo sapiens
  misc_feature 443: n = A,T,C or G
ccgggccccccctcggaatacttctagaattaattaacgcgggggattagttagtaagtgatattggagaaaagttacatttctgctccatactatacatcaaaataagttctagataatttaaaatttgctattaatattaaatgaaactataaagtactagaaggaaatgtgagtgaattattttatatttcaagaggacttcctaagtatgacataaaaagttagaaactatagttaccaatatgacaagaatgttcaagaaactggtaggacttaactacagctgcatgaacaccttttgaatgtgaacaatcattaaaaacaaaattgagaggaaacagcaaaaaacccacaaactatgtgattaataaaagggcttttagtctaattgtataaagtacccttaatctaattacataaaatagtctaagaaaccagtnaagaaacgctctagtggggaatgtgggccaagcataagaattagtggttcctagaagaaggaacatagggataatgtttaccatcactactaaataaaatctaagtgccattttaatt

SEQ ID NO: 55301 - DNA, 577 bp, Homo sapiens
  misc_feature 28: n = A,T,C or G
ccgggccccccctcggaagtcttctagnaattaattaacgcggggctggcagggaaacactatacgtggaaataacagattttctctgatgggaagagagagtggcttgatggcggctagggtaatgagatctgagtcaaaaacagagagaggagagcagctaaaatcaaagacccatcacaaaaaacacaggtgattagatcattggccttaggagagcggctcaaccttcagtccctgtccaccccttttagaggtcaagggggtaggcatgaaagttccaactctgctaaacacatgggtggtttccctgggcaatcagcccctaaacagaggctatgcaggagctcccccggccattggctacctaattcgcatacaaagagacacatcactttaagattccttgctgtgtgccaagaaatgggggcagaagccaaatatatatttcttattacatccagaaatggaaggataggtgacaaaacaaatagagcaaaagcttaaatatagaatccaggtgatgggtatacttcaattttcaaaataaaatgaagatggatctgttctgctttga

SEQ ID NO: 55302 - DNA, 592 bp, Homo sapiens
cgggccccccctcggggtacttctagaattaattaacgcgggcttcaatcaaactaatgaaatctcagtgtgaaaatcgaactctaaaactgcctcggttctttctcaattcttttatttttcccatttcatattttggatgaatagcattgcaatgagattggtacaaaagaccaacctcagcagttcttcctgagttgtagagaagtaatcaaagatgttagcttacaaaagttatcctagtttctaatcctaagtggatatataaccttaactttccataacttccagttcctgctggactaaaagttgtattccaaatatgaaaaaaaaaaaggaattggtaatgttgattttagaattgaaactgaagctgagctacgatgtctacagacagaaaattaatgatttttatagataagcccttatttggatatttgataattggatatcagtaatctgtctccctcttctcttctttttttcttcccttttctctccctctcccctcctcttttttacatgtatatactcataaattagcaagtcataatactagggtatcaaattactgcagtttgtcaattctcta

SEQ ID NO: 55303 - DNA, 600 bp, Homo sapiens
  misc_feature 15, 39: n = A,T,C or G
actgggttaccgggnccccccctcggaaatacttctagnattaattaataaaattgatcacctgaaaaagagagctaaattaagatcaggagttaaagatgggttctaactacagatcctacaggcaattaaatattaataagggaatattataaagttttatgataatacatttgacaagtgtttaaatgaacaagcaataaatttataattttattaaatttaataagtttataaaatttataaaaataaaaataaattcccaaaagagaatgaaaaaaataatctgaattgccccattttctattaaataatttgacttcataattaaacatttcttcataacaaagtctcctgggaggatggctttacttgagaacactatcagacatttaaggaataaataaatacaataaaataaaaagaaaaatatttcattacatatgcaaattatgtaacattaaaatttcaatatctgtagttttagtaaagctcagcaatattttttgtttgtttgtttacatattatctatgattcctttcatactacagtgaaagagttgattagttgcaacagagactatatgtgttgctttcatt

SEQ ID NO: 55304 - DNA, 605 bp, Homo sapiens
  misc_feature 16: n = A,T,C or G
cgggccccccctcganaatacttctagaattaattaacgcgggcctttaaatacagcatataatttaatcttcatagaaattctgtgttatagatattatttccactttacagataaagaaccagatgcaactggttcaaggaatagacccgtattgaacttcacaatctccctcccaaacaattatatctaactcatcctctgtcactcagtgaaccaccatagatttctcctgcaagtctcttactactgagagagaaatttaaagtgacaagcaatcataccaaattaatgctaattatctcagtatgatccactaccctggctgggcatgctggctaatgcccataatcccactttgggaggacaagacgggtggatcacttgaggccaggagttcgagaccagcgttgccaacatggcgaaacctcatatctaccaataacacaaaaattagccaggtatggtggcccacacctgtaatctcagctacttgggtggccgaggcaggagaatcgcccgaacccaggaggcagaggtcgcaatgagcccagatggagctactgcaatccagcctgagcaacagagcaagactcagtcccaac

SEQ ID NO: 55305 - DNA, 296 bp, Homo sapiens
  misc_feature 14, 25: n = A,T,C or G
ggccccccctcggngtacttctagnattaattaaagcggggaggggcagaggagttccccggaacccgtgcagattaaagtaactgtgaagttttcaaaaaaaaaaaaaaaaaaaaaaaaaaaaaaaaaaaaaaaaaaaaaaaaaaaaataaaaaaaaaaaaaaaaacgaccgccgaacggcctccgccctccccctttttcttaaccgacttaatctccccccccccccccggcggcccccccctccccccttttgggggcttttttcccccccccccttccccctccttttccc

SEQ ID NO: 55306 - DNA, 369 bp, Homo sapiens
  misc_feature 40: n = A,T,C or G
agactggggtaccgggcccccccctcgaaatacttctagnattaattaacgcgggtggccactgttgattagttacgtgacctcaattaggatattttaactctgtgtgtctttgtttcctcatttatatgttgaaggtaatgatagttcctacctactgcacaggcttcttgaagattaaatgacatagggtgggtaaaaggtttagactagtacctagaaatagcacgtttcactaaaaattacctattactcatattatttttgctaagtgattgtataaacctaataaacatcatatattttactatgcacagataatttaaaaatcttataaatacaaatttaacccacaaaaaaaaaaaaaaa

SEQ ID NO: 55307 - DNA, 608 bp, Homo sapiens
ccgggccccccctcggggtacttctagaattaattaacgcgggccgtgcccatttgtttatacattgtctatggctgctttctcacaaaaatggcagagatgaataattgtgacaaagaccttatggctcacaaagccaaaaatatttactatctggtcctttacagaaaaaagtttgccaactgctactctgaaggctaccttgaccaagaggacacagcagaatcaggcaagtggatgtgagtggacctaaagctaagccttcttttcaatagctgaaattttagtgtgaattataatcagctcaggagagatcagagttaggctgagttaagcagaattattaaaaatcatttgcagactgagaatagtttatttttggtcatctttcttccaatattttctcttattgttacaatctaccatgttaagtgctagatttttacttaaaatgtcaactagatcgtacacattgtcttcaaattttcagtttgttttgcttggagaagaacctgcttgctgagtttgtgcttagacttccacctggccacagtggctgacacagaaatatgggtttgcagtctttgaatgaaaatgagaagtaagac

SEQ ID NO: 55308 - DNA, 313 bp, Homo sapiens
  misc_feature 24: n = A,T,C or G
gccccccctcgaaatacttctagnaattaattaacgcgggtagatgatttctagcaggcaggaagtcctgtgcggtgtcaccatgagcacctccagctgtactagtgccattggaataataaatttgataaggtggtgaaaaaaaaaaaaaaaaaaaaaaaaaaaaaaaaaaaaaaaaaaaaaaaaaaaaaaaaaaaaacaaaaaaaaaaaaaaaaaacaaaaccaaccaaaaaaaaaaaaaaaaaacactcccccccccccccccggggggaacccccaatccccccaaaaagaagttttttcccccccccc

SEQ ID NO: 55309 - DNA, 594 bp, Homo sapiens
gggccccccctcgaaagtcttctagaattaattaacgcggggttgatagtttaggggtaaaaggtttttgtcataaaatgttctaaaatggattttggtggtacttgcacagttttgtgaatatattaaaaaacacttaattgtacaatttaagtttgtgtgtgaattacatctcaataatgctggttaaaatataaaaaagatcaaactttttaatatagaaattgttcaagagaaaaggctgcctctctatactaatttatgcttccttattataaaacctgtatttctttagtatttttggtaacaggaaataaatgtaattctcatctataacaactcttattctaagtttctgaatttctctactcaattgcctttttaaagtattttaactgtcttgtgctagatgttttaatattatctttggacttaaatcctgaggaatagaaaatacatatctttaaatttataaatagataaatctagacgagtaaacccttaccaataagaatgtcaacttacgccgggcatggtggctcacgcctgcaatcccagcactttgggaggccgaggcgggcggatcacgaggtc

SEQ ID NO: 55310 - DNA, 625 bp, Homo sapiens
  misc_feature 29: n = A,T,C or G
ccgggcccccccctcgaaatacttctagnaattaattaatgattgatggaggagggcccagtacattgtggatggtgcctttcctgggctggtagacccaaattgtaacagaaagcaggccaatcaagtcatgatgagcaagctaataagcagcagcatgccatgctctctgtatcagcttctgcttctaggtttctgccttgcttgaatgtctgtcttggcttccttcaatgattgattattcgaagggtaagtcaaataaactatttcatccagtagtcgttttggtcatgatattttatctcaacagtaataatcctaatggtggtagtggcactgacatctggtcatcaacatagatctggcatgaatatcctacgttcctaaaattcttaacatttttctgcaattgtttttcatcattatcaaattagtatatctttggtaggaattttttataatgtttgatttttaaaatttactccatgaatttctgatttaagtatagtaagaaaatattgtataaatttggcctagagatatgaattttaaacaattcgtgaaatggccctaaacatatttctggcactcactactacatagttatacaaagaagtattctcac

SEQ ID NO: 55311 - DNA, 607 bp, Homo sapiens
ccgggccccccctcggaagtcttctagaattaattaacgcggggagtggcctgaagttgagcctctatgaacgttttggcacagattcattaacacggtaaatacttttcacataactggaactcttttctctgcccaatttaatcatcagattgaacaactgaagattacatgatattctctaggactctcatgatgtttgttatatctgcttataaatcaggatccaactaaagtttttctaatagaaaactttagtttctgcaaagaaaaaaattactagtacagtaaaagacttcagaaacaaagcacaaatgttgctaacaatgatagcattatacaatagtcccctatgagtgttcacataaagattgcataaagatatacataagcacacaataaattgtatgaatgttttaaagaatatctgttgacggtaaaaccaaagctgttgactaatctgatagctagtgtttcataaaatgcttgtaacactttagatataaattatctaaaattattccttcaaattttcttcttagcatttatatttcaaaatcatcaaaaaattaaatcagtctttctttaaaaaaactcctcgttaatt

SEQ ID NO: 55312 - DNA, 608 bp, Homo sapiens
  misc_feature 31: n = A,T,C or G
taccgggcccccccctcggggtacttctagnattaattaacgcgggccgcgcccagtgcaaaaacactattattaatccatttatcaaattaattgcatttatttatttaatattcactgcgtctccagctgtgtctagaatctctagagaaatacatgaaatagtctctgatttttaaaaatcattccacccatcgttgacaaggatgggaagaaataggcactctcacacctgcaagtgggaatataaatcattgcaacctttttctatagggcagtttggcaacagatattcaaaggagtaagaacaaaacattagctgggatattgtgggatgatgacaaatatttggaaagcccctaaatgtctagccatgggaggttgtttaagaaaatgaaggctgtggctgggtgcggtggctcacgcctgtaatcccagcattttggaaggccgaggccggcgaatcaccaggtcaggagatcgaggccatcctgaccaacatggtgaaactcatctctactaaaaatacaaaaaattagccaggcgtagtggtgcatgcctgtagtcccagctactcaggaggctgaggcaggggaatggtttgaacc

SEQ ID NO: 55313 - DNA, 548 bp, Homo sapiens
ccccccctcggggtacttctagaattaattaacgcggggtttccttaaaaaagactcatggaacaatttccctaaatttttgccatgtcaaatatgtttatctgtagcctttacacagtaaaaacaatttggctagataatacaattctcagttcatatttttctttggaatattaaagtattgctatagagaagcctaaagtcatgtgacatttttcttacataagtgatttgattttttgcttggctgctcaaattattcctttatcaagtccaataactctaacaggtcttggtattgacctttctgggtcagttttcactacattttcagaaaattttcattctatttaatagatgaatactcttggttttgtttaaataactaatttgagagtcattgatctagacaaatggcagaggatagggggagaagaacaagtgaagggttaagatgttaatgagtgttcatgagaaatttgtgggattgtgtgcctgaaaagaatggtaaatggtacattagggtggttcaagtggatgtgatacta

SEQ ID NO: 55314 - DNA, 588 bp, Homo sapiens
  misc_feature 28, 542: n = A,T,C or G
cgggcccccccctcggggtacttctagnaattaattaacgcgggactgtggtaatcagatatttatttggggacattatactaaaatactgatggaattatcccccatttcccctagacattacgtgctgctgggaaaacatacatgatattttttgtcctggtcattttcttgggctcattttatttggtgaatttgatcctggctgtggtggccatggcctatgaggagcagaatcaggccaccttggaagaagcagaacaaaaagaggccgaatttcagcagatgctcgaacagcttaaaaagcaacaggaagaagctcaggtactgagtgataaaagcaaagatttatcattattattattagtttctaagtagaaatagtgttatactatagagggtagattggaactgctttttcattttatatataggcattgtcattagaaaaaaaagtattcaaatatgaacttgtttctgaagttagagtctaacaaactttttagacactgtatataaagaaatcagctagcggatagaanatacattagggataaggtttactatggaattgtctcatagaaccta

SEQ ID NO: 55315 - DNA, 565 bp, Homo sapiens
  misc_feature 28: n = A,T,C or G
cggggccccccctcggaagtcttctagnattaattaacgcggggggaggctgaggtaggaggaccttgagttgtagaccagtctgggcttacacagtaagaccctaactcaaataaaacaacctaaaagaagaatgagaaatctattaattggcccatatttgggacaaaggaaaaagaagtcactggtcaacctggggtgctgggcctcttttcctacagtgaccaggaaccaggtccagacttgtagatgatcagttgcagtctggtagcacacccctcctgcatgtagctctgtggccctttccctcacatcctaacgagctagatcctgaactgggacttgtggtgctgtcaggatgagaacatggaagttttgaacctagtgtcttttggaattcgtaaagctaaataaatgatgttgaacttgaaaccctccatatgtagatcagtttcaaagtgataatagtgattgccacggccagtaagtaccctgacctgtccctgtgcagactcccttgcagggttttactatgttgatctaaggtctccttgatttcatttgc

SEQ ID NO: 55316 - DNA, 581 bp, Homo sapiens
cgggccccccctcgaaagtcttctagaattaattaacgcgggcccattatctatattctgtgctgattattagtatttcatcctttctaagagctgtaactaccagttttacactcttaagtctatttcagtaactcaaagctctcattttagttccaaaatatacttccattttccacattcctgggtatgctggaagaacatacaaatcagcatgttcaaaactaaaccattatctatgtcctaaaaccagctctttttcctgcatttcacatctgggttaatgatactgccatcttctgggttgtcataatttgaattctcagagttcttatctattactccctctctctcaccttccacaattttgaaccaagctctgactattcatctttcaaaatagttcttaaatccctttcataatccttccttaatgtcaaaccttcaattcaatcccttatcatctctcactgattattacaataattttctttctccgattttactcctttctctaaatctgtttctttaaaaataacaatcatgtttcatgcctgttctaaaaaaaaaaaaaaaaaagc

SEQ ID NO: 55317 - DNA, 629 bp, Homo sapiens
  misc_feature 36: n = A,T,C or G
tgggttaccgggcccccccctcggaatacttctagnattaattaacgcgggcaccaaccaaaataagcattgatttctgttttgttttgttttttaatttttaccaaccaagaggaagcactgatagaggaagaggtttaaattgtagatttgctgaaaatattacgctaaacattgggtgagaaaatgagtgggttcaaagtttggctctgttatctcttagctgtgttattacctgtacaaattatttattttcctcttggttctgtttcttcacttataaaataagcaacaatttattattggtgtggagaataaatgacacatatagcagtgtacgtaacatattgcatataaatgatatgtatagtatatgttaagtattgtgtgtaaatgatatatggtattgtatgtaaagcacttaggatggtcctaggcaagagttagctattattaacattttagaattatagaaatgtaattatatataataagcattacaagtgaataatttaaaaatttgcttcctaaatataagttaaatgtaatttcacataaagggtagtaggtgagataaaaaaatgtaaaaaccttctaaccacaaaagattgttcttcattatttaaatg

SEQ ID NO: 55318 - DNA, 594 bp, Homo sapiens
  misc_feature 28: n = A,T,C or G
cgggcccccccctcgaaagtcttctagnattaattaacgcgggcccctggcactattgacatttatgtctagatgccattttcttgttgaagggctagctaccctttgcattctaatatgttttgcagcatcaatggcctcaaccaactaaatgccagtagcattctttcccgatttgtgatcaacaaaactgtctctagacattgtgaaatgtcccaagggcaatattgcttctaattaagagcccttatttagttttacctttcccacccaccaatttacagtcccctcaaaaaattacctttattaattctgagtatgcttctagagtttcttcatgtaaaaatctttttttttaacatgttctcatccttgttttgtcatttaaagacttctggcacattttacaaatttaggggattatcataatttttaatcttttaatgaacacttggattgcttcaaattcttttgttataaatgtcttcaaatggacaaatttatacatccatcatttatatgtatacaagtaatagtaaaataaattcacggaagtagtatatatatatattttttttacactgtcatcaacat

SEQ ID NO: 55319 - DNA, 597 bp, Homo sapiens
  misc_feature 28: n = A,T,C or G
cgggcccccccctcgaaagtcttctagnattaattaacgcggggttattgttatttagtagggagctcagagaatcttaatatgtattatatttaaattttctataaataagtgaactttttatacagcaaagtagattgagttgtttgtatatgccctttcctaatatcactatttcttgaagcagagaatatattgaggtaaatcctcattagaaaatttattacgcaaaatttaaccaactgtagttgtgatcagtgctactgatggtcagtgtgctatgggtgtgaagcaggaagaccttttcatatgaagagggtggagggcaaaggtggtagggatgggtagaggcaggggcaggtgcagtgggaaatacattttgtaatgccgacgcctgaaggaagaggaggtgtcagccaaaggaatgtgagaacaaacattttctatatttaatgagacaatcataattaatacggatatatcaaaagttctctgatccatcataatatctatttgttgattcaaaagtgacaagcaataattattatgtaggagccttacgctttaatgaattatctatgatcacttaaaaacact

SEQ ID NO: 55320 - DNA, 602 bp, Homo sapiens
  misc_feature 23, 590: n = A,T,C or G
ccccccctcggaagtcttctagnaattaattaacgcgggctctgtgaaggaatactgctgtgaccgcaaaactgtttctgtagaattttctccggtgtggtcatcctgccttcaggtcagtgaatagatggtgtttggacagcgtctggcacagatactttaaccttaaagcttaatgtataactggtattttttcccccttctgtgtcagcaattggcaacgggacactgtaaataaggattctggtttgtaaatggacgtctgttcctccaggggaggggaaggctggagtaagcagttttgaaattcatgctgcaagtgataagataatttgagtaacctgtaagacctgtggattcacaggtttcaaaaacaggaaagtctcttgtttgaaaaccctctaaagcaacatgtgggcttagaaaagaagccggcttgtggtttggtgattgtacttccttattgatataatggccgctgacgcaaggcctcctgggattgcagcgcggtgaccgcaggcctgacggttaccctgaccgggttctgaaacagcccggggctttcagcacagatgagaagtctaaaaatntcccttttcatt

SEQ ID NO: 55321 - DNA, 594 bp, Homo sapiens
  misc_feature 19, 32: n = A,T,C or G
taccgggcccccccctcgnaaatacttctagnattaattaacgcggggcatgggacatacttagattaaaattgtacattggtttatctagaaattcaaatttaattaggcatcttggattttatctgacattcctattcctgaaagacaatagaatggcaacttatttcactttatatttacctcaaacaaacatccgtcttttttacaaaactctctttttcccaaacagtctgtggctttttctttaaatcaagttacagcaaactgtcatcgaaatccagcctgctgcctgtttccgtatgggctgcaagctaagatttttttttttttttttacatttttaatggttgaaacaatcaaaagaaaaatgctatattctatgacacattaaaataatatgaaatttgactttctgtgcccataattaaaatttcattgaatcataaccaagctcatttgttacatatgatctatggctacttgcacattacaacagcagagttgaacagtttcagtaaagaccgtgtgacccacaaagtctaatttactctcaggccttttacagaaaaagttggccaacccttttcttgg

SEQ ID NO: 55322 - DNA, 586 bp, Homo sapiens
ggtaccgggcccccccctcgaaatacttctagaattaattaacgcgggggtgtgattacagaatacagtataaaatacacaggtacaaacagtctccatttctcacccttagcctatactagctatcacagttgggtccaaatatatttctgaacccagtgctgcaaattgcaggtacggggcatttcctaaggtggcttttgtaagggctatagggattccgtgtgtatctttccaggctctcttgttctgtctgcctgtttttaggcctatgccattaccatatttaccttgtgggcagtgattttaatttgagcggcatcattgattaatgttattttgaattttgctggtttggtgattttgtttgtatttaatttataagtttgttttttgcttatctagttatataaacataagacatttaaacttagttttatagttgtgtatataagctgggtgtggtgtcacatgcctgtgatcccagctactcgggaggctgagcagaaggatggcttgaggccaaaagtttgagaccggcggcggtgggcaacatattgagatcctatcccaaaaaaaaaaaaaa

SEQ ID NO: 55323 - DNA, 599 bp, Homo sapiens
  misc_feature 53: n = A,T,C or G
ccgggccccccctcggaagtcttctagaattaattaagcgggttctaccaaanaaccctctgcaaatgacatgactgtagattctgctggttctaacaggaatggagggtgaaagcctcacccactcagactctccctgttcctggctaaggtctctgagtcatcccacagagaggaggatctctcagaaatgtgttttcacaaatagagagtcacttccattatacaattccataacatcatgagtaaaaaaactgatttggctcattttattcttgtgttctttattagaataaggcagcctacaaaaaatttaaatgtagtactttctcaaaattgagcttaaatagattatttttaaatagggatgtctaagagtatcttatttatattataatgtcctaggccaaagttttaaagctataataatcaaagattagttttgcttatttgtattttctttttattgctgtttatactaaacattctcacttaagaatcgcttttggaatgaataacgtatgatgccatgtttagggtaaccaacaattccagtttccctgggactgccctggttttagtgttgaaagtccctaatc

SEQ ID NO: 55324 - DNA, 599 bp, Homo sapiens
  misc_feature 584: n = A,T,C or G
cccccctcgaaagtcttctagaattaattaaggtgtgaatatgtgcctcattcaaacatagatcagctatttcaaatttcttatagagtataactccactgatgatattttttcatccttgcaacctcatataaaacaaacataaaaagtaccttttgccatgcaatatttagggcttggtttttcttctggtcaaggtcttctatagttgtaagaattttggatttgtcattttctacaattctcttcttcttcatcaagtcattgtactatgagataaaaaacatggttaactgggaaaatataaaatctcttctatattctggaatttggtcagaaataaacagttttcattatttttatatacaatacatacattgctatttaccaaaaagatataatgcactaagaattatatatactcatatactatacatatactgtatgatgtgtgcgtatatacacactcatatacacactcttaacaaaattaggaataaaatcatccatatgtatataactaaattactagaactaagaatttataagacaaagtccttaaaatattttgactccactaatantccccttatctcctt

SEQ ID NO: 55325 - DNA, 579 bp, Homo sapiens
  misc_feature 28, 64, 539: n = A,T,C or G
cgggcccccccctcgaaagtcttctagnattaattaacgcgggattcaagaaacattatataanttgatgggggcatgagttattagaactgaaaaagcccactggatacccagcacaatggatggagatgtgctccatccttgttctagacctatgccagtttcagagttctagaacaaggaaggattccagaagtatataagttgagaggcaggaatatatacaaaggatcaggaatcagaatggctttgggcttgccaaagcaacattgaaactagaagaccaatgccttcaaatttctaaaggaaaattatttctaagctagaattctacaggcagccaaactatcagtaaaatacagagaaaaatatgttttcatacattccaagatctcaaaaaaactgacatcccattaaatattgctcaagaacctactgaaagacgtgcttcgccaaaatgagagtactacaaaaaggacgagtgcgtgggatacaagacaggagatccaatgaaagagagaggtgaaggcagttcctanagtgcaggtgatggaaagggatttctcagatgacagctgt

SEQ ID NO: 55326 - DNA, 530 bp, Homo sapiens
taattaacgcgggccactgtaaggatttaaaggttcagtgctcttacttgtcatattattgctctgcatatgaactctaataaaagcattatagtggggctcacatatatatccactatatatgagtttaaaatgtatttatatccaacaagactgcagtcaagcctcaaataatctgattcttaattttgtgtgttgagcatatcaataccaaaaaattcttggtgaaaataaactggatactaaaaagctaattagtctactgactatctaactgtggtaatcagatatttatttggggacattatactaaaatactgatggaattatcccccatttcccctagacattacgtgctgctgggaaaacatacatgatattttttgtcctggtcattttcttgggctcattttatttggtgaatttgatcctggctgtggtggccatggcctatgaggagcagaatcaggccaccttggaagaagcagaacaaaaagaggccgaatttcagcagatgctcgaacagctta

SEQ ID NO: 55327 - DNA, 343 bp, Homo sapiens
  misc_feature 28: n = A,T,C or G
ccgggccccccctcgaaagtcttctagnattaattaacgcggggaccaaataaataaatatttttatcaatcactgagttttgaggtggttttattgcagcaataaataaccaaaatagaaatgattatgatttttctcgttagtgctatttatatgatgtattataccgtttcttgtcttctactgaattactcttgtacttttagagtaaacctcacttactcatgagatattatttttaaatgcagtgttctattttacttatttctctattatattcataagtgaggtcagtctgcagatacctttttagatataatctttataaggtttttaatctat

SEQ ID NO: 55328 - DNA, 389 bp, Homo sapiens
  misc_feature 27: n = A,T,C or G
cgggccccccctcggaagtcttctagnattaattaacgcgggggatgaactcaatattcatcagaaaagcagatatttaaatattacaatatagaatctataaatttaaatgatatggatatatatgatatatatgcatacagatatatttatatatagctatataaatacatatagatacagatgatggacaggtgataaagggatagatgatagatagatgttagatgacagatgataaacgattaatagaaagggagacagctagctagctagctagatacatagagatatcgtgccaagtctgtcccgcagactctggctaagcaacaaatgaaagcagtatgctgacacaggtattttgcctgacagccaaaaaaaaaaaaaaa

SEQ ID NO: 55329 - DNA, 572 bp, Homo sapiens
  misc_feature 21: n = A,T,C or G
ccccctcggaagtcttctagnattaattaacgcggggtataatttgtgtgctccaagctaggggttggcaaactatggcctgcaggccaaatccaggaagtcacctgtttttgtatggctaagagtggttgaaaaaaaaaaaatcaaaagaatagtttgtgacatgtaaatattacatgaaattcaaatttcagtgcccatagatataattttaaacacagccatgcccattcatttatatatggtgtgtggctgctttcacacaatgatggcagagttaaacagtccagacagagaccacatgtcccaaaattatctactatctggccatttacaggacgtttgccaacgcctgctttataacaaactgaacacttgatacgtttagctgttctcactgtaaagaacttgtaagccaggtatttcttctggaaatttttctttagatcatactcctctcacacagcctgcagaggacacataggctttcaaagctaactgagctccaaaaaccagaagacttaaaagatcttgccttccggctgggcacggtagctcatgcctgtaattcc

SEQ ID NO: 55330 - DNA, 539 bp, Homo sapiens
gggccccccctcgaaagtcttctagaattaattaacgcggggaggaggggtcgggggtactcttgtcaaaaggcacattggtgcatgtgtgtttgctagctcacttgtccatgaaaatattttatgatattaaagaaaatcttttgaaatggctgtttttttaaggaaaaaaaaaaaaaaaaaaaaaaaaaaaaaaaaaaaaaaaaaaaaaaaaaaaaaaaaaaaaaaaaaaaaaaaaaaaaaaaaaaaaaaaaaaaaaaaaaaaaaaaaaaaaaaaaaaaaaaaaaacccccccccccccccggggggacccccaaaccccccaaaaggaaaatttttaaccccccccccctggcccgtttttaaaaaactgggaaggggaaaaaccctgggttaccccaaaaaaaaccccctgaaaaaaatcccctttttccccgggggggaaaaaaaaaaaaacccccccccaaatcccttttcaaaaaatttccccccccaaaggggaaaagaaaatttaacccctaaactttttggaaaaaacc

SEQ ID NO: 55331 - DNA, 284 bp, Homo sapiens
  misc_feature 39, 261: n = A,T,C or G
ccgggccccccctcgaaagtcttctagaattaattaacngcgggcccttataaatgtcattggtcttttgttagaacataatttactactttattttgaaataaagtctaagatttagcatgtaagtggtattactcagaaatggtttaaatgcaaatgaaataacagttctaccaggagtactaaaaaagatgctgtgttcaaggtatattaaatttgtgtgaaacttgattcacagacacagagggcttccagagaatntggaactatgattcagaattcat

SEQ ID NO: 55332 - DNA, 351 bp, Homo sapiens
ggccccccctcgaaagtcttctagaattaattaacgcgggtatataaaaaaagaatctttaaaatatattttagtattaaagttaatgcttaataatgtggattattgttttcattgcacatatataattttctttattatcataagagggattattgctaattaaaggaaattgcatgtgtaataaaatatgctaaggtataaagaatgaaaattgcacccacattgccaccatttagcaggggtgtccaatcttttggcttccctgggccacactgggagaagaattgtcatggcacacataaaatacactaacactagcaataacaaataagcaaaaaaaaaaaaaaa

SEQ ID NO: 55333 - DNA, 464 bp, Homo sapiens
cgggccccccctcgaaagtcttctagaattaattaacgcgggggagggagtgttctgctggtctccaattaccaagaattctccaaaaataattttctgcaggatgattgtacagaatcattgcttatgccatgatagctttctacactgtattacataaataaattaaataaaataaaaaaaaaaaaaaaaaaaaaaaaaaaaaaaaaaaaaaaaaaaaaaaaaaaaaaaaaaaaaaaaaaaaaaaaaaaaaaaaaaaaaaaaaaaaaaaaaaaaaattaaaaaaaaaaagggggcccccccccgggggggaacccaaattcccccaaaaaaaagggataaaacccccccccctgggccggtttttaaaaaaggggggaaggaaaaaaccctgggtaacccaaaaaaaaagccttggaaaaaaacccccttttcccccgggggggataaaaaaaaaaggcccc

SEQ ID NO: 55334 - DNA, 597 bp, Homo sapiens
  misc_feature 28: n = A,T,C or G
cgggcccccccctcggaagtcttctagnaattaattaacgcggggccacaagagcttactctgttgagggtgaagttaaaacgcacgtttctcttagaccggtgatataatagaaggtcggttcctttttatctctacgtgattattttgagtgaaaaatttaaagctctttcacataccattggcttgtcttctggagaaaggaacagcatatatagaggatgaaaaaataaaaaatcctttctaattttgctagccaaaagtgctcctttaaacaataccatattaaaagtccaatgccaggggtatttattctattttcaagaagctcatcagttcaaagaatacaggtccctattcgttttgtttttcaatagtctaacacaatacagcattgttttaataaaacaaagaaagtttgaacatttctttgctatttcttcaaaattagttaatgcatactaaagcaaccaattttctatatgtactggaggtcatttttctttttttttttttaaatattaggatttagtagaatgaacatatcacaacagttccatagctatggcaatatagcagtggaattttatattgact

SEQ ID NO: 55335 - DNA, 576 bp, Homo sapiens
cgggcccccccctcggaagtcttctagaattaattaacgcgggtgcctttattgctattgtaatgaattttaaatcttaattatattgtaagcaatccaaataagaatcttgcttggcatttttcatttttgtagagaaattcacaaactgattctaaaattaatataaaaccatctagaatgtagaaatctagtatattcaatgcaatatttaaaaagaaaaataaagtgggcagacttgtactatttggttccaagacttaacaataaatctgtagtaatcaagatattatgtgatactagcagaggattgacaagtagatcaatggaacagaaaagagagcccagaaataaacccatgtctctactgacttttgatttctaagaaagtcacccaagcaatgcaatagggagaagaaaacaagcagagctgggaaaaccgaatgtccatatggagaaaaaaatgagtcatgacacctacctcaagccaaacaaacaaactcaaaatggactatcgactgaaaaataaagctaaaacagtatagtttctaaagaaaataggatgtcttcatgaca

SEQ ID NO: 55336 - DNA, 613 bp, Homo sapiens
  misc_feature 23: n = A,T,C or G
cccccctcgggggtacttctagnattaattaacgcggggttataaagtctatttttttctcttacttttctgagcttctaaactctccccatgacatgttttctgttacttttataataaaacaccttacattttattataaaacttattaaacgtattaaaaatatacctagagaagagtaggatgcactcctatatatttatatcccagattcaatcatcatcgagattttgccccatttgctgaatctatcctttttttcctgaagtattttaaagcaaattccagacatcatatcatttcacctacaagtacttggtaagaatctttttttttaatggatattttctgtcattaccacaatgcctttatagtacttacctaaattaacaataatcccttggcatcttctaataccatctaatccacataatcctactttcaaaattgtctctaaatatcttttttttagttggtttattcaaattcaggtacaaaaaaggtctatattattacaattggttgttttgtttcttagatttctttccatttagagaagattccccctcccgtcgacacacacatgcgcacctgagtgcacacacacacatg

SEQ ID NO: 55337 - DNA, 610 bp, Homo sapiens
  misc_feature 589: n = A,T,C or G
cgggcccccccctcggggtacttctagaattaattaacgcggggctggtgtcttcagccttcttctcctctatgtgcctctacctggctagcttgcttatagcagtatgataggacatcttacatgtcaactggcttccaggaagacaagcccctatacacaagtgcttatccagcttctgcttgcattttacttgcatatccaatctcctcttggtgaaggcaagtcagagtcaaggttggaggcaactacactagggtatgtatacttggaggagtagttcactgtggactccagtttaactgctaccaatgtaacaatcctccacttctagcaaaatgccattctgctgggaacattgtaatcttcatcagaatgggtaaagcaactgaatagcactcagcatgtctccaacttggtatataaccttactaccatttagaatgatttctcccagtaaaatcatagtaatcttttcttatatcagagctcgcctctgtgaaacctttgttgacttctcagtccttcactctacaatgttcctttagctgtttgtgattcctttcattactgcatctattacattatncctatctatctatctatctat

SEQ ID NO: 55338 - DNA, 348 bp, Homo sapiens
  misc_feature 325, 326, 327, 328: n = A,T,C or G
taattaacgcgggtggcgcctttgtgcttgtcttgtatgatgagatcaagaaatacacataattatgtcctaagtgttctccccgagaacaggcatgttgtataatataccatatcttgaacattctggacagattctctgggcttgtctgttttatcagtggcaactatttaccagttgaaaagtgggaagcaataatattcatctgaccagttttctcttaaagccatttccataatgacaataatgatgggactcaattatattttttatttcagtcactcctgataataaaaattgaagaaataaaaatacccaaaacccnnnnaaaaaaaaaaaaaaaaaaaa

SEQ ID NO: 55339 - DNA, 584 bp, Homo sapiens
  misc_feature 28, 558: n = A,T,C or G
cgggcccccccctcgaaagtcttctagnaattaattaacgcgggcgatgttaaatgacttgcataatatgacacagccgaatctcttctaagaattgtgctctattttatagttgtaatcctatttggaaaaaatttaaaatagaaaaaaattttaacctatatttgtatgaccttccctgtagcaactcaggttttaatttgccaaagtagtaaagttgtcaggtgtttcatagaagaaaggaaggatataattaagtgaataacttttgttatcttctttttaaattctctgtatgctgttattaattcattcctaaactcttctctaaatatgttgaagtcattattattttgtcagtttcatgtttttagacccctctgtcttcccacactgatctggatggaccataatggctctctaggcttgttgtacacctatatttctgggatctctctttaaccatcattctgatcttctttgttagtttctttgcttattttgccagagcatatcctccagtagctacctggtgtatgggtggatggaaagtaaatntttggggaccttgcatggtagactgc

SEQ ID NO: 55340 - DNA, 568 bp, Homo sapiens
  misc_feature 28, 44: n = A,T,C or G
cgggcccccccctcgaaatacttctagnaattaattaacacggngcaaataataaaatacaaaatatataattatgtcttattttatatattatatatgattttaacatttaatattatacatacacacatatatatagtggagacttcttcatataataaaaggtgttacaaaactgtggtgattaaaagacagtgcagtagacctactaccagatgtgtaaatgaaactgaagagacatggaagaataaaaggaaagctggcatttgataagcatacattttaaatcactgggtgggaagaagaaataacatttaattgaatgtgcttggacaagcaggaatttgtttgggaaacctaataataaaactggaacttttcctcactgttaatagacaaatgtagtctagatggcttactagtttaaatctaaacatatgcagcctaaaaagggaaaaagaaagcctgaatagatatttgtgcacattgcatgtgggaaaagcatttctaagcataatacaaaaacctagacccatttagggacatgatttttattaacatttgcatc

SEQ ID NO: 55341 - DNA, 570 bp, Homo sapiens
  misc_feature 22: n = A,T,C or G
aattaacgcgggggaaatccanatcaacacttttgccacaggttaatagtaaacaatgaaacccaaaaactcatagtccaaatatcaaacagctttccattccactgaatacaagattcttaattgatttaagctcaaaatggacaaagaggctatacagatacatacatatgtatatatgtatatgtaaacaaaccagtctctctgttatctgtcacccaaagagtatggaaatcttatctctataacctgttagccatttgtataaatcaccagatgatcagatcatgaaaccaaattcccagtcattgctgtcaccaatgtagaataaattagtggctataagcaaaccagaaacaaaaaaagaaacaaaaatcagtagagggaaggaaaatagagaaattcagtcagcaaacttaggttatgttgactcttaggtttcatttctgggaaccaaaaagacacaccaaccttaagtatcctaatgagatacactactctggcaacatattttacctggctctgttaaataaatccattggatattatagtagattacctccaaaatgg

SEQ ID NO: 55342 - DNA, 605 bp, Homo sapiens
cccccctcgagaagtcttctagaattaattaacgcgggggagggatagcaggtcaggatatacccttcttgattcaatgatgaataaatggataaatcttggatcaatagtagatgaagaaaacccaaaacaaaaacagagcctttaaaaagaacctgcaacataataggaggaaattacatcatgtaagagatggaggaagaacagttaaaagtaatttttaaaaggccaaaataaatgaagttataagcaaaataatagtagacttaataaagtaaagacgtggatcttttccaagagaaaacaaaatacacttaaaaataaacatttggcaaagctaataaaataatttcctgttccttgagtgtttgaaagaaactgatctgctaaactgcctgagccaggcctcagccaatatccagtttctactatgctattgatttcttgttattttctatgcctacaattttatatttatttccatataaaatcatctgtcattaaaattactgaatttattatgacagactttgtgattatgtcaaatacctggcatgatatagtaatgaaataataaatcaccatttcctaagttggtgttctga

SEQ ID NO: 55343 - DNA, 606 bp, Homo sapiens
  misc_feature 28: n = A,T,C or G
cgggcccccccctcggggtacttctagnaattaattaacgcgggccccaggccccacatcattgtaacaaaagtttgtagacacaattatttctgttttaccttactgctctgtccattgaaagaaaacagcctatattttcctacctggttagaatcagatgtatctacctgtttcttcacagacgtctaaagtgagcaaaagaatacgaggattaaatgatttctgacggagttcttgtatacaaaagacctcaaaaactcttcatcttagtaaagaaatatagcaataataatttatgtttattgagtgcttattatctgctgggcattcttcaaagtggcttacatgtattgattgatttaatgtccacaacatgtttgtggggcctatacctttattattgtcattttaagggtaggaaaaattatatagaatttatgaagcctgcttgaggtcaccctgcttgttagtaacagagcttggattaagaaatacacattcctatgtacttgttggtacatgaaacataaagcaaatcatattcataattgtggctttcattctttaagtgaaaataaatttgaaagcaagtgaagtattaga

SEQ ID NO: 55344 - DNA, 522 bp, Homo sapiens
  misc_feature 36: n = A,T,C or G
tgggtacccgggccccccctcggaaatacttctagnattaattaacgcgggtatatacccatgtaaatatctttcatctcaattcattagtgcttttttttgtaagcaatacacatagaaatgtattttccttttaaataacaataaagtttaagttattgttattatggtattagcattaccaagttacataaatttcagatcaaagcatcataaagcaggttttccgttaacatcttttcaaaggtgttaaaatgagagatgtcttatacaaaacacagtgatagcaaaatttgtgaattccctaggaatgacgactctcttttttttttttgatactggaatgcagtggcacgatcttggcccactgtaacctccgcctcctggttcaagcgattcttctacctcagtctcccaagtagctgggaatacagggacccgccaccgtgcccagctaattttttctgtttttaatagagacggggtttcaccatgttgatagggctggtctcgaactcctga

SEQ ID NO: 55345 - DNA, 464 bp, Homo sapiens
cccccctcggaagtcttctagaattaattaacgcgggggttgtggtgagctgagatcacgccattgcactccagtcttggcaacaagagtgaaactacgtctcaaaaaaaaaaaagaaagaaatagatacaaacaaaagatatagtttcaaataatctacagtttttccatcagaatatactttatctcttcaggataggaagaaaaataaaataatattttccttatgaaatgtaaaagacattttattataggctttgaataaaataaacactcattttacattacaaagttaacatgaagaatttgctatcatgtgaaataatgttaatagttattaaagtttttttttttttacctctaataaataaaagtatctattaaactgtggactctttgtatcctccaaaccttttaattgtctggtaataaacaaaaatatgtcctgttaaaaaaaaaaaaaa

SEQ ID NO: 55346 - DNA, 612 bp, Homo sapiens
cgggcccccccctcggaagtcttctagaattaattaacgcgggcataccagtgagtgagcctgttgggttatgtgatgtgcatgtatctgactttagtgatgctaccagttttccaaagtagttctacctgtagacggtaccatctgcagagtttgagagctccacttgtttcacatcctcatcatcactttgaattatcagtgctttctaattccagccattccaaacggtgtatagtggtattttataataatgaagttgttttcatatgtttattggtcatcttgatcttttgatttgtgaagtgtctgttgaagctacttgcctatttttctatttttttctctttttttaaattttcatataggagttacctatacatcctgaattgagttccgttgttaggtatgtgtatttcagatttcttcttccagagtgtagcttgcatttttattcttttaatgacatttttgatacaaagaagttcttaattttgatgcagtttaatttatccatcttttccaactgtaacttgggctttttgtgtcctttgcagaaagaaacatattaaactgtgttaacttatagaggctttcttatcttttgcagta

SEQ ID NO: 55347 - DNA, 624 bp, Homo sapiens
cgggccccccctcgaaagtcttctagaattaattaacgcgggtgacaggttgggaaggtggtttctatagttaacagaattggtgaaacagagggaaggagaggggaaggctagaaagaatgaggaacgttttaaagaggaaaggcccttactcttccgaaattcaaatggacagataatgttctaacaatggtagccaagccttgaagtatgaacaacttcaatcttaaagaacagggccaagaagaaaggtctgaagcaaggggcatgaccaaaaggagccccaggaagtgcacagttcaagttgtagacttgtgtctttatccataaataagaaggttaaagataggatatgtgattcattgccagtacatgtgccgaaattctttcacttaggcaaaatctaggcaattggtcaaccttattgtctgctgccagcacagtgggagtaggtggtagcgctggagatgaggggagatggaaaaggtgagacttggaaggacaatcctggggtacggagggaaaacaaactgctctgattcctgaagcccaaacaaacataactttccatcttctaacaactagaaagcagaagtctcctgagagttcaactctgatttgata

SEQ ID NO: 55348 - DNA, 431 bp, Homo sapiens
  misc_feature 49: n = A,T,C or G
cgggccccccctcggaagtcttctagaattaattaacgcgggtactggngaaaaccaaacccaaaaataataacgagtatatttatttgacatttattttgtataattcacttgtatatgcactgtacatggattatgtaatttaatctttgcaacaacttcaggagacagtatttttagtgttctcattttatagatcagaaaaccaagaattagcaaggtttaaatgattcatcccatatcacccaacaaataaattgcaattaagccataatttcatatttgcatgcttccaaaatgaatgctaccaccatcttatcctgtgtagctatttcatgtgaagagatcaagcctttattttaaagagattcatcagattttcattgaagaaagaaatacaggctattctagtctccaaaaaaaaaaaaaaa

SEQ ID NO: 55349 - DNA, 578 bp, Homo sapiens
  misc_feature 563: n = A,T,C or G
cccccctcgagagtcttctagaattaattaacgcggggtctaacttttactttttagcctattatttatcttaaattaactttttatgtatggaatcaagagttggttcatttttttcctgcaccatttttgagaaaattaattttttccattgattttattctttctttgttgaaaatcaaagtagagagacaatgttgaaaactcagagaactcataaatatcttaccctagtggaaagtctaagttagctccagagtataacctttcttagaccaaccttaacaagcttaaaaacaactgaaaaggatcaagctattccatgattagtttaaccatgagttaagataaaattcaatactcattgagaaaacacaatattaagacactaaaaagcataagatttacaattcatcaaatctatattcccaatgcatgagaagcagaaaattttgattcacaatcaagataaaaatcaatacacatagatttagaactgacagacatcataggaagtgcagaaaagaacttaaacacttattataaatactataaatagcctncaaaaaaaaaaaaaa

SEQ ID NO: 55350 - DNA, 365 bp, Homo sapiens
ccgggcccccccctcgaaagtcttctagaattaattaacgcgggtatgcatgctaagtaattattgttattaatctgttatataaatacccttcatgcaatattaactgattttcagcacagcaaaagtataatatttatgtacgtcaagattgccttgctattatgctgcaatagcctaacaccttaaaattttaatggctaagacaattaaaagttcacttcttaccatataaattccatcttgtctcagcccagtgctttgctccacgtcattctgactgttagcctcatccttataagtcttcgctctctcgaatatatatatatatatatattttttttaccatctcaaaaaaaaaaaaa

SEQ ID NO: 55351 - DNA, 410 bp, Homo sapiens
cgggccccccctcgaaagtcttctagaattaattaacgcggggggaagaagtaaaaccaaatagatggcatttatacagaaagttctaaagaatctaccaaaaagaaaaaaaaaaaatactagaactaacaagtgacttaggcaaggctgtagagtaaaagataacaaacaggaattaattatatttctaaacactagcaatgaaccatccaaaaatgaaattaaaaaaccatttacagtagtattgcatagctaaatacttagtaataagaatagatacacaaacctgtacactgaacactacaaaatattgttgatggaagttaaagaagaactaagttaattgagaggtacactatattcatgaattggtacactatgttcagtgcagtcccagtcaaaatcttgtc

SEQ ID NO: 55352 - DNA, 605 bp, Homo sapiens
  misc_feature 13, 26: n = A,T,C or G
ggccccccctcgngggtacttctagnattaaagcagtggtaacaacgcagagtcacggccgcttttttttttttttttacaacctttaaaaatgtaaaaaccattcttagcttgcaggctgtgtaaaaactggccatgcaccaactttgtccatggtccataattttccagctcctgcttcagatccttaaaatgtccctaatcttttctatccctcaccctgggatgtgatagttattgatttactatcttggttgtcatggagggtagcttctgagacttcctctttatttttcacactatgatagaccttaactttcagaccaacacccaatatgggatttgtgccaattgcaagcatatcaatcctaattatacatttgggaactggggaaacaatcactgggtgggtcatcaggcccaagggagtttgtccaggagtccatttattttctagtccccataatttattatcagccttgtctattattttgatttattttttgtaaaactatgagtatgaataactttcataaaaataaaaaaaattaaggaaaaattcaattgggactttcagtcaaactagcagtttatgagcaaaaata

SEQ ID NO: 55353 - DNA, 517 bp, Homo sapiens
ttaattaccgcgggtgattcctttgctaacctctgttagcaggcagatcagtcattcgacctttattaggcaaaataatgtaaggaaaaaacatggctggttttcctctgtaaattctaaatacagttactgatatacgggctggccctatatacatttttgggttccaaaggtttttatttgccctgcctttaaagaaatccaggggggggccattaaacctatgttgctgaactgcagggtcaaattcgtgtttgattaaaacaacttcaggaaacctattaaataaatttttcttaaatctttattatccctaaagtattatactgaagtgaaaattgtttccttgtgaaatagcttgaattttaaaacaaagattccgggaagggtttcatttttcatatagcctttccaaaaaactgaattaccattcctattttttaaagtaagcaggaaagttttttatttaaacccaggacccaaaaacctgaaatatacaaaacataggtttttttaa

SEQ ID NO: 55354 - DNA, 426 bp, Homo sapiens
cgggccccccctcgaaagtcttctagaattaattaacgcggggatacacagatactaagcaaagaagccaagatttgaagccagataatctacaacttgctttcctaaccactatagcactatacactataatgcctctcttagacttcaacacatgatgaattgagtatataaggatgctattttaaaatagctggataagatgacttatttaataagcagtgttgggacaaatattcaaaccatttgttttggttttctctaaaaagctgttctcactataccactctttcacaaaagtaattttagataaatcaaagattttaatataaaggaataaaagcacaacagaagaaaccattttaaagaatcttaaatgggaacttcctaaaacattaaattcacagcccaaaaaaaaaaaaaaaa

SEQ ID NO: 55355 - DNA, 552 bp, Homo sapiens
  misc_feature 524: n = A,T,C or G
gccccccctcggggtacttctagaattaattaacgcgggcataccattagtgagggaaaatattccttttttttccttcagggttgaagaagttcttcatcaaggacaaaagataagactatcaattcagctaagatagtaattaaaagattaagaatgatagtagtaaggtaccttttgctatttccatatttgattgaatgttttcataaaaaatacattttctagctttgaaagaaatcatatttgcctttattaattcaccctaatggcaggaaccatcagatgcatgactgaattttgtgtattgatgcacagactagtgccagcgatgagtcaggtgacattcatcctgatgtgcctgtgacagtgcctgtttatatctgttatgaaactattattagtaatcttcctggccgggcatggtggctcatgcttgtaatcctagcacattgggaggctgaggtgggtggatcatttaaggtcaagggttcaagaccagcctggccaatatggtgaaaccncatctctactaaaaaaaaaaaaaaaagc

SEQ ID NO: 55356 - DNA, 611 bp, Homo sapiens
ccgggccccccctcgagagtcttctagaattaattaacgcggggtcctaatggtttataatactgtttcttcctacatcttgtggcttctacgccctcagaaatgaatgctgtagccctccagaaatgcctgagactaaaaaggtaatgaaaaataatttgtagctatcagcatttttgtctttccgaggaaagacccatctttagaataatttatctttatatgaagcaaaagggctcttctgaataatgcaaaaccactaacagttaaaacaatagctgatactgtagtattttctgtgtgccaggctcttttctaagcacttatttatattaacttatttaatcctgcaacaaccctatgtaacaggtattattgtcatcccaattttatgaacaaaaaaaaagacagttatggtaaattcatatactctaaatatgtggataatttaggagttctgaatatgtaacatcacctcagtaagagcttcagccacagagtctggtcccagaggatccgatttattaattactaaactcatttctgcagaatgcaccaaaggcttccactgttgggaaggaagatgctttatgaaaaaattttagtcttgt

SEQ ID NO: 55357 - DNA, 555 bp, Homo sapiens
ccgggccccccctcggaagtcttctagaattaattaacgcggggaattggggctgctgcagagaaacagctcagatctccaagttctagcctgagctcttctgccataaaccatggggtgttgggcacattgtcaacccctggggccttcaggatcttcatttacagactcacttcaattgggatcagattagatgatttctagggtttatttagctaggaatttttaaattctaatttagaaaagcaagactttgtattggagtttcctcagtagtgattagttttatttttttgtttgtttgtttttgttttttttttttaaagtccttatcttcactttgggaggccaaggcaggcagatcacttgagatcaggagtttgagaccagcctggccaacattgtgaaacaccgtctctattcaaaatacaaaagttagccagaaatcacttgaacccgggaggtggaggttgcagtgagccaagatcgtgccactgcactccagcctgggcaacagagcgagactccatctcaaaaaaaaaaaaaaaaaaagcg

SEQ ID NO: 55358 - DNA, 585 bp, Homo sapiens
  misc_feature 25: n = A,T,C or G
ggccccccctcggggatcttctagnattaattaacgcgggtaccctagttagggggagaaatcatctctctcggatcaccataacagtcttttatctcctctccctgcagatcggtcttgctccttctaatctattcttcatagtgcaaatagagatgtctgtgtaaaactcaagtctgaccaggttacttcctttttaaattcccttggcttgctatttagagcccacaggacataggtctacccacattatatggccctcattatctgatctttgcttcccttaccatctcttctctaagtgctcttcccctttcattttataattaaaaatgaactgaaactacttatggtttcaactccaggcctttgttcacactattctctttgcctctgagacagagcaggaactctgcttaggaccctacctgtcccccttccccaagcataaaaataaaggaaaatctcgagttccttcaagagaaattccaggcacctagttgtccttagaaagcaaataaacaacatgatgtaaacaaaaagataacaacagcttagtcgggggaggatcacaaggtcaagagt

SEQ ID NO: 55359 - DNA, 527 bp, Homo sapiens
ttctagaattaattaacgcgggattgcaggttcttattagtaaatatagattcataagaaatttgtatcttagatttatcacaacattttaaaaagtatgctctaaatggaatttctttacaaagcacagacttctcaattctaaccttaattatatcaagtcctcctatgagctctccagaaacatagagctgaggataggtaggccaactggaataggctttgagtccctgtcgaacctcttcatctgagaagatatcaaaactgctaaactgaatattatgtttgtgaagaatttccaccatctgcttgctgaaacctgtacacaaaaaaagaaataaagcacttaacttctctctcccaaaacacatacacatgataatacattagttcagcgtacatatcatctaaaagacatagacgcctgccttattttgctggtgatttaattagcatggctgaataatatacaaagagaaaataaattcctggatccccttatttgaccttgaaccatatcacacact

SEQ ID NO: 55360 - DNA, 381 bp, Homo sapiens
cgggcccccccctcggggtacttctagaattaattaacgcgggggtggtaaagacagaaacgagaaaaaaaggaagttttagagtcttctgtggctaaagggtaagaaaaaccgtacatcagattgaaagacctaccacctatccagaccagccaaaccaacagatgatcaaataaatgggcaaactaactctgattttgtacttgaattatcctagtctggcagtaaaagatactactaatataagaatttagtaaaattacttaacatcttaaatgaataaaagaaatgtagagttaagagaaaaatatttttaaaaatcaaaacacaaaattttacacaaataaactaagtaaacctatcccaaaaaaaaaaaaaaaa

SEQ ID NO: 55361 - DNA, 590 bp, Homo sapiens
  misc_feature 531, 564: n = A,T,C or G
cgggcccccccctcggaagtcttctagaattaattaacgcgggagtttcagaacattcctttcctctctgtttcttaaaatagattaaatagcttcagaattatttgttcattgaaaaatttgtgagcattcacgtataaaatctttctgttgtcttacttttattttggcaaaggaggtaattgaaagttgaaatggtgaataaagataatgggaaattttaaaaatatatttcttaactgtttctatagtaattgcttgtatagatttttctgttattgttggtcaatgttagtattttatatattttgatatatccataaaatctattaatgtaaattgagaaaactattatattaattcctgtgttttacatgttgttgatgctttctgatgcatttttaaaatttcattccttgcattcatcagctctggaatttgtttcagcgatatctttttaatgtaaaattttgctttcttcttttattttgaaattaaatatctgtgtttttattcagtgaaaaatagcanaagattgtgaagagcttcatagtcacaaatgancatgcaagtaaattacgtacttctgt

SEQ ID NO: 55362 - DNA, 607 bp, Homo sapiens
  misc_feature 28: n = A,T,C or G
cggggccccccctcggggtacttctagnaattaattaacgcgggggggagtgtattggggacttttggatagcatttgaaatgtaaatgaggaaagtacctaataaaaaaatcagctacttctgtaaaaaaaaaagaagaagaagaagaaatcccttactaaggtacagggtacaagtttaaagaaccatacagagcagcacaaagtaagaattcctcttaataaataataatcaaaacaataagcatacagaacaaagaaacactataaaaatatgccaggagaaaagacaaagtaacatatacaaacagttctatcagaataacatctgatttctccagggagactataaaagatcaaaaggcctgggaagatactctatcaactctaggagaggacagatgacagccaatactactaataccctgggaaacttccagtcataatagagagagagagaaaaaaagaacatttcataataattcaaaatttgagcagtatctaactaaaatcctgtcctacagaaggctgttttaaaaaccttcaacctgaagatttcaggccaaaaacaccagaagtgaccatctaaattctttttttttatttt

SEQ ID NO: 55363 - DNA, 609 bp, Homo sapiens
  misc_feature 9: n = A,T,C or G
acttctagnattaattaacgcgggctcatagtagagaatagaatggtgattaccacgggctagacggggagagggaaagttggggaaatgttagtcaaagcatataaaatttcagacaggaagaataagttcaagagatctgttgtacaacatggtgactatagttaataacgatgtactatatacttgaaaattgctaagagtaggttttaagtgttcttactacaaaaaaaaatgaagtcatacatatgttaatcagctcagtttaggtattccacaacacatacatatttcaaaataatgtgcagaattacatacaatttttatcaattaaaaaacacttaaaaaaattcatacagaccacttgtaaaataacgttttgagttaaccagggaaattttattttaaatagataattagattataccaaagaattattaattttacgtgtaaaatggaattgtgattatggaaaagtcttgtttttagaaatgcatactgagctatatgggggtaatggtatataaaatctgggatttatttttaaatataaaaaataagagagtgactaaatgatgggtatatacacacttaccatactggttatct

SEQ ID NO: 55364 - DNA, 575 bp, Homo sapiens
  misc_feature 517: n = A,T,C or G
cgggccccccctcggaagtcttctagaattaattaagaagtaattttgatttttttttcaatgaatatttactgagcacctgctaagtaccaggcactgctttaggctgagatactgatgacaaaatacgcagatcaactgtttctcaaaataagacaaatgtccattccagctatgacaccccttctgaaagtctagttgattatggccctggtcctgatgtatgaccttttcacaaagtgacttccaagtataacctaggaaactccaatgtagcaatcaatgcttaaagctaagtctgctatcacttgattcttaaaacagtgaacaccaccactaacttaactggtatagttaagattgatgtgctaacaaaaaaaggggataaaaaaaaaagcaagtatgtcattaataagcttactatgaaatattttaaaatacgtgatttggaactgataccaggaaaattactataaatacaatacaatctgaattgtgagaactgattatatgattntcttacagattttcagagaagaaatcataaactatatttcaaatataaacacctgcgt

SEQ ID NO: 55365 - DNA, 620 bp, Homo sapiens
  misc_feature 28: n = A,T,C or G
cgggcccccccctcggggtacttctagnattaattaacgcggggggataaataaaggcattagtaaaagcaacaaaaagaacaaatttaacttaaaataacagtagttgtctgaaccacactgaacatataaaattcattaagatcataagaatattttacagagaggaagcctgttccttcctggaaaaacatgttaccgctggaagggttctatactctaactccttactctgaaaattggtaaataaagtaaaagaattaaacatttatcccgcttttctagaagaaacatttcaggataaacaaattaattccagttaatagagaaaattctctatagaagaattcatgctaatatatgtagaaacaacagaaacagaaaatctcattttataacatctttaatagagcttaaaactattatgcaaaaggtttaataaaactggatctcaaatgatgtcaaaatctctccagattacttgctagtagcaaaaaaataaaaattttgtaactaagagatcaggtcatgaacactttaatcatctgagcatcatgaatggcgagacaagtattgtgtaatatgatgcagtaggaagtatgtgaaaaatacctacaatg

SEQ ID NO: 55366 - DNA, 576 bp, Homo sapiens
cgggcccccccctcggaagtcttctagaattaattaacgcgggtagtgtcattagtgatgcattactacgctgtgttcctggattagattgctttaatgtctattctccccaaattcagattgatttgtagattataggtgatggaattttttttcccctgaatctgtcaatcctgttcaaagttttacatggaaatgcaaaggatcaagaataccaaagacactactgaagaatatgaggtaaagaagaacaagatgctgggagctttattataaattctagttatttaggctttgctattggaccaaagataagcaaacagataaatgacagaatggagagggtagaagctgaccaatgcatgtttgaacattttgatttattaagaattcagcattgcaaagaagtggagaaaaggcttgtcttttcaatatcaatgctaggaccatttgatgtccacctagaaaaattatattaaccccctccttcctatcacatacaaaaacagttccagatctacttactgatctagttgtgagaggaaaaacagcaatcttttgttaattagtgtagag

SEQ ID NO: 55367 - DNA, 477 bp, Homo sapiens
  misc_feature 23, 28, 466: n = A,T,C or G
gggccccccctcggaaatacttnctagnattaattaacgcgggggggacagcccgcgcccctagaacgctttgcgtcccgacgcccgcaggtcctcgcggtgcgcaccgtttgcgacttggtacttggaaaaatggacaaggattgtgaaatgaaacgcaccacactggacagccctttggggaagctggagctgtctggttgtgagcagggtctgcacgaaataaagctcctgggcaaggggacgtctgcagctgagtaagtatgagcccacgtgatcctgtataccgcacatgctgaagcaaccgaggagtatatgtgataacggcatgttttccattgatggcagggtaacgcatagccttacccccacaaccgcaaccacgagtccgtctctcaaaacagcgtgctgcgacggctcctgcatttgcagcttccctgtgtgttgcccaggagctctccacctncgatgaaccca

SEQ ID NO: 55368 - DNA, 618 bp, Homo sapiens
  misc_feature 39, 100: n = A,T,C or G
agactgggtacccgggccccccctcggaatacttctagnattaattaacgcgggcagatcacgaggtcaggagattgagaccatcctggccaacacgggngaaaccccatctctactaaaaatacaaaaaaattagccgggcgtggtggtgggcacctgtagtcccagctactcgggaggctgaggcaggagaatggcgtgaacccaggaagcacagcttgcagtgagctgagatcatgccactgcactccagcctgggtgacagagcgagactccgtctcaaaaaaaaaaaaaaagaaatgcagaggatcaggtcttatccatgacctgcttaatgagaagctggatttgaaggtctgtagtttcctgtgaaagtttgagaagtgcatctgacagtgattagtgattcagcccaaagggtatttcatactcctcaccggtgagataattgaattcacagagtatctgaggtaggggagatccagtgggctgtgaggggctggggctggaactgaaagcaaagactggcgagacatcccgaagaagacaatgtgggccgggcgtggtggctcacagctgtgatcccagcactttggaaggctgaggtgggtggatcac

SEQ ID NO: 55369 - DNA, 590 bp, Homo sapiens
  misc_feature 35, 536, 547: n = A,T,C or G
tgggtaccgggcccccccctcggggatcttctagnattaattaacgcggggatatagtaaaagtcctgacttcactactctgcaacatactcatgtcacaaaattacaagtgtacctcataaatttatactaatagaaaagaaagtctgtacacagtaatcaattgtgatatgtagataaagtcaatattaaatttaaaccagaataactagttaaaatgttgtgtacacaacagtgaagagagtatttatcctctatgacagaggaaaccatcaatattaatgcacagaaaaagcaaataactgaaacaagaaagagcagttttgtgacagggtaaaaattgacaacagttttagaatgctcctaacttgagttccaaaaagaaagaacgagaaaacaggtcagaagcaatctttaaagaggcaattgttgattatttggaggaagtagacacatccatcaatccacaggttcaagaaatccagtgaatgccaggcagaatgaagtaaacacacctcacgttcaacattacaganaagcagcatanaagcacaaccaacccttaaattagccagaggaaaaggatcagc

SEQ ID NO: 55370 - DNA, 501 bp, Homo sapiens
  misc_feature 28: n = A,T,C or G
cgggcccccccctcgaaagtcttctagnattaattaagcggggtttgcaggaaagtccatgaagcccttgagatgatcacgtatgtcatatgtgcatttttctgggaggagagtccacagctttcatcattgtcaaaggagttcacgacttgaagagtaacgttcactattttaattataattttttatttttttgagacggagtttcactcttgttgcccaggctgcagtgcaacatagcgtgatctcagctcactgcaacctctgcctcccaggttcaagcgattctcctgcctcaacctcccaagtagctgggactacaggcgcccgccaccaggcccggctgattttttgtatttctagtagagacggggtttcactatgttagccaggaaggtcttgatctcctgacctcatgatccgcccgcctcccaaagtgctgggattataggtgtgagccacggcacctggccttttttaaaaaaaaaaaaaaaaaaaaaa

SEQ ID NO: 55371 - DNA, 633 bp, Homo sapiens
  misc_feature 33: n = A,T,C or G
gtaccgggcccccccctcggaggtacttctagnattaattaacgcgggcccttatatattaccatgtaataatagtagaaataaagtacacaataaatgcaatgtgctttaatcatcccaaagccatccccaccttcccagtctgcagaaaaattgtcttccacgaaaccggtccctggtgccaaaaagttgggaattgctgtcttagagtagctggatagttgataaagtaaaacttctctttactgaaatactccagataacaaatgtactaagaatgaaatgagataattaaaatatcaccattttataacctctagtatgttgctgaatctggccaatgatcatcagtggctgttaacatcacaaaaagtgggacaatcagacactatgtgtttgttctctggtggaggtatataagaacatctgtgaggtattcttgccaaataagctggtcaaatctctatataactaccattttacaagaaatatagattacagaggaggatattcaatgataccaaggggatgcattcagtaaaatacagattgaggtaaactctgtctaataaattgtccagtttcttcaacaataactaaaaggaccaaaaaagatgaaagagattaagagaa

SEQ ID NO: 55372 - DNA, 605 bp, Homo sapiens
  misc_feature 55: n = A,T,C or G
ccccccctcggaatacttctagaattaattaacgcgggggtgcatatggaggaanacagggctctcctggaagtcagagaataagaatagagcaaatactaaactgaatagagcacatggtcatgtgctcacgtgcacatgcacacgcacgcacacacacatatgcacatgcatgcccatacacgcacacgcatgcacatgcatgcacatgcacacagatgcataaacacacacacatgcacaaacacacacatgcacatgcatgcccccacacacatgcacatgcacacccatacacacacatgcacatgcatgcccacacacacacatgcacatgcatgcacacacatgcacaaacacacacatgcacatgcacatgcatgcacatacatgcatatgcactggtgatcctgtactgcacggacagcccatctacccatcccagaggcctcctcagcacatgcagggaaaagacacatcttcccacccaatgcagaatgcaccaaccttctcataggcttactcaacacacggaaaggtgacatttctctgtggaagcctggagataccgcttaaaatgagcctcccctctcccatgatcaccc

SEQ ID NO: 55373 - DNA, 608 bp, Homo sapiens
  misc_feature 41: n = A,T,C or G
gccccccctcgaggtacttctagaattaattaataactatnggaaaatccatataaaataaatagacacaatcattggactaaaagtgaccttacagggggcatttaagaatctccaggcattttgtctcagcactttttgcatcttctctacctattccctgggaaatggttctcaaacagtagcacaattcctggatggctttttaattttttttttaatttttttgggacagagtctcactctgtcacccaggctggaatgtagtggcatgatcacggctcactgcaacctcgacctcccaggctcaagtgatccctcctcggcctccctagcagctgggaccgcgggcatgcaccgtcatgccccactaatttttttttgtagagacggggtccccctgtgttgcccaggctgctctagaactcctgggctcaagcaatcgtcccaccttggtctctcaaagtgttggaaattacaggtgtgagccaccatgcctggctgggctttttaaaaatacggattgctgggctgtaccccccagtgtctagttcagtagacctgagatagagcctgagaatttgcattctaacaagttcccagttagc

SEQ ID NO: 55374 - DNA, 578 bp, Homo sapiens
  misc_feature 9: n = A,T,C or G
acttctagnattaattaacgcgggatctaaacaaagactttatgaagttagaaaacaaggggaaactaaacctaaatcaaaagaaaaaaagaagtaaaagatatgagataatagataaatgagacagaacacacacaaacaacagagtcaatgaaaccaaaagttgggtctttgaagagatcaaaaaaattgacaaatctttagctagactgaccaagaaaagtagagcgaggactcaaattattaaaaacaggaatacaatttgggatattactaccaacccttaaaaataatgaaagtgttataagataatattataagcaattgtgtgccactaaattaaataacctagaaaaatagacaaatttctagaaacacacaagctgacacaagtgaaaacagtcgatatctgaattaactttacaggaagtaaaatgactgaatcaggaatcaaaaacaaaacaaaacaattcaacaaagaaaagtacactgcaagtttgtttcacaggtaaattctatgaaatgtttaaagagaattagtaaagtctttctaatactgtttcaaaataaaataaaac

SEQ ID NO: 55375 - DNA, 626 bp, Homo sapiens
  misc_feature 34, 571, 592, 599: n = A,T,C or G
gggtaccgggcccccccctcggggtacttctagnaattaattaacgcggggtggggaagtaccagtgaaaccagatatccagacaaatgaggcactcaacacacattaaacattcctactcataagttgacgctgattttacagacaggacagaaacccaaccgagcagttttcactctggcacttgacctcagcagcgtcaccccatgtcttctaaggtggctctctgagctcccatttccccctgaagtggctctcacgaggtctaatctagcaattcacagctgtcccgggcagggctgagccgggtccctgctcctttcctccacaggctgcacctctccctagattagctcctatatgctgtggtcactagcaccaagcactgaatagtggctagtgagacggagaaatcaaatgtttaattttatctaattttaattcatttaaatacaaactcaaatagctctaaatagtctgaacttaaagatagagggtgagggcagtgccgacgggtgcagcggagttaaccactcttacccagtcagagccaacatcactgacaccctgnggttggagagaggagactcangaagcangtccagagacagggagcaaggaacccc

SEQ ID NO: 55376 - DNA, 448 bp, Homo sapiens
  misc_feature 440: n = A,T,C or G
cgggccccccctcggaagtcttctagaattaattaacgcggggtccctgccttttcattaataatgaataatagctaatcattatactaaacctttattgaacacttgctgtgtgatagacgctgtcagtcactttccctgcattacttcatttcatcctcacaatgaccataggagtcaggtactattattaccccctcctcacagatgaagaattggagaattggaaatgtttaagtaacttacccaaatcccacagctagaaattgacaaagctcgaattcaaacccaagtctgtttgattgcagagccctattcttgatcttcacatttgagaaaatgtagcttaatgaggagcctagcagggttgggatgaaaggggaaccatcatttaatgagcagcaattatgcattattaatgaaaaggcagggggaaaaanaaaaaaaa

SEQ ID NO: 55377 - DNA, 605 bp, Homo sapiens
cccccctcgaaagtacttctagaattaattaacatttaagagttggaaaatggagaccactgaaagactatttttattgtaaatgaaagcaacattcttggttgcaaatgcatatctcttttatacaggaaatgcatcatctctaatatgtacctggtttgaaataattttatttcatattaaattttataacatattagcccacatgtggtaaaatatttaagatattgtttgttgaaataatttacatatgttattagctggtaataaagctagaaaattagagtatccattataggatacaatgcaaagaacattgaaaagactgtacctttcactgctggatctcctcctaatgtccttattgaatatataaaaaaatttaacataacattaggtttttggtattataaaattggccgggcgtggtggctcacgcctgtaatcccagcactttgggaggccgaggcgggtggatcatgaggtcaggagatcgagaccatcctggctaacacagtgaaaccccgtctctactaaaaatacaaaaaattagccgggagcggtggcgggctcctgtagtcccagctacttgagaggctgaggca

SEQ ID NO: 55378 - DNA, 578 bp, Homo sapiens
  misc_feature 27: n = A,T,C or G
cgggccccccctcgaaagtcttctagnattaattaacgcgggccttccatcagtctaatgtgccaaaaggctcaacacaagtaatcctatctgcctatttcttgcttgattcaatgctggaaatgctggaaaatgctggaaaaaaatatgccactctttttgcttgctttaaatccatgacctctatcgcaaatgagccttcagttctacctattaattctaccacatttgactagaatttttaaattttctgctctccaaataaactctccctccaaaacctcctatattccctatgccatgtctacctctgatttttattttattttattttattttattttattttattttattttattttattttattttattttatgtacaaagagctaccatggtttctttcatgaggtggttgccttggacaacccattcaaggaagatcacttagtccaacttaatgaaatctatatcttttgtatactgacggaaacactggcagcacatattgaggccatgtttttggatcacaacaatgcaagtttgagtagatgtgataagagtgagaactctgac

SEQ ID NO: 55379 - DNA, 471 bp, Homo sapiens
ccgggccccccctcggaagtcttctagaattaattaacgcgggggaggaaagagtttatttggcttacaggttatcatgcaggcaattcagtcaggaactcaagtcaggcagaactagaagctggaactgaaataaagacgccaagggaatgtgctttactgatctgttatcctggcttccctagttttctttcctgtttcttttacttatttttttaattgataatagaatttcatactatatattttgatcctggctttattgtcccaagttcctcccagatcttctatcctaatctgtagcatttctttaactctaataagcaggcatctaagaattctcttggtgttcctattcatagcaccaccttcacaataatggtaatgcctcttcccaaataattaaagcttatgtcatgttgacaaaaacaaaacaaaacaaaaaagcccagttaggaaaaaaaaaaaaaa

SEQ ID NO: 55380 - DNA, 592 bp, Homo sapiens
  misc_feature 552: n = A,T,C or G
cccccctcggaagtcttctagaattaattaacgcgggtcccctgcagtttcacagggagctcctccctgcccacaacttgattttggacttcttgcctccagaactgtggggcaattattttacattgcttcaagcctcccagtttatggtacaaactgggaatcttaggaaactaatatagcatgtaagttccagccctagaaaactaatatagcatgtaagttccagtaagtagctgcatcacatctttgataaatgagaagaatgaaccaattcataatcaatttactatcagcattcatccatctatagtgtcacacatccagacttcttatttctctaatgtgacaccccccactttctattacatcatatcttattagaattttactctttatttgcacttgagattttattggcaaaagtcacttcaacggttatctgaaccacacatataacaaaagatttagggggaaagactttatcacactcttcatctctatatctatcatatcatatgaacatatgcttctctaaatcagggagctcanacatttattaatgtgtcccacagaaagaaatatatttgat

SEQ ID NO: 55381 - DNA, 577 bp, Homo sapiens
cccccctcgggggtacttctagaattaattaacgcgggggttcattatttggctcaagataccagaagttcctaaatcatacaccagttctaaaagaaaaaaacaaatattctctaataccccttccaattctaaaaccctcagattctacacactttccaacattcattcagtaactcattcaacacatagttattgtgtctattgtatgctaggttctgagggaataaagaagtaagttcagtcctccaataataagaaattcaacacattattatagataaatgctataataacaacagttaaaagtacatgacaccatggataatgtcaaaagcagggaaaattactgaatttgaagacaattaaaattattgagtctgaggagcagaaagaaaaagaatgaagaaaaatgaacacagcctaagggatctgccagttaacaaatgcattatgaagttacaaaaagaaaagcaagagagagggatgaagaaatgatacatgattaactaatgactgaaaactccaaaacttgaagacgtgaatctacaaatccaaaaagcttaacaaacttcaa

SEQ ID NO: 55382 - DNA, 418 bp, Homo sapiens
  misc_feature 363: n = A,T,C or G
cgggccccccctcggaagtcttctagaattaattaacgcgggctctataatgataaaacatgatctgaagcatattaaaaagctactttactcagtactgagataatgaactgcctcatgtaatacagttagcgtaagataaatgctagtttatcttatacttaattcaattagtcaactgaaaatacaagtcccataattcttatcacacaattatagatttttttcttctatcacgaaaaagatgaagttatgcaactgagcttaagtcacatcacactagaaactgtaatcaccttttctagaagataaattttataaggagaatacaaaatgcatgcaaaatcccaacaaaaataactntaagattttacatattgcattagaaaaagactctgaaaaaatatatatgtactta

SEQ ID NO: 55383 - DNA, 622 bp, Homo sapiens
cccccctcggggtacttctagaattaattaacgcgggactcacagtaaataagagtggactaagagtagaaagtaatgacaaaatcatgtatgtcagacttagaagactattgtttttaatcaagcaccactgatacaaaaaggaaaagtcttaggctatatagaagtaaaaagctatttctacttatagcatataaggttgaaatgctattttcaatcatcaatctatattagtatatagtatgtaaaacagaaatgaaaaaataaaaacacatttacagtaccacttattggacatacactctgtttcagtcatcatactaaacattttacatacattatttgatttagtcctccaacagtattgccaagcaggtcgtatcatcccaattttacagataaaaatacagatgataataataataataatgatgatggcaaaaaataaaatttgaaatgtgcaagaaactatgctaatcatgttttatttagctctcacaacaactgcaaactataacattaactattattattattagtttacaggcaagaaaactgaaggctagagagtaatttgccttactataccaagaaagggtaaagctaggattttagtctagga

SEQ ID NO: 55384 - DNA, 343 bp, Homo sapiens
  misc_feature 15, 50, 133: n = A,T,C or G
cgggccccccctcgnaggtacttctagaattaattaacgccggggtgctngaaaaaaaaaacaactgccagccaagaatactatccaggaaaactatctcttaaaaatgaatgaaaaataaggactttactangaaaaacaaagtgggggaaatgtatcaccactagacatgccttatgaggaatgctaaatggggcccatactacttaaagcaatttacagatccaatgaaatctatattaaaatctatattaaatctaaattaaatctatattaaaatctatattaaaatatattaaaatctatattaaaaatggcattttttacataaaaaaaaaaaaaa

SEQ ID NO: 55385 - DNA, 575 bp, Homo sapiens
ccgggccccccctcggaagtcttctagaattaattaacgcgggggagagagaagggggaagaaaagaacaaacccataaaaagaaaacacacattcattttctcactctttcttgatcaggagcattcatgagatgaaggtgaggatactgactacaacataaaatggcaggactccaagtatacctctggtccactatagacagaatagacactctgacctttaggttcacacaggccaaacactcctactttgcaaactattagttaatgttttacttcaagactgcattatttcagcaattgatcacaacatgcaggacaggcaatactggcctaccagccacttctgaatctgtccccacttccgatcaaaggaatgaagagagtactagaaatgcaaaaatttcataaaccaaatagtttctaacatattgcattctccaaaaaccttaaattaatcatacacattttccctaaaaaacaatgatagctgactcaaagttacacattcaaaatacagaaaattagtaagctaaatatgttcaatagtaagagatgcatgtttccctgtag

SEQ ID NO: 55386 - DNA, 543 bp, Homo sapiens
  misc_feature 17: n = A,T,C or G
ccgggccccccctcggnagtcttctagaattaattaacgcgggctttaacatctgattatatttgatttattatttgagtgttgttggaccatgtgtgatcagactgctatctgaataaaataagatttgtcaaaaaaaaaaaaaaaaaaaaaaaaaaaaaaaaaaaaaaaaaaaaaaaaaaaaaaaaaaaaaaaaaaaaaaagacaaaaccaaaaaaggaacacaaaaaaaaaccaaaaaaaaaaaaaaaaaaaaacccccccccgccccccccgggggggggcccaaactgccccaaccgggggcgttcccccccccccccccgggccgcccttcccccccgggggggggggaaaaaccccggggagcccccctccaatccccctgcccaacatcccctttttcaggagggggaaaaaaaaaaaaagcccccaccattccccccccccccacgttgccccccccctaggggagacggaaatttaaccccctaaccttttgcgaaaaaaccccttaaaaatcaaaaaaaaaccccctttttt

SEQ ID NO: 55387 - DNA, 565 bp, Homo sapiens
gccccccctcggggtacttctagaattaattaacgcggggactgacatattcaaggatgcatagtagtcttaatgtgagctattttcacttccgagcacacaaatcttatgtgtttatctatgtatatattatttttacacatatataagcttagttaaaattacatatcattttgaaaatacttctattattttgctactttacaaataaacattttaacccaagtactctgaatttgaaaatactataggaatgacaaatgaaataaccacgattggcaatagtgttttatatagactttaaagaatcagattaactttagtttttcaaccagttattcaagaatgcacttctaaccatattaaaaagcaagatgtgatcatgtcactcaagaatggcatgctttttcagcatggctgcctttttttgacctcaactaggtttggttgtatctttattttttccccattacttatatttcacctttaaagatgattctgatattgaactcagaagaagtgtttttgtttgtttcactttttaaaaatcatattgatcccatct

SEQ ID NO: 55388 - DNA, 500 bp, Homo sapiens
gggccccccctcggggtacttctagaattaattaacgcggggagttacagcatctgtacatagctcaatattaaaatattaaaattaaaatactgtaacttagcaagctaatagataaaaagagaaaatgcgtataattatctctttatagctagaagaaatttgatgaaattcattctctattcttgttaagaactcttaatgcactgcaatgtatttacataaaatatcctgaaaataaaaacataattattatttcatatttttaaaagaactgcatctagaacttctagaaccgttccttttcatttcggagcaagaggaatatgttcattatgacattgttttttaatgaagtctaaagtaataaattagagaaggaaataaagggtataaagttacaaaagagaagggaaaataaatatttgcagtttaatatagttatatcaattacaaactcaagtggatgatctgaaactctcataaaaaaaaaaaaaaaa

SEQ ID NO: 55389 - DNA, 265 bp, Homo sapiens
cggggcccccccttcggggtacttctagaattaattaacgcgggttctctggtatataatgctgctttccttgttctctggcaaaatttcctaaagtcagcatggaatctgaatatatgttcaaggaagattaatcaatttcatggtcaaataagtttggaaagcactgggttaaagaaagttaaataggttttatttttaggtagcacatgttagactttaatatgctactacacagtatgtatctccaaaaaaaaaaaaaaaa

SEQ ID NO: 55390 - DNA, 508 bp, Homo sapiens
  misc_feature 12: n = A,T,C or G
cgggcccccccntcggaatacttctagaattaattaacgcgggggcccttcaaatttaatcaaaatatggggcactttgagcataaaataagtagcaaaaggagtgaattatcactcactgaataaaatactctattatcttctaatgatacaaaattcaagatgaataaaatctagaggagaggaaaatgctctccttataagggaataccaaataaaatataaagacatggtagaactagaaaattagcacttgcagccattatagtattatagtagtaattgatttaggtaagaaggttcaatgtttcctacaaccagtttgtaaaattttaataagaaataggtgttttaatattcctaatatatctccccacatatcattgattaattatataaggaaaattttaatgaataaacctgtagaatcctactttattgatgtaatgaaagttaacctgaccaaaattgggaaaaattgacctcaatttcctaaaaaaaaaaaaaa

SEQ ID NO: 55391 - DNA, 590 bp, Homo sapiens
  misc_feature 561: n = A,T,C or G
ccgggccccccctcggaagtcttctagaattaattaacgcgggcactcataagtaatttttatacttaaatatgtgttctgttagatggttttctagaattgctgtattatagggcatgcaaattttaaaattgtgatcaatatggccaattgtcttgtgaaaagatggtattcacagtctatgagagtgcacttacatttaaacaatagaaacctgagcatataaatttgcttaaacttaatgattttcaaatagttccagttttacagtaaaattaatttcaaatggaattatttaaattctttacttatcatctaattaaatttaaattattgaattagcatctaatttacagaaagaaatcaaaactgaactacaactattgtacagataagctcatccaagaagtaaagatcttctttgctgaaagctagaaacaactgaatttttcagtaatcattcctcatgtatagaataagaagggtcatgtcatacttcttttcaaaactgaatcaagttaaaaaactaaatcaaatatttaaaagaaaaccgcccaccanaaaaggaaattcccttccctcatttgaaa

SEQ ID NO: 55392 - DNA, 557 bp, Homo sapiens
cgggcccccccctcggaagtcttctagaattaattaacgcgggagaatctttccctgaacattaatgctataaagtttctcagatataaaaattcctttggtcccaatcagttactagcatcacacagctacctgagtgaaaaaaatatgttaactggctttgtgatacctaacccttggcaaaagaacagcaaaacactagaaaataaaaagcagcccttttgttctttacagagccttcatattctatatagtaagcatccagctttttttttctaataataaatataacatgctcattggagaaattttgaaaaataaaaaagtactgaaagaggttaaatcacaaaattttgttacctagacataaccactgtaaatattcgggtatatttctccacatcattttttttttctatgcatctataaatacatgaaaagaaaaagaagggtcaggcacagtggctcacatctgtaatcccagcacttcgggaggctgaggcagatggatcacttgaagtcaggagtgcaagaccagcctggccaaaatggtaaaa

SEQ ID NO: 55393 - DNA, 540 bp, Homo sapiens
ccccccctcgaaagtcttctagaattaattaacgcgggggagggggagtgggactcagcgtccgcacaggtgaccgagaagccgaatgatgatgtcccggatgcctatgctggtcggagtcggacaggagccgtcaagtagggaagctgagcgcggggctgccagatccactgttcctactatatatgataacgggtcaccctctgtgaggtaaaatatttaagatattggttgttgaaataattgacatatgtcattagctggtaataaagctagaaaaccagaggatccattatatgctccaatgcaaagaacatttaaaagactgtacctttcactgctggatctcctcctaatgtgcttatagcatgtataaacaaatttaacataacattaagtttttggtattataaaattggccggacgtggtggctaacgcctgcaatcccagctctttgagaggccgaggccgctggatcatgatgtcaagagatcgagaccattctggctaacacagtgaatccctgtctctactaaaaa

SEQ ID NO: 55394 - DNA, 600 bp, Homo sapiens
  misc_feature 540: n = A,T,C or G
cccccctcgagagtcttctagaattaattaacgcgggtactctcgagttgcccatggaagcaaactattcctaataaatatactaatacagaatttaaaagagaaagtaatccacttgaaacaccagtgattctgcaaatgcagggttagagtaaattaaatactttttaaaataaggtcagttacatatactttttgggcatttacatatactttttagtacttaatgaaagaaattagtggaaattgatctgaatctttaatttgttcaaaatgtcttttatctagcaaaaaaatcccaacttatgattttttattttttgacaaatactgctagctatttttccttatgcatatgaaaatatgcatgtgtgtgtcatgtgtgtatatatatatatatatatagtagcaaagtgtttattaaatgtgcattatttgcctacttatagtctttgtattatttcatcatcataaaagttacaggctttaaaagagggccacaatccaataagctatcaattgaaatatactagaattcanagtatgcaaagtcttgtcaatagaattactcatacaaaactcttctttacctataacatg

SEQ ID NO: 55395 - DNA, 593 bp, Homo sapiens
  misc_feature 566: n = A,T,C or G
cgggccccccctcgaaagtcttctagaattaattaacgcgggacttaccagaatagagaaggcaaaaacagaactatgcatatgcagctacctgatttaaatgcagtacactggaaagttgggtattttcaataaccatcactattcacaaaatttaattccaaatggagtgtaaaagtaaacagcaaaagtaaaacaataaggcttttaaaagaaaacataaggaatgtcttataaggttgaggtgatcataaatttcttaaatagtaaataataaccctaactataaagaaaaatttataaactgggttacattaaaattgaaaatccatttgtcaaaagaagttcttagaaaaaagaaaagccacaaagtgagagaaaatattttcaaaatatatagttaacaaatggttcctattctgaatatatatataaacttttacaaatcaatttaaaatgtaaccaacccaatagtaaatgtttaaaatgcttgaaaagacacttcatgataaagtaaaataattgaataataagtaaatgaaaagttgcttaacactattagtctntaagaaaataaaattaaaatcacaatg

SEQ ID NO: 55396 - DNA, 601 bp, Homo sapiens
  misc_feature 25: n = A,T,C or G
ggccccccctcgaaagtcttctagnaattaattaacgcgggcagttgtgtcaactatcagaatttgcacaagcaaaagtaatttgccatctccagtaaaatggaaagagcctaaaagtatgtcatcaggtacacctgggttcacatctctctcctacttctgactagccatgaaatgttaagtaaattattgaagtgctctaagcctcaatttccccacctctcaagtaaaaataataatacctccctcagacaaccattcaaaagatgtttagtgtgatttgcaaggataaacaattccaaacacatatcagagcactacgtaaagacagagaagttactaatttccccagcaatccctatggttgctaccatgcctctttccaactattttatcaatattttaaataaacaacttaaaaattgtattaaaatgccagttaagataagaaaattaccaactgacttacctatcttgggacaaagggtgcttgccatgctgatacacaggctatttgcccctggttttaaaatgcttttcagagatatgaccctattagatatctaatttgtcagagctgtaactatgtgtaagcatatat

SEQ ID NO: 55397 - DNA, 585 bp, Homo sapiens
  misc_feature 27, 89: n = A,T,C or G
cgggccccccctcggaagtcttctagnattaattaacgcgggtgtacacacatacctattctatgtctataaaagtacatttgtaactngaaaaccactcacaaaacaataccttcttttatatgtgaaaagcattctgatatgttctagtgtattttcagactatgtataatactagaacagtggttttgagtactcattatggagcaaaaccagctgggatcatatgtgcatgcagatacttgacaatcgttgtaggaacttggaaaagcaacttaacctataaaaacaattatacctcaaaaggttgtcatgaagattaaataaatattatgtgaaaatcactgacataaaaagtacccaacaaatgttggctcttactctgttaggacctcagcacagggcctagatggagcagctttacaatgactgacacataaaagcaccacaaaaaggtttgctgtttgtgatgctgtgtacttattatgtctactaagtgtagggcaatgtgataggatgtataaacaaaagaaattggataatatttacatagatgagcaaaaggaatgggacatcacacaacat

SEQ ID NO: 55398 - DNA, 610 bp, Homo sapiens
cgggccccccctcggaagtcttctagaattaattaacgcgggaaagagggattaggtaaccagtgaggtcccttctactgccagtgtatgactctcttctttgtaaatgtcatatgtagggttctgtacacaggacattttcttcattgtagttcctcagatgcattgagctctcctgaatgacttagcggggaagctcagttgcagctgaccgtattaagggtcctctcccattgtgctgtgccgctcgttagcgtagcatctgccccacgccctcctgtttctgaggctggctttggcccgtaggatgtaggcagctgtggtatgtgaaaagatttgaaggggcaagtgcatacctctccttttttggcttctctgccctggccatgagaaaatgaccaggatggatcacctgggtcctgaaaacctgggagcttagtaaatgtttattatatggcacatcgattttgtagctgtttgagacccactgtaattgacccaggagcctatcagttaggtctgcacagctgaccaggtaactttcttccagccactatctactgtggaccaagataaggtgttgaagggatggtgggggtccaggtgtgtt

SEQ ID NO: 55399 - DNA, 284 bp, Homo sapiens
  misc_feature 28: n = A,T,C or G
cggggccccccctcggggtacttctagnattaattaacgcgggcttcatgtaaaaaaaaaaaaaaaaaaaaaaaaaaaaaaaaaaaaaaaaaaaaaaaaaaaaaaaaaaaaaaaaccaaaaaaaaaaaaaaaaaacaacaaaaaaaaaaaaaaaaaaacacatcaactcactcaaccttttctttactacaaccttgtctgggaaaaaccataaaaaaacccggcccccccccggggggggtccctcctccccccctttggcgggggttttaaccccccctccc

SEQ ID NO: 55400 - DNA, 459 bp, Homo sapiens
  misc_feature 37: n = A,T,C or G
ctggggtaccgggcccccccctcggaatacttctagnattaattaacgcgggatccaatggtctctctcctgagtgcactgacttacttgcagaggtaggaataaacacaaaagaagaagaaaaaagcaagtcaaaggacataaatatggctccctgtgacttctcttatggaggtgtgccctacttcacagtcttttatacacagacagaagatagtcaccattttggactttctctttgttctgcttttttggtttttttactttttcttactttcttacttctttgtactgactcatacgtctccacattacaaatgtaataaattaactagatgcaacaagaaacagactaaacaaggctgaaagcaaattaatggcatggaagaaagtatgatctgaagccaggtgtggtggcttaggcctgtaatccctgagtaatctcaaaaaaaaaaaaaa

SEQ ID NO: 55401 - DNA, 223 bp, Homo sapiens
acttctagaattaattaacgcgggggggggttaaaaaaaaaaaaaaaaaaattaaaaaaaaaaaaaaaaaaaaaaaaaaaaaaaaaaaaaaaaaaaaaaaaaaaaaaaaaaaaaaaaaaaaaaaaaaaaaaaaaaaaaaaaaaaaaaaaaaaaaaaaaaaaaagggggccccccccgggggggaccccaatttcccctttaagggatttttttacccccccct

SEQ ID NO: 55402 - DNA, 516 bp, Homo sapiens
attaattaacgcggggtggcatacggcacttggacaagacatgagatttcagagaaaacttaagagacatctcacattaaaaatggcttgaccaagtatttattttcaggtacagggggtcaatttaaatatctaaaacttaaagattccactccctaaaaggccaagtgtataaatttaaattcagaagttccctatcctaggaaaacatatcagaaactatgaacataaatgaaaggcaaaggacctataaaagatcctcaatacatatccatcacatggatgaataaaagcgaatttcaagagacaaaaaagacaagctttagggaatgacaataggaatatgaaggaaaaaaaaggagttacgactataactgagatagggtaaatcagaggtcaaaaaagttggtttcaaaggagtaagcactgccaacagggaagatcaaggaaacagagaattgagaaaaagactattaggacagtatattttccttcataagttttgttgagcagtat

SEQ ID NO: 55403 - DNA, 452 bp, Homo sapiens
  misc_feature 31: n = A,T,C or G
taccgggcccccccctcggggtacttctagnattaattaacgcgggcagtatgacctttgcacttgccattccttcttccctcatatattcacatggcttcatctcactgacttctggtcttccttggccatcctacctaaaattacgtctaccagtctgctctgttttatttttctcctgcttagcacttaccactctctaacaaaatatgtattttacttattctccttgtttctgccttcctcactaaaatgtaagcaccagggattattttctaatttctccaacaaacatatccccagtggctaagacagtatcctgtacacagttggttctcaacgaatactttttgagtgaatgagtgaatagagaatgtttactaaatgtggaatgaatccatgaatatatcatttactacactgtaaggagtctgggcccctttgagactgat

SEQ ID NO: 55404 - DNA, 530 bp, Homo sapiens
ccgggccccccctcggggtacttctagaattaattaacgcggggtattaaactttgagccactttgagccactatacagccctcagctgtgtagatgatagatacaaatagatagatataattacagtacatattttaaaacaattactttattccaaatccaaataaagttttctccattatttatattctaaaatttaaattgctattaagttgttaaacaaattacttatttaaaaaatacataccgttcccttacaaaatctgctagttcttttgttgatatctgtccatgtttcatattatggtagaggacatcaaagccactatttttttccccctaaaatttaaaaagatttttagtttcataaaaaaacagataaaaatgacttgagaatataaaaagccaacattaactaatatgcaatcctgtgctcaggtgaggtgttttcataaatttttctcatttattggatgattttaaacagtataaagcaatattatatgctttaataaagtttacaattaac

SEQ ID NO: 55405 - DNA, 590 bp, Homo sapiens
  misc_feature 582: n = A,T,C or G
gccccccctcgaaatacttctagaattaattaacgcgggtcttaggatcacaaactaataataagagttttttcttacccatttatactatctgtagcttcatgtattaaccatacacaattatctgtttttctttaattatcaaatattttaaacaatcctgatttttatactaaattataaacctaaattcttatactagattataattgttttactcatttattcagtaaatattaattgagcaggtacaatgtgcaagaccttttttaaggatgaggacaaagacatatataaggaagacatgttccaatgccttcatgaatcttccagcctcatatgtttaacaaacactgactgactgaatggcttactaatgaaaatgggcctgcccatcattctccttcaaatttctatttctagtgtttgcttgaaatccacaaaaaagcggtttttagaactgttcataaactaaagatatgaatttaaataaagaactaatgaagtcacctctaaataaatcaatcagtaaggattcttttgattgcaagtgataggaaactcaacaaagttggatgacanaaaaaaaa

SEQ ID NO: 55406 - DNA, 594 bp, Homo sapiens
  misc_feature 28, 553: n = A,T,C or G
cgggcccccccctcggaagtcttctagnaattaattaacgcgggtcagtcaaaaagaagtcgcaatactattaattcattcgttcattcatctcagaaaaacttattctgaccctaatgtgaaggttatgcggcttattaagcattgggagagatataaacgtgtataaatcaggagaacccctaattggaattctgcccccaagaattttcaaattgatttgcaaatcactgtaataccatatgcaaaatgtagagtatcctaagagtctatgaattaccacaagaattcagagaaggggcaagcttcatggaaggctgtctcagctaggtttgaaggttaaacagaattttgacgctcagtaatgatggaagaagaggacattccaagtggaggaaacagaaaaggcacttgtaaattgtgtaaacacagtctatttttccatgtgttcgtctattcaatgaatgcttattaaataccttttatgtgtcagaaattacgatatgcctggaacatctaataataaatagggcacagtcaaaccttgccctgngggtatttaccttctagtggtggggacagacattaaataaa

SEQ ID NO: 55407 - DNA, 545 bp, Homo sapiens
  misc_feature 513, 525: n = A,T,C or G
gccccccctcgaaagtcttctagaattaattaacgcgggcgttaaagagacttaaaaaatataaagtattgccactcttctcacttaattttttgtttttataaaatagatttttcataaaaagtatgtaatttatgttaatatacaataagtttattttaaataataattttttaactttctaatacaacaaatactggtaaatataacccacataaacaaagctttttgggtgtcctcaataatttttaagaatttccaggagtcctgtgacaaaaaaaatttaagaactatttttaaagggcatagaagaaaaggctcagagttgtgaatgggtgggagatagcatcagaaaagagaggtgcagagtcctacagtaatgaaggtttagcgaattaaggataaaccgagacctcggttggtgactgacaaacacagaagtgaagagtacaattgaatttgagttaatgatcttgaaataaagaacagtggagaggttaagaggttacgtangaagaggcctgntggaaatgtcttgaagtgtg

SEQ ID NO: 55408 - DNA, 608 bp, Homo sapiens
  misc_feature 28, 503, 538: n = A,T,C or G
cgggcccccccctcggaagtcttctagnattaattaacgcggggatttctcagcctttataatcatatgagccaactcttcctaataaatcttatctctccccgtgctgcccactgactctgtttctctggagaatcctgactaatacaaaccctaaaattctgctatctaatcatagcattataaatataacattatacattgcatttcatatatcattataatttattataatttacatttgcatttatatatgcctttggccatctcaaactggctctaaaaataaggaaatgcttgtctgtcacaacaaatgtctatagctggggtggctgcaggtgagttacaatcaagaacaaagtcatcaaagaaccaggttatttcctttctttcctttatcttcctcagtgttttctctttgtcctcagattgtttgtcttccttcattgttgcaagaggtctgaagaagctcgtgaatttagatctagactcattatacctgnggaaagtgagagagagggggaaaagcacaactctntagtgtctccttatcaagagctagaaaaatcatgtttggaatcccatccaaaagactgctgctctcatat

SEQ ID NO: 55409 - DNA, 514 bp, Homo sapiens
cgggcccccccctcggaatacttctagaattaattaacgcgggtatcagaaaaaataacaatcaaaagcctgaaatagatgagaaaaaagaatagaaaacagaaaagaagatgtgagagaattaacagagttaatctgtttttaatggctaaaaaacttgagcagtctctaaaaaatactgatttttttatagagggaggaataaacaatatcagaaatgaaaagtaataaaagataatataaacaataaactatgaaaatatggtaaaaagaacattcttagaaatgtgtgaattattaaaagtgacttaagtcagtattactatcagtctgttaagaagagattggagaaatagaaaattagaataatcctaataatgttttttaaaaaaataagttagctgttgaagattttccaaagcaaatatcatacctagagcattttaccagcaagttctatgaaccttcaaggaatcaataacctcgatatattactacaatttctatggaacag

SEQ ID NO: 55410 - DNA, 604 bp, Homo sapiens
  misc_feature 539: n = A,T,C or G
cccccctcgaaagtcttctagaattaattaacgcgggacatgggagagtgaagaatccttacagcaacagaaagtgaagggcctaaaaaaactagagaacttcaagaaaaaagaggacgaaatcaaacaatggtatattttccatcatggattaaagaaatgtatttgcagcctgaaagaagggaaggttttaaaataatgcatggagatcacagctatctagaatctcagattttgctttgatcatctaaacatggagccatttacaattctattttataagattgtgaccttcagatactatatttttatatgtggctaccaagtttttggagttaactagcttatggagcgttattcacacattctttagttttcacaataagtgcatgagatttgtactgttattacccattttgtagatggggagaatacggcacacagcaattctgcaagtggactcaggttttgaattctgatgccctgaatccagagcttattctcttaagcaccttgttattttcctgtagttaggctgnggtggcttagatgtagagagttaatattctggaactctctgggttatgatatacttaaaacaaat

SEQ ID NO: 55411 - DNA, 597 bp, Homo sapiens
  misc_feature 28: n = A,T,C or G
cgggcccccccctcggaatacttctagnattaattaacgcgggactacaccaaaattcaagtagtttctaaaatgttagtattaaagggtaccctaaagtaatattaataaattttcatattatacataactaattgatatatctcacatattggatggatcttttagccatgcataattatatacattataattgatcatttaaaagatattggttcactgagttatataaatcctgtaaaatttgataaatgttattatataatatcaagctcacaatgactgataaaagctttccaaaattctaattttctcttaaacgttcaaattttgtcataacaataaagactattagctgtttttcttgaagtagcagcctaacgtcatttattttcagaaaaatatgtgccaaataaccaatgtcaacacagtgaacaaggcacatatcatcttactattagtacaaaaataatttgaatttgtggagcccctaaaacggacttaagaatcccccaaaatctgttgaacacttatgataactattgcattaggctgctatgggaatacagagctgatacatccacccccaacttggat

SEQ ID NO: 55412 - DNA, 221 bp, Homo sapiens
cccccctcgagagtcttctagaattaattaacgcgggaggtcattgaaattctctctggcacatgcaacttatttctaacttttataaaaagtagcataatgaaaagattattgcaattaaaagcagcagttggaatcctaggtctatccccaaatagctgtgtgactttgggtaagttgctatccctcgctgatcctcagttctcaatttgatgaagtga

SEQ ID NO: 55413 - DNA, 587 bp, Homo sapiens
ccccccctcgaaagtcttctagaattaattaacgcgggtggcccatagaagaattctaacttaagttggaaaatatttagaattgaacagtagaatgctctgtatcaaaacttacgaaggaaaagagaagcacaaataaacaatactaggaaaaggggggcaaaatgacactgtaacaaagatgttaaaactaggaagaaggtggtctgaactactttatggcaatacaattgaaaactcagagaaaatggacaattttcattgaaaagactataacgtattaaaactcaggaagaaagagaaagtccaacagacctataatcattaaaaatttgaatcaatagtacaaaatctatctgcaaaacaaaataaaatagaagaaaacaaaacttcacccaggctaaggtgattaaaaagtaaattctaccaatgacataagttaacagataactgtactataaactgttctagagccaaaatgggtaaggggaaaatatgggtcctctgtttattttataaggctaaaatgacctaaacctaaaaatcagacaagaacaatttaaggaaaaaaaatatactccagtctg

SEQ ID NO: 55414 - DNA, 598 bp, Homo sapiens
  misc_feature 531, 584: n = A,T,C or G
cggggccccccctcggaagtcttctagaattaattaacgcggggggattacaggtgtgagccaccatgcctggccagaagctttaaattttgatggaaagtgtttattctttattttaaaaaccagtgcaagaactaacagttgcacaatgaatttaaaagggaaagaagccatgatactttatacgtagaaacttatacttgagttagagagattcaaaactaaagcccatgataaatttttcagaaaaagaagtgcttaacttgtacactgaaaactttaaaacattacggaaagaaactaatgaagacctaaataaatgggaagacatccatgtttatggattgtaagataatattattaagatagcagtactcaccaaattgagccacagattcaatctttgtcaaaatcccagttggttttttaaaagaaattgatcctaaaattcacatggaaatgtaagaaaaccacagcagccaaagcaatgttgaaaaacaaaagttggaggataaagtagattagtggttntaagggtctagaaggaaggagaaatggggagtgactgctaatgggtataaatntatttttggaatga

SEQ ID NO: 55415 - DNA, 612 bp, Homo sapiens
cgggcccccccctcggaatacttctagaattaattaagcgggacagaatgaaggctagacttctttgaatgaaccttgttttgtagatttataagcttaattttggaactatataaatgtttatataattattttttgaattaaatcaaaatttgaaaagcaatacctaaaaatcaaaagtaaaattaaacaaattaacttaattatataggaagttgatggcttaactacatagatgaattatttcaagtgatattaaacatagtaattagactgtgtgggataaagcctaaggattaaaggaaatgcaagaaatcataaactgtttctagtagtcatattgttagaaataatattcatggtggtgttctgaaacttataattataggataaggcagttgagttattataaaagtctttaagaaacaaatttttcatcataaaagagaagaaactcaaattgaataaacttgtagttctaaattggaattggaaataagagtttatgaactcaagatgtattttactcgttaagaacgtgtattctctagttcagtcttttcagtaaacagtaaaaacaagaccagtattcagttgcaatgaggtctccta

SEQ ID NO: 55416 - DNA, 457 bp, Homo sapiens
  misc_feature 23, 36: n = A,T,C or G
tgggtaccgggcccccccctcgngggtacttctagnattaattaacgcgggactggcagcaaacatatggctctctcagaagagaaaatagttatatacatatatatttacttcatatttattgtgcatgaataaatgtcaaattacagctaaatatcaacaagttcaactaattaatgttctatataaatggcaagctagaattataaatcaaaaatagtactgggaaaatgagaaagaattttttgaagttataacactaagttatttttctgaatacttattatataagtattaaacctgttctaaaactacctatttctggccgggcgcagtggctcacacctgtaatcccagcactttgggaggctgaggtgggtggatcatgaggtcaggagttcgagactagcctggccaacatgatgaaaccccgtctctactaaaaaaaaaaaaaaaa

SEQ ID NO: 55417 - DNA, 602 bp, Homo sapiens
  misc_feature 557: n = A,T,C or G
cccctcgagagtacttctagaattaattaacgcggggggcttgtcgcccgcaccacttcctgcctctggcactggtgggaggggcgggtctcgcctctgccccctcaggccaggggtctggatgcacatagcgttcccctagcctctttccccggggagaatgtaggatacaggcccagcctcctggcctttctccatcagggactcagttgtctgggcccccccgtcactttatctgctagggtcccagaagtccagggtccccagctctgtcctccctcaggggccgtgagtctccacagtctcctgatcccctagaacccaagagtccaggtacctcttcccttcctttctcctctagggcccaccagctctgagcagatcatgaagacaggggcccttttgcttcaggggtgagtttgaggtctgattattgtggcacagatttgaggagtgacaccccgttctgattctgcaccctcactccatccccactctagtttcatccaggatcgagcagggcgaatggggggggaggcacccgagctggccctggnacccgtgcctcaggaagcgtccaccaagaagctgagcgagtgtct

SEQ ID NO: 55418 - DNA, 395 bp, Homo sapiens
  misc_feature 28, 44: n = A,T,C or G
cgggcccccccctcgaaatacttctagnattaattaacgcgggnagggggaaataaatacacatgatatacacaaagatagaatcattcatatcctctaactccttaagagttattgagtgccatacattcctccttcatggtctgccttcagtgttaaaaaaaagtttataacttgtaaattgataatcatagttttatgtttttatggggtcaaagtgatgttataacttatgaatacaatgtggaaataattaattcaagctaattaacatttccgtcacctcaaatactttttttgtagtaaaaacaagtttttttcttagcaattttgaaatatatgttattttctatattcaccatgctgtgcaatatatctaaaaaaaaaaaaaaaag

SEQ ID NO: 55419 - DNA, 615 bp, Homo sapiens
  misc_feature 38: n = A,T,C or G
cgggccccccctcgaaagtcttctagaattaattaacngcgggaggtactcatgaaccgtaacatgagattattgaatgtttggaatctactttccatttctataagatggcacatgcccaacagacacagccttcagcatttttccattttaccatgcctggcaccaagcatctgacctgctgcgttccatatggaacaggattctgagagcagaccaggtggtacggtggtgggcctccctctttggaattggatgttagcactgtctgtcattctagggactgagaagtcaacctgggaatgataagaagctagggaaaacttttctcctccgtatgggagaccttgatctctcggcgggtggcttagctgtatccttggcttgtggaggtctcctgggaagcaggtaagtccccgaggataagctcaggacagtaggctctggaagtggcaattcctggagcagatgtgagttatcctttccaactcccaagtcttcaataaactcattagaagagaaaaagtagaaacggcaagcataaatgtttaatcatctaggtttatatcctttcactgactagctgtgtgctgcttctcagctcatttaacttct

SEQ ID NO: 55420 - DNA, 582 bp, Homo sapiens
  misc_feature 28: n = A,T,C or G
ccgggccccccctcggaagtcttctagnaattaattaacgcgggtagctaaacaggaaatcagaaatcataaatgaaatcatgacatatttcttacattccacaaaatttattttaaaatatggcacaatttatttgctttatatttttaccatgttcattatttacatttttataaaacatttctaattgcttttcttttagtcttgctaggaaaacaaatatatatttttgacacataattatttttgcttattctatcaatttaaattaatatttttttgaaaacatttttttttcagcagcacactaacttcctgtactgagctagtagtttgtcatgagatttactttcattatacctttcagctaattctaatgcaccttgtacctcattttatttttgttgctcactctttaaaacttattttcttatgtcatctagaaatttcctgacaatagtgtatggtaaaatcgctataaaagttcgtttttggttgttcacatatattctgataacttacttgtgtatagaactctagatctaaaccaatttattcttagaacttggaaggagttcttg

SEQ ID NO: 55421 - DNA, 586 bp, Homo sapiens
  misc_feature 39, 530: n = A,T,C or G
cccccctcgaaatacttctagaattaattaacgcggggnagtctacaggagtaactagtaacttttatcccaggtgtatgggtaccaactcacctaaatatgcaaatgtattaatatcatttgtgtttgatatgttaatattttaaaactgtctttttaaagttatgccaaaattaaatttgcaatggtatttgtgcgtgattcatgaatctttcagggagacaatataacttatagatagatgttcttatttttgaaatctctgtgacatctcttacttcaataatatttttcaatcaagtctattttgaattaaattgtattacaaaattgacatcatggcttcatataggattattattgatatactccaggatggtatagaatattatatcttttaagttgtcacttgaaagcaagaaaaaatatctttatctctgtaaatagaaaaggaatttactagagaatatttaagtagtttacagaattgttgaactttctagagaatgagtttaaggctaacctttcangaaacatgtcataaacaccactgtagatatagcgtaatgaaaataccactgccctc

SEQ ID NO: 55422 - DNA, 390 bp, Homo sapiens
cgggccccccctcgaaagtcttctagaattaattaacgcggggataaccaagtagccattttcctcttaaggtttcctctacaaccccaaggactttcatgattatcctcagggacaggattggaggcattgagcgtgtttattaacaaattgtttttggtaataaaataaatgcttggactcttaaaaaaaaaaaaaaaaaaaaaaaaaaaaaaaaaaaaaaaaaaaaaaaaaaaaaaacaagaaaaaacaaaaaaaaaaaactataaaaaagtgggggacgccccccggggggccctcaatttcccctttaagggactggaataaccccccctcaacgcccttaatttaaaaaaaccttattgggaaaacccctgctgtccccaaact

SEQ ID NO: 55423 - DNA, 591 bp, Homo sapiens
cccccctcgagagtcttctagaattaattaacgcgggggcattttcgattccactctcttccgtttctgtcgctgcagtcgtccgcggtgaaacccccgcccctgaagaatgggtaagacgttttcccagctgggctcttggcgggaggatgagaacaagtcaatcctgtcctccaaaccagccattggcagcaaggctgtcaactactccagcaccggtagcagcaagtctttttgttcctgtgtgccttgtgaaggaactgctgatgccagcttcgtgacttgtcccacctgccagggcagtggcaagattccccaagagctggagaagcagttggtggctctcattccctatggggaccagaggctgaagcccaagcacacgtaagccccccttcctcccctagcttcacaagccattgcccctgggggctgctccctttgtctcccctgttttgatctcccttaatttcttcctattagttcttccatagaaagcctgagcctcagaggtaccagctccttacgtccaaggattttttcctgatttagaagctcctggaccgggtgtggtggctcatgcctgtaatc

SEQ ID NO: 55424 - DNA, 530 bp, Homo sapiens
cgggcccccccctcgggggtacttctagaattaattaacgcgggtccaccacacccagataatttttttttttaagtaaggacaaaatctcactatgttgtccaggttccaaataaattttaagagcctaattttaactattcaaaaactaagcaaatacctgaaaattatttcttctgaaaaacacatactaaataaaaatctattatacttatggattttcagaggtcttcataaatattaactcataacttcttgtggctttcccaattgtcacatgtctcctttcatgaaatattttgtaaatttttactatggtattggacagagcatgaacctcagaattgcccaaatctgagttcaccgacttaatcaagcacatattattaatatataatcttggataatttatcaatttaaactgaagagctttatcttcaacatttctaaattatgcgtgttataaacaataaatcaggttattccattacatttaataactagcaacccacactgtgataagtgtcagt

SEQ ID NO: 55425 - DNA, 632 bp, Homo sapiens
gccccccctcgagagtcttctagaattaattaacgcgggtggcttcaaacttaatccactactctgtatagagaaacgtgcaacttttgaagaacttggctaattccgtgggagcttatgttatgctggcttatgtaattgatctggcatgaaagacaaaaatacggatggctcagcactctacagatctgtgggcattgaattctcctggataattgcatgagcaaaggggaaaagacatgcttcctttttactctctattcatcttgttaaatcttttttttaaaaaaggaataaaagaataccagactttcaacaaatagaactaaagatattattaacagatagcatgtttcaagtttactttttaaaatgagcatataaattcagataaacagattattaaatcactgtattttaaaaatttacattaaatttaaattaaattaactaattaagcatatttacctcttggaaaaaatatactgaacatacacacacatacacatacacacacagagagatgaatatacctggaagttattccattatgtcttccctgacctttgcatttaattctagttgacatctaaaaggaatgtatatgctcctaaaaaaaaaaaaaaaaagcg

SEQ ID NO: 55426 - DNA, 565 bp, Homo sapiens
  misc_feature 543: n = A,T,C or G
ccgggccccccctcggaagtcttctagaattaattaacgcgggggggaagactcaaataaataaaatcagaaatgaaaaagaagatgtcacaatagataccataggaccaaaaaggatcattagagactccagtgaacaactatacacagttttgagcttaataaataaataaagcaagcaagcaagctgaagatctgactgctaaagttgaaaacatactacaaagcagtagtaagcaaaatggcacagtactggcattaaaacagacacatagaccaacgaaatggaatagagaatacagaaatagattcacatatttacagtgaattaacttttaacaaatgttcaagaacactcagtggggaaaggacactctcttcaataaatgctgctgggaaaattggatatccatatgcgaaataacaagactagaccttcacctctcaccctatacaaatacaataaatataaaatcaattaaaatgtataaaaaacctaaatgcaagatgtaaactaacactactagaggaaacatagagaanacacttcaggacatttgtctgg

SEQ ID NO: 55427 - DNA, 498 bp, Homo sapiens
cggggccccccctcggaatacttctagaattaattaacgcgggggtgcagtgagtgaagcactcatctctggtgctaaatttaagtggtcaccaaaacactcaggaatcctgacaaatatttttgaaagtcaaaagtaaggcaaaaaaaaagatatgatgaacaagatatctaaactttaaataaagacaaaatcaatttattgattttaacttttgccttaagttccaacctagttcattactgcactgctgaaggggaagagtataatttcaaggtattggcttaaatggactttctatcttaagttatggcctctagggcaatggttctacaactttagtgtacaccagagtcacctggaaagcttgtgaaaagacaagagctcaaccccaaatctagaattttgatttattgaaaatgagaagggggcctaagaatttgcattgctaacaagttctaggcaataaggctgttgctgatgcaatgctatggtctg

SEQ ID NO: 55428 - DNA, 524 bp, Homo sapiens
  misc_feature 339, 340, 341, 342, 343, 344, 345, 346, 347, 348, 349, 350,351, 352, 353, 354, 355, 356, 357, 358, 359, 360, 361, 362,363, 364, 365, 366, 367, 368, 369, 370, 371, 372, 373, 374,375, 376, 377, 378, 379, 380, 381, 382, 383, 384, 385: n = A,T,C or G
  misc_feature 386, 387, 388, 389, 390, 391, 392, 393, 394, 395, 396, 397,398, 399, 400, 401, 402, 403, 404, 405, 406, 407, 408, 409,410, 411, 412, 413, 414, 415: n = A,T,C or G
cccccctcgaaagtcttctagaattaattaacgcggggtaccctagggattcatctgttttcttcacttccctttgcatctgagatcctgctggaaaccacggcaacctgtatccactattaggaggtaaaaatcaataaaatggcccattcatttgtgttgtaaaaaaaaaaaaaaaaaaaaaaaaaaaaaaaaaaaaaaaaaaaaaaaaaaaaaaaaaaaaaaaaaaaaaaaaaaaaaaaaaaaaaaaaaaaaaaacaaaaaaaaaaaaaagccggcccccccccgggggggaaccccaattccccttaaaagaaaatatttaagccccccatattnnnnnnnnnnnnnnnnnnnnnnnnnnnnnnnnnnnnnnnnnnnnnnnnnnnnnnnnnnnnnnnnnnnnnnnnnnnnnttggcaattggaaaaataaaaaaaaggcccaacccaaacccctttccaaaattttcccccccttaattggaaaaggaaaattaaagccgtaaaattttttataaattcc

SEQ ID NO: 55429 - DNA, 528 bp, Homo sapiens
  misc_feature 27: n = A,T,C or G
cgggccccccctcggggtacttctagnattaattaacgcggggtgggggtagcgttcattatagtattttctctacttgtgtaaatattttaaaactttcattacaaagcttttttaaaaaatgaagagaacaattatggtatagatttctatatattaaaaaatcctccagaaaattattttacctaggcaaaaagtagggagattgctagatagaattctctccttatttcaaatgagtcttgtcctaagagagtcagtttcttgaggacagagatcatgttattcctcttttgtatttcttcccatttaccaaattactatatacatagttgatcctaaatatataacttgttatttgaaaatacatcttgaatggaaagtatagtgataagccatctctctcaccttgtattccctttctgtctccttttgctagattccgtgaagaaaaaaactttttgccatatgccatcaactcctgtatgtttgcctgagatgagcacaacttctaaatccatagcaatc

SEQ ID NO: 55430 - DNA, 628 bp, Homo sapiens
  misc_feature 27: n = A,T,C or G
gggccccccctcggaggtacttctagnaattaattaacgcggggtgcagaggttatgtgcttcagccaccagttcttcactaaagaaaatgatcaaattattagaaagtggtcattattagttatcagagctaacactgctattttaaaatatgctagagagttttgataatactttttaaatgaagtaacaattattttgatcctgagtgtcttaaaacaccaacccactgactaatactttcattcatcttgttatgcactttccacatatgagcgttactgtccaaaatgcaaaaaagcaaacagatctcaataaaagtcagaagcaaaaaaacctctttctgctttctgacttactagatagctgaatttaattttcaaactgccaaaatctaaagatattctccaaatcacctgttttccaatttttgaagtagacaaaaaaaaggccaaggaatttatcaggattcacagttccttggaatctgttgaaaatcaagttctgggatttggtttcatctaatctgatctctctcttttctataataagaaacccatgtttcctctgaggactgggccacagtgaaaaagagcagcatgtagtaaaacatccgtctttttctaac

SEQ ID NO: 55431 - DNA, 590 bp, Homo sapiens
  misc_feature 28, 539, 561, 573: n = A,T,C or G
cgggcccccccctcggaatacttctagnaattaattaacgcgggccgtaccaccctttcattctgggagtgtaatttgcctggaaatttatgaaattgactgctactaggcccccttagtactctctgcccctccctgttcttcccagttaaatctgtttgagattctactgttatgttttttacgtgtggtgtattttttacgtaatattttgtttatataataggcagtaccaagaagcaagagagacctatcttgatctggatagtaaagtgaggactttaaaaaagtttattaaattactgggagaaatcatggagcacagattcaagacatatcaacaatttagaaggtaagtacattgaaaaatgttactatatattatacatttttgtgtttctctgttttcatattatttatataattctgttatagcagagactattaatgcttgctttgttattcagttcttaggattctctaatttaatcagacaattccgaatctgaagggctctttatggtgagcttatccaactnttccactctgttagatattctntatgcttaatanggtctttatgcttaaat

SEQ ID NO: 55432 - DNA, 418 bp, Homo sapiens
  misc_feature 11, 23, 36: n = A,T,C or G
tgggtaccggngccccccctcgngggtacttctagnattaattaacgcgggcattgtttcaggccatgtaaatttttctaaacacatggctaatgcttgccaagcctcagccaataacactgacattttcttcatccacaaagcttaccacatggattacatctatgcattactcacacaacataatcattggcccatatgccagaaggaaatacaattttacagttgcctctaaagcacacatttccagctttggttccacatgtaagacagatttgcagcttgcattttcttacactcagcccaacacattcaactcaagcagaagtatatgttccataagccagttttttgttgtagaaaactcttgtttcttttctgacaatctgtcacctaaaaaaaaaaaaaaaaaaaaagc

SEQ ID NO: 55433 - DNA, 204 bp, Homo sapiens
  misc_feature 32: n = A,T,C or G
gtaccgggcccccccctcggggatcttctagnaattaattaacgcgggagtgaatgaaagattcgtgactagatgctgaagcttattaatgctgagggcaggcccaaattatcaagctagtaaaatatcatgcggctgcacatctggacctcaaatcgagttcctctacgaaagacacaccaaaaaatttgacattgacacttc

SEQ ID NO: 55434 - DNA, 599 bp, Homo sapiens
cgggccccccctcggaagtcttctagaattaattaacgcggggggacagcatcacaaatccctgagttgttcaagtatcaactgtaagggtgtgtgtgtgtgtgtgtgactgtaggggtgtgtgtctgtgtcagagacagagagaggagagcagctaaaatcgaagacccatcacaaaaacacagttgattagatcattggcctttggtgagcggctcaaccttcagtccctctccaccccttttagaggtcaagggggtaggctgaaagttccaactctctaaacacatggttggtttccctgggcaatcagcccctaaacagaggctatccaggagctcccccggccattggctacctcattcacatacaaagagacacatcactttaagattccaagctgtgtgccaagaaatgggggcagaagccaaatatatatttcttattacatccagaaatggaaagataagtgacaaaacaaatagagcaaaagcttaattatagaatccaggtgatgggtatacaaaaattttcaaaataaaatgaagatggatctgttctgctttgaccctggaggatgagctttgcatcttctcgat

SEQ ID NO: 55435 - DNA, 536 bp, Homo sapiens
cgggccccccctcggaagtcttctagaattaattaacgtggggcagagctcagtggtaaaaggccacctttctcgtggctgtgtttggtgtcctaagagaatgagctcaagaacagtgggctacagtcttctgacccttggggaagatcgtgagaaggatgctgcagctcttcatgtgagagcggaggctgtcctcctttcacagataggagaacaaaagtttcatgtgctatcccactgctggggctgggactggggtcgaggtcaaggtcaaggtctagtgggtctaagtcaaaagttaactgcttacttacttccctctgtttctcttccttctagtcgcccatgtttgatggaaaagtcccacactggtaccacttctcctgcttctggaaggtgggccactccatccggcaccctgacgttgaggtggatgggttctctgagcttcggtgggatgaccagcagaaagtcaagaagacagcggaagctggaggagtgacaggtgtgtacatactggggcagcatgggcattc

SEQ ID NO: 55436 - DNA, 597 bp, Homo sapiens
cccccctcgagagtcttctagaattaattaacgcgggacatacaaatttctcttacgtagttgaaaaaattatgcacatggatttttgttttagataacacagctgtcattttgactaatagaactggttttaaccttcaagaagaacctgtcttctacatctccatcttaattgccgacaatggaatcccgtcacttacaagtacaaacacccttaccatccatgtctgtgactgtggtgacagtgggagcacacagacctgccagtaccaggagcttgtgctttccatgggattcaagacagaagtcatcattgctattctcatttgcattatgatcatatttggtaggtagaagtcatcattgctattctcatttgcattatgatcatatttggtaggtggtgctgaactgaacatatactcatttatttaaaataacatgataaatacatagttaattctattatagcattataatgtgggtctgtgtgtacgtttattgctcctctgaatgtagtataattcttaaatcaagtggagtaaataagtggataaaaacatgatctttgaattgtatgagtatgtgagtgtgtat

SEQ ID NO: 55437 - DNA, 637 bp, Homo sapiens
  misc_feature 39, 551: n = A,T,C or G
actgggtacgtcgggccccccctcggaaatacttctagnattaattaacacgggtggatcacataactgtgctgctgaattaaactctatgtggcagctatggaggtgtgcagctcatctccattcaagaaaaagcttgctgatcagctgtgtggagtgcagttagctgacagcccccaactgcagacaatccttggcagcatctgagccaaggccagccttttccaggaagtctcaaccaatagctgagcacagtgagacactggggcccagtcatttctgcccaacactggactcttctatgggccatatttgcagcagagctccccgttaggctcaccctgatttctcagagcctcagtgcagttttaggctcttcctacccaagcctcctctctttaccttctactttcacaggtatcagatctgagctgcagtcagaaggatttccctgacctcttgatacttttcctctttatctttcataggtgttacccccagtaaatattggaccccagcaatatacccaggaatcccctatctatgaactntgtattatataaagcaacagatatctttattgtttaagtcattattagttattatattgctggcagcccaaagtatcctaactgat

SEQ ID NO: 55438 - DNA, 621 bp, Homo sapiens
cgggccccccctcgaaagtcttctagaattaattaacgcgggccacacatgttcagtgctgttgatggttggaaggaaagataaaaggtagatgtcactgccaaactattattttgaatcttggatctttatccctttctgtatcccttttattacctccctgggatttctggagcctactttgaaaagtggatttatacactgcggaagtttctcacataaaaccatgaaggtgaaataacataggtcttactacaaaagaaatggccctggccatgcatctaatatctgtgtgatgttagtaagcacactgcatctccccaggcttcagtttcctgagttgagtgttctatcagctagaactatttcattttcaagtgatggaaagccaaacataagcaaacagggaatttactgctacatgaaattttatagtccaggggtaactctggtttctgttactgcttgattagggattcaaacaattttacaggacccagatactcactgcctctcaactctgcccttctccttgtttgatacgttgccataacagaccttcatttctgtgtgtaagttggttgtctctgctctcacatcctttgatgttacatcttttga

SEQ ID NO: 55439 - DNA, 609 bp, Homo sapiens
  misc_feature 28, 546, 592: n = A,T,C or G
ccgggccccccctcggaagtcttctagnattaattaacgcggggtactctgaagacaagatttgaacatctgaaccagcaatacttgattctagctccattcgccctttccagttaaataaattatcttttttgctaaaaacagaattggatttgtaaattcactgggaatgaaaagtgcctggctgataaaaacttatgaattcatctaaactctttaccttaggaaactaaataacccagcagagatatgaagattttcaaaaagcaatgcaggtaagtaatgtattatttatttatatcagtaaagctggtaacacagagatagtgctaatccccttctctttccataatttgttctaggttacagggttttcaaatagcagaattaaaattcaaaatttggatccaataggtgtccaatatccatgaactttctgctgtgtccaagaggatgtgttttgttgagtagcagtaagtaatgcttccatactttttatctcctacaacccaaaaagagccattgtaatgaaagctctctaggttntataatcttcagccattataactctgcatataaattaccttgaatnttctattcttgtcatat

SEQ ID NO: 55440 - DNA, 604 bp, Homo sapiens
  misc_feature 10: n = A,T,C or G
cccccctcgngaatacttctagaattaattaacgcgggggtgggggcttccactcatccctccccaggccctgtcagggagacgccaggcgcttggcacccagtgtgggctcagtaaaggttagcaatgatttttgttattgctactaaatgccagtataggtaggcatgctgtaaaatgaacaggataatctaagcggacctttttttttccttttatttcttcccttttacatcatttctattgttatgctgttatttgtatatatgtgtgcatgcattggagatggggaatacagctacggaggttttgaagaggcacagtattgggtttagttttcatatcaaatctcacacattctgaaatctgtgaagaaatgtgtcacatggtgatgcctggcatataatcagctcctcagaaaatgctgtgattaacagtaactccaacagatatttccttctcaaaagaaaagcacatgattttatagcatttttaaatgccagggcatctcatcagctcagtcttttcagtaatttaaaaaaaaaaaaacccagatagtggaaattcagggtagtcaatggaaaaaattcaataaagctgaata

SEQ ID NO: 55441 - DNA, 587 bp, Homo sapiens
  misc_feature 24, 537: n = A,T,C or G
gccccccctcggaagtcttctagnattaattaacgcgggtttccatctctggttgtctggattcacgaatgcagaacccatggatacagaatgccaactgtatagtcatgaggaaataatcagggaaaaaacagtaatattctaagtattacttaaattttggttttgaatccattttaacatttttttcctcctggaaagattttatgactaaatttatctgcaaattgtaatcaccaaaataggagttaaggatgcaaaattgtttgttttcattggtactgccaacattttgttattcctgagttcaaacggatacatttaaaagcctctgcaaccaaatgactgtgacttttagctcagtcagtttctgtgagaaaaaaagacactattttaaatcatttttatttattaaacactagctctctacaaaaagcagctattatgatattacaggactataatgatcaacaaaactgtagtagttgtaatctgggcaataaaactttaagcataaactttggaagcagagcctgngtctaacctgataataccacatgtatgctgtgtgaccttatacaggttac

SEQ ID NO: 55442 - DNA, 509 bp, Homo sapiens
  misc_feature 436, 443, 457: n = A,T,C or G
ccgggccccccctcggaagtcttctagaattaattaacgcgggggtggagggaaaacaagtacacgttagtaggagtgaaaattggtagacttctgggagggcaacttggcagtatcaacaattttagtatgtgtatcatttgacccagaatatgtctagatagtctagtatctagactgcactaggtacacatttgcacctagagaaatgtgcaaatgtgaacaaagtaacatgtaacaatgttcattgtggcagtatttgcaatagcaagaaattagaaatagcctaaatacctatcaatgagaaaatggttaagtaaaatatatccaccgttgtatgtacagcaattagaagaatgaggtagatttatacattagtactaacaaggaggtatcttcaagactaaagtataacatttctatctttaatgctctntactcanatagggtaaaaatntcagtacaaaaaaagtaattgaaattgacatgacaaatactaaatagtagag

SEQ ID NO: 55443 - DNA, 596 bp, Homo sapiens
cgggcccccccctcggaagtcttctagaattaattaacgcggggagctttagaaggaatacattaatgtgtaaaggaaagaagacccaaagcataaatgcttttaaattatcttttccctagataaaaattatagtaccatgactttcaagcagacattaaaaattcaacaatatggttttgttcttggaattattttcagatgaggtttatcaagtacagcactattgatatttcagtctggaaataattctttgttttaggctgtccgatgcattatagaatatttaacagcatccctgccctctacacactagatgccagtagcacttcctagtcatgacaataaaaaaaatgtctccacacattgccaaatatgccctgtggggcaaaatttctcctggctgagaactactttcttaaagaataattctaatattaatctacagcataataatattatataacaattaaatttctatcttttattagttttctatataaataatcatttgtgaaaatactgagcaagctgcttctgaataaaattatgaaatggcttcaaatccgtagaattactgcagtagctgaagggtt

SEQ ID NO: 55444 - DNA, 587 bp, Homo sapiens
ccgggccccccctcgaggtacttctagaattaattaacgcgggccaggggcttggagctcaagtctgaaagacactcctttccatcccaacccatcccgggggccttctggagaccctagaggtttgttctgaggggttctgctccttctaggaagataccctggaacacacctcaaaaaaaaaaaaaaaagccagagcgcctgctcccgcaccaagccttaggggtgagcccatgggtgggatcagaagtcacactcaccaggggctactgagctgtggtgggggaatctctggaagcccagattcatagcctgtccccaacacttcctggttgggggactcagcacaagctacagaggctctccaggcttcagttctcaccacttgtaaagcaggaatcagagaagattcctcctgggtctaatgggtcttcacccagatcctcccatggctccctcacagcactccagtccctacccacacgtcacctcctcagggaggtcctccctgatcacccagctatagtggagaaacatgcccacactctcaacccggccttcatttattttgccttcgtaatatcaac

SEQ ID NO: 55445 - DNA, 621 bp, Homo sapiens
  misc_feature 21, 26: n = A,T,C or G
ggccccccctcggaaatactntctanaattaattaacgcgggagttgtgcttttaatccttagtttatctaagtctgtaaatgtataatttatgtaaaatgtgcaaaatgtagataaaaataatacctatgaataagattattgcctgcattttttactaaaatatttcttaattgtcagaggtttcaatacatagaatatatggaaatacaatatctaacaggtatgaaacacatacccgacattttttgagaagtaaattaattcctttaattcttataccagtcccatgaggggcagatttcattgttatttccattttaaagaaggcaaaacttaaaacagtgttttttgtttgtttgtttctttgtttgttttttagtactaacagattaatgacacaatgtcttagcaatgcaaaatctaattgtaaatgatacatgtgaacagaaaaaaaatactcatttttatgaaatgactgtttaaaaggattttcatttcttatcattttcttacctttcttatgttcaatggagtagcacttttaattttcttgtaaattttttcattgcattcacaacttggctcactttttggagcaagcagtctagcttgtgacct

SEQ ID NO: 55446 - DNA, 535 bp, Homo sapiens
  misc_feature 12, 25, 488, 528: n = A,T,C or G
gccccccctcgngaatacttctagnattaattaacgcgggacatctttgaaaaacatggagctaacatgtttaattgtgagaaacttaaaactttctccttgaaatggataacaaaataaagatatatgctctcgtcattttcattaaagtttgttctggaagccattgtaaaaattcaagaaaagtacaatgtatatagattgtaaaggaagaagtaaaattctctaaatttacagatgttataattatatatatattaaattctaaaaaatgtacaaaaacttttggactaattgaatatttcaaggcctctggctataagagcagtaataaaaaataaactattaacagttaaattggaaaattcaaatataaaatatatttacaacatcatctagaatacatggaatacttagggatacatttaagaatatgtgtttaggaactctttactgaaatatactaaacaatgctgagagaaattaanaccctaaataaatagaagatatatcatgatcatgaattgngagattc

SEQ ID NO: 55447 - DNA, 616 bp, Homo sapiens
  misc_feature 43, 580: n = A,T,C or G
cgggccccccctcggaagtcttctagaattaattaacgcgggngaagagcagaataaataaaacaaacaaaataaaatataaaagaagaaaactttcctgagctgatgttttcattaagaccagggtcagctatccgtgacagctgtgaaactaaaccataaggaaggcgaaatattttttattccatgcagctatgtgtccataggcatatcaggaattatgtttctaagaagaaaactatggatttggaggaaccactaccaacgtctgccataattgaataaaaatgtacatttacacatcaaaagatctcacgaagtacctggcaaaattaccttaaagacttcaactagcggatgaactcaagttcaagaacaataagagcattttacaattacctagacaggaaacaagttagcttacctacaaagatagaaatatagactagcatcagatagctctataacattaaacatcagatgaaaatggagaaatgtttatagttttgagtgcaaaaaattgcctgctagtcaagaattctaaactcatttaagttgtcattcatgtctgaaaaaaatntcttatatttctttacattttcttacaaaaattttc

SEQ ID NO: 55448 - DNA, 584 bp, Homo sapiens
  misc_feature 534: n = A,T,C or G
cgggccccccctcgaaagtcttctagaattaattaaccgggtccggctctaaacaacctcataaaaataaatatagcacgtttaaaaattcatagctagatcacttcttactagaatgctagattggcctgaagatatttcaatattttaagtaatttaatttaaattttaaaatatttaggtattagtagattcaatttttcaatgtcgattaattacattgattgttttcagtacctcatgcataatgattctgcttctgcaaatagaaatcaaggtttttattttttaggttaaaaacacatatcacatctttttcttctttgaaactacaactttagctgccagcagaagttccttgggggttttaaaaacatcaatcagtttcacagctggagagagtacttttttagagaacaattttagctaaaagaaaagtaggctttgtcatttatgaaagcacgtaacgagttaaattcaagaaattgtaagaaacagcttttcactcacaactgactttatgtgaagacaganaaaaaaatagagtaggcaaagtaactaaacacttacctaaaatctttaca

SEQ ID NO: 55449 - DNA, 630 bp, Homo sapiens
  misc_feature 38: n = A,T,C or G
ctggggtaccgggcccccccctcggaaatacttctagnattaattaacgcgggccattagaactgaataatcatactgcatatcaaagtttgtgggaaattgctaaagtgtaaaaaatgctcatattgaaaaagaagaaaagctgaaaattaattgtgcttccaactttaaaaaaggacaacaagctaatcctaaagaaactagaataaaaggaaaaaataaacagaagttaaagagtaattttaaaaaatacaatagaaattatcaacgaagccaaaagttgattctttgaaaagattaatgaagtaggcaaaccactggtgagatgaatcaagaaaaatagagaaaagactcaaataaacattaggaatggaaaatagggcaatgctaaagagaattcaaagatcagaaaaatatgggagtatactaaaaacgatttcatgcccaagtgttcaaatctatattgcctttaaaaatatataaaaaaggagccggacactggctcatgcctataatcccagcactttggaaggctgaggtgggtgaatcacaaggtcaagagatcaagaccatcctggctaacacagggaaaacccgtctctactaaaaatacaaaaaattagctgggcg

SEQ ID NO: 55450 - DNA, 506 bp, Homo sapiens
  misc_feature 28: n = A,T,C or G
cgggcccccccctcgaaagtcttctagnattaattaacgcgggttattggtactgtgagcagcatattccatctttctagtgtattatataggtgtgacaacacagaggccagactgccaaaattcccattctttcacttcattttgtaccaatcaaaataccttattcagctaatttttctcaaaaagctggaatctatcccaccatataaaaatcccttagcttttgataggttatcagtatgctagttgtactcatttcataaaagaacagtttgtaagctctccataaaaggacagtttgttttggtgacctgcaatataatatgttaaattgtttttacttatgaaacagtaaatggagaatttatatatggtgaattaaagttgtttggattttctaatgtgagtctttaaatctaattgtgtgtattttgtttctgttagggatgcaggtcacaaatgtccagttgacaatgaaatactgctggaaaatcaactatttc

SEQ ID NO: 55451 - DNA, 552 bp, Homo sapiens
  misc_feature 31: n = A,T,C or G
taccggggccccccctcggaatacttctagnattaattaacgcgggacacatggatgttccctgccaagaaaattttttataaaagaataataaggagatagttgacctaaataatattcaaacatactgtaaagttactataatcagaacagtatggtattggtaaatgaatagaaaaatacaccaggggaacaaaacagagagtccagaaagagatccaagtataatagatccaagtatatagggaattcaaaaagcaaagtggcctttcaattcaggggagggagaggtattttaataaagaatgctggtccaattagctatccatctggaagcaaacaaacataaacctctgcctctcactatttacagaataaatttcagcttgattaaatagttaaaaaatgaaaaaaaaagagaagacaatctgcaaaagcatttatgggtgaaagcttttaaaaagacagttacagattcaactacataaaaatcaacatgtatgtatggcaaaagcaaaaagtcatttctaaaccaaacagcacttgtgaaaa

SEQ ID NO: 55452 - DNA, 403 bp, Homo sapiens
  misc_feature 362, 365, 366: n = A,T,C or G
cgggccccccctcgaaagtcttctagaattaattaacgcggggtgtttatatgagtctatcatcctggcaaggtcttcagcattacgtactgcaggactcacaaaggatagctggcatcagaatcaattgacaggttcacagctttgaataaaactttccacatctggaaattcattcctgcaccatctactgactctctaccatgtgcctggcatagaaaataggcgttaggaattaatttattaattcaaaaatattaagtgcctattatatgcaaagcagaaagcagtatgcaaaaaaatacaaaatccctgcattccaggaaggtattcacagagttctgcatctatcaccacaatanatnntagaaaaatttcatcacccccaaaaaaaaaaaaaagc

SEQ ID NO: 55453 - DNA, 627 bp, Homo sapiens
  misc_feature 561, 582: n = A,T,C or G
cgggccccccctcggaatacttctagaattaattaacgcggggggctacagaacaagactcaaaacaaacaaacaaacaaacaaacccaagaacaaacaaaaaaacaaataaactttctctgaaagatactaaaaagagaaacaattaaattttatgaaagctatatgatggctttaccacatcatcttaactttcccctttgtgagagtgtcattcaagttcccatcaagcacatatatacattcaacacttcctcttagcaggcgttggcaagctatagctcacggactcgatcatcaggcttacctctagtttgtaaataaagttttattggaacacagccaggctcacttgtttgtgtattgttgctggctgctttctggcaacaatggcagagttgaatatttgtgacagagagtgtttggcctacaaagtctgaaatatttactctctggctctttacaggaaaagttcggggactgcctgctcttagcatccacttcaccttcaaatttccttgatatatatcctccaagaaactattttccacaagagcctgngtttatttttgcagaacattntaaaagcatttgatcatttacttttgcctgcataaaaaatatggg

SEQ ID NO: 55454 - DNA, 520 bp, Homo sapiens
  misc_feature 33: n = A,T,C or G
ggtaccgggcccccccctcgaaagtcttctagnattaattaacgcgggatatctgccatcacaacataatgatctccttctcttacatgcaaaagctcattaataatatttgcccacattacattttagactattgactctctttgtgctttatgtgcatctctaagttcatgcaaggatttaaataattaaataggatatcttgatgagttttctacataattttatgttctttgttaattctctatcttcctattttatgttttttaaagttgaacttctatgttttttcatttatattatgaatgttaatggactgtactgttttctttttcacattagaataatttgaaagtttaatgtcctacacttaccattacttatgactaattttaaagagtccataagcatccttaattggagtagtcattaatgtattactataaaattagccacaattgatcgagaccatcctggccaacacagcgaaaccccatctctactaaaaaaaaaaaaaaaa

SEQ ID NO: 55455 - DNA, 479 bp, Homo sapiens
  misc_feature 31: n = A,T,C or G
taccgggcccccccctcggggtacttctagnattaattaacgcgggcctgggccatactgttagtctgtaaatctctatgcccaagctagaattttctcccacaatcctgatccaacttgctattaaaaattgaagctgtgctcgctatggcagcacatatactaaaattggaaagatacagagattagcatggcctctgtgcaaggatgatatacaaatttgtgaagcatctttatttatttattcattcatgtatttatttattgaggccggacacagtggctcatgcctgtagtcctagcactttgagaggcaggcagatgacttgagcccaggagttcaaggccagcctgggcaacatgggaaaaccccgtctctactaaaaacaaaaattagccgggcgtggtagcgcaagatcatgccacagtgctctaatctgggagacagaatgagattctgtctccaaaaaaaaaaaaaa

SEQ ID NO: 55456 - DNA, 613 bp, Homo sapiens
cgggccccccctcgagagtcttctagaattaattaagcgggccctttcttggcacacaggagaccacagttcccagcctcttttgcaattaggttggaaccatgagatcattctggccactagaatgtggaaataatttatgtatgctgctgtggatcaggcccctaaaatttctcttgaacgccttggctctctttcctgccttcacaatgtccacccatctaaggatgaatttggaagtgtaagattccaaggaactccttgatggaagaaacatggacctcagagtcactgcttgggggaaagctgctcaacttgcattagactttgcatgagtgagaaataatttttttgttaagccgctgaggtgtcagaattgctctgttactacaggacatagcctatcctaccctaattactacattggctagttacaggagtttcgtgttcttgtggttgttataaagaatttgagttggagcaaagtggaagagaaattaaatatgtaaatataatccaaaaagattaacgtgatgtaaattagaatgatggggtatagagaaaagaaagagaagaaaggtttcatggacaaagtttggggacttgttgaatg

SEQ ID NO: 55457 - DNA, 517 bp, Homo sapiens
  misc_feature 28: n = A,T,C or G
cggggccccccctcggaagtcttctagnattaattaacgcgggggggttgggggggtaaatctcatatctgtctctttctactttctcactgcctatgcctgcattgccactttcttgcagaccttccttgctccagcttctctcctataatcctgaccacttaaacactatctttcccttgtcactctctcattcacccacaaaaaccatccatgactcctttttatattaaacagggctgaactcctttcactctacctaaagagagaaacttattttccaacacttatcaatacatgtaaagtgtgctccaatcaggtgcaactcctcattctttgtaagttcactgtacagtcatgcactgcataacgaagtttcaattaatgatggactgcatatatgatggtggtcttattataatgaagctgaaaaatccttatctagtattcactatactatacttttaatcattattttagaattgtactccttctacttactaaaaaaaaaaaaaaa

SEQ ID NO: 55458 - DNA, 427 bp, Homo sapiens
ccgggccccccctcggaagtcttctagaattaattaacgcgggctattcatgttatagatatttgacattgtccctggtctaatcattcagacctggcacttcagtgtcatcttgaattccttcttcttccttgtctccaactcccaaagtactacatatgatttttgtttgaagtgaacataaactcaagattttattgtcttcatgataaaagatgacacttagaactggatcacttggccctttctcttcttatctcctcccagttcaaaatgcttgcatcttttaatagccagcaatctcttagatctgcagaagtactacatatgattctatattgtgtgtgaatgcatgcacatatgtgcatgcatggggagacttgaaaagtacacactgtgattcagatattgcaaaaaaaaaaaaaaa

SEQ ID NO: 55459 - DNA, 597 bp, Homo sapiens
attaattaacgcggggacctattgtcaataaagtattaaacaacaataaccgatacacacatgcatacacataacacattcacacacacacagaactgtaaaatgaaaaccagtctgtactcagataagttttttagacctcccttaagtgataactgaatctaatgttataatcatagtaatagagaggacaatggttttacatattttattcagaagtttattagttgatatccctcgattagacttttctgaagtctcttttgaaggtagttggaaataaaccataaatgagtggaataaatgagaacatgttctttgaaataaaaatggaaagaaatatctgaataattttggtcataagctgtttttacttcaacttgctaatcactcatttctttcattaacatgctgtgtacacagcataacttacgtatattaaagttacagataagccagtggatatgactgtgggaagtagcatcttaatgtggaaaacaatcttatcttttatttttatttctgttcccttgtatttttatttgacagtgttccttgatgaaaattctttttagtgactcctggtcactaattttt

SEQ ID NO: 55460 - DNA, 636 bp, Homo sapiens
  misc_feature 15, 566: n = A,T,C or G
gggccccccctcganaatacttctagaattaattaacgcgggtaacaccaaaacaatacatttcatatatttcttaaaaatgaataaacaaaataaaaccaagacagagaaatcagggaggaaagaacagaaaccatgtttgtacatgttatcttggtgcttgtcctggcacagtgatttaatacctcttattcacagacaacagaagatacatcacttcctactcatcctcagttaattttcattcattccaaggttgtattcattctcccttgtagatcctaacttggatcttcttctttttacttattgtaaaatcatttctcctatgttatcccaaatgattgcttttctgaactttatactcccttcttcctattttttttctatttttcccaatttttcaatgttctttagtgaacaaccctacaactgaccaacgaactggtgagtgaactcgccatttctggagcagccacacagtacagagtaaggtgatcagtacaaagggcgtgtgtggttcaccacccaccaacctttccattctagataaagaacagactcangtcttcaaatgaatctgagaatctccaaagaagggcctatatggcttcttaaagagcatgtccttacatc

SEQ ID NO: 55461 - DNA, 604 bp, Homo sapiens
ccgggccccccctcggaagtcttctagaattaattaaccgggaggaatgaacaactccaaacgcgccgccttaagagttataacactcactgggaaggtctgcagcttcactcttgaagccagcgagtctgcgaacctaccagaaggaagaaactctgaacacgtccaaacatcagaaggaacaaactcgggacacaccatctttgagaactgtaacactcagcacgagtttccacggcttgattcttgaagtcagtgagaccaaaaacccacccattccagacacactaacacgcctgtttgcctggttgtgtcttgatttgttaaaataaagtatgtacaacacttttagagaatatggaacaataaataaagcagtgcttttatcttaaatttgctttatgcaatatttaaaaagtaaggtatgcatataagtaaagtcctcttaatgtataaaatattttagtacataagacaatcttgaagacaggtgtaagcttggaaagtttcttacaaattaatcattattaaagactcatttactctattgaaactattgctgagccacatgtagttattaaaatctagaaattacataatattc

SEQ ID NO: 55462 - DNA, 427 bp, Homo sapiens
ccgggccccccctcggggtacttctagaattaattaacgcggggggttgtcctaagaggaaggagaacaaggagcaaaattagggacactggcttctgtgaagcaatgactaactcaaggagccttcatgtaggagaagcctgttggtggactatacatcctgcttccaaacagaggtccgaaggagagaaagttcgaattggcgatgacctcatcctcgtcagcgtgtcctctgaaagataccttgtaagtacctcataatataagagtcttctgttttcagaaatttttcctttaggaatagatggccatgaagaactgagccacagcaggttggatagaataagatgcttttacatatatagagttgacccttaaacaatgtaggggttagggatgctgaccccctggcaaaaaaaaaaaaaaa

SEQ ID NO: 55463 - DNA, 552 bp, Homo sapiens
  misc_feature 34: n = A,T,C or G
gggtaccgggcccccccctcggggtacttctagnaattaattaacgcgggacgaaacattgacttgaaatatgcccaccttgccttatcatttctaatcattacaatacaattttttctaccattctcaccaggtgtacgagacctcacattacccaagccccatatcggctcactatgccctggtctaaaaattaaaggcaggccctctgaacacattcaataggaacccttaaaacttgcacatgaactgtctgtcggcatttgtacttacatagtccaaacaaacctgtaagtggtctgagatttcaggcagcacaaccaagagaaatgaaatctaccacgagttgtaagggaggagatttagggcatgaaaggccactgcaaaacaatccagctctgccctgcccaggagctacccccactcctttcctgcccatagtggacactcctatttctcctccttcacttctcacacagaagtttcaaccttcatttccccttagtagttggcttttcttaaataattagttggcatggaattgcctctacc

SEQ ID NO: 55464 - DNA, 581 bp, Homo sapiens
gggccccccctcggaagtcttctagaattaattaacgcgggatatgccatctgactggtcagcaggactaagtctgattacctgaagtatgaatgattagctcttggcacagtttgatggccatttgttcctgcctcttcagtagactggagatctgtgacttgagaaattcctcctccatggacaagttgttggagttgcccagttgctgggataagttatcctgctgctgttggatggttttctgaagttgactcaatttctctgaatctgagttaatgtcattagatatctgcaaaactccaagacatgacaggagacaagttcatatattcttctattcttataactgtagataattctcgtgacagaaacatttcttaattgttcaagatttattagtagctcttagtatttgaggtatcatgaaagaaacaaaccagatgcctttctattccaaattatttatagttctttataattttatttacatttttattattgcactatattaaaataatgatttaataatgatatatttctgacatcacatctaaggaagggccagtcattctgccact

SEQ ID NO: 55465 - DNA, 457 bp, Homo sapiens
taacgcggggtgggtgtatctctcttctaatttctgttgtctttgttattgtgactacagcagcagtagatcagagcatggactttggtagcagacaagcctgggtttgaatcctgactctgccacttatgtaagtgatttcagctctcagtatctcagtttccccatttataaaatgaagccaatatgggattgtggaaataaaataatccatttaaactctctaggacacagtaaacactcaacaattatgacctcctattgtgaattcaagccacctgccttattattattattattgagatggagtcttgctctgtcgccaggctggagtgcagtggcgcaatctcaggtcaccgcaacctccgcctcccgggttcaagtgattctcctgcctcagcctcccgagtacctgggactacaggtgtgctcactaagaccagctaatttttgtatt

SEQ ID NO: 55466 - DNA, 254 bp, Homo sapiens
  misc_feature 13, 24: n = A,T,C or G
gccccccctcggngtacttctagnattaattaacgcgggggtggagggggcagagacagttcaaacaagagaactatgaactgcaaaatggaaaaaaaacgtgcctaccataggctaccacagatagacaagggaatcccggttcgagtccggagagggagcctgagaaacggctaccacatccaaaagaaagcagggggcgcgccaattacgcactcccgacccggggaggtagtgacgaataaaaaacaact

SEQ ID NO: 55467 - DNA, 565 bp, Homo sapiens
  misc_feature 503: n = A,T,C or G
attaattaacgcgggattgtcttcccatcaatagtaaaattaggaaagtaaggatagacagtagattttgactttgtaatattaggtgagaggaattgaatttaaattttagtattctggctttaaaaatggaataatcttgtgttgacatcctaattttttgttttgaaattttactgaactattaaatccaaaaacactagaaaccaattgatactaaaaaagatagaagtgacacataaataaaaacagaggcagaagtatcagtgagatgtatttatcattagaaactatcagatgacatggcagcagaagacgggttctctgtttaatctcctgaagtgccatgacagactagtaagactgagtttgacaccttggtagaaactcttttgccaagttggtttgtcatccattaaattaatgttaaattacaagagttgaccagattaatgttactccagaaagaagatgagtattgtttttagatattcaagcaattnttagaaggtagatattccaaaccacagatactctataaactaatagctaggaaacttcacat

SEQ ID NO: 55468 - DNA, 565 bp, Homo sapiens
  misc_feature 33, 50, 517, 525: n = A,T,C or G
gtaccgggcccccccctcggaaatacttctagnattaattaacgcggggnagctaacgatctagtggtgaaaaccaggtaaccagataattagagtaaaatgtgaagtgttatgagtaatgttggagagtgtaagcaatagttgtggtggaggttcatggtgagctggaggtgaggaatacttccaggagaatggatatggtaagccttcaagaaaacagtagattaaaatttcagcaccctcgtaaatgcgaggcaggaagctaagctctatgtgggtgcaaagaggaaaaagataatgggcaagcacatatgtaaacaacagagtattaggttgtcaatgggttagaccttgaaggattaataaagtacagcaggcaaagatgatgaagaagaagattattattttaaggtaaagacattcataggaaagatgttgagttaaaaaatgcaggaataatttgaagacataaaacaactgatttctgagaaaaaccctgtgaacgtacagaatgtangaatgctntcatttatctgatacctgttcagagacacatgataacaca

SEQ ID NO: 55469 - DNA, 566 bp, Homo sapiens
  misc_feature 16: n = A,T,C or G
cgggcccccccctcgnaaatacttctagaattaattaacgcgggcccttgagtcactttgaaatagttaattcaacagcaccatgttagaaatatattggcatgccaagactctgaactctgcagaaacatttgtttcacccagacttcaaactctagccctgactatgatgcccctgtgtgcatttacaataaagactccaacggagggaaaaaaaaaaaaaaaatgttctaatgttcaaataagggcatcctaagtggaatttaatttattgtagctcaggcatccaaatatcaattttccttatgagccttaagatctttaattttttttaaccttactttctcttgaaaataaaaaactacctttgttaagtaaataaacagcttaccaggagctgacttgtctaattatttttatgtaataaagttgggagggctgggtgcagtggctcaggcctgtaatcccagcactttgggaggttgaggtgggtggattacctgaggtcaggagttcaagaccagcctggccaacatggtgaaaccccatctctactaaaaaaaaaa

SEQ ID NO: 55470 - DNA, 516 bp, Homo sapiens
acttctagaattaattaacgcgggtcccctaaatatttaatgtacccttttgaaaaaggcttttttctttaactaaccatagtaactttattatacctaacaaaatgacagtaattttctaatatcgcctaataccctgattatagtcacattttttacattttttgatcaaagaataagcatttggatgttacatctcataaatctttttaatatagaatccccttggttttctttttctccaaaaaatgtttgaagatgtatctaacttttgtgtgtgtgtcattttacttgttcctgtgtcccttgtattactaaaagttaggtcagaaccctaagttacattcaggtttaaacatttttggcaagaatacttcataagtagtgttctatactttatattgcatcacttcaagagtatctggttgttccatgttttgtaattgattactctgttaaggaaaagacaagcagaccaagtatggtggctcatgcctataattccaacattttgga

SEQ ID NO: 55471 - DNA, 454 bp, Homo sapiens
  misc_feature 44: n = A,T,C or G
cgggccccccctcggaagtcttctagaattaattaacgcggggnagactcataattttaaacacccattgaagaagatactaaatttctaaatatgtatatatctaatagcattgcttcaaaatatgatagtaattgccagaaataaagttgaaagagacaaacccataatctcgaaatgaaaaaaagaaaagaaagtcatgaagtgttggaaatttaagtagttcatttataaaaatctcgtgaaaagagaaaaaaatcataaacgttcaaaatattttcagctgaattataataaaaataagacagtaaaatttgctttgcttttttttaactttttcacatggatacttagatcactgattattagactttttcttaaaatttgttgacttgctttatatatagttggttttgatattctacattcttcagaagttaaaaaaaaaaaaaaa

SEQ ID NO: 55472 - DNA, 517 bp, Homo sapiens
cgggcagccatgtctcaccctgctgtgttacaaattaagtgcagtctcaactcttggaaatttatagtctccatagcaggatcacaacccctttcaaggtctacaggccattgttttcctgcacatatatttcatacctgtgattcattcaactcagttcctgtgctatgtgctgtctgcacaacatgttaagacagttcttaactttaagaagaaacctagtatatgatgtaattgcttgacacagttatagtccagtggggttagtggaatgacatggatacaaacatggcagcacaggaaggtaaacttcacctagctgggagtagaggagttggtttacaaggaaaacttctagaaggaagtctttttgttattagctaaaaagaataggcaatttttttttcaatgctcatcatcatgtgtcaagtattttagatgaattgaatcatttaattatcacaacaattttgtgaggaaagtactattgttatccaccatttatagataaagaaaa

SEQ ID NO: 55473 - DNA, 611 bp, Homo sapiens
  misc_feature 28: n = A,T,C or G
cgggcccccccctcgaggtacttctagnattaattaacgcgggcaggctgaaggctttttagaagtgcaaagtggcaggacccatatcagacctactgaaacagaatttgcatgttaataagattcctaaatgatgcctatgcactttaccatttaaaaagtaaatttactttatcgtggtaaactatgcattacataaaatttgccactttaactatttatgcaattcagtggcatgaagtccattcacaacgtagcacagctatcaccacaccatccatctccagaacttacacagattttattggtagttttgaactacttggaagaacaaatttgtaacacttttaaaacttgtttgttcttaaaggtacatctctcatctgttgattcattcattcatttaatgtatacccattgagtgtttgtgctaatccagatatcattctggacacagagggctacagtgataagcagaaagacatgaagtttacagcctagtgagttggctgaagtgatttatttgtcttttattccatcttcattgaggtaggtataatgacaaataaaactggtatgaccattatgaaaaagagtatagaggtttctcc

SEQ ID NO: 55474 - DNA, 609 bp, Homo sapiens
  misc_feature 546: n = A,T,C or G
ccgggccccccctcggggtacttctagaattaattaacgcgggatgacaattgggattattacagttgagccaagcttggcacaccgttcatctagaattctccagaacacaaaattctcaaattttgtgtttcctttgactagtattgcagtttcagttatatttcagagtggaatatacaactaattaggtcatcgaagattctgtcatctcgatgataaattttaatattacagagcagaggatgaggatgcaacacatcttgaagataacgaatgtgatatcaaattggcagtaagtgacttatttttttcctattccattttgggaaggcaggagttggttgatacagaaggaattatatttagtttttctcttacacttcatttaacttttgaaaagctctataagtttactgcaggaaatgcaagaaggaaaataattttttagagacttgataaagaacatggggttttcagtactatttttaataagtagcattctgatacatattattgctagttaggatgtcaaatgaaaaaatnaagcatggtaatttggattttaacatctacatgtagtctctaggttatctgaagtatccaggg

SEQ ID NO: 55475 - DNA, 566 bp, Homo sapiens
attaacgcgggtgctccatattcctactggaggatttatttaaataaaatatgcttattaaacactcctgcaaaaaaaaaattagttgagagtataatattatatatttagagagctactgatttagtgttccttactaaaaatggattctcctgacacactattaataaaaatgtatgggggcaggctgatatggatttctattatatgaatcaacactagataacaacaaagttggatgcttctttcttaagttattttctgttatccagaggaaaacagtgacatctttagtatggtattttaaatcctttgtattccgaccgctattggcatttctattgtttctgctatactctatgctagagccacagccatgataggctgtttatttagcagacaaaatccaattcttcaagagccacctgaactttgttccttgtgaggtatttttttccatagttctgtttaccatccattactcggtgctcctgaagcagtgcactcatttctcctttctagcacttaccaccattagctgattgaattcctcccaacagccacac

SEQ ID NO: 55476 - DNA, 509 bp, Homo sapiens
cgggccccccctcggaagtcttctagaattaattaacgcggggtattaattttatcatatttctttttactataaatcatttttaattcatccacataatgataaaatcttcaactattaaacattttaggtaatttttatgaaaaaacaatcttcacaagatttttaaaaaagatttagaaaagaaaaataatatctatattttcactacaaataaaataatgtaagataatcatgtaatgactacagattttttagccaaatgcttgaaccattttctaaagagatgttttaaatataatatcactgaaacacagtggttttttacaccatttttttagaggtgcccatctgtcaaaggcaatcttagcccttgttccggttgcataatagtttttttaaaagtagtttgtatctttattatttgtcagaaattacttctttgtttgcagagcctctgcagctcctcaggggagcagtgtaggtttgtgtgtgctgtaatcccctga

SEQ ID NO: 55477 - DNA, 403 bp, Homo sapiens
  misc_feature 25, 38: n = A,T,C or G
actgggtaccgggcccccccctcgngggtacttctagnattaattaacgcggggacgacatcctgaatgttacgttgtgtatcttcacttcccccttatttttaaccttctaattctactttccccaactttcctccaaaacctttccctagcccattttaagttctttacattctgaccaaacatttgtttctatagcttaaaaaaattatacataattatatgtcatctgtgtggcaggaaatagtttagatcctgtggatacaatagtgagaaaaacaggtaacaattcctgccttcctggagcttacattctagtcagggaaacagacaataaccaagataaataagtaaacaataaagtatattaggtagtgataacaactagaaaaaaaaaaaaaaa

SEQ ID NO: 55478 - DNA, 614 bp, Homo sapiens
  misc_feature 28, 579: n = A,T,C or G
cgggcccccccctcggggtacttctagnaattaattaacgcgggtctcatatagtaaatactgtatttaaaccatttttaattttaagtaggataatgaatttaactattacagaaatgacaaaggctacagaaaaaagaagaaatagagatgcttatttcagagaacaagcaaggggatattttgattatgctaaaggtgctgaggtagctagacttacctaactggcctagtaagaacattaaatccacaggtgcatatgcgccctctttttaatcacacacagaacatttaccaaaatagaccttttatggggccatatagtttcaataaattctaaaataataaaatcgtagagtatattttctgaccacagtagaatcaaaccagaaatccataaaaaaactattaacttaaaaatctgacaaaagtaagcaatgtacttttatataaatatgtgtcaaagaagataatacaatggaaatcagaaaatattttgagcttaaagacaatagaaatatgacacatcaaaatctggaaatgcacctaaggcagcaattgaagagtaatttatagctntatatgcatatattagaaaaacaaatattgaaatc

SEQ ID NO: 55479 - DNA, 585 bp, Homo sapiens
  misc_feature 95, 524: n = A,T,C or G
cgggcccccccctcggaagtcttctagaattaattaacgcgggtctcctaaaaatccccaccattttagaataagtattgtacctttatacatgngagaaaaattagtataaagaaggtcatttatcccaggttctagagtatatggtggaaatatgaagaaacatcatgaaattttgaagtactatggaggaataactatcttttgggtgtgttttatctatttatttttaaacctgttttatgtttacagtttattagctaatcaacatcaacgtgcaaaagtaagtgataagcccctgctatatggttttgtgtaaactacagtagttcattcgttttgaaaagtcaccaatatttatgtcaactgaactattagttactgtaatgaatagtatttagactctaaagttatgaaactatcctgcaagccctctgcaaaaatgtgcttcagtgaatttccacgtgaatacattttcaaagcagggaaaccagcagcatttttgggcttattttaaagaacanaagagtatctatactatatgtgattataatctaatagtttttaagttagtacaaaataagc

SEQ ID NO: 55480 - DNA, 521 bp, Homo sapiens
acgcgggggttcattatttggctcaagataccagaagttcctaaatcatacaccagttctaaaagaaaaaaacaaatattctctaataccccttccaattctaaaaccctcagattctacacactttccaacattcattcagtgactcattcaacacatagttattgtgtctattgtatgctaggttctgagggaataaagaagtaagttcagtcctccaataataagaaattcaacacattattatagataaatgctataataacaacagttaaaagtacatgacaccatggataatgtcaaaagcagggaaaattactgaatttgaagacaattaaaattattgagtctgaggagcagaaagaaaaagaatgaagaaaaatgaacacagcctaagggatctgccagttaacaaatgcattatgaagttacaaaaagaaaagcaagagagagggatgaagaaatgatacatgattaactaatgactgaaaactccaaaacttgaagacgtgaatctacaa

SEQ ID NO: 55481 - DNA, 519 bp, Homo sapiens
  misc_feature 33: n = A,T,C or G
gtaccgggcccccccctcggaaatacttctagnattaattaacgcggggtaaggccttattatttccactttctaaaaaactttactccttcagttcttcctccttcctcctacatctccactgtctgcttctatatgttctggagttggctatttaaatttgaatgcattaaaattaggtaaaattcaaaatttagttcctcaggtgcactagctatatttcaagtgcttaatagtcatatgtggccagttgctatagaattaaactgctcaagtagaaaacattcctaccgctgcagaaaattctatgggacagtgttgttctagagcatgtttgaaaaatgatagaatttcgtcactcattaagtgtgaccttggccaagttttctttactatgcttcaatttcttatgtagtaaactgaaaaaaagaatagtatcagttttgtaggttattgtatataaagaacatattaaattggcatgataaaattgaacatgaatataaagttgaagataca

SEQ ID NO: 55482 - DNA, 538 bp, Homo sapiens
  misc_feature 28: n = A,T,C or G
cgggcccccccctcgaaatacttctagnaattaattaacgcgggcacttaggtttcatattgtttatgaaaatattgatagctgtgtaatcaaattcagggccaaatattttcagtgtttgattttattgtaatgtggtcagagaaacataattataggtgagtgacttgaaactcatgctgtgtgtaggtacatttcttaacagaataatgtatctcgtgagtgttatgtatgtgtgtctctgtgtgtgtttgtgtgtctctgtgttgtgtgtgtgtatagttttgtcctcaaacttatttctccttacatgataaattatgactttcctttcctatggaataaatgttaccagttcaagttgaccaagtgtgaaaacaagtgacatttatttcctgctttcctacttctgggcagaattggagtggaaagtaatacatgtcgttctgcactgaaatatttaggactattttgccctgtagtagacaatttaggcttaataaaaggtttccatccagtgtttgctaaaggtaattga

SEQ ID NO: 55483 - DNA, 596 bp, Homo sapiens
  misc_feature 27, 38: n = A,T,C or G
ctgggttaccgggcccccccctcgganatacttctagnattaattaacgcgggacactctttttgagctattcatgagttggtataggcaaagctgctattttttttttttttttttacatgctgtggcttaaataagaaagaagtctatttctctctcttgtaacagtccaagggaggcagagttattttgtcatccttaatcctaggctttcatccttgattccagggcatttgttccagttctcatcatttcccagacatggtgaaggaggcaagaacaagctgagttcataccttttccttttaagatcctgagctggaagtggcacatattatttatgctcacatgatattggccagaattacataccatggccacactttactgcaagggtggctgggtggctgtgcactcaactaaaatgcactgactttgcaatcataagatacaataacacaacaaccaagcagtatgctatatatgtgactccaagttttctacatgtcatgccaggtccactgccaagcagtggactacacgaatgtggggcagattcttccattcaggaattatagcagtctgcagaggacatg

SEQ ID NO: 55484 - DNA, 540 bp, Homo sapiens
cgggccccccctcgaaagtcttctagaattaattaacgcggggaggagcctggcccctagtgttcctgcgtgggaacctgggaattagtctgtgagatgagggcctgttaacaggaactcctctctcgctttgctgtgttgtttctcgttttcacccgataaattctggccccctcacccttcaaagtatctgcataatctttcctgctagtttgacaataacccgggttttcctacaacaatattatgttggtaattttaaaaatgtgcttcaatggacacttgttatttgatctgaatactaaatttcatcagcttttagcccaattcatgatcccagttactgatgtctattgaaattgagggtagagaatgtcattttggcttgcataaatctaagaagaaattccagaacggggttggaacaagcaccccacacaaacagtgcagacatgtccccagtcagcttcctctgcggcacggagaaagggaagaaggccctctctggcgccttggacacagccatgggaggaatccctg

SEQ ID NO: 55485 - DNA, 472 bp, Homo sapiens
taattaacgcaggcattaggtatttgcatgtttgatggtagattttcaactacagggaaaagcatggtacatattgctggagcatcagttttacttgttagtatatatgtagaaacatttttatattaggacaaatggaaacatcagagaatactgtgcaaatgtataatttaaagctcattcaccagacttcataaggctataattttgacctaatagcttgacacttttgaatctaagacaataatcctgatttccatcatagtctttccatttgtttgtaggtatttagttgaatttagtgatttattttttgtcctttttttcattccttaactgaaatttaaacataactttttatagaaataaaaaggatatacagaaaaatgcacatatcataagtttatggcttgctgaattttcacaaagtgaacccactggagcgagatgctgtctcaaaaaaaaaaaaaaa

SEQ ID NO: 55486 - DNA, 595 bp, Homo sapiens
ccgggccccccctcgaaagtcttctagaattaattaacgcgggagaagcaaaaaaactaaaatagaagctcacagttttacccaattggaaatctaaaattatctttaaaaacttatataacaaaaagattaatggacactgattggctgtttgtttctttaaaaaaaaactttttaaagtatacaattcagtggtgttaaataaacatcaccactatccatttcagaagttaaaaaaaaaattccaaattgaaactactcattaaacaataactctccatgccttctcccccaagcctctggtaaccacaattctacttatcgtctgtataaatttgcctgttctaacacctcatatatgtggaattatacaatatttgtccttttgtgtctggcttatttcactcagcattatgttatagcattgtcataatttcattccttttgaaggctgaataatgttttgttgtttggatatactgcattttctttatccatttatctgttggtgggcacttgagtggtttccaccttttgggtattgtgaataatgctgctgtgaacattcgtgtacatgcatctgtttgagtccttg

SEQ ID NO: 55487 - DNA, 455 bp, Homo sapiens
  misc_feature 32: n = A,T,C or G
tgggtaccgggccccccctcggaatcttctanattaataacgcgggctcattgccttgtgctagaatacagaaggtagaatgtttttttatgggagacgggattttagagggaataccacaaagttattaagcattttatatgtgccaggcattgtgctaacattgttcacatatttagaatgtaatgctcttaataattctgccccattttatagatgagcaaattaagactgacagagattgtctaacttgtataaataatcacaattctatcaacagtataggagaactacagtaatctcatcctctggttaagactgaggctgggcatggtggctcatgtctgtaatcctagcactttgggaggccgaggtgggcagatcacttgagctcagaagttcaagaccagcctggtcaacatggtgaaatctcatctctacaaaaaaaaaaaaaa

SEQ ID NO: 55488 - DNA, 577 bp, Homo sapiens
ccgggccccccctcggaagtcttctagaattaattaacgcggggtggggtctctctacgtttcccaggctggtctcgatctcctggactcaaacgatcctcccaccctggcctcccaaagtgttgggattataggtgtgagacaccatacctagcagaacctaactcttagatgaagaaactaagatccaaagggaagacacagctcacctcttacaggcctatgcagtgaacgctatttgtgccctgtactctgttatgggctcttattacttcatctaatcccatgacaatcccatgagtgagatattaccagctctgttttagagatgggaaagcagattaactcatccacagtcacacagctggtaaatggtaaaactgggattcatgcctaagtttttttgaccaagttttattaaggactactttaatgtattcctgataagaatcctccatataacttttttaaataatcaggtcacataaaataaatcaagtgcattgactgaataaactgaaatcttgtcacatatcaactaatgatggaaaccttgcaactcaggaagagaaaaaag

SEQ ID NO: 55489 - DNA, 474 bp, Homo sapiens
  misc_feature 28: n = A,T,C or G
cgggcccccccctcggaagtcttctagnaattaattaacgcggggattaaagtcctacgtgatctgagttcagaccggagtaatccaggtcggtttctatctacttcaaattcctccctgtacgaaaggacaagagaaataaggcctacttcacaaagcgccttcccccgtaaatgatatcatctcaacttagtattatacccacacccacccaagaacagggtttaaaaaaaaaaaaaaaaaaaaaaaaaaaaaaaaaaaaaaaaaaaaaaaaaaaaaaaaaaaaaaaaacaaaaaaaaaaaagaaaaaaaaaaaatttaaaaaaaaaaaaagggggcccccccccgggggggacccccattcccccttatgggggggggaatacccccccctacggggccgatttttaaaaccgcggggcggggaaaacccggggggtacccaaattaaatggcttggaaaaaatccccctt

SEQ ID NO: 55490 - DNA, 637 bp, Homo sapiens
  misc_feature 9: n = A,T,C or G
ccccctcgnaaatacttctagaattaattaacgcgggtgcctagttcttttatgaggtgccttgcttagtcattggttggtggctgcccttaaaatagtgtgcctctgaaagtggaggcagaccatgaggttgctcacagctggaggctgttagacaactacattctttccagctgggcagcgagtgctttcttgaaagatctgactagtgcttctccatgtctgccacatgtaacttatctttctccagttcattttttttcctcaaagctgcactgagaaagcaagctttgcaagatgttctctgttattgatttcatctacagactctccttggttgcaagtgtttgagagcaagttgaacttgcttaggagaaagggcaaatttattgctcatgtcattaaaccatgggaaggccagaaatgatttgaaaccagaaactcagatgcccccaagatggctgctgcctcttgtctctgcttctcttcgtgtgatgggcttctttgagagtgccagaagtaataactgcactacacttacttctctctgcttctgccaacagaggagaaaaattgccttacctttctgcttggttctagtgtttaaaatctcaagaacgattctgtgagtctgcca

SEQ ID NO: 55491 - DNA, 500 bp, Homo sapiens
  misc_feature 16, 98: n = A,T,C or G
ccgggccccccctcgnaaatacttctagaattaattaacgcggggctctatagtaagatatcagtttctttttaatatacaaaaacttttatatgttntctgaaaatcacacattgtcaaattaaagcaaagatacaattaattatttgcttgtaacaaggattttgtgccacttgtcaattaattgtcctacttcatttacccttcctttcctcttctggaaaaaacaacaacaacaaaaaaggagctgggaacattaaatgttcttcctagctagcatgatgttaagctttgtcagtaaagggttagagccgttgccagagatgaaggttttctttcctagttctgatgtgttctctaaacagtctcctgcaatgtgagcagcttctctgtcactaagcactcagagtgtgagcagcttctgcagtatctggcttctgcagcaccatggcttgcagtgcatgactgcctgcagcactcagtggccagaagcttcccct

SEQ ID NO: 55492 - DNA, 402 bp, Homo sapiens
ccgggccccccctcggaagtcttctagaattaattaacgcgggtaaattattgctgaaaaaaattactttccattttcatttgtgatttcatgaggccactgacattttcattgtttttttaggatgctgtatcgctgtaatattcaactcttatcattacatctttgcgagctccaattaagttgaacatgtaattttattttttggaagtagaatacagttatcaaaacgttaatttctaagcattagcattatgcaagaaaagagctgataaatggcaaggaagtaattcatccatgcatttattcatgcaatgacctttcaacaattttctttttttaattctactctggtgcaaggcctcactgataacttgggggaagatggctgacaaaaaaaaa

SEQ ID NO: 55493 - DNA, 628 bp, Homo sapiens
  misc_feature 8, 31, 549: n = A,T,C or G
taccgggnccccccctcaaaatacttctagnattaattaacgcggggatatttctattttgctaaaatacagtaagaaaaaaatctgtgaacttcaacagttctaataaaaactaaatgaatgtacagacacagaacaaaatacatgataactattaaatataattgcaccatgtttatacattgagttatttagtatagtagtctaggtatcagtgctgttaattttctcattttctactttcttcattcatttattcaacaaatgtttattgagagatgttttgtgccaggcactggaattataatgatgaacaagacatagtcttctccccaacaattatatcctctatcctgggaaatgataaatagcaatttccatatagtatgacatgtgccatgatagatctaaagacaggactctggctggatgtggtgactcttgcctataattccagcattttgggaggctgaggagggaggattgcttgaggctaggaattgagactgccctggtcaacatagtaagaccctgcatccacaaaaaatnttttttaaattatggccaaccgcgtggctcacacctgtaatcccagcactttggaaggccaaggcaggtggatcacttg

SEQ ID NO: 55494 - DNA, 617 bp, Homo sapiens
ccgggccccccctcggaagtcttctagaattaattaacgcgggtactcagcatttatattttgagtgaaaatatgacaacattttccattgaaaaaaagaatgtttttaaaacaggaaataacaccataatacaaactaaaatattgaaggtatttgcaaagttctatgaaagaagagatgaaaaagcaatcaatcttgtttggatggagtagaagagaagagagtagagtagccaatgatgatgattatgatgatggtggtggcccctaccattatcaccactgatggagcctagcctcttcaaatacattttctatcattctctcctctagtcccacctctctatctcacagcactccttatcatttctcaaacagttcaggatttgacataagcttttgtgttgttttatgataattttgattaagatatatttatatgtgtattcatgtagacatatactgttgcaatacaaaacctcttactgtaattttttgtcaaaacagttttgcaaaactctattccagaacaatagattcttacctttggtagatcagagacttctttgaaaatctggtgaaaaaaaacatttgcaatattttgcacacaatttcag

SEQ ID NO: 55495 - DNA, 580 bp, Homo sapiens
cccccctcggaagtcttctagaattaattaacgcgggtctccaaagaaacttctaaattaaaaattcatagaggacacagctgtaaagtgttatgaatcagattaagcaaatatataaataaaagaattatattcatctccacaaaagccatattttgaaaacatataatagctcatctaaaatgtactacacattttctaacataatatatttaaatatcagtgtttattaagcaatattcgatgttacctcggagaaataatgaaatattgaatttattacatcataaaagataacagagaggcttaatacaaaaataactaactaaatgtaatgacaatttattatgtaacattataatttgcattccatgataatcagcagcatattttgaaaatatattgaaagaatattagtgtcggccgggcgtggtggctcacgcctgtaatcctagcactttgggaggctgaggcgggtggatcatgaggtcaggagatggagaccatcctggccaacatggtgtaaccccatctctactaaaaatacaaaaattagctgggtgtggtggtgcatgcctgt

SEQ ID NO: 55496 - DNA, 602 bp, Homo sapiens
  misc_feature 28: n = A,T,C or G
cgggcccccccctcgaaatacttctagnaattaattaaccggggggggggtcgatgcaaccccctagtcctagaattcactgacgcgggtaaaagggccagctgggatgcccccaaaacatggggactaagactgtatcgatccactggggccgacccggtgaccctgttctctctgacccgccaggtcctcaatgtagggccccgcgtccccattgggcctaatcccgtgatcactgaacagctacccccctcccaacccgtgcagatcatgctccccaggcctcctcgtcctcctccttcaggcgcggcctctatggtgcctggggctcccccgccttctcaacaacctgggacgggagacaggctgctaaacctggtagaaggagcctaccaagccctcaacctcaccagtcccgacaaaacccaagagtgctggctgtgtctggtatcgggacccccctactacgaaggggtggccgtcctaggtacttactccaaccatacctctgccccggctaactgctccgtgacctcccaacacaagctgaccctgtccgaagtgaccgggcagggactctgcataggagcagttcccaaaac

SEQ ID NO: 55497 - DNA, 267 bp, Homo sapiens
cgggccccccctcggaagtcttctagaattaattaacgcggggtgggggagggtacttaaattctggaaccagataatgagagtttgaatccagactgttatttagtgtaaatggtaggcagaatttgaaacagcactcaagattcccattatcctggtgtacatgtccgtataaatgtcttccccttcagtgtgggcaagacttgtgaatatatagtcggccctctcaatctgcagattcaaccagccacggatagaaaatattta

SEQ ID NO: 55498 - DNA, 380 bp, Homo sapiens
cgggccccccctcggaagtcttctagaattaattaacgcggggtggggataatagagaactttctgtagctcatattttagcagactagaaatgctcaagaacacatataattcaactttttacagcacacacatctttttctcacctttataagtggcaaaaatttaacatgttaattagcatgaccaaaacttatagcctttatattgtaaacaaaaattaaaaagtatatgaaggagcaattacaagattgatttctacttttcagaaaattgcaggtcagaagacaatggaacgaggtagataggtagatagcataataatttcagattgtgaccattgctgctaggggaataaggagaactaaaaaaaaaaaaaa

SEQ ID NO: 55499 - DNA, 439 bp, Homo sapiens
  misc_feature 12: n = A,T,C or G
cgggcccccccntcgaggtacttctagaattaattaacgcggggaggcactgttttaattattgcttcaagataaattctataagttgttacctaaaaccagtaggttacagtcaaaataaatgtgtttttttaccctgcatatctaccgtattgttgtattgagaaaaaaatgcatctatcattctgggaagtaatgtatcagcatattgagaaagaaaatgttaactgcatcacataggatgttatcaagttgttttctgaaattagaaatcaggtgcccaaggagagcttaccagtgtttggtccaaaccataaacaaaattgcaattaccctattgaaaatgtttaagaattactgttatgggctgtttaacctatctattaacctatctagaacctcattaaaactggtaagctggtgcggtggcatgcacctg

SEQ ID NO: 55500 - DNA, 580 bp, Homo sapiens
  misc_feature 568: n = A,T,C or G
ttaattaacgcggggcctcctcctcaacaatgaataccatggagtgctctccaggaaaagacaaagaattgagtccaaactcttattatgtagcacaaaattaatagcaaagggaagggctagaaataagtgagcttacctgcattgatgagatctgcatcagcttcatgttgtcgtggatatggaccctgtcaaatacaacatacattcaattagtaaatgaagattctcactgaatcacatattagaactataatataaataacttccctaaaaaccctataaatttatcatccgaatacttgaggtaaacttttgaaaaataattcggttgtgtccatggctctgtttcttatgttagtcttttctatactaaagttgtgattgggcaaatgaaaaatattttctaaaaattaccagtttgaaagaaatgctatactattagaaatacaagtccataaaacaaaaagtaattatttagtccctactatgaaaatgtattagaaatataggtcggtaaaactaatgtaagccagagcagtggctcatgcctgtaatctcagcattntgggaggctgaa

SEQ ID NO: 55501 - DNA, 623 bp, Homo sapiens
cccccctcgaaagtcttctagaattaattaacgcgggcatgtggccaagtagataggaaatagaaagccaatgctgcaaaatgggatattttttctctttgcaataagattgtattaaaatcaattttattatggtacataactaaacaagtaacacaatacctgagctttcctctggataatctaaaatgcgacatgcttttaaatatattttaggaatattttaagggcacttttcccctctaaatattgctttttagataagcacatgaatttgaaattaatcaatagatgtcctacttttgaaaccaatcattcatacctatacagtgaattagagcttttcttgtattgacgacaaacataattgcacagatttatagtgttttacttcatttactgtatatatcattgcattaaaggaaaatacaaaaagtatgtgtgcgtatatgtatatatacatatataactcacatattaatgtatgtagacacattcaccaacataaacatttaatatttaaatatctctgaaattgagacatgttttaaaatagatgaaaaatcactgctgtagttgtcttggaatttttttttgccatttcctacatgcgtaataacttg

SEQ ID NO: 55502 - DNA, 614 bp, Homo sapiens
  misc_feature 28: n = A,T,C or G
cgggcccccccctcggggtacttctagnattaattaagttactagacataactcacaagagctaaaagcagcacaattcaaataaaagtcaatcatctcatttgataaatacactgaaaagtagaactctgaaactgcaaggtgataagaaaatggaggtaaaatatctacaagtctatgtgtcattaattcatcttttagtttgaaaatagtaagggtaatcaagacgagaaactactttgaaaaacaggacataagattaacgtcatttagaccactgaacaatgactagttcactatgcaactaatttacttacttgtcgtcatgctcataaatattcagacccaaagcatcaacacctagccacaattcagttccctttttatttttttatttcaaaatagttgactccatacatttctagatcttgtgcaatcttcaggtattccatcatagaatcctccctgttgaaataaaactaaatgtaatatatttaagtaggagcatatcaaactaaagttgcaaaatacctggaattaaaaattagtactttacataagtcaaacaatcttttggaaataatgtaataataaatgttacgacatgaaaatac

SEQ ID NO: 55503 - DNA, 601 bp, Homo sapiens
cgggcccccccctcggaagtcttctagaattaattaacgcgggtctcaataagtactttaatgatttgagtatctcttatctgaaatgcttgggagtgtaggtgtttcagattttggattttggaatatttgcattataccagttgaacatcccaaatctaaaatcctaaatgctacaataaacatttcctttgagcatcatgttggtgctcaaaaactttcagattttggagtatttcagattttggattttgaaatttggaatttggtatgctcaacctgtattgggtatattacttttaaattatattcagtcccttgagttattgctataaaaagccagttatttccagggtccagaaacgagtcagagatggaattctgcatatgtcttcataagaaggcaaaggcatctaaaattataaactttgtttttttacttctgataagaagtcacttctgagtgaatttagagtttataatgacactgtgattacttgaaaatgaaggattggtcatgcatattcaatgtagtaaatacagtaataagttttctaactcattttcttctccgacaatggaagctgcaacatgtgcttga

SEQ ID NO: 55504 - DNA, 586 bp, Homo sapiens
  misc_feature 528: n = A,T,C or G
cccccctcggaagtcttctagaattaattaacgcgggggaagtcttaatattgttaagatgttagttcttccccaattgatctatagatccagcacaatcctgatcaaaatctcaaaatgtttttttattatggaaaatggcaagctgtttcttaaatatacatagaaaagaaaagccctagaatagtcaaaacatttttttaaaggtcaaattttgaagacttaatgcttcctgattttaatacttactctaaaatctacaataatcaagactgtgaaactggtgaaagaatggtagacacatggatcaatggaacagaacagagtccagaaatagactcacaccaatatagtcagttgattttcaacaaagttgcagagtgaattcaatgaagaaaggctaatcttttcaacaaacagtgctagaagaagtacgtattcatatgtaaattcaaaaaacgccttgactactacctgatacaaaacataaaaattaattcaataggatcattcataaaataaaaactntaaaaaaactattaaacttctagatgaaaacagtagaaaatctatttggctttgcatt

SEQ ID NO: 55505 - DNA, 579 bp, Homo sapiens
  misc_feature 32: n = A,T,C or G
taccgggcccccccctcggaaatacttctagnaattaattaacgcggggttttcactaggaaatgttccctcgattcccagaacagatcaagtccccttgctggtctctctcaaatcaccataatgcttacatattttgtgcctatccatttgtttctatggttatctgatcaacattggtatcttcctctgattgtaagtctcaaagagcaagaattatatctgtttcttctcgccgttgtatcctcagctcctcgtatcttgtttaaaagagtagatgtccaacaaacacttacattataaattaaattaacaaatacccaccatagtatctggagcaaaactgatcctgaataaatacatgcaaccattcacaaatgtatgaatgaataaacgaaacttgcttacttcagaagttgttccaagagagtctaggaaactcatgagtaaattctatcaattaattccacaaatatttattaagccccttctctgtgttaggcactcttctagagactaggaatatggaagtaaacagaaaaatatccctaaaaatcaccaacttagggaatattttct

SEQ ID NO: 55506 - DNA, 636 bp, Homo sapiens
cgggcccccccctcggaatacttctagaattaattaacgcgggacctcttcaaagagcagtaagacagataattactgtaagcaagggaagtgcctgatgcttataacaccatcagatctcatgagattcactcaccatcatgagaccagcatggaggaaactgccccaatgattcaattccttccatctggctccatccttgacatatgtggattatgagcattacaatttaaagtgagatttgggtggggacacagggccaaaccatattaactatggtccctgaccatgacccctgaacaaagaaaagactagaaatggcagatcaacaattggtatccattttctccaagacaaaattgccatatctaaagtggaagtggagagcctgagaaatttagcagcttcactgaggcaggagaacaaataattgaagattaagttctgcaaaaaagaattgaccctggtaaaataaacaagtttcagttgtcttttaatgacggttatttagcaatacatagaaccgggaacactgactcaaataattgaaataatataattttctagctttaacactggacataagcaaaatacattgtctcttaagttatataaaatcataaccatcacatatt

SEQ ID NO: 55507 - DNA, 417 bp, Homo sapiens
cgggcccccccctcggggtacttctagaattaattaacgcggggggtgcggcgtttatgcggctgagagtgcgggtctcaggcagaatgtggggcggggacgtgggaggtggctggtcaggtgaaggaagggtcgatctaaggaccctaccattactaatcacatctaggaaatgtggggcggtgccttgccccgagtccctgcggatagttaacactcccttgggcttcgaaagtagatctttttagactcgaccctgatttcctcttctccaggtttgagacggtaacatctgttttgcaggattgtgaaaaatgaggtcctctttctagagtacctgacaggttgcttggcatccagaagatgtttagctaaggccttgcccgagatggacagccggattccttatgatgacta

SEQ ID NO: 55508 - DNA, 609 bp, Homo sapiens
  misc_feature 571: n = A,T,C or G
cgggcccccccctcggggtacttctagaattaattaacgcggggtgctcatggggagagccatgtctggccctgattcctaggatcccacatcttctttcactttaagaacccacaaacaattgatgcataagcgctctgcattgggcaactgcccttatctaataagcactgtccccctcgcccaactctgatgaagaatcatagggaacccatgcggatgtaacgcgtctctctactatatcaatgcaaaattaactggcctttggaaagcacagaattgactaacacattattcactactctcaagaacacatggagcattcttcataacacatcatactgtgggcctttcgacaaacgtacacaaatttaaaagaataaaaaaatcaaagtactaaaaagcactttttgatgccataaagtaattcacctcaaaattaatttttaaaaatataataaattttaatttaaacatcacactttgaaaagcccatgagtcaaagaggaagcctaaatgaaatttttaaaatattgtaaccataatgaaaataaaaatagaacataaaatntctgagatgcagttaaacagtgcttacagggctgtttg

SEQ ID NO: 55509 - DNA, 402 bp, Homo sapiens
  misc_feature 23: n = A,T,C or G
ccccccctcgaaagtcttctagnattaattaacgcgggccctatagagcctcaaccctggttaaatccaaattgacaccaagtttatgcctatactactgaaactaaatttgtcttggaccagtgtttaattgttctcactttaatacctggccatagacccaaaggggaccttctatgctgcccagacattacaagtctttatttcattcataatcctactcttctataccttttcctctctcttcaaactaccgcacaaattatctcatccctactctcagctgataatcttgtttcttatttcaatgaaaaaaaatcgaccaacaaaaaaaaaacctttcacatacttctgttattacaacttccacttcaatacaatggtaacaaaaaaaaaaaaaaa

SEQ ID NO: 55510 - DNA, 497 bp, Homo sapiens
  misc_feature 9, 460: n = A,T,C or G
acttctagnattaattaacgcgggtgtctatgcgtgtttataggtgaagtgagtttcttgtaggcagcatatacaatacttgggtctttacacttgtgtgtgtgcttgtacacacaggtacagatgtgtgtacaagtggaagtttaaatttattctccctgaaattttcttgttagctcaaaattaaagctgttaatgtttttcagactagtagtatgttccagtcactattcctacattctctgagtcagataatattattactgttttatagatggagatttggaggcacagaaaagttaaagaactttcctgtttatacacctagtaagtaatagagcccagattcgaacctagacattctgacaggtctagtaattaatgtttgggagctgatctgaggtcagtatggcttatatccactattattttaatatataatcaaaatcatgttcattangtgtcaagatggtgttagaaaattttagtgtcttgag

SEQ ID NO: 55511 - DNA, 633 bp, Homo sapiens
  misc_feature 602: n = A,T,C or G
ccgggccccccctcgaaagtcttctagaattaattaacgcgggggatagagagatatcacagatttttttttagtagtttcccagtaaattaattattcaaataataattgctaatagaattcaaagggcaatgtaagtatggtctgtcatgatgaagaaagtcttccttgctcaaatgatacctgtcctggccttttccagacttctagtcctctgatgattcctttttctcctatctctaagtcctcttatagatttcctttcttccatctctgccattttcttatcctttgcttatactaattatcttcaatgttggtgtctttgtattataggaattatttaaaacagtttgttcattttacaagaattggtttagttaaaactggatataatatataaacccagttaactgggcatatgtaaattgtaatatgaccaatgaagaaagcaaatgagtgaccaggaaggaaggacatcactgctacccttctgtaacatggaattttaactcttctctcaattttaatacttctttcaaagtatctcaagatactttgcatttgtttgtgacatggggagcatttgatttatggttcangtctgggtaccaatgtcaattcatttataaa

SEQ ID NO: 55512 - DNA, 603 bp, Homo sapiens
ccgggccccccctcggaagtcttctagaattaattaacgcgggaaggccaattctttttttaactattatttaaatctctttaaggtatgaaaatcataacaattattgtattgtttataacatatattcaagtagaatctttgaaaaaatagcagaaggtcaggaagggaagtatcctagtataagattcacgtatttatatattatatatacatataacacacttttaccttgaaaagtaaaagatttacagtataaatccttaaacaacccctaaattaataaacaaggagttatggctaataagcaaacaaaggagattattgggataattttttaaatacttgatgaatccaagaaagtccggaacaaaagataactatccaactcacatgataatggcattaatccattcataagagcagaaccatcatgacctcatcacctcttaaaagctccacctctttatactgttacagtggcaattaggtttgcaacacataaattttagggaacattcaaaccatcactttagggaaatggtaatcaaaactacaatgatatgtcacttcacacccatcaggatggctattatttaaaaa

SEQ ID NO: 55513 - DNA, 597 bp, Homo sapiens
  misc_feature 524: n = A,T,C or G
cgggccccccctcgaaagtcttctagaattaattaacgcgggtttccatctctggttgtctggattcacgaatgcagaacccatggatacagaatgccaactgtatagtcatgaggaaataatcagggaaaaaacagtaatattctaagtattacttaaattttggttttgaatccattttaacatttttttcctcctggaaagattttatgactaaatttatctgcaaattgtaatcaccaaaataggagttaaggatgcaaaattgtttgttttcattggtactgccaacattttgttattcctgagttcaaacggatacatttaaaagcctctgcaaccaaatgactgtgacttttagctcagtcagtttctgtgagaaaaaaagacactattttaaatcatttttatttattaaacactagctctctacaaaaagcagctattatgatattacaggactataatgatcaacaaaactgtagtagttgtaatctgggcaataaaactttaagcataaactntggaagcagagcctgggtctaacctgataataccacatgtatgctgtgtgaccttatacaggttacttactct

SEQ ID NO: 55514 - DNA, 428 bp, Homo sapiens
  misc_feature 9: n = A,T,C or G
acttctagnattaattaacgcgggcacttgaggttttggcttttgtttaagcataaataattgaaatactgtatgataccatgttaaaaataagccaccacgccaagactgtattaatagcacagttcaagtcactgctgtaacgtacatggcactgcatctttcactaacaaacgaaatgtaacctgaactttgtcttacacatagccttgaaaacagatatttcattactaccacatatttttgttttatatcctgccaaatgattaactaagttttattgtaaaagaactgtcaatcagagcacagtataatgatcagggtacaattatttttttttttttacatctgatatccaccacttacaaacttaggcaggccagttggcttcctggaagctcaggttcttcataaagatgaagaatatc

SEQ ID NO: 55515 - DNA, 541 bp, Homo sapiens
  misc_feature 38: n = A,T,C or G
ctgggataccgggcccccccctcggaaatacttctagnattaattaacgcgggtatgcattcttcattagagtattaaaacattttctaataatttgaagctatagtgtgtttgatttgtagtatattaaaatctgtcatttttcttttaggctgtaaaggatgtgaatctttgaacatagttgccatgaatcttaaataacaaaaagcagttagtatttttaaaatattccatttgttttataaacattattttgtaggtatctgtaatgcgtgatgaggataaattactgaggattaaaattaatgaactggagaaaaagaaaaaccagtgttctcaggaattagatatgaaacagcgaaccattcagcaactcaaggtaaacagttttgtttttaaagatgatttaaatgcattctcttggtatattttagtgtacaaaaaggtacaaatttgtttttaataacaaccctgttttgactttttcttgagtctagaaataaattatttaaaattaaataggcaaaaaaaaaaaaaagcg

SEQ ID NO: 55516 - DNA, 612 bp, Homo sapiens
cccccctcggaagtcttctagaattaattaacgcgggatattacagagttgtcgtttgacttgcaacctagttgtcttgctctcggcccaagaaaagtcattgattttcagattgtttagctttcccttgttgtaaggatgggaatgattatttccaagatctttataagttggagctagaacagacagtccatcatattttaaagtaggactttagtatataacccttacaaattcaatcaattctaaattagttatggtttttgtgataaatatgggctagtcattatcaaagcctttttaagataccaattgaaataattatgagttttttctttaatgtttttattatggatcacatttattttttatgttagtcatctatgaactcttggtatgagccctatatgattatgatatattctgtttaatgttggtgcagttgtgtaatactttctttggaattatttttgtatattcattaaaaaatgggtctgtggtggccgagcggagtggctcctgcctgtaatctcagcactttgggaggctgaggcgggtgtatcacaaggtcaggagttcgagaccagcctggccaatatggtgaaaccctgt

SEQ ID NO: 55517 - DNA, 619 bp, Homo sapiens
cccccctcgagagtcttctagaattaattaacgcgggcttatttgtactctatggtagcagcctatttttcagtaccttagtatcaacagtcacgtaaaatctagcaactactactttaaaaaaaatcagtacttttgatcttcaccgaattgataaagcttaagagtaatgtgatgaactaacagtttaactacttaattgccgtattactaattctggaattgacacacaagacaagagcggtgacatcagaacatttcaagatccaaaaacaattccaatactgattaaatcctcaaaaatattaaagttcagatcccttatccacaacacaggcaagcaactccaaataaataaatgcgaggagggaggaaggcaggacataaaatttgccatcaaactccacaatgttgttaggttagaaaattgtttttttgtttttttttttttttgctgattgaacaaacaagctttgcacaggctctcctgccctcctgatggaaaataagttagaaaacgccctaagacaagcactcaaagagtctagatagctatccccctctcctccctccctcattttaaaaaacagcgagaagaataatcaggcttccacgtttt

SEQ ID NO: 55518 - DNA, 620 bp, Homo sapiens
  misc_feature 27, 582: n = A,T,C or G
cgggccccccctcggggtacttctagnaattaattaacgcgggggtcgtcttggggataatgggttgtcttagtggccccaggggcccaaaattctaaatgccctgcaatgtgtaggacagtccttcaaacaaaacatttagcccaaatagcatcacttttaaatacagaatatgaagaaaaacaggcagtttatatcacaatgaccacttaagaactgtaaccttgtttctgttttctcatgtataaacacacaacatacaaacccctgtgtttgtgtaggctattgtgaagatgttaatggcaatgtaagtaaaatgcctaataacactgcatggcaaacaatgtttaaagacagaaaggtttaactttctaaattctaccataaactattttaataagtcatgcataagttacccctcatggaaaataggtactccagaatgatatacacagacttcttctagactctctagaccctggtatgtctaaaaaagaaacaaagagaaaaaaattagctgcgtatcttacagttacatctcatacatatttgcagtattggtgacctctacgaactttgcanaatacttaaatgacaattacctagaaaattcacaaatc

SEQ ID NO: 55519 - DNA, 433 bp, Homo sapiens
cgggcccccccctcggaagtcttctagaattaattaacgcgggtaggcctggcttcttatagatgctcaataattgattgttcaatgcgtaaataaattaatcaccaaagtgggggcattcattaacttgccatatttgttttccttcattattttgtgttttctaaatttagtttatagcacatttccatacagaatgtaaacaatgagttttagggaactttttatatatacatttttttttctcaaatagattctgacatcaaagtacttgaagatcagtttgatgaaatcatagtagatatagccacaaaacgtaagcagtatcccagaaagatcctggaatgtgtcatcaaaaccataaaagcaaaacaagaaattctggtaagatgatttgcctttaaaatgttatagtatattttaccacaaaaaa

SEQ ID NO: 55520 - DNA, 600 bp, Homo sapiens
  misc_feature 548: n = A,T,C or G
cgggccccccctcaagtctttaaatattaacgcgggatataatgtccagggttgttcctgagttcatctttatgaactttaaaagggggatcataatgcctttccccacttctttggcaggtattttgtaagagggtattatatgcctattttggataaaaaataatgaagtttgttattaatatataccagaatcccttgccttaaagattttatagtctaaagaacatagtacaatatttggcacatcgtaagtgctcagtaaatgtaattgtgggtagggacatgactttcttccttttaaggagcttatagtccaaatcttttatttttcgttgttaaacttaaaaaaattaaagcagaaatcacttataatcttatcactgtgaaaactttgtaagttgtcctgtcctttgtaaagcccttcagagaccaagagaatccagtagcaaagagcacttctagcctctgggttttagtctctaaacacttctttccactaaagggaatgagagctccttggagaagtgatttaattctaggcctgnggctggatatgaaccagaaacaaagggatcaaagaaatatgggaccttatcc

SEQ ID NO: 55521 - DNA, 384 bp, Homo sapiens
ccgggccccccctcggaagtcttctagaattaattaacgcgggcccagtgcctcttatctgactcttgcctctactttttctttaaagcatatcttcctccatccctccttacccctcactaaaacatagctctaggaggacagagattttgttcctcttgtttgctgtggtatcccactgtgttagaattctttgtgggcacatgagggtactaaaaatctatttgttaaattggatgattaaaatacatttctgagggctggcaaaatgaatacttaattcagattttgccttaaatgacccaaaagtgagacattggcaaacttgcttactatcaggtgcttatgtctagtgcttccaaaaagctgtaaaaaaaaaaaaaa

SEQ ID NO: 55522 - DNA, 362 bp, Homo sapiens
cccccctcgaaagtcttctagaattaattaaacctataatgagtattcttaatggagaattcttaatggatggattatcccctgatcttttctttaaaatttctctgcacacacaggacttctcattttccaataaatgggtgtactctgccccaatttctagggaatttgtcttttgggcttgaatgtacttgttttctgttctaaatactttttaaagaaaaaaaattttgacaaataagggaaaatattcattttgccatccatattacattcccgaatttgaagtcagagcttctaccaaggtcaccaagaataattttaaagcttccaagaactgtttaaaagtgttttcaagtctg

SEQ ID NO: 55523 - DNA, 642 bp, Homo sapiens
  misc_feature 59, 561, 611: n = A,T,C or G
cgggccccccctcgagagtcttctagaattaattaacgcggggctatcacataacatgngaaactgcaaagcttatattacttgaaagtgaagaaaaacagttttcactgaatttcaaaaggctgtaaaaacagatcagggttaatagtgttggcatgctggagcactgtatgtaagcaactgtcctcctcaggaaattcaaaaccagaaacacctctaagaaaaaaagcctttcccactacatgaaagcctctgggcttcccatggagcactgcatggaagccccagggggcctacccatgtcaccggcactccatgtgtgggtggagatctccaactccaacaaaaagatagagctctcttggcaggaatgacaagtgacaaagttctctatcttaccccgtgccttaaaatgatcatctgagtgtcccagagtaaacagtagtatttgtaaaaataaaaaaatatatatttttctattgaatatgtatatatataatctttaataaattattacagtatttttaggcagatactgttgtggtcacatggctgatacanataggaacaccgataggggtgaatatcttgctcctgtctttccaagatancagaaaggaaaaagaagacctggtgacagtg

SEQ ID NO: 55524 - DNA, 580 bp, Homo sapiens
  misc_feature 11: n = A,T,C or G
cccccctcggnagtcttctagaattaattaacgcgggtagtctcttattaagtctgtactaatatctgaataatcatttaaaaatacaagtctggtcagataattttcttgcttccagtttcttcaaagctcccaatcgccttagaataaaaccaggctttcttagcatggaatgcaaggatcttagtgatctagtcatggcctgacttttcagtcctgtttccttacaacttcccccaaatgacttgtgggtccctgaaaactctgcagttttgcttttcacccttgcttttaatgtttctctgcttggcgtgttattgtattactgactagctcctatccatgctttaagacacaatttaaattttagaaacttttaattatggatattgtccaaacatacacagaagtagagagaataatataataaaccccatgcatccatcacccaactttagagtatcattttgcagatttttcaaccatgatttttttttccaactcagtcttcactggagtcctccatgacctctctaagcaaagtgagccactcttttcctgtgttctccttagcaccttg

SEQ ID NO: 55525 - DNA, 365 bp, Homo sapiens
  misc_feature 31: n = A,T,C or G
taccggggccccccctcggggtacttctagnattaattaacgcgggacttgcaaaatacattcataaaatttttcttccatgaatacatattttatagaagccaatttaaaagaatttaataaatgcctaccttaaagtcaagctcttagggcaaaagataaatattataccacttcctaccctcacagtagtaatggaccagtttgagaatcagaaacaacagcaaatctttaaacactatgctaataaagggacaagcgcagatagaaatgaagtagagcagagcaatgttattgaaggttgtatgtgagtgtgggagttcatttttgtgtgtctgcatgtgcatgcatacatgtgtgtgtat

SEQ ID NO: 55526 - DNA, 611 bp, Homo sapiens
  misc_feature 28: n = A,T,C or G
cgggcccccccctcggggtacttctagnattaattaacgcgggacatacctcgtagtgaaatttctggctcatagaagaagtacatgttccactttgctaggaattgtcaaaataatttctaaaatgtttttttcaataaagaattgcaccagcagagagagaatgttgttgttgtgtcagctttctgccaaaagttggtaatatctgacttttcagttatcatcttttccttaaggaagacctgcgtctgttttgtatcttaagaaaacgtttttattaatccgatgacatacgtaatgaactgaatgttaagtccttcctagttttatatgttgaagctctaaccaccaatgatggtatttagaggtgcggctttttggaagcaggtaattaggcttagatgagattatgaggatagggtcctcatgatggggttcatacctttctagaaagaaactagagagatttctctctctctccaccatgtgaggacacagcaagaagatgactagctccaagccagaaagaatgccctcaccagaaaccaaactagcctataccttgatcttggatttccagcctccaaaactatgagaaatgcatttctctt

SEQ ID NO: 55527 - DNA, 628 bp, Homo sapiens
cgggccccccctcggaagtcttctagaattaattaagcgggaactgaatgtccagaggagaaaagactctttatgcctttttgtacttttgaatttcgtactatatgtattatctattcaaaacacatattttttaaggtaatacagccattacagtttccatttatcaaatattatttctaatattcaatatcttccaatcagtatgatttcccatgaacagtttattttatatttaaagtaataccaaagattagcagctattgatctttaaaaagtcaacagtattaggcaatgaatcgcagcctaatttattattttccttgttccttgcttttcctgttataatttgcttttaaactgttttcctgctaattggaaactccatttgaaggtgaccaggaaaactgacataaaaggacacatatttgttaactgtgatgtttgttagctgtgttacaagatctgttgaagaatctggttgaaattactatctaaaataaagttggtaagtaatccacagaactgatttaattctactatttcaagttgcactttgcttctgacaatgatgcatattcataccatcaaatctgctaaatatacataaaggccactctattaaatg

SEQ ID NO: 55528 - DNA, 418 bp, Homo sapiens
ccgggccccccctcggaagtcttctagaattaattaacgcgggtagtagttttggacagtaggaaagacattttatacattatagcataattggtaacagtaatactgtatgtcatttaaattcctatcaaacataattcacatcatctgccaatttatgacataatcctttctagaagctttattttattttaaaattgtgtattataattattaaaagtttttatagaattgccaaattattcttgacctccttattgtatttagcatcataatataatttcaagatgcatgaaaagtatttattagaataggcacatcagcttcaaatattctaaaatgtgaaaaatatgttgtatattttgtataaatagaaagtttttatttattgattcgttataaaaactgtagtactact

SEQ ID NO: 55529 - DNA, 484 bp, Homo sapiens
cccccctcggaagtcttctagaattaattaacgcggggggggaaagaaaagaaaaaaaagaataggcaagaagcatttcatcctttttaaattttttttaatttttttttttactgtgctgtcttgacccagctagaacttggtcagttctccctcttgagcacagtcctaaccactttccttattgagctatcacactcagagccactatatgtccactctaattgccccagggccaagtactagatagctagggatagcctttacgtcccagagatggccaaaattatccaaattagccaatcacagggagcccttgatacttatctaatcccacgccacttgccatagacaacctgtcccctgaggttccagcttgccattcccctgtccccaggtgtagcactctgtgtagccccacttggtagtcttctattttttggagctgtaaaaaaaaaacaaaaacaaaaacaaaaaaaaaaaa

SEQ ID NO: 55530 - DNA, 607 bp, Homo sapiens
cgggccccccctcggaagtcttctagaattaattaattgccatagatgctttgaaatacaatgctaacaaatattagcaagattaactgtagagactaatctaagtttttttcagtttgtaaccttcagtttctttttcttttaataagtttcataggcgaatttacaaaggaataccactccagctcagaggtgaagtctgggccctccttcttgagatccctaaaatgaaagaagaaacaagggacctgtatagtgtgagtagctaaagctaacttgttattttgaaattaaaaagtaaaatccatttcttttagcattcaaggtgacataagatattcatatgatcacttaaaattatattaaaattctatcgcattggaggttttggaggtctatttgttttcttgattgcaaaaatacttcttaaattttaaatagatacttcagtaaaaatgttattgtctgtatcaataagtatgaagtgcttttcaaatacataaatgatcaattaaagtaattagatgatcaatgttaggacgtggttgcatggaaaatggactaacacctaattatagctgcttgtttgccacatgggtgttaatgg

SEQ ID NO: 55531 - DNA, 495 bp, Homo sapiens
ccgggccccccctcggaagtcttctagaattaattaacgcgggccttttcattatttctcatgcaacaaaatagagcagagtttattttaaaatgtgaaaagttacactaatgaaattcattttattagtgttgaaaataaggaagtaattagagcatttctataataaataagtaaccatcatgagcaatgccaaagaatatattgaactgttttcttcttgcttttatttggaaatgaggtacatgctagaaaacaatacaaaacaaaaacctcaagcaatcccagagggcagtcttctttagtttgtacccagagaaaaccactaatgactatggtaggaagaattccttgtggttggaaaacagatgaacaagttgctgaaagtctcatttatgtattaagccagttcagtcagtttgagagttacatgaagggattctgttgtccaagtatctgctaactgccacattgaattgtttaaaaaaaaaaaaa

SEQ ID NO: 55532 - DNA, 544 bp, Homo sapiens
  misc_feature 9: n = A,T,C or G
acttctagnattaattaacgcggggagataattatttaaaatattcaaagatgtggtctaagaaatatccacaccaggattattggaattccttgtgaaaatgcagaaacttacgtttttcctcaactcaataaatgagaatgttcaggggtccacttcagggggatctagattcttctaaaggcccaaaggtaaatattttttatacttaagccctagaataataactttagaaactttaggtaagaaagactacatcgatttctaggtagaaaaatgaaaagatacagagaaaagatacagttatacacatatttttttcaatgatcaaatttccatttttttttttcctgtgcagatcagcatcagtttaaatatatcctcactgggagagtgacgttgacatgatggcagaatagtttctactatgttcttctcacagtgcaccgatttggacaaaaacccacagcaagagtgcctttgtaggagtctaggagtccaatcagtaagttccagcaaacagttgaagtggaaaaaaaaaaaa

SEQ ID NO: 55533 - DNA, 590 bp, Homo sapiens
cgggccccccctcggaagtcttctagaattaattaacgcgggtcttaagtcataatatgtttatattaatactaatccaaagtatattttttctgactcttaaatggtgccatcaggattctgtgatcatttaacatgcactctgcactttaagaacttgaatttctagtcataaaagcaatacaatcacattagaaacatatgaaaaaataaaaagatatttttgtcacctctactctcataatttctagtgtcttccttggtctttacctgtttagtctcttttttccctgtatacttctaaatataacataattttggaatacctacaatttgatgttatgctttaaattttaagttaaagatactttcaaattgctacgtatatttgaaatcaggactgtaatagatgtgtacctacatgcatacacatatatgcatatagaatatatatgtagtaatgtgctttccaattgttctatttttgaacgttaatacttggttttgaaatttttgatatgagtaacatgaatgtgtctataagaaatacacatgttccatattttatatttattttcatagaaaaattc

SEQ ID NO: 55534 - DNA, 285 bp, Homo sapiens
cgggccccccctcgaaatacttctagaattaattaacgcgggtagatgatttctagcaggcaggaagtcctgtgcggtgtcaccatgagcacctccagctgtactagtgccattggaataataaatttgataaggtggtgaaaaaaaaaaaaaaaaaaaaaaaaaaaaaaaaaaaaaaaaaaaaaaaaaaaaaaaaaaaaaaagaaaaaaaaaaaaaaaaccgcccccccccccggtggggggcccttctcgccccccctcttactacaacatcgccccccaaaa

SEQ ID NO: 55535 - DNA, 500 bp, Homo sapiens
  misc_feature 28, 41: n = A,T,C or G
agactggggtaccgggcccccccctcgngggtacttctagnattaattaacgcgggttcttgattaaaattattattgttgatgcagagtacagtattcatgataaatttattaatagatagtattcagatctagaattctgtccattaccatattatatgatttaatagagaaacgtgtcatgtcagtgaaattgcatctgactgacctgtatcttatctaattataaatcattgtttttcctaattatactttagggcatattattcttattttggcacattactatagttaaatgtataaacaatttatacagttatatagaatcccaaagtatgtagttatgctcatttaatggaaatttttagttgctttaaataaaaattcaatgattcatgatttgtttgattttgaagatttgtctcttggtcaataaaagggctttacatttaatttggctgaagtttttctttcatcacaacatacaaaaaaaaaaaaaa

SEQ ID NO: 55536 - DNA, 500 bp, Homo sapiens
acttctagaattaattaacgcgggagttctttcaaacaataagatttaaaagaaacaaatttaaaacttgtcacattaaaaagtctgtttctacttaacatcgtattggcattaaagtacttatccttccacacaaagtggtttatcatctgcgtttcaaatttggaataaaaaaagaaataaagagaatacctttttagtccatctttttactccattatatcctttggttaccagctgtctatgaaaaaagctgttgaagaagtgaacctagaacagacaacaaacacaagcaaccagattatattaggctgtgcccagatttaacttcaaaagaggaaattttaaaatgtttgaatgtaaagcagacaaaaaggaaggaaaaatttcttcataaaaacaatgattgaggaggcaagtggatcatctggggtcaggagttcgaggccagcctggccaacatggtgagacactgtctctcctacaaaaaaaaaaaaaaa

SEQ ID NO: 55537 - DNA, 631 bp, Homo sapiens
  misc_feature 38, 54, 604: n = A,T,C or G
ctgggataccgggcccccccctcggaggtacttctagnattaattaacgcgggnaaataaatattgaatttaaataccttttaaatactggattacataatagagcaatccaaaaaatcactcacatagtttaaagtagtgataataatgtaaaaagcaaatttaaatacctaattatttttcatcataagttgcagaaagtaaaacatgtttcaatttatgaacacagaataatttttgcgtattaaaaacaataaaatcacctcctgggtaaaaatgtatgtttttcaaagagcagtatagtttttcatgatttctaaaatgatttttatttcttccttttgggggaaaaatcgtcatgtaaacagcaccctcatcatttgtctttgaaagaagaggcttctgatgtggttcgtcaaaagaagaagtacccaaagaagcctaaagcagaggctttgataacatctcagcaacccactcctgagacattgcctgtgatcaataagagtgacattaagcaatatgattttcacagctcagatgaagatgaatttccacaggtgcttgttttaaaatattttaaagatatttcttcttagtattntatattgctatatttttaaaacaattg

SEQ ID NO: 55538 - DNA, 389 bp, Homo sapiens
ccgggccccccctcgagagtcttctagaattaattaacgcggggtggggataatagagaactttctgtagctcatattttagcagactagaaatgctcaagaacacatataattcaactttttacagcacacacatctttttctcacctttataagtggcaaaaatttaacatgttaattagcatgaccaaaacttatagcctttatattgtaaacaaaaattaaaaagtatatgaaggagcaattacaagattgatttctacttttcagaaaattgcaggtcagaagacaatggaacgaggtagataggtagatagcataataatttcagattgtgaccattgctgctaggggaataaggagaactgaaagggaaaaaaaaaaaaaaa

SEQ ID NO: 55539 - DNA, 296 bp, Homo sapiens
cttttgcctgcctctttatataaattgggttcaagtcttcttgtgattagaatgagctccttcaagtcttggtattcaattcatgcattctgagtgtagttcattgactcaggatgagagaaacagattctggcagtatttacagagtttattagtaagtttggatccctggtagaggtgaacgcttttgttttagatttttaggcacatttgtcctgagttttaatattttcagtgatagagacaataataaaacttcagggcaggatttctcagctttggaactactgacatat

SEQ ID NO: 55540 - DNA, 595 bp, Homo sapiens
  misc_feature 9: n = A,T,C or G
ccccctcgngggtacttctagaattaattaacgcgggatttttggcgaataaataggtacttatttcataaccagtaataccaatattctctaagcatcatatagttccaaactgtaatctaaaaaattaatctaactgaaatgatgcagtgttgatcatgatttcctttagtcttttaaacttacgagtcttgctctttaatatcttcaacctcgttcagagtgactaccaaaaagtatatgactaagtgccacataaaataatcttgagtctcattttaatagagaataaatctgtccagaaattttgttgaattatatactaaataataaaagttaaatatatgatcttccatttaactcattttttataaagtgagccagttctattttttttaatccttaaccaggagagtatgaatcacccacatttccaaacttggaatacttagagaatatgtttttaataactatatttaaatttgtattttttcctttcaggctgcatctatgacaatgactagcactcaactttggtcattctgctgtgttcattaggtgccaatgtgaagtctggattttaattggcatgtta

SEQ ID NO: 55541 - DNA, 600 bp, Homo sapiens
  misc_feature 28: n = A,T,C or G
cgggcccccccctcggaagtcttctagnattaattaacgcggattaaatagtatagtattccatcttgctgaggaatcaggattttctaaagcacttctctgttgtttgggactgaagtaatttgcagttttttgctcttacatttaacactgaaattaatatctttatgcctgtagtatttttctttttttgaattcttttttaggtgttatattttttgttcaaataacaggtgaaaaaactgtattcattggtatctgaaaagaagtcagctcttgcctcagttataaaagagctacgacagttgcgtcaaaaatatcaagtaagtttttgattttatcaagtaatttgattttatgatacttttagtattctatcttattcacatgtgctagttagaaccctggatattttacttgggtaatatagaaaacaaattatcattattacgttattgatacaattcttcaaaagagaattaaaacatgacatacaggccaggtgtggtggcttatgcctgtaatcccagcactttgggaggttgagacaggaggatgatcacttgagcccaggaattcgagaccagcctgtctaacaac

SEQ ID NO: 55542 - DNA, 510 bp, Homo sapiens
  misc_feature 16: n = A,T,C or G
ccgggccccccctcgnaaatacttctagaattaattaacgcgggacctctttaattattttggccccttttttgtcattgaattccaactgagccaaagcctggtcaatagacattcctcgtacctagaattaaagggtgagagacaaaagaaaataaattagtttacaaagtcaatgtttccttttcaatgaaagtcttacataatttgagtaacttctaaaaacagtgaattgaacccaaataaaagagaagaaaacaagtttgagaggagacactattctctttcagtcaaaatgaaacaaacattttaaccataaaactgagattataatagtttcaataacattaaaagacagcaaacatgacagagagaccacaggttggtaacaaccacactaggcattcaaggcatctccttctcctataggataaatgtattacatgtatatttgctgcttcagtctcccctcatctataaatttcatttcctaggaaaaaaaaaaaaaaa

SEQ ID NO: 55543 - DNA, 414 bp, Homo sapiens
  misc_feature 24: n = A,T,C or G
gccccccctcgaaatacttctagnattaattaacgcgggacctaatttaatcctcacgagaacatcatccacattttataaaaaagaaaactagcacaaaggcaagttatattcattcacatgataaatacatggcaggattgggactggaacttaggtgtgactgaccccaaagcccatgctctttcacagggaccaaaacagggggtggagtagaattcagtgtgcatgagttggcaatgaacaactggcctcgggaaaatgagtaaaagataaaagactgagtttctagctgggtatcatgtcatatgcctatagtcccaactactcaggaggctgaggcaggaggatcacttgagctcaggattttgaagctaacctggacaacatagcaaaaccaccaaaaaaaaaaaa

SEQ ID NO: 55544 - DNA, 622 bp, Homo sapiens
  misc_feature 11: n = A,T,C or G
gggcccccccntcggaatacttctagaattaattaacgcgggggacatcacaagaaaacaaaactgcttctaattttaaacataaaattcctaaatcaaagtttatgccacattttaaagtttttcttacatgtttccaagttgctttccaaaaaggttatagaaatttgccctcatatccatagtgtatggaagtgtatagtttcctacttcttcatcagcaattgtattttatactcttttccactgttggtgcatttgaaagccaaaaaatgttattttgtattgagttacatttctttaataataaatggactcaatatatttttagtatattctttgattattttttctcagataaatttttatttatgttcttttacatctgtctttcctgagtgggttccatattgtcttaacagcatggttctgtaatttattttaatatatggtagggtaagcctcttctaatacctattttgtttttttaaaaatgttatgaatgtttttctcctacaaggattttgactgaaatcgcaatttatttgtaaagtaattgaaaaagtctatagtattatcagaatgtgatatatctttccattcacccagatcttctttgaag

SEQ ID NO: 55545 - DNA, 505 bp, Homo sapiens
cgggcccccccctcggggtacttctagaattaattaacgcgggactcatgttttagatatctaccattattaaagttttcatgggtaagactagatcttaaaacagattgattttttgatgaccagaaactgaactgaatttgaacaagtcccattgggactgaatttttagcatctcaaaagtggtgtttaaaaccacactactctgacaatgggaaaccaatgaacatagtacagccacaggatctttatatactgcaatgggtggaagtaaagtttccctaaaataaaattgatgttcctattatcaattatcccacaaggaagtaaatcctgagacaagaaaggagggcttgggaaatatatgtcagttactgaagacaaagagaacctctcccttttctaggtgagggactcatcttaatgagcaatgaagcctcaatactgtaacagccagtgctagtgactgggcatggggtgagttgcccccaaaaaaaaaaaaaaa

SEQ ID NO: 55546 - DNA, 601 bp, Homo sapiens
cgggccccccctcgaaagtcttctagaattaattaacgcgggtatcagaaggaaatttcagaggtacaaatcatcccacagtcatatgtgtagctttatttactgttgaactagttatcacttcacagtgtctgtttgctcatttaactcaattgaaatgggaaaaagacaccatgtatatcagcttacaatgatactaagtttgtttgtcaatactactgctaatactaataataccatttttactactcctgctaagacctcacctttaacaagtgcttattaagtgccaggtattgttgtaagtacatgtattaacacaattatttctcataataaatagaatgtttagcgggtgaaatgttagaatgattgtttttattttgttaagtaagatacatgggaaatgtagtatgctttattaacccaccctatatataatatctatctatatatatatatcactagaatttgtaaatttgagaatttagttcttacttcaaaaatctaagacctctctgtagcaacctgtatatacagcccaactgtatagctgtgttatagatactcagtatctaagttaactatctatatacatcgt

SEQ ID NO: 55547 - DNA, 484 bp, Homo sapiens
accggggccccccctcgaaagtcttctagaattaattaacgcgggtctcccttttttctccccctcccccattacttctatattactactgacttcttcttttctgaaatttcctaatctttagcttctttgactctcctgggcttttctttccctcttggggttgcttttctagatcatcatcttaagtcacagaaatttcattgtttgtatttgaatataggatttgaagttattagaaatcatgctttgatcttaatttaaaataatttttttcctccttttagctttttctaaaggctcctgtgaacactacagaactaacagatctcttaattcaacagaaccatattgggagtgtgattaaggtaagtaggataattgtgtttattctgattaaatgagttctttattctgttcatgctgggcctcaccatgcttgtaatcccagcactttgggaagcaaaggtgggaggattgcttg

SEQ ID NO: 55548 - DNA, 621 bp, Homo sapiens
gggccccccctgcgaaatacttctagaattaattaacgcggggggagatctaacataagaaaaagtgctccagaaggagaaaaatgaatagatataagaggggcaatcaaaaaactatatatacatacaaaaaaattcattcagcaaataagagatctgtttctaaagattaaggaatactgtgttttaataccaaaataataacaaaagccaaccactaagaagtattttggtaaaaatacacaaacacacacatacacacacacacacacacacacacacacagttctgacagaacaaatcatccccctctttcccaacagcaaactgcctttgggatgtttgttggtaactatgaaagttggaagccagtggaatagcatcaacagactagtgaaataaaaagagtcttatttcagaatcctgtgttcaaccaagatattattcacttgacagactgttttttattttagatcaagaatattcaagaacttagcatattacccaagtggccaccaaaagaaaaatatttgaaaaagattctaacagcatatgaggctataaatcagggaccttgggaagacagcagatcctgggaagagacacggtggtgagcaatca

SEQ ID NO: 55549 - DNA, 613 bp, Homo sapiens
  misc_feature 28: n = A,T,C or G
cgggcccccccctcgaggtacttctagnattaattaacgcgggtcttttctaagtgagatgctaaagttaaaaggaaactattatttcagaaatgtaacatatatgtatgcacatatataagaacaaattacatatgtgtgtatatggttacgtatgtatatatgtgcatatacagatggtatatgtattttaagatatcaaatgggcccacagaagatgctttctcatcctccccctttactttatttcccacatttttaaatgggaaaaaaggcatatctattttgaaacataccaaggaaagtacaacacacttaattgcaccagcaaatagttaagacaatgctcatgccagaatcttaactatattttttaaaaagcaatactcaaacaccatattgtgaaagacaaaaattgttttaaaatgtctcacatttcctgaacttcttaaaataaatatgcaaagtatattctactgaattgcaagataaattataatggcaacttcattctggataagattaacatgatattaaaacccaaaaataatttggaattctatacaacttgctgagtgatctggtattttatctatgtcccatcttaaaaaaa

SEQ ID NO: 55550 - DNA, 363 bp, Homo sapiens
  misc_feature 28: n = A,T,C or G
cgggcccccccctcggaagtcttctagnattaattaacgcggggctctaccctgtaacagagcttcaaaatcacagtgagatcctacacttcaacttcatccctttacctatagttcctagcccaaaggtcttacggggacatcaacagagttttgtaacaagtgggcaaatctcctccaattgatttcttcttcactgtgttctaaatgtgcaaagcattttcaatagaaaatttcacaaccctgtgctctgtcaactctaaaaccctctgctgtacccaagtaaaggctccagaggaaataacatagtatcactgcttatacaggctgtgctgagtggatcacatccattatctttctgac

SEQ ID NO: 55551 - DNA, 641 bp, Homo sapiens
cgggccccccctcgaaagtcttctagaattaattaacgcgggcactgtattattagaatatcctgcagtagtttagttataaaatttcattattctatatattttgctattcggaaaaatcatattacccttctgggttcagaatgatctaatcaggttgacatggtatgctgacctccatacagttgattcattaaacttatccagttacattattattatgttaatgtacatatatgatctgggtgtgaatgaccagatggacgtctgctaagttttataaaaaccaatatagctagttatcaagtaatctagtaaaaaatattcaacccatcctgaagatcaaagacatgcatgttaaagcagtagagtcatataattttctttatttatcagaatggcaaatattaagtatttttatacacttctagtgagaatctgtatttaaaattagatggcttttttttttttttttttttttttgtctaaggaaagatctggaccagagtcaggtgtcacaaactcaaatgcctacaggagccagaaaagggaaaccagattgacatttctctttcccatggaagtgttcaattttgaaagctttctatgaagttctaggagtgtgtctaaaaataatgaat

SEQ ID NO: 55552 - DNA, 609 bp, Homo sapiens
  misc_feature 37: n = A,T,C or G
ctggggtaccgggcccccccctcggggtacttctagnattaattaacgcgggggttcccaggatagcgaggaagttctcacaagatctgatgattttgtaagtggcagttttctctcctctctgtatctctcattctgtcttgtgaagaaggtgcctgcttcccctttgccttccaccatgattataagcttcctgaggcctccctagccatggggaactgtaagtcaattaaaccactttcctttataaatcatccagtcttgggcagttctttagagcagggtgaaaattgactaacacatagtggttctcaaagtgtagtcccctgactagaagcaagggcatcacctgagaacttgttagaaatgcaaattctcaggccccactccaaatctgttaaatcagaaactctacaagcggcgttagcaatgtgtgttttataagccctgcaggtgattctgatgcagccactgtttgagagccactatcttaagaaaattatttgccaatttttgatggacagttaagccctagttcttactcttctaggcagtgctggatcatgggtagggctgagcatttggagccaaagagaacctgatgttata

SEQ ID NO: 55553 - DNA, 468 bp, Homo sapiens
  misc_feature 16, 29, 45, 46: n = A,T,C or G
cgggcccccccctcgnaggtacttctagnattaattaacgcgggnnatgggaaaagatgaggatttgtacgttcaaatttcaaaatatactataaaaatacagcaattaaaattatatggcattgacaaattgatatatataaatgaaggagaacagcatgtataatgaagggacattctaaaccactgagaataaaactgaacaaatgggattgaaaaaaaattgttaagattcctaacttggccgccaacataacatatattctaggttgattaaaaatctaaatacctaacataaaaccataggagcactcaaaataaatatatttgtaatcttggagtacagaagacctttaaaagatataaaatgcatatgtcataaaagaaacaattgataaatctgacaatatttaaaacatgtacctgaatagaaagaataaaatgttattggaatgcctaccaatattc

SEQ ID NO: 55554 - DNA, 655 bp, Homo sapiens
  misc_feature 27, 50: n = A,T,C or G
cgggccccccctcggaagtcttctagnaattaattaacgcggggatacantcttagaaaaatcatccagtttttttaaaaacaattgaagcccttctttaattttctgtacgttgctaaatgccttgtcaattccaaaagatgctttgatacggtgtactctaggccaagaagaacccatactgggacataaaacctgaagcaacatacctttatgtattcctatatagacctttattatgtattatactgaaatatgtgttatgtgtatttaatttttttttcattttttaaagaaactatgttaatagaacaataggtagcaagcagtttataagtaaatatttgagtattgccgtactgtcaattaagacaaatgaaccaaatatagaaagatttatctaggaaacatctcttaacacaatagcagttaccatccccaccatcagccctatggcattcagctgtgcacacattgacggagaacatgatcacagcttgtgggagccaagttgggcaaaaaggatttgttttcccaaattcagagatctatgttctgatcaattactgcttctgataacaatagtagacaaacaattgggcagtcattattgttcagcctccagcattgttgcaagctgcctctccccatcctg

SEQ ID NO: 55555 - DNA, 511 bp, Homo sapiens
  misc_feature 15, 28: n = A,T,C or G
cgggccccccctcgnaaagtacttctanaattaattaacgcggggtgatctatgaaatttccttcactaatgctgccaacattctctaactttattctaaacatgtctagaatatacccacttctctccatttctaccgccatcagccaaatcaaagccaccattactcctgctgtagcctcctaagctgctctctccaaatttcttctgctctattctgttcctcatcatctgttttccacacaagagagatctttttgaaatccaaatttgatcatgatacatccctgcttataatatttaatggctttctccttaaataaaaataaaattctcaaatgttcaggtggcccttcaacatctggtcccctagttaggtctccaggcttattcaactgcttttctccttgctttctacacttcagccactcagatccatttgagtccttgtcttaggcttttccatgcactggctctcttctgggtttctttttctctgtctgggagccaa

SEQ ID NO: 55556 - DNA, 562 bp, Homo sapiens
  misc_feature 11, 36, 80, 514, 556: n = A,T,C or G
tgggtaccggngccccccctcggaggtacttctagnattaattaacgcgggtattagaaacaacagagcacagccaaaanaccaaacacgatttcctcagggaaaagagtacctggtggaggccacactagtatccaaaagtaaacacagatctatacacaaagtgaaaaccaaaagcaagcaagcctcatgtcactgcagagacgtgaagggcaggcttggaagtcaggactccggcctcagctcccgaccctccaccacttacctgtgagagcctgggctaaagatttcttaatcacatttagcctgtttcctcaccagtaaaacaatgagaaaatgaacgcaaaattttgccaggattaaatataacaaggcacagagtctgtcccgtgtcctcaataaaatgacagtaattatcacgattttccctttagttgttgcttgtcaaaatcgctaaaagccaactgaaggcattctcacttgggaaagtatgctacttcttaaggcaatcggnggaaaaaaagctcctcttcaatctgagtgatgtcagatgatntatttc

SEQ ID NO: 55557 - DNA, 535 bp, Homo sapiens
cgggccccccctcgaaagtcttctagaattaattaatcgaaagagctgagatgcactccctctctacctcataagggcttccatcatgaacttgattgtgtcctaaattcagtcctccaggagaagctcatcaccctccccatgtcctgaatgtcagaatccaaagctggaaactgcatcctacttaatctcccgcgttaattaataagacatccaacaagacagtaaatgcatttaagagaattagaaatccagggaggttaagtggaaccattaagacatttgccctaaaggcatttgccaatctgtgaataggtaaaaacttctgttttgatgacttttgatggcaaggggagcagaagttgaagtctttggtttcctagagtggaaacttcaatagaacccataacacatgaattttggattcccagaaaacataccttcagagggaaggagacataactaccaccagaaagtatttttctaaaaagttgctcagaacttggaggaataagggaaaaaaaaaaaaaaaagc

SEQ ID NO: 55558 - DNA, 502 bp, Homo sapiens
gggccccccctcgaagtacttctagaattaattaacgcggggagggagaactcagccctctgtttgcatgatctgaggctctggaaagccccctgcccccttccagatacctcatctacttgacaaacttccaagatgccctgcctcccctttctacacattgctcttccccgaaaggttcctgctctgttattcttggtcaatctgcagaaggcaggccggatactccacaaaggacccaagagaggagcagccgttaggaaagtgcaaggctgggagggaaggacaggaccagggttcccggattcaattgtaccacatcatacatgttgcctccatgcaattttctctttagtgccaggtttctagaatcagtgcatgaaaaatgatatctgaatacggtgcttaagggagccgggttttttccacttctgattcactccacagcttcagcatctattgtcagctaagctcatcttctgtgaagccctcactggtttct

SEQ ID NO: 55559 - DNA, 617 bp, Homo sapiens
  misc_feature 7, 27, 40, 567: n = A,T,C or G
gactggngtaccgggcccccccctcgngaatacttctagnattaattaacgcgggatgaatggtcagatatgaagaaaattgtaaaaaccccaagcatgaatgaaattaagataaatagaatcatgttttctgaaggaaacagacaattgaggtgacagaaaaggaagtagacaaacaaaaaagaagctctgacattctaagaggattttgagaagataatataagaaatggatcccaccaccaccagctcacccaaggataggagagttgctggaaatccaaatattattgctgaaaatttgaaacaaaaacactgaacatgtaattagaagtattgagttggaatatttggttgaggcaatctcccaggacggagaataaaaaagcacagggatggaaaatgtgataaaacttaagagtgatgttttagttcagaaggtccaattccagaatgagtgttacagaagaaataattgaggaaatggaaggcaattctttaaagaagtatagtactctccttttatctgcagggaatatgttccaagacccgtcgatgcctgaaactntgggtattaccaaacctatgtttggatagtacccaaactatatttttttc

SEQ ID NO: 55560 - DNA, 585 bp, Homo sapiens
  misc_feature 39: n = A,T,C or G
gactggggtaccgggcccccccctcggggtacttctagnattaattaacgcgggagggcattcttattgtggaatataccaggcagggtgattcttggtggttaaccgtttcccagaacaccagtaaaggattaaagttcaacatcgtcagttctcctttttgttcaagaagaatattattctttgttctgtaatctgatgattacttagaaggttaaaaaaaaagccaacaaaaaaaaaccctttacaaacttttactaaagcagacaaggtaaacacaagctctttttaaaaatcctgtaaataaacccatcaaaccttaactaactttgaccatggtaaataaatttcccctttgtttttttggagaactttgtacatctattcaggttttgtcttgcacaacaacagtcagtcatttcaccttaggacaaaaccattcttttcagcagacaagctgagctcatgaattatacaactcacaactttctgcagccacccattccttatagtacaactttacgaagtggtaaaaatcagcatgttcattaacaggcccaagtatataatctccaaaaaaaaaaa

SEQ ID NO: 55561 - DNA, 572 bp, Homo sapiens
  misc_feature 28: n = A,T,C or G
ccgggccccccctcgaaagtcttctagnattaattaacgcgggtatgtggctgtgtgggtttgagcttggctctgccttttaccaactccgtgaccttcagtcactgcccccactgtcttcagctttctccaaaaagagtgttgtgtgtcctcttggaggccataccctggggtgctcagcacagggtttcacacacagtgactattaactggattttagctcctattataattactaatagcagataattgccttattaaaaaaattaaaggcaagcccccaaaagttaagaacatatgtacttgtttgctttttcatcttcttagatgacacttattttaagttttctttgtatgtaattcattctagctctcttattcagcagtatttctttcatttgaaaacagcataatatttagatgccaaatgtgatcatcaaatgcaagaatatggatatcccactaagctatctagttatgctcaaacccaaacaagtagaaagcccttatgtacaaagtgattcttttcatgaacttggaaatttttcaaaatcaggttgctgagttctgat

SEQ ID NO: 55562 - DNA, 600 bp, Homo sapiens
  misc_feature 19: n = A,T,C or G
accggggccccccctcggnagtcttctagaattaattaacgcggggaagttatgggaacagggaggatcctgaggtaacaaagacaaggtctctgccctcagatgagttcacagtgtggctcttcccttttttctaaaagagccagaatgataatgagacttctgaatcagaagagtcatgggatcgaagtttgagatttggcttctccacttgctagcttttgactttgggcaggtcactagcctctccatgcctcagtttctctctctacaaactgaggataagggtactccagtaacctacctcaaaagattgttgtaaagaccaaatgaaattgaacatgcaaaatctctttctaaatggcaaagcatcatgcgaatatgatcttataattatgagtcacagcaaaagagcgattagattcctaacaatgataccttctacataaacaataaccttgcccagcaactgccatcttctaaatcccctaaaaatcagcacatgagaaaggcagactggctttccttcaaaggtaggggtgtgttataaaaaacatttgtgtgaccctagcaccaagagcatagcaagtactcaataaa

SEQ ID NO: 55563 - DNA, 597 bp, Homo sapiens
ttctagaattaattaacgcgggccagcaagtggagaagttctcacttccttctttagagcagctaaaggggctacccagatcagggttgaagagaaaactcaattaccagggtgggaagaatgaaggcactagaaccagaaaccctgcaaatgctcttcttgtcacccagcatatccacctgcagaagtcatgagaagagagaaggaacaaagaggagactctgactactgaattaaaatcttcagcggcaaagcctaaagccagatggacaccatctgatcacacctgatgccatgtacttgtgagagaggatgcagttttgttttggaagctctctcagaacaaacaagacacctggattgatcagttaactaaaagttttctcccctattgggtttgacccacaggtcctgtgaaggagcagagggataaaaagagtagaggacatgatacattgtactttactagttcaagacagatgaatgtggaaagcataaaaactcaatggaactgactgagatttaccacagggaaggcccaaacttggggccaaaagcctacccaagtgattgaccagtggccccctaatgggacct

SEQ ID NO: 55564 - DNA, 619 bp, Homo sapiens
  misc_feature 33: n = A,T,C or G
gtaccgggcccccccctcggaaatacttctagnattaattaacgcgggcagtctccttatatatagacagctttgtgtcacatgcagttattttcttagaataaatacggcttacaaaatttggcttatgaaaatttaacactatgttttcctaaaattaggaagtattccaactaaaacaaagatattgctttaggaacctgagatattaccttaggaacatttgagaggtactgaatcaccatctaacttataaatctaatttttcaaataatttaaagtttttaaatctttgaatcattcacgtgactcacaggaaatacaagtctattataaaaataattaataatgttattctggattaaagattaaactatcaactgaaacataaaaactaatggaagtcaaaagacaaaaacaaattcatgagcctcttttaaaaatgatttttaatagaaattcactaattttcattgaactgtagtttatgtcaccaattgagttggtatgccaacttacatattgtattatttgattttaattgacttctcataaaaagattctagtaaatagcctgctaattaaagagtcataccaatgatgtaagtgcaagcaaaca

SEQ ID NO: 55565 - DNA, 561 bp, Homo sapiens
cccccctcgagggtacttctagaattaattaacgcgggggaagattgatattttccaggcccaagcaagactttgaaatagtacctagcagttgcagagagctatttattttcccctcctcccagaagtgttttcacatacatgatctcattttatccttcaaatagtccttggagttaagtaggaaaagcagtattttcccctaggaacctgaggtccagagatgttaagtaactcgctcaaggtcacacaattagccttgacttgtagtctggtattctttccaccaaaatgacactagcatttactttgtcttgtttcaaagttgttcaaagtcttttaggtgctggttggatccaagctgtcattcttatagctcagatttaaataaaatttgtaacatcttttagtgtttcatgtgttttttttttcccctaggccttaagatgtgtctaaagtggtaattttgtggggccttaaaaattatgtgggagagagaaacctttataataaaaagtgaagggaaaaaattatttggggagcttgttcagtagatcatgg

SEQ ID NO: 55566 - DNA, 324 bp, Homo sapiens
cggggccccccctcgaaatacttctagaattaattaacgcgggggagagagccagtctgtctgcaggaattctagaacccaaaactgtcaacgctcgtcccctccacctgtcagcagtggattcctaacagcttactgataatcataaaatgcaaacccagaagaggtctctgaataaaggttggttcagaaccttaaaaaaaaagccaaaaccaaaacaaccttaacaacaaaaaaaacaaactaaatggcgaatggaaatagaagggcgccacatccgggggaaattcccattaaacctttgttaaatcagcttatcccccc

SEQ ID NO: 55567 - DNA, 555 bp, Homo sapiens
  misc_feature 28: n = A,T,C or G
cgggcccccccctcgaaatacttctagnaattaattaacgcggggaagaaataagaaacacctttttctcctaaattaacaagcataacttttatacttgtatttgtcacctgattctgaattcattagtaggtttgtcaaaaagtaaatatgcaaacaacaatgtgattcaatttattgtattaattaggttgggtatagtaacaaatagacccagaaatgcatattgactgaaacataattacttttgatttctggcttcataaatgacccaacttggatgattctggtccatgagaagttttttcaacaagtgattcaggcaggcaggcggcttctatcttatggttccaccatcttttggggtttcattctcatctctacgtagtggaaagaaggtgcacattgtttcttaaaacaatctcttggacaaggaataacacataacaattgtgttcacactctattaaaaaggacttagcccatggtcacacaaaggaaagcaaaggaagctaagagttttagtaattttgtctgtccaaaaaaaaaaaaaaa

SEQ ID NO: 55568 - DNA, 613 bp, Homo sapiens
gccccccctcgaaagtcttctagaattaattaacgcgggcaggtagaataaatagaattgatctattccagtgtgtatcatagtagaagtactgaaaacaaaaaagatcacaaatgacagggttaattgagtagggaaaataaaataataataaatttttgtgcattaaatggtagacctttaaaatatatgaagctaaaattaaggaattatataaaatggaaataaacatcatgaaaagtgttgacatacatcaaaaaaacagctgacgtacatcaaaaaaacaaaaaaaaggaagatgtatagattttacatctatacttagacatgagatactatttgagtctagcaaatgcagagtatacattttttcaagtgtataagatatatttgtcaaaattgatatatgctggttaataaatgaaatgtcaacaaatgtcaatgaattgaaattatgtgtactattttctctaaccacagtggaattaagctagaaattaatttttaaaacataagactacagatatcttcccctcctatgaagaaataagcaatatccttctatataactcatgagttcaaatcggtttataaatcataaaaaaaaaaaaaa

SEQ ID NO: 55569 - DNA, 659 bp, Homo sapiens
cgggccccccctcgaaagtcttctagaattaattaacgcgggcacttgaggttttggcttttgtttaagcataaataattgaaatactgtatgataccatgttaaaaataagccaccacgccaagactgtattaatagcacagttcaagtcactgctgtaacgtacatggcactgcatctttcactaacaaacgaaatgtaacctgaactttgtcttacacatagccttgaaaacagatatttcattactaccacatatttttgttttatatcctgccaaatgattaactaagttttattgtaaaagaactgtcaatcagagcacagtataatgatcagggtacaattatttttttttttttacatctgatatccaccacttacaaacttaggcaggccagttggcttcctggaagctcaggttcttcataaagatgagaatatcaacattaccttagctgaattatgtgaatcaaatgtgaaaatgttttataaaccctaaaattctatttttaaaaccatgaaggaaagactgacaggctatattagataaatattaaatatttctgcttggcgaaagagcaaggcaccaccactatcaaatgataaactagaagaaaatatgtgtaacacatctgaaaaagagttaatgtctttaa

SEQ ID NO: 55570 - DNA, 635 bp, Homo sapiens
  misc_feature 24, 37: n = A,T,C or G
ctggggtacccgggccccccctcnaaatacttctagnattaattaaaattaaataatatgaaaattttaatttattagttacactagccacatttcaactgcacaatagccacatgtggctactggctgtcatattagatagcacactgtgtaaggccattcttgcattgctataaagaaatacttgagcttgggtaatttacaaagaaaaggggtttaattggcttacagttctgcagggtctataggaaacagtaccatggtctgcttcggggaaggcatttcacatggcaagagtgggaacgagagagagagagagagagagagagagagagagagagagagagagaaagtagttggtgggtaggtaccagacatttgtaaatgttgcctttatctatcaaaaactacaaacttgaagttgtgccagtggacctctgttctaacattagaatagataactcgatctaaggaaaaaatacctataaataagcaatattataataaagcttttaatatatgatcaggactttgcagatcaatggaggaagaaaacattatttcacaaataatggaatgactaaataacaatttgagggaaataacacacagttataaaaattatgttacatatc

SEQ ID NO: 55571 - DNA, 619 bp, Homo sapiens
  misc_feature 20, 33: n = A,T,C or G
gtaccgggcccccccctcgngggtacttctagnattaattaacgcgggtcctttactgatcttaaatatttatgccactacagtgtattacctacagatttttaaatttagctttatttatcaacccaaaaaacaaataaataagatcaatattcttttcttcttgtcaaacatcagttatttttttgaactgtccagagaaaacaaaagttgtacaattccttgtataaataatagattgctcaaacctagtgggagtaaatggccaggaatgaagcaatttctctttacaaatgttatcatttatatggctgagaatgataatcagaaacttatgtgaagttaatgctacatgtaagattagaaaatacgtaaatcttgtgtattcattgcaaaaatgtagtaaaccaagattggagggattaagtgatgtatccaagactatataactagagaagagctcattaccatcttggaaatatttgttataacttacattttgttagttgctattaggtgctatgcaataggaaatcccagagacatgcttcataaaggaaaacacatagtaatagttgtacatacaaactggttatcagggatatttacacttacggta

SEQ ID NO: 55572 - DNA, 562 bp, Homo sapiens
attaacgcgggaattctgtaattataataaactgaatcaaagatacctgtaataatttgttgtgagcttaagaaaagactagtatacttccttatatttgtatttataatttacttaatttcataaagtctttgaagcaatatagaataaaaacaataaaataataggaacaaaggaaaaaacctaggaaattaagaaagtcaagatgaaacaaaacagagtttagatgccaagaacacatagttacaatagatgactttcaattttggtctgagtttcacaagggaaaaggcaaacagtgggttaggatagcttcctatttaactgctatttttgtgagacagttcttcacgaaagaaaaggtttttctagtagtaaatttcagaagtggctaaagtgggggtagagatctaaaaataaagataaatcaaaagatttatctttgaggcatttttaaaggtactattacactcttatactcttaacactggtgtattcatttgacaaatttcatggagtgcctactgtaaatcagacactcttctagacattgggaacagac

SEQ ID NO: 55573 - DNA, 601 bp, Homo sapiens
  misc_feature 32: n = A,T,C or G
taccgggcccccccctcggaaatacttctagnattaattaacgcgggggggatttacttcccaatacataaaatccttcaaaacaagaatgataataatttttatactttttataaaaataaatttatttttagtccatcaaggtgtctgaagattttatgcctaggtatctccatatctaacttgataaggaaaataggataaacaatgctggtaatagcaggaaagtaagtatttgaataagatgtcaaactgatatttcatgtgaacctaactcattttatggtaactaataattatcttatttaaatcaataggtaaaacctgtttagaaattaaaaatgagttacgatttaaagaaaattcagatgactcattgtgagtgctagttctcttgtaggatgccactggaaatgttgaaatgaaaaatgtaagtatatcttttggtggaaaaaaggatagtctctaggacacaaaattactgttttatttttttctcaggagtttgcctaagggtgtgacagatgatctctgtcacttgtcttagttgtgtcctgcaataaactggatgctttataaaatactagacctgtgatttcgt

SEQ ID NO: 55574 - DNA, 553 bp, Homo sapiens
  misc_feature 14, 27, 506, 542: n = A,T,C or G
gggccccccctcgngaatacttctagnattaattaacgcgggatgcactaaaattgtaagcttgatgttctctatgtgaatagtttacctgttttgtacacaatgaactatacagtggtatgggcagaaaaatcattccctgaaaagaaccagaaaaatgagaagtgagcatagcattgttcaataaaaaacaaataggctttaaagatttatgttaaaattactttaaatacatgcataatttggccatcacattaattctctgaacctcattcttctcatttgtataatgaaaatagcaatatgtatgtctcaaatttgttgtgaagattaaacataacaattatgaattaatgacagaaaatattttaggtgcttaaagcttttgcatgttatgtcctttcattcttacagaaattactaatggtgggtgacagtattatttctattttacccttgagggacggttcttgtagagaagtaagaaatttgccaaaggtcatcanacaagttaatcaaaattgaattatgtcgtactttanagcctgtgtac

SEQ ID NO: 55575 - DNA, 607 bp, Homo sapiens
  misc_feature 16, 588: n = A,T,C or G
cggggccccccctcgngggtacttctagaattaattaacgcggggtcccgatcttggctgaacagatctgccacagccaagcattcagtgttctaaactttcaatattttttgttatacactaacaaattagaaaacctagaggagatggataaatttctggagaggtacaacctaccaagattgaatcaaaaaaaaaaaatagaaaacctgaacagattaatagtaaataataatattgatattaataacattaataaaatgtttcccagcaaagaaaagcccaggacctggtggctttactgcttaattctatcaaactttttttttaacctcttccttgcagagcagtgttaacccctaggcactgtgctcagagtcagctaattctaccaaacttataaaaagaattaacactgattcttctcatactatcccaaaacattgaaagggagtgaactcttcctgacgcattatatgaggccaaaatgaccctaataccaaaaccagacaaggacataacagataacaacaagaaaaactgtctgccagtatccctgataaacatagatgcaaaaatcctctacanaatactagcaaactaaatc

SEQ ID NO: 55576 - DNA, 621 bp, Homo sapiens
  misc_feature 38: n = A,T,C or G
ctgggttaccgggcccccccctcggaaatacttctagnattaattaacgcgggacccaaaatataagtatccaatttcaaatgagtactttcggagttcaacttgttcaattacttgtatttcaggagagtgtggggctcaaatcagatatttcataggagtaatattgagacttcttatatggccaagtcaggtaatgactaataccttatctaaacatttattagaaatcttaatcagtggatccaaagttgatctttgaggaaaatcttagctttgcctgcagatatgccttactttctgttgaggtgacaataccattttggctttttattatattagaaaatccaagagttacggagtttccttcatttagaactcttgtgctcccagctttttccaaagagttaacctcaaattgtgtgtgttccaaaaagcaaaagtctagctgaaataatttttaagaaaaatagtccaagggagctgctagctatctactcttctagttatacaaaagtctgtttttagcattatgatatattaccatgtttgaattatattattgtgattcattttacacattccacaaatactaatttgaaaataaccttaattcctcac

SEQ ID NO: 55577 - DNA, 556 bp, Homo sapiens
  misc_feature 10: n = A,T,C or G
cccccctcgnaaatacttctagaattaattaacgcggggattctatctaggacgtaatgcctgcatagatgaagataaggtcattagtctcagaccataattatgttcctggaaaattctaagtgacactgtcttcctggctggtattacagtttgcatttttttcattttttggattccagagagtaaacaccatgttttaaaagcctctgtgtgcaggtactactacatcttactaccctatcctgcctccctctccataccagggagagaggactgtccgagaggtttctgactagaccgtttttgtagtaatttgatcactaagcagtcaaatttgtctgactcaactgaagtgaaactatattagaacttcagtaacagattggtttgacactaatgattaggcatttgcaaatcattaatttttgcaattaagtgatggaatatacagataatagagaaactgaagttttttatcactctttcttcaagtgagttcaaccataaccgaaagcaattagagttataatagcatttgaggctcttgctcatc

SEQ ID NO: 55578 - DNA, 494 bp, Homo sapiens
  misc_feature 27, 40: n = A,T,C or G
gactggggtaccgggcccccccctcgngggtacttctagnattaattaacgcgggacaccactgatgtactgtatatctgtatatatactgtggccctttgaacaaacacaaaccattttaatagctgagacttttttttttttaacactcttcctcccccgattagtttccctttccttggtgactataatgcctctattgtaaatgcatgttttgacccacctgcccaaccttggcccaacttgcataaggtatatttaaaccaagtgattctaatgtgcatccaggcttaggacccagtgatcttacccactgtttccaaaacctggcttgatcatgagaattaactgggaacatttgttaagcaatcatattcccaaacccttgtgcctggagattatgcactaagaattcttatgcttaacagttgcctcagtaattcttaaaatgtggcagatttggttctttctcttctgaccaaaagctgctctct

SEQ ID NO: 55579 - DNA, 631 bp, Homo sapiens
  misc_feature 11, 36: n = A,T,C or G
tgggtaccggngccccccctcggaggtacttctagnaattaattaacgcggggataaagatgatcaacaaaaagagaaaagtacaagtcaaaagtcatagaacataaatgaaacataactacacatgaagtacatgcaaaaatataagagaatttcattgaaatgtggataaaacagaaaatttgctaaagtcttccacaaacccaaatatcccataatgatgaaaaaaattagtaattaaaatttacacataacacactcacactagaacaaaatagctttatagagaatgtctactaaacattaaaaaattaatcagaatcttatacacactgtaaccaaaatactaaaggcaaaattatgtccaaatgccaactttttaaaatgagtctaatacaaacttgaagtcaaaaatcaaggaaaaatgcaggaggaaaattatatggccaagcacaattctaaaaataaatgcaaaaatttgtaaataaaaaaagttaacaaggatctagccatctcttaaggaaacctcatgaccaaattggatttatcacaagaatgaaagaataacgtaatattgtattactggggcatcacttaactcctggtacctttcgaaattttacagtgtagc

SEQ ID NO: 55580 - DNA, 576 bp, Homo sapiens
  misc_feature 28: n = A,T,C or G
ccgggccccccctcggaagtcttctagnattaattaacgcgggagacatttgtaaattaatttgtaaataaatttcactgagcaaaaaattctggtaagaattttataaactaattatactatgggcaattcttaatgttattgaggatgcttggccttttgggaaatttcttagaaaagcggaatctcgggttccatcccagacctacagaatcagaatctgcattttcacaagtcttccaggtgatctgtgtgtgtgctagagagtgcaccagcgtgaggcagcctcacatgcactgactcatcggctctttataaaaaccctatgaggtatgcagagctgacgctgttattcccttttctagaccgagatgctgaaacatggggatttgccccaggccactaggttggcacaggcaggagttttgtgcgtcttttgatagaagtcttttgatttctattccagagtttatttcactaaagtttcttttctgcctgtcatggaagtcctagaaaatagtctacagttggaccagtatcagttactcaattataatatgtgctcaagaaaaatgt

SEQ ID NO: 55581 - DNA, 596 bp, Homo sapiens
  misc_feature 25, 38: n = A,T,C or G
ctggggtaccgggcccccccctcgngggtacttctagnattaattaacgcgggacactcaagtaaaacaaatcctcaaaaaaatacaggtattaaaagtgaaaatgcctagccccctaccctataagccaccaatccaccccgttaacagtttaatacataacctttcagatattttctaggtataaatttacgtatttttctaggtacaaaaacataggtataaaggatacacacactttaaaaaacgtgaacataaccatcttatatatgctgctctgccagctgccattcccaacagaacactcttacacatcttttgaaggttagactgttgtccccaaacagccttgtgtctgcaagagcctggcttgcagtagacactaagtaattcatttcacgcttcagaggattattattaaactccccattttgtacacccctcaagaagaggacataatttcttaacaccagtgatcacagctcagaatcaatttaaaagtcactaagtgtctcccatacatccccctgggactcctacagcttacaaaagaggaaccctccaaccctatggttttgctttcaaacgttcttggc

SEQ ID NO: 55582 - DNA, 465 bp, Homo sapiens
ggtaccgggcccccccctcggagtacttctagaattaattaacgcgggcagcatggcaaaaaaataaattatatattttaaattctaaaagagaaggaacataaaatttcactcctagcataaagccatataatattattcttgaaactcattacatcatttgcctcctgcccatttgaatataatcatacctacgttttattaattgtgcatttgtaaaaccaaacccttccagtaaatacttgctataaggctattgcttgtcaattatcaaggcttctaaatatgttaaaacttgtcattttgatttttcaaagataattttattatactgagctaccaatattcttaaagaaaactaaccaaagttaatattagtgtagtccattattatgtggacaattattatgtggaatctcttaagtgagcaactaagaaaaagccttatagaaagactacactgga

SEQ ID NO: 55583 - DNA, 627 bp, Homo sapiens
cgggcccccccctcggggtacttctagaattaattaacgctcaggtggggacatagccaaaccatatcaacatgtattaacaaaaacaaaagttaatttgctattattatatgttacatttttctaataaaaatttgtgtaaaagattttgtgaaaaatttttgtaaaatttttttctttcttgttatatcagtacctaaataacatccttggtttgctgcctagcccagaaagcttaaaatatgtgctatatagccctttatacaaaaagttcgctgacccctctaatagatgttacacatacactaaatcagctttttcttattgtttccctgagagagatacaatattatcccaatttttagataaggaaatgaggatcaattgaaaaatacaatgagtgaaatgaaaaatgcaatagagagtatcaacaccagaaatgatcaattagaagaatctgtaaacctgaagacagattatttgaaaatatatagaggagaaaaaagaaaaaggaaagtttacgggaattatagaacagcttcaacagagcaaatgtacatggtataggaattaagaagagagagactaaaggatagaaagcttatttaaagaaataataacagaaaa

SEQ ID NO: 55584 - DNA, 470 bp, Homo sapiens
tgggtaccgggcccccccctcggaaatacttctagaattaattaacgcggggtggggggaggtctgtaatgtgaaacaacttcttgtcttttttctcccactgatgtaaataacttttaatggccaaaccccagatttgtacttttttttttttttctaactgctaaaaccattctcttccacctggttttactgtaacatttggaaaaggaataaatgtcgtcccttttaaaagaaaaaaaaaaaaaaaaaaaaaaaaaaaaaaaaaaaaaaaaaaaaaaaaaaaaaaaaaaaaaaaaaaaaaaaaaatttaaaaaaaaaaaagaggcggcccccccccggggggacccccaattccccctttaatgaatttttttaccccccccccatggccctttttttaaaacctctgaattggaaaaaccctggggttccccaatttaattcctttgaaaaaaatcccctttttc

SEQ ID NO: 55585 - DNA, 299 bp, Homo sapiens
  misc_feature 24, 26, 37, 54: n = A,T,C or G
ctgggtaccgggcccccccctcgngngtaccttctgnattaattaacgcggggnaaaaaaaaaaaaaaaatgggggaaaaaaaaaaaaaaaaaaaaaaaaaaaaaaaaaaaaaaaaaaaaaaaaacaccacaaaaaaaaaaaaaacaaaaaaaccctttaaaagggtggccttcccccggcggcggcgccctcccctttccccctctccgggagtgccttttgcaccccccttcctggccccccctttccccccgggggggcttggtccaccccttttttttccccttttttttccccc

SEQ ID NO: 55586 - DNA, 587 bp, Homo sapiens
  misc_feature 26: n = A,T,C or G
gggccccccctcggggtacttctagnattaattaacgcggggtgcagtatatactcaagcacttatagagcaaaatgagtaaattaaactgattatttaatgtaaagatggctcagaaatataatcataaatgcagtttaacttctaaattccaaaaactgtaaaagtcggcacaaacaagagatagatttacaagcaaaatcatggttgtttctatctggatgggcataaatgagtagtaacagaaatcagaattctcagttatctcctcacctaacagactccacaaacatttgacaaaatccaatctcattttcaaaatatgaagtctagtactattttttaaaatttgctctcaagtcaccttttcctaacacttcaaagtagaaaaataatctcaggtttcacacttggagatgaaaaataaccatgtgtagaatgtttaaaaatgcacttttctgtttttctcctaaatttatagcattcttttgcttgaggtattaggaatgcattattgtaacttttaaaaaaaattttcttacatagtaattattttacacaagatcccaaaaaaaaaaaaaaaagcg

SEQ ID NO: 55587 - DNA, 579 bp, Homo sapiens
  misc_feature 21, 26: n = A,T,C or G
ggccccccctcggaaatactntctanaattaattaacgcgggcacgcccggcctctttttatattcttaacatctttaagatacatactggctccctgcattccttatataccattataaaattctgtaacatttcctttgacctttagatacttttacatttttctgtgttatatccagtttctctaatttctacattatctaattatacagtctttcagttacagtaataactctgaagtacagttgaacattcagctttaagggcaggaatggagaatggcagctgaaataaggaccctttctcaccttagggaatcttttgtaatattgacaccactgtttccactagatggtgttgtttagtttttaaagatgtctgagtttttattcaagtgtttgggtaaaagggtagagctgggaggtaaaggtcttagattcattttgatttcagatacctgtactaagtggcttttaggttctttgcagtttatttaatggtatttatttcctcaccacttcattcctagggagagctggaccaggaacgactgaccaggcagcaagaactcacagcct

SEQ ID NO: 55588 - DNA, 603 bp, Homo sapiens
  misc_feature 531: n = A,T,C or G
cgggcccccccctcggaagtcttctagaattaattaacgcggggatgaagtagatttaaaaaaaatctttgacaattgagaaagaggctgcagctcagaaagaatgaattacttgcccagagtcccgcagctagtgagcagtggagctgtgttttgactaggacagttttctttgtattgtaccataccctctttgttacacttcaaagaacagtttgaaagagggagtttccttaacaactttcactggaaaattcattaaatcttagccttaacctattcaatccatagcaagttttcacatccagaatatggagggcatctttaagtaatattagtgatctcaggcttataagtagctcaaaataattagcaaattactgagaaatgagtggtttcttatagcatgttttgaattatcgtaggttatacaatctgttttacaattggagagtagtatggactgttttgcaatgtaaatgtgatatacgtgcactggtcagtctgaatgatttcctttaatgatgtatntagaggaatcgtggtgctggacacactgctgtcttagggggactggtagaaagccaatactataatgtcaag

SEQ ID NO: 55589 - DNA, 596 bp, Homo sapiens
  misc_feature 37: n = A,T,C or G
ctggggtaccgggcccccccctcggggtacttctagnattaattaacgcgggcgctgtccccgcacgcagtcgggctggagctggagtctgactctagctgagcagagctcctggtgtatgttttcagaaatggcttgaagttatgtgtttaaatctgctcattcgtatgctaggttatacatatgattttcaataaatgaactttttaaagaaaaaaaaaaaaaaaaaaaaaaaaaaaaaaaaaaaaaaaaaaaaaaaaaaaaaaaaaaaaaaaaaaaaaaaaaaaaaaaaaaaaagaaaaaaaaaaaaaaaaagggggccccccccgggggggacccccattcccccctttagggggtctttttccccccccccctggcccgttttttaaaaacgtggggccgggaaaaccccggggttacccaaattaaatgccttggaaacaattccccttttccccagtggggttaaaaccaaaaggcccccccccatccccctttccaaaaattgccccaccctaaagggcaaaggaaatttgaaaccttaaatttttggtaaaaatccgcgtaaaattttggtaaaaccaccttttttt

SEQ ID NO: 55590 - DNA, 462 bp, Homo sapiens
cgggccccccctcgaaagtcttctagaattaattaacgcgggtagatgatttctagcaggcaggaagtcctgtgcggtgtcaccatgagcacctccagctgtactagtgccattggaataataaatttgataaggtggtgactcaaaaaaaaaaaaaaaaaaaaaaaaaaaaaaaaaaaaaaaaaaaaaaaaaaaaaaaaaaaaaaaaaaaaaaaaaaaaaaaaaaaaaaaaaaaaaaaaaaaaaaaaaaaaaaaaacggggccccccccccgggggacccccaaaacccccccatcacccaccttaaaacccccccaccccccccacttttaaaaaactgccccccgaaaaaaccccccctttcccccaccttatcccctaagaccccccccccctttccccaatggggtttaaaaacaaaaaccccccaccaaaacccctttcaaaaaaaagcccccccc

SEQ ID NO: 55591 - DNA, 451 bp, Homo sapiens
gccccccctcggggtacttctagaattaattaacgcggggtactgcaaagttatttataatatactaaacttgtaaggcatgaagagccaactattacattttaggaaaaaatctcaaaccaaaaaagagttgaagcatatagattttctgaataatcttcatttgactaaaagtttactttaccagaatgctttttcttgattattttgtttaactggtattttgcttagctctgttattcaatttatttaagaataatttattaaatccctactaggttccaggcatttttccaggtgctagggtaatagcagtgaattgaatggtagtgaacgtacatagaatatgatgtcaatcacaagaaagtagatatatctaataaactaacatagaagataagatatattagacatttcagaaatacttagtacatccaaaaaaaaaaaaaaa

SEQ ID NO: 55592 - DNA, 625 bp, Homo sapiens
  misc_feature 33, 617: n = A,T,C or G
ggtaccgggcccccccctcggggtacttctagnattaattaacgcgggtagcaacaggttctatcttttccaaattttaatttgtatggtataaaagtaggataggatgggataagaaggtgaagataggaagaaggtgaaatactgctttttattcagatgcttctacattgcttaagtttttttataagcattcattcacaaattattttttataacttatgaaaaagagtcactcatttttaaaatcagagtggattttttagaagtatttttcccaatttccattaatattttgagggttatattttatagcctggctatgacttaatggcaatttgcatgattgccttacattgtgaattaaatatatttaacactagcttaataataatttaaaagtatagttcaatgtaatatcaaaaacctcagagcctaaaattaatttactcagaatatttgctcatatagataaattaagtccatgaaattttaaaaagtgaaatacctccaacagtggcatttcttctgtgattatgggatctaaacgtcgatcagggccatatttaacagatgttttctcttcttttgtgttgttaagtcgaggaccttgaatntctaaatc

SEQ ID NO: 55593 - DNA, 613 bp, Homo sapiens
  misc_feature 38: n = A,T,C or G
ctgggttaccgggcccccccctcggaaatacttctagnattaattaacgcgggggagatagtatctgataagtatgttgtttcagtttgggaagatgaaaaagtcctggagatggatggtggtgacggctgcacaacaatgtctgcatgtccttaatgccactgaactatatacttaaaaatagtgaaagtgctaacttttatgttatgtatcttttcccacaatttaaaaagtgcttaagatgatacgttttatattttaccacagttaaaaagtatttaaaagagcaaagcagctgaacccctccccgacacccagtttccaccctgtagagctcatagggcaagaggcctctcaccctgcggggaaggaggctgcgccgtcctgctggccaggggcgtccacgtggcagacggcaaagtgctgggtggtctcctgcatgtcctcgtagttgaagagggggttgtagcaggttttgtctgaagaacagcagtgagggagagaagagaaaaaagtaagatgagaaaaaaattaggtgtctcggtggcaaagcacattcattttgtttcattcctattcagaagtaggaagtgaacttagaagaacacagatg

SEQ ID NO: 55594 - DNA, 598 bp, Homo sapiens
cccccctcgagagtcttctagaattaattaacgcgggcatcatgaaataactgaataagaacttgtaaattgctgaattatgaatcattctcctggtttccagtattatttttattagaagttgacatggtacatgctggttaaaatatgacccaggctggttcaagtgcagtgtggtgtttacaaccaactgatcacagccagttacagatttctttgttccttttctactcccactgcttcacttgactagccatatatgtatgcgtgtatgtatatatgtaataaagtgtgatccagatgttaacaaacttgattcttcttactgactgaatcattattgttcagaaaccctttgatacaatgggaaaaaaaatgctgttgatataagaagggagtcaaatattacaggactggactgttgattaaaaaattatttttaaagcacagtagctatgaattactgtgctgttgtatttgtctctatatgtgttgctgatttctgatcttggatcatgtttaaaaccagtggcagtctgtaaataccaacaattattatcttttgatacccttttaagttatgaaactcatattgttg

SEQ ID NO: 55595 - DNA, 594 bp, Homo sapiens
  misc_feature 25, 38: n = A,T,C or G
ctggggtaccgggcccccccctcgngggtacttctagnattaattaacgcgggactatttaaatatgattattggctatttgatttttttacttttgtggagtgttgaccaaatctttttgttccttttttgtctgcctttttgtgcactcacttgtaagggttgcaatatgtaacctttttaaagctttatcatctttcataatattcatctacactattttttccaagtgtaaactaaatactaacttagttgtttaaatcataattcacagttgagacagtagccactaaaaagtagaagtggtaattacgaatatcaattattttcaagttggaggtggaattaggtaaaagacacaatgaagaggttgttcagcatatgattaagggcccagacattcagctttactgtgtccttagctgtgtgacctgaggcaggttacttgaactctctgagcatttgcttcctcctgtgtaaaataggtgacaacagtagctactccacaaggttattgtgagaataaaatgggactgtggattaagagcgcttagcataaaactaacacaactgaactcatggagatagagaaca

SEQ ID NO: 55596 - DNA, 583 bp, Homo sapiens
  misc_feature 15, 28, 569: n = A,T,C or G
cgggcccccccctcnaaagtcttctagnattaattaacgcggggtataataggtttaaaataaattctttaaaagaaaaaaaagtatagcatggacatacatatgtaaaaaaatgaaccatcacctaaatattgcatctcgtacaaaaaaattactgaatcatagatctaaatataaaaaaccaaaactataaacattctaaaaagaaaaccttcatatttgagggttaggaaaaaaaattttctttttttttgagatggaatttcactggttgcccaggctacagtacaatggcgtgatctcggctcactgcaacctccgcctcccaggttcaagcaattctcctgcctcagcctccctagcagctgggatcacaggcgcccgccaccatgcccagccaattttttgtatttttagtagagacggggcctcaccacgccggccaggctggtctcgaactcctgaccagcctgggcaacttagaccagttcaagaccagcctggcaaacatgtttctttttgtagagaaaaaaaacaacataattgagttttttttctctacaaaaaanaaaaaaagcggccg

SEQ ID NO: 55597 - DNA, 496 bp, Homo sapiens
  misc_feature 19, 32: n = A,T,C or G
taccgggcccccccctcgngggtacttctagnattaattaacgcgggaactgtatgaaatattatatatggtttatatcttgtttgggggtggatatatagctgtgtataattgtcaacagtcattgaactgagcacttaaaatctctgcattttagtgtatgtaaattaatttttaaaattattttaaaagaaaagtaaaaggatagaaaaagatataccatgaaaacagcaatcatacagagttggggcagctatactaatactagataaaatagtctgtaagacaaaaacttattagagatgaagagggacattttaagtgatgacaatttattcaataaggaagatgtaacaagaataacaagtatgtatgtacctaataacaaaatcccaaaatatgtaaagcaacaactgacaaaattgaagggaaagatagacaattcaacaataatagttgaggactggaatacctcacttccaaaaaaaaaaaaaaa

SEQ ID NO: 55598 - DNA, 548 bp, Homo sapiens
  misc_feature 23: n = A,T,C or G
ttctagcaataattaacgcgggnaggactacaacgtgaaaaggacatggtcaaaacccgatttcaatgacatttctgtaagaaaataataaactcaacatttaagatacagtctaataatagcagcaactaacaagaactataattaaaatacttctatttccactaagatgaaatagaaaattatttattttatatgacgtttaacaaattaccaatacatcaagcagcttaattcaatattgtttaccattttttttatatatatctcaacataaattgcaaagataggagatttcatatcttgtcacaaggaaagtcaataattaccaggtgggagactgccatatataacagctgattctaatccccgaatttcaatctgccgactcacagaataaatatcattcttgctaaaacagacaatgcagtccccaggccgaaggttatctaaagattctagtgcatggtccagcacagaaatgggggtaagcctcttatagtctcgaacctacaataaagacatgaaatggcaaaatgacacaccca

SEQ ID NO: 55599 - DNA, 521 bp, Homo sapiens
cgggcccccccgtcgaggtacttctagaattaattaacgcgggactcacctgaagctatggcttatgaggtacttaatgacagctggtttgatgcgagcaactcctccctggctgtggtttcctctccccgtaatcacagacaaatagggcttcccaccgttctgcttaaattctgttacaacagaaatcaggggagttaaaattcatttatcttacattctcaatagaaaacgtaaaccttagctactcaagcacatgaaattgttttcatgaggattttggggtttgccatctcaaaactgtaatagtaagacagatttgctatctcaaaaagcccccaaattaatgttttaagatgtatgttttaaaacacatagcctcattgtaatctatccatcaaaagatttggtgggacttcttcctttatgggggaagagatttctgtgcactaccagaagttctccctgaaataatgataatggcaataataccattaatgatacctaaaaaaaaaaaaaaa

SEQ ID NO: 55600 - DNA, 614 bp, Homo sapiens
  misc_feature 572: n = A,T,C or G
ccgggccccccctcgagagtcttctagaattaattaacgcgggggactttatttgatataaattaagatgtagttagtttctggatttttggattgtgattttactcagtacctgaatgtcataagtcagtttgctggttttgaacactgaatttgaatattataaaactttataaaacaaaatttatttgtttgcacatagtacactgtggaaccagactgtattttctaagactcctagccatggacatttttattgccgtttactttttccttatatgatgaattgttacaagtatcacttaattgcagctatacatgcccatttgaatatgatttcaaatgcattacttgttcagtgtggtaggtactattctaggtaatttacatgtattgttgatatttctgcattctctcaggaagatgttactatctttttagaaatgagaagaataaattcttcagaaattatataactagtctaaagacagactaataaatgatggaagcaagattcagttttaggtctgtctgactgaaggtcatgctcttcatcacactgcctgcatcangtgtgaatgtgtgtgtgggaaggtcttggagaggctggggtg

SEQ ID NO: 55601 - DNA, 599 bp, Homo sapiens
ccgggccccccctcggaagtcttctagaattaattaacgcgggactctagacttttagcataattacctataggcagcaaaaccctagtcaattgagtgtctggtgcgtcttggacctggacttccccaagagaatgggcaaggaggacgaaaaggaagagacagctatgctttgtgaaacaggaggtgacttaaaaaaaaattctatagcagtcttcttaattcctgttacagacttgatacgcttatctgctgttgaggacacggttgccagtttctaaccttctctgtctgcctgaaaaactagaaattagatgatcatatggcctagagccagaagtgcaggaggcagaaagccaggggccagtttttttctttttgtttctgaataagaaggccaaatcctgacttaaaataatcaaaataaattttacggagtgacggtctttccagctgaaaaccttaaaacatggcatctggaagaaggccttagtctattgctcccaggatggtactatatagtcattaaatagcccacagataagggagttattgccccctcgttattgggctgccagaaattaaatgatggaactaag

SEQ ID NO: 55602 - DNA, 533 bp, Homo sapiens
  misc_feature 486, 506: n = A,T,C or G
ccgggccccccctcggaagtcttctagaattaattaacgcgggcagacataatttataactacatcaaaataagctgtgactagcagcgaaataaaatgtaaaactttgcatactttttattacatagtgtgcctaaactataatatttttgtgaacagctgatttttcaaactaaatagacttcagcgtggcatcctgtgctttctctttttactgattatcataaattcaattttagaaatgtttactctccaaaaaaattaaccttgataaatcaaacttcagtgagatactgacacttcttgtaaatttcttatctaaattgtaggtgtatttggttcaaactaagtttaaaatatttaatcaaaatatttgaactaatgaatatcaaaattgtagctgttaaaagttttagaaaataacagaggcaaagcttagaaataaaaatttcatcatatccctacaaaattaagagaccccaacanataaaattaggaatgctcanatttaaactattaaatcatgcagttct

SEQ ID NO: 55603 - DNA, 622 bp, Homo sapiens
  misc_feature 32: n = A,T,C or G
taccgggcccccccctcggaaatacttctagnattaattaacgcgggttgcctagcatagagtttcagaactctttatttttaactaacctgtgggattatgttttatgtgtatcctctgcagacaaacaaataaatattaacaggtattttaatcattctcttttatgattttaatttcatttgttttgtgtttgttttgtatttattttttcttagaattatttagaaattatgtatcatatttcaatttctggtagtaatagataagttattatatcagctttatataatgttgtaacaaattatcatacatttaatcattttaaaacaacacatatgtattctctttcacttctggggtcagaattccaaaatgtatcttggtgagcctaataaaggtgtcagaggtgttccttctgagggctctaggagataatctattttctgaccttttccagcctctaaaggccatctgcattccttggttcatgtctactttcaccatcttcaaagccagcagtggaacatcttcaaatatctctccaagtcttggcttctgcttccttcttttgtcttttaaggacacttaacaattacatgagcccaccaggataattcac

SEQ ID NO: 55604 - DNA, 615 bp, Homo sapiens
  misc_feature 32: n = A,T,C or G
gtaccggggccccccctcggaagtcttctagnattaattaacgcggggagacccctccctcttccaccatgtgaggttagactgagaaatcatctctgtggtttatatgctgctcagtctatggcattttgttatagcagcccatgctaatgaatacagatgaccgtgtgtctgcagaccttcctaggaaattattgagtccttcattgaatactaaactgtgaatacatgagagaaaataacagaagcctggggtaaaatgccaacacaaagggtttgaagaacaattctcaaagctcaagaaaactctgcaaatattattgttgccacaaaccaaagtagaagacagggtaatatatgagctattaggtagaatctttggaagaatcctgcttttgtgatggaactcactcattcctaaacctaaagcaactctacatcttctctaagaaaattttatagcaatctctaaaagcatcaaactgattccaaataatttaactgtgtttgagaacaaaatacaaatatacaaaaggaattcaacaaaatccatcacataacaatatagaattcacaatatctggttttgatgaacataataattagtgttgaaac

SEQ ID NO: 55605 - DNA, 602 bp, Homo sapiens
  misc_feature 32: n = A,T,C or G
taccgggccccccccttcggaatacttctagnattaattaacgcgggtcccttatattttatctgtaattgaatcatctgcaaatagaaattgtgtctcctttctgagtgatgaaactcatttttttcagttgcatttcttaactttgaatgtgactataccatgtaaagtaataatgtgattgaacattattatgggctaaattgtgtctctttccaaaatcatatggtgaagacttgacttccaatatggctctattttgagagaggacctaggtttcaatttgtacttaattattctttgttatataagttactgtgtgggttgtttattttttcttataatttagacttttatcatttttgttattaaattgtaaggttcatatttatatatgtatgactgcatatttggtatgtgtcaatataacataaaaataacattgcttgaaaaaatatgttctatagagaattttttcaggctttctcagtaacctaacacataagatcatacacacttatatacacccacacacatttcatctgtagtactaattattatttgttattttgctggaaatggatgccagagacccaatgatt

SEQ ID NO: 55606 - DNA, 357 bp, Homo sapiens
  misc_feature 41: n = A,T,C or G
aagactggggtaccgggcccccccctcggggtacttctagnattaattaacgcgggttccctcacctgtagggaacgggagctagctgcacattttgaatgcagaatgacttcttaaaaaacaggctgggtgcagtggctcacaccatcatttcagcacaggaatttcagaccagcctatgcagcatagtaagaccctgtctctacagaaataaaattaattagctgggagtaatggagaatgcctgtagtaccagttacttgagaggctaagtaagggaggatagcttgagtataggaggtcaaggctgcagtgagctatgattgcaccactgactccagcctgggtgacagagca

SEQ ID NO: 55607 - DNA, 582 bp, Homo sapiens
cgggcccccccctcgaaatacttctagaattaattaaattgtagtcaaatcttaaatgaacattacaaaagtgtgtgtgtaaaaatatgcaccattttgtgccattttttttttatgagaattggtgccaactatttggagaataccaaaggtaggaaatggtgtcctgctttcttgttctttctcctttttaaaacgctttctttagaattctccctttgcacttccagttccaagttgtttctcaatggtttgagaagaaagtgaaaacttctcttttacaaacggatgaaaagagagagccctaatggaccacatctaggatgctagatcattgggtctggagcaaactacccagtttccaactctggctccagaatctaccatctgtgttaccttgggcaaataacctcagtaatccccagtttccatacttgtaaaatgtagataatgatattacccacctcatatgactgatgtgaagttcagagataacccatctaaggtgtttggcacaaggcccggtacacagtaagtgccaaaaaatgtttgctttgataatacaaagacaatattgaggaa

SEQ ID NO: 55608 - DNA, 507 bp, Homo sapiens
  misc_feature 27: n = A,T,C or G
cgggccccccctcggaagtcttctagnattaattaacgcgggctgcttttccgagttgtaccccagctccacaagcctcacagcaaagtatggcaacaaagtgagactggggactcaagtctccacaaaccttaaatcagactgcagaagtttagtacaactttgcaaagcactgtatttcaaccacaaattctcagccccctaaatcaccaccttgagcaaaggagttactgagggcacgaggatatcccataagcaaaacccgcagcagccaaaacagataggaccagcaattcgctccatcccttagaacatggtggctacttcacaccttgattactctcactggaaaaagaaacttcaagtttacagggtgccagtacagtgacgcctcaatcaacgagaactaagtattgaaatcccgaaataaaccagagtattttgctgcattttacactgggaaaaaaagacacaaatttaagcaaaaaaaaaaaaaaaaaaaaaaaa

SEQ ID NO: 55609 - DNA, 572 bp, Homo sapiens
cgggcccccccctcgaaagtcttctagaattaattaacgcgggtgtgtctttgcctctttctatcatcactggctctctagaatctgtattgtgcctggcctatgtagttgctcattaaatatttcttgtatacaaaaatgtaaaattgcccttgcatgtattaattactaatacaataatgtttatcatactttagataaaataatataaattttaatattattttgtactccacattagattatcttgaactcttatgggaagggagtactttctttcaaggaatattaaattaaaatgttgaaacattataagcttgtaattatgttagtatgatctctctataatcctcttcctcattcaatttagaaacaactgacagttaactcgagtcagcagatgataattcagtgatggcctttttgccccagcaaagatatacagacatgcctgacttggatgacacataatatggtttgctaatattgcatcccagaaagaggcgtatctagcctgtcataggctgagctggacaatagaggttatcttatcaggttatgtaaaaaaaaaa

SEQ ID NO: 55610 - DNA, 635 bp, Homo sapiens
ccgggccccccctcggaagtcttctagaattaattaacgcgggggtggaatatatcagggaatttataataaaattgccttaatctctacaacagtatcttaatttttacttgcggtgactattcttgccacaatattggagaataatgatagatgatatactagatttttcaaagtgtgaaaacctttagactttttttagcaattagtttggcattcgctactatagtaaccaagcactcattatatatgcatcctccaaatgtttcatgcttatttataggaaagttatattaatgagattaataatgtgaaatacagttttcctgcaaaattagcattagagaattgattttagataacagatttttaaagttttagagaaaagtacagtaatacagtaaactgaaagagtatatagataacaataaaataacataagtggacatgtttatagtaaatactctgaagtaaacaaccgtttttattaactgcatctcattagggaaagtttatatgtcttgttattttttattaacattttatttaccattcagagtgaaaattactaatttgagtattaacaaataactgaataaatggatcattacagttaggttttctcaaattgcaaa

SEQ ID NO: 55611 - DNA, 490 bp, Homo sapiens
  misc_feature 14, 25: n = A,T,C or G
ggccccccctcganagtcttctagnaattaattaacgcgggtagatgatttctagcaggcaggaagtcctgtgcggtgtcaccatgagcacctccagctgtactagtgccattggaataataaatttgataaggtggtgaaaaaaaaaaaaaaaaaaaaaaaaaaaaaaaaaaaaaaaaaaaaaaaaaaaaaaaaaaaaaaaaaaaaaaaaaaaaaaaaaaaaaaaaaaaaaaaaaaaaaaaaaaaaaaaaaaaaaaaaaaaaaaacacaaacttaaaaaaaaaaaaacccccccccccccgggagaacccccccctccccccattaaaaaactttttccccccccccccttcccccggttaaaaaaaccctaaaaaggaaaaaccccttggcctcccccaataaaacccctgccaaaaaaaccccttttaaccggggggggaaaaattaaaaaaacccccccctttcccctttttaaaaaaagcccccc

SEQ ID NO: 55612 - DNA, 480 bp, Homo sapiens
  misc_feature 14, 27: n = A,T,C or G
gggccccccctcgngggtacttctagnattaattaattgaataaagtaaatttaaataaccatagatggctagtggctaccatattagcacagatttagatcattttatatatattagccccactattaagttaaaatgaaattatgcctctgactccaaaaacagaaacttatctctaacaataaaaatccatattataagttgcagtagctctttccttcgaaaagtacatttttaggagacctcagttaaggatcttgaggttgattttgtccttttgtctacatataatattaattgacttcccatgaaatcctatacatttctgctacctgtagttcaacactgtgggtgagaaaagggggaattaaggaacagtgagaaggaattagtgtggaactctgcatctgcagagattttggttttaaaaccttctttcctaaaggtttattttccagtcattcgaaaaaaaaaaaaaa

SEQ ID NO: 55613 - DNA, 575 bp, Homo sapiens
ccgggccccccctcggaagtcttctagaattaattaacgcgggggttcatgctgcgggtaatccctgtccatggcgggccccactgcaagcatcgggcggcaggcggggtggggtcctcggccgggcagcaggcggcgggactccaggacccggggccgccggggcgtctatctgggcttctcatccgtggtggcggcggtggcggcagcatcatgatcttgggagggggcccgcgctttatcagcacgctgacacccagaggggatgtggcttccttctgaaatcaggtcttcaagggagtcgttgtaaaagagaacgatgaaggtgctggtggcccagacaggacaaccactgggaaggcagaacctcagacaggaccaagatccgggagaatccgaggaaccgggtaactgtgtccgcctcccagctctctcctgagtccgggtaactgcgtccgcctcccagctctctctcttgagtccgggtaactgcatctgcctcccagctctctctcctgagtccggataactgtccgcctcccagctctctcctgagtccggataactgtccgcct

SEQ ID NO: 55614 - DNA, 582 bp, Homo sapiens
  misc_feature 523: n = A,T,C or G
ccccccttcgaaagtcttctagaattaattaacgcgggtgaagagatcatgatgagtaattatgccagtaaaccactgggtggcagagtcttgtctatatactctcactctgtatccatttaaggaataaggacctggtagggctgaaaggcactatcttcagttaaaaaatccagttgcttatctacaaggaattctactgcagtgactgaactgggtatatttctttcaaccagaggtttgaaagttttgttcttgagaattttaaagtatctttaaatctcagaaatccacaacaaggctttaaaggtcagtaagtatttgctgaaatttctattttgttctggaagagtatctagtgtaaatacttctttagtcttcaaaaatcacaggcaaatggctctcaaaccaagcatttctgagctcacttgcagcggcgtcattgtataggaagaaaagccaagaccacagaacgaagcaggagctgtaacctaacaagtctccaacgagcaaatgacgattntctgtctgctctggctcagccctggcagtgatgaggattacaactcgctctttgtcatc

SEQ ID NO: 55615 - DNA, 512 bp, Homo sapiens
cgggcccccccctcggggtacttctagaattaattaacgcaggaggaggacgggttgggaggaaggtgcaataacttgtcattctgaccttcggtcttttttgagacccaggtgttgatgtgtttcctggactcttctgcagctctgataaaggaaagctccttcagctcagcatggtagaattgaagacaggattccttaaacgtctttggagagaaaaatgttcagtgaggctgcattgctaaatacaaatgtcagcaaacttccaaaaattctaaatatgttatctttttttaataaaaagaatatacataactctttaaaagtgatcatatgaagatatgttaaaatatcagagtttgtgaataggtatgtattgaaccctgaataaccagaaatgaacttgagaattttacctttcaattttacctttcaagaaaagtagagactacttttgcaatactaatgcaaggtataattatagaattgcagtctttaaaaaaaaaaaaaaa

SEQ ID NO: 55616 - DNA, 577 bp, Homo sapiens
  misc_feature 16: n = A,T,C or G
cgggccccccctcggnagtcttctagaattaattaacgcggggtagtgcaagtcaacaaaaacacagcaaacttaggcaaagtgtcctttctttgagatgcgagttctttcatgaggttttctttagggccagagttacctaaagtgaagcctttcttatctatagacttcagattctgcttggaatcccaccggctcaagaagcacatgtattgtgcaattaattgtctttacactaaaacagtttaatacaatctaactacgattttgaaaccagtgtctgatttatggtcagtgggtttaaaaagaaatccacatgcagatcttttaagacttaaaaagtgatcatagaaaagactaagtgactgtaaagatgctctttttttaagcatctcactttacctccccaagcaccctcccaaaccttgtcttccctcttctgttgcatcctttccctacccttccctcccaggtgctcggtactttacctagtttctatatatcagtgttttatgttggaatttttccttgtttttattttactagttggtaaaccctgtttatgctgaaacaaata

SEQ ID NO: 55617 - DNA, 319 bp, Homo sapiens
gggggaggccggcgcagcgcagagcgggctcgaagaaaataattctctattatttttattaccaagcgcttctttctgactctaaaatatggaaaataaaatatttacagaaaaaaaaaaaaaaaaaaaaaaaaaaaaaaaaaaaaaaaaaaaaaaaaaaaaaaaaagcagccaccacaggaggaggaccaccagaaccccccaatgaggagttttattcacgccacttagggcgccgccgccccccgggggggcggccgaaaccccgctgttgggcccctttttcgccgcgcagcgggggggcttttttccacctgtg

SEQ ID NO: 55618 - DNA, 489 bp, Homo sapiens
ccgggccccccctcgaaagtcttctagaattaattaacgcggggctctagtccaaaacactcctctttctcaagttatttttttctagccttgctctttaaatcaccatccaaacggcagccttatcaaaggcaactcaggtgccccctgacagcccaaagcctctgcccagggaaaaggccgtttctattctgccttggatagaaatcacagcctgagacacaatccagaaatatttccctgtgctgggcgcccggagaggattagacaggagcacatgtgatttcagcttgggtgtactcgccgctcaactatgcttgctacgtgctggattcaattataggttttcttacacttatatcttcattagttctacattgccgagtggatggaatgtgctgtcagcttaaaaaaaaagtgttggtttttcttccccccaaggattcaacactgtccagtcctgttaaaaaaagaaaaaaaaaaaaaaaa

SEQ ID NO: 55619 - DNA, 360 bp, Homo sapiens
  misc_feature 29, 46: n = A,T,C or G
ccgggtccccccctcggagtacttctagnattaattaacgcggggnaaaaaaaaaaaaaaaaaaaaaaaaaataaaaaagaaaaaaaaaaaaaaaaaaaaaaaaaaaaaaaaaaaaaaaaagaaaaaaaaaaaaaaaaaaaaccggaaagccaccaaaaaggaccccactaacccccctattcaaaagcaccttttatgaacaaataatgggccggccccccccaggggggggcccggaaaaccccttttgtgacccatttttttccccccccagggcccccccctttaaccctctggccgggtaacaaacccggccctgcccaatggaatttcccgacagaaaaaccccctttttggca

SEQ ID NO: 55620 - DNA, 584 bp, Homo sapiens
ccccctcgaaatacttctagaattaattaacgcgggggtggtgtgagagggaataaagggctcattccacgggctggaaacaaaaacaaccttataaaaaaataaaataaaccaacatatataaaagacaactaacaccctaaaaatctacttaaaagtaaaaataaaaatgctttcatttaagctaggttgcactagaaagttttcattcttattggcaatatcagactatttctaggtatgtatacctcacaactcccactcaaatataaacggatgtatgtagaaagatgcattttgaagcaatctttgtaaaatcctcaaactgcaaacaattatctatcttcaattgaatagttaaatatgctttagtataattaagtaatggaagactataaagcaattaagaatgtattaaaatgaacacatttgatctgtttttatggacacagatatatatatcaaaataataatatacagtgtaaaaagaacaagttcctgaacaatatgtacagcataccatttgtgtaaactatgtaaccacacaaaacactactatttggggccaattggaatgcacacat

SEQ ID NO: 55621 - DNA, 535 bp, Homo sapiens
  misc_feature 15, 17, 28, 105: n = A,T,C or G
cgggccccccctcgngnagtacttctanaattaattaacgcgggatatatatgtgcacacacatgtatatgtaaatatatatgagacagatataaaatatatatnggaaagtatacttgaaatataaatagtcaagtatttggtctgagtccacagcctgagaaacaggagagccaataagtacccccgtaagtctctcctataaaaacagagtgtaaattccagttcaatggcaggagatcaacatatgatcaacatttcaacatgtgtacatatatatatatatatgtacacatatattcaggtatatacatgaatttgtacacatatataggtatggaatgtaccaatttaaagacatatttgtagatataatgtagataaatagaatactgaacttgaagtcacaatcagtcatcatgggcctcatatattgtccttaatgtattttttaagtgtcattttaatgatcttttactgacagttgtatccctaaccaacattatcgggtgtgaaatatcatgacttattttta

SEQ ID NO: 55622 - DNA, 382 bp, Homo sapiens
cgggccccccctcggaagtcttctagaattaattaacgcggggtgaggtaaatattctataattgattgccacattggttacacaactctttgagtatatttaaaaaacactgatatttagaatactttaaatgaatgaattatgtgatttgtgaattatatcataatttagctgtttaaaaaattctaattactagaaccagaaatcaaagtcatgtttaacaactcactattatgaggccttgattttgaaagctaccaattttagaattgaatctactctgaaactgttcagagtagattctacttgtttgattaatacttgttgtatctccttcggcatgaaatgaaacctttaaaattcagttgtaaaaaaaaaaaa

SEQ ID NO: 55623 - DNA, 562 bp, Homo sapiens
  misc_feature 23, 516, 530: n = A,T,C or G
ccccccctcggaagtcttctagnattaattaacgcggggttcttttaaaatatagaatttttaatcgagttcatgttgtttatccaaactgctttattttattgcatgtgtaaactactagaaaaaactacttagagcatattgtcttcccataatactaccttaggtgatctttgctgtttattaaccagccctcagattttgaacaaatttttttaaccttactggaccccagatttctcaattataagatgagaatgttgtattaggtggactcttctaatcctgaatttctatgaaatttctatttcattttgacgtctcttactatgaaagaatgtttgtgggttttgtaagttatgtccattttgaaataagtgttcatagtaatttatgtatttttgtagataggcaaaactaaactaagaaagtttcttaatgtttatttagggtagcatgggagcatgagtagacttttgagttcctctaaagttttgttacactaattactagaanattttcttcctttntaattcacccttaatatgggttaataaatctc

SEQ ID NO: 55624 - DNA, 530 bp, Homo sapiens
ccgggccccccctcggaagtcttctagaattaattaacgcgggacccatgtatctaaattaaaattgcatattcatgttttgcattttcaattggccttgtataattaaaactgcatcacatttgatgaatttataattatggctaaatgtttatgttaacgttcacctcttccatgctgaaaaacaacaaaaaacgagaacatttctttaacttgtttctgaccagaaattcaatctccagatacaaaattcaatgaccatgtgtcctgaaaataaaatatctttgagatcaataggcacagcttcaagtgtgagatccaaaaatcctgatgcttgcaaagcacaaacccaaactgctttaaagaataatctatagaggaaagaaatagaatgaatggtagaagatctgattaaggtcttatagaagataccttactaacttcaatgaattagcaggagacaatcatatctcctcaggctataatcattgtactttaaatccccaactatttccaaaaaaaaaaaaaaa

SEQ ID NO: 55625 - DNA, 598 bp, Homo sapiens
  misc_feature 16: n = A,T,C or G
ccgggccccccctcgnaggtacttctagaattaattaacgcgggcataagttaataatgatacatttctaagaaatcattggtcacaagtggaatttgctagagtacatggggttcatcatgcttttctctttacttctgtaaagtttgaaaatgtctgttatgcaaaggttttaagcgttcagttactgattagaactgaatttatggattaatgtggacatgatgggcatctttataatactaatactttctatcatgaatgtggtacacaggtgcatttatttgtctccataaaagccttgtatggtctttgttgcatttaagcttaggtagcatgcatatatatatatatatattacatgatatacatacttttaaaaatatttcagttgttggccaaacatggcggttgacacctgtgatcccatcactttgggaggccaacgcaggtgcattgcttgagctcaggagtttgagaccagcctgggcaacatagcaaaacctcacctctacaaaaaaatacaaaaattagccaggcattatggcacacaccagctactcgggaggctgagacaggaggatcacttaaacctggc

SEQ ID NO: 55626 - DNA, 478 bp, Homo sapiens
  misc_feature 27: n = A,T,C or G
cgggccccccctcggaagtcttctagnattaattaacgcgggttcctttttcaaagatgaaaaaattgagatccaaataagttaagtaatttgttaaggtcacacagctagtaagtaatagatatctcagaaaacctatctcacagcccatgctctcttttaggggaatggtcacttaatgactattttatgatccagagccttctcagggcattataaacatctctaacaattctttctgccatgtgttcaattaaggcacttttgtaggagaactttttaatagtctgagtattcaaagctgttaagaaattaccttcatcaaaatttaaaactttttctcttgaggctctattaagagaatgaaaatcaagccacagactaaaagaaaatatttgcaaaccatatacctgacaaaagacttgtgtccagaaaatacaaaggaccatctgaactcaacagtaaaaaaaaaaaaaaa

SEQ ID NO: 55627 - DNA, 471 bp, Homo sapiens
cggggccccccctcgaaagtcttctagaattaattaacgcgggtcccttaagttctgctatatagtttttttaattgtcaagtagtgaaaaggattttctaattttcattgagatttctttattgactttaacttattttgaataatattgtttaaaatgcaaatattagggaattttctaatttttttgctatttgttttctagcacaattccattttagttttgtaatcttcttccacattatttcaattctttgcaattcattgagactttatagctcagtatatggtggattttggtaaatatttcatgtgctcttaaaagaaagtacattctggtccggcacagtggctcacgcctgtaatcccagcactttgggaggctgaggcgagcagataatgaggtcaggagatcgacaccatcctgtctaacacggtgaaaccccgtctctactaaaaaaaaaaaaaaaa

SEQ ID NO: 55628 - DNA, 595 bp, Homo sapiens
ccgggccccccctcggaagtcttctagaattaattaacgcgggcagttagatttgttttgagctaggacccaaacaagaattatatactacattttgctgataagtattttaagtcctttttaatctacagataacccctcctgctattttgattcttaaaatttatttgttaaggaaaccaggcctgcagcatgtcccattttctgattacctgattcatctgcccgatatcatttgtacatgttcctgcatcccttgtattttctataaactggtagttaaatctcaagcctgccaagacattaagatcgatcagtgggtttgaatattatcagcctgatccctccattataaagaacgccatcagctgcacctaacagcttagtagccattaacaaccacattgtctaaactcattattcaccaggggttgcaaaatgctaatgttcattccttctgtatttattagacggcattcttctatgaagaattttctgactggtcatggtgactcatgcctgtaatccaacactttgcgaggctgaggcgggaagatcaccgaagccaggagcttgagacaagcttgggcaatat

SEQ ID NO: 55629 - DNA, 444 bp, Homo sapiens
  misc_feature 144: n = A,T,C or G
cgggccccccctcggagtacttctagtaattaattaacgcgggggagagagagagagagatctggagtttagcagggactctgaggacagctgcagactgccagacaagaattaaaaaaaaaaaaaaaaaaaggcgaggcaggngtaggagaaaaatagtaagaacttatggaataagtcaaagcatacatttagcagtttctcaataagtaaatgttgcgtaaattaaaaattttattgtaaaatttatatatagaaaagttagatttacgcagtctctattgtgtgaagataaagatatgccttagatccccaaactactgaagatagcataaccaccactaaaaccatcagccaaagttgaagagctaaaaaactagtaaattccattgcctctgaaaagaaatatggaggaaaatccctggatgctaaatctaactctga

SEQ ID NO: 55630 - DNA, 472 bp, Homo sapiens
  misc_feature 445, 458: n = A,T,C or G
cccccctcgagagtcttctagaattaattaacgcgggactttataaatgtttcccaatctactaaagataaaatgatatcttggtgttatattaatttataattactgattacaactgagagtgagcattctattatagtttttaaattgtcttttatgttttcctttctgtgacttgcctgttcacatttcttatacgttttcctattaggttatctagttattcttgataaaaagatattcttatatattctagatagggttcctttagcacttatttatggtataaatttttcttgccattatttaaacatgaaatgatcccctaatataactaagttgtgtcgtgtctctttttctgttacataccaactcttaccagaagcatcttttcaaggtgatggatgatgaggggaccctgcttggactgatctctatctcctangatagagatctgnaaaggaatgtgctc

SEQ ID NO: 55631 - DNA, 617 bp, Homo sapiens
  misc_feature 37: n = A,T,C or G
ctgggataccgggcccccccctcgaggatcttctagnattaattaacgcgggttgatataaaatgaatactgacaatgtttttaaaataatataaggtaaccattaggataaataaaaatatatatttattttcaaaggattgggcattaaactgtatgcagtgtattttataaaataattgaaagaagacacaaaattaaaaatggtatgaagaaaggataaaataagttggcaggaataaaatcaaatatgtcaattatgatagtaaactcaaatattttaatccctactctcttacagcaaagatttgtagattaggtaaaaaattaacaaaatcataaatcaaagtgtatgctgccccaaagtgacaaatctgactcaaaggaatgaagaagaataaaatgtaaagggttgtcaaagatttatcaagcatatagaaaaacggcatggtagcctaaatttcagactcagcagaatttaacacaaaacaactaaacaaaacaaaaaggtcatatgattttctttttctataatttgaatgttaaggaatatgtgaagtcatgaatttttggtcaatatcactcattatcaatatatatgacataaaaactgttag

SEQ ID NO: 55632 - DNA, 450 bp, Homo sapiens
ccgggccccccctcgggggtacttctagaattaattaacgcgggtgtccctgtcatcctcatgaaatgttctggttaattgctaagtcgtctttcttctgtccatcacctgtttttcaaacatattgttcccaggcctagagatagaagtactcatatccagtctctccttttttatttccctctgagagagagcccttatgtaatctgtttccgttcaaagcttgtgttactcttcctatagaatatccatatttcccagggttgggtttctgcctgctgccaggttgccctaactgttttggtgacatgttggcccccgtggtcttactccttatgcagtgttgtgggtctgcagtttagcaaggaagagacttgacaatgcacattgatgtgcatgtctagcttctgttctaaagaaatttaaattgccaaaaaaaaaaaaaaaagc

SEQ ID NO: 55633 - DNA, 578 bp, Homo sapiens
  misc_feature 26: n = A,T,C or G
ggccccccctcgagggtacttctagnattaattaacgcgggcagtagtccaactaatgttgtataaattgtcagcttctcaggtaataggcgtgcactgatttaagaacccagtataacaagaaaaccccaaaacaatggcgttaagttgctgaattttatgtgaatctttttatcattccattaactttggaacaggattacttttagctatgtctttaaaaatacttcagaaaaagcatgtcattgagaaatgttacagacatagtcccgtaatttttcattttaattcatcagttaatctaagagttaagaaagtaaatgatttaattgtaaagttatcatactgaaataaataaaactaatgctacaacagtttttcttcaagtgtgcttagtggaactgaatagcatttccacagaacatggtttccatggtaaaatagctcagaaatcctgggtgaaacaagcctctttaatacagaatcattaagggggggcgtgcagcattcagaatttctaaacttagctaaccaaatgtcatggaactagaattctactttgagaaacactattctag

SEQ ID NO: 55634 - DNA, 576 bp, Homo sapiens
  misc_feature 9: n = A,T,C or G
ccccctcgnaaatacttctagaattaattaacgcggggagtgcagtcaaggggataaaagagtagcatttttcatgagaaggtgctgattgtctaagtaaatgggtaggagaatctgaaagacagctacgattgctgtttgatcaggtatgatattaacattttatatatctggatagttctgtaatctaggcagatgtgtgtgaggattagataaatcttacatttaatcagtgttctaaataaacccagaagaattagactatttctttctagattattttcttttatatgtcgagatgacactgacctacagtgaacagttttatagtaagaagggaaagaaataattggatcttagttgtttggagtcttaggtctcatgcatataggaagagagtggtaatctcatatttagagagatagtagtagtgaattatggctcagtatgggagttaaagactatttctgccctggagcggctttcattttcatatcccagattgtattgacagcacattgtaagataatactttctgatctactgaggcatattgctgcaaatgcttttaaatct

SEQ ID NO: 55635 - DNA, 608 bp, Homo sapiens
cggggccccccctcggaagtcttctagaattaattaacgcggggctagtttggtgtaaggcaagaggatgaagaaaacagaattcaaattatgtttcactttccagaatcttcagtacagtgttgaatataaatggtgagaaagaccgctcgttttgtttctgatcttagcaggaacgcaagcattaaggctttcaccattaagtatgacacagactatagcgtttctgtagttgccctttattagttcccttctgcctagtttggtgagagttacaatcagaggtagatgttgagtttcctctaggaatctggatttacagattatggtaaaacatataatgatgacttttatgcttaccaaaaatagctgatctttttaaaaacacgcaattaaaaagactaacttttgatactcttttaatcaaatgctaggcatatgttacatttttactcttcctcttttcagtaattatcgatgtaaattgtaagaacatattaatattgtaattactgaagtttttaaagtacttactgaaattttaaattatgttgtcttaattagcagtgtgacgacgtttagacagcttccatattacagtggtgtca

SEQ ID NO: 55636 - DNA, 625 bp, Homo sapiens
  misc_feature 606: n = A,T,C or G
gggccccccctcggaagtcttctagaattaattaacgcggggtgggagtggcataaccaagtgtctgttaatagaagaatacagtatagttagtaaaagtaatacacaaacatctagatttgtcaaggaagtaatacttgggaagatagtagacaaagcaaagttagttttgttataccaccaaatctataaattaacatcgtttagaataataattggaattagagtgattttcagatttcaatgtaagctaggttcgcttttttaataaatcaaattaataataatgaaagaaaggaactattttgaaagctaaaagttttcgatactgtctctgtgccttgatacttctcctttaagatgcatttggtctccttgatgttattcagccttctagtcttcagcttagttatctcttctttcttacttgactcattagaatttgtttaaactgttataaaattttacagcttttcaaaaatgcaattaatcagatttgaaaaaaatccatttccatctattaaaaaatatatacacatgttaatatgtgtacacattctttattagaagtaagttgtatctgtgcccagcaattgaaaagtgtgntttctcttgccatgcagtt

SEQ ID NO: 55637 - DNA, 400 bp, Homo sapiens
  misc_feature 91, 92: n = A,T,C or G
cccccctcgagagtcttctagaattaattaacgcggggtgggggtggttctttacagaaggatgccagttgataaaatgtagaaggaatgnnatggaatcagaaaaaccattttgtaactctcagtgtaaaaattgattcaggcaaaaatcattgatggtgaaaatttgttgggaaattaaatattcattggtttaaaagtatcacctcacaaattatttactaattacaaaaaagaaaatgtacctttgtaattgagagtctggcaatcatcagcttaacaaaatgatcaatcttagcatcatgaacggtgggacagcccattgtttttgcctttcatggggtgcagtaagaaaaaaaaaaatcaccggtatagttgtcccaccaaaaaaaaaaaaaaa

SEQ ID NO: 55638 - DNA, 569 bp, Homo sapiens; identical to SEQ ID NO: 43979
  misc_feature 16, 29, 130: n = A,T,C or G

SEQ ID NO: 55639 - DNA, 585 bp, Homo sapiens
  misc_feature 189: n = A,T,C or G
cgggccccccctcggaagtcttctagaattaattaacgcgggctcatgattaacgttattatatttgtcatatgaatttctatgtgactctgtacagagtattccctcttgctttttctttgtctctcactctctctttgaattttctaagattacataattccataatgaagttcacgtgacgtctcnactgaaaggtacacatactattccttttactgcccgatagataaaagactggattaggacccagagagacctcccttattgaaaagatagtcaaagaatttgaccttattgccatcttttaatagtatataaccgatattgtgtgttctttcatttctatctgtgcctctctgtagggattagagatggggaattagctttatcaagcctttgggtaaaatgtaaaaactgagctgatttgtctttggcatctcagtaacaaaaatatagatctgattttaacatttacagcactgcctgtgtgctgactgcctataggtgtgcaaagatgaaagttattctttagaataatattaaagaaaggtttattaaatggcacagtacttctgaagacat

SEQ ID NO: 55640 - DNA, 527 bp, Homo sapiens
  misc_feature 22: n = A,T,C or G
ggcccccctcggagtcttctanattattaagtggggcagagctcagtggtaaaaggccacctttctcgtggctgtgtttggtgtcctaagagaatgagctcaagaacagtgggctacagtcttctgacccttggggaagatcgtgagaaggatgctgcagctcttcatgtgagagcggaggctgtcctcctttcacagataggagaacaaaagtttcatgtgctatcccactgctggggctgggactggggtcgaggtcaaggtcaaggtctagtgggtctaagtcaaaagttaactgcttacttacttccctctgtttctcttccttctagtcgcccatgtttgatggaaaagtcccacactggtaccacttctcctgcttctggaaggtgggccactccatccggcaccctgacgttgaggtggatgggttctctgagcttctgtgggatgaccagcataaagtcaagaagacagcggaagctggaggagtgacaggtgtgtacatactggggcagcatgggcat

SEQ ID NO: 55641 - DNA, 485 bp, Homo sapiens
  misc_feature 45: n = A,T,C or G
cccccctcggaagtcttctagaattaattaacgcggggtgggggngaagagttataggaccacagtcttcacttctgatacttgtaaattaatcttttattgcacttgttttgaccattaagctatatgtttagaaatggtcattttacggaaaaattagaaaaattctgataatagtgcagaataaatgaattaatgttttacttaatttatattgaactgtcaatgacaaataaaaattctttttgattaaaaaaaaaaaaaaaaaaaaaaaaaaaaaaaaaaaaaaaaaaaaaaaaaaaaaaaaaaaaaaaaaaaaaaaaaaaaaaaaaaaaaaagggcggccccccccgggggggacccccatttccccttatagggagtctttttaccccccctccttggccgtgttttaacaacgtcgggacgggaaaaaccctggggtaccccaattaaatgcctttgaaaaaaatccccttttcccc

SEQ ID NO: 55642 - DNA, 542 bp, Homo sapiens
  misc_feature 503, 508, 511, 518, 524, 525, 529, 534, 535: n = A,T,C or G
ctgggtaccgggcccccctcgaaatacttctagaattaattaacgcgggggggtgacgctcagcaccgcaggcaccgaggacagcctcccacaaaggctcctctgggccagagcatccgtagtgccaaggggaaaagcccggacacaaaggatccagtgttttcaacgttgctcagggtatctccacacagaaactcccatctgccttttgtgcaaactctggggtcttgcaatcgataaacgttcacaagacacaacacgtgaacctaacaattctcttttgctccaggagagagaaaagaaggaatggtttggggagattcaccgaaattctgtgagttcttgactaaaaatcaccaagtccgctgtgttctgttatcagcagtcctgggtaggcccagacccacctcacccccagcgggacccaggaaaggctttaaacctcaaacgtcccttttcgtaacactggctgtttcatgtggttaataaatcatccaataaantgaanaanaaaaaanaaaaannaaanaaaannaaaaaaa

SEQ ID NO: 55643 - DNA, 407 bp, Homo sapiens
  misc_feature 41: n = A,T,C or G
aagactggggtaccgggcccccccctcggggtacttctagnattaattaacgcgggggagtaagaggggcgaggggagcaggatctgagcacagatccatgatttactggctatgtgacctcaaaccactcgtcttaaatgacatttatttacagagacaacagaacgtagtgattagagcatgtgctttgaagtcggactgcctggtttatagactgatcctgctacttaagtaacttgcagaaacttacttatcctctctattacttatgtgatgtataaatgtaaatatacacagacatacatacatatatacatacatacacataagcatatataaatgtatgtttgagtatatttgagcttatataagtcaaataaatgtagtgtctaagaaaaaaaaaaaa

SEQ ID NO: 55644 - DNA, 593 bp, Homo sapiens
  misc_feature 28: n = A,T,C or G
ccgggccccccctcgaaagtcttctagnattaattaaaatactcatgaatgtatatattgaatgttcactatgtaccaggcattaggttcctatttacatcaagtttctcatttggtctttaaaaatacagtgagagataataccactgtaactcccactttacagataaagaaactgaggcttacagagcttaaggaatttcctctgggtgaaaatggttactaagtttcaaatccaaaatacaaaaccaagcagttggattgcagagcttatatgtttacctctcccttcagggtttcatagagcctcagagcatgggtgacccattccaaactctaatagaaaaacaagcaatgtggttaagaccctagataatacatgggaaatcagtgagtggagtaggaacatcacacgggatgggaggggggtcttaaaaatgcatcaaaatcagcacaccttctaaaccagcatttgcaatttataaagaattttaggtaattcatctgcacattgaagtttaatttaggaatatagattggtgcagccactgtggaaaacagtatggaggtttctaaaaaaaaaaaaaaaagcg

SEQ ID NO: 55645 - DNA, 548 bp, Homo sapiens
  misc_feature 515: n = A,T,C or G
gccccccctcggaagtcttctagaattaattaacgcgggggtaaatccacagtactgtcttcaccagtgttgatatggtgaatgattgcttgaggaatatacccactgttttagtccagaggcagtgtttctccagttaaaggtggatgttacccagaacaacttgatgtcattctgaagaatgatagaatgattatttttgaataggagagtctttttgagtcatttggatcaactcctctcagtaaacaaatgaagaaacttaggtccagacacttgttaaagcccagtaagctatcgtacggcagagctgaaactaagattatgcttgctttatcatactgttaagtggaaattgaggccatgaaaaaggaaaacgtttgcatattaaatttgagaaaacaaactcagcagaaagaccacaaatatatgtgcaaaataaaattatcagaatacattaagatatgtcactattggccaggtgtggtggctcgcgcctgtaatcccagcgcttntggaggccgagatgggctgatcacctggggtca

SEQ ID NO: 55646 - DNA, 423 bp, Homo sapiens
  misc_feature 30: n = A,T,C or G
accgggcccccccctcggagtacttctagnattaattaactttaaatttattatgtattcatataaagtataataagtcttccaacttaattcatcaagatagcctctttagatgcttcaatagctttcttagtccagcctatttttgtttctgtatgtattaaggtaatatttattcagtaaaatgcacacgacggtaagcacagagctctattaatatttacctacatatacaacgatataactactacaataagcttgtcagcttacacacacacacacacacatacacacacacacacaatacctgtggagattttgtatgtgtttcgtgatagattgaccattttggtcctatttggtcatatctctaaatccatgcaatgttactctgcagttcatctctccaaaaaaaaaaaaaaa

SEQ ID NO: 55647 - DNA, 616 bp, Homo sapiens
ccgggccccccctcggaagtcttctagaattaattaacgcgggggggagaattgaatctgaatattttgagttgtatattagcattatttaagacgtaggttaaagttgctgtaacagattcaaatacggtgtttcaaataagaaacttgagttgtcttattctctcttaaaggtagggttggcctccagggactctggctgccctgcctcatcagcactgtggggaggggagagagtggacagcacgcacacatcacttcccttctcgcctcatcttggtcacaaactcacctaacttaaggggacactaggaaatgtcatttatggggcagtcattagtaatttgatggggtttctaacacttaaaggaagaaggaaacaggaatgctagggaaccacattggccacccaagtgtccagtggacctttcatcccacacatggggatgtgccagtgtgggtccagaccactgcaataaagtgaatagcaaaacaaagcaagtcacagaaacttcttagcttcccagtgtatataaaaattacgtttaggtatgctgtggttactattcagtatgcaatagcattatgtctaaaaatgtaaataatttaaagatac

SEQ ID NO: 55648 - DNA, 510 bp, Homo sapiens
  misc_feature 28: n = A,T,C or G
cgggcccccccctcgaaagtcttctagnattaattaacgcgggtgggtgacagtgagaccctgtctccaaaaaaaaaaaaaaaagaatttacatcaatcccccaaaaactgaagagaaaggaatacttccaaggtcattctttgaggggcagcattagtgtgatatcaaagctaggcaaaaatactacaagaaaaaataaataattacccaatatgtctgatgaacgtagtcaaaaaaatactagcaaaataaattcaacagcacactcaaaagatcattcaccatgatcaagtgggatttatccctgggatgcaaggatggttcaacatatgaaaatcaatgtagtacaccacatttacagaataaaggacaaaacccacatgaccatctccactgatgcaggaaaagcatttggcaaaattcaatatcctttcacacacaaaaaaagaaaagaaaagaaaagaaacactcaaaagtggaaagagaaggaaattacccgcacataataa

SEQ ID NO: 55649 - DNA, 607 bp, Homo sapiens
  misc_feature 22: n = A,T,C or G
cccccctcggaagtcttctagnattaattaacgcgggtctcttcaaagtgccaataaaaattcaaaatgtcattttccagtgcaattcggcctgaaatcaacctgttttatggtaattatgggctctggcaccagaacatagcagagctttagaaacattgaatgagtgattgagtccaacctccataaatgtgaaacatatgaaatgatttgggtaaagtaaaaaccagagagcgttgtcaccctccctaccttgagctatgcataaagctgcgttaatgtagtggagtagtcatatcagaatgagggagagggtgagaaaaatattttcagaacaatagaaatagcatttgaaaagcatcttatgtggtagaggggaattttcttgtaaaggtataaactgtgagaaagagatgatgatgcccaatgtgggcaaaaaatgccttttcattggcaagattcgggtatatcactatgaaaagaaaaccatatatatttcttgtaactactgcagcggcaggcataaggacccggtaatgcatcatcatatgctacatggcagcttatcaggagtggctactcgagccaagagaaacgtggcaacact

SEQ ID NO: 55650 - DNA, 610 bp, Homo sapiens
  misc_feature 28: n = A,T,C or G
ccgggccccccctcggaagtcttctagnattaattaacgcggggggttctgctacttgcttggtgtttgaaaatgtgaggaaatggatgttttctgtcaatgtaatttaaatctatccaggagtattgacatataagaacacttgaatgcaagtacattttgatgaatataattaaatcaaatgtgtttacttttagctgtaaaggaggacatctaaaatttaacttacctaatataaatttagaaggtctttcttgaaaatagctcttgctttgtattttgaagcatttcctactgaaaagtcttggccaaagttaccagagctccttttccatacagatgaaactgcaaatggagaaatatggaagcagagagaggggaaaggcattttaatacctctaatatatttctgtgatgaaatagtcttctctagagagaagagaattcatgaaaattcactaaggaagagctgcaagtttgttattgttagaataatagaaagatgactttaactcacaactgagtaagtaatatttgtgttcttacttgtttacccctcaagacctacagaatggcaaatgtcaggagatgttctgtacatagagtcggt

SEQ ID NO: 55651 - DNA, 604 bp, Homo sapiens
gggccccccctcgagggtacttctagaattaattaacgcgggggcatttcacactcattttgtgtttaatggtgtgaatcagtgtgattccaaggcagtagtgcatgtacattaaggatgtaggctgtagctaaactgcatgggtttgggtcccaggtctgactcttactagttgtgtgactttggataaaatgctaatttgtttgttgttttaatacaatcagtgatatagagcttgcactattgtatcatgcactatctaaggaccttatagatagtaactatctataagtgaatgtcacattcacaccctggagagagacctttgatcactctccatttttcacatgaggaaactgaggtacaaaagataaagggcatattaactaagaatgtgggctctgtagtgttgttacctgagtttgaattctagatttgccacttcctggctatgcctaacctcaggctacaaaataacagatcatacccaccctactcccatcattctattcttagagggattttgttttaaaataccaacaaaataggactgacatatgatcagaataaataacaaactcttagaatatatgtagcttttaaa

SEQ ID NO: 55652 - DNA, 436 bp, Homo sapiens
  misc_feature 362: n = A,T,C or G
gccccccctcggagtacttctagaattaattaacgcgggctgttgaaggacacagcatcatctgtcatgttgaaaggaaggggaggcaggctgctgcgagatgggattgggccaggaactctttaatttcagggctggggggcctcatgttatttcagagcgtaagcttgctatttataggacacatctaagagtttccagaaaaaattatgggactgcaagtctcctgaaatattaacatttgtagtattaatatattatctttttcccttttaagttgtggtaataaaatatggtccttaaaagcctgcctttttgatatttgttgtgacatgtttgattgcctaacatatgaccaattntatttaaggattctttggtatttgaaaagtatgtgtattctgaaagtgcttcatgctattctaatatattgata

SEQ ID NO: 55653 - DNA, 553 bp, Homo sapiens
  misc_feature 26, 470: n = A,T,C or G
ggccccccctcggaaatacttctagnattaattaacgcgggtaggcgtgagccatcacacccagccccatcaagcatttttatacctgtctaagctagttgtattcttttttctgctatttttccagagttcatggatttttatggatattttacatttggctctttaatctgtagtgtatttttgtgagtgatctgttctaaccttattttatccaagtaaatggccaatgtaaaaagacaaaaagatatgaagaacagattttgcagcagtgtctgttatctacttaggtaattcaagtaagtcaactgaaaaactattaaaacttatatgagttctgcaaaaaaaatgacgggatgcaaaatcaacttaggacattttaaagcttttaacaacacgagcaatagcctttcagaaaatatcatagtaaaacagaccccattcataatggaaacttaaaagtacctaanagtagacctaacaagaaacatgtgagaacaaaatggagacttacccaactattcctgtacagaatatagtctagaaattcatg

SEQ ID NO: 55654 - DNA, 601 bp, Homo sapiens
ggccccccctcggaagtcttctagaattaattaacgtgggagaagagtcttttcaattcagaaaacaagtattcaaaacataaatgatctcggttggctatattatatactatacccacatttaggggagtcaatttctcagaaaactcttctgccatcgcaatgctcttcatattttgacaatatctacagatcacaggtgacaggagaatatggaaggttctacataaaccctaccatatcaagaaaataattttaatacagaactgattattctaccagaagactttcattgttactgatgaaatgaaaaacatatcaagatcaatcaaaataaccatctttaatataaaactaagtttatagactgtaagttcttactttgtcctcggggttccaatggagtttctgttctaaatcagtcccaaaattgccactgtgcaaaactgatgagcaagtcagcactataaaaacataagtcaaggaagaatctcagagacgatctcagagaacaaaaatcactttacagtctaaaaggattactcacacatttattgctaaggtctaaacccattttcttaaagacttaatgttacacaga

SEQ ID NO: 55655 - DNA, 435 bp, Homo sapiens
  misc_feature 10, 23: n = A,T,C or G
cccccctcgngggtacttctagnattaattaacgcggggggagcaaaaaaaaaaaaaaaaaaaaaaaaaaaaaaaaaaaaaaaaaaaaaaaaaaaaaaaaaaaaaaaaaaaaaaaaaacaaaaaataaaaaaaaagggcgcgcaatattacggggcgcttcatgggccgacctttgaacaagccctttcctggccccaccccgggcgtttcccaacttattccgctttcaggaaattcccctttctcccccctttcctctcttttacaggctcccccacctttcgcccttcccaactgttgcccatccttactgcccaatggcctttcccaaggttggtttttggttaaaggcccatttaactttttctttaacccttttgctttttacccccttggccttttttcgtcaaatcccttttttttcacaaaattgc

SEQ ID NO: 55656 - DNA, 573 bp, Homo sapiens
cccccctcgggaagtcttctagaattaattaaaaaattaattcatttgttataaatttaaaaatcaaaatagtagaccaaaaataaagggaaatttaatgtttgagtggagggatttctttgtcaaagcatagtttacttaatttgagatggttctttaggtagcctgctatatctaagtacaaaaacctgattcaagccaggagcatctaggttacttatgctcagtttcaataccaaccattaggacttaggatcacagaaacagtattttaaaaaccagcaaagctatctttagcattttagaaagattgtcatgtagcaatctctagagttctatatcagccaccaaaagctagaaaatatttagtaataattagcctgcaatgaaatatatttttttttaaatggaaaggagaaaatcaggatcaggagcaaattggttaaaacaggaaaaggatcagaataagcataagcacagacttccaagtactataaacaatctggtaaggaaagagatgaaaactataacaaagaatcaagttaagaatacaaaaaagaaaattagaatcaa

SEQ ID NO: 55657 - DNA, 406 bp, Homo sapiens
  misc_feature 37: n = A,T,C or G
ttctagaattaattaacgcgggagagtgttagtttcnctatgagcctccaatcacagtattttcctcaaccagagcactatttgcataatgtaagttatacaacaagccagtctcatcagctttggaaacctgctcttttacataacattgttcctgtatgatagttagtgaattttaaaaaaattcttctgtacccttgaacaactgacttccctcctttaagccaccttagttaaattaaacaggggaagtaaataaagtttactatatttactattcacttcttacagagttggtaagaagatgaaatgagatactgtgcgtaaaacccctaaaaacccaataggcatttgaaaatagtagctattgtcattgtgttgtataacaaccaaaaaaaaaaaaaaa

SEQ ID NO: 55658 - DNA, 588 bp, Homo sapiens
  misc_feature 516: n = A,T,C or G
taattaacgccgggttcttatacacaaatgttataaacatcttattaagttccatgtgaaataaaacctattaaaattttcattgatattttattgtctgtaaataattttacactattgagttttcctatctattaacatggtatttttcttccatttgtttaggtattaaataatgtgtttttagcatgttttataatattccacaaattgtatatcctttgttaaatatgttcctagatatattgtttcagcaactgtaaatggcatcattttaaagttgcattttctgtttgttggtatatgatgaaacataatatgactttaaatagtttttgacttgtttctggcaatggtagagcaaaaagaaccagaactacccctcttgtttaaacagccaggaaaacagacaaaatatatgaaacaatagttttcagatattgcgcaatatatagcacaggacagtgattgctaagagaatacaatcaaatgtggtaagcccagtgaatgccccangtcaccatctgaagagtttccaggtcatagtgcagggaggggacacccaaacagagctcagcagtctccctg

SEQ ID NO: 55659 - DNA, 580 bp, Homo sapiens
ccccccttcggaagtcttctagaattaattaaccgggaggaatgaacaactccaaacgcgccgccttaagagttataacactcactgggaaggtctgcagcttcactcttgaagccagcgagtctgcgaacctaccagaaggaagaaactctgaacacgtccaaacatcagaaggaacaaactcgggacacaccatctttgagaactgtaacactcagcacgagtttccacggcttgattcttgaagtcagtgagaccaaaaacccacccattccagacacactaacacgcctgtttgcctggttgtgtcttgatttgttaaaataaagtatgtacaacacttttagagaatatggaacaataaataaagcagtgcttttatcttaaatttgctttatgcaatatttaaaaagtaaggtatgcatataagtaaagtcctcttaatgtataaaatattttagtacataagacaatcttgaagacaggtgtaagcttggaaagtttcttacaaattaatcattattaaagactcatttactctattgaaactattgctgagccacatgtagttattaaaatc

SEQ ID NO: 55660 - DNA, 595 bp, Homo sapiens
  misc_feature 37, 77, 85, 86: n = A,T,C or G
actgggtaccgggcccccccctcggaagtcttctagnattaattaacgcggggcagagtaaggtgtttgaatactanggtccacnntcattgaaactaccatcacctggaaaacactgacagaatcagctctgtttttggaaccctagaacctactgtaatttgaaatgtataaccagaggaccacttaatgaaggaaagggcagctgaaatttggcgaaaaagcattaggtattttcactcatctgataactatctctaattccccagcatggcagagatgccatccatgggaatggcaaaccacgttcctgatcaagtttgctggtgttagtggtgatggaaacattgtttttaaaatattgtagttgtctgttttgacctatggggttgttctctaaataaacagtgtagaggctgacatttatttctccctccccagcaatcaagctggagtggttttcttggtagtgactgcatctttcaaaatatttaaagacatacactgactgtacctgcctgaagaaagaacagtggataaggcaagcatcagacaactctaaagcctgggaaagacaaagctcaggaggaaattc

SEQ ID NO: 55661 - DNA, 385 bp, Homo sapiens
  misc_feature 39: n = A,T,C or G
gactggggtaccgggcccccccctcggggtacttctagnattaattaacgcgggacctggggcggggtgacggtacttatataaaggcagactctgtgtttctaccctaactaaaaaaaactaacacacttaacttaattattttaaatatttaattatgaaaaataatgtctaatactacattttgattttaaatatatgatgcggccgccaccgggggggatctcatcttgtccctttataggcttatgatacccccccctccctgacctgtctttgacaacaatattgactggaaaaaccctgttgtccccgactttgctcacttgctaatgcctgcccttttaacactttggaatgccaacgaagaggccttgccctgatc

SEQ ID NO: 55662 - DNA, 574 bp, Homo sapiens
ccccctcggaagtcttctagaattaattaacgcgggccagtaggtctcagcctcattttacccagctcctattcatgatgatgttgctctggttcaaatgcctctgacaccaggaagaggcttcctatatttcagaataaaatttctacacctaaactttctgctgcaaatattcactacctcttctaggaaagctctggtgcctgattctgctgaaagcatcttttttctccccgctactcgccgctccccccacccctactccttatcaaatgacctctctttcagaaagaagaaaagaagatataaaggtaagggaacatgagagtagagaaatgctgcctagccacatacaattttttgctttaattcattgtgttcttggagagactatcaaaagctttcatcagagtctcaagagtccatgaccccggaattttaagagctgctgctacaaaaggattcatgaaatcctctaagaaaaaggcacagaaagttcagggagggtttattaaattaattttaccccactgtctgatttttggcaggttatctaattttttttttaaccatg

SEQ ID NO: 55663 - DNA, 423 bp, Homo sapiens
aattaacgcggggggaggtaggctcggaccggcccgcggagctgctgcagtccttcgcgccctcctcgccctccccaccgacatcatgctccagttcctgggcttcttcgctggaatgaggaagaggaggaagccaaggaagacagagactgtggcatcagtacggtagcctttcctagtaaagagacaagcatagctgaggagaagggtcaggaattttcaggagtaacatgatgtctcggagcagtctgtccgaacacagtgcctctttttaggacttatctagaggtaacattaagcttagttcttgccagttgctgccacgctatccactttggatttaatgggcaatggcgaatgtctggaggcagggcctggctagagtagatgtcttaatgtgaatttgtgagcccggttattggg

SEQ ID NO: 55664 - DNA, 460 bp, Homo sapiens
  misc_feature 14, 27: n = A,T,C or G
gggccccccctcgngaatacttctagnattaattaacgcggggtccatgtggctgaagcatgcttaaagtctctaatccatcatcttgaaaaaaaatttaatctaaatttgagtttataaaagcaaaattgtatattttattaagtggttgttattctcgagctaaaagattaatctcataaatacacatatttatcttcagtgccagaaccaaaaaattaataggtgccaccaacacgtatcagcacagtcatattgtttggtcagagcgtaagagagtgtaatcaggtcctaataaatacattcaaaatgtaaaatcttaatacaaacctcagcactccctgtaagaagtgacaattaagctagagtgaatcccctgaccactctcagaagacacataatgcatttgagaccagcctggccaacatggcaaaaccacgtctctacaaaaaaaaaaaaa

SEQ ID NO: 55665 - DNA, 622 bp, Homo sapiens
ccgggccccccctcggaagtcttctagaattaattaacgcgggggacttcattgtacctgtttaagggatatactaacacatgcaatgtacagatgagtacactaaatatgagagaggttaagtaaatttttcatggccacagaactattaagtgatggaattgtaattcaaaattagttctgagtgactccaaacactgtattctccccttctcactatgatgcctcccagaataaatgctcatattaatagcagtgtgtttgcatttattatctgaggagatggtaataataagcctatatcatactatttacccccaagttaatgaaattttcctccatattccatatgatgagctaattatgctcttatgagtcattggaaaattctgttttattcattacactattgtttactgagtgtcacctatgtaccagaaattgtaggcactaagcagactagcaagacaaagtctctgctttctgaaaccagccttaatttatttctaatcactctgtacatgtaagccaacatgccagatcactggatcccccaatcatagtttctggaatacaacccaaagccacataagtattctaccaatgcccagatggaatcatt

SEQ ID NO: 55666 - DNA, 608 bp, Homo sapiens
cccccctcggaagtcttctagaattaattaacgcggggtatcactgtttaaagcaacaataatagtaatgtgtttcaggtttatagcatataaaaaagtaaattgtgtgacagtagtataagggacagcaaagaaaatgagcatatgctgtttaaatttttttacactatttttgaaatgatatattattatcctgtaaaccctggagttaaagatgtatattgtaaaatatgtatactataaatcctagagagacagcaacaacagaaaagaaaaaaatttttaaagcatatgtagtaagttaataggagataaaatgaaattttaaaattaaaaaaattcttaactaactcaaaagaaagtaacacaaaagaaaaatagagaagataaaacaaatagaaaacaaaaacagatttaaaccaaattatgtccactgttaaatagaatttaatataatgaacttaaaagtcacaaattgttagttggataaaaaattaagacccagccgggtgaggtggctcacgcctgtaattccagcactttgggacgctgaggagagtggaccacctgaggtcaggagttcaagaccaacctgactaacatggtaa

SEQ ID NO: 55667 - DNA, 461 bp, Homo sapiens
acgcgggatatgccatctgactggtcagcaggactaagtctgattacctgaagtatgaatgattagctcttggcacagtttgatggccatttgttcctgcctcttcagtagactggagatctgtgacttgagaaattcctcctccatggacaagttgttggagttgcccagttgctgggataagttatcctgctgctgttggatggttttctgaagttgactcaatttctctgaatctgagttaatgtcattagatatctgcaaaactccaagacatgacaggagacaagttcatatattcttctattcttataactgtagataattctcgtgacagaaacatttcttaattgttcaagatttattagtagctcttagtatttgaggtatcatgaaagaaacaaaccagatgcctttctattccaaattatttataagttctttataattttatttacatt

SEQ ID NO: 55668 - DNA, 395 bp, Homo sapiens
  misc_feature 17, 24, 35, 48: n = A,T,C or G
cgggcccccccctcggnagtcttntagaattaatnaacgcggggtgtnaaagaatttctcctagcttctaaaatggaagtctgattgtattctcagactttgcatagtattcatagctgatattttagttttatatgtatttgataaatatagaataaatgctggctatgttcaaaaccaaagtattgctagaaaacttgaggagttacaaaaatggataactaaagctggattaaaacattttatttacaaaatgattatgattctccactccaactcccatctcaagtacaattcaaatgaaaacagtattgaaataaactacaacataagtgtaagaaaatgccatggagctttgatgtttctcatgcagactatgttgacgcatgcttgaa

SEQ ID NO: 55669 - DNA, 355 bp, Homo sapiens
  misc_feature 10: n = A,T,C or G
cccccctcgngggtacttctagaattaattaacgcggggggaaaaaaaaaaaaaaaaaaaaaaaaaaaaaaaaaaaaaaaaaaaaaaaaaaaaaaaaaaaaaaaaaaaaaaaaaaaaaaaaaaaaaaaaaaaaccggacgtgggggggggcctaccctccatattgactttttgttatttttgtttactttgccctacgtggccccccccctggggcggggttgaaccgtgcccctccttgggtttttttgctttccccccctttgggcccttgtctcttgcccttgtttggtggagaccccgccggtccccccttgttttccgttccgcagcctcgcccgttttgggggggggt

SEQ ID NO: 55670 - DNA, 606 bp, Homo sapiens
  misc_feature 40, 531: n = A,T,C or G
agactggggtaccgggcccccccctcggggatcttctagnattaattaacgcgggggaactataatagcactgagcaagaacattccttaaactatcaatggccagaagttttgaagaatatgtggaagacagaaagcatcagttcaatcaatggactcatggagaaagctcagtagaaatcaaaattcagagcagcttcaagtccgggggtcaatagagagctagaatgagccacagagaaatcatcaaagttactcattttatagaactgtgtttccaataacatggacatttggttgcccctctgggcctttattaattagaacagtttcaaggaataggcttttgctcttgagctaagattgaagaactgcttcctaaagaaaacaatttgtctgggggtagctctcagtgagaatataggagtctatagtgaagcagggtggtgtatgtaggaaatcctgatctccacaacagatatagtcaggtaaactgaagaaaggtaagtgcctgggaaggaaatacagcanaggattccattcctatggtaattgtgtctgtcctcagtctctttgcatgcctcatgtcccggcaaactccaggat

SEQ ID NO: 55671 - DNA, 475 bp, Homo sapiens
ccgggccccccctcgaggtacttctagaattaattaacgcgggtcattcccttatacagatagatatctaaagtaggaggtataataatctgggggagggacactttagacactttctggggcctgattttcatgaggtttatcatatattcttacatataagaaagtttaataaatatttctggaagctaatttgcctcaatttgggaaaatcatttttataaggagtgttcactatatttgagcatttgagggaagaaaataatgtatagattataatctctgctctcaagaaaataggagaagcaagacttttacagaagaaaaaaataacacaatatataatcgacaaagtgcaatacagattgtaatttttggaagccttcagggaaatatagtagctttagattaatactaaatgacagaaaatgtgtatagatgagtacaaaggaatgtggggaaaaaaaaaaaaaaa

SEQ ID NO: 55672 - DNA, 610 bp, Homo sapiens
  misc_feature 27: n = A,T,C or G
cgggccccccctcggggtacttctagnattaattaacgcgggcatctgtagtatgtgcttaacaatggctagagcaacatgacaggaatgcagtatcatggcaaaatttccaaaaataactccattattactttgttttaaaaaaagactaaacaaatcatacataccctcttttctctcttcttcagtttgaaagtcttcaccaaagaagagtcccaatcctgttgacaattacactgtattaatttctttttttggttaggccatccctaaaccctgtgcaaataaatttacagagaactttaaaggcttcttcagtcaggctacctaacgtacaattcggggagggttagagaagggaaggtctcaagtgttgtagctatagagctatagtaagttaatgtgctttctttgaaaaattgaagctattataataaaatcaggaatcaataccacagaggcaagaagaggttaaagaatcaaattctgccatatttccagtggctgatcctttatttctgattatttttgtaattagttttagaacttacagaatgttaggcactatactgattgtattagatgtgattcttgcccccaagggattgcc

SEQ ID NO: 55673 - DNA, 596 bp, Homo sapiens
  misc_feature 27, 42: n = A,T,C or G
cgggccccccctcgaaagtcttctagnattaattaaccgggnaactcagataaatagagttaattcaatttgggaaaacctacaagttctgttattgttaccatattgtcattcttatttaatactcactgtacttttatttgagacaaataggtgatactgaattttatactctattgtctactttttcattaaaacattggcatctcaatgacatataaacttaaggtaagacattaaatgtaaaactttttagttaaaaaactactatctaaaatataattttattaatttttttagatttttatctttcaaaatatattttatgagatctatgtaaaatgtaattgctattaaaatattttgtggtttttggatagaatttatttcctatacatattccaaagaagtttaacatatttatatatagaaaacattttatatataacatatacaatacatatgtgtgcttatatatatgtattttaatcaatgcttttaaggggagacatagtaaatatagatgattttgcatcctcaaaatcacaaattagtctatgagagaattttatggcatacaattttaaggaactacg

SEQ ID NO: 55674 - DNA, 304 bp, Homo sapiens
  misc_feature 27: n = A,T,C or G
cgggccccccctcgaaagtcttctagnattaattaacgcggggtgggggtgtgggtgacacagacatagtcatgtgtccaaaaacccaatcaactgcacatttaaaaatctgcacttaactatatgtaaattacagtaagtcctcacttaacatcaatggattcctggaaactgtgatggttaagtgaagtaatgtatagcaggtcctcaaataacatcattttgttcaacattctttcttcctttaaaaaaaaaaaaaaaaaaaaaaaaaaaaaaaaaaaaaaaaaaaaaaaaaaaaaaaaaa

SEQ ID NO: 55675 - DNA, 501 bp, Homo sapiens
cccccctcggaagtcttctagaattaattaacgcgggcctagacctatttctttagtctctagtctaattataatttagattcacaatgtagatcaaatgggcctttcaagatcatgttacaattttctccttttacagattaggatactgaggcttagaaaagtttcataatttgcctgagagtagacagtgattaaccgagtattttaaaaattaacttaaacatcatatgcagttagtttgactgaaatgccaatatatatattcccttaaagaatactctgtatgtctttggaacactgacgttttagctcagctctagtggccctttgttacatcctgtgctccaaattcctctgtgaagcaccaaaccaaggtcattttacaggagaaggaacaaggatgattgccccatctgtacaaccaaggttattttaatgtaaaggaaggggaaatctaaaagtgttaaataacttgctgtagaaaaaaaaaaaaaaaaa

SEQ ID NO: 55676 - DNA, 611 bp, Homo sapiens
ccgggccccccctcggaagtcttctagaattaattaacgcgggtacatattgatttaaatctaccggaatgcctagtttcatgataatgtcaataaatgtttgattcattggtcaggccattgttgggccactcagatgtatggaaatactattagctgatgcatccaaattagttattccctggaatattcttcttaccaattccttattattgtggtttgaaatagttcagccttatactactatcttacttaactatgtcaagataggttagtggaggggttatagtcaaggctatcatgcctgttcacccagaccaattcatttcagtttgaagctttcatctaaatgtttctaaagcctgctcaccttgttgagtttgggtaagccactcacccctatggagtcagtgttgttcagatatcaagcgctactctggcttagaattcatattctattatttatgtctttaacagagattgtttgggatttctgtactcttcaccctctagccccctcatccctcattatgttctcacatttcctctctttatctctcccacaggcatgtgtgtgtgtgtgtgtgtgtgtttgatgataagtccatctc

SEQ ID NO: 55677 - DNA, 566 bp, Homo sapiens
cccccctcgaaagtcttctagaattaattaacgcgggacaaaattaaaacaaatgctaccaaaattccagctaacctgtgatatattaccccccaaataataaaaacttcaggaaaaaaaatatggaaaaacccataaaccttatcacccttttcacttctttttataaaacacactttaaaaaatttactgaacaaacattcctacaataaaacaacctgttcacctttatgatacaaataagcatttcaataatagaattctaagagaacccctgtgactatactagtgacaactcacctctgctgtactgccagtgctgggtccaagcctctcaaatacactgggtcttcgggatgtgctatcagatatagtcttggtattttccactgtgaccttccttctaatttttgacattttgtactacttcaaccaaaaaagaaagaggcaaaactgtaaaattcctcagttttaaataactgagcccacagcttacaagtagataaaactataggtaacagtgtaaaattacaggagattttccttgggaaaaaaaaaaaaaaagc

SEQ ID NO: 55678 - DNA, 591 bp, Homo sapiens
ccgggccccccctcggaagtcttctagaattaattaaggtatatacatagatccctaaatttaaaagataatcgattgagaagcaaagtaaagtaatataactatcaaaagatggggggaaaagagctgataaaacgttacaactgagttcaatcctcttctttcatagcagaagatgccttaaatacctaaatttcatcagtcaaagaactgtgtgtataacaatagagattgttaacatttatttggcataaacactattggcagtctggtgaagcctttgaaactgttctcaaaataatattttaagtgcataaaacaaaatacataagattacaaaggaaatcaattatactgaaacacaaaaatattaaacaaatgtagcaattgatatagcaataatcttattaatgcattaaatgaagtagagatgagaaaaaatatctcaaggcagatttttgtaaaaacttaatgttatatgcaaatatttctaaattcttttttttccataaccttcccggagtagtctcagtaattctttcagaattctatcactgacaaagtcacagtactgctgatgttattggggga

SEQ ID NO: 55679 - DNA, 593 bp, Homo sapiens
  misc_feature 17: n = A,T,C or G
ccgggcctcccctcganagtcttctagaattaattaacgcgggtatcatacagtattaagggtgaggatcctgaataaaaaaggctgtttccaggacaagggtcaggaagccagacttcttcgaggttgcttgtaccggtccttgtcaggcaatgtgctcctagagaatttcctttgctttgtgtttcatctacctagacagcagtgtattccccagaggacgtcactatctccagagaacatattccaattatcctgggaaatatgataattgggattataacagtactcattttctcaattctcagaatgaaaacctatccaaggcaagaacaaaagttctccagaaagcactcccctcccaattgtgaaaacccagttaacattttattagagctaccaggttatgtgaaactgttgatagttttatcactttcctttcaagatataggcaggggcagtggctcatgcctgtaattccagcactttgggaggccaaggtaggtggatggcttgagcccagaagttcaagaccagcctgggcaacaaggtgaaaccctatctctaccaaaaatacaaaaattagtggggcc

SEQ ID NO: 55680 - DNA, 441 bp, Homo sapiens
  misc_feature 356, 394: n = A,T,C or G
cccccctcggaagtcttctagaattaattaatttttttccaaaataatttagtgcagttgtgtaaaataaagagtaagttaagaaaacaagctatctagacattgttttgtatttttaagtttaattgaaactttttgggttgtcttttctcaaaaaccaactgcccttccttatatttagttttctgtagttttaaatcttgaccagagcccccacagtgataattggaggctttacaaatagagtggagtgtgtttggtgcattggggttgaatgcggttgcagtcacttgctcatccattcattccttctatttcaggtggactgtctgaatcccattaatcaccagagactntgtgtgctcttcagcagctcttctgcccagtccagcantgctcctagtgcctgtgtcagtccttggtaggattcttttcccccta

SEQ ID NO: 55681 - DNA, 590 bp, Homo sapiens
  misc_feature 27: n = A,T,C or G
cgggccccccctcggaagtcttctagnattaattaacgcgggtcctgtgcattttaatataaatttagtatggaatgatctatatttacaaagaattctgttgaaattttaataagtaattatgttaagcctatagtacaatttgagaaaaatttatttatttatcctgttgagtattctagtccaagaacatggtattgctctctatttaattcttccttgattttcctagggaatacttcttttcatattgacaaaaatacatattagaaaataggtatcaactatcaaggcttttgtccattttagaaataatacaaatatttctatgaatagaaatattatatttatttgttttttctcttgggagaaaaaaacaaataaatatcctgaattaaagaatatacagcttatatttcaatgatgtcattgatgcattttattcatttaactcattaccacttgtcgttagtgattaagaaacagagaactatatgtaacccagaatgcaaaagtatttaataacatcattgttaaagaagacactataacatttttggagtcaaatcaagtgtaaactcttttgaagt

SEQ ID NO: 55682 - DNA, 572 bp, Homo sapiens
ttctagaattaattaacgcgggcacattcataactttataacattacaacatattaatgtacatgtgcatagtaggtagtattaattcttaattctgccttgggcaaagaggtttttcattaactcttacccctccctccaccccagtctccagacagagttaatcattcccttatctgtcttttgctcattacacaattcttcatttccatttgtctcccttctgatgtaggagttccttgagggccagccatacccgtgcgtcttggtagccatggtgtccagcgctgtgtctggcatatgcatgagagaaaggagagatggatccacagatggacaaacagaagaaatgagtggggctaagctttgatagtttaacatctatttgacttgagtagccttgtaaacttattaattctcacctcagcctcagggatgtatgtagggaaggagcataaaagatctgcagttgccctaatacagatatttttcccttcacttattttgtaaaattatattttattttcatggtagttttagactcaaggttataaaggcctgcttataatagt

SEQ ID NO: 55683 - DNA, 594 bp, Homo sapiens
  misc_feature 27: n = A,T,C or G
cgggccccccctcgaaagtcttctagnattaattaacgcggggtggggcctaagtctaaacgtgaaattcatttctgttttgtatacacctatcacacatagcctaaaggtaattttatacaatatttttaataattttgtacatgaaataaagcttatgtacactgaaccatcagagagcaagaggccaggtgtggaattttccacttgtagtgtcatttcaaattttggagcatatcggatttcagattcaggatgatcaacctgtatagcaataagattgtctaccagaaatgtcatctactttcccaaacctttccagtgatttctgtaacgctatttaaaatacgtatcaataggtcaacagggcctaaaataatattgatataccagtactcaccctttggttaacatcacaaacatttcttaggtactgtctagaattaggacatacttgcattccttttgctatagaagctttttgagaaaataagtatacacatttataaatgcagagaagacgggtgtctcccctaaagctgtcagccaacttgacagatttttaataaacattcttgagtatcaatgagagca

SEQ ID NO: 55684 - DNA, 602 bp, Homo sapiens
  misc_feature 28: n = A,T,C or G
cgggcccccccctcggggtacttctagnattaattaacgcgggcctgggacaactgcctgttagatctcctcttttatggccttccccccgggaagacacgtcatagaagataagagcaaggcttctggatcagaaatattctgggttcaaagttttcctctgctcctaattagctgtgagaccttggccaagtgacttaaattctctgtggcttatttctaagcctctggaaagtggaaatgacaattttaatcacctggtgagaatcacttctgaagaatacgggagctgaagccctgaagcaatgaacaccatgcctgtgcaaatgcccagaaagatgctggttgctgttgtgacaattacatcacaaaccaaactctgtcttcccccatctttcctcctgaatgcctaattgagtcactgtcctcctgttacgggttaaatgctgtcccctaaaaattcatatcttgaatttctaacctccagtacctcaaaatgtggtcttatttggaaatacaattgttgtaggtaattagataaattaaggttataccggagtaagggtgtgccccctactccagtataactggtgcctttatga

SEQ ID NO: 55685 - DNA, 631 bp, Homo sapiens
  misc_feature 39: n = A,T,C or G
gactggggtaccgggcccccccctcggggatcttctagnattaattaacgcgggtgggcagctgtatagcagttcccatagaaactgccagattcataactctggggttccactcctgtgtatatctcaaaatcaagttgtcttcaactcttttaatctgcaagattttccaggctagtcctttgcatttctatatgaatcttagcattaggttatcaatttccatgaaaatctctgctgggattttgattgaatctgtaggtacatgtgaagatagttaacatataaaaatactaaacttttccaatctatgattacaatatatctcttcatttatctaggtctttaatttttctaagtaatattatgtagttcgccacgaatacaagttctctgtaaaactttcactaaatttattcctaagagtttgatgggggttttaatgtgatatttcaaattggctattgctggtatataaaaatacaattgatttttgcaaatgcacctgtttagtttgtgacaatctgagcccagtacatggttctctgattcctaagccaggagtctctctgtaaccaaactgctattatgtgagcatagaacagctctcacagtagatgtcccacttcta

SEQ ID NO: 55686 - DNA, 604 bp, Homo sapiens
cgggcccccccctcggagtacttctagaattaattaacgcgggccatgtagtatttaaataacactgataatatttattaagaacttgctttatatcttgcactgttttaggtgctgggctttagaattggagagatctacattctaaattcactctatcatttctagttgtgtgacttggggcagatttctaacttcattaatcttttgcttatttctaaagtagagatatgaaaacacttgcctggcagaattgttgtgaagattaaatctatcatgcattttatgtgtttagcagagcaccttacacaaaataatcatttgcttgtattttaattatttcccatagactggcctcactatgatttttggtattctggtttatgactcagaaaatccagctattttgcttcactttggtcaaagcatatgttaatgaatttttattttcacactctgtttaaagcaactaggtataacttctatttcttctttccgtctcccacttccctgtatatttcttagtgtcttaatggctgacagcaaggtgatgaaatttccatttcaaaatagaaaaagtcacaattttcaaagcaacaaattt

SEQ ID NO: 55687 - DNA, 609 bp, Homo sapiens
ccccctcggggtacttctagaattaattaacgcgggtcccaccaggccccttctccaattcaacatgagatttgggtggggacacaaatccaaatcatatcagatttgttttttgcaagatcaagaggacagatgtccagaaagtaccacagaagtggtaccacgacttctctgccacccaatgagccacagctgtgccatacccagaaagttctgaatctcagtcctgaggtggaagaatgggaaccccttctttgaatgatctgtcccatccctaagatagtgactgttcttctatctgctattctgtatgattttgagttctctcttcttcttgatagtcaagagtcctcgatcttgtagcagacgattactgaggcttggcatctcccagccattcacattgtaataaggagcaatccagaactagcattcctaggatctttcaccaagaagcagaaggtgacccacactggctcctccctttgctggatgtaccagcagagattatgtggaaagtccaagagaaaaaggctagtgaaaaacctaccaggggagcaactctctttcctatggccacggcatctccaaccccttacccatagatac

SEQ ID NO: 55688 - DNA, 536 bp, Homo sapiens
  misc_feature 15, 28: n = A,T,C or G
cgggcccccccctcnaaatacttctagnattaattaacgccgggtccccaaatggccagccagttgttctaatatgttgattgagtgactcctctttttccttggtgatttgaagccatctttatcttttattaaatccctatatatatatttgaatctattgtgagctcgttattcatttgtaaatatttttctctatgtctattgccatactatactttataatacattttaatatttaaggtagatattctttatcatattcaaggaaaactttccatccttaatttattaggtaatttcgccaaaacacatttgtatcaaatgccttcttaccatatctgtagataatgacgtcatttttctcatttatttattcaacaaatatgtcttgaacaccaactatgtaccaggccctacgctgagtactaaatacaacagtgagcaaaatagacatggtccctgccttcatgatgcttattgcaatctagtggaggacacagatgttagtcaaataatcccaaaaaaaaaaaaaa

SEQ ID NO: 55689 - DNA, 616 bp, Homo sapiens
cgggccccccctcggaagtcttctagaattaattaacgcgggactagggcctgaatatgggaaaaatgggacatggtcaaatggtacaaatttttagttataaaacaagttattgtgacctaatgtacagcttcatgactatagttaataatactgttaggtatgctgaaaatttgctgagagatcttaattgttctcacaacaaaaagggtaagcatgtaaggtgatagatgtgtttgttcattaatttgattgtattaaccatttctatatatatatatatatatacacacacatataaaataaatacatagtaaacagtaaacatacaggtattcaattatctgtgaaaagatccacatgttacatacccatacatatatacatgtgtgtacatatacgtatctgtctatgtgtatgtgtgtgtgtatatatatacatatttgacacagtcccagtaagctaaatacaaaataagagaaaactgtaaaataacacttatttaaaaataaagttaaaattgagagtttaatatatgctcagcaatgttttaagctcttcagtgacatagtatatttgataaatgtgtggagtaaatatatcatacttattacag

SEQ ID NO: 55690 - DNA, 584 bp, Homo sapiens
gggccccccctcgaaagtcttctagaattaattaacgcggggaggcactgaaagtttgagcttttccaaaacttcaggaggaaatgaatttttaactgtattttaagcagtttttttatttctaatttttttactttgtataattaactgccttattatttcacatattgattgttagagtttcaaaattgtacttattttttaaaaagttccattgtctcctatttagaaatgtttattctgaatacatccaatgtgatatttatactaccagtcctatttactcacatcctttctctctctcttatttgactagtttttcttttaaatcattctttataacttcgctgtgtgtgtagttttgtaaacagcatatgagaaagttttaattagttagctctaattatataatattttgactgatcaagtttaaagaaatagccttaccttaagttaattatttcattttagatggtatttatctttggcttccccttattttttttattttttttttttgaaacagagtctggctctgtctcccaggcaaggagtgcagtggtgtgatttcggctcactgcaag

SEQ ID NO: 55691 - DNA, 615 bp, Homo sapiens
  misc_feature 16: n = A,T,C or G
ccgggccccccctcgngggtacttctagaattaattaacgcgggatctacttatgtaagcacccatgtctatcaaatggctgagaattaaaatcaaataaaaagttgggcaacataatatagtataaagcagattttttttgattagagatagtttttctcataaacaagtggataatttattttaaagaacttcaaaaattataatgctatgaggaaaataaaataggatgaatccaatgaatatggctaacatcagattttagtcacttttgcagaagcttataccacacagtcatttctcatgtttcttcatggaactatgttatttcatagtgcaatgattttcaaacccataaaagtgatgcctcaggggatcatcccactgaggccaacctagtctatcccatacttatcaagtcaaatcatagacctggagttccaactctctagcccaaacctacatgtgtccatgctgattccggcataactaaacatcacattcaggataattctccacatacatagctcatagaggcttaagtcacaaggaatgagaagaatcaagaacctgcagaagatgtctcaggagcacatacctaaaaaaaaaaaagcg

SEQ ID NO: 55692 - DNA, 517 bp, Homo sapiens
  misc_feature 28: n = A,T,C or G
cgggcccccccctcggaatacttctagnattaattaacgcggggtcctatttgggatacatataaaagttaccccaaaggtttaattagacagtgaagtacaaaaatacagatttgtaaaatattaaatatataaacaatataaatctctattttgacaagtgtcttgataaactaggttaaataattgttaatagagttgggtaaaggcagtgatgttggtaaactagtgatccaaatgaaaagaaactcggctgggcacggtggctcacgcctgtaatcccagcactttgggaggccaaggcgggtggatcacaagatcaggagttcaagaccagcccggccaatattgcgaaaccccgtctctaataaaaaatacacaaattagcccagcgtggtggcatggtgcctgtagtcacagctactcaggaggctgaggcaggagaatcgcttgaaccagggaggtggaggttgcagcgagctgagaccacaccactgcactccagactgggcaacag

SEQ ID NO: 55693 - DNA, 491 bp, Homo sapiens
gggccccccctcggagtacttctagaattaattaacgcgggtggattggggcatgtaaattatggcccaatcatgccatgtttcttttctctggaaaagaaagtaaattaggttcatacattataccatgtaccaggctagactccaagtgaatccaaggtaaaagtgtaaacaaaactatgaaagtcctggaagaacacatagcgagttcctttttataaccttggagcagagaaagcctttctagtttcaactcaaaatccagaagccagaaaagaaaacattcataaaaattgaatttaaattacaaaaaaactttctgcatggccaaaaaccataagcaaagacagatgccaaactgagaaaaatatctgaaacttctatcacaaagagctaatctcccttgtttaaaaaaacaaagtaaaacagagctcctagaaattgttaaagaagatgctaacagttcaataggatttgggatgaagtattga

SEQ ID NO: 55694 - DNA, 583 bp, Homo sapiens
  misc_feature 22: n = A,T,C or G
cccccctcgaaagtcttctagnattaattaacgcggggtgggacgacagtgaaatctagagtaaaaccaagctggcccaagtgtcctgcaggctgtaatgcagtttaatcagagtgccattttttttgttcaaatgattttaattattggaatgcacaatttttttaatatgcaaataaaaagtttaaaaagttaaaaaaaaaaaaaaaaaaaaaaaaaaaaaaaaaaaaaaaaaaaaaaaaaaaaaaaaaaaaaaaaaaaaaaaaaaattaaaaaaaaaaaaaaagggggccccccccgggggggacccccatttccccctatagggagttttttaaccccccctaatgggccgttttttaaaaacgtgggaatgggaaaaaccttgggtttcccaaattaaatcgctttgaaaaaaatccccttttcccaagttgggttattaaaaaaaaggccccacccaatcccctttccaaaaatttgcccaccctaattgggaaatgaaaattgaaacctttaattttttgtaaaaattcccgtaaaattttggtaaaaaaacctcatttttaaaccaatgggccaa

SEQ ID NO: 55695 - DNA, 430 bp, Homo sapiens
cggggccccccctcggaagtcttctagaattaattaacgcgggcagtcaattcattcgatgacgattccattcaattccgttcaatgattccatttgattccatttgatgttgattccattcgattccattttaacatgtccataattcagttaacagcactgcaccaatattaatttcctagtttcaataactgtattatagttatataagcaagatgttaatattaggggaagaagggtgaaaaaacacgaaataatgatctattttctcttttaacaacagctcttttgatatataattcaactaccatacaattcctcatgtaaagtgtacaattcactggtttttggtatacttacaaagccacacaaccatcacattcaagtttggaacatttttatcacctcctcccaaaaaaaaaaaaaaaa

SEQ ID NO: 55696 - DNA, 599 bp, Homo sapiens
  misc_feature 32, 48, 536: n = A,T,C or G
taccgggcccccccctcggaaatacttctagnattaattaacgcgggngaatcaaaagttacacgtgaattttttaaattttaagattcataaaaatatttcataaatttgcatgtcatccttgcaaaggggccatgctcatcttctctatattgatccaaattcagtatatctgctgccgaagtgagcacacatggatttttgactgtgcaggtcagtgccactaacccctgcattgttcaagggtaaacggtatataatttcacccttaaatatttcagcatatgtctctagcagatgaggatcactataattcctctgtttttatttttaaatatgaatgattactgtagggattataatatacatttttaacttgtaactgacttcaggttgatattgaattaattataataaaacatagcaattttgctccaatatagttccatatctttttcccttttgtgttactcttgtcacatatatttatgttataatctcaacactatagtgctataattatctacttaaatcangggtatccaattttttggcttccctgggccacaatggaagaacaattgtctggggctacacat

SEQ ID NO: 55697 - DNA, 547 bp, Homo sapiens
  misc_feature 27, 43: n = A,T,C or G
gggccccccctcggaaatacttctagnattaattaacgcgggnggaaagagagagctcctttcgccatgttttaccagtctgctgttataacctcttaggttgtatcctttaatttccagccttttaggttagtttctgtaacagaacaagtgagtctgggatgaagtcctcaaagtacttcaaatggtaattgttttgtttttgtaatagcttaacaaataaacctaggttttctatattaaaaaaaaaaaaaaaaaaaaaaaaaaaaaaaaaaaaaaaaaaaaaaaaaaaaaaaaaaaaaaaaaaaaaaaaaaaaaaaaaaaaaatttaaaaaaaaaaaaaagggggccccccccggggggggcccccaattcccccttaaggggggttttttacccccccccctgggccgggttttaaaaacgggggggggggaaaaacccgggggttccccaatttaaaggcttggaaaaaaatccccttttccccaggggggtaaataaaaaaaaggccccacccaatcccctttccaaaaatttgcccccc

SEQ ID NO: 55698 - DNA, 631 bp, Homo sapiens
  misc_feature 608: n = A,T,C or G
ccgggccccccctcggaagtcttctagaattaattaacgcgggtcttattttagtaaacatggctagcaggacataaatgaatccagaaaatgcttttgtagaacataattaatggagatttttctagtatctcggcctcaatgctggacatcgactatgagatatttaatgtataaaagtatttaattctatagataaaaaagtcaccagaagttatgctcactccattatctacacctgaaactgtgtttaagaaatatcaatttgcgttcttgtcattcatgctgttttttaaaaaaagatttaaagagaaaaatccagttagtagaggattcctattagttgtgctctcattaaagttttagtatatttttttcgattctgtttggatagcatcaatatttaaataagtaatgtattttaattctctaccaaattttttcctcactggatataaattacctacaaagtattccaaagcagtaaggattcatgtttatctaacagaaagttttgtactattgatgaaataaatagtcttaccagtgtgagggaggatatggaagtgcttaagaagtatctgaatagccagtaaggtaaagtgcanaagattcggccagaaagaatgag

SEQ ID NO: 55699 - DNA, 605 bp, Homo sapiens
  misc_feature 43: n = A,T,C or G
ccccctcgaaagtcttctagaattaattaacgcgggccctagnaagaatataaatgtggagagaaccagacaatatacgtaactatatttaatattataaaaaagttatagcaaataattttgaggttaagaaattcctacaaaacaactgctaaaacaaaatcaaaagctgtcgaaaccaatactgagtgattctgatgttgagatatgtcaaatcttcccagttatataatcttcaaaatagaaacaaacgtacaaaagtaaagcaattcaatttttctcatgtttataattttacaaactataaaatgtgataatacaaatacattcaaatttttactaataatataactactagcaatcttattaaaatgtgttttatttttgcaaattatttcttacattattcaaaatctcaattatactgcctgtgttatttctataattagaaaatgctttagattatgttcttatatactacctacagcattctgaaattatatttttcaaaactataaaaatgtggagaaaaacctgacaacttgtgaaaatatgttgtcacttttcagagatgctttataaaattgcaatacgagatcgacacc

SEQ ID NO: 55700 - DNA, 628 bp, Homo sapiens
  misc_feature 27, 40: n = A,T,C or G
agactgggtacccgggccccccctcgngggtacttctagnattaattaacgcggggtagtcaccctattgtgctgttggacactagaatttattctatctaactgtgtttttgtacctgttaacctttccctctttgtccctccctccctgctccccttcccagcctcttaaccatcattgagagagatgcctatgtaaatcttaagattttcaaaaggagcacacacatttggtaaagcactctaactgtaatgcacggtacacacaatgcgcattttctctttccttgctgtaacctctggtctctcaggtccctgcagacctttatatatatgtatatgtatatgtatatccttccagatacatataaacacacatgccaccctttaaaaacacaaacggtagcttattttatacactgttctatgctttgcttttttcatgtaatatatcttgaaggtgtataatcagtaagtactgtagctctgcctccttctttttaatataacattccattctgtggatgcaccataatttatttagtctagcttatgttgattgttctgctctgggttgtcaaagcctcctgagtacagcagaggcacacacagtacgtggatttgggtg

SEQ ID NO: 55701 - DNA, 588 bp, Homo sapiens
cccccctcggggtacttctagaattaattaacgcgggctcgaaaataagtagaaaagatggtagatacctggatgattcttgggttaatgctccaatctccaaatccactaaatcacgaaaagagaaatctcgtagtcctctcagggccaccaccctggagagtaatgtgaagaaaaataatcgtgtggaatttcgtgaacctttggtttcttatagggaaatccatggtgcaccttccaatttcagttccagccatctggaatcaaagcacgtatactgtgtagatgttaatgaagaaaagactgagagcggtaactggatgataggcagtcgagaagaacggaatatacggagctgtgattttgagagctcccaatcatctgtcatcaatgatacagttgttaggtttttaaatgatcgaccagcaattgatgcattgcaaaattctgaatgtttgattaggatgggagcttctatgagaactgaggaagaaatgcctaacagaacaaaaggaagtgagaataatttgaagctttctgtgaataacatggcccatgatactgatccaaaagcgttacgactaactg

SEQ ID NO: 55702 - DNA, 447 bp, Homo sapiens
  misc_feature 25, 45, 46: n = A,T,C or G
gccccccctcggaaatacttctagnaattaattaacgcgggggcnntctcctgaaacctaataggcacacaataaatggtattttatgacataacatttattacctaaataaaatgttcatcttttcacatcatagatagctaaatgtgttttttctttcttttttttttttttttccagaaaaaatggccactactaccacttggctcagaaatgctagtctttattttctgaaatgttttatatagaaaaaatttaataataaatagacattcttatatatttccttaccattttagattgggttaaaaagtatggagacttccggccgggtgcggtgattcaagcctgcaatcccagcactttgggaggctgaggcagacagatcatgaggtcgggatctgtggctaacacagtgaaacctcatctccaccaaaaaaaaaaaaa

SEQ ID NO: 55703 - DNA, 497 bp, Homo sapiens
  misc_feature 27, 473, 477: n = A,T,C or G
cgggccccccctcgaggtacttctagnattaattaatagaaataagattttattctacatactgtactgagacccactttttaatcttaaccacaaatcatgaacatttccccaaataggtgcacacatagtttattttttaataattacaggtattccataagaaaacatgttagtgttataatttggcctgttttcaactgatagatgtttagactgcctccggttatttgctattatgaacgatgctgcagttaacatccttgtcaatatcttttcataaacctgtgaatatttttacaggatgaattcctaaaaatagagttactgattcaaaagttaggcatattttagattttagtagaaattgccaagttaccctctaaaaaagattgtaccaattttgggcagtacattagccataggtttttaaaatacagcattttgttgagtgcttacagtttgccacagtngtgntctacgtcactgtacccttc

SEQ ID NO: 55704 - DNA, 410 bp, Homo sapiens
ccgggccccccctcggggtacttctagaattaattaacgcggggctcttctaactcctcacagtctgcctcaaacaacatggagttagcttaggtgtaggaaaacagaggaacccaccatactccaacttaacttctataaggagagatggggagctcagaaaaaaaacctagtggagatagaactgtttgtcatgaatgtaagatgaaagttacgcagtttctttgttagggggcaacacagtagatgtgaaatgtgttatttgcccttgccaaaaatcaagactatatcttttgcagtccttttaataaaaagtacacattagctttcaagaagtacctctccaaatgttcacgtgcgcacacacgcacacacacacgacatgcacacaccccaaaaaaaaaaaaaaa

SEQ ID NO: 55705 - DNA, 597 bp, Homo sapiens
  misc_feature 30: n = A,T,C or G
actcgggccccccctcggggtacttctagnaattaattaacgcggggtggggtaaaacagtctctaaggttcctttcctgtgcaagaaaggcttttccaatatatggtggcatggttctagtaacccaggggcagcccagccacatccttataagcatagcggatgggaagagggagggtgatgatttatcgtatttattcttaaagggatacagggagaaagtcactggaaagccgtaacattgtgcaccattactatactagagtttgtgttagggatacagagcaggttctacctcgcaagcgtgaagcttttcatttaaaaaaatctacgtagaggcctcttcgcacaattccacaatactttatttgggacagtatgatgacagaccctctgctaaacaaatgaggatatgttaatgaattgaggatgcgttagtgacaggtattaggttcaatcacacataatttgctttgagggagtgctatggtttgaatgtgtctcccaaaagttcatctgttggaaactgaatctgcagtgcaacagtgttgggaggtgcagcctaatacaggtgattgggttatgagggaggagtc

SEQ ID NO: 55706 - DNA, 367 bp, Homo sapiens
  misc_feature 16, 29, 45: n = A,T,C or G
cgggcccccccctcgngggtacttctagnattaattaacgcgggnaaagtatttattgtacattattttcatagattaaataaatgtctttataataccaaaaaaaaaaaaaaaaaaaaaaaaaaaaaaaaaaaaaaaaaaaaaaaaaaaaaaaaaaaaaaaaaagaggaggaacaacgggggcggcccccagggggggggcatccaggcgcgccctatggggggccgttttaaccccccccccccggccgggggggggccccaacccccctgggaaacccgtggagtccccccccttctcccccgggggtacaacccccttggcccggggggagccctgtcccaaaggccttccccgctggggggg

SEQ ID NO: 55707 - DNA, 567 bp, Homo sapiens
  misc_feature 19, 32: n = A,T,C or G
taccgggcccccccctcgngaatacttctagnattaattaacgcgggatcctgccccagatttttttcatccaatgtgacaaatgcttcaggcacattctttaccttccagactattccaagtgacagctttgccaaacgttttgccattacataacatgagtgccattttactagcctcctacaacacttccctcaccacctgccacccagtctcaaaaccagtgccacgtatttcaggtttttgttatgaaagcattccacttcagataccaattactgtatcggtcagctattgctgcatgacaaccacaaaagctcagtgtcatacaacaacaagcacttactttctcactcatttgcctgtggattggagattcagggggaaggaatgagtgatgaacaataatttcgtctaccacacatagcgaggatatagtgatttttcaataaatgtcggtcattgttagctattctgccaactcctcatacagtgacattccatagtaaatatgcagaattggcttctaatcccaactccaccattacctcaccgtgaggcttaacg

SEQ ID NO: 55708 - DNA, 590 bp, Homo sapiens
  misc_feature 44: n = A,T,C or G
ccgggccccccctcgaaagtcttctagaattaattaacgcgggnaagcattcacaatctataatttttttttcttccttgagatggagtcttgccctgtagcccaggttggagtgcagtggcgagattttggctcactacaacctccgcctcctgggttccagtgattctccggcctcagcctcccaagtagctgggattacaggtggctgtgggattacgtggctgtcatcaatgcctggctaatttttgtatttttagtaaagacagggttttgccatgttggccaggctggtcttgaactcctgacctcatgatccgcccacctcggcctcccaaagtgctgggattacaggcatgagccaccgagctcggccccacaatctataactttaagtgtgaaataaagtgactgaagaaccataacagtacattagtttttctcacaaatataatgcctagattgatatctccatgttaaatattgagtaaccaaccaaattacaaaacaaacataataaaaaagacatagagacagtgattagctaggtgtggtggcggcagctaaagttccagctatttgggaggctg

SEQ ID NO: 55709 - DNA, 582 bp, Homo sapiens
  misc_feature 24: n = A,T,C or G
gccccccctcgaaagtcttctagnaattaattaacgcgggttgcctatgactaattttctttgtatttattctagctagataatattgacattcttgaatttgtggtttcatggcttttattatttttgtaagactttggatctcaaatccctctatattgtggtagttataaacttcagttagtctttccccaggccattgtaattgcccaaaattctggactgccattttctatttagtcattgtagcttacactactaatcagagaaacctttaaaaaaatcagcagaaactaaacttttaactaaatgttctttatcactcagcttctcaagttctgtctaacttgattgttttccaatagctcacagaggagatttttttttttttttggtaaatcatcattgttatctaacttttaaggtgttctaagtaaaaatttttttttgatgtgaagtaccctgtaatagcctaaagtagaagcttttgtcactatttctagatgtactagggtttcactacactgtatcaagctgagaaggtatttttatttatctgcttggaaatcaccatttttctct

SEQ ID NO: 55710 - DNA, 578 bp, Homo sapiens
cgggccccccctcgaaagtcttctagaattaattaacgcggggaaccttctctaatgatccctttctctgaccctacagagttttccatcatgtcctttatttttccagtgaggcatctagcacaatctgctaatgaatggcgtaattatttcatgtgtctttccaactgcaaagtcagctgagagcaggcatcatttcttctttgttcactactataaccctaccatatagcacaatacccaggaaatagcagacactcaataagtttgccgaatggctggtggaagctttttatgcagtaatgtgtggaatgagtgtcttcaacggagggtacggcttgtggcactgcccatacacactgaaccagcaaactcttttttcccaaaatgcctcatgaggctagtgttctggaagcctgctttgggaaatgctgctatagaggatttctaatcttgtacagtccctaagatttcacaacaactaattctgatcttaaaatctagttaaagaagctctgaaaagttacactgtaaacagagctctcccttcgctctaggagcacagttttaaaaaatta

SEQ ID NO: 55711 - DNA, 555 bp, Homo sapiens
cccccctcgagagtcttctagaattaattaacgcgggcatgctcttttcattaccccaagctgcctcctaggcactgaggccaaattggggttggtgaattggattcagcagggaaaatttcagatatgtccaaatgcccaaatatggctgtataatttcaagttggaatatcaactatttgtgtctccagttgccagcaatgacctagattttgtttgttttctatttctctaatgcttagctgtgacaatggcattaaaaagataaaggagacaggagagaggataaatattgatatgtaattatttcagttagattgtaaactgcttattccattacataacaagtccatttgtttatgaatagttagaactacacttcatatgatatccaggaacaaaatacacgtttttgataatttttgaatattatggctgattatatctcctactcattttttaaataaaactgctagtagtattatttcataactattcagtgttttactcttttcaattctgattttttatttttaaactaaaaaaaaaaaaaaa

SEQ ID NO: 55712 - DNA, 618 bp, Homo sapiens
ccccccttcggagtacttctagaattaattaacgccgggaacccatgaaggaataaggagaacatacgaagtcttcatggacagtggcctcagctggaagtaatttattttttctcattaatgttgtaacagcatgatattgaatgaaacagcattttttgaggacctgctgtaccttgtggaatagctagatgaaactaattaacatatgtattacttataagtttttgtggtgagaacacataaaccttgcatcactttctaatgtcccagaagatgttcatgtaggtgaaaaatctgtttataattatctgagcctcaaaccaaatttgtttaacataaacatacagtattttttttgttgttgttgtttttctgaggtaaggtctcactctgaccccccaggctggagtgcagtggcatggtcttggctcactgcaacctctgcctcctgggttcaagtgattcttgtgtctcagccacctgagtagctgggattacaggcatgcaagcccagctaattttttttttgtacaaacggggttttgccatgttggccagactggtcttgaactcctggactctaccgatccgcccgcctccgcttcccaggtgctg

SEQ ID NO: 55713 - DNA, 268 bp, Homo sapiens
  misc_feature 32: n = A,T,C or G
taccgggcccccccctcggaaatacttctagnattaattaacgcgggtaggtatcattccaaaggtacattttgaaagaataatgtaacatctcagttttaaaagtcagccagcatatatgttaaaaactgcataactacaagtatttaaatttttgatgaaaaattttagatatcaatctaaaaaatgttcaagtaggtagtttataaaaaaaaattttaggggctacccaaacaaaaatttgatgtctcccccaaaaaaaaaaaaa

SEQ ID NO: 55714 - DNA, 445 bp, Homo sapiens
  misc_feature 20: n = A,T,C or G
ggtaccgggcccccccctcnaaagtcttctagaattaattaacgcgggaatgtcttaacctcctgggaatgcagcccagtaggtctcagccttattttacccagcccctatttaagacggagtcattctggttcaaacacctctgacaatagtaatcataacccaaacgtggattccctgctccataagcccttgcctccccctgtatcctcaatttgctgtcacctctgcccctagtgtagtggtggtggtggtggtaagggattttggtaggatctcatctcactgctacattaaaaacaaaaaaatatatatatttctacttgggaggctgaggcagtagagtggcatgaacctgggaggtggagcttgcagtgagccaagatcgcgccactgcactccagcctgggcgacagagcaagactccatctcaaaaaaaaaaaaa

SEQ ID NO: 55715 - DNA, 629 bp, Homo sapiens
cccccctcggaagtcttctagaattaattaacgcgggcttccaagaggtttgcttttttcctgtaattttataatttctcccaccaccctgaccaagcccctacagcaaacccttacagcaaagcagacaagagacatgccaagtttataggattacagaccaagagataatgtttgacttttagggtttgattctgtgccctgcccccaacttcttaggctgtataaggggtttgctaacctttggcaaatacattaagcattttttatatgcaagctacaaggggttgtgagatgcatcaataggttcctttctttgaagaaactgatagccttgatggatacatagatcattataaagatagcaagataattggaaataagtggtatttaaattttgtctttcatatataaactcttaattgaaattcatatggtgtcactcattttcactgtgttttgatacttttgtgttcccaattgaacttggtttgtattatgttgttattcttttgatttctcatgcatttcctgtattttcacccattttaaataagatgtggtctcatagaaaatagaattgctgagttttagtgagccaaaaaaaaaaaaaaaaagcggccgccacc

SEQ ID NO: 55716 - DNA, 530 bp, Homo sapiens
  misc_feature 457: n = A,T,C or G
cggtgccttgcaggcatttgtatacataggaggaaactgttttcaaagctgagctgcacttttggtcccctcaagagtggcaaaaataaaagccaagcccagggcctccagaagtgagatctctggtaaattacctcccattttacgcttacacactgaaagaagagggtggagccatgtgtgttatagccctctcatgaacttgctttctgcccttgtgtcctgttggtggttcaacctgggattaagtggtcaaacctgaattaagatatgtagactcgtaatgtccgcagctctctggaagaaacagattgcctctaggagaaggtatcattatcctaggcctaaagttaataataatataatttttatatccagtgttcagcttataaatttaaccaggtacacacacacacacacacacacacacacacacacacacacacacacacacagnaccaagagcaagaagcagcaaaaccaacagacaacagaaaaaaatctttaggtattggaattatcaaacagaa

SEQ ID NO: 55717 - DNA, 565 bp, Homo sapiens
  misc_feature 36: n = A,T,C or G
ctgggtaccgggcccccccctcaaaatacttctagnattaattaacgcgggcttaatgtctaaggacaaataaaaaactctttctttgccacggtgctgcctttcgatttttttttttttaatcattataaaaacagttgaagcccgggcacggtggctcatgcctgcaattccagcactttcaggggccaaggcgggcagatcacgaggtcaagagattgagaccatccctgccaacatggtgaaaccccgtctccaccaaaaatacaaaaactagccagttgtggtggtgcgcgcccgcaaccccagccactcgagaggccgaggcaggagaatcacccgaacccgggaggcagagtctgcagtgagtcgagatcgtgacactgcactccagcctgggcaacagagcaagactgtctcaaaaagaaaaagaaaatgtggtatactttgcctcaaaaataaacacataaaataaaataataaataaataaataaaacagttgggatccacccaaatggagatttgcaaagtgggaaacataccctgtgataagcacgtaactag

SEQ ID NO: 55718 - DNA, 540 bp, Homo sapiens
  misc_feature 33, 477: n = A,T,C or G
gtaccgggcccccccctcggaaatacttctagnattaattaacgcggggactgtgtgcatgtccagggctgtccctactcagaagtggtcagaaagagaagatcaaagttactagtccctggctgaatgtgaggcaaaaagttaaactccttgatctatgatagcacctccaagccacacaaacacagccaatggtaaaacataaaaacataacttactaagggagcataaacaccacgctgggcaaataagaggcttctgctgacccaggagggaccatttgttagccaggcaaaaagacgaaatcaaggaagacactctgagaaagggcatgctccagaagaaacagactttacagaattagattagccaagtcattaaacaaacatacaaagggaaagcaaacaacaacaatattaacccaacctagggggatcaatatccaaagttgatctatattatctaaatattatctanatatttagataatatatatatattattatctaaaatatattatctataatggattttatctaa

SEQ ID NO: 55719 - DNA, 622 bp, Homo sapiens
cgggccccccctcgaaagtcttctagaattaattaacgcggggggaagaccgcttgagaccaagagattgaggctgcagtgagcctctgcattgtgcgtctgcactccagcctgggtgacggagaccctgtctcaatcagccaatcagtgaaagtccaaaccttgtgactaaagtctttaagtattttctaggtgatagataaggaactagacagaagggagaggaaagaagagtaatcttttaaatgttacttagaattctcttctgctttttaatgttaaaaatttggaatttaaatttcttaaagtatctcaaaatccaattctctgcgcagcttaatttattttactggactttgagtaaaagactgtgtttatgatattggtgagttaatttaaaaaaattcaggaatccagtgattcaaatatgaagatttttctgcctgctatttaaatatttttttgggattgtttatggattacttttagggcacgttttttgttttagtcaccatagggtaccacacatttgctattacctatacttctatggaattattgcgtagagtcttatcaaaatcaactatttaaaaagaccttctggctgggcatggtggctcat

SEQ ID NO: 55720 - DNA, 537 bp, Homo sapiens
  misc_feature 13: n = A,T,C or G
cgggccccccccntcggggtacttctagaattaattaacgcgggtccgctaaaaaaaataattaaaaattgaatttccacaacaacccaatgagttgtcaataaggaaacaaatacttgacaaaagttaccgccccctcaaccaccccccaccaaaaaaaataataataataattaccctacttgtttaaaatatattagtaaggaatctgggtaaaaatcaagcaaatatccccaatctgacaacactgtacacgagtaaaagacctatggaatgagattctcagataccaattacgaatcatttaaactctgatatcatataaaaaactcccacagaaccagtccactacttatagctagtgatattaatgagaataaatgactgtagtcatgtatacatattaaacttataaaatccttcttgccaaatgttaacagaggaaacaaaatggaaagaaaagatatggggttctgagcagcttaagataggtatgagatgcttaatcttgctttgatctccaaaaaaaaaaaaaaa

SEQ ID NO: 55721 - DNA, 615 bp, Homo sapiens
cgggcccccccctcggggtacttctagaattaattaacgcgggacctcaaaaacgaaaccaaaaaaactataaagcacagaatatgggaccatttggtagatatagtaactgaaatcacatcaagttttaataaactaattagtattcataatggcagccctacatcttcaagaaaaatatacaataagcgagtttcaggatgctcaaaatatttaagatggccaagaagaaattatgcatgtagtacattttaggcagattttccttaaaactgactaaagacacttacttttttgaaacaagaaaagacttagttatttggataatttgcttatgtggaatatctcattgccagtcaatgttgaataagtgaggcatttattgtgtggcggaaaggtggttctttgggccagatgaagtaaggtgggaagaaaggaatatgaaatactgagagaaggaattactactttaaataatagatgtagctttggtatgtttttctgtgcaaatcttgagacaaagccctttttgttggaggaaatggcatgcaagggattttattttcagtttgaccatttgcaagtattagagctgtctccatgggagaaaggtga

SEQ ID NO: 55722 - DNA, 578 bp, Homo sapiens
gggccccccctcgaaagtcttctagaattaattaacgcgggggaggatgaagcagaagatcaagaactgattatagttaaaatatcttacttatgctaattctacaaaaacttacaaccatgtagacacattgttagagcccctcccagggtcttagaaggtgtcagtgtaagtgaggggtcctgaaagcttaacttttattctctttattgtaaaatccacatttaacaatagaattaaaatacaaaattatctcaaacttcagactgaaatagacagatgaaatttaacttaataaaagtaaaataaagcaaggtcaaaatatgaatttcacaagcacgttaaaggtcacatgatgaattaggattttagatgacctccattttatcatgaaccaactgtatgatgcaaacatagaaatggctaacacaataatgggccacattaatagaaatagtttccagatcatgggacctaataattcctcaaaaagctgtcttggtcagatcacagctgcaataatatgtccaatttagactccataatttaggaggcattgtgaccaattagattgtatc

SEQ ID NO: 55723 - DNA, 530 bp, Homo sapiens
ccgggccccccctcggaagtcttctagaattaattaacgcggggggggtgggcaaagaagtaaaactaaaaaaaaaacggctcaacctcttttatctagatggttggcaggcacagggtacatctgaccagtcttgaggtagagaagcaagccagcctctggatcagctcttctctcttggcttagtagagtgtacagaacaacctgtgcaaacattgacatttgctcaaacaaaactataacttcttgtatttccttacattgtcttgcaaccaacacataattttaaactcaaaagatcaataaagttatttctatttaataagtaacatgagccaaattggtaaagataacacaacaaatttgatgtcaaacatttaatctaggccaggcatggtggctcaggcctgcaatcccaacactttgggaggccaaggattgtggattgcatgagctcaggagttcaagaccagactggccaacatggcaaaacccccgtctctgccaaaaaaaatagaaaaaaaaaaaaa

SEQ ID NO: 55724 - DNA, 616 bp, Homo sapiens
  misc_feature 13: n = A,T,C or G
ccgggcccccccntcgaaatacttctagaattaattaacgcggggatttgagaaaaatatttttgctcttctctaggtgccgacttattaaaactgacaaaggaggatttagttcaaatttgtggtgcagccgatggaattcggctctataattcactgaagtcaaggtaaaatactgtgaactgttttgcttgaaataagaatgtacctttcttcgcgtggggaatttgggcagaatgtgtttccacgctaggttggcgtgtgtgcctgtgtgcgccatcgagcattggcagcattgtgctcacaagaagactgttttgtgtacaccttcagggcaggcccagatatgatgcaggcactgatgagggcagaggtagactgtaagactggtggaaatgcacatgggcagtactgatttcttgaagacgactgggtttgttgccaagaaaacaaaacttctaatttaggtgagctatacagaatctatggttttcaaggtcatgactattactaaacagttattaaaaatgtaaactaattgtgaattaaaatgacagaaactgtaaattgtgctggcttgtaagaaccatttactatcattgctctttctatactt

SEQ ID NO: 55725 - DNA, 337 bp, Homo sapiens
ccccccctgcggggtacttctagaattaattaacgcggggaatatgggttgagtgagataattatgtaaaagtgctgtgtcacctgtaaagaaccaaataaatgtaatttgttgaattttaaaaaaaaaaaaaaaaaaaaaaaaaaaaaaaaaaaaaaaaaaaaaaaaaaaaaaattaaaaaaaaaaaaaaaaggcggccccccccgggggggacccccattcccccctaaagggagccgtttaacccccccccacggcccgggttttaacaacgcggggacgggaaaaccccgggggtccccaaactaattcgcctggaagcaaatccccttttcc

SEQ ID NO: 55726 - DNA, 550 bp, Homo sapiens
ccgggccccccctcgaaagtcttctagaattaattaacgcgggcatgtattctgacttatgagtgggagcttagtattgagtacccatggacacaaagaagggaacaatagacaccacagcctacttgagggtggagggtgggaggagggtgaagatcgaaaaactacctactaggtactatgctcattacctgggtgatggaataatctgtaccccaagcccccattacatgcaatttacctatataacaaacctgcacatgtatacctctgaacctaaaataagtttaaaaaaaaaagagaagcatcacgtattttctgtaggaaatgggaattatatatgaatatacattgtcaaagactataatgttagagattttctattgcttatttcattagtttctttctggacctattcaatctgggctagcaattctgaaaacaaagtagtgtggatcaaactctgtcatctgtttctgtcacacagattacagccctcatcctgaaggagggacagatttcagtcccatcctaaaaaaaaaaaaaaaaa

SEQ ID NO: 55727 - DNA, 572 bp, Homo sapiens
  misc_feature 35: n = A,T,C or G
tgggtaccgggcccccccctcggggatcttctagnattaattaacgcggggatgtaatgttcatagtaatagattctgttttaaataattttaagtcatttaaaatgagcttttggagaacttgaaatatagtgcgtgaagaaagtgttttagcttaaatcttcagcaatttaatacaatcaaatctcctcttaaatctcatcttataaaccagactgataatccttaaatataggaacagaatatttcttcatatctagtaatgtttcctcatgcaagtaaagtttatatatttgatgtttcagtacattttaatttaattgtttattggattcggcctcctgacccaattattgtgttttaatgtaatgctttttgctgttttcacctggattcaatgaactgttatttgtttttatttaccaggaaagaccgttgtttaccttgtggctttccatctgttctttgttatgtctgtatggtcctattggatgacaattttcacatctcccgcttccccctccaaagagttctacttgtccaattctgaaaaggaaacgttatgaaaagaa

SEQ ID NO: 55728 - DNA, 608 bp, Homo sapiens
  misc_feature 13, 24: n = A,T,C or G
gccccccctcggngatcttctagnattaattaacgcgggagcatatcagtgggtaagcacatagatcctagaaacagacctgctattgacatacatcccagctctgccactcatcattgtgactgtgggccgattatttaacatctccgagtcttcattttctcatctatgagatggagagattaatagtaacttccacaaaagattattgtgaagactcatttattcagtacatgtggaacccctaacaagtgccatgaggtgtgcttaaccgggattaaataagatattgtagactttgatgctgggtctgctacattgtaagccctcagtaaatgcttacattcactcagtaaatgcttacgaagttcacgtgttgaaaacgtaattcccagtgcaacagtgttgggaggtggggcctttgagaggtgattaatgaatgaattaatgttgttaatggatagattaatgggtcctcataaatgattaatcacatcatcaataacaaatctcatgcatttgttattgcaagagaggaagtgttataaaagtgagtccggtcttgtgtgctcttgccctttcctctttcatcatgggaaggatgcagc

SEQ ID NO: 55729 - DNA, 579 bp, Homo sapiens
  misc_feature 9, 570: n = A,T,C or G
acttctagnattaattaacgcgggttgggctgagtgaagagtttatagggtggagtatttgagacggagtctcactctgtcgcctgccaagtgaagggttgggaagtaaggtaaaggccacctgcaatgtccctaagtcagtctatcacctgcagtgtccttaggcactccatctgccacagatatctcccacattaccctacaaccctacattccatccctctcccccagaaatatcatacttgcagaaagaactctcttcacaggtcttaaagttgcttctatccacagcaagggtaatccccaggcagacccctaaaaaagccagtaccaaagacgcccaagacctaaggagaaaaggacaaagacagagcaatcagcatggaggtcagaaggggcccccttcaaaaggaaaagcttcttcctgtcatagcactagaagatagttgaggaaagaggggagaaagatgtagtcacatcaaatacaaaacaaggcagagtggacacagggttaaggatcaggcctgagaagttggctcactcacaccttccctttgaaaggcagagtangctgggcgt

SEQ ID NO: 55730 - DNA, 576 bp, Homo sapiens
gccccccctcggggtacttctagaattaattaacgcggggattgtttgattacaaatgaccctagggaagttatttaaactaattctgcttcagtctgttcatttataaaatgggaatattaggaactcacttcacaaagttgctgtgaggatttactgacttaatctatgcaaatcatttaagacaattcctgagattttatgattaccatataaatatatccaaagactattatttccaattatatttgttccaaagggtagatttcttcctcttatcttccacatttctattagatatttgccaaaaatggagacatattaatgttttattaatgcatgtatttatctatttactgaatgctatttaaatgtggtacaccactgtctagatgttagcaatttagagaaagtaaaatccagtccctttccacaaggggactatcataatgggtataatttgaagacaaggaggagcctagtcgaagatggcaaatcagaaaactttactttggtggtagcagaatttaaacatccttcatcttagttgagatgataaattattagtctcagctc

SEQ ID NO: 55731 - DNA, 424 bp, Homo sapiens
gccccccctcgaaatacttctagaattaattaacgcgggtagatgatttctagcaggcaggaagtcctgtgcggtgtcaccatgagcacctccagctgtactagtgccattggaataataaatttgataaggtggtaaaaaaaaaaaaaaaaaaaaaaaaaaaaaaaaaaaaaaaaaaaaaaaaaaaaaaaaaaaaaaaaaaaaaaaaaaacgaccccccaccacaaaaaaaagaaaaaaaaaaaaaaaaccccccccccccccgggggcccccccaatccccctaaaaaaaaccttatttccccccccccacggcccccctttaaaaaaccccttaacggaaaaacccctgtgttacccaaacaaaatcccttgaaaccccaccccccttcccccttttgcctaaaaaccaaaaagccccccc

SEQ ID NO: 55732 - DNA, 578 bp, Homo sapiens
  misc_feature 18, 20, 31: n = A,T,C or G
taccgggcccccccctcnangatcttctagnattaattaacgcgggtctctaactgacttatttttagcctttagaacaagaatttcttggcagcaatttaaatatatcaattagggtggtgtcagcaaatattttaccttcagcttaactcctttcttttgactctggcctattcactgccaactaatatattttgtcaggaatagtttgttttatttggattctaaacaaacctcagatatactgagaacaatacaaacacaaaaagagaaaaatacaagcaggggaaattcctgtgggatgttgtttcctgtcttgtctgaggggaggtattatatagcctagtgattaggaggttggaatgtgagatggtggttgagagtcaggatctcttttaaaagtgatcttgagcaagttatttaaactttctaattatcagtttctttatctgtaaaatggaggtaatgggaatacttacctcaaattgctgagagaattaaatgaaataattctgcaagatagttatcacagtaaagcagtaaatgctccattcagggtaccattactattgactgcc

SEQ ID NO: 55733 - DNA, 601 bp, Homo sapiens
  misc_feature 13, 37, 80: n = A,T,C or G
ctgggtaccgggncctcccctcggagatacttctagnattaattaacgcgggcctgtgaattagtgagaatatatacacnatgaaaatttttagtaataatttgggtgacatatggttaaaagccagaataaattggcagataacaaattcctttaggacattggtcaatcaaatcagaatcccagggcatgcctgttaaaacacagatttctatgtcccacacctagagtttctgattttgtaagtctagggtgtgtgcagcttgataatttggatttctaataagttttcagctggtgcttatgctgctgatctgtccttttctccagtctctcacagtgatacaaattgagaactgctcctgtaggagaccagagactagagaggtctgcagtatgattgccgtgtgttgagatgatgcttcctttcatcattcacctgctgcagttacccatgtttctcttttctggccctcattttatgagaacagctggtagcactctttaaaatgtccacttctgtaaaaagtgctacctggtagcacttctgatgtcataagcagagagcatgccccttttctataattaggtaattctctac

SEQ ID NO: 55734 - DNA, 528 bp, Homo sapiens
  misc_feature 481, 496, 515: n = A,T,C or G
gggccccccctcggaagtcttctagaattaattaacgcgggcattgcctcctcaaggtcaattcaatttcatcttgattataaaaatatagtctacacctcatattcatttaattagttcattcattcaacaaatatatactgattttctaccacatgctgatcaataggctgaatacttaggatatactggtgatcaactacacataaacccctaacttcatggaactaatcaatgaaaatagagccttgaaaataaaatatttccaggtaaataaggtaggcataatgtttatctttgaattatttgaatttttgccatccttattcccctaaatacccaatttatacctattcttataacgtatagagtttttccacatttgtttttcaaatagacataggcataacccctggaaggcatgaataaaattgaaagaatgctgtcatttaactttttctgaaacatttaaataacatanagatgtattaagcanaaagatactaatatgattntcttactgcaatg

SEQ ID NO: 55735 - DNA, 560 bp, Homo sapiens
  misc_feature 24: n = A,T,C or G
gccccccctcgaggatcttctagnaattaattaacgcgggtctctcatcttctacctttatatataaatagagaggctttttgaattatgttaatactcatttctgggtggtgagattttgagacgtgctgcttttcttttttgtacttttccatattgcttaaaattttttttaaggaacagatatcatttttatttaaaaataattactttttaatgttaaatgaatatggctcctaagtataattcaacatggaaagtcatccatgatatattgctgagtgaaaaggttggtttaaaatttcatctgtagtataatctcatttaggtaaaacctacatatcatacatgcttacgtgttcattaaaaagtctagaaagatgaacaccacaatgttaacagtatttatttctaaagttggtgtagagaattgggcttataatttctcagtatcattttctaaacctttttatttaaaaataaaacaggctgggtgtggtggctcacacctgtaatcctagcactttggaaggccgaagcggacggattgactgaactga

SEQ ID NO: 55736 - DNA, 560 bp, Homo sapiens
  misc_feature 37, 451: n = A,T,C or G
ctggggtaccgggcccccccctcggagtacttctagnattaattaacgcgggggatatatcttgagtgtctttcatgttataactatgatattactctttcacataaaattttgtttatagattattgccttaacaattctcatctaagactaagtctaatttataaaaaaatctagtttcattttgtgtgtacatgtgtatatgtatttgtaaacatatatatgagcgtatgtatttttacgagttgcccttctgaaaggtctccaacctttgcaaattactttttactctacctagacacgctccatgttgcacaaccagcagggggaggtaagatttaaggaaatagcaaaatgaacttcacagaagcaactatagaaggcaaataaacaaacaaacaaaggaagagagacttgtcaaggagcagaatggagggtttctaatgcactngggataggttaagtgtcttagatatggtggttggctatcagaaattttgataaacatttgccaatgtactttagaggtccaggttttaagtactgtagacatgaattct

SEQ ID NO: 55737 - DNA, 586 bp, Homo sapiens
cgggcccccccctcgaaatacttctagaattaattaaatacacagcaatctcgtgtaaagctaaatgcccattggaaaaccattcaatgtgttaaggtccttaacttactgtggtttggtttttaattttcttctaactttactttttctttctttcatttttatttaattacttcataactggtagttggtacataacattacttaacatttagtacagtgtctcgtatgcatatggaaatgcctatcaaactgaggcatttaccaaaaatattaaaaagaaaaacagaaagagcaacaacacagaagtaaactattttgactagtatattaataacaatagcaccaatctgatggattgagagcctccccctgaaaacactacgcatcttttaaataccagtttcatggttgcaaatatagacagacatattctggctgtatacatggaactgtcaaatattcctctttgaaaccatctcatctatgaaagggtttgggctgctgaggctggctgccatcttttgatcgagagaagagctgcacaaaatgtttactttgacagttgttgtactgtactgtgaac

SEQ ID NO: 55738 - DNA, 547 bp, Homo sapiens
  misc_feature 479, 486: n = A,T,C or G
gggccccccctacggagtcttctagaattaattaacgcgggtgagaactaagagcaacttttacctagtgagtccttaaatattcacagtggagtggattctgaccagtagaatctctacgcagtgagcttgcttgagttcaaatcatagttttctcatggagcgttatgaccttaaggaagttaataacctgtttgttttagtttcctcatatagaagatagcaagaaaataaaaaaatcttgtataaatgttgggagggttaaatttggtaatccgttaaaaataagtagcccaatgcctgatatatggtaaataccccatacatgttctttggtattgtttaaacaatatttacctcatgcaaaaatgaattctacatggtctaaagacctaaacataaatcaatttaagcatcataaaataatatataattgtatgtgtacagtctttgggtaggaatgatcttcctaagaacanagagcantagcagaatccacacaggataattttgtccaatttgcttatttataaattaaaattttctc

SEQ ID NO: 55739 - DNA, 473 bp, Homo sapiens
  misc_feature 443: n = A,T,C or G
ccgggccccccctacggggtacttctagaattaattaacgcggggtgggggaacagtaaacacgatattatttaacatcaccatacctgctattcaggatgtttacaacagacatgggacttccccacatacaggcactccatggcccagtcaagttgacatataaaattaaccctcacaatatttttacaacatatgcatgaaatactcaccactagaaacatctgcattccctgcagtctattttgtaaacttcatatttagtgacagtaaacctgtgttgacagagaggccagaagagaatttgcatgaatattttacctatttgtgatatatagtatcacattccttgggaaaatgttgtttggcataatctgcggtgctaccatctttcagattaattgttctgaccttggtctacaagcataaacggaaatgcattntagataatggtagctcctgtcataattata

SEQ ID NO: 55740 - DNA, 568 bp, Homo sapiens
cccccctcgagagtcttctagaattaattaacgcggggtcccatgcaaatgcatgagttacatatgcataaaggcagccctacctgaagatgattcatgcttaagcacacagggacatacatgatatagtactactagcataatgaaattgtggttaaatatgtaatcaattttctgttactcctatatttattaagtatggtagctttttgaaagtttaatttttaaattttctgtttttaacttccttttatttaaaaaatgtaaatagtgcatgtactcagagcatctctcttaataaatgttttaaagtgttaaataaatgactcataattttaagagcctattctttagtttcattatcaaaaggactagttattcaagaaatgttttccaaacgatctgaattgtgtccatgatgtcgaaatttatatataacatatattatatgacaataatttatatataacaaatatttctgattagcaacattaatacaaagttggtgatgttttattatagattaataaaataaaaaccaagtttgtaccttattatgagtttactc

SEQ ID NO: 55741 - DNA, 369 bp, Homo sapiens
  misc_feature 23, 36: n = A,T,C or G
tgggtaccgcggccctccctcgngaatacttctagnattaattaacgcgggccctcagtttcaccaagaacacctttcattggtgtatttcatttgttacatttgatgaacaaatgctgatacattattattaactgaagttcatagtttacatcagaatcagtttgtgtatgttgtacagttttgtggatttgccaaatacacagtcatgtatccttcattacagtatcatgcataatatatcacttccctaaaaatccctgtaatctgtgaaaaatccctgaagtctgagtacttgatactaggaaataaaaaggaagagtcttaaaattataggatcagaaggagcagtcttggcaagggaccatt

SEQ ID NO: 55742 - DNA, 616 bp, Homo sapiens
  misc_feature 28: n = A,T,C or G
cgggcccccccctcggggtacttctagnattaattaacgcgggccccaacaccgttgcaatagactaagtttccaacacatgaactttcaggacacattcaaactatagcagttttgcttcatgaattcctcatagctcagtacaagactgttttaatttaagcaactccacatcctgtacctctaattctgacagtggtaaagaagcagattcgcaagtagctaggaaacagagcttacatttgatttcctttcctttaaaattttagatttatgttttaaacacctacagtctagatcaagcaaatcaaacaattaatccagcttatctttctacactaacaccaaacaaagaaagaggaaagaacagtatttgctctttcaggcattcactaagcagcatcatatgctgggaagaatatggaagaactgttggtattaagttggcccagtaacgatacttattcttattctgagaatatgatacgcaatggtaactcaaggttcaatataagaacagtaaaaagggaaaagtgttccaaaaactactccttagtttaaaaaaaaagagtaagaggtaagcaaggccagtttttcataagtgtgggtatgggtg

SEQ ID NO: 55743 - DNA, 568 bp, Homo sapiens
ccgggccccccctcggaagtcttctagaattaattaacgcggggagcccgggagttcgagaccaccctgggcaacatggcgaaaccccagctctacaaaaaatacaaaaattagctggtggacccagtgacttgggatgctgaggttgggaggattgattgagcctgtgaagtggaggttgcagcaagccgagatcgcgtcactgcactccaacttgtgcaacaagagtgagaccctgtctcaaaaaaaaaaaaatagagagacacacacacacttgtatatgtagacatatatattatatacacacgcatatatatgtatacagagagaaaacaaaataacagaatgaagaacaattctttctgttagatgcccactgtcacattatcatttaacattttactaaggggaatcagccaagagaaaaattaatgtaagtggattttaaaaacatgttttgttgaaacataattatacacatttatggggtacatatgatgttttgatacatgtatacagtgaataatgatcaaatcagggtaattgggatatccaccacctcaaatgt

SEQ ID NO: 55744 - DNA, 478 bp, Homo sapiens
cgggccccccctcggaagtcttctagaattaattaacgcggggatcttatagaaaattaatttgacagttacaaaaaacttccttcaagaggatgaaaaaagagactccaacagtatttttgtagcaccattgataggcagtattaagcaactatgtacacaaaattgaaaaaaataactcatgatgtggaaaatcaataacttttctcaacctacacgtactcgccttttgaagatgtctcattaaagaatatagaaatgaaagccatgtataatgtgttcaagcactgtaggaataaattgtaataattacttatactgactttggtaatattccaataaatgtttgacagacaaaacagaaattactcattatcaatgatccccattcaaactggcattcctcaatattatacaggatataatgataaaattgtattgtaatgttataggacatacgatatccaaaaaaaaaaaa

SEQ ID NO: 55745 - DNA, 544 bp, Homo sapiens
  misc_feature 28, 512: n = A,T,C or G
cgggcccccccctcggaagtcttctagnaattaattaacgcggggccgggtcagctgctgcctggatgatctcaggtggcctcatctaaatgtctggtggcttgtgctgcttagtgattggtgctacctcccagtgttagctgttggcttgatgacaaaggtacctaggtcacatgtatcttctcacttagtatatgcaccaggcctcttcacatggtagtcagaaagggcttaagagtagcaagagaaggcaagtcccagtgtgcaagtactttttaagtatccgcttccatcatgtttgcagtagtctcactggccaaagtatgtcatatggccaagctcaaagtccacatgagagggtatttcataagggtgtggatacaggaaaggaaaggaaatcatttttttaaaaatgttttggccaggcatggtggctcatgcctgtaatcccagcactgtgggaggctgaggcaggcagatcacaggagctcaggagttcaagaccagcctgngcaaaagaatttttaaaaaattagccaggtgt

SEQ ID NO: 55746 - DNA, 541 bp, Homo sapiens
ccgggccccccctcggaatacttctagaattaattaacgcggggacaaaaggaaagaagagaaaagcaataaagaagaaaaaaacctgaagaagtagagaaagaaacagctaatttaacccaaaacttcagaatttaaaaatctggtcatgtaaaaatattaaaacacaaagcaacatttccactaacagctgatgtgatttgttttcatttcacgaaatattttcttcactatatttcaaacaatgggatttaaaaactctcatccaaaactcatggtttcctttgatgttccaattccttcttcaaccaaactttctattctccaaagctaagttcatctggtaaacttgcaacatatttgccctgttgcacagcatcagaggaaactctgaaatgcaatcagcttctttcttattcctttattcatgcaataaatatttattaagagtcttctatgtgcgcaccccccaccccaacccccagcacaactggtgcttgagatacaacgttgagcaaaactcacagagtttatgatcctg

SEQ ID NO: 55747 - DNA, 375 bp, Homo sapiens
ccgggcccccccctcgaaatacttctagaaataattaacacgggaggacacgcaggaggaccagacgctaaaggtgtaaacgggcagccgtggcactcctcacccctcaataaataagataaataactaaataaataaacaactaaataaagacatgaaggaaaaaaaaaaaaaaaaaaaaaaaaaaaaaaaaaaaaaaaaaaaaaaaaaaaaaaaaaaaaaaaaaaaaaaaaaaaaaaaaaataaaaaaaaaaaaatgggggggcccccccgggggggaactacaaataccccttaaaggggggcaataacccccccctaatgggctgttgtttaaaaaaatcggaggggaaaaaccctggagggacccaaatt

SEQ ID NO: 55748 - DNA, 582 bp, Homo sapiens
  misc_feature 553: n = A,T,C or G
cccccctgcggggtacttgctaaaattaattaacgcgggatgaaagtcatgagaaatgacttctaatggtagtttcccattcatttacttatatgaccttgacatttctcattccagtgatctctactagtttataaaattacttagttcaagtagttatatgctgacaatacatattctagagaaaatactcattgagattattataaactaagtttttgacttttcagaagttttcaatgcttatgtaaactgcttagaaataaatttatcattttatgaaacttggtgatagtttactattatctcaaattgcttataaattaatggaagtgtctcccatacattttaaaatgacttttctgttgacattttggggtatagcttcccacttatgtattaaaatgcaattaaagaaaaacccctaaactttctgttttagctgcttgttactcacattttgccttggtatatcaccatctaactccataaatattgtcccctattgtctcttgttatttttcacctgaaaattattttgctatgactcttntcatcttctaccttagtatcctattttta

SEQ ID NO: 55749 - DNA, 640 bp, Homo sapiens
  misc_feature 38: n = A,T,C or G
gactgggtaccgggcccccccctcaaggtacttctagnattaattaacgcgggggataaagttaaagcaatagagagcaatttatatattaaatgcttgtatcagaaaagaaggtcttaaatcaataatttaagctttcacttaaactagaaaaaagggcaaaataaccagcaaaaaaagcagaaggatgaaaatgataaagatgaaaacaaaacaaaaacagagtatcagtgaactcaaaagctgattctttgaaaagatcaatataattagtaatcttcaagtcagaatgatcaaaggaaaaaatagtctgtatcataactaagaggggattatcaataaaatccccaaaacataaaaagatgaagccaacattatcatcctgataccaaaaccagacaattacaaaaaacaaaaaaacccagagatgaatatcccccatcaacagagacataaatatcttcaactaaatatcagcaaattgaattcagcaatatttgaaaagggtactacatcacgaccaactggagtttattctgggatcacaagtatcattcaactaaaaccaactggtgtaattcaacatattagcagactaataaaaagaaaggtcatataatcatcgcatttaacaaaatcc

SEQ ID NO: 55750 - DNA, 629 bp, Homo sapiens
  misc_feature 38: n = A,T,C or G
ctgggttacccgggccccccctcggaaatacttctagnattaattaacgcgggaatgcaataaaacaagagagaaataaagaggaaaggaagaaacaaaatgatcatttgcagataatatgattgtctgatagaaatttcagacatttctacagctgttaacatcaatatgagaattcagcaagattgttgggtacaatccatatagaaaaatccacagcattattatacagcaggaaaaataatagcgaaaatataatttaaaaaattttttgtttataatagaaaaagaaacaaagttacccagtaatcagtctataagatatacaaaatcattttggagaaaaacataaaacatttgtggaagacgttttaaaagccctagacaaatagtgaaacataccatattcatggacgggaaatgttacaaagttggcatcaaatctcaaatcaatctataaatttaataaaaatctaacttaaaatgccaacatgttgttttttaaaaaatagaactggtgctgggtgcagtggctcacctctataatcctagttctttgggaggtcgaggtgggcgatcatgaggtcaggagattgagaccatcctggctaatatggtggaaccccgtc

SEQ ID NO: 55751 - DNA, 583 bp, Homo sapiens
acttctagaattaattaacgcgggaacttgtatcttatcctattaatgacaagaagccattgagttttcaatcaggggagaaaagacagtacaactatagtagagttttgacaagatcaaaagggcatttactgacaatattttatattagtttttccgcaactctagccaaattattttcctttcggaagaaaggaaagaaatggtacactaggattagagggagctgagaggctgaataaaggccacctaccgtagggaaggtcagcacctagtaggttaccaggatgctcggggagcactgcatggacagatggaggaggaggaggaggcagtcgggagcttctctcagcaagtaacacgccacttcagttccagaaaagctagctcatgcacgcaagcttttgggaaaagttagcaaatttcccaaaggcaaaaaggaagcacataatatgtttgaagactatccagacctcacaaatctaactggatgtgatttccagtaacaattagttttctacaaactaaatttgtagaaacagtatctcttacaataatttcagagtatgtgtcattatttcta

SEQ ID NO: 55752 - DNA, 578 bp, Homo sapiens
  misc_feature 13, 554: n = A,T,C or G
ggccccccctcgnaaatacttctagaattaattaacgcgggcctctgcctctgtctaactattagacttccatatatcaagaatattaagaaaaaaaccctgagtgtaacaaacatcataaaaccagaaaatcagcattatatattatttctatttatatctcttaaacactgaaagcatttttctatattttttaggcttagaggtatttgtgacttcacgtgacagtgctgttctggtatcattttctatagagagaatggaaaggtccttaagattttttttgtagaataattgattttttaaaaacactttatttttgatagcatgaaaatgttttagtttcacactggtattgacacataaatttttagaattgatattacatttaggaaaatatctaccatgttttttcagatacaagcaggaagattccaaggcatttaaggctctcttgttcaaggaccaactttaaataagttgaaatgatgagactccaggacattctgattgtagggcatgtgacaagttccattgcgggtgccacacatcangtcatgatgccagcagagtctaca

SEQ ID NO: 55753 - DNA, 616 bp, Homo sapiens
  misc_feature 13, 26: n = A,T,C or G
ggccccccctcgngggtacttctagnattaattaacgcgggctcagtcttaaaatacttccttacaaaataataataatgaatgtaacttaaaatgaacactgcaaaaatactaacatatttttaaaaattcttcagaggatatctatgtacatacggattaacagtttacttcatgatgaatatgatccaaatttatattatttttttaaatccttgtgattaagtacatttttgtaataaagtttacaactttagaatagtttagatatatggaaaaattggaaaagtaatacaattccttcctgaatacctcttactcagttactcagtttcccctattattaaaacctcacatcactatgtttcatttatctcaatcagtgaagcagcactgatacattgttctcagctgaaatccatcctctttaacatacctcccttaagcttatctgtatgtttgctctttgttttgagcatatcttcaagttctggaactaccagttgctccaggctcatgttgtatattttctgccctggttttatactggattttgaaatgatattcatttgctttgttctaaaaaagtttgcatggcaaaaaaaaaaaaaaagcg

SEQ ID NO: 55754 - DNA, 634 bp, Homo sapiens
ggccccccctcgaaatacttctagattaattaatgtaataaatattgaattaaaaatattgaacacttcctttgctgaatactgttgtgaattgagcttgcaaaaaacactcttacaaacatatttcatacatggatcttaacagagtgtattagaattgtgggtaaacactccatttactgaaataacactgttctgaaagatacactcaaccagcactttttagaaacatcttttattatatggtgttaagagtgttgaacacacccagtgactgaaataacactattctcaatcacctgtccaacttacattcttagaaatagcttcaatacattgttttaagagtgttttagatgaagttaagagtagtgcacccttccatttactaaaataatactattttcagttatagttgcaactggtactattagaacagtttttacatgtgtcttaacaaggtgtgttagatggagtgatgagtggtaaacatttccattcactgttgtgaatcacgtaaacaagtacccatctgagaaacaactgtcatagaagtgtcttagacaaaggcaccaagaagacacaatgggtaaagtttagtctctttcatatctagtgttgggaaaactggata

SEQ ID NO: 55755 - DNA, 303 bp, Homo sapiens
  misc_feature 25, 38: n = A,T,C or G
ctggggtaccgggcccccccctcgngggtacttctagnattaattaacgcgggcagcggtggttggcagggagtggagtatcgcaccattgctctccaacgctcccgcctgggcgacagagcaagactccgtctaaaaaaaaaaaaagaggttttgcttaaaagtatgctggcagaatacagtagtggcatcaaatatgaacaataccattacgcaccatgccctagttagcagagcacacctcccccaagattttgcggctttaggttatatatgaacaagcactgtacctaaggcacatgg

SEQ ID NO: 55756 - DNA, 611 bp, Homo sapiens
  misc_feature 22: n = A,T,C or G
cccccctcgaaagtcttctagnattaattaacgcggggggggcacgtgttctctaagaaagaagaaatcagtgatcaaaaaatcatctttctctcctgattgccaatcatggctgcatttctactgagtttttatttagaatatttgctaatgtgaataattgaaaaagaattgtgtgcattttgaactggaagttatgcaactgagatggaggttatgcaagtgagattcaagttacagctttgtcattctggaaaaagcgtttcgattctctagacttcagttgtcaaatgataagatgagggcttgcacctggtaacacttcacatctcctttcaactccaaaatgctgattctaaattacttagtgggtgaaattaagtaaaattatttatattctctctcctccacccatatgcagaaatatatgagttttttttgtttacaaacttatttatttatcatttctttttatgtcaggttaattgagaattagctggtcaatattatgcttaaaatctactttcctcagattatctttctacatagccactgaggtttataagtgtatttatgtacattgttttaaaaaaaatttatatactttatct

SEQ ID NO: 55757 - DNA, 569 bp, Homo sapiens
cccccctcggaagtcttctagaattaattaacgcgggccctctaatcataaaaggtatactaggttatcagtttactttattaagtctacttatagcctgaaatcatctgttgaagtcaaattttctctcttcagccctccttttaattagtcctactaacccagtcattcaaatccgggtattacaatgttctaagatatgctatttgttgagtttgatttctcctctctcactctgtgtgtgtgtgtgtgtgtttatgtgcacatatgtgtaatagacaaagcctttcacataccttagagacaagttatcggaaaaaggaaataataaaacatattttcttcagtaaatagagcccaataagaaaatttgggattagaaaaataactcaaaagtttattagagacacataacccatgatattgaaacacattccaattattatggtagctgcaatcactgaaaaatcaagaagctgcagaatcctctgtgaaattagtagcaattagtaatttacctatcaagttgttccattataatgttaattatgtggcattcttgagaggca

SEQ ID NO: 55758 - DNA, 547 bp, Homo sapiens
  misc_feature 37, 53, 74: n = A,T,C or G
tgggataccgggcccccccctcggaaatacttctagnattaattaacgcgggngaaattaataaagttaacttngaaaaatccccagataatttggtatcaagtaaacttgttaatcactaatggatcagaggagaatttacaagggaacatagggagaccttgtctctgcaaaaaaaaaaaaaaaaaatttaagtagctgggtgtggttgtacatacctgtagtcctagcactcaggaggctggggtgggagacttgattgagcccaggaattcaagactgcagtgagctgtgattctgctgctgcactccaggaaaggcgacagagctagaccttttctctaaaaagaaaaaattaaattaaaaaaattttattttcaatttaatgaccagaaagtttgtgggtgtagctaaaacagtgtttagaaaaattttcatagctttaaatacatgtattagaaaacaagaattttcggctgggcgcaatggctcatgcctatgatcccagcactttgggaggcaggagaatcacttgagctgggggagc

SEQ ID NO: 55759 - DNA, 595 bp, Homo sapiens
  misc_feature 25: n = A,T,C or G
gccccccctcggaaatacttctagnattaattaacgcggggattcactatgttggtcaggctggtgtcgaactcgtgatccgccagccttggcctcccaagtgctgggattacaggtgtgagctatcacacctagccctgcaaatggattttcatattttgtcagttacaagtaccaaactatcacaatgccattttctgaatctaagaaggtcacttgttttctactataagttaccacacatatcatgttctgacatcttattaaacacacacacatacaacaataaacagaaagcttacctttttttcatttctaacaactgattattgagcacagatctttcttcttccagctaggaaaaaaacacaaaaaacttcagttcataaccaggccacagaaaggcatatttctcatcccacatgtacatcccccaggctccaggacagctaaagccattggctttcctcaacagcaatgaagagggacaagtggtcactctatcacaggatgtgtagttattaatatataaatcacttacgacctcagtaactccccctcctcagggacctgagagttaaacatattaaacaat

SEQ ID NO: 55760 - DNA, 609 bp, Homo sapiens
  misc_feature 23: n = A,T,C or G
ccccccctcggaagtcttctagnaattaattaacgcgggcagttttgtgtattctaaaattcacaaatttgaacacagttgagcatgctgtgttcctaacaggaatcttccctgtgaattcagcaatgaagacaatatctagtcttcccagacaaatctataacacgggctccagtgcccacatcacatgcccttggcctacctctgattgcagctagagggagagatgctgggtgagtgtttccatgttcttgctcaagatgttctctgatatccgataagctccaggcctgtacaagcacagctcaaagcagagaggagttaatgtcttccttcccaaaggagatagtgaaatacctcagactcctgtcttccaggtgggcaattccaggggcattctggatctttctcagagatcctggcggaattgaaccccattgcttacaatggcaactttaataacacatctatctctccattaacatttccttcttcctgtttgttttcctgctccttaacttctgcttcatgggatcacattcccaaaactacttggtgccaagtccttatctcaggctctgctaaccagggaaactaaactaagccatg

SEQ ID NO: 55761 - DNA, 624 bp, Homo sapiens
  misc_feature 32, 592: n = A,T,C or G
taccgggcccccccctcggaggtacttctagnattaattaacgcgggggtcagttagaacaaaagacactttcagaaaaaacgacttgaataagtgttaccaggaggccttcagatcagagccatccccatccccgtgttaattttgagttttgtcttggaagtaacattcaggtttttacgtaatttctttgaaaaccattctgtatctccataagcagttattagtgatcagatcatgtcattaagcctttgggccattaagataaaactagggcaacacatattaatactgtttttctttttaggacaagaaagaaatggccatcaatgactgcagcaaaggtacagctttattatcttattacatgttaacatacaggagcattatgtcagacagaggggctttgggtcaggtgtgcacttgtacatgtgtacccttcctctggggccttgcaagaggcaactttataattattttcaaagatactatataatagagtaactgcttttgaatggatagttcaatcagtttctcctctactggtaaatacatgaagaaaaattcagtgctctagcctgggcaacatgancaaaccctgtctgtaccaaaatacgaaagtta

SEQ ID NO: 55762 - DNA, 496 bp, Homo sapiens
  misc_feature 406: n = A,T,C or G
cgggccccccctcggggtacttctagaattaattaacgcgggtcccttgcactataatgcagggtcacaaaataaacaacacaacttgtcattatttaaaattttgatattttactcatcataaattttttgcattaatttgaatattttaaaatagtgcactataatattatttatcttgattactgagttttcagtgccttaaattttgggcctgaagtgaatgtttcttgtaactcactctcatcccaggactacctaagtatttcataatttttgcactaatgtttttaaatttgaattttcaattattcattgctagcacatggaaatacaattgatttttaaaatattgatcttgtatactgcagcctacttattagttctggtacatttgctatagatntctttggattttctacatatttgatcacatcatcaattttctgggagagattgagtacaattggtattatttcactcttaaatatttggt

SEQ ID NO: 55763 - DNA, 622 bp, Homo sapiens
cccccctcgagagtcttctagaattaattaaattgtagtcaaatcttaaatgaacattacaaaagtgtgtgtgtaaaaatatgcaccattttgtgccattttttttttatgagaattggtgccaactatttggagaataccaaaggtaggaaatggtgtcctgctttcttgttctttctcctttttaaaacgctttctttagaattctccctttgcacttccagttccaagttgtttctcaatggtttgagaagaaagtgaaaacttctcttttacaaacggatgaaaagagagagccctaatggaccacatctaggatgctagatcattgggtctggagcaaactacccagtttccaactctggctccagaatctaccatctgtgttaccttgggcaaataacctcagtaatccccagtttccatacttgtaaaatgtagataatgatattacccacctcatatgactgatgtgaagttcagagataacccatctaaggtgtttggcacaaggcccggtacacagtaagtgccaaaaaatgtttgctttgataatacaaagaccatattgaggagctcccactccaattctgacctgtttgattctaacacacacatgcct

SEQ ID NO: 55764 - DNA, 577 bp, Homo sapiens
cgggcccccccctcggggtacttctagaattaattaacgcggggtcaattctaaatgtttatgcatctaaaagaacttcaaaatatattaggcaaaactgatgggactaaaagaaatagacaaaatcacaaagaggcttcaaaacccttcttagtaattgatataacaagtagacagaaagtcatcaatgatacagaagaccagaacagactaccagtcaacttgccctaaattatatttacagaatattacactctaaaaaacagaatacacatatttttcaagtgtacatgaagcattcaccaagataaaccataatctgggtgataaaacaaaccttaacaaatttaagacttgaaaccatataccttatgttctctgaccactatggaattaaactagatatcaataacagagatatctgaaaaatccaaaaacacttcctaactgaagtaatacacttctaagtaactcatgggtcaaaaggaagacacggggtaagctagaaaatattttgaactaaattaaaatgaaaatacagtatatcacaacttgtgggatacaactaaagcagtgc

SEQ ID NO: 55765 - DNA, 614 bp, Homo sapiens
  misc_feature 19, 32: n = A,T,C or G
taccgggcccccccctcgngggtacttctagnattaattaacgcggggccctatttggattatcccagtagaaagttcaagacaatataactaatgtctacttgggtccctgtgattacatgaacttaattttcattttcttttaaattaagagttaggtttctgtttcctaaagtaggaacctaggttgttaaagacacctccatctaatagcctccaatttaattattttagcatattgatactatggcaattcaaaatgtggaaaatactcagggaagggccatcttatcactttgaatttaaatcactggtgaattgcctgttcctggagtcttaacctctaacaatttaagaccagcaggtgtaccttactccaaattacatgaaaacaaaggtgctactcatgcacatacattccttcccaagtctgaaaaagccctcaccatcctccagctttctagagctgtgagcgcaaaagctcagcacataactagacccttctacaatacatgttgtcaccattttagctgaagccaggtactctctgctctctgtgcatcaattctagactcttttttaggaatattgtccccacagatgagtcatagatc

SEQ ID NO: 55766 - DNA, 576 bp, Homo sapiens
  misc_feature 37, 556: n = A,T,C or G
taattaacgcgggatactatcacactggcaacacctngattttggaggggacacattcgtaccatagcatcttaaaaagagtacagatggctaaataaggaaaatctataatcccctgctcagcctcttcctactcacccttccctttaatcccctttccagtttctaataatcacagcactattttaatttctctattattatcttcatatacttaaaatacttttcatacacatgaaattatttttcctattttaccaaatatagactgtcttgattcttcactgtataattaggcaaacagttctctagcattcttagtaaataaattgttattcagtgtgtagaatcttgataaatgctaattgtgtttagtaataaattgcatcctaattttatttttaaacaaatttgtatttaatgcctgttgctttgaaactttcatacagagtatatacaactttttttccctaccagagaccaacagtgataataactaaatttaaaaataagaaggtttttaacttttatttcaagtttttatttaacaggacanaaatataaaataggagtata

SEQ ID NO: 55767 - DNA, 354 bp, Homo sapiens
  misc_feature 23: n = A,T,C or G
ccccccctcggggtacttctagnattaattaacgcgggccatctattcatccatccttccatctgtcaatctacataaatagaagataaatagaaaaacaacagctatataatatgtatatacatatatacaggtgataaacagatacagattggtaatgaatatataaatgaaagatagctagaacatagatacgagttagtatatctaatatgtattacatataatattaatttatactcctacccatatagttgaactccgatgtagagtaaccaacgagtagatgtcagcaatttgtattaacttacaattacacttggtatacttaagacatataccaaaaaaaaaaaa

SEQ ID NO: 55768 - DNA, 547 bp, Homo sapiens
  misc_feature 37: n = A,T,C or G
ctgggtaccgggcccccccctcggaaatacttctagnattaattaaatcagctttataaaaaaagtaaacataaacacataagtctttgtataagcacccctacatttttaaaagtatatttgccttttcataaactcagttgagtagtggtaacattcatcatcacaactttttagaggcaatgaaattgatgtcatttgagatcttcatcttttattttcttattttgtcatgtttagcaaaggatagtaaaagtagaggatcattcaacccagaaatacagggaaactgatccttgtaaatagcaccctttatagactaatggatgttttaagagcaagatgtgctagaaaggaaaataaggcaatctcttaatgctgtgccttttcttccattatatttttagattatatattatcccttgtttatttctgtagctggggaaaatatttttattgaaatagattgttttttgaagtttgctatattaggtaaaaataaataccaaacttctctgtcttcagtttaatagaaaaaaaaaaaaaa

SEQ ID NO: 55769 - DNA, 612 bp, Homo sapiens
  misc_feature 567, 592, 594: n = A,T,C or G
cccccctcgaaagtcttctagaattaattaacgcgggattttaccagtgaagtacttaaatgtgttaatagatttaaagtacttgaagcaaagtctgaaacataataactcctatttaaatctgtgtccttatattattaacattattattattatttaaagaataaaataaatttcccaaagtaaattgtagaggaaaaactaaaactccaggcctagacctgttttatttattgatttttttttttcatcaaaatacagaagattaagctgtcacatgcaataggtcatcatttcccaaaatgttgttttcaggaacaataatccttcaagacactcctttgtaaaattattccttggataaaaatataatatgggatacgctgcctactatatcccttcttagaaaaaaagagtgcacattagcttattaaagactctgaaggtgggtacagtggctcaaggctacaatcccagtgactcaggaggctgaggtaggaagattgcttgagcccgggattttgaggttacagtgagctatgattacagcactgccctccagcctgngcaacagagtaagaccccatctcananaaaaaaaaaaagcggccg

SEQ ID NO: 55770 - DNA, 275 bp, Homo sapiens
taaaattatgaggtatggcccctcttcccacttaatttttggtttatataaaatagaatttcttcatataaaagtatgtattttatgtaaatatacattaggttattttaatataataattttttacctttcaaacacaacaaatacgggtaaatataccccacataaacaaagcttttggggtgccctaaatatttttaaaaaatttccggaagccctgggacaaaaaaaattaaaaaacttttttaaggggccattaaaaaaaaggcctcaga

SEQ ID NO: 55771 - DNA, 306 bp, Homo sapiens
  misc_feature 28: n = A,T,C or G
cgggcccccccctcggaagtcttctagnattaattaacgcgggaatgaaaatgagtcttaaaccaaaatctaccaaatgggtaatgtcgtgcagacagagcagactcaaaactgtcctacaatttgtttctgtattttggggaagaacctgctctctgcccttctatcttcagaggtttggtaaatattcacttctagtttctcttagtttactaaatttttgttcataagcccttaatattttttcttatttatatatatttattgtaaaatattagaaagagacccagcaaaaaaaaaaaaaaa

SEQ ID NO: 55772 - DNA, 530 bp, Homo sapiens
  misc_feature 25: n = A,T,C or G
ggccccccctcggaagtcttctagnattaattaacgcgggtatctaagattctgttgttctgacaggtgcaaattcaagtagatacaagttcaagtatggggaggcccttctctgcctcttagcacgtcagggcagagtgatctgaagccgaaactctcctggtagaagggagggtaaggctgcggggagtaggaaggaaacatggggctggagctgtgaaaaccagtaggtactggcatgtttcttaatagttcattgaggcctaaaagaccttcatcctttgaataactctttaggggagagaaatgatggaaattctgtcggcatgtggttttactctgtgaaggtgatcaaaatgtttggcatgttactcttagttcaatctctcaggaaggctttgaacaaatgaaagcagcagccatttcagcaagcgggggccacacctaaggttactcgagagtgaagattatctcagaagtttagaatcatgacacttcggggaagataggatcagggatgaatgggagac

SEQ ID NO: 55773 - DNA, 630 bp, Homo sapiens
ccgggccccccctcggaagtcttctagaattaattaacgcggggggaggtaggctcggaccggcccgcggagctgctgcagtccttcgcgccctcctcgccctccccaccgacatcatgctccagttcctgggcttcttcgctggaatgaggaagaggaggaagccaaggaagacagagactgtggcatcagtacggtagcctttcctagtaaagagacaagcatagctgaggagaagggtcaggaattttcaggagtaacatgatgtctcggagcagtctgtccgaacacagtgcctctttttaggacttatctagaggtaacattaagcttagttcttgccagttgctgccacgctatccactttggatttaatgggcaatggcgaatgtctggaggcagggcctggctagagtagatgtcttaatgtgaatttgtgagcccgttaattggggcaagtcctagatggagtgatcaggagtggagttggttagataaaggagaatagaagaggatgagacctctttcctatgaaggccacacctccatgtgcctcccttctcaagtgagaagttgatttcttctttacagttggtactttatagatgtttcctcctttaactttcataa

SEQ ID NO: 55774 - DNA, 452 bp, Homo sapiens
cgggccccccctcggaatacttctagaattaattaacgcgggcaggctgaaggctttttagaagtgcaaagtggcaggacccatatcagacctactgaaacagaatttgcatgttaataagattcctaaatgatgcctatgcactttaccatttaaaaagtaaatttactttatcgtggtaaactatgcattacataaaatttgccactttaactatttatgcaattcagtggcatgaagtccattcacaacgtagcacagctatcaccacaccatccatctccagaacttacacagattttattggtagttttgaactacttggaagaacaaatttgtaacacttttaaaacttgtttgttcttaaaggtacatctctcatctgttgattcattcattcatttaatgtatacccattgagtgtttgtgctaatccagatatcattctggac

SEQ ID NO: 55775 - DNA, 425 bp, Homo sapiens
  misc_feature 196: n = A,T,C or G
gggcaacagggcaaaacccctgtctgctaaaattaaaaatagccaggtgtcgtggcacatgcctgtaatcccagctacttgggaggctgagccacagggaattgctctgaactcacaaggccagaaggttctcgggtgaactggagattgatgccactagcacatccagtcctgatgctaacagaaggcaaggacncctcgattctcaagaataataaaaaaaggcaagagagagtaataaaaaaagaaaaggaaaaagaggcaaaatacatttatcattattcaatattattctggcataaaaatgtgttacagttgggtgtggtggctcatgcctgtaatcccagcactttgggaggccgaggcacgcagattacatgagcccagtagtttgagaccagcctgggcaacatggaaaaacccca

SEQ ID NO: 55776 - DNA, 635 bp, Homo sapiens
  misc_feature 16, 18, 605: n = A,T,C or G
cgggcccccccctcgngngtacttctagaattaattaacgcgggcactgcactctagcctgggagacagagcgagaccctgtcttgaaaacagaaaaagatccccaattctccagcactgttctccactccatgggattctctctgctttgtccctgtcttgtatagttccctcctgttcacccctcagatctcctgacctcatagattagaccaagtccacttcagtgcactctcctaaagtccttctttgtagcagttcttgcattttatcattatgtgctagaccagtggttctcatctgtgggcaatttttcccatgtttgtcattgtctggaggcacatttggttgtcacaatggaagcaggtgctcttggcctatagcgagtggaggtcagggatgctactgaacatcctacagtgcagtgcccagaaacaaaggataatccagccctccatgttaacagtgctgagtctgagcaactctgtgctgtgccgtaggctccacagggctggggttgcatctgtatttccccagtccctaggatgaccctctcaagagaagtttattgaaggaatgaaaggaagataaacggtgaatctcangtcagccctgttgctagctctgctccactt

SEQ ID NO: 55777 - DNA, 589 bp, Homo sapiens
ccccccctcggaatacttctagaattaattaacgcggggagtcactttagggatagaagattgcaagtactttccaagtctactttctatgagccaagaccctatctattgaaaaataatttcaactgtaccagaagagcccagtgcccagaaaccaatatcagttctatacagatacaaggtgatgctgattatttcatcaaccatcttggagttcccatcgtgcagtttgcttacgaggacatcaaaacattagagggtccaagttttctctccgaggcccgtttttctacacgagcaacaaaaattgaagaaatggatcgctctttcaaccttcatgaaaccattactaagctctcaggagaagtgattttgcaaattgccaacgaacctgttctgccctttaatgcacttgatatagctttagaagttcaaaacaaccttaaaggtgatcaacccaacactcatcaactgttagccatggcgtcacgcctgcgggagagtgctgaactttttcagtctgatgagacgcgacctgctaatgatcccaaggagagagcacccatccgcatccggatgctgaatgaca

SEQ ID NO: 55778 - DNA, 449 bp, Homo sapiens
cccccctcggagtacttctagattattaacgcggggtggagaagtaaataactagggaacagaaggagtcttcatagcatattcttaagagccgccagaattttaaaccatgtatatataattctttccaaacatgctcatttttcaaaatatatgatttatgaacctaaaagcttctgattttgaattttagaaatattcgtatcgcctatccttttactcacaagttttctaaacatcatgtcaaagtttgtcatctatatgttgaaaagagcacacaaagtaagaaacaaaatgttgacatcattctttttgttttcaaactgacctcaattcataaacccggcctcttttacaaaattattcaacagttgaatctgtgaccagttaattagttgtgaatccactcaatcaaatcatctcaattcactatttcctttttttttttt

SEQ ID NO: 55779 - DNA, 533 bp, Homo sapiens
  misc_feature 21, 32, 48: n = A,T,C or G
gtaccgggccccccctcggangtacttctagnattaattaacgcgggngccttgtacacatccagtgtttctcattaaatctgaattgctaatctgaggtcagtattaagtccacagaaagttgtgcttgttagagaatcacagaataatgtagtttatgagagagcctactaagaggcaaagtgcccatcaggttcactggggctcttgctgacctcagagcttggaagaagctcatagcatgcacttactgtgggcagacaatgatcaggtatgctatgggaggaaatgggtattcccatgagacaaatcatgctttgccaagacatctgactagaaattagaaaacaggctgggcgtggtggctcatgcctgtaatcccagcacttcgggaggccaaggcgggtggatcacctgaggtcaggagttcgagaccaggctgaccaacatggtgaaacgttgtctctactaaaaacacaaaaattagctggacatggtggtgggtacctgtaataccagctactcagtagtct

SEQ ID NO: 55780 - DNA, 619 bp, Homo sapiens
  misc_feature 14, 27: n = A,T,C or G
gggccccccctcgngggtacttctagnattaattaacgcgggctgggtgacaggctgtgttccttctgggaagggaatctcaccaactctcagacagttacggactaagtgactttgcaatagtctagtctttgaaaagctataataatctgtaacctcacctgtttccaaatagggttaagatgatttcaatggcaggcacagaatactagaaggctaaaatagaaaaacaaaataaacggaacctctggagagaaagggaagatggaaaaatggggagtgaagctgctggtctgcaggtgggggctttgtatgcattatcttcttccattgtcattgtgaagtagacatcaatatcttgatgtttacagaggcttgcaaaagccaagacttttagaaaaagcacacacatgacaacaacttcctgtggtcacaattagtaagtggtgaagctatatttcaaaccaggtctgtctttttcactacaccatatataggaagtatctgaagctatgctatccaatacagtggctaccaaacctatgtggctattgagtgcttgaattgtggccagtgcaaactgagatgtactgtaggagtaaaatatgtgtcaagttta

SEQ ID NO: 55781 - DNA, 421 bp, Homo sapiens
  misc_feature 39: n = A,T,C or G
gactggggtaccgggcccccccctcggggtacttctagnattaattaacgcggggcattaccaatcacaagttgtttccatacacacctgtctctatgtcctgtattagtcaagactttttaagtggcaaatcacagaaacctaactccaactggcttaaagaaaacataaaagtctgaaagagattggatttcttagattatttatatgctgatgagaatgatccagtagagtgggggaaaagctaaagatatgagagagaggtgacaattgcaagaacaaagtccttgaacagacaaaaaggagtagaatccaaatcacaagtgataggcttgggaggctgaggcaagtcgatcacttgaggccaggagttcaagaccaccatggtgaaaccctgtctctcctgaaaaaaaaaaaaaaa

SEQ ID NO: 55782 - DNA, 512 bp, Homo sapiens
  misc_feature 29: n = A,T,C or G
cgggcccccccctcggaggtacttctagnattaattaacgcgggctccctctctacagttcattctaaaatcaccagccaaagagatccttttaatacataagttagataaaataagttcccatattaaaacatttcagtggatgccagtctcactaagaaattaaaacaataacccttctaatgtcctacaaatccctacatggctggccttccaggattttgtctgcagcctcatctctgatactctctaccttgtacatccagtttcctctactctccttcataggccagccatactcacattcacgacagttgcacctgctcttccctttgcctgaaatgccaaatctaaaggaaactagaaagttcactcacaactgtttatttatcattttttatttggaaacaattaatatactatactattcaatctgtaagttttagtatattttaaaagtttcaccactaattccaaaatacttttatcacccccccaaaaaaaaaaaaaaa

SEQ ID NO: 55783 - DNA, 592 bp, Homo sapiens
  misc_feature 15, 28: n = A,T,C or G
cgggcccccccctcnaaagtcttctagnaattaattaacgcgggggagacagatttgaatgtttcctcctgtctccgtgcagtcgacttgcaataaagcttttattttctgaaaagctggtgccatgtattggcctgtatgtgcattgggcagggagcacattgattgcatagacagcaaaaagactgtcctttctccgttgaattgcctgtgagcttttgtcaaagatcaattgattatattggtgtggatttatttctggactttctgttctgttgatctgtgtgtcttcttttgccaatactgtcttggttattgcagatttccagaacgtcttgatattgggtagtgacagtcctccaacttggttcttctttgatattttgtaggctattctcagtctttgtctttctgtatcaattttaggatcagtttgtcaatatctacaacctggcaacatctattaaaattaaaaatataggccgggcacggtggctcacgcctgtaatcccagcactttgggaggctgagacaggcagatcacgaggtcaagagagcaagatcatcttggccaacatgatgaaacccagtc

SEQ ID NO: 55784 - DNA, 598 bp, Homo sapiens
  misc_feature 26, 37: n = A,T,C or G
ctgggtaccgcggccctccctcggangatacttctanaattaattaacgcgggtagttgtatttacatccaccattttactttgttttttgtattccccatctcttttttttgttcctctattttccttctttatttctttcttttgcactaattattttctactgtagcatttaaatgtattgttttttcacaatatttttgcatctttagtgtcttcttagcacttagacattttaccttctaattctaattcagatttatttcagacaatttcagtgagatatgcaaacttagttctactgtatctattcgttcctcacctttattgtgctataattattacacatattacatctatatactgtatatcacaaaactaataacacatttgcataatgactactttatatacttttgtatcaattatagaaactgcaataaaaaagtaaacatatattcatttagtttgatatattagctttctatttattatttttatttttaaagaaataattcctggcctggtgcagcggttcatgcctgtaatcccagcattgtgagaagctgatgcaagaggatcatttgagcccatctgt

SEQ ID NO: 55785 - DNA, 626 bp, Homo sapiens
  misc_feature 25, 38: n = A,T,C or G
ctggggtaccgggcccccccctcgngggtacttctagnattaattaacgcgggtaatgtgtttcaacattaagaggaagaaggcaataaaagaatgcacatctgactcagacatagaatcagcagacaaggactttaaaataatactttaaatatgtcaaagaagttagaagaaaagtaaaaatatggattaaaaaactgagaatttcaacaaaatatattctataaaagtaacaaagtgccattctaaacttaaacttgtaaaagagaaaatctaaagttagcaaaccatgttaacggtagagggaataaaggaaaggacggtgaactagaagatgggttagtaaaaactaaccaaaatgagtcacagtttgggaaaagaaaatgattaaaaaatagaagaaataattaaagcaactcgggatatgatcaaataatatggtcaaataatctaatatgctgcagcttgaaatacaggagagaaacagtaaacgaagcagcataagtaattgaattaataataacttcaaattttcttaaagaaaccgaacagtacaattatgaaggtcaatatactttaaaaaagattcatgggccaggcgcggtggctcacgcctgtaatcccag

SEQ ID NO: 55786 - DNA, 583 bp, Homo sapiens
  misc_feature 23: n = A,T,C or G
ccccccctcgggagtcttctagnattaaagcagtggtaacaacgcagagtactaattaacgcgggccctgctgaagtctctggctgacgtggagaccctagacacatcacgttttagctgtggagctgacttagttctagagactattccagacttagtcttcaattaaaaacaaaacattacaaaacaaaatgaaaaaacagcctaggtaactgcaagtaacttacatctttataacttatccaaaactcttttttaaaaactcaacaaccactcaacaatgtaaattccataatgtctagcatccggtcaataattatcagtcatccagggaaacaggacaatatggctaccttttcaaaaatatttaacagaaacaaatctggaaatgacaagatgaggaattagtaaacaagaatttttctaaaactcatttttaaagacttaaaggaaaacatgaacaaatgaaaagattaaaaggagttattaaaaaaatcatgagatctgctgggatgaaaaatataatagctgaaataaaaagtttacataaaatgaataccaaatagatattgcaggaaaaaag

SEQ ID NO: 55787 - DNA, 592 bp, Homo sapiens
  misc_feature 9: n = A,T,C or G
acttctagnattaattaacgcgggggttaaacagaattttagaagctcgtgataacaattcacgaaacttatcatagcgcatgttctccttgctacacagcaaaagcttccacaccttatatcaaatgtattttaatagtcacatgtctgaggttatggcagtgctaacctagtgattgtgtgtagctagaatattcagtcctcagtgtcatctctcactggcttagtgctaaactagaatatagatattttaaaatcacatttaatatttgttatgatgtagccaacattcttttggggccagatgatccttcggggcttaatgaatatggggacttctaagtcaagaatctggggtttgggtcaaactcaaatcccaaattttatctatcggaaaagataaatgagtgtgtgaggtttacttttagttaatctcattgaattttacttgttttttctgtccattcaaggaatgaaaaaagaaaatgagtgcatagaagccggaagtaggacggtagtttcccggggtctgcagggaatggggagatgtaggtcaaagggtatgaagttgcagttatacaggttgaataag

SEQ ID NO: 55788 - DNA, 602 bp, Homo sapiens
  misc_feature 32, 43: n = A,T,C or G
taccgggcccccccctcggaaatacttctagnattaattaacngcgggcctggatgtgtaacatcttttatttctaagtcaattgctaggcttgatagattggactatatgctaaatcatcagcaggcgaattttaaattataagcctcaaaactccctgctttgccaagcatgggagcaaaattaacaccctgtataaaaattccacattaaaaaacttttctggctgatgttgaaacctccgtctcagatgcaactttattctgtagactaccagaataatatttcctgattctatctaaaaacttcgtctcctgttcaaaatgctttggggaataattactaaacaagaaatgcttcactgaaaatttaaccctttaaaaagactgtcgttagatgtggctactaggctaaaattcaaacccattcacattatttcaagctatttgggccctttttatggcagttttcatgatatgatcaatacgaccaatataaaaccaaattttcagaagccctcccttgcattcttcttgaccaaatgtaatcccaggcaactttataaaaacagagaactgctgggtaaaatattacgtttgcag

SEQ ID NO: 55789 - DNA, 380 bp, Homo sapiens
acttctagaattaattaacgcgggtccccctattacttaaaaaaaactggcatggacgctgaataagctgaaaatgccatgcagatgaattctgagataatatgttcaaacctgttatatacaacacaaatcctgtaaagttatgtattgtaaacctacatttattgagaactaaaagtcttaaatccatctgccacaaaggaaatactgttatgtactttatagtaaccaagaaccatgtgcaaatgtcttgctaccgtaagcaagaaaatggtgcaaaagatgctaaacctaagactgtatgaaataaataacattcttttgactggttttggttagggatctattaaagaaatgtaagattgaaaaaaaaaaaaaaa

SEQ ID NO: 55790 - DNA, 550 bp, Homo sapiens
cgggccccccctcgaaagtcttctagaattaattaacgcgggggaagggaagtagaagagagagtgttaaacttcacaaaggagtttatcattataggttcaggtcaagtcccactttcactcatcacttcagccttcactgatttctctcttctctgattttccatggaatttctgcaccatacaattgagcactgaaatactcattgcaagaattcaatgaaaagttgagaacctcctatccaccaaactctgcacagcacagacatggtttatgccttctccaaacttatagtctcatagaaacattcaacaaagtcaattaaaaaccagctaccacaggtgcacatagaaagaacacttagactttgatgacagggaaggcttctcagaggaagggacagctaacggaagacttgaagggtgagtatgagttacccagacaaaaaggagggaggagtgtttcaggcagaggaaacagcatggatggagacttagaggcaagacagagtgtttaggaaaagtgtttgggaggaaaaaaaaaaaaaaa

SEQ ID NO: 55791 - DNA, 634 bp, Homo sapiens
cccccctcgagagtcttctagaattaattaacgcgggcttgtgtggttgggaaaacatcgtaagccatgaatttagtttcaagtggacccaatccaatagttttcccagatgctaggcgaaaacccaaatactgtatggaaaagtgcaccttcaatcaaggcctcaaagaaattcaacaaatagtttttcaaggacaattacatagtcaaaaataactgaacacttaaagaaagaaaatatcataagaattatcagaaacagcagacacagacagacgcacttcagaaatatctggtctcagatctatatatgatcactgtaataccatttctatcaatcaatgtaaatttattatgaagaggctgaaatataaggcaagtttaccagaaaaggatttaagagagatgatactggaattaatgaaagggagggaacagttggagattgggttgagaagaggaagtagaacaaaactttcatcatatatgccacacaaatatgtatgaaacatccttccaaagaaggaaaagaaaatagaaaatgttacctctccctaaatcaaactccattctaatgaaactatttaagcagctcgtgcaattgtcagtgttggctgaccaactatattttatc

SEQ ID NO: 55792 - DNA, 417 bp, Homo sapiens
attaatgaacgcgggcatacattataaaaaatgaatgactgtcctgtcctattggggatccccataaaagtcaccccaaaggtttaattagatagggaagtacaaaaatccagattggtaaaattttaaatatttaaccaatttaattcttttttttgacaagtgacttgataaactaggtaaaataattgtaaatagagtggggtaagggcagtgatgttggtaaactagtgatccaaatgaaaaaaaagtcggctgggcacgggggctcacccctgtaatcccagcacttggggaggccagggggggtggatcacagggtcaggagttcgaaaccagcccggccaattttgtgaaaccccgtctttaataaaaaatacacaaattaccccagcggggtggcatggggcctgtagt

SEQ ID NO: 55793 - DNA, 522 bp, Homo sapiens
  misc_feature 9, 41: n = A,T,C or G
acttctagnattaattaacgcgggtttcccattttgtttcnctgagtgtgaataactggaacagacttcgcaattttaaacttcgtttttctagatctttgtatactaaatgcaaaaacatttgtaaaaacaacatacaacacaaaggattgtaatgtgagtttgtacttagttttaattgaggaaagctccttaaacacaggatctcagtgaatttgtcttcatccgtgccccatctgttctcaccagctttatagagaatctattcacaagagaatgatattagagacacaattattttctttttgagaggtgacatgagaagaatcggagttgtatttcagaggtcagtgccatcatctattatctaaatctctcactttcagaagactagaaatcaaaaattgggctgtcaggagccaaggagaatgataactaccactggggcaggcaaaaagttagggttccgatccccaagcttcaggcttctctttcaaacaaaaaaaaaaaaaaagcggccgc

SEQ ID NO: 55794 - DNA, 579 bp, Homo sapiens
  misc_feature 536: n = A,T,C or G
cccccctcgggaagtcttctagaattaattaacgcggggaggatattttggcaatattaaaccattttaaatacgaatcatctctgacccaccaattttacactaaaaacattattacaaggaaattagagaaatttataaagatggatattctaggatgtacactatagcattaacagcagaggactaaaaacagcctaaatgttcattattatgggattgtttaaacaaattatgataaagtcaatgcagtattgtctgttaaggatgaagaatataggaaaacacctccatagtatattaagtgagaaaataaacatacaaaacactaggctgggcgcggttgcagacgcctgtaatcccagcactttgggaggctgaggcgggcagatcacctgaggtcaggagttcgagaccagcctgaccaacatggagaaaccctgtctctactaaaaataaaattagccaggcgtggtggcgcgtgcctgtaatttcagctacttgggaggctgaggcaggagaatcgcttgacctgngaggcggaggttgcaatgagccgagatcgccccgttgcactcc

SEQ ID NO: 55795 - DNA, 511 bp, Homo sapiens
ctgggtaccgggccccccctcggagatactttgaattattaacgcggggggccacaaaactcttcaccccaggtctagaatcattctagaatcatcctacaagcctagttttcatgagattcagccctattttatttcttgctcttggaattatatgaaattacgaatttctgtgtgttgccagctgtaatagaataccctggaattttatttacttttaattttgtttatttatttatgcttatgtgccatcttctcatgaaaaagaggtagtatgttaaaagtttgagttcagattttctgatgtagataaataagctaaagaaggcagggtgaagtgtgatatatgagaatttccagagcagggtattcgtaacttgtaagtatttagtccaagttccctctcccaacacattttacactagaataagattgaaaggccagatgtggtggctcacgcctgaaatcactttgggaggccaaggcagtggattgcttgagcccggagttc

SEQ ID NO: 55796 - DNA, 593 bp, Homo sapiens
  misc_feature 23: n = A,T,C or G
ccccccctcggaagtcttctagnattaattaacgcggggtgggcaagggagagttctgagaaaacatcactttcctgttagataagtggctactcgaaaaaaaatgtgtaactttctccaagctctccaaatatatgctttttcctaagaataaacacttggggaaaataataactcatcactctaaatcactaaaattaaccactcctcactcaaatttaaacattgaagccatcacttaaattcacaataatgaaaggagtcctcaatcttcagcctatgcattcagaccttaaccacactatctccactgcatttatcaagaataccaaactagaacagtagttccaaagtaggtgtgtgtcatgatccattagagtacgtaaagaatagaatacccttgttaatttcttcatctcattctttttcaatattccttcttggcaattttgtataatgtgcagtagtagtattacccgtatacaatgtataaattacatacgttaagactgtgtgctcagtatttttttaactaataagatatataatcaaaaacctttggtgctggacacagcggctcatgcctgtaatcc

SEQ ID NO: 55797 - DNA, 634 bp, Homo sapiens
  misc_feature 23, 36, 593, 609: n = A,T,C or G
tgggtaccgggcccccccctcgngaatacttctagnattaattaacgcggggcctattaaacaactcctggtattaaacaaaggcaaattctgctcttcacaagccagcagagagagatactattggttttttgcttgtatataaaaactaagcttggctactgccaaatcagagtcagagatcagaaaatctaacaaaatcctggtacactttctgacttctgtcttcctagagacctttattgactgcctggccttaggaaagaaagttctttgttttattgttttgttgttgtcattgttgttattgtttgcaacctcaaggcttaagttttttcacagattattattgttaccacagtaataataatcacagccacctcgtagtgctgttgaaaacttttagagcatcccctaagacatgatgagcacctaataaatgttagttattattatccctgccacagaggaagctagaaaaatttgtaaacttaaatacatatattaataaacaaagaataaaaataaatggattaaatattaaactcaaaacattagaaaaagaataaaatgaacataatacaaaacaaatntaaaaaatcaaagganaaattagtgaatgagaaaagagaga

SEQ ID NO: 55798 - DNA, 592 bp, Homo sapiens
  misc_feature 10, 49: n = A,T,C or G
cccccctcgngaatacttctagaattaattaacgcgggtccacaccggnaaagccaagtgctgtgcggagctaattaaacactataattatccatgagctatggcccagaagcagagagaaaatctaacacatgtctgattgtaatatcaggtaaatactcaagatgtgtgactggtgaaatgcaaaatattctattcatttaatattcttgatgaatagtgaattagtctaatcacattagctattctattcatttattaggtgagagtgattagaagtgaatagctgcagaaaaaccctctcaagttgcaaaaattagacttctgtagttttattatgtttattttcaactgagggtaattgtctgtagctttctctgcgactagtctatgcccctcccctgtctttgccccttgaaaaactgaatgttggttacacgtgtagagagagcagataagacaatgaagatctggtacacaaatgctcctggacattgtataaacattcaaaatatcgcacacaaacattgcacttccaagggcataaccacactattttttattctttttaattgaggtataatttacatat

SEQ ID NO: 55799 - DNA, 554 bp, Homo sapiens
cccccctcgagagtcttctagaattaattaacgcggggatgcaagtgacttttgtaatttaacagaattctacaagattttctcttttaaatagtactttgagtttcaagtgacagacatgaagattgcatatttgagaattcagatgagaaaccagagacgttagaaaacaaattgatattaaagttgcacaaactgcttttatattcagtagaatgtataacctggtttgcatttgttttcacatattttttttaactgttactgcagctggatattgcgtgatcacctatatacttggagttggagacaggcacctggataaccttttgctaacaaaaacaggtaacaattaatgactaccagtagacatacattgtatatgcccatggtttttacccctgaatctatgtactaacaagataagttgcggcctggcgcggtggctcacgcccgtaatcccagcactttgggaggccaaggcgggtggatcacctgaggttgggagttcgagaccagcctgacaacatggagaaaccccgtctctactaaac

SEQ ID NO: 55800 - DNA, 437 bp, Homo sapiens
ccccctcgtgcgtacttctagaaattaattacctcggggggaaaaaacgcactaaccttagatgattttaatgaagagtttttcagatcttcaaaaaatagataaacccatttttttttaacctgcccaattttatataacctgccctaatagtgccctaaaagccctaggcatagatggtttaaatgaagagtttttcaaatcttcaaaaattagataaacccatttttatttaacctgccctaccgggacaaaaaataaaattttttaaaaccctaagatgttttaaaaaccccccttagttggtttcttaaatttaataagaaaccacccttacgtgggaatagcacttatgaatatagatggaacttttttaaataaagtttaaaaattcccagagagaagggtggaccaagatggctcaaaaaaaaaaaaaa

SEQ ID NO: 55801 - DNA, 581 bp, Homo sapiens
cgggccccccctcggaagtcttctagaattaattaacgcgggaccccataaatgtgtataattagtataaataaattaaaaattaaaaagaaaacattcttactaaaattgatacactttacataaattatatttcaataattaaatcctgatttttaaaaggattgttagagatgcatacttctgatgtgttcgatctgcttcacaatatttaagtacaagggaaaatagcatctatcgatgagataggattggtaaattgttgataaatattgaagctggatgattgatacatggaaatcgatatggttattatgcttttgtatgtttgaaaattgtcatgataaaaattagtagaaaaataaatgaaagcaggcacatcctattagtagaatgccagcccagagcgtctgagcctaatgctctttatagtaactttaagaacttgaccgaatataggcgctatggctcacgcctgtaatcacagcactttgggaggccgaggtgggtggaccacctgaggtcaggagttcgagatcagcctgaccaacatggtgaagccccatttctactaaaaatgc

SEQ ID NO: 55802 - DNA, 523 bp, Homo sapiens
ccccctcggggatacttctagaattaattaacgcggggacccccaaatctaggttcaggtgttccactaatgcactcttactgcaacagctaacttgtccatctctacactagtctgcagacaatatgacggggactgtttttgtaattgacctctgtatcccctgggccctggcaaagtacctagtatgtggaaagcactcaatacaattttgttaaataaggaaatgaatgagtgcattaatctagcccttgtatgcttagatctgccaaaagacaaagctacaacaaatttatcttaaagatctcaattggctttattgcatttttagaattgggcaacacttcattccataaaatagaataagtgttccaataagctgagtggaagggtttggttttatagacggagaagaactgaagaaagcagatatgtagaacaaaatgtgactggtcatttcaaaactatttcccttgtaaggcaggaacagggaaacaatagagaaataactgattgcttaata

SEQ ID NO: 55803 - DNA, 601 bp, Homo sapiens
  misc_feature 28: n = A,T,C or G
cgggcccccccctcgaaatacttctagnattaattaacgcgggatgggagtgaatactgggaggcggggattattgggagccattttagaagctgcctactgcaattgtcatgattcttcatccttttttgctagacatgcaactcaggaacagtaaagattgtcttgtaaaaaattgcagaatgtagcaataaaaaatccaaagtttggagcgtggtgccttgcttggtaagccaggttattccatatgatctgcgaatgctccctccaggaggtgggtgcctgtatcactcatcagtgacccatcttgcccagtaaggagctcacacatgtgttgcttgtgaagaaaggtggcaaaaagacaggtgcttccttggataggaagtatgatttaagtaagaaactgtggtaattattatttttttttacagttaaggccacattctctatttctgcttagctgcacagagtttgtacatcgggacaaactgctctctggaaatgccaagaagctgtggggctattataagaaaaacggaactgaaggagttatggaacttgctcttcttccccatttaaaagtcgtcttccttctttaact

SEQ ID NO: 55804 - DNA, 608 bp, Homo sapiens
  misc_feature 16, 29: n = A,T,C or G
cgggcccccccctcgngggtacttctagnattaattaacgcggggggacgctgaatggctggctttgccttatctcattgttggtctctgggtcaattaggataagaaatttgattttttttttagcgtcacagaggtaatcagcagcaataaaacatcctcttccttattttcagctattattaaatatgcgccatatggatggaaattaattgtgagaccccaacaattattaagaaaagatatggttcttgctctcacagaaggcattttaaaataaacatattaacacaaaggttgtttacccagttattaagagctgagattctgaagccagatggtcttagcttagtcttgagttcaaatcatgattttatccgtgtatctttaggcaagttatctaatttccgtaagttgcaatttcttcacttatagaagatagtgaatatttgccacagacaggattaaatgagataatgtatgtaaagcacagatgatgataggttctaaataaaggtgaggtgttattgttatagctccatagaacacgttctaaataaatgtgagctgttattgttatatcttcatagaacagaataattataaag

SEQ ID NO: 55805 - DNA, 613 bp, Homo sapiens
  misc_feature 32, 49: n = A,T,C or G
taccgggcccccccctcggaaatacttctagnattaattaacgcggggnaacacagtttggcctgtcacagtagcaaaggtaagaactttcccagcttatcaagcatagaaaacaggtgttctcatacacaaatctggcaggggtataaattggcattaaaaagagtatattgttgaacctataaattatactggaaggaatttatcctggaaataaaagtttcatatagagaattagttggaagacagctgattacagtactttttatagaagaaaattggaaataagtaagttcagctgtaggggactgttttatgatttattctagtgatgaaatattatgatatttcataatttttgataatattgacatagaaagatttttgtaatatattgagagggagaagaatagtcatcgttctttctgaatagtgggattattagtatatgagatattttcatttggtctcttatattttctgtttttcccctcccttgaacattgttttttcaaataaggaagcctatttttattttttaaaaacccattagaaatttttctgttttcattttcatatacctgaagtttaaatgccttaactatatacccat

SEQ ID NO: 55806 - DNA, 545 bp, Homo sapiens
ccgggccccccctcggaagtcttctagaattaattaacgcgggaggtcaggttttgcccccacatgagttactaaaagcctgaggttggagttttttggattttaaaattatggatatgaaatcatagatctgcccattctttcactttaaaacccatagtaaatctggcatatcttttcatcttgatgatatagacataagtagttgagctgcttctttagttgacagttataagggttataaaactgatatttacttcatatagccgtgttaaattactttcaacttttctggtccataatctaccaagttgtgaaattttgacatgttagccctcttgtgtactgatagtatacctttaattcataagtctagaatcactactgagtggcagagtaacattcttctgtctcatcatattttctaaaatggagtcattaactgccacatattcagggagataccaaagaattaatgaaacacttgtaaacctttggtaaaaaaaaaaaaaagtgtcttaaagtgttattcattagaggttcaa

SEQ ID NO: 55807 - DNA, 571 bp, Homo sapiens
  misc_feature 542: n = A,T,C or G
cccccctcggaagtcttctagaattaattaacgcgggctctgacgatctacagttcataaccatcaatcctctgaggcctatcagagaaaacgatgctgaaatccttatttctatcccatgtataattgtcttgtcctactgccattctataactccagggagtggccactcaacagttcaacatgaaggaacctcttgtgaattaaattaaatggaagagagaagtatccgaaacagctggcctgagccgagctgacagaaaagcactgatgagtgtgtacaaggaacagttaactgcttaaaatgaaccctgacccagggcctatgatcggctactacttgactaaaaatgtccccaaggctacttccagctctctaatttcaaggtttcccaacagaaaaataattacgatagataagtatttcacttcaacagccttggatacatttctaagaccacagtggaagtgtggagtaggcagacaaatagcttgaagtattatcttacatattgctgctcacacaattaaaaggttaattntttgtgtgttcttccctgaagatacctga

SEQ ID NO: 55808 - DNA, 423 bp, Homo sapiens
ccgggccccccctcggaagtcttctagaattaattaacgcgggttcccttcaccaatatgtgaggatttaaatccaaggaaaatctcttgcagacagcatatagttgggtctcggttttttaaaaatccattcaggccaggcacagtggctcacgcctgtaatcccagcactttgggaggccgaggcaggtggaccacgaggtcaagagattgagaccatcctggccagcatcctggccgtctctactaaaaatacaaaaaatcagctgggcgtggtagcgggcacctatagttccagctacttgggaggctgaggcaggagaatggcatgaacccaggaggtggagcttgcagtgagccgagatcacgccactgcactccagactgggcaagagtgagagtccatctcaaaaaaaaaaaaaa

SEQ ID NO: 55809 - DNA, 462 bp, Homo sapiens
ccgggccccccctcgaaagtcttctagaattaattaacgcggggggagaattgactagaagggggcacaggaaactttctgggctgatggtaacattctatatcttaataggggttaggtataaatttacatatgcatttgtcaaaaagattcagcaaatgtatacattatttgcttcagtatgtgtaaattttaccccaaaagataaaatatgctgaagtcattacggaaaagggtagtatcatctatattttatttttaaatgcaccaaaaaaaccaggattaaatgctgaatggatacagcaaggctgctattacaggaaatgtgtttttaaaaaggtatagtcaaatgttaacagcagattgtaggcggatttacagttgctttttttttttcaactttgccatatagttgatattttcataatagaaagttgaggacagggcaaaaaggcaaaaaaa

SEQ ID NO: 55810 - DNA, 603 bp, Homo sapiens
  misc_feature 38: n = A,T,C or G
actggggtaccggggccccccctcggggatcttctagnattaattaacgcggggacaaagtggtgttatctgtctcttgtactgctgcctaggaagatgaagtaattgataactcaagattgaagagtatagcagtagtgaagccagaaatagtctttagatctgttgaaactattcagtgaccaaacctccttattgtgtatatactgaaaaagagtaatgctttactgcacattgttccattttcatttaggatgtagatgttggcgtgatgggcagtttacttggaaagatatgtcttcataatatttccttttcttgaggcctcttgatctgctaaggtctgaaaagaattcaaagaggtaaatctttagcataaagactctcagtatgtttttaaaacaacttttaattatataactactgctttgaggatatttacccataatatcaaaggactaactaccacataaatgtatcacgcatacttatttgcatctctaaaatttgatgtcatattggaaagaatttttagtgaaatagtaaatacagatgatgagaatgccacctggagaaagagataatgtgattgttaagaactca

SEQ ID NO: 55811 - DNA, 627 bp, Homo sapiens
cgggccccccctcgaaagtcttctagaattaattaacgcgggtgtggctagtctcttgtgggtaatttgcattcctggaaacctccagataaatattcatcccaaaatctcctactaggaaagtgccctgaggccatttccttttggttctcaatttagcaaaggactataataccaaatttcctttgtaaaaagatacagtaacacaactagttaatgctcagttaaagtatagtaacaatgtattgcatacttgaaaattacttagagagtcattttcttttatgtgttcttaccaccaaaacagggtaaatttgtgaaataaagcataggttaaaataaattgacttagccatttcacaatgaatacaaatatcaaaacatgatgttatgtaccacatatatacaatttttacttgtcaataaataaataaatgtcaattaaagtaaatcctcttaaaatggggaccaaaatttcacactaagcatagaaacattttgataaaaacttaaataaaactaaaacttataaaagataaatttatattatattcaaccaaatataggctaaaatgtaattatgccttaacttttgaaaagacaaattgcatgaaggcttttgttgag

SEQ ID NO: 55812 - DNA, 439 bp, Homo sapiens
ccgggccccccctcgaaatacttctagaattaattaacgcgggtttcttaaattataaaatatattcatttaaaatgtgaaggtgccaatggtcttcttatacaatttgcaccatatggcattttgaggttttacattttaattctcttaaaaatagcaaattgtaatgatcgagttacataagagtaaaatgtgatctctacaataaactctaaatcattatatgtaattatactgagcacctctaaaaaatattttccatgctgacttgatgaaaatcatgttgaactacgtatgtgtagtatataaataaaaaataagttgtttaataatagaatattaagattatacaagctgtgtgtgtgtgtgtgtgtgtgtgtatgtgtatcctccatattaaaataaggggaattgacaaacattttttagtgcttctatc

SEQ ID NO: 55813 - DNA, 571 bp, Homo sapiens
  misc_feature 30: n = A,T,C or G
accgggcccccccctcggggatcttctagnaattaattaacgcgggggagcagatagtgcttactaccaggttgggcagacaggcaaggaggggaccgagaatcaaggcgttgagcctcaaggtgtgttaaagaagagtaaatgtgcttattctatgctttgatttatttattttagttgcatatatttcttatagccttaaatagataattcttagtgctgaaactggggcattccctctgttctcacttgtcagtgtggtagagtggaaaaagcatggcactgggagagtccaactactttcagatttcactgccatcgtgtactgtgtggtagaatcagaaatctttagtttccataacgtgtaaagtggcaaaaacaatgtcttccaaggttgatgtgacattccacatgtaaaaacatttgtcttaatatgtaactcatattatatactcaaatgttttcattccactactccctcaaatgttttctttcttttcaagtccctgtaaagttgcagctatttatgtcccctttcattttgacattttaaaattatgtctaatgctgg

SEQ ID NO: 55814 - DNA, 578 bp, Homo sapiens
gggccccccctcggagtacttctagaattaattaactaggaaaattggtaaacaattgagaaaatcaatgaaatctacacaaatgaaatcaaacaaaatctagactgaacaaataaagaaatagagaaataccaatacaccaatagagaaatataccttacccatggcttgtaatatccaatattattccaaagttaattccaaatcgatatgcagacaaagtaattacaataaaaatctcagcaagtttctttgtttcaatatggaaaaacaaactgcctagaacagccacaacagtctgcaaaagaaaaaagaaaaaaaaaagagaataccacatgatcttacttatatgtggaatcttaattttaaaaagttttggtatcatagaagcagagagtagaagagtggttaccacagactaggaagggaggagagaggagaggatggggaagggttggtcaatgggtacaaagttacaatcaaacaggaagaataagttctggaatcctattgcacaataggatgacaggtagttaacaacaagatattgcacattacaagatagataaatgagaggc

SEQ ID NO: 55815 - DNA, 484 bp, Homo sapiens
ttctagcaattaattaacgcggggtgctatacagagagtagaatggtttgtgattgttgctttcctaaggggatttaaagtttttcatttattttttgtgtgtgcatgcacatgacactctcatacattctgccccatttcttttttcttccctcagagctagctcaaataaaataaacatctttagctctttctttagaaaaagaagggaaaatcacatgccaatccaagtagagaaagatacagaaaacagaagcaggtgggaaaaggcactttataattcattaatttatattggtatctcttaaaatttttctttttatgaaaaagaagtgaagaatgttagaaggtcataaactaataagagaccacatagtttaaaagatttgccactttttttttttttagctttattgactattaccaactttcagtatggttcaaataattaaatactggcactgggacattaaaaatacagcta

SEQ ID NO: 55816 - DNA, 589 bp, Homo sapiens
  misc_feature 15, 17, 28: n = A,T,C or G
cgggcccccccctcnanatacttctagnaattaattaacgcgggactagcagtacgctttcttcgctgttttcatttatgatttgctgtcagtccataatctgtttcttttcctctttactcggatgatttatttggttacgattttatttggctgtttatttttttctgtcactaaatttgcttcacttttttccccatatatttcttttaccttgagaatttcttccacctttcttgctttttccatattttgaaattctaactttcatttgcttttggtttatatttttctcaatttcttatttgcctttttatctccctgctttctctctcttcttctatcatctacctgtaataacttctctaatgtatgcacagaaaatatctttttgtacctctgatgggcaaaaaatgtatatacatatatattgatatgggaattaatacattttcagcacaagaaatgggaccagcgggaatgtcaaatggaacattaaaacatttaaaaatcactacattagctgagcaaggcttaaataatatttgcatggcaaagagtctaaataaagaagcaagaataatgaagt

SEQ ID NO: 55817 - DNA, 530 bp, Homo sapiens
  misc_feature 465: n = A,T,C or G
gggccccccctcgaaagtcttctagaattaattaacgcggggcagtactggcaaagctaggcaagtgtgacattatgtgactaatatgaggctgatagatcccctgtcacaaggagatgttcacaaaggattggtcttgaactggatggctcatcagatgttgattaagattatgaatgttctgttacattctgaagagtctaatgagagtcatcgaatgcagttgcattcatttagagtagttgagcagatgaatatcatctaattattatatatctttctgatcacatggcttgctggggttgaaaaagagaaagacgtggcttgaggatttctttgatatgttttattattatttttctgcaagcaattttaatatatttaattcacatatgtattatatgtacattattgcataaaatattttgtatggcccacacaattgttgattgaccactgacattntggctatttcagaaaattactactgaaactgtgattccaactcagtgtaattgttaaagtagaaa

SEQ ID NO: 55818 - DNA, 570 bp, Homo sapiens
  misc_feature 16: n = A,T,C or G
cgggcccccccctcgngggtacttctagaattaattaacgcgggtccctcacttcatgaaggtcacatgaaaatgttaacttgtcaatgaggtcttgcctaactatcttatataaaataaagcctccatccccatccatagcactccctacccaccttactctgctttatttttctccataggacttatcgccatttgacataccatgtgtctgctcacttatttgttcactgtgtgtcttccccctcattgggcagaaagagactttgtgggttcactcattgctttttccccaggtctagaagagtgcctggcacataccaagaagcaaggaagagctcaacaaacatttactaaacaattgaatgatgaataagagaattattgaaactaaaaaacataaaattgcccaataaaaattcaataacacgactgaaaaatatgtcaaagaagtctcttggaacaaagaacaaaagtttgcaatacaaaatgtgaaataatgtaagctgagacatagaagattaatccaggatagccaacatttacttcatgaagtttccaaaaaagaga

SEQ ID NO: 55819 - DNA, 592 bp, Homo sapiens
  misc_feature 9: n = A,T,C or G
acttctagnattaattaacgcgggatcctcagtgtaaaaagaaccattatgtacagaggaacagtagcagatagagtcggagtttcaccatgtttgccaagctagtctcaaactcctgacctcgtgatccgcctgcctcaggatcccaaagtgttgggattacgctgcacccagccttttttttttttttaataatggaagcaagaagacaatggaccaaaactttttcagacacacaaaagctgaaaaaattcatcaccagcagttccaaagtatgttaaaggaggtccttcagctagaagaaacatgataacagatggaatctatatgtatagctatgaatgaagaacatagggaattgtaataatgatatgtcagtaaatatcaattctttttcttatttttaagtcatcttaaaaggtcaattgactaaagaaaaataatatcaatatactattgggttcataacaaatgtggaagtaaggcatacgactaaagaaaaataatatcaatatactattgggttcataacaaatgtggaagtaagacatgacaataatacacaaagtctggaagaggggaacttgataaa

SEQ ID NO: 55820 - DNA, 540 bp, Homo sapiens
  misc_feature 70: n = A,T,C or G
cccccctcgaaagtcttctagaattaattaagcgggttaaataagcttgttgttctcatacttccatggngaaaaaattgagcatataccccaagatatttgtttataaattttatacacattctactacactgatagtgtatacatttgtaaaatataactatttttagtgatagcaatatcaatgcacatgcttcattctttcgaatatcttctaaatgcattcattttaatatctggtattaaatattgttatacttgaaaaagtaagaagatcaaaatggaagacacatgattggccatgcttactgaaatacgacactaatttttcaacctgattctccaactatgcaaaagtttttgtgaaaattcagccagtaaattttaatctttaacatcaatacattgtttctgtattgaactgtagatcagaaagttctacagtttttggtactttctaactttattattattattactattatcatcatcatcattttgttcttgttattaccatgggtgagataatttttttttgta

SEQ ID NO: 55821 - DNA, 548 bp, Homo sapiens
  misc_feature 507: n = A,T,C or G
gggccccccctcggaagtcttctagaattaattaacgcgggactaaaaaaaattagaatgttgagctaagacgacaagatgaaaaagagtagtacttttagtgcaggagtaaatttcagaattttagagattgtatttttaaaggtaaatcactacctgtcctgttaagaggaagctaagacagatactgtggttctcacctgtaatctcagcactttgagaggccaaggcaagtggatggcttgagcccaggagcttgagaccagcctaggcaacatagggacatgccatctctaccaagaaatacaaattaaaaatttagccaggcctggcggcatgcatctggggtgctaccacccagctactccggagactgaggcaggaggattgcttaagccagggagatcgagctgcagtgagccataatcatgccactgcgctccagcctgggtgacagagcaagaaactgtctcaaattaaaaaggtgcgggaagataagtttgtgtntatacctttgtaaatataattctgaaactgtagcgtatttt

SEQ ID NO: 55822 - DNA, 428 bp, Homo sapiens
cgggccccccctcgaaatacttctagaattaattaacgcggggggactttggaaaatatttttttcctttgcattcatctctcaaacttagtttttatctttgaccaaccgaacatgaccaaaaaccaaaagtgcattcaaccttaccaaaaaaaaaaaaaaaaaaaagaataaataaataactttttaaaaaagaaaaaaaaaaaaaaaaaaaaaaaaaaaaaaaaaaaaaaaaaaaaaaaaaaaaaaaaaaaaaaaaaaaaaaaaaaaaaaaaaaaaaaaaaaaaaaaaaggggggaattttttggtttttttttaaaaaaaaaaaaaaaagggggcccccccggggggggacccccaattcccttaaaaagggggaaatagccccccccccggggccccggtttaaaacacggggggggggaaaa

SEQ ID NO: 55823 - DNA, 514 bp, Homo sapiens
cgggccccccctcggaagtcttctagaattaattaacgcgggatcattctgaggcaagtgttctgcccaatttcccagtttccacacaggcaattttccctgtgggggttggcttaataagacatctttttttttttttttttgacacagggtctcactatattgcctgggctggtctcgaacccctgagctcaagcaatctccgactgcctcagcctcccaaagtgctgggattataggcatgagccactaagcccagatgagacatcttttattgactatcttttcttccttagcttccctttgttctttgtacctggaaataaactacttgtatttgaactctcatctcacaagtcaccttggggtgagggggcaggcaggagtgcaggaatgaccaaaactgagacatcactgaagttaacacacacacacacacacacacacacaggaaaagaccaacagatctgactacataaaaattgaaaatccttaaaaaaaaaaaaaaaaaaaa

SEQ ID NO: 55824 - DNA, 500 bp, Homo sapiens
ccccccctggggcgtacttctagaattaatgacggcgggtccattataaaacctaataaaattttattatgacaaacattggggcagctgattaacactggttggggccttgcctgcagttaaaaaaataaccttctagaagttaaatttggttccggattcttttccccagaaaaaagaaaagaaaacctgctttcttgaccctccccccatccccccgggggggcctttatgtttaaatgccttcagtcacagggacagacggttccctaaatgtgtcctccctaggttttttttttaccaaaccttaaaaaagagagggaaagagagagagcaaggcagggtattcggtgggggcacacttccctccacctaagggaatgtcaaagtttcattacctattttatttccctcataaaaaaaccctttttcttttttgatcaaggctggctttgaagggttgactgttgtttcaagacctaaaaactctgaaaatggtt

SEQ ID NO: 55825 - DNA, 563 bp, Homo sapiens
ccgggccccccctcggaagtcttctagaattaattaacgcgggccttctctaagatggacacatgaattgcaggaaaaggagttctttttctactggtgttgctgacagctaccatttctgcaacaaagattatctgcagcagaagagaataaaggcacactgcaaagagaaccagtgcctaaagatgaagatgaagtgggtactctgaagacaagatttgaacatctgaaccagcaatacttgattctagctccattcgccctttccagttaaataaattatcttttttgctaaaaacagaattggatttgtaaattcactgggaatgaaaagtgcctggctgataaaaacttatgaattcatctaaactctttaccttaggaaactaaataacccagcagagatatgaagattttaaaaaagcaatgcaggtaagtaatgtattatttatttatatcagtaaagctggtaacacagagatagtgctaatccccttctctttccataatttgttctaggttacagggttttcaaatagcagaattaaaattcaaaatttgga

SEQ ID NO: 55826 - DNA, 363 bp, Homo sapiens
  misc_feature 37: n = A,T,C or G
ctgggtaccgggcccccccctcggaaatacttctagnaattaattaacgcgggggggatgttaaatcttgaaaaaacacatttgcatgtaaattctttccagtgaaataaaagaatcttgcatgtaaatctttttctgttatgtgcaaaaatatgaaagaaagacgtgttatatcacatcttgaataatgcatttctattgtttatattcaatgacatgaacaactaaatatggtccaaagagtattttttattaatggttcatttcaaaagacattggattaagaccggattaatttccatggacgtgtgtgtgtgtgtgtaaataaagtataattgggacacactaaaaaaaaaaaaaaaa

SEQ ID NO: 55827 - DNA, 476 bp, Homo sapiens
ccccccttcgaaatacttctagaattaattaacgcgggcttacctagtctattgccatctctcagggctcatggttcctttgatgactgatagcaatgtcttcatatattttgtcttcataaattttaatgctccatatattttgtccattttttgttgttttaagtagaaggaaataaatccagtgcctgttactccatcttggccagaagtctcaagacaattttaaaacatcaatttgtctacaagtttcccaaagatttgctgatctttacaggtaaaactcttcttcctccccatatgctggctcacttcaaaatatttctgagaaaccagtcccttatatctgtgtagcacattagagctacatcagaatttcatatattgagataacattgttttctttggaaaaaatgtgattgtgtcatactgattataaatccattttatgtgaaaaaggtccctgcccaaaaaaa

SEQ ID NO: 55828 - DNA, 422 bp, Homo sapiens
cgggccccccctcgaggtacttctagaattaattaacgcgggccggaagacagcgacttgcctaaataaaaaccaaatgtaagatataatatcagctagttcttcaattcaaagaaaaaacccagaattttctatacagctgtggtatacaaaataactgctagaaaatgagccacagggggctttctgtagaacttgttgaatgaatacaaccaccacaccactgtatggtacataacataaaactcttttgtgagattctttaccaaatactgacattaagtttctgtttttaaagttgtaaattgcgcccttgaaattcttctcatactcagtattagaaaaaaatgaaaggacacttgtcagaagcaattctaaagttacttaaataagtaagctggcttaactaaaaaaaaaaaaaa

SEQ ID NO: 55829 - DNA, 554 bp, Homo sapiens
  misc_feature 24: n = A,T,C or G
gccccccctcaaggtacttctagnaattaattaacgcgggtcctcaaatcttctgcaagagaggtaatttcaaaacaattttggttttctcttttatttaatatatgctttctgtctctcttttctgcatgtatacataacttcagtgaccaatgtctttatagtccaccatgcttcttgtgctaggtgaattgtccactaggcttaatttcttgaccttcagtaattttcttgactttcttcaaaattcctggttttcctggctactttatgactgtggagtctgaaaaatagataaagtacaaataaaagctgaacaggtcaagttctaaatgcctggtttattttcaggatatctgcacgtttgatgcttttcatggtccggttgtccaccaagacccatactatttataatatgaatgacatttgagtaaacaacaaacatttagtaattattttgaattagaaaatattcaactaaaatgtattgttggtagtattaaagaagatacaagataaattctgagtacaaacatatgtacaagtgtatccac

SEQ ID NO: 55830 - DNA, 431 bp, Homo sapiens
cgggcccccccttcggggtacttctagaattaattaacgcgggggaagaggaaggcggcctagtaggcacctggggcccgtaagcgctgctgtgtgcctaggcagcaccgccctacccactgagggccaggcacgcaggtcctagtgccactgtgcgtgtgctacgtagagccagcacttcctccatgaatgacgccacacgcctgaaagggggacagccacaccctcaaggggaaaaggcctcttgaactccccacaatcagtgtgtgccagcagccctgggaggagtgatctgtgtgtggcaagtaacccagcgtgccactataacaaagaagcctgggcattgtgaccacaacttccattttttttttttttttttctttcctgagacagggtcccgctctgtcacccaggctcaaaaaaaaaaaaaa

SEQ ID NO: 55831 - DNA, 520 bp, Homo sapiens
  misc_feature 23, 34, 115: n = A,T,C or G
tgggtaccgggcctcccctcggngtacttctagnattaattaacgcgggaccttgtcttttttttttaaattttctttccaggtagagtagctctttgtacataaagaatacttngaaaaattaattgtatgatgtatgagaagacagagtctcctagttttgtatcttgttgtatgactgccatgagttccaccagaaagccactctattttggtctctgtgacattttaaatgcgtgacagaagtgagcaaataaagtgaggaagaaatctaaaaaaaaaaaaacaaaaaaaaaaaaaaaaaaaaaaaaaaaaaaaaaaaaaaaaaaaaaaaaaaaaaaaaaaaaaaaaaaaaaaaataaaaaaaaaaataaaaaccccctaaataaaaaaaaggggggcccccccgggggggggaacccctttcccttttaaaaggtaattttttccccccccattgggctttttttaaaaaacgttatagcgggaaaaccccgggggttccccattttaaacggtt

SEQ ID NO: 55832 - DNA, 611 bp, Homo sapiens
  misc_feature 595: n = A,T,C or G
cgggcccccccctcgaaagtcttctagaattaattaacgcgggatctttctaaggtagataatgccaaaccattttctaaagcagttgtacctatttatttttcttatgttttgtgaaatcaaggggaaatgtttttctttctctaactctagttgaattcatgcgtcttgataaagataaattacatttcataaatgataatgttttatttttgtaggactttgctgctatttgagcacagtgatattgttgtcatttcactactcagtgttttgttcaccagttctggaggaggaccagcaaaggtagaattttccattatcagttacttggaaatggaaagtatgtatgtcacatattatccaaaggaataaaatcttatctttcaccatttaaaagaatgcaggaggctgagcgcgatggcacacgcctgtaatcccaacactgtgggaggctgaggtgggcggattacatgaggtcaggagcttgagaccagcctagccaacgtggtgaaattccatctccactaaaaatacaaaaattagctgggcatggtggtgggcacctgtaatcccggctactctggaggctgangcatgagaattgcttg

SEQ ID NO: 55833 - DNA, 604 bp, Homo sapiens
cgggccccccctcggaagtcttctagaattaattaacgcggggggggatatgtgttcacttagcatggacttctgggaggggccaaggaagggcggtctggagttttattgaatagagcagtgtgtattcggctgcctgcctgcccgcctgcttgctctctggctgtgctcctgcttaaagaaatcagtccttcctttccgacttagtcctcgggaagaagtttcagactacaaggtatcattggaacatttcaagatcatcaaatcaaattccacagggattggtgaccaaccagaaggctcagacatctgattgctgacctgtccagacatcatctggtctccctgaacctgaaatcacaccatggatgattttgagcgtcgcagagaacttagaaggcaaaagagggaggagatgcgactcgaagcagaaaggtaaggatctagggtgaaaaatacttgtattcccttattaacaaccttggtttcaggcctcaaagaccatccttttgaaaggccaaatgtggtcatatcgcacaccaaactgttcgcaaaagtagttatggaaaatttttctgctaagactctaaattaagcatttaaa

SEQ ID NO: 55834 - DNA, 511 bp, Homo sapiens
  misc_feature 433: n = A,T,C or G
gggccccccctcggaatacttctagaattaattaacgcgggcatgtaacaaatatgcacatgtaccccctttatctaaaaggaaagttgaaattacaaactaaaaagtagccaaaattagattattttacatttcaattctacataagacaaaaccaaacacataattttaattgtattgtttggtaaaagatgaaaagatcctaatgccaaatctggtaaagaaataacaaaaagagagttactgaccatattggcttatgaatacagatgcaaaaattctgaataaaatattcagtagcatatgaaaagaatgtgaacatgaacagtttgttttagaaaggccagaatgagtttgatcagaagatcttttagggtaataaattaaaggaggaaaaaattacatgagtatataaatttccataaaaagacanaaatgaaataacataaaatttaccgttcattctaaaatatatttctatgaaagtgggaaaacaggaaagtgctctaag

SEQ ID NO: 55835 - DNA, 600 bp, Homo sapiens
  misc_feature 15, 28, 44: n = A,T,C or G
cgggcccccccctcnaggatcttctagnattaattaacgcgggngaaacccagatattaatgtttttgaaatttgggacatgcaagggttattttcagaaagatagtaattttctataatacaagctatgtatgcaactgatggtaatgaaattatagaagtgggtatttctgaaacatataatagactattacaattttgtgttacctacccgcttaatatttatttaatttattgttaagcatacatgatgttaactgattgaataaatagctatcatgtaaaaacaactaaacatgttactcgaatagcaataatgtaacaaatttggatctttaattagcagggatttatagatacatatatataaatatgcaactttatgcataattatataaatataaatatatgcataaaattaaatgtataagcaaagtatatcttaatcataaagtttgggcttcaaatttatatgcaatatgtatattctttaaaatattatatatgaaacagatgactatatattaggtagaatcaatataaatgagaataaaaattttatgcattaatgaaggtattattgatttccagggagaacac

SEQ ID NO: 55836 - DNA, 370 bp, Homo sapiens
  misc_feature 23, 36, 93, 94: n = A,T,C or G
tgggtaccgggcccccccctcgngggtacttctagnattaattaacgcgggctggtccttgaaacattcaagatttattatctaaaagatatnntagaatcataggaagaaaaacaatttataacaacaatatgaaccactcaatctcagaatatgaaaccttctgaggctttgataaagactttgtctaattgattgtgatgcatggttattgaatgatgctataatctgtgtcctagcaaaattcatatgttgaaatcctaatcaccattgtgatgatattaggaggtggggcctttagaaggtatttaggtcatcagggtagagccatcataaatggaattagggccattccaaaaaaaaaaaaaaa

SEQ ID NO: 55837 - DNA, 476 bp, Homo sapiens
  misc_feature 22, 28, 29, 170, 171: n = A,T,C or G
cgcgggcttattcaaaactttnaagggnnaaattaattgaaaactaactagtaaacaaagctaacactggtagattttaatggcatgctgtataaactcctacatggaacattttttaaaaggcaaataattaacattataacttcagaaatatacttaaaacacatgtnnttgatggaaaaatatcatttctaactttaaattcacaagaattcaagacaggaacactcagaaaaatgtacagaccacgtataatgagaaatgaaaatgagaaataattcacgtgatcactaacctgtaagtgcagccacttttgcagcaaccttttctgcaaagccaattctagtatttaaacctgtaccaacagcagtgcctccagctgcgagctcatagattcttggcatggcagcttttattcttgtcattgcatattttacttgttgaacataaccactaaattcctaaaaaaaaaaaaa

SEQ ID NO: 55838 - DNA, 391 bp, Homo sapiens
taccgggcccccccctcggaaatacttctagaaataattaacgcggggggaggtgtattgaagtcctccagacaaccctcagatttgatgatttcctagtagaactcacagaaataaagagctgttatactgtgaaaaaaaaaaaaaaaaaaaaaaaaaaaaaaaaaaaaaaaaaaaaaaaaaaaaaaaaaaaaaaaaaacaaacaccaacaaaaaaaaaaaaaaaaaaaaaaaaaaaaaaaaaaaggggccccccccccggggggaacccccatttcccccaaaaggaactggaaaaaccccccccccccccccttattttaacaagcagaaaatgggaaaaccccggcggtccccaaattaaaaaaggttcgaaacaaatccccttttc

SEQ ID NO: 55839 - DNA, 509 bp, Homo sapiens
gccccccctcgaaagtcttctagaattaattaactgaaagactaaaaaacttagtcctcaggaaacttaggcatacttcaagagctactggcagttttaataaagtacatttctgcacctgctaccaccctcccctttacctccccatagtttcatcaaaggggttaccttgattgtctactttgtcatcatctcttggaggtgagtactttggccttcttggccctcgttttggcagtcgttttctctttagaacatcacttaatcgactgtccatgggaaaatatgagataagtttagcaattaccactgttttatatcttcactcactgaaaaagcaaactaaaatggcagaaacagggagtaataaaatactgtcaggccgggcgcggtggctcacgcctgtaatcccaacactttgggaggccgaggcgggcagatcacgatgtcaggagatcaagaccatcctggccaacatggtgaaaccccatctctactaaaaatacaaa

SEQ ID NO: 55840 - DNA, 574 bp, Homo sapiens
cgggccccccctcggaagtcttctagaattaattaacgcggaatgcttatatcaatacaaacaaaagaagaaaatcaaatgaaataaacatggaactcaagggattagaaaatgaagcaaaagaaaggaagagtgccaacaaatacacaaaaacttgtgcaacttttttctagaaaaatacaccaaatatatagaatagaaaaatttcttaaacttgactcggtagaaataaaaagtttaaacaaaacaaaaatccaaagatgaaatagttatcagagttaatcttaccaaaaagcaccagtacaagccttcaaaaaccagataacccctgtattaatcatgttttttactttatctttcatattttgatattttgggaggggtgttggagggtgtgcttatacatccagagagagactgcccctctcaggaccagctaattccttaaggtggtaaacttacttgggaaaacatttctcatgtgcaagccaaccgctatctaacttttacacatagaccattaattccccactactaaatcaactcaagaccatataccagacaacaacggaca

SEQ ID NO: 55841 - DNA, 611 bp, Homo sapiens
  misc_feature 25, 38: n = A,T,C or G
ctggggtaccgggcccccccctcgngaatacttctagnattaattaacgcggggatatggattgttatgggaccggaaagtcaggatttatgaggatttatgcaagatttttgtgttttttctgctcaaagtgtactccctggaactggtagcattggctttctcagaactggtgcagattcccagaccccacctactgaatcaagagtccacgtttcaacaagatgtccaagtgattcaattgcacattacagtttgaaaaggccccgtttaatgtgtatagcacccgagtatcacagtgccttaaagcttgtgtttgctcctcatgacccaagaataagcccaaactccaaaataaagtttgaaggcctctgcacttcggtctctgcctccctctccatctttgtctcctaggagttctccctttgatctctctactgcagccatgagggcttcttttgctgcattgagcaggccacataaacatcagtgtgaaatttccttggcctggaatattctccacaaaatcatccccttttgttgactcctctgttattcctgcaacaaatatttagggagaatttcctgtgccaggcactattctgggaatg

SEQ ID NO: 55842 - DNA, 593 bp, Homo sapiens
ccgggccccccctcggaagtcttctagaattaattaacgcgggtgtaaggtgaaaataaaactgtaaattaggtcttccagatttctttctgctctacactcatcttgaatcactagttgtgccttttgatatcaaaagaaggatgtagagagtgactgaagaataatatctgggactactttgcaattgcaaaagtaaatagaaagataaaatattaaaagaggagcagcataaataacattaacaaagagataatcaagaaattacaacaggaggagaatatcttaaggttacaaaccttatcttaaaaaaacaaagtgacaaaaatttaaaactgacacagaaaatcatggtggaatcaagctgtattttgaaagtgaactgtataaaatattgtcatcacaagaaattcccttaaccctaagatgaagtaaaaaaaaaaaaaagtgttgatggttttagaataatttgctgtagacgattacagtttatttaatgaaatgaatgtgttgaatatttaagccactttattgaaatctataatcaatatttagttagattccactcacttttatagacttaaagaaactac

SEQ ID NO: 55843 - DNA, 507 bp, Homo sapiens
cccccctcggaagtcttctagaattaattaacgcggggtgtggcacttatatcctttgatgctggttttgtgcctgtactacagttctcatggcaatggtttcatggtttcagtctcaaaatatggggtttggaaggaggcttggtggagagagagagagtagagagagagagagcaaagaaaaaaggagggaggagagagaaaaaggaggggaaacaaagaaagaaaaaaataggcttccatagtgcagatgactttgttttctgttccccttaaaacttggattctttaacacacttcctgttctttttctgtatgtataatggtaaactgccagaatactgatcaggccagaatgatgtttgaatctttctctgtaacccaccaacccacacgcatcctcccattttgttttggggaaggaagaaatgtatccacgcccctgtctgtcccttcaccagttgcatcagtgaggtggagactgtcccccctgggcagtctgctcgc

SEQ ID NO: 55844 - DNA, 609 bp, Homo sapiens
  misc_feature 28, 486, 533: n = A,T,C or G
ccgggccccccctcggaagtcttctagnattaattaacgcggggaaggtaatcaagcatacactttaatacaattaaagaaataagccacagataaataaaaccatataaacaatctggattactttttatcatcatcaattaacactgcaaacaggtttatttctagacttttatgtatcatctgcaaaatcctaaagcacaaaaaattataactgtgtatcagaatctcttttggtccatcttttatcattatttttactagttgattagtatttgctaccaacttacaaaggccaatggtattgtatatttgttaagtacatttttggttccaattagaactaaaatttgttagtgtttatcactctagatgatgacaatttaaatgaaactaaggcaaatgtatcactcttttaaatgtgaaatgccttttcagtgatctaagttatatcaacattagtatggattccgaaccaatggtccnccaaagcctaactcttaaaacattatgcttgtgtaatttaaaacatnaccgtgtaaaccagaattttacaattggtgcatgataaaaggcataaaactttcgcgtaattggaaagctttttga

SEQ ID NO: 55845 - DNA, 629 bp, Homo sapiens
  misc_feature 10: n = A,T,C or G
cccccctcgngaagtcttctagaattaattaacgcgggggataagttaaacttaaattttactctattaaccaatatgagtgtatttctgaaagcatagttacgttgaaataaagttttaaaaagcgaaaatatgaaagaagaatcagtatgaaaaatatctatactttatgtatattttatatatgcatggccactctaggaatgttttaataaggcagaattttgtttaatcatgatatgtgttatgataaaatatttgctctcaaccaattctaaaacataaaaggaaatttctcactttctatattaaaagtcaaaatataaaataacaaaagaaagagttaaaattaagcaaaaaatatgatacatgaccaaaccgtgtaacaattatatatacccaactttagtaatatatttgtttacatttattgtgcactctctctgtgtgagaaattatatggaaattatatgttcatttacttctcactgtttctttgctttgcatgtggtagtaactgtctataaacttgagggtacacaaacacttcatttatagctttttaatttgaactaattttagacttatgaagaattgcaaaagtagcacagagatttctcttatatctc

SEQ ID NO: 55846 - DNA, 436 bp, Homo sapiens
  misc_feature 77: n = A,T,C or G
cgggccccccctcggaagtcttctagaattaattaacgcgggaagttattttcctcataaccttgattatagtacangaaatatttggaaaaaaataaatttagacctagctttcaccctgtactcaaagtgttgcctcagatccttaataaataagacagactccaacttaataatatcccctaaattgtgctatgatttacctgttaaatattcttttaattatctgactaaaatacatgggttttttttatttttgtgctcaccatagttataaatttcttttttcattttccccacctcttttctttaacatctcattaaaagtcacatactttcctaaatggagattaagaatagtaatattataaataaatacaacatatgctaaatataaggcatggtgattttagttttatgcaaaaaaaaaaaaaaa

SEQ ID NO: 55847 - DNA, 595 bp, Homo sapiens
  misc_feature 28: n = A,T,C or G
ccgggccccccctcgaaagtcttctagnattaattaatataaaaactttccaataaaagtagtaaatattttttttctttctttaattttcctttaagagaaccatttacattttataaagaaattgtgccagcaatttaattaggtgatttacctttattattttcttttattctgtcagcaaccccaagatattagtgttttcaccattttatagaaagaaactgaggatgagtgaagttaaataacttctccaaggacaaaagttaataatcagcaaaagtgggaattgaattcatttctgctgactctacatgtttggattatttgggatattatttatcctgaccttaatctaaaagttctatccaagcactatgttgggtgatatgttttgagagggatcaactcttccccataataaattcttagtgtaggcctgcaataggtaggctctggcaaggccctgtctgtgcatggtagcaaagcgaactatcaggggaggtatgggaactttaatgctgggacaactgtagttcagtcatctgatatgtaattctgacccaatggggcccatctaaggtttttagaatta

SEQ ID NO: 55848 - DNA, 337 bp, Homo sapiens
ccgggccccccctcgagggtacttctagaattaattaacgcgggcactcatgggttctattgtccatcgatgatttgtgtctaatgatgtttttctctttgtattattatacatttctgggctgacgttgtttcttaccaaaagaggtctccacctctgtttccatagtaggatggatgaccatcagtgtaatcagaacaatttattcatagagcacggtcttcctttctgctaaagtaaattatatgtcttatttgctgcttgtatcacagctttcttaaaaaaagacactacatttcatattgaaatatagcatacctacaaaaaaaaaaaaaaa

SEQ ID NO: 55849 - DNA, 606 bp, Homo sapiens
  misc_feature 14, 27, 584: n = A,T,C or G
gggccccccctcgngggtacttctagnattaattaacgcggggataataaggatctggagccaaaggagaaacagaaactacttttaagaactttggagatccaagtttagtggactcttaagagcctgtattatttcttggatgacttatccagccctttgtagaatcagaactctcacaattttctttaaatcaaataaaacccaaggggttaagtggatctttaaaattatttccaggtcattctttcaataaacatttattggtttatttgttattatttcaacaaactatgtgacaggcaaacatgaactcatttctttctttctttttttttttttttttacctttcaactccttttatttatttacctatttattttccttaagcaagtaaatctccctatggattgttaagggccctgtgcatatttgcatgtagccaaagattcagtctcttgcaggaactctggttgtcaactggtgatcttgcctttgtcttttctcatagttctgcctgtggcgcctgtcactagcagtcaaataaggacaattttaccattctctcctgctgctctaattnttttttagtgccggtacatgaa

SEQ ID NO: 55850 - DNA, 423 bp, Homo sapiens
  misc_feature 36, 74: n = A,T,C or G
tgggtaccgggcccccccctcggaaatacttctagnattaattaacgcgggagggacaaagagataagacacanaatctatcttctaaggagcggcttgaaagagtgggagttggagccacaagcaaacagctgattatataaagtggtctgaggggaaaacaaaggggtcaattaaagcatacagaagacacgaaaagggttgaaaacaaatatagagggggggtgattcaaggaaggctttgagtaagatgcaaggcttgaggtgaatattgaagaataaacaaaagttgccaggcacggtggctcgcctataatcccagcactttgggaggctgaagcaggcatatcacctgaggtcgggagttcgagaccagtctggccaacatggcgaagccccatctctaccaaaaaaaaaaaaaaa

SEQ ID NO: 55851 - DNA, 375 bp, Homo sapiens
cgggccccccctcggaagtcttctagaattaattaacgcggggggattacaggcataagccaccacacccagccaaaaacattctttataatgatacaagtaatataccagacaagaaattactcagtgtactatgtgagattaaaaaaaaaaaaaaaaaaagactggaagtggaagtgggagtacttcaaattcttgtctgatgaggtaaagattttaacttggtggaaggaatagaaatcaaggatgtgagaaatttttcattaattagaatttcgagattcttcttttaagaatgcagtgatgctagtgaagtggttgagtgaaccatctttcagctaacaattataagatctggacaaaaaaaaaaaaaaa

SEQ ID NO: 55852 - DNA, 456 bp, Homo sapiens
ttaattaacgtcgggggggcagagtcaggtatattgcacctgtctttgttctcagcactgcactccagcctaggtgacggagaccacgtctcaagaaaaaaagtctgcagagaaactgctgataaataaccttacattttcacaacgtttgccagtttttccaactaagtccttttcttctccacagatattttttaccgtcatttgctttcttgtaagttgggaatattggtaagatcaatgtatgttatattcttggcatatctgtggtgtcatttcataataaacacaatgattggctgtcaaattcaatgacaaaatgattcacacttgacactgtgccttaaaagggtaacatcaacatctgctttacttgtgtggatgtgatggatatgcactggggatgaaaaatggtgatgaaatgtgatactgcctatgcatggagtgtgaaatgct

SEQ ID NO: 55853 - DNA, 584 bp, Homo sapiens
cccccctcggaagtcttctagaattaattaacgcgggctctgtacatattttattaagacccaatgcattgccctttggctcacatttcaacaaaccaactttaagtttgtagttgttgcttttaaaggatagaacacattggattttaaataaatatttgcttaatctgaagttttatccagttgcttttctagaggagaacaagaaaagaaaaattgtggaggagaaagagctctgaagataaaggttttctgatttagaataaagctcctccaaaggcctgaacttagttaagagtatggaagatgcccaccatgaggacctcatctacccattcagttcataacaagcaccatcctctgtattcactttccaaattgtagataactctaagttcaaaacttgaaaagttgtggaaaccatttatggcagtgacaacatgctgattcttcacaacttcagcatcacccgggaaggttacattctggaatcatacacgggcataccttgtttcattgtgcttcacagacattgtgtttttaacaaattgaagttgggtggcaactctgcatcaagcaggtca

SEQ ID NO: 55854 - DNA, 572 bp, Homo sapiens
  misc_feature 531: n = A,T,C or G
cgggccccccctcgaaagtcttctagaattaattaacgcggggatgaagcttcaaaaactggataatgattgttataggttggtatcatcatattattcttttaatacattccataaaaatatgaccaattacacattttttcctgattgtatatttttggaacacattaaataaaatagcttcagtagtttggcttcctttgaaaccagtctagaagcttctattggttaaaaagctatagatattaaaaatataaagttaataaacatggtatacatcttagattaatcacaaaataatacaaatggaatgtatttctttcaagccagatgaaaagagaagtgaaagaaaacaatccaacagaagccaggaaggaacaatgcaatagaagacaggtaggagaaaaaagaggcaaagaaaaaggaaaaatattgtaaatagaaagcccaaaataaaatggcagaaataaatacaaatatgtcagtaattgtaataaaataaaacttcatgagtcttctgtcaaaagacanaactattcaaaattaaatttaaaaagcaatatatgtagtta

SEQ ID NO: 55855 - DNA, 584 bp, Homo sapiens
gggcccccccttcgaggtacttctagaattaattaacgcaggtcccttgtcattacttagggtccattcagaaaatctagggtattatttctactttaaaatcagctgattggtaattttagttgttctttgtcacgtaatctaacaaaatccaccatatatttgtaaattttaaaatgtacttataaataacttatacatccaagaagaaataataagggatttaaaaaatttgtaaactttatttctaataacaatggtatatgttaaatgttaggaatgtagctaaggtaaccctttgtaggaagatgtataatttctaaatgcccatatcaaagaaaaacaaaaggcaaaaaaaaatttaaaagctgggaaaacaactcaaataaattagaaaatgctgatagtaaagagagggacacaaattgtgggaatagaaaacaaaattagaatgaaaagtataaacagaaaaattaacaatttgaaaacaatataatacacatctttcaagcaatattgataggcacaaataagctatttggaatgagaaatttggcataaaatgtttgcagctgaagtttaaa

SEQ ID NO: 55856 - DNA, 500 bp, Homo sapiens
  misc_feature 27: n = A,T,C or G
cgggccccccctcggaagtcttctagnattaattaacgcggggtgggaggatggctattgtcaggagactttacttcctctctggcttttggcaggaagccttagttgttaatcatgtggacctctctgtagagctgtttgggtaatctcaggacatggcctagagtgagtagtcccagctacttgggaagctgaggtgggaggattgcttgagcctggaaggttgaggctgtagtgagccgtgatcgtggcatggcaccccagcctaggtggcaaagtgagaccctatctcaaaaaaaaaaaaaaaaaaagaaggattagatgatgttgaaggtgaagcctgctataggggcaggcaatcgacatcagttaatctttttcgtattctaattgcaggagaccgatgattaacagcaaaaacaatagccaacgccatagacatttcagctggttcattttacacaattctgactctgctcagtgggtgccaaaactgttgc

SEQ ID NO: 55857 - DNA, 603 bp, Homo sapiens
cgggccccccctcggaagtcttctagaattaattaacgcgggcttgattgtaattaatatatattaagatctagaatttctatttagtgcttttgcaaaactactgttacatttttatggttttcaatccttgattgaagtatttaatattgtctttacctcttgaattaaaaaagcatagttacttagaagctagttgtctgataattctagtatctgaacccattgattgtgagacagatactgtacttaatgaaattgtagaaataattcgagttctgatatgatgttatcttgctttagggaagattaccatttgctctgacaaatgctaaaagtcagtaacaggacaatctctctgtcaggggttgaagttatctgggttaggctggccaacatggggaaatcctgtctctactaaaaatacaaaaaattagctgggcttggtggtgggagcctgtgatcccaggtactccggaggctgaggcaagagaattgcttgaacctgggaggtggagattgcagtgagatcacgccactgcacttcagcctggatgacagagcaagactccatctcaaaaaaaaaaaaaaaagcggccgcca

SEQ ID NO: 55858 - DNA, 592 bp, Homo sapiens
  misc_feature 24: n = A,T,C or G
gccccccctcggagtacttctagnattaattaacgcgggtccctttataactcacaaaacattctatcaataaaatttgatacttgcttttgtatattttttacttcctcctgtgtttacaatagtccctggaattgtcaacaagtattaggttgaatcccagattcctcaataataattagacaagcctaggaggttttaacaacctcaaatttctttgtcggtcaaaagtggttaataatacctattttgcaagtttgttgtaagtctaagtgagataatacataagaaggtctaagtctagaccttctatttcttaatatttctctccctcccttgtcccctctcttttatatacatgaatttatgtgtgtatacacacacacacacatatatacattatatctattgatatatatagatagaataagagaaaggcaggagtgaaaggaaagttctaacataattttgatcagcatctctaaaggaaaggagaaagagttcagacgcaacacttgaacaaatattgatggatattttttccaatctggatgacacaagaatctcagagaatcccgcttagaaaaagtac

SEQ ID NO: 55859 - DNA, 594 bp, Homo sapiens
  misc_feature 28, 571: n = A,T,C or G
cgggcccccccctcggggatcttctagnattaattaacgcggggggttcaaatcttagctacagggttgcaggttacatggccttgggcacattccataacctctctgtacttcagcttgcttatctggggagaataatagtacctaccccaggattgctgggaagacagctaatctaatatacttggaatactttttcccatctgattttgaaggttttgtttgtttgttattactcccccctgaacaactgaattaagtgtctttgtgaaaactgaaagcaaatggaaaatttcttcatgaaaattgaatacccttcacctacttgaaaaaggttaattattcaagcacttgattttaataaagccagtgtgtttgcttgtgctcatgctagaacagacagggagttactctctgttttcgtcctggaagcctgcactttggtttggtcaggctgacctcgctggtctcaattaagtcctccccacaccctctcagactcctgacagagaaggagcaatccttccccctgaagtcagcattgtcacagaaggaagtgggaagggagggnaccacccgattaaactgaatgac

SEQ ID NO: 55860 - DNA, 607 bp, Homo sapiens
  misc_feature 14, 27: n = A,T,C or G
gggccccccctcgngggtacttctagnattaattaacgcgggcatgaagtgattactgaatttattctaaactttttcttcatccaataagatattcatgtgattattcttttttagactgttgatgtggtgaattacattgatggcttttcaaatgttgagtgagccttgcattctggggataagccccacttgatcatgccatattattaatatcttttaaatatatttttggattcaatttgataatattttataagatttttgtgtctgtgttcttaaaggatattgggttgacattttcttaattgtaatgtctttggttttattgggtaatgccaatctcataaaatcaattgagaagtgttccttcctcttctttatctggaagagattatgtaaaattattatttcttccacaatgtttggtaaacttcatcagtgaaaccactggggcctagagaattctttttggaaggtttaaactacaaattcaatttaaaagttatacatacatatatatgaaataaatcattgctttaacataaacttttttcttcctgaatgaatttggtaattttttttaattttaaaaattagtgcattt

SEQ ID NO: 55861 - DNA, 627 bp, Homo sapiens
  misc_feature 36: n = A,T,C or G
tgggtaccgggcccccccctcggaggtacttctagnattaattaacgcggggggaatgagtgaatcaatgaaggaagaaacaaacagatgcacgagcagatggagatgccagtcatttctgcggtcacagaatccctggacttaagcagaatctggaaagatctgttctcaaaggctctaatgctataggctgccacaaatgacaccaagggtggttaaaatattttaccctctttctttttcaaagctgtcacacttttccttcctgtagacaaagcaaaagctaacgattcactaaacaaagaaatatttcctgactggccccctcactgtggacctccaggaaacaatgatttcagaggcatgagcttagctgagaaagtgagtgctacagacctctccagagaagaatcgagctcatcccaggcaaggttcatttcaagatctacttcaactgtcacgctgccctctggggatatctcacaggttcatcccaagactggggatgttggtcaggatgggaagcattatttccaaagctactttatagcaacatactaactgtactttctgggtaacttaaaaggcgccatttttgacctggcacttgaagatgccacgttgcag

SEQ ID NO: 55862 - DNA, 476 bp, Homo sapiens
gtaccggggccccccctcggagatacttctataattaattaacgcgggcagatcacgaggtcaggagatcaagaccatcctggctaacacagtgaaaccccgtctctactaaaaataaaaaaaattagccgggcatggtggcacgcgcctgtagtcccagctgtcaggagactgaggcgggagaatcgcttgaacacaggaggcggaggttgcaatgagctgacatggcaccaatgcactccagcctgggtgacagagtgagactccatctcaaaaaaaaaaaaaaaaaaaaaaaaaaggaggtgtattactattatttccattttacagatggagaaaccaagtctttgaaatcttgagaaacttgctcacagtatatatagatgttaagtggcacgtttggtgaatgaatccacgatgatgttccaagcttatgctcaatatttgaatgatacaggggacaagtgaagaggagg

SEQ ID NO: 55863 - DNA, 610 bp, Homo sapiens
  misc_feature 15, 28: n = A,T,C or G
cgggcccccccctcnaggtacttctagnattaattaacgcgggcccaatgcagacatgggaagtgtctgataaaactagagtaaaataggtgaaatcagtaactgttaagaattctcaacatgaaagtgatttaataggatattaaaataagtgcaatttattgatcatggttgcacttctcagatactttgtaaatcaatattagatatttgtaggagacatcatgagaaagaaatcacagccatttgtttgctttgtgaccttagacaggttttttaaagcttttcaacctcagtttccttatctataaaatggggaccttcatgcctccctcactggggttgtcaggattagatagtgtgcttggccagtggtaagaatgcaacagatgatagctattaacaactattgtgttaataataaaaacttacaatgatatgtagctaaacccatttgcattttaaaaatgttatttgtaaatagtatatttttatcccacgcctttccttcaagaatcatcattaactgccaactttgtatgaggtgtcagtgagatactctggggaagtcaaagaaataattttggtggttcatgcctataatataatc

SEQ ID NO: 55864 - DNA, 410 bp, Homo sapiens
  misc_feature 9: n = A,T,C or G
acttctagnattaattaaacaaaaattggaataaataatttaaaatgaaagtccaacagcatcttagtgataaaatacaagtatttcatgtttgttgatcatttctattcttcattgactcacctctatagatgttttgtgttttaattgtagtctacccatggtgttggaatgaatggaaataatgcagcagcagggaaaagcgtaggtaatctacagataattttgaaaacaatacaaggctgataattacataattatgcatccggttgaattttcaaagagaaatgggaagaaccttctctgtggcatgtacagagtaaattctgtctctaaatgctttttccaattaagaataattatgagaacggactgtaggacatatataaagaataaaaaaaaaaaaaaaa

SEQ ID NO: 55865 - DNA, 332 bp, Homo sapiens
cccccctcgaaatacttctagaaataattaacgcggggggaggtgtattgaagtcctccagacaaccctcagatttgatgatttcctagtagaactcacagaaataaagagctgttatactgtggtttaaaaaaaaaaaaaaaaaaaaaaaaaaaaaaaaaaaaaaaaaaaaaaaaaaaaaaaaaaaaaaaaaaaaaaaaaaaaaaaaaaaaaaaaaaaaaaaaaaaaaaaaaaaaaaaaaaaaaaaaaaaagccggcccccccccggggggaaccccaattccccctaatagaaagttaattaaccccccccaccggcccgctttttaaaa

SEQ ID NO: 55866 - DNA, 420 bp, Homo sapiens
  misc_feature 32: n = A,T,C or G
gtaccgggcccccccctcggggtacttctagnattaattaacgcgggttccattgtattagtttcctagggttgcccataatacaacaaaaattatcctctcacgattctggaggtcagtccaaaataaagtgccagcaggggcatgctctctctgaagtctctacgacagagtccttccttgcctctttgagcttttgttggctcctggcattctttggcttgtgaccccaccattccagtttctgtgtctgtcttcatgtggcctgaaacatattctgtctgtgagtcactgtatgtgtctttccgtcccttataaagatgctttcattagattcaggatccagcctacccagtatggtctcattttaaatcttaatccattgtatctgcagataaggtatttacaaaaaaaaaaaaa

SEQ ID NO: 55867 - DNA, 597 bp, Homo sapiens
  misc_feature 28: n = A,T,C or G
ccgggccccccctcggaagtcttctagnattaattaacgcggggatgttaagatattttcataatgtagttccatgtaagtcatccagacctgtgcttcccaattatttactcctgtaggtagcttgattttgttaattcttttgtattaataaagagataagaggtgagagaacagacttatttttattatggtaaaatatacaaaacacacccattttaagccatttttagtgtatagtccagtgacattaaggacattcacatagcacaactctcacttttacccatctacaaaactatatcatctcaaaccgaagttctctatcattaaacaataactctcccttccttcctctccccagccgctaataactgctattccattttctgtctctgaatttgactattctaggtcactcatataagtagaatcatataatatttgtccttttgtatctggtttatttcacttaacataatgtctccatatcatagcatgtgtcataactaaggctgaataatattatatctatgtactacattttgtttatccattcatccctcatggattctttatttatgtacttccatactg

SEQ ID NO: 55868 - DNA, 600 bp, Homo sapiens
  misc_feature 37: n = A,T,C or G
ctggggtaccggggccccccctcggggtacttctagnattaattaacgcgggtgtaaggtgaaaataaaactgtaaattaggtcttccagatttctttctgctctacactcatcttgaatcactagttgtgccttttgatatcaaaagaaggatgtagagagtgactgaagaataatatctgggactactttgcaattgcaaaagtaaatagaaagataaaatattaaaagaggagcagcataaataacattaacaaagagataatcaagaaattacaacaggaggagaatatcttaaggttacaaaccttatcttaaaaaaacaaagtgacaaaaatttaaaactgacacagaaaatcatggtggaatcaagctgtattttgaaagtgaactgtataaaatattgtcatcacaagaaattcccttaaccctaagatgaagtaaaaaaaaaaaaaagtgttgatggttttagaataatttgctgtagacgattacaggttatttaatgaaatgaatgtgttgaatatttaagccactttattgaaatctataatcaaatttagttagattccactcacttttatagacttaaagaactac

SEQ ID NO: 55869 - DNA, 591 bp, Homo sapiens
cgggccccccctcgaaagtcttctagaattaattaacgcggggacagcttacataaatcagaattatatttttaggaatctttaatcatgaattcctctctaaatttcaaaatattttatgacttctaaggaaccttttttttacaataaataataaagaaagatttgggatttgcagaatcttctggcccaattaaaaacaaaagaagctgtaaatatccagaacttaatagatgtataaattataaacaaaacatgtccctgccccaaggtattgaaattacattactatagatacatcccatttatgaggtagtccgattcctcagatgtaatgggacgagcttttttcagtttctgtttcaccagtcgtagtcggcatgcaaccatgagaagcagcagagcagtgatagccaaacccagcgccaggggtagcactgcacctttgagaaggttagacatgaagagggcaagccagtgattagtcacagtgacagctactggtcactatatgatacgcgctttgcatgcactattttatttaatccaaacaaattgttattagtattatcactattttgcagattaact

SEQ ID NO: 55870 - DNA, 525 bp, Homo sapiens
  misc_feature 38: n = A,T,C or G
cgggccccccctcgaaagtcttctagaattaattaacngcgggcctctagatattattttaattattattttaaattattttaagttggcataaaaatttccatcagattattatggatagatcgtatgtagaatccagaatactcatttgacatgtgaaaaaacaaaacaaaacaaaacagtaaaacacaggttaaagtgagttgccaaagtcataggttaattatttgtcattatctataggataatttaagtttcttgattacaagttcattatgtttcaatagcactagtgcaattaaataaatcatggaaaccaatcggaactagttaacacactcacaaaatccacatttactatgatgcagccttgtttgaaactctatagatacagccacagacacactaaaagatattgttaatccccttggtagtagttataaactttttttttcttttctgtcattgagtatgtgaatcaaatctcagtgtaagtactaatatcagtgtactaattaaatgaag

SEQ ID NO: 55871 - DNA, 639 bp, Homo sapiens
  misc_feature 563, 603: n = A,T,C or G
cgggccccccctcgaaatacttctagaattaattaacgcgggtctcttggactcaacagtaactataatattaatataatggtctacctttaaatttataatctatccctaaaaacactgtgataactgataaacatgataatttgtcagaatatgcagaaaatattgaaaatgacatcacctcactttatttttattttgcataaaacaagatttttatctggaaaatgtaaatttttaaaatataagaataatatagtagaaattgctatttggcaaacaccattaataataattgtttcaggatcaagggataattctaaaactagtgaatggaagtttgctaagaacagaatatttgcatagtcttaagatatttttctcaccaggcactcactatctacaaaggtaaacatcaacaacaagtaatattgcaatagagaaacctagtagtcaccaccttaagaaagtgataaacttattgctggtactgtagaaatgtgtgtttcctgaaatgattcactaagaaggacacactatcacagctgtgtgattcccaccanacatccataacctaagactaatcaaaaggaaacataaaanaatccaaactgagggacattctacaaaataaatggc

SEQ ID NO: 55872 - DNA, 307 bp, Homo sapiens
ccgggccccccctcgaaatacttctagaaataattaacgcgggtagatgatttctagcaggcaggaagtcctgtgcggtgtcaccatgagcacctccagctgtactagtgccattggaataataaatttgataaggtggtgaaaaaaaaaaaaaaaaaaaaaaaaaaaaaaaaaaaaaaaaaaaaaaaaaaaaaaaaaaaaaaacaaaaaaaaaaaaaaaaaaaaaaaaaaaaaaggccccccccccccccggggaacccccaatccccccaaaagaaagtcaaataaccccccccccctgcccgcc

SEQ ID NO: 55873 - DNA, 427 bp, Homo sapiens
  misc_feature 27: n = A,T,C or G
cgggccccccctcggaagtcttctagnattaattaacgcgggggataaaacaagtagatacaaaatcaggatacagaagattcaaagtactaatcaccttgatggtgacagccacttatagaacagtctattcaacaacagcagaacacacgtttttctcaagtgcacccagaacatttattaagatagactctattcctggcattaatcaagagtttcaacaaactttaaaagattcaagtcatacaagataatattccttgactacagtgaaattaaattagaactcagtaacagaaagatccctggaaaatcccctaatgtttgaaaaccaaacacatttcaaataagctatggatcaaagagaaagccaaaagaggaattggaaaatattctgaactgaacgtaaatgaaagcatcacatatc

SEQ ID NO: 55874 - DNA, 454 bp, Homo sapiens
  misc_feature 26, 405, 406: n = A,T,C or G
ggccccccctcggaaatacttctagnattaattaacgcggggtgatccatatatatatttctttaggctcataaagtgaagcagtgggggtggacaaggaagaaagaaatctgtaactggtttgtcatcgattagttgtatacaccattgcacttggaccagctttgtaataaattttgaagcaaaaatttataatcattagagtaaaattaagggaagtaaatgaaaatataaattataggaagaaaaaaatgtaaatttccaactgttaaaaaagtatattcacatttgttttaaaggaatgatggtgatagtgggtatcaaattactaatggtatttagagtcactgggtagattttaaaaacaccctaacagtctcccttttttttttttttttttttttnntttgagatggagtctcaaaaaaaaaaaaaaaggaaaaaaaaaaaaaaa

SEQ ID NO: 55875 - DNA, 336 bp, Homo sapiens
  misc_feature 18: n = A,T,C or G
ccgggtccccccctcggnagtcttctagaattaattaacgcggggatctctagggtccttttcccttatttctgcataaacaaattaaagcttagcagctaaaaacacaaacatctgttatctcacagtttttgtgggttaggaattcaggtgtggcttgctgagaacctctggatcaaggtctttcatggtgttgcaaccaaggtgcctgttgaggatgcagtctcatataattggattctaatatccctgataaaattttaattttcaagtttaccatcatactaagacttctgttccaagtcttttataggagtgaggcccaaaaaaaaaaaa

SEQ ID NO: 55876 - DNA, 537 bp, Homo sapiens
  misc_feature 500: n = A,T,C or G
cgggcccccccctcggaagtcttctagaattaattaacgcgggaagtggagcaataatagtacttagaatgtttttatttttaaacattttttctttaaaaagtagccacataatatacttattaaaattattttctttatttttttcttttaaaaacaggaatattcatcgttgatttttacaactttctagaatctattgtgtgaatgtactatagttgattcaactgatgcagtttaataaatggaccctggagttgtttccattctgttgctattttttctgcaataataaagccttgtacacagtcttttcacatttttgccaagctatcttttgggtgacccctaaaagtcggataactaggttaaagataaatgcatatgcatttttgctagatattgttaagctcaccattatataatctgtaacatttttatgcactctagcaatgtataagagcctcatcaacagaggatactgtcaagctttttgattntaccaaccgacagctgagaaataacgtataacatagt

SEQ ID NO: 55877 - DNA, 501 bp, Homo sapiens
cgggccccccctcggaagtcttctagaattaattaacgcgaggaatagcaagaccttgtctttaaaaaaaaaaaaaaaaattcaaaaataatagcaacaaacataaaacaatcatgtctcaattttggtttcagcttactataatacagaagattaaatatcagattaaaccaatacaataaacctattgccaagaggaaggacttctgaggtttggtgttataaataagattttattggtatttaaaactccttacttaacccttaataatttaagatagcaggttaaaaaacaaaaaaatccttacaaaactagtaaagagtatctcttactaatgaaatttttttactctaaatatgcgatgtcaaaaaaggcaacttttgcactgaggaaaggagactgtgaatgttttaactgggcttattcatttttaaaataattcttgagggtccatgacccatctgacattctgataaaagtgactagccttctctccaaaa

SEQ ID NO: 55878 - DNA, 603 bp, Homo sapiens
  misc_feature 28, 45: n = A,T,C or G
cgggcccccccctcggaatacttctagnattaattaacgcggggnaaacatataataatctttcttttctaaggggaagaattaacctctctggagggtctttggcaatatatataaaagtattttaaaatgtgtacatcccttgacccactaattcaatctctagaaattaatcccaaggaggtagtcacgactgtgccaaaaataataggttcaagggcatttttataataatgaaaaattggaaaataacttaagtgtcccacagtagggtacattatatttagcctatacaatagaaggctatgccaatattaaaactaacgttgtagaataatcacatggaaatatacacctcttcagatgaaaaaaacagattacataacacatactaagccccctttaatttttaaaaatacaaatagcaaaactctagaaggatgtgatatatgcccaaaattttagcaatggtatctctggctgatgggattatgaatacccttaaatgtattgctttcacttgtccgtatcttcaaagttttctacaacaaacttgtattacttttaatacatggtaggagaaaccagtaaaggctattacat

SEQ ID NO: 55879 - DNA, 345 bp, Homo sapiens
  misc_feature 18, 31: n = A,T,C or G
taccgggcccccccctcnaaagtcttctagnattaattaacgcgggtagatgatttctagcaggcaggaagtcctgtgcggtgtcaccatgagcacctccagctgtactagtgccattggaataataaatttgataaggtggtgaaaaaaaaaaaaaaaaaagaaaaaaaaaaaaaaaaaaaaaaaaaaaaaaaaaaaaaaaaaaaaaaaaaaaaaaaacaaaaaaaaaaaaaaaaaaaaaaaataaaaaaaaaacaaaaaactgaccgaactttaaaaacaaaaaaaattgggaaacccctggggttggaaaactaaatcgccttaaaaaaaaaaccttttacc

SEQ ID NO: 55880 - DNA, 620 bp, Homo sapiens
cgggccccccctcgaaagtcttctagaattaattaacgcggggacaactacaagagatgtaaatatgcataagggtaataacagaaagagaagaagggaacagaagaaatatttgaaataatgattgaaaatttccccaaattaatgtcagaaaccaaaccacagatccaagcagctcagagaacactgatcagaataaatgccagaaataacttatgtaggcatatcactttcaaactacaaaaaaaaaaaaagataaacaaatcgtttaaaaagccagaggaaaaaaaatcatcttacctaaagaggagcaagtataataagaattacatctgactctgtttcagaaactaggcaagcaagaagagagtgacaaaatatcatattgagaagaaaaaacccaccaacttagaatcctgaaccttgcaaaattatccttcaaaaaccaaagagaaataaaaactttctcaacaaacaaaaattaaggctgggcaaggtggttcacgcctgcagtcctaatgctttgggactacaggcgtgagccaccgtgcccggcctaagaaacgctagagatttttttaaaaaactgtaacaaaaatgaagaatgttgttggtgggct

SEQ ID NO: 55881 - DNA, 604 bp, Homo sapiens
acttctagcattaattaacgcggggggcaggcaaggggccaggagagagcaaacaagtattatttttcctgtgtgtagactcatatttaataattgttgaagaaaaaagccttaacaccacatgtagcaagttttaatagagttttctgattaccttggtcccatggctgaccagtgaccgccattatgcctgcagagatgggatggtgagccatcatttctccttcctctttcctgaaactagttctgataccatcagtggcttagtctctatatgtccatcagatcctgcccaatgctggggacaaaacatgaatgaaatggagttacccctcaaagagctcccagctctaaagccatgatcctgtgctccatcaataaacaggagcaagggggaaggcagatgttccaggaggagcagagaaggcttcacagagggaggcagcacagccgacctcaagtgtgaagggaagctgcaggggaagtgcagagcagtccctttcaggcccaacaacacatgctgctcagtgacggaacccatccgtcatcagttatcagcataatttattacccactgacacagtaaggtctggaaggacttttg

SEQ ID NO: 55882 - DNA, 473 bp, Homo sapiens
attaattaacgcggggataaaatttggtcacctagagatacagaattgtccaccttgaaggaagctgagagacctcagctatgaaatgtgaatagaaattcttagggtaggctgggagcggtggctcacgcctggtgacatttcttaatccaagtttctaagaaaaacattcataccaggtaaccgaagatcatcactttttgaaatgtatcacacatttgtcctcttatcaaattaccaagtaatttaacttttcttgggtattagggttattcattcaacaaacctttttatcacattgcaatgctaaatgctttcagtgttaatgaggtggggctccatggctcacgcctgtaatctcagcactttgggaccccaagatgggaggattccttgagcccaggagtttgagaccaacctgagcaatgtagggagaccccgtctctattaaaaaaaaaaaaaaaaaaaaaaaa

SEQ ID NO: 55883 - DNA, 592 bp, Homo sapiens
  misc_feature 55: n = A,T,C or G
ccgggccccccctcgaaatacttctagaattaattaacgcgggccgaccaccaanaaataggttggctttgtgttttctattttagacttctggaggagaaggagcagggagaataaagaggaagcagaagggctagagggatataatgtcaagaggagagtattggttctagactgattatgatatagctcctggagagcccttgtgtgccttattctgactgtctttaatcctagctctgcctccatttatttggggctttctccatgttccaaccaggtacagttaccatatttgcctaagaaaaaaaaaaaaaaacagaggatatttgaaattgggattattccagtttcaggtgattattaatctatgagcctttgcttttgtgtcagtctttttccccttcttgtcttgatgaaactgtatagacatgtgggttatgttttcagtagctaacatgacatactagtcagtattaatgaactaataggggctctgactcctcccaactggcttacatgtcaatagctttctgcagatagtatctttgcctgctgtttatccaggggtcttgtccaatggtgggactgt

SEQ ID NO: 55884 - DNA, 382 bp, Homo sapiens
  misc_feature 33: n = A,T,C or G
gcccccctcggaatcttctaattattaagcggnaggacttgtatgaatgtgagttatctacctggcagttgttgtaaaaacaagttgtgaaccactgggtgcaaaatatttcataattcatggtattgctataagctgaacaactatataataccttccaaaatatagagaaagcaaaagagaatagactatatagcaaaccacaagcaaaaacaataataataaaacaaatgacgaagtaaaactaaattaaatatagcaatgcatgtgagtggattaagtgctcttgttaaaaataagaaaattctcacatagcccatttatgcctagtgttccattattggaacggtaagcatgtgggagttatttatatcctgctgct

SEQ ID NO: 55885 - DNA, 607 bp, Homo sapiens
  misc_feature 597: n = A,T,C or G
acttctagaattaattaacgcgggattcatcagttttttcctaaagtatgttttagcactttgaccatatgagacaacccttctgctgttagcatttttctctttgcaatagatcttcctatgtcagtacacatcaatctacctcattcttacctctgcataagagagtagtgtgtagttgtataatagtttaacttggcgattggttattgattttgtaactagccagttactgaattattctaaaggttttgctgttgttaatttctttcgcctttttcagttgggtaatagttctgggtaggttgataattttattcccatatttgtaatcttatttcactttctcaactcatcacattgactggtacttttagaacaatgttaaaaaacatttacataattgtgctgatattgtacattatttgatatatatatattttttttacttagaagagtgtttctccaaaactataaatttgactcttagtgtaaaataatcttaatatttgaattatacattcaggttatgccctctatttctagtttgatgaaaatattattagtaatggatgttggggttttattaaatggctnttttccacat

SEQ ID NO: 55886 - DNA, 593 bp, Homo sapiens
  misc_feature 37: n = A,T,C or G
ctgggttaccgggcccccccctcggggatcttctagnattaattaacgcggggtcgagggagaggaatgttgctaccatttatctttgttgttgttgccgttgttaatatttgggggttttaatcagttggaggtgtttggagaaagggagcgttgagatttggggagttagatttttccagttaaatgttgcgagtagtttttcttatttcctggaaattctggtcaccctttgaaaagggaggtttgggaagcgtcaatcattaggacgttgacagctaagttagattaattcagacgtaccttaaataggctttgttctcaccattcccttgtttcgagttgccttcagattattttggaagagttcttactacaagatgaggctttttatttcacaaataatgaatctacacacagaaaataagtggtttgggtttttggtgtttcgtgggggttttttgctagctttgtgatttgcttttgtcttaaatttaagaaggaaagaaagcaattattctttccataaataattctttccataatttctaaatagtatgttagcatctagagaaattttctctttacgtcat

SEQ ID NO: 55887 - DNA, 582 bp, Homo sapiens
  misc_feature 31: n = A,T,C or G
taccggggccccccctcggaagtcttctagnattaattaacgcggggggaacatgtggaaacaacgagtgtctaccacagacctaaatttatgcagttctagttgagcctgtttttctttgatttttttttttttccgttgcctcaaagtttagaagtctgtcatttttcaaagatgtactacaattctgttttatgctggattttgctatggtttggtatttttatacgttgcacagtcctcctagagttaatatgaaatacgatgtcgagtgagttagtgtaatgctaagggccatgagctcttgacccagattgcctggctccaccatttaacagctgtgattatgaaattttcctgtgcctcagttttctcagtgctaaaagtagggaaaatagttcctgctattttgaataatcttcgtagttcaatgagaaaatatatgcaataatgttagtagagaaccaagcagagtgtttgtacctaataaatattagctgccattattattattggtgttctttgtatttcctctccccaacctctattctctcatgtcgagggcagaaccccaggtggctc

SEQ ID NO: 55888 - DNA, 584 bp, Homo sapiens
  misc_feature 16, 25, 27, 30: n = A,T,C or G
cgggcccccccctcgnaaatacttntnagnattaattaacgcgggggcaggggggggtatgaaaaaaaatcttccatattaaaatggtttgcattgctccaaagctgagccctacttgacaaaaaccttactcctcagtatttaattcctctcattgtgttttcttgggtatcccacaagcaacattaatatggaagatacagtaaatgtgtgcaagaacactgctataaaactatggcagcagatggctgtgattggaagactctatccattgctagatctccaagtcacattgaatgggaggccatttgactgccttgtggctgatctttagagcttttgtgtgtagcttaggctctgataattaaacaaaaatagtttatattttactatttaattcaaaaggttatttaacacatcattagttatggtaagtactcaaaagactaggcgtggtggctcacacctgaggccaaggcaggaagatcacttgaggccaggagttcaagatcagcctaagcaacacagagaaactgtctctaaagaaaacaaaacaaaacaaaacaaaaattagccaggcatgg

SEQ ID NO: 55889 - DNA, 250 bp, Homo sapiens
cccccctcggaagtcttctagaattaattaagggaaaattaagtaatttgtataaataaacagctgattagaggcaaagtgaacaactaggatccaggtctcctaactataatctatttctgtaaactgaaagtaatttccacttaaattatagtcagcccttcatatccacagttccacctcagtggattaaaccaaccttggatagaaaaactattcagggggaaaaaaatacaaaaaaaaaaaaaaa

SEQ ID NO: 55890 - DNA, 486 bp, Homo sapiens
cctcggggtacttctagaattaattaacgcgggggggggagagagagagaaagaaacagagagagaggggtctagggtctaaaactcagtgagtcggttaaaacaattttactgccacgctactaggaagaaacctgtcaaaagaaaagaagtactgtatcgaatatggagtacaagaaagctgaaaactaaatatcacagtacagatggcatatagaaggcacaagactgagattgtgtacttaaactcaaatatataagcacttgaattacatataaatgattgaataacccaggtctcaaataactattatgtttagactataaaaaaatcctagaaacaaacttaaactctagaggggcagtaggttcaaaagcgaaaagatggaaaaaacatgccacaaaaactctaacagcggcaaccaaaaatagctggtgttcctatatctatatgagaaaaaaatacactttggggggaaaaattac

SEQ ID NO: 55891 - DNA, 589 bp, Homo sapiens
  misc_feature 10: n = A,T,C or G
cccccctcgngaagtcttctagaattaattaacgcgggctatcccctgagaattagtcaggacaaatggtttgtagtatcttgccatatttaggttcatgaaaactaaggtcaaacaggcctagtttgaattactgttcagtcatttggcaaaggtgtgactttaggaaagtcactaaaactctttaacttcagtgggctcatctgtaaaataataactcgccttacgtgtttaacatgaggattatgtgagattatgtttgtgaaccctttggtacagtgttcagcatgtagtaattaatagatgagtttgtaaatgaagacctgacacagaaaatcaggtaatatatttaacataacaaagctacagagtggcagaacggatctaatatattcattgtttttcatctttaatatcatatccactttcatttccatgaatttctatcaaactagttctcaggaacttaaattgggacttcccacctcgcttcctttgcacattcaagtctgtgcccctgagatatccacatccaatctttctgctctttgatgccatttattaggtctagtgctgtaagatgtgacct

SEQ ID NO: 55892 - DNA, 607 bp, Homo sapiens
cggggccccccctcgggagtcttctagaattaattaacgcgggcaccttccatattcttcatagaaatttctaccctcatcagttcatgttgtacttgttttatttttaaccttactgcagcaaacaattttgccaaactttctttctcttcagaaatcacatttttccttatttttcaccttaaacttttactcacagcttccttgaggccagattgagcctgctgctcaatcccaaaaccaaagtgactcattttagttttttgttaaagcagaaccagattccagtgctaaactctgttttagttgtctattgttgcatggcaaaatatttccaaactcaatagcttcaaacaataatcatttttaatatctctcaaaatctgtgggtcaggatttctagcaggttttttggctgttgaatgtcccgctccatggagtatcaatgaaggtcactcagcagtggggttggtctggagcattccagtgagcttgtctcccaggtataacaccttgaggtttatgagtagaaggattggctcatctggaaacaagcatcagatcacttagccatggcccctatatatagcagcttcagagtagctgt

SEQ ID NO: 55893 - DNA, 586 bp, Homo sapiens
  misc_feature 28: n = A,T,C or G
ccgggccccccctcggaagtcttctagnattaattaacgcggggtgtgaggagaagaggggatgtgaggagtatgcccccactgaggatcatcagggctggggtccaggctctgccagttactgactcagccacacagccttttggagccttagtttcctcatccataaactgggataacagcaagccctcactcaggactgaaaggataaacgaagttagagagtaaggcactgtgctaactctaaagctaaatgctgcgcttgttttaattaacgcgggcacctgttttcatttgacttacagctgttttgtggacagataaattttctccacatttaatttctgtattaaatgtgacaagccaagactgtcctacctatgttggaatcctttgggtttattttattatgaatacatatgattgtcttcattgcaaacttgctttttggctcttagcttctttttttttttcctcatatatatgtttgtatttttcattttgtttctttcattttttaaatttaatttaatttaatttccagttccgagatacatgtgcaagcttttccctttttgaaagggcc

SEQ ID NO: 55894 - DNA, 519 bp, Homo sapiens
  misc_feature 32: n = A,T,C or G
taccgggcccccccctcggaaatacttctagnattaattaacgcgggagttaaataattctttcagatgttagcactaagactaagatattaggactttaaggcaaggctgtttctactcacataatagccagattcattcaaaaataacttatagtcagactggtcaaagtgacatgtgggacaattgaaggcctgtgtccacgacaccataagaatagctcactagtgtgtatgataaaagatcagaattcattcattccaaatttattgagcaccttccatattccaggcactatgcaaaatgcaaggcatataaaaaatgcacttgagtaggtcagtctagcaggaagacaggcatatagacaaaacatacatgtgataatagaggcattttcaagttacagagatatcacaaaggaggaggatggtcacctcctctgtaaagttggtaggtttgggccactaaggaaatgagtggtagtaacctcttaactgtgacgggaaaaaaaaaaaaaaa

SEQ ID NO: 55895 - DNA, 604 bp, Homo sapiens
  misc_feature 45: n = A,T,C or G
ccgggccccccctcgaaagtcttctagaattaattaacgcggggngaaatgcaggagaggttgcttgggaccaggggaccaaacatgcagaatacagggctgacactcaagctttgacaatgaagtgtttactacattgtggattcctgagcatcagctgtcatataaaatgccagaacatgagaaagatgggcaggagctttctctgaatagtctcgcctacaccttctccaaggtggtcctattagcatccctcaagccctgaagaccttgggcaggtgtccagaaagcctcagcaagctttcaagcctcagcagcccaccactgctggcagagacaagcacataacgaatatgagaaactcccttctgaacaattttatgctcctaccctgccacttagccaagacgtaatagcagcagggtaatcaagtctcacttgactgcaatttaattacctttcccaggtttgccgtaagtaattaaaattaagtgaccccaaaataatgggaaaaagttcatatgggatgtaggatgtctgatcttatcagcaggaactcattcgcaggattgggtaattgctaatggccttcccagtcattagc

SEQ ID NO: 55896 - DNA, 335 bp, Homo sapiens
gccccccctcggaagtcttctagaattaattaacgcgggatgcttttctctttaattggatttctcagcttgtgtctggcttgtttctccttagtgtatgtttgaatttaaatataattccaggtgaaaaatgtagtctattattgatgactggaaaccatttaaactcataataataaatgataaatttgtttctatcaagtgttaaatgcttttatgagtttgtttttaaatctttttactgttttctgttttatcgtacatatactctggtatattttattgtcttctgtagtgatttaggaggaaaattccccaaaaaaaaaaaaaaaaaa

SEQ ID NO: 55897 - DNA, 617 bp, Homo sapiens
  misc_feature 36: n = A,T,C or G
tgggttaccggggccccccctcggggatcttctagnattaattaacgcggggtgggtgttttatttggagacttctttggttttgttttgtaaaagcaaaatggtatctaataggtaggacctttttcatgagccccctgatgcagaccctcaagtttgttttctctcacagatcacagccaggaacattcctggggccccctgaatctagaagcagcaagttcaagaaggttttaggcaaaaggaagggcccagagtgctgcaccttccagaacattccagaaccttcctgaacattccatgtaccttcaagcaaaaggggttaatgatttttcaaaccatccaactgtaagcctttccatggcccacccagaactgggcccactccactctggtggtgtccatcctcacctgcctccgatcattttcaggctggagctgaacacagaggggtctcactccctgcccctctaaagaagaatcagctctgtgcaagacaaggtgtgtgggaggccttctgaaggaccccatctggttcccatggtaacacttcttcctagtccctctcttgtccatgtctcaactttctctgcttcttacctaccctgaggagggga

SEQ ID NO: 55898 - DNA, 586 bp, Homo sapiens
cgggccccccctcgaaagtcttctagaattaattaattttttaaagtgagaggactcttttttggaatcccaaacgagaggtacattttgctatccattttatggaggaagatgaatgatacttgcctgttttctttgagctaatggttaagtccctctccattcaaatgaaatgaaaaaagctagtgattcagatacagtgaacaacaacaaaaaaaaagacacacagaaaacaatcgttctttgcaacaatgtaccagatacaactgttcattctccgatatccctgttttaaaatcccagctccaagtatttattttgttaaattttatcctagtttttgtagcatcatcctgagaccttcagtacccatgcaggatgctgacgctgatactgcgttaccctctattgagcaaggaaaccattcctcaccacctcacccaccactgggcaaatgccctctacttaatcatgacaaacaaaaaaggtttagaagaaacagagaaagagttatttctttctattttcctagcatcatgcagataaattactttgtataagacaataaagaaatccaaagcggccg

SEQ ID NO: 55899 - DNA, 468 bp, Homo sapiens
  misc_feature 27: n = A,T,C or G
cgggccccccctcggaagtcttctagnattaattaacgcgggaaggatgattgcaaaagaaattcgtcacgttggccgaatggcttcagtgaacatggaccctgccctcatgttcaggactcggtgagtatgtcatcttcagtggcacgtgtgagagtagagaaggttaaatttagagcttcccaataaatgatttttttaaagtttgagtatttatatttgtagtacggcagaaattatagtaggatgtgctgagaatcacctgtgagctctaatttggaataaatgtcttattctgtataaagtgttctttcggctgtcagtaaaaacagtttgtctttcagacattttcaatgtaatagacacaattatgtgtttcttatttctcagaacactgacttgtagagctaaaactcatagctagtagtatgcactaaaatatgtaaataccccaaaaaaaaaaaaaaa

SEQ ID NO: 55900 - DNA, 620 bp, Homo sapiens
cggggccccccctcggggtacttctagaattaattaacgcggggtgggggtggggatgagggaggtactcaaagtcttacccaggcacttcaaatcccatagtttgcttctttccagatacagtcattttagcaacttttggcacaatttcagattcacttcgcgatgtctgggaatctactggttttcctagttaaggagtaaaatataaaaggccaattaatttctttagtaatataaagaaatctattacatagtactttatagattatgataactttcacagaactaatgtctttataaacacattatctctaaaaaaatttagtaagatattaatgctgaaagaaattctgtcactttaatctaggaaatcccctattgtcaggactctcctatgcttaacctccaccaaatctcttcctaattttgaactgactgttaagtttcagtattaagaggtcacaaggtagtttctgcactgagccttgttctgacattatacctagaccctatacctccctttcctaccacaccctttcacaatactaaaattgtttggtcagttagcagatggctaaactatttttaatcctgcgaggtttatgaactgatgaaca

SEQ ID NO: 55901 - DNA, 544 bp, Homo sapiens
  misc_feature 41, 523: n = A,T,C or G
aagactggggtaccgggcccccccctcggaatacttctagnattaattaagaaaagtaaatggccccccttcctctatgaatcagataaatatatttttaaatcacctagttaaaaaaaatatagatccctgggtttcaccctgggtctactgaatacagtctctatgggtggacatcaggcaagtggatgcttaaaacgttccccacatgattccaatgcacagccagggaagggcccgcgttaattaacgcagagcgccctgagcggtcccccgcgccggtggcatttgcaatgagtccctgacaggctgattttccacccctgttgtgatgctgctttctctagttaatattcctgtgtaagtgtcgcacaaaagtaaacccaaagagcccgcacatgacacggaggctgctccatttacattaattatgcagtcagggcggtgagaattcgctgtagcagctgaccttagccggctgcggccgagagaacgcgcgttgcccgccgaccttgtgccctgnggtcagcacccactgcaagtc

SEQ ID NO: 55902 - DNA, 607 bp, Homo sapiens
  misc_feature 28: n = A,T,C or G
cgggcccccccctcgaaatacttctagnattaattaacgcgggggaccaaggtgggaagggcttgcaggggctaggtgagcactttggacttatctttgtcagttttttttaacaatataaaatatatttgactgtttttaaaaggctcaagcctcagtttttcaataggctgcacacatctgtctcatctgttggacgtctctcaccagatcaacctggcttcagctggcagcacttcattccatccacaagaaaaagaccaacttaattttgagaaaagaaactctaggtctgagaacaatgaacgttaatctgtaattgaaaataaaattagggtgaatgtctcatgttgctttctagagccttctcctcacacagagccaggtgtgtgtgtgtgtataaagagaatgtgaggaaatggctcatgcaattatgatggtgggcaagttggaatttgtagggaaggctggcaggctagaaattcaagtaagagttgatattgtagtcttgattctgaagcctggaaatggttagaacttctatgttgtagtctggaggcagaatttcctctctcagaagcctcagtctttgttctttaagttcttc

SEQ ID NO: 55903 - DNA, 373 bp, Homo sapiens
gggccccccctcggggtacttctagaattaattaatgtgagttttttagttagtgtttcagagttatatgtgcttgagcctccttatagctatgttcagtgggtttttagggacattttgttattagtttgacttgaatgatgaataagtaagacattgctgtaattacatgaatttctattctaatactctattaaatcttaatcttaaaatacttttcacaactaaattttatttatttactttttacttttaatagagtggcagacgaaatgttgatttggatttggcagcatctcacagaaagagaggtaagtgtaagtattaagaacatagtaaatatcttagtgagaccctgtcccaaaaaaaaaaa

SEQ ID NO: 55904 - DNA, 524 bp, Homo sapiens
cccccctcggaagtcttctagaattaattaacgcggggtgttgcattccatgacttcaaaaattaccaggaaagctatagttgctccaattctaaattcaccaagtccattaaagtaggctgagtatctagagtgcaaaataaagtcacaatttgtaagatattcagcttattgaaataatatgtacattccacatggatagttcaatcacttaaaagaagacatctaggccaggagtggtggctcacgcctgtaatcccagcactttgggaggccaaggtgggtggatcacctgaggttaggagtttgagaccagcccgaccaatatggtgaaaccccgtctctactaaaaatacaaaaattagccacgcgagttggtgcactcctgtagtcccagctactggggagagtgatacaggagaattgcttcaacctgggaggcagaggttgcggtgagccgagaacataccactgcactccagcctgggcaacaagagcgaaactccatcaaaaaaaaaaaaaaa

SEQ ID NO: 55905 - DNA, 498 bp, Homo sapiens
cgggccccccctcgaaagtcttctagaattaattaacgcgggggaggcggaggttgcactaagccaagatcacacaccactgcactccatcctgggcaatagagccagatcttgtctcgaaaaaataaaaataaaaaacaaatagggcatctctttgagccatacagatctatcaatggcctgcatggctttgaaatggaagtgcaagttgcagaaccacatcctcattaaccgcacgaggtgatgagttgcagcatagcaatagccacacacaagaaaccacaccctttgccccaagatttattagcagggctttctctcttaagtggccaatagatgtgcacatagaagttgacctttacttctaatcaaggcagaaaggcactgtttaaattttaaaaaaaaaaaaaattttaaaaggaaggaagggtacaatttttagattttaaaaactatacttcttctaaataaacctaaaataccaaaaaaaaaaaaaaa

SEQ ID NO: 55906 - DNA, 613 bp, Homo sapiens
cgggcccccccttcgaaatacttctagaattaattaacgcgggcaatcgtgatataaaatatacaatatctggaagcaaacttcaaaacaaaaattaagaagataaaaaaattgaaaaaatatttgaaatactcttgaagaacttaatggatggattaaaacttacataagaaaactaaaataaatggatcgaaagagtgaacaccataaaggtgacatatctttataaattaaagcataaatgcaatttcgatagacatataaacagaatttgtacttaaattagacaagctgattcttaagtttaatgaaaaataaacaagaatagccagaaaacaaaatttcaaaaagaagtgtaaagaggtcttctgccatatcttatacagtaactatggtatcaactatgtggtaaaataaaatatagtccagaagaaatgcagatcagtatgaggctatagattaggatataagtgacatttcacataagtgcaaaataaattattcagtaaataaaataagtaaatatcactgaaaaaaaaactaaatttgaatttctaccttatatgcttcaccaaaataaattcccaatttatcaaatatttaaatattaaaa

SEQ ID NO: 55907 - DNA, 532 bp, Homo sapiens
  misc_feature 482: n = A,T,C or G
acttctagaattaattaacgcggggggcatggactggaaaggtctcacctaagtaagctctgctaaatgaaaactaaatcagtctcccctttgcactcttgtttggataacctaaaggcttattaaacaacaccaaataattttagtaatggcattttttttttcatttctctcaaaaatattttggcagctggccgttgctcagttaactttcttgattgcaaaatgcaccatcagtttggtgcaagaagcttatcttgctctcttggctctctcactttcgctgcttttccctgtgcctaaggtctcctgctgcctaaggtcggccacctaaggtctaccaccacaggccctcggatgggatctgtccagtcatttctcatgaagatgccctttgtctgtctgtgtgaggctggtttgtccagtgctgagtttagttggcagtgtagaactttggtatggatgacagacaaatgactcanaaccagttgtctgggctgtagtctgtggcacagaaagaaactagaggaag

SEQ ID NO: 55908 - DNA, 516 bp, Homo sapiens
ccgggccccccctcggaagtcttctagaattaattaacgcggggaggagcaagaggggtgaaaagaaacaagttctctacttgtgatcagcagctggacatagtggttgcctggagtatatgcctttttgtatcctttgaatttccagccatgtaaatgtattatttattccaaaaataaagcagatttacattttaaaaattcaaaaaaaaaaaaaaaaaaaaaaaaaaaaaaaaaaaaaaaaaaaaaaaaaaaaaaaaaaaaaaaaaaaaaaaaaaaaaaaaaaaaaaaaaaaaaaaaaaaaaaaaaaaaaaaaaaaaaaaaaataaaaaaaaaaaatgagcggcccccccccggggggggacccccctccccccctggaagggatttttttcccccccctttgggggtttttttaaaaaccccggggggggaaaaacccggggttccccaaaaatttaaccgggggaaaaaacccccttttttgaaggggggaaaaaaaaaaaaaagcccccc

SEQ ID NO: 55909 - DNA, 613 bp, Homo sapiens
  misc_feature 12, 28: n = A,T,C or G
cgggcccccccntcggggtacttctagnattaattaacgcgggaggatcatatgaggtcaggagttcgagaccagactgactgacatggcaaaagccccgtctctactaaaaatacaaaaaaaaattagctgggtatggtggcaggaccctgtaatcccagctactctaataaccactatatgtcacatgccacactagacaacacgtggaaaaagctctaagcatagcatctgacgcatagtaggacattgtttgttttgagacggagtctcaaaaaaccaaaaaacaaaaaacaacacacacaaaaaaaaagatggcaaataaaccattttcaaaagtatctttaagtaccaaacactaacaagcatgaacttttaaacaatctcctaaaaacagcatcatctaaaaattaaaatccaaatcaagtgtagtttttcatacatgaagtgtgtaagtttaaattaccttcattattttaaaaatcacaacatcacccattgcccccgtgtccaaaggattcgcttgtaataaatcagcatacctagaaagatagacacccatagaaggactgccaagaattgttattttggactgacccacatgtaatccttt

SEQ ID NO: 55910 - DNA, 591 bp, Homo sapiens
cgggccccccctcgaaagtcttctagaattaattaacgcgggcagaggatcagacacaaccattgcaagatgagatagtgtttgattggtttccagggaaccgaaggatacaagcttagttgtacctgtcactatggctcccagcatttttctcccttaatgtcttttttagctgtaggaagtttctctttaaagattcagtgctttcctaatggcataaagtgagtaatgtgaagcatataaaaatgttatatagataacaaatgaattcagtctatttcgagacaacgtgtgctagccctaaagaatgattttatttagcttcagttttctcttgaaaataaatttagccaaacattctgaaatgagcacaccactggcatccccatgttcattttcccttctaggtaaaacatacctggattttcattgcaatatgtgtgcctacccaaaatacaatctgcatctgatgctctttcatacactaaaacctaggaaacggtacttccaggaattattgtaaaatgtaattgaatcatcattcctggtactcaaatctctgtgtgtgtgtgtgtgtgtgtgtgtgtgtgt

SEQ ID NO: 55911 - DNA, 367 bp, Homo sapiens
cggggccccccctcggaagtcttctagaattaattaacgcgggggtgggggagggatagcattaggagaaatacctaatgtaaatgatgagttgatgggtgcagcaaaccaacatggcacacgtatacctatgtatcaaacctgcacgttctgcacatgtaccctagaacttaaagtataataaaagaataaaataaataaaataacatcagcccaaccacacgatatattcattttcatctacctggaatcttagctttccaaaatgacccttgttttttggctgggacttttttttctttttttaaagaatacatgcatcttttttaaaaaaaagatgcatgtattctttaaaaaaaaaaaaaaa

SEQ ID NO: 55912 - DNA, 366 bp, Homo sapiens
cgggccccccctcggaagtcttctagaattaattaacgcgggaggttccgtaaacctgtctaactagaagacacacaaaagccaaaagaaaaaatcaggagagcaaaaggcttcttggaaactagtatgtgtcaaagaaaaaacccctttcacccacaagaatgtattaggagagaagccagtgtgcccctaaaggactttcctgcaagaaaaggaacacttaacaattttagatacataatttttattatttttctgaaataaattttttttttttgagacggagtttcgttcttattgcccaggctggagtgcaatggcacgatctcggctcaccgcaaactccgccccaaaaaaaaaaaaaaa

SEQ ID NO: 55913 - DNA, 592 bp, Homo sapiens
ccccccctcggggtacttctagaattaattaacgcgggaggcggaggttgcaatgagcagagatcatgctactactgcacttcagcctgggcgacagcgtgagactccgtctcaaaaaataaaaaataaataaagtatatccatcagtcccttctcttttccttcttcccccaaaatcctcatcttaaccaacacaccaagtataagagcactcctatgcttctgcagatggagggaagaacagctcttgttttataggctctggagttaatacctggataatgtgagatctggaaagataactcatgagcttagtccctgtggttcttatcactctctagagaagagttctttaaggaccaaggactatctttgctctaggatatccattttggccctttaatctgcaatgataggctagcattatttctcttagaatttgtcttcagttggtatgcctccctctgcctttctgataggaatgtaatgataaatgatgactgcactcatttttaaaagttaaccagtttttgttcaattgaaaaagtaatgtacatggaaaaaatttcatgtttacaggatgttcagtgaa

SEQ ID NO: 55914 - DNA, 597 bp, Homo sapiens
  misc_feature 28: n = A,T,C or G
cgggcccccccctcggaagtcttctagnattaattaacgcgggtaccttaagttgcccactagttcagaaacgggtctgatggcttatgccaagactaagggcaaagggaaacacattttatcataggtgagaagacccaaacaactctctccccattgtcttcaagaaagaaagaggggctgagccacatgtgctcatgatccttcacccagatgcactgggtggttgagaaggtggggctgcaaggtcatgttctttagtggggatccatccacatggaaaaatgaagctggtgtaaaagagggtttccctaatatcattgattacacctcatctgctacattatctttcaaaacaaaacgactctgtgaggtaaatagtggtatctccattttatagctgtaaaaactgaggcttagaaaagataagtgatgggtcgggcgtggtggctcacacctgtaatcccagcactttgggacactgaggtgggtggatcacgtgaggtcaggagttcgagaccagcctggccaacatggcgaaaccctgtctctactaaaaatacaaaaatcagcggggcatggcagcaggtgcctgta

SEQ ID NO: 55915 - DNA, 616 bp, Homo sapiens
ccgggccccccctcgaaagtcttctagaattaattaacgcggggtgacttagtagaacattatcaactacttcaggtagctaatagatgtttgagatgtgtgcactttgtatattcctatgtggctcagttcagccaagtgcagttttctgcattcatctagtgtttcttaaggacaaaatcacatgaaattcacattgtgcccaaactattccctaatataccaatcatgttggaacaatcctcacattttcaaaacaagcattacaacagaacttactgtattatttagacttcatgtttggtaaaataaccattcaattttcttttctttcccattcaagttttttgttcatttttctaccaggttgcctttttcataataatttataggaattctttaaacatcctgaccagtgatctatattgcagtgtcttcttccagtcatggcttgtactttcatttcttccttatggtttacattgatgatcagaaattcttaattttaatatagctgaatatttcctttatgattgtgatttttatattgtttaagaaatctttcgcccaccctgaggtcacagatattccattttgccttctaagttttacagtt

SEQ ID NO: 55916 - DNA, 569 bp, Homo sapiens
ccgggccccccctcggaagtcttctagaattaattaacgcggggaagtcctctatcggttctttatcacgcctgttgcaattttatgatttatgtgagcaaaaaagccccatatttccctctggttggccagtcaatccacagcaccctcccctaagtcacatccctctctgaaaaaccacaaacacctgaagatattttttttagttgtttatttttccttttagttgacacatactaatagtgcatatttatggggtagagtgtgatgttttgatacatgtgtactttatgtaatgatcaaatcagggtaactagcctatctatcacctcaaacacttgtcatttctttgtcgtggggacatctaaaatcctttcctctagctatagtcaagagccacataataatgacatttagtcaaggatggaccacatatgacagtcatcctataatattataatggagctgaaaaaaattcctgtcacctggtgaggtcttaaagatcctgaccctgtgtaggcctaagctaatgtatgtgtttgtgttttagttattaaaaaaaaaaaaaa

SEQ ID NO: 55917 - DNA, 485 bp, Homo sapiens
  misc_feature 32: n = A,T,C or G
gtaccgcggccccccctcggggtacttctagnaattaattaacgcggggagcacaaaaacagcacaatggattttagaaaactgttgggcagtattcttaaaaagttaaatatacagctaccataagacctaacaatcgtactcctcagctggtgaatccaagataaatgaaaacatgtccacaaaaatccctcgccaagagtatgtatagcacatttataatagccggacaaaaacagctcaggggtccatgaacagaaggatagctacataaactgtcatgcattggaatagcacgacacaacactaaaaaggaacaaaccaggctgggcatggtggctcacgcgtgtaatgccaacactttgggaggctgatgtgggtggatcacttgaggtcaggagttcaagaccagcttgaccaacatggtgcgaccccatgtctactatccctaataaaaaaaaagcggccgccaccgcgggggagct

SEQ ID NO: 55918 - DNA, 603 bp, Homo sapiens
cgggccccccctcgaaagtcttctagaattaattaacgcggggatgagaaagtaaagggcttggaccagaactgtgccatgcaaactccatcattctggttactgaccctcaggcttccacgactacccactgacatgcgctcgtcttcatcagaagcctattaaaagaaaggacgagaacaaccgtgaaggaatcatacaacatacatgaagaaccagtgcccaagtttcagggggatgctgggaactgaccccaacccacagcagtgagggggccagccacccctggacatctcaggggacaccagtctaggtcctccacagcatgggctttgtggatctctgtctgcttatgggcaatatggatttaaagtaatttcagggccaggtgtggtgtcatgcctgtaatcccagcattttgggaggccgaggcaggcagatcacttgaggtcaggagtttgagaccagcctggccaacaaggcgaaacactctgtctctacaaaaaatacaaaaattagccgggtgtcatggcacgtgcctgtaatcccaggtactcaggaggctgaggcatgagaatcacttggacccacgaggcagacatt

SEQ ID NO: 55919 - DNA, 581 bp, Homo sapiens
  misc_feature 9, 479, 496: n = A,T,C or G
acttctagnattaattaacgcgggcatacagccttggaaggaagtgaaggcatagatctgtcgaataaacagatttcattttaaatgttacatggagaggtcaccttttggacttcttgcttttcattttcatttctgagaagtttccactttggcattttatttaaaatgtgggtgagaatctgcagataaaaattgagaatcactttaaagcatgaatttcttttgtatatcacactagaagaaactattgtgaagaaatagcaatggccaagcagtttcactcatggaaacttgtgatggctaaacttatagattagatttttttaaaactagctttataaggatttacagtagccacattaaaaaaaaaagtcccctttaacatccaacttgtgtgacatttaaagaaatagattaatgtgtcaacttttctgaataaaattgacatagctgaagttaaatttctgatgcctcangtgctattaatacattnttgaaaataagttcttggacagggatgcaagatggcagccaccacaggcttgggaagtaaagtccctctcatttccgactgttgg

SEQ ID NO: 55920 - DNA, 432 bp, Homo sapiens
cgggccccccctcggaagtcttctagaattaattaacgtgggaggcaggctgcttttttttattttgtactttctcaaatttgctctaatgtcttttaaaaaactaaagctcatttattgaaaattatcataccaggccaggcatggtggctcacgcctgtaatcctagcgctttgggagaccgaggcgggaggatcacgaggtcaggaggttgagaccatcctggctaacatggtgaaaccccgtctctactaaaatacaaaaaattagccgggcgtggtggcgggcacctgtaatcccagctactcaggagactgaggcaggagaatggcgtgaacccgggaggcgaagcttgcagtgagcagagattgcaccactgcactccagcctggggaacaaagcgagactccgtctcgaaaaaaaaaaaaaaaa

SEQ ID NO: 55921 - DNA, 616 bp, Homo sapiens
ccgggccccccctcgaaagtcttctagaattaattaacgcgggatgagagtgatttttttttcctaaccttcattttaaaaaaaatctatgaaatgatatgatttgatttgattagcattaaggttgtaattcactcaccttttcctctctcttttacatggcagtagcctttttcctcagccctatagtcagctgctgtttggtttcaggatctttgcaggcaagccagggactgtttgaggtgaaagagaaaatgggcagctgccattttgccgtctgtctataaggtgcttttgtcctgacataggagacaaatggcatatgttaaaaacaaaaaacaggctgggcgcagtggctcatgcctgtagtcccaaggtgctgggattacaggtgtgtgccaacgcacctggcctctctgtctttctcctcatatatgtgaggagtaaaatgaggatgatactttatagaattgttgtgaggatttaatgagatataaagaacttggagcagtgcctagcacatcataaaacttcagtcagtgttagcttctagtagtactttctgcttctccaatagaagtgggtaagaataggtaaccttgccacattggtattt

SEQ ID NO: 55922 - DNA, 512 bp, Homo sapiens
cgggccccccctcgaaagtcttctagaattaattaacgcgggatcaggaagaaagacaatttttcaaacccacatcaaaatgtgaagaaagaaaactgaaatacaatgtttaaatctatactcacatttctgaataacaccatcatctctctctctagttacattttcaattttcaaatgcttgttttactttatttttaaaattttatcttttgagacagggtctcaaaaaaaaaaaaaaaagcatacattgaatctctctgttttatttcttacaactgcatgcgaatctgcaattacctcaaaataaaacttaaaaaaaaaaagtagttacaaaaaaagagagcgcttaggccttctctgagctcacagatactctcctgctggccttgaagaaacaagctgctggagttctacagttgcaaggaaatgtgttttgtcaacaatctcataagcctagaccctgagcctcagatgagatactgcagcccaagttgacaccttggttgcag

SEQ ID NO: 55923 - DNA, 549 bp, Homo sapiens
  misc_feature 27: n = A,T,C or G
cgggccccccctcgaaatacttctagnattaattaacgcggggcccattcatagatctcaggttatgaatccctgctgtaaatataggaatatttggttagaagaaaagtattaaccaagattccaaagttatttcttaatataccaaggattgaaatacagaaggaagttaacagccataaggacatatgtttacagttttttgagatatggttgacatataataaactgcacttatttaaagtgtagagtttgataagctttgctctgtggatataccatgaaacctgcattcttatttttcaaagacggggaaataaatagcttgtgtacgatggggcagtcctgggctgttgacttgtgtttttgtctattttaggccagaacacaaagcgtgaatccggaagaaaagttcaatctggaaacatcaatgctgccaaggtcacaaatcttttaagtgtttatggtagtttgcctccagctatctttcctggtatttggtcatagccagggcacagtggctcacgtttgtaatcccagcaccttggg

SEQ ID NO: 55924 - DNA, 616 bp, Homo sapiens
  misc_feature 17: n = A,T,C or G
ccgggccccccctcggnagtcttctagaattaattaacgcgggggggggggaggagttggaaaagaggaaagcacagtcatcttatatggttttttggttaaaactatgagagatttgtgggtttcacatcagtcaactttcattattcttgttcccatcttctctgattcacatggtttcagtttcttttgagacgtctttggttcaaaactttatggccatgaaacagagttttaaaaacagtttaaaatttttttaaattttaaaactgttttaaactgttttaaaaacagtttaaaattgacaaaaagttttggaagcaatcagtgagttttgcacaactttactagcagttatttttagtgtgaaaaatggtgctattctatgataaacatgggttaggaatgtttatgtcattattatgtagctacttagagaaataagaccacagtgttacatatgtttgttggaaatggaacttattggaaagttaaaaggtggagattataatatatatacaatatgtgagaaatatattttttatatatgaggaatatattacatggaggcataatttcattgtgttgaaaacagcatttgcttaaactggagaag

SEQ ID NO: 55925 - DNA, 570 bp, Homo sapiens
cccccctcgagagtcttctagaattaattaacgcggggaggaatggaattacagctgccagaatgagagtttgatttctttatacatgtcacaatgataagtacttataacagggaacctaccatgtgcctgccaggggctttcataaaaaataccaccaatcctcatgctatccttgtgaaacaggtgttattttagatgtacgaaaactgaggcttagagaattaaggaaacatgcccaaggcaacacagctaataggtgggtaaactgggattcaaacctaggttggcctgattctgaagcctgaggttccctttctattactccatgccacctcctaatgggccagagagctttccacattatcagcctgatgcttctgtctgaatctcctcccagctcaaatggggacttttggtcagacagcaagagcagctgacttttctagctctaaccctctaaggtctggggaccctaaatccctgaagactaagtaatttcaaggaaactgttctgtgtgggccctgtgagcacatgctggcctctgtatttaggcctgctttggatct

SEQ ID NO: 55926 - DNA, 585 bp, Homo sapiens
cgggccccccctcgaaagtcttctagaattaattaacgcgggcacaaagaagggaacaacagacactggggcctacttacgggtgggaggtaaagaactgaaaaactacctattgggtacaatacttactgcctgggtgacaaaataatctgcacacgaaactcctgtgacatgcaatttacctatataacaagcctgcacattacccggaacctaaaagttaaaacaaaacaaaaactgctcatgagcatctactaataaagcaatcactttacataaaactgtactatattagaatttgtcatttctcctataaattcacagctctgttagcaaatcttaggtttactcaaaactgaaattacaaacaaattttattaagcaaaacatatgccatcatttttgatggataataagaactctacctaaactagccttaaatatttagctacaatccagatgacaggtactctgaatgtaaatcttggctgcaaactgaataggaccatttattttcagtagttaaagttctaccaccttttcctaagaaaagtaatctaattagaactgcagatgctatacaca

SEQ ID NO: 55927 - DNA, 286 bp, Homo sapiens
cggggccccccctcggggtacttctagaattaattaacgcggggactggactttgttccttccctttggtagtttgttgggacccatgggtgggcatgggaagctgacatttccaaaggaactaccaagactattttaaatataatttttaattgtgcttttaaagaagatgtaattcttcaccacctccctatgaactagggtgcatggtcccctttggagaggaaactgaagcccagagaagtgaagtgggttgcccaaaagcacacagcaaaaaaaaaaaaaa

SEQ ID NO: 55928 - DNA, 359 bp, Homo sapiens
  misc_feature 17: n = A,T,C or G
ccgggccccccctcganagtcttctagaattaattaactactggagtatttaattcggcgtatacatttccaatgtgtaactgccccttttcccatgatccaattaatttctctaagacttctctttgaaaagtcttaagactagctttttttcccattaaatctaatgggtactgtgaatcttccaggtgactatttctctctatgcgttgaaatgaagaagagcagagaaggtgtcagacttctaaatctatccactagaaataaaaatatataatgctgcaataaaatccctatacataatctcttttatttgctgaaacggagtctcctaacaacaacatgaaaaaaaaaaaaaa

SEQ ID NO: 55929 - DNA, 608 bp, Homo sapiens
cgggcccccccctcggaagtcttctagaattaattaacgcgggcatattggtgagcttgtagcagttaggatagaaatgacatgtacctcattgatttgcaactagtacaaagtttaaattaattgacagcaagcaaagaactagaaaaactaaaagaattaagtatactcacattctgtatctgtatacctaccccatttgttgttgaaaaccctgtgcctgaattagtctgcagttattactatgaacttacccatttacaagtgacaccaatatgagaactcttgaaaactagagattgcctttctctgtagtaaggagtatgctgtatgtacacaaaagaaatgttgttctacagagaaacttgattatgagaattattgttttgttttcttccaaggttaagcagcatattgtttagtgggatttagtttattatttagtttagatttagtgtcctaatatctgttttccctgtctcctagaagactgtaactacagcttctatgattaccacaaagacactacctctcgtcttgaaagcagcaactgcgaccatgcctgcctctgtggtgggccagagacctaccattgctatggtgaccgc

SEQ ID NO: 55930 - DNA, 612 bp, Homo sapiens
  misc_feature 34: n = A,T,C or G
gggtaccggggccccccctcggaagtcttctagnattaattaacgcgggtgtgtatatatacacatgtacacatatatatacttatatatacacacatatgtatatatacacatatatctatatatatacacagacatacacacacacacatatacataatatatatatgctcactaaagaaagtttatttaaaacttttaaccataaaacagaatagaaaggagtggaaaatagataaggcggcaaaggactggaatctcttcccacttccgctatttattgactgttccaccttaaccaagacacacaatccatataagcctgagttttcccatctataaaaagtaggcaatagcatctacattattaaactcaaaaagtacatgcaagttttgtaaattctaaagctgtacataaaatagattttaagcattttcctcaagtaaatttattttaaaaacctattctattctgaccatttccttacctcaccagtttgcttgatactgctttgctcatgcttatgtgtcatattatataaaaagcaatattaataagtactatcataatttccattttatatttaaataaactgagacacagagctaaga

SEQ ID NO: 55931 - DNA, 576 bp, Homo sapiens
acttctagaattaattaacgcgggtgtttatttcagaataaatggtctctgagaaagctgaaatcacttcacatttgtgtgctcatgaagtaagggtctctgattcatatcggtggagagagctaaatgttattgattagaatatgaagctgttacggccaagtgtgaatgcacaccaagtggatactgaatcagaaataatttccaaatctggaatttccttaagagtcattcataatgttttatcctgaaatattattagttctgttttatacatacacatgattactttttttaaaaatactgatttttttccaagtgcatccttttctgctgctgaactcagcctacgaatcaaaaggtgactttcactttgtttactttattctactccgtatacccagcacctgtgccagtgcccggcacctactaggtgctcagtaaatacttgcaaatgaatccaatagaacccattgtttttatctggtcaaagcctgagctcctaatttggaagctacttagagcaggttctgttcttctaccaaactttgagctgtgggtagggacccattcaca

SEQ ID NO: 55932 - DNA, 510 bp, Homo sapiens
  misc_feature 14, 16: n = A,T,C or G
gggccccccctcgnanatacttctagaattaattaacgcggggtggggatgagggctcaagaccgagagaaatgtccacggtcccaggtggttaacaaagttctggcagctaaaagaaaaaaaaaaaaaaaaaaaaaaaaaaaaaaaacaaaaaaaaaaaaaaaaacaaccaccaccaaaaaaaaacctcacaattcaccctataatgaaatccctttatacacactagttccccccccccctggggggccttccttttccccttttttggtttttttttcccccccctctttgcccttttttttcctccttcggccttggaaaccccttgctttcccccctttttttccctttccaccatttccccttttccccttttggtttttttccaaagcccccccccctttccccctttccaattttttccccccttttttgccaatttattttctcatcctttttttttttttaaatttcccttttatttttttttttactcccttttttttt

SEQ ID NO: 55933 - DNA, 602 bp, Homo sapiens
cgggcccccccctcgaaagtcttctagaattaattaacgcggggcgctcatatgtttgcatatgttgtaagctcatagaacatggaaaaacacacaatagtttacatcagtggtagtagtggtatgtattttttaataaaactgtaaaattatttatggtctgttaattgcaaatgtagactataatactctataaaataagtgaatgcaatgtgtaagatatgaataagaaaatagactaaaactggaaggtaatataggcaagtgaaaacacaatgttaatgaagtgatagggatatagataatatttatctttgatgtttgttggtattttaaaattgtttttcccacaatgtgctaataaccataaatgaaaatggtaattaggcacaaaaaccattactcaaaaagaaaatctctcctctactttctaaaagcacagcacaatttttttacaatagtggctctcaacctgaaacaattttgccccccagggtgcatttgataatttttgaagacatttttggttttcaccatttcagggatgccagtggcatccattaggtagaagcaagggattcagttaaacatcttacaatgca

SEQ ID NO: 55934 - DNA, 592 bp, Homo sapiens
  misc_feature 89, 578, 579: n = A,T,C or G
cgggcccccccctcggggtacttctagaattaattaatgcgggcccgccccagcctccttgaaaaccctcccaaggagagaatgagttngaaaatctaggcaggctaaaagttggcccatctttctcagggggagagatgaggaaagggagtgtggccgagggtagctcactctggtctttgtgaaggctggggcagggacgtcgcaggccactgcagctgctggtggggggccactgctacctttggccccttttctttctttcagaagaattttttttttaaaaatatgtaatttatttttatggaaaagagagaaaggaaggagagaaagaaaaagcaaaacgagacagaaaaaatcttcttgtccctcatctgcttggtaccaggggattcccacccctcctcctaaactccccaacccacctctcttccctccggactctaaacaggaacttgaatactgggagagaagaggacttttttgattaagtggttactttgtgtttttttaatttctaagaagttactttttgtagagagagctgtattaagtgactgaccatgcactatatttgnnatatatttatatg

SEQ ID NO: 55935 - DNA, 591 bp, Homo sapiens
  misc_feature 43, 49: n = A,T,C or G
cgggccccccctcggaagtcttctagaattaattaacgcgggngaaaanaaacgcgtttcaatctggcctgtcactttactaatgtaaatagctatgattctgtttatacagatcggttccaatgacatagcagagaccgagttttattccttttactatttttgtgatgagtagaatataatctctgaaactgtatttcagaggatgatacgagttctaaattcatgtatattgtatatatatgtatgtatatttaaagtgtttcctgaacaatccaaatttccaacagtttcagaattattattagatatttaatactactattactaagtatttgagtgaaatatctgttctttataaaattattaacctactgaagttaagaaaagcaagtgactgtcatttcttagctgtgtgtcctgtagcaagtttcttattctctcaactgcatttttgcagatgatgttatatactgaggggcaatttgggtggtgattaagagcatggactctggaaccctagtgttcaaatccttgctctgctatttactagctgtatgtgttttggcaagttattaacaatctgtttca

SEQ ID NO: 55936 - DNA, 617 bp, Homo sapiens
  misc_feature 24: n = A,T,C or G
gccccccctcggaagtcttctagnattaattaacgcggggtgggtactatacatagggtcaccaattcattcctgaactgtcccggttttaaagctgaacattgacaacctggaaaaccccctcagtcccagacaaactgggactgttggtcaccctgcttggatgttacatgtaacacctgaccatcttttgtactgtacaaccttacaattttgtagtgttttcagagtgctttcatctgcatgctaagggaatacaaacttaattactgattgtctttgcaaaatataattaaggtaaatatgctacaaaaatatctaattataactaaaaactgtttttggcttgttttgagtaatgactttacatcacagcttagataattgaagaatgactatatatatattttaaaatatgcttccatagggaaaagaaaaatcggtcatttggaagatatcccaaaacattaaatcttttcttcagcaggatgactctcaattttctaaaggcattgttctaccatacttctgtctcagtggttttctttgtcctcaaactcataccattttacatctctcctctcctgccttggcaggagttcattatcagacaatgt

SEQ ID NO: 55937 - DNA, 581 bp, Homo sapiens
  misc_feature 47, 57: n = A,T,C or G
cccccctcggaagtcttctagaattaattaacgcggggattcttgcngaaaactggngaagaaacaaagagtttctttgtttctaacaagatgggggacttttttattggaagctatgtggatgctaagagttactaagaaaaagcaccaaacaaaagagcatatgaattgaccgactgacgaggaatcaagaatgtgctccaaagcagagaactgggaggattatacctgaggactcataaacttagaaaggtttttgattatttttacttattaaatttcatcacattccaaaagtgcttcagagcgcttttaaaaatagctccaataccaaagcccaaaactgaggaatgagaaaatcaagaaaaggcaaaaataaccataggtaactaaataagggtctggttaggacttgcacaaagaaatgtaaagcacaagctcttgtagaattgttgagctgggaaacaaatttggctttaaactttctgggattcaaagcaaaaaaggatgcaggaatagtgaggccactaattttttttttctttcccaattatccttcctccaaaaaaaaaaaaaaaaaa

SEQ ID NO: 55938 - DNA, 590 bp, Homo sapiens
  misc_feature 43: n = A,T,C or G
cgggccccccctcggaagtcttctagaattaattaacgcgggnaaatgaaagagccaaggcccttgatcttgaaccatcattacaagcatgaagaagtacagaagcataagggcctcccaatgccatatttatctttaggtctcagtttccaaatctgtgaagtagggatagccaccctgtctcttccacctcagctaactctggcttcttcagtacctcctgggcctcttgggtgaagaagggcaccctgaccctcctgttctgaccctaaggaccttctgaatgggaggccaggaaacagtagacatgatagaaataatcagcataaaggaaaactaacatcagcttgaatctgccctagagaaaactggatgtggtagagaccatggcaaaaaagagagaacagagaggaaggaaagggaaaaatcggaccctatcagcagctataactggaaattagacctggaaaaaaaaatgagttcaatctttggtgcaaaatttacacattaaaggataaactctgctaagaataatttccataacaataaaaagctggagaaaatcctaaacatctagtggaaccatatgg

SEQ ID NO: 55939 - DNA, 507 bp, Homo sapiens
  misc_feature 43: n = A,T,C or G
gggccccccctcggaagtcttctagaattaattaacgcggggnagaatatagaaaggccaagtcaaacaatagagggaaaacaagaaaaaaggataatcaaaaccatacgtctacgttaatgcacatagacatatttagatggactttttaaaaccttttttcatatagttaaaccaaggctcaaaacaatccatcaaagaataattgataaatgaaaagacaagccaaaaactgggagaaaataactcacaagtcgcatatctgataaaagacttctgatcagcaaatataaggaattctcaaaactcaattaaaaaaaggttttttaacgtgcaaaagattttagcagactcttcaccaaaaaaagatatacagatggcagataagctcacaaaagcatgctgaatatcatttgtcatccaagaaaatgaaaactcaattacatatcccactatacacctatccgaatggttaaaagaagaaaaaaacctggcaataccaagtgc

SEQ ID NO: 55940 - DNA, 600 bp, Homo sapiens
  misc_feature 27: n = A,T,C or G
cgggccccccctcggaagtcttctagnattaattaacgcggggggaaaaaatcctcagaagaacaaattgctaagctacagaagcttcatgaaaaggagctggccagaaaagagcaggaactgaccaagaagcttcagacccgagaaagggaaaaggaacaacgaaagatgttagtttctcctgaattaatacataagtctagcaaaacctcaatggaaacttttcataattcatcagaacaactttacaatgaatctggaagaatgacaagttaaaaacagctaagacatttttgaaagaacacgaagacaggatttcctttaacatagattagaatatattttaaagctacagcaactgtccagcaaggtactggctcaagaacaagtcagcatcagtggcacataactgacctctgaaaccaaacttacaagcaaaatgaaataaaaagaagcattgcaaatccatgagaaagggttggattaacaaatgctgttgagaaaattgactacttggaagccaatctttttagatcttaatctttttctcaggcaaattccaagcaagttatagcattaagtatttaaaaacctcatagc

SEQ ID NO: 55941 - DNA, 619 bp, Homo sapiens
ccgggccccccctcgaaagtcttctagaattaattaacgcggggggacttgtatctttctccgaagtttgtttcataattttacaaagcctatttgagagaagttggtaaggttgacccaaagggcaaggtaacttctttgaattttagtgccgagaagtaggacacagaattaataagggggaactctttggaaggggtcacggggcagataattgttctgttacattcatgggctgatgatgtcattggaaggcacttgatgacagattggtagaactgtactgtgcattagagcttgccaccccagcaaacccactgatgggacttggtgttttggttactccctgaagtacagtggcagttgtcccgggagtagaagatgttcttggaatgctgtcattattaccttggctcacgttatttagaaaaagaggaagatgccttcttggcctgataatgtgacagccacctgctgtcactcatttttttcagtgctctgaagatgaccagaacctggtcatcaggtctcctttaaaaagaacaaaacacagacatgcataaaatcatacagcataaaaggatgatgtcattctcagggagacagggcagcatgtgca

SEQ ID NO: 55942 - DNA, 590 bp, Homo sapiens
ccgggccccccctcgagatacttctagaattaattaacgcgggggtagtatatcttggctataaatgtctaaatagtacttaataagcatctaataaatgtttgtttaacgaatgaatattggaaaatcaaacttttggaatggcctgggcctgtaagtgaccatggagagcccatggtgatcatgggttaggagcactctctggagctaagcagcagcagcaactgcttagtacttgtcaacaacagaaaaataattaagagctgaagaaactaacttcggttcagcagtcttttattgagcacctattgtctgccagacagtgtgctagatgttggctttgcaaagataaacaaaggcatctggtcatttcatggaaaaaacacataacgacttgtcctgaaagaactgagaagtaataaagaatcaatgtgtacatgagagactagaagtgagaaaagacatgagaaagcagcagattaatgctggtatgatctgtggatatcaagaaagtaaggcaacagtggaaaacataaaagagcttgtgggagagtgaatctgaggtaagaggtctctgtaccccggatata

SEQ ID NO: 55943 - DNA, 583 bp, Homo sapiens
  misc_feature 547: n = A,T,C or G
cccccctcggaagtcttctagaattaattaacgcggggatgtagcttgtgaaccttggctctggagtcagacctggattttagcctacacctcctgaccacagcacacgtgaccttgagtaagcccccaccttctccgagcacaaattcctcatccacaaaacaggggtgtacctctgtcagagtccttgaaggaatcaacagcaattaatggaactgagtgcttacagcctgacagcatgctgtggactttttgcatgtatgtatcatctaagcctcaaaacaaccctgtaagaatggcaatgttattaatcccattccacaggagaggaaactgaggcacagggaagtaatttgcttaagtacgtggtttaggaccaggaatctgactccagagtgagtggttcttcaacccctggattgaataaagtccaaacaaagcacttggcactgagtaagcactcggctcataacagcggttgttagttcggttcattcattcattcatttatttcttatggcctcagttaattggatcctgtgaatanggagatagtatacaccctactcacattacatagcta

SEQ ID NO: 55944 - DNA, 577 bp, Homo sapiens
  misc_feature 27: n = A,T,C or G
cgggccccccctcggaagtcttctagnattaattaagcggccgcttttttttttttttttagtactaagacttccttatacttagaatggaatttcatatttctgggcaggtttctatatttctgggtttcagtcacagccagtaaaaataagagagacactaaacagaaagacattctaggacaataaactagaaaataactaattcatcaaggtcaagagacagggaaatttcaaggtctgtctatccaagtggatgagccagatggctttgtttctaggtttgttctcattatccttgatacgtggtgatttatggaaaggctacattaaatgggacatctttatttggaaatgttcatttttatactacatgatggacatccatagtctttctgtatctctaaaaattactactaatctttggaagaaaacacagattcttttgtcacccgcgttaattaacgcgggggagggggttggctttctgactgggaacttaaaaatcactcttcatgcttccctggtcctatgtgataacagagttagagacttgagtctgatttcagtcatcttc

SEQ ID NO: 55945 - DNA, 576 bp, Homo sapiens
ccgggccccccctcggaagtcttctagaattaattaacgcggggtgctattacccccacctgatgtaactactatttttaatcttgtgtttattattaccttttaaaatataattttatttgtgtattgctaaaacgtgtcatttacttttggttattttttactttataagaagggcattttctgggacttaccatttttcacctatgttgataggattcagcctgggcaacattgagcattgagtgagcgagactccgtctgcaatcccagcacctcggcctcccaaagtgctgggattacaggcgtgagccaccgcgcccggccgcttgtctttttaaacaagcgtctccaagataaatagcaaaagaaaaaaagagggtgtgaggctccagacccacactcactcacttaatcatcttcttctgccttgtatagaatgatgtacatatataccttagacaacccagagtttttccctggtggagaggggagactttcagccctacctgtttccaggactgtgcacttagttaagggtgtgtggagagtgaggggaggcctatagatagtggt

SEQ ID NO: 55946 - DNA, 600 bp, Homo sapiens
cgggccccccctcgagaatacttctagaattaattaacgctggtttccaatactggtggtgatggaatttacaaaatcatttattttgtgtaaacaagagttaacctgttctaaaggtaatatgattactctgtactatcttaaaaatagtcttacaatattcatgagtatcatgtcaagtgctggaaacagtcaccatatatgaggtaacaaaaaggtatggtatagagtgtatgagttttaaacacagccagatctgaattttagttataggttcattactgtgtgcccttggcccagttacatatgctctctcagattccagctttccttctggaaaatgagggcaaataacatccatgttaacatttcaactttcatatgtttttatatttatcatttattcatatataaaaagtttataactcagctatctgagttgaggaagcatgtgagctagattagatactgcctatctctagtgtcttttattgaacatattacttattgaggagcaagttatagaagaacttgaagcaagttttgtaaagttttaaaagattattttatttaaattttgagacttcctactctaagtga

SEQ ID NO: 55947 - DNA, 607 bp, Homo sapiens
cgggccccccctcggaagtcttctagaattaattaacgcgggacagtaagtggaactctatacctccacctcgcctggctgggtggagcctctaaactcaggattctgccttgagctgtggctctcccctcaggttgacagggtccagagcaaaacctacggaagaagctgcagaggccaggtggagggaaggatgctgaactggaggaggccaggaaattatgaggtacaccaatcaaacatagtgtgtccagaattggtgggttcttggtctcactgacttcaagaacgaagctgcggaccctcacggtgattctaagcacattaaaatctggatgacacttatctgaatcatttcgcaacttggagagagatggagaagacacgcatggtgtaactgggcatcaccagaatgtgcactgccatctgtggctgtcttcctgctggcaaatccttttcattccaagcaaataagattccctaaattagacaaaaaggaagaaacacaacagagtccataattctgagaggaagagaagagtgatcatcagcagcaaaaggcaattgcagagaagcaccaccaagagccagcttcatgctcaggagt

SEQ ID NO: 55948 - DNA, 601 bp, Homo sapiens
cgggccccccctcggaagtcttctagaattaattaacgcggggcccttccaaactttgcaaggaaaattaaaaaaaataagaaatctcaacttctcccatccaggggccatggtctccagaccctttaacacaaggacatccagctttgggcttccccaagatttaccttgggtcacatccagacgtctggaaccattctctccctccctttcttcttcaccatctgtgggcctatgccaacccctgaagaggccaagatgaataaaggcaagccctacccttgggggttcacagcctcccttccctctcttctctcttgttggcattttattttccatctcatctttcttctttccttttcccattccagtttccatttttcttgattggctttttctacaactctccttccatgtctgtctacattattgtctcaaggtgactcatcacagataaaccaggaagaaaagattcaagagggaaagcaggaattcaacagaagatgacagaaaccttgtcaagatggcctcaagttgataacaagcatcttgctattggttatgtgtctgagttttgtggctgcttggaagagaggcactg

SEQ ID NO: 55949 - DNA, 465 bp, Homo sapiens
  misc_feature 30: n = A,T,C or G
accgggcccccccctcggaatacttctagnattaattaacgcggggtgcatgcatacaacatgtacatgtacacaatgtgtatacatgtatacaatgtgttaataatcaaatcagggtaattgggatttcacctcaaacatttatcatttgtgataagaacattccagatcttctcttcaagctatttggaaacatacaacaaattattgataactatagtcaccatactgtgctactgaacactagaacttattccttcttaactgtatttttgtacccgttaaccaacctgtcttcatcctaccttccccgctacctttcccagcctttagtaaccaccattctttctactctatacctctatgagatcaacctttgatatatgggatcatatatgggatgatatatgggatcatagctcccacatatgaatgagaacatgcagtttttgtcttcctgtgcct

SEQ ID NO: 55950 - DNA, 511 bp, Homo sapiens
ccccccctcgaaatacttctagaattaattaacgcgggggtctttgacataacttaatctacagagcaaacattaagaggcaataagcttatttatgccaaatatctataccatacctttataattcattagcagtcatgttacaagtaccacaataaagtgctattactttagcaaagctggtttccactgattatcctttgaggatgtctctttccaagttattttattattattttcctcagcatctctgcagatttccctttattcttcaactccttctcctttattcaatacagatggacacacagatgaacagtcagatacagtgactgttcattatcacaccatacagagtaatgtttaaaagcatggatttgccgggcttggtggctcatgcctgtaatcccaacactttgggaggctgaggcgggcggatcatgaggtcagcagttcgagaccagcctgaccaacatggtgaaaccctgtctttaccaaaaaaaaaaaaaaa

SEQ ID NO: 55951 - DNA, 624 bp, Homo sapiens
  misc_feature 38: n = A,T,C or G
ctgggttaccgggcccccccctcggaaatacttctagnattaattaacgcgggggggattatagagattaaatctaattccacatttctatgataatgcagtagagaaataggttaaaagacttcttcaaaaatcacttacatcccagttaccctgatttgatcattatgcattgcatacaggtattaaaatgtgacatgtaccatgtaaaatttttatatatcaataaaacagtaacctgagaaaaaagtaaataaaatgagtgagattataaaaaaactacttaactatttagacatagactcaggactaagctagttgcttcagtaagtgctaaataatatactattatatgtaacaatattactggctgaagttgtaatgagattcaaggtgagtcagtttctatcttctccttctttctctttatctcctttcttccacccccacccccatttagagacatacacctctgcaacattggtctgttttatatgtgtgtatgtgtgtgtgtgtgtgtgtgtgtatgtataacaggaatattttatatatataaaaaatatttgtagtctgagtttgaaaattgtagaatatagaatttgaaaagcaccaaattttaagaat

SEQ ID NO: 55952 - DNA, 342 bp, Homo sapiens
  misc_feature 28: n = A,T,C or G
ccgggccccccctcggggtacttctagnattaattaacgcggggtgggggagtcgcttgggcctgggaggcggaggttgcagtgagctgagatcatgctgctgcactccagcttgggcgatagagtgagactccatctcaaaaaaaaaaaaaaaaattacatccattccttctactacacaccaagataaattttaagtggatcagagattaaaataaatgtaacaaaatgacttcatacaagtacaaataaaatgcatgggaatttccctgtaacttggatgtagggaaaatttcctaatagactcaaaattcatacacactaaggaaaaaaaaaaaaaaa

SEQ ID NO: 55953 - DNA, 616 bp, Homo sapiens
  misc_feature 35, 592: n = A,T,C or G
tgggtaccggggccccccctcggggtacttctagnattaattaacgcggggggactgacaattttcttcttctctatccatttccatagcagttttcacagatttgtggccagatgctagagacaaaggctgagaagttgtccaggacgtcatattcttgctttgctggaggcagatctgaaggatgtcatctctcctgtagcttcttctagtgtggggtcccgaagcctggcttccccagccgatgtgctgctttagtcagcgtctgccctggtccttcggttcgcaggctcacacgcttttttgggttgtgtccctttggactgcagaggctacgtgtcctgtgaccaaccacgaaggcggccactcccgctcccctcaggagtgtcttaaaatacctccattttagctaccctattgaatgacaggttagctgggtgctgggttttcaggtgatggacattttccctcagtcctctgaaggtgttgctggcttcaggcattgatgccgccactctgattgttgtatgcagtgagcaaactagaattttctcttggctttctagattttcttctttatattctgaaactntattatatcaaggtttgaattttc

SEQ ID NO: 55954 - DNA, 566 bp, Homo sapiens
cgggcccccccctcggaagtcttctagaattaattaacgcggggtttgaggaataggtttggcaatagggttagtataaaaatgtgaaacaagggaatcttcatctccatcctgctggtgattctcatcaacaggtttgcttaggaaactaaatctgcaaaggaaaagaaataataccttagcctcttgtagtagtaataacaatgataatagctaactaataccgagcctttactaagtgcctggcactgttctggatagttccatgtattaaaaattcacttaatacttactacagcagtactgtgaaacagataattactatctctattgtatactctcctatatggaatcaaataattggttaattttaagattaaaaactgaaaaaaatgttagatttttaagattacaatcaacaaaatgttaaaaaatgctttataaataataataataaaaaacactagaattttatccaaaagaaaaaaaaaacaggagtacaaaggtgtctatacaaagggtttctttttttttctttttcgtgatacagccctcaggaggccctg

SEQ ID NO: 55955 - DNA, 594 bp, Homo sapiens
  misc_feature 28: n = A,T,C or G
ccgggccccccctcggaagtcttctagnattaattaacgcggggtattcatcttgtattctagtctcttatagtcaagaatgtatcccataaactaaagagaagttaattcctttattaattgagaacaaacaaaaatggacagcttaactgagtcctgccaaaattactgactcaggaaatcatgagatataataaatatcacatgtatagtttgttatgaagcagtagataaccagaacaactgatttaagaatttaggttgtgaaatcctccccctttccctccagtagaagtgactggaattagatgatagaggagcaaacagaaatgtaactgtagattgatgtcagaatgaaaatgaatttggaaaaaattaagctcttctcatttcagcataaatttagacacttatattctagaaagtgatgatcacatggaagaggaccagctaagcactgattgtatacaacaattcatttcatatgagaaaatattagcaaggaaatgggaattattgctagcttttgcttgtaattgcatgctctgtgctcatattttgcctataatacctaacactatcttatgtacctct

SEQ ID NO: 55956 - DNA, 580 bp, Homo sapiens
  misc_feature 29: n = A,T,C or G
cgggcccccccctcggaggtacttctagnaattaattaacgcgggggtgacataaagtatagaagaggatgtgcataggttatatgcaaacactacaacattttatataagaaacttgagcatccagattttgatatttgaggggagtcctagaaccaatcgcccacagatactgaggaacaactatattctagtctgcctaatctggctgtttttcacttggattaatttaagcctcttaactaatttccctaaacaagttttagccttttcaatccattctcctcactgatctttctaacagacaaatcttaccatggcattccactgcttctgcttacaacttttcaatgactcgagttagttctaaattcctttcaaaaattcagtagtaagtgtggttcacaaataaatatgttctatccaaacatatcatttttatttagcttctttttttggggggacgggaaccattcctaaatataaacagacaatcacggatagcgtgaaagaaagcttccaacacagaagagatcaaaaagagaaaataagaactctgaagaaacagatataatacaga

SEQ ID NO: 55957 - DNA, 486 bp, Homo sapiens
  misc_feature 27: n = A,T,C or G
cgggccccccctcggaagtcttctagnattaattaacgcggggttttctgtgtttttttatgaggaactataagttaccaaaagttgaatgttgtcatttatttgtgctcagtaatgattttcatttctttgttatcagagcttatcacacagtgtctgaagtccacatggtgagagtggcctgcattccattccagtttctgtcctccaaaataggttctgaatttttacaagttagaaatgccttttcacaattattcatccagatttgcctattattagaacaccaaaatagtactagatgctctgagaaaagcgtaagtagtataatacctggcataaacagctaaaagaagagaaggatgggcatgaaagctggagtggtcaaaggaaagcctggtggaaaagacaggatctttgtatatagaaagctcgagatgggcctttccaggcacaggggaatgctgtgagcactagtacagagga

SEQ ID NO: 55958 - DNA, 598 bp, Homo sapiens
  misc_feature 28: n = A,T,C or G
cggggccccccctcgaaagtcttctagnaattaattaactcgggggggctgaggcagaagaaacgcttgaatccgggaggcagaggttgcagggagttgagatcgcgccattgcactccagcctgggcaacaaaagcgaaactccgtctcaaaaaataaataaataaaaataaaaaaataaaaatacagatacaccactgtgaaagaggtgttccaacattaattactgacgaggtagacagtggaaaacttggagaacactccatgaagagcacccacctgctacactatttagaaccagctggcacaaggggccacctttgaagataggcaaactctctcccttctgcccaaaattcaagaaatgttgtggtgaagagagacattggaggggaaaatgactataactgctgtcttgtatctatctgtcttttgaaatttctattttatgaaggcatatcatctgttagtatcaaactgcatgtgcatgaatttaaaaatacagccgggcgtggtggctcacgcctgtaatcccaggcctgtaatcccagcactttgggaggccgaggcgggcagatcatctgaggtcgggagttcg

SEQ ID NO: 55959 - DNA, 441 bp, Homo sapiens
cgggccccccctcggaagtcttctagaattaattaacgcgggggatatgaaatattttatgtctaaccttaataagccccacctagcaatgcagggctacaatgatattgaattttaactagatctagagtacaacctctaagtgtagattcaacattaaagcaaaatacatgcaactagttttgaaattttgagtaaactgacaaaggagtacttttaaagtaaaaaaatcaaggaacacccaatgttaaaatataacatttgaaaaacatttcaaaaataatgaagctttaaattggcaaggtccgaaccatcaacttgcttcaatttgaacacttaacgcaaacaagaaatgcagcagctgtcagatgccgttagtgattcaactctgaaataaaaggttccaaccataactcttaaaaaaaaaaaaaaaaaaaaaaa

SEQ ID NO: 55960 - DNA, 595 bp, Homo sapiens
cgggccccccctcggaagtcttctagaattaattaacgcggggttggcattaccacctgagctcagcctcctaacagatcaggcaggcattagattctcatagaagctcaaaccctattgcgaactgcacctgcgagggatctagcttgtatgctccttatgagagtctaactgatgcctgatgatctgacgtggaacagttttatcccaaactcctcccctgcgtctgtggaaaaattgtctccaacaaaacaagtacctggtgccaaaaattttggggaccactggttaatgtatgttagtgatcagaacatttccagggcctaaggcatgagcctgaatgggctcaaaactgaagattctttaacaaccaaggatgttagagaagaggaagaaggcaagagagaaacctgttggaaaataattactataggagaacaaatgaaatatattccttcataattaaaggctactcaagcctatgatagtcataacatgacacaaaacctgcactttggtatatatgcgaagggttagatcacccaatggaagacctacttgtttgccatggctgaatggcattctcttaaccatc

SEQ ID NO: 55961 - DNA, 602 bp, Homo sapiens
cccccctcgagagtcttctagaattaattaacgcggggtctgcacgaagcccttgtggttccccccacccctcaacctcaaacgcatcaagctgaccacagccctcccctagacaacaccccgagtcctcatgcatgaaatgatgctccagtcctcctcaaaagcagggagatgcaactaaaaccacacagagacagatgatcgggctgaatatcgtcagcgagaagtcacatgacatcacacaccagcgagaagtcacatgacatcacacacctgctgacgggacatcacacacctgctgacgggacatcacacaccggctgactgacaggatgaggtgagaagggcctctgtggccttcctcccctaaacccgcagccccacgtagtcatgagaaaaccggccacagggcatcaggccagcactcctcaaaactgtcaaagtcacggaaaacaggaaagtccaagaaactgtcagagaccagaggacaatgaatagagaggtgacaactgaatacaacgtagaaccccggcacagaaaagccttagttggaaaaactggtgatgtccaaataaagcctggagtttggtaaacagtaacgc

SEQ ID NO: 55962 - DNA, 465 bp, Homo sapiens
cccccctcggaagtcttctagaattaattaacgcggggctaaactattactatgaaaataaaaatgctctttcaaaataaagacatttcttttcaaatgtattattttctacagaaagtataatttactattaaaatgataagcacaaaaaaaagagagcaatacattttcagaaataaactttttctccagataataccacttacaaagcagagcatattacatactttatattactgtgttttgtcattgtgtgttggttttacttacccgaaccgtgtaatggattgtgttctgtttttcatattgagaaaccactaatgtaaaggtatgggtgccaggtgtggtcagctttatcttagtcaaataatgagggctgttaattcgaattccatcaatgtatggaggtgggtcagctgcaaacaaacaagtaggcttagagaaaaggagacttttctttcttta

SEQ ID NO: 55963 - DNA, 395 bp, Homo sapiens
  misc_feature 28: n = A,T,C or G
cgggcccccccctcggaatacttctagnattaattaacgcggggtgggggaagtgggggacaggacactaggtgaagttcaaggagaagtgaaaaggaagaaatgacttcagagagtggagaacatattaaaggaggcagtaacacttccgggtcgagtgtcatttgagatttgtggcaaattttaaagtaaccctggtcagaactgctggcttttctctggcaaacatcaaccacttggcccttcaaaggtggcctcaaactactctttcaaccatctcctgacattccctttatgttcctctgtggttttcaattttcttggctgcaggatcttttttaccccctttacgtattatattcagtaccccagttaaaaaaaaaaaaaaaaaaaaa

SEQ ID NO: 55964 - DNA, 599 bp, Homo sapiens
  misc_feature 41: n = A,T,C or G
gccccccctcgaaagtcttctagaattaattaacgcggggnaatttacagtactaaatgcctacattagaatgaggaacttctaaagtattacatgcaaaaattctccataaaatattagcaaattaaatctagcaatgtacaaaaagaattatgcaccatgatttatttaggatttattcctaggacacaagggcaacataagggatctttgtggtcatgaaactcttctgtatcctgactgtgttaatgtcaatatgctcatgattgtgttgtaagatattagcactggaggaaaatgggtgaagggtacacaatctccttgtgttttttcttacaactgcatgtgactctacaatgatctcaacaattaaagcacctgtggatgctgactataattcaactcagccatcaatgtttaagcaatgttatgttatagaagactgacagtgtcgtggttgttgatactcaggggtaagactctccaaaactaggatttgagattgttgtctgagatttcaactttataaaccacgcgaaatgaacagaagatgaaatacacaaattttcaaaaaaaaatcactatgatcactatgattg

SEQ ID NO: 55965 - DNA, 444 bp, Homo sapiens
  misc_feature 421: n = A,T,C or G
cccccctcgaaagtcttctagaattaattaacgcaggttgatttccaactttgtcccaagtctgtctcttttagagaaaccctcgaactactaatgaattaagagtgttgatagcactttcaatctggacagtggggatttataaattgccaaatagcagacaagtattttagtctttcttataaaacaaaacaaaatcagatcttttttgggtataaattagttatgaagaaagaaactattgtagaataggtactcttatatactggtggtatgattataaactggtacaatctctttagatttgtgacttagaaatacattttttttttttaagagacagggtcttgctctgttgcccaggctagtgtgcaatggcgtgatcttagttcactgcagcctcaaactcgtgggctcaagncatcccctgtctcttaaaaaaaa

SEQ ID NO: 55966 - DNA, 585 bp, Homo sapiens
  misc_feature 28: n = A,T,C or G
cgggcccccccctcgaaagtcttctagnattaattaaactctttttaacaaattttataattaaactctttagaccagaaagcagtaaggtaaaaacataaatgcctaatacctgaatgtataaatgtaggtatgaaattatgcagtacaaattagaaaatttatattgcttaaattatcttgacacttatcaaaaaaaatttattcaagaaagcactgtggtagtcactggggattcaaagacaaaaagataaatcaaatttggcagaagcaacacgttaattcacaccagtcaaaaaatattttcctaagaaatgttatttggcagtaagactatactatatactatagactacactgttattttggcgatacgactatactatatactatacgatttatacaatgaagcttatattctaacacctttccactggaaaatttaaacgccaaataaaaacttattggtattcaaaagatttggatactggacaggtacggtggctcacgcctgtaattccagcactttgggaggctgaggtgggcagattgcttgaggtcaggagtttgagaccagcctggcta

SEQ ID NO: 55967 - DNA, 613 bp, Homo sapiens
ccgggccccccctcgaaagtcttctagaattaattaacgcgggccatttttacattacctgtataatcattttatgcatataattagaacttgactctgattcattgttccatgcaagaaaaataatgctttttaaatactgaaattaatttgacaaataatttgaaattaatttttttaattatagagaaattaaaagaaaacctaaaaaaaaaatcgttaagtgccatgcttgatcctcaatctcaggggtctgacactttctctgtaaaggccagatagtcaatgttttttgctgtgagggccatatggagtttactacaattactcagctctgctgtttatactgcagacaaagagtgtggttgtgtgttctgggctgtagtttgctgactcctgatctttctaagaacttacttgctaaactcatatgtatgagtaattcaggctctccaaagagattatgtttagggcaatatatttgtagtaatatgaatcattccatttcatacaagttgcatgcattttacaagggacttttatgttcatttttacttttatctgacactttaactcttctgtcatgaggatattaatcttactttaaaaatta

SEQ ID NO: 55968 - DNA, 581 bp, Homo sapiens
cgggccccccctcggaagtcttctagaattaattaacgcggggtgggcaggcaggacttggctgagaagaaaatatttgggtaaatatctaaaggagggggcagagttggatgtggatatttgcaggaagagcattccaggcagaagaaataacaaatacaaagccctgaacatgtaccagacagaacatttgtcaaagcatctcatctctcttctaccgtaaaataaaattctgctctaacagggtagtgaagaacgtattaatcctgcaccaatactattgttcatttagctcacaagttcattaccacaatttgatggtatgaactgccttggaacttggtccatgtgttaacattcatcgtattttgctttctttttgtttttattttgtactggtaacacataaatactttcttgttgaaaagatgcaaacaataggcctggcgcggtggctcacgcctataatcccagaactttgggaggccgagtcgggtggatcacgaggtcaggagatcgagaccatcctggctaacacagggaaaccccatctctactaaaaaaaaaaaaaaaagcggccg

SEQ ID NO: 55969 - DNA, 595 bp, Homo sapiens
ccgggccccccctcggaagtcttctagaattaattaacgcgggattgtaattattttagggtgctgtgaattgtgcctatagaagacaggaaacttaatggataaaagatatgaaaaagctattatgaactgtgtcttcttggcaaaatatgtgtatttcttgctcaactcccagaagctgaatagtgtaaaaaagagtttgtttttatgtgaattttatttttcaataaaatattgatgtccttttttttcctcatgtgaaacctgatgcactattccaaaaagtaccataattcctttttttttttaatacataagatatattacactggcaaataccagagtcttggaatcaaacaaggtggtccttcagcaggaaaatgggttgagctaccaattacaaaatctccaaagatagtacacttctcagttggacacgatggctctcacgcccttttagttgcagaagatgggagcatattctttacaggatctgctagtaaaggagaagatggagaatcaagtaagttgagtgatcaactatgcatttaataaaaataaatgctttattttagtaaaaataaaactttattaa

SEQ ID NO: 55970 - DNA, 623 bp, Homo sapiens
  misc_feature 15: n = A,T,C or G
cgggccccccctcgngggtacttctagaattaattaacgcgggggagataaatcagaaatttccaaatatgaatcacacatgcagggaagaatctggcccacagacttcctctaattaaacgcctatctaataaaatattgtcaatggcatacagatgactgttcaaggagctgaagccatttattttgagttctggagctcattaaatgtatttcttcatgctaaaagaatttcttgcgtttttattttgcccttaacaagcggcagcaaaggcaaccacaaaagggtctaaaattcacatattttgaaataatatccaacaaaagatattagcacaaggaggccctggagtagccaacagtggctttaagatttgtgtttacatagggcttgtcttccattcacggtcttaagatagcacgtcacagagcagccagtgagtggctggtatctgaaggcctgggtcccctattgagtcaggagacccctacactagctattgtcctagaaagattggttgagaggtctcaggaaaccctttggaaatctgaatgcattcagaagtctgtaatatctgctacctagtatcacacccaaccctacctctggccttcctccactc

SEQ ID NO: 55971 - DNA, 579 bp, Homo sapiens
  misc_feature 28: n = A,T,C or G
ccgggccccccctcggaagtcttctagnattaattaagcggggggaggcgtcatcaaagttctgccaacttaaagttgctgctgtggtgttggtacttacatcaatgttggacacattgctgggcccttgattttaaaaaaaaggcaattcatgtaaagcacagattaagtagaattccaggactatttactatatccaaaaatagcctggctcgttttagaaagaatgaataaaactagtatttgctggctcaaaagatggaaaacttcccaaaaacacatcaagaaaataattatacagattaagtctcaaaagaagtttaatttaggcttcttttaatacttcaagtttatttcaaatatatttttaacatttaatttctaatctgttttttaaatctaatagatggagaaaaatatactaaaaacatattacaaactaacatctttaccatgtatttaattcaaatattcgcaaaacacctccctaactgttgcaggcgaagctcctcatctgggcagtatcttccaataccaacatgacaaggtgacccttctctactctgtattctcaaggaa

SEQ ID NO: 55972 - DNA, 549 bp, Homo sapiens
  misc_feature 20: n = A,T,C or G
cccctcggggtacttctagnattaattaacgcgggtagtagctagctcatagtggttgctaacatagattctggagccagattatctgagtttaaacccaggttggctttttctatctgtggaaccttgaacagcttacctcacttcactttgactcagtttgtttatgtctaaaatagagattagcatactgcctgactcagggggactgttctgagaagtgagtgaattcattcatgtaaagtatttagagcagcttctggaagtaaatgttagctaagtagtgggtgatggtgaacagtgacaaaaatttatttgaaagagtaaaaatcatgtcctataaatacatgaagttggatatgtctatgttggagaatataaacttaagagaaaacataactgatattttaaactatttgaagtatattataagtagccaacaaagatggcccattttgtgttgttgcagaaagccaaactagaactatttgttagaaactatcttgggacaaagtttaggtaaaataaccccccaaaaaaaaaaaaaaa

SEQ ID NO: 55973 - DNA, 615 bp, Homo sapiens
cgggccccccctcggaagtcttctagaattaattaacgcggggacgataatgaaaacatttaagaattactggcaattgatatttttattaaataaatgtgaaaatataggttgagaggttaaataattagtccaagaacataaaattattaggtgtgagagctctgacttatacccaggtttgtgcgataatgaagtgtgtgcttttatccaccttaccaccttgcttccttgcccttcattcagctctctgaacctctgcttccctccatgtgctttactgcttcccatcctcccagatttctctgtaccctcccccggtagtggcctagattctcctaaactgctctgtcccccttctaggatctgagatcccacctctttggtttcattgttagtgaaggaatgcttcaagggaaatttctgctcttgggttggaggaatgagtgtttgcattttaatgcccattcagagacatttctcaaaggactgagtcttttccagtgggacttcaggatctctcacatgtcagtgggaagcaatttggaactgtgtgctttgcaaacccgtgcaaatcatagcaggaaggccgatgcctatctctagctaaagcct

SEQ ID NO: 55974 - DNA, 538 bp, Homo sapiens
ccgggccccccctcggggtacttctagaattaattaacgcggggtcagtggcctgtagcctcattttctgcttctgggtctgtactgtagttgtttagttaattgaaaggaaagccacttagagctaaagtttgagactcatctggaagatagcctattaaatctgagaaacatgccgtacgcagcagagttttacagagagaatggggaatatggggctaatgtagtgagtctgtcaagtggaggtaggctgggagaatttctgctgtgtatctatgttgtattgtcagatgactcctaagatgcatccattttgtccaatggaatggaatttgaaattcctattatggttattttaaaggagggactgctaaatcatatagagatgtatgaccattgtgccttcctttcttgcctttttttttcccacttctactggagctaaggtgcatgaaagtgagttgcacttggaagggcacagtaggagcagatcattggatgtatccaaagagccaccatctgtcagctctcctgttgc

SEQ ID NO: 55975 - DNA, 575 bp, Homo sapiens
cgggccccccctcggaagtcttctagaattaattaacgcggggtggggaattacttatgaaagtttaattttaaagcagataatatttcaaatattttctttgaaatagaccatttgtcctgccttgaagtatgttagtacattttaagaaagtcagtgggttaaggagtcagtgctgttagtattcatgcttaaaacacttcccttctacctaccctaataaatgaggggctcaagagaaatatttctaattctctagcgacatggctaattttttttggcataaaaaatatagtctgaatattaagcattgatttagtacccatggtatcgcagatattatacagaacacaaggcaaatgataatcaggtgtaagcataaaagcattctcacgttaccccgatattttataaagcaaagctattgtatacccttttacttaggaaattgaagctcaagaaggtgaagatgatacctttctaacagcccaagtaagtttacatttagtcctatgaattcgatattgtgggtggacgggcttggaaaaggaatcttattttgacttcataattct

SEQ ID NO: 55976 - DNA, 503 bp, Homo sapiens
cgggccccccctcggggtacttctagaattaattaaactctttctttactgcagtaccacagtctcagtgaactgattttgtctgtgcagtggtcaggtgattacaggatctgttataatattcaaattcccaggatctgttataatattcaaattcccacttaatgattatctcctccagccaggtctccctttactatctgagccaattagtgtctctctgcatctgggccaattagtgtctctccccattattctctatactagcatcctcttattagctccatggcactcacacacatttgttattatgcatctttaaatttgttttgaatttttcatttgtatgtccctcccctccctattccttgcctggagcatagtagctgcttgatatactttgttctgtaaacaaaagaacaaagaagctcattccttaacatgcaccactctttcactaataactttagttctctccagcaggtagcctcaaaaaaaaaaaa

SEQ ID NO: 55977 - DNA, 525 bp, Homo sapiens
tcttctaaaattaattaacgcggggtggggtgtgggggaaagaacaagacatacttaaccttgactttggatgcttctgaagaactttatagaactaaaattaaacttgctgcatatagcaagttaactttacaggacatcatagcacacttgtctttttatgacatcataaatgactggactaacaactcctctaactgcatatataggtataaaaggatagatgtacaagcgctagtgtagtctgtgcgcttgtctcctcagaatgccatccttctccatgggttcaagccacattcatgattatacttactcagggctcaggtgggctgtagcagtgccaatgacagacaccatggcagccaacacctcatcctccaatagtacttttctcagaactgagggctccttctctgcaaaacacacacacatgcacacaatcacaagaccatgacgggttcaagaaatgaatgagtgggttctggcagcatcactgagtctggggcttgactctagccacgacag

SEQ ID NO: 55978 - DNA, 601 bp, Homo sapiens
cccccctcgagagtcttctagaattaattaacgcgggggttcccatctgggaagtcaaggtatattttaaaatgctctacaggtaattcttaagcacatctgcggctaagaaccactggccctggcttcccaccctcatagtccatggtgctaagagccccttccttttgttttgtcaacaaaacttacaagacgattaactgcaccacatttacatataggtaaaaggacagctgacaaggcagctacctgttgcttcttcctaagaatgctatccttctccctgggttcaagccacatccatgattatacttactcagggctcaggtgggttgtagcagtgccaatgacagacaccatggcagccaacacctcatcctccaatagtacttttctcagaactgagggctccttctctgcaaaacacacacacatgcacacaatcacaagaccatgacgggttcaagaaatgaatgattgggttctgtcagcatcactgactctggggcttgactctagccacgacagcagttcttaatctggtctctggtagtgctatagtcctgagaatcagggcaccagaaacaggagtggtctgacc

SEQ ID NO: 55979 - DNA, 511 bp, Homo sapiens
  misc_feature 27, 471: n = A,T,C or G
cgggccccccctcggaagtcttctagnattaattaacgcgggatcgactcagaattcagaaacagaaggtagatgactggcaaggactgttcctactctagagttttaaggtcattagaaagcttttgttttgttgaaagcactgtactttgtgtacgatatggttgagccttttagaaggttgctgagacttacgtcttatctttgcttatatagtatcgactagaggttggcaaactttttctgtgaagcgccagatagtaaatgctttaggttttgcacatacattctctgtcacagctagtcaacgcttgtaagaggatagcagctgtagacaatatgtaaacaaatgagctatgttccaataaaactttgtttacaaaagcatgcggtggggcgcctgtagtcccagctactcgggagaccgagactggagaacggcttgagcccacgagttttcgaccagcctgngtaatagagtaagaccttgtctctataaaaaaaaaaaaaa

SEQ ID NO: 55980 - DNA, 599 bp, Homo sapiens
  misc_feature 28: n = A,T,C or G
cgggcccccccctcggaagtcttctagnaattaattaacgcgggttatattgttgttatattgtagttatgcatttataagcatgtttttcattattgttttataaagtcagtttgagtagaatccaggttttaccatctatatttttatagcccctgagacagagcagctagcactgaggtgcagggaagaaagaaataagaaaaggaaagaagaaaggaaggagggaaggaaaaggagagaaaagcaaaggaaagagaaagcaatgagcaggatgaagaataattgtcttcagatgaaaatctgtaaagagttttgtttcaattatttattgctgcataacaaactttcttaaaatatagtgcctaaaaccaatcaatagttaaatatttatttgctcatgattttcagtttcttcaggactcagcagagacagctcatctttgctccatgtcttcttggctgagggcttatttgacgctggagaactcaagatggctgccctcacctgtctgacacctcagtttggacgtctggaatggttggaagctggctggactattctctcttttttttcttccattctccatggcttcttt

SEQ ID NO: 55981 - DNA, 603 bp, Homo sapiens
cgggcccccccctcggggtacttctagaattaattaacgcgggctcaaaacatggtccctggacaagctgaattggcatctcctgggagtttgaggctctcaggcctcactctagacctacctaattagaatcttcatttaacaagatccctggtgattcatgtgcacatcaaagtttgagaagcacctcgttctagaccaagggaccaatttgagactcttttcctttcatttcatttcattaccttctatggtaccatactttaaatagttgaggctatagaatcccttctatgttgtgttattttttatataactgaagcaacaacttactcttggttgatcatgcctagtgttagggcttgttattttgaattatatgtaggttgtcttcaactgtcctattgctggacaataaaatcttcaataatcaaaacagggttaaatgcatagatggtagttttcattttgaaatctcacacagaataaatggcgacgaatagttggctggcaattgatgtgcttaacaatgaattccactcactgacaattatcagggccacaaaagttaattactagcttcttttgaaggcagagccatgc

SEQ ID NO: 55982 - DNA, 496 bp, Homo sapiens
  misc_feature 28: n = A,T,C or G
cgggcccccccctcgaaagtcttctagnattaattaacgcggggggtgacagagcaagactctctcaagaaaataaataaataaataaaaataaaaataaaaataattctatgttatgcactattctcatttcatactattcatactagtttcctgccatgaaggaactgttcctatattcatctacattctcaaggatatgtgaaacccttgatatgatttttgaaggtgctacatatcaccttttcaaatgctaacctggaaattttctgtctcaaggagctaaaaactgttctccccacattacccacattttcaaattgaacaacacatttctaaatattccatgggtcaaagaggaagatctcaatgaaaattaaagattcataaaattgcaatattgtgagagaaatttatagcagtaaatgtttacattggaaaaaatgaaaagtctcaaatcaacaattgaagtccctatctcaaaaaaaaaaaaaaa

SEQ ID NO: 55983 - DNA, 450 bp, Homo sapiens
  misc_feature 28: n = A,T,C or G
cgggcccccccctcgaggtacttctagnattaattaacgcgggggaggatcctaaaagtcagcctgaacagtgacccaaaccacagctggccttgcccatgctgatgtgaggaaggaatgggtgggggcaactaagaaattgggggacagagttctctgtgctaggtatcctaggacaagccacccagccacacagagacccccccctgcccccccacagaacagttctggatgataaaatgcctgcctggaatggagaatcagatgagaagatgtttgcaaaggggtttgagatcagttagcgggtggtgatgacaatgttgataccgtgggtgtgtgactgccaggagctgtgaagcagagggtggagtgtgcggtggtcaaagcctggttctgggatctctagctttccaggggcttaggctccgccttagcaaaaaaaaaaaaaaa

SEQ ID NO: 55984 - DNA, 577 bp, Homo sapiens
  misc_feature 9: n = A,T,C or G
acttctagnattaattaacgcggggtgggagttggggggtctcacataaaggttcagtttgacagcggttttgatagagcatacatgtcaagtaactccaccagagtcaacacagggagcatattcatcacccccaaaagcttgcttgtgcgccgtggtgatccacttccctcaggcagcctctggtttgccatgtagactagtttgcatttttaataattgggtgcgtgccccagattcataaagcaagtccttagagacctacaaagagacttagtctcccacacaataataatgggagactttaacaccccactgtcaacagtagacagatcaacgagacagaaagttaacaaggatatccaggacttgaactcagctctgcaccaagcagacctaatagacatctatagaactctccaccccaaatcaacagaatatacattcttctcagcaccacatcgcatttattccaaaattgaccacatagttggaagtaaagcactcctcagcaaatgtaaaagaaacagcattataacaaactgtctctcagaccacagtgcaatcaaattagaac

SEQ ID NO: 55985 - DNA, 595 bp, Homo sapiens
  misc_feature 11, 13, 26: n = A,T,C or G
cccccccttcnanagtaccttctagnaattaaaattaacgcgggccctgaaaaaaatgtgttatatgtatttaatacaggctgtgagttacaagtttacaaaaactgaaactactaattttatgatggaattgcattgcctgaatatagatgttttaaaatatgaaattaaccattgacagaactttctcataaaaatttttattgtaaaactgtaactattgaaaaaccaaaccaaaacaaatataaaactaaagggcaaataattacctttaaaccaccatgtaggtcaagaaatagaattttgccagtcatcttagaatccctctaattacaactgcctctctcccccaaatggaacctctatcttgacttttacagtaatcactttcttttatttatttgtaattatgtaatctaataatacatcccttatctataatttagtttttcttagttttaaaaaacacgttttttaagtctcaggtcattctatctgttaaaaaaacctggaccttttaaaaaacctggaccttttgacatttagcatttcccatggtctggattttgttaagtgcatattcatggtgtagttt

SEQ ID NO: 55986 - DNA, 587 bp, Homo sapiens
ccccccctcaatctttagaataataaattaaaattaaaaaatattgagtgtttagtagccaatggctactaagtggacagtgtaatgtagaatatttctatcactttagaatgctctattggacattgctcatgtagatggtgatatacataccccatataacaatttccaattgatatctggcagtaatggaagtatatgttccttactttttagtaaatcaataatgggactttaaaatgatgacagctgctttttctttttcaaattccctttaaaaattaattatttttactacttagattaaatgaataaaacccagcattatcatgtcatttgtattttttaccatttatcttaaaaaaataccctagggtctgtcaaattcaacactctacagtagagttagaaaattcagagactggttataagaactattactaccaggccaggcacggtggctcacgcctataatcccagcacttttggaggccgaggcgggtggataacctgaggtcaggagttcgaaccagcctggccacatggtgaaacaccatctctactgaaaatacaaaattagctgggtg

SEQ ID NO: 55987 - DNA, 461 bp, Homo sapiens
cgggccccccctcggaagtcttctagaattaattaacgcggggtaaagagtaagttaagaaaacaagctatctagacattgttttgtatttttaagtttaattgaaactttttgggttgtcttttctcaaaaaccaactgcccttccttatatttagttttctgtagttttaaatcttgaccagagcccccacagtgataattggaggctttacaaatagagtggagtgtgtttggtgcattggggttgaatgcggttgcagtcacttgctcatccattcattccttctatttcaggtggactgtctgaatcccattaatcaccagagactttgtgtgctcttcagcagctcttctgcccagtccagcaatgctcctagtgcctgtgtcagtccttggtaggattcttttccccctacactattccacataagaacagaattccagcaaaaaaaaaaaaaa

SEQ ID NO: 55988 - DNA, 486 bp, Homo sapiens
taacgcggggtacctccagtatcttgtcacctagggcattttatagcttattattttagatacaagttaaaaaaaaaaaaaaaaacaagaaaaaaaaaacctctctgtctcaaacttcacttctaacccactttgtgttagccagtggtgtatttgttagcttgcttgacagaggtaattaccttaattctacaggtaaatttagtgtaaaatacaactagaatcccaacaaatcatgcaattacaactagatttaaatgtgtgcatgggaaagatgagaagaaaagtgttagggctgggtgcagttggtcacgcctgtaattccaacaatttgggaggctgaggtaggaggatcgtttgagctaaggagtttgtgaccagcctgggcaatatagtgagaccccatctcttaagaaaagtgttaaatggcaggggtattggtagcattggaataatgtggattggcaaactatgtggtaacctatg

SEQ ID NO: 55989 - DNA, 609 bp, Homo sapiens
ccgggccccccctcggaagtcttctagaattaattaacgcggggctagaaggatgacatgacgtatgatgtactcagtccttaaaggagcatttagtttaattttctttagacctatccaccaaactataagatccatggggacaagtttgtcaatttagctcatcatcatgcgatgcctggcccagcaaaaatgccatatacacatctattgaatgaaatggaagtaagtgggagtagtgttaagatatttgaaactgaaattttccatataaaccagtagctttctgttcaaaatgtaaaaataaaaatgtctatccatacaatataattttatgaatttctcacttttatttgtgtgaaataaaattttctgaagagaagtgtaattttaaccatgctattgctttttataatgcttagtgttgtaggatggttgcttatagataaacactattatggtagttattacttgagatttaacatttttcttctttataaaatcattcagtattatttgattaatttttagaagtatccataaagagaacaggtggcaccgttttttttccctctgagtagaagactaacttagaaaggttattatgat

SEQ ID NO: 55990 - DNA, 563 bp, Homo sapiens
  misc_feature 24, 524, 541: n = A,T,C or G
gccccccctcggaatacttctagnattaattaacgcgggggacaaacatccaaactgcgacagatgtcttgtctaatttaagactcctttccaaaagtcagctcttccatgaaggtatcccaccatactgatctctccttcctttacattctttctgctcagcttctaagtagttctcaatccagggtgtacattagagatacttagagaactggcccccagcccacttaggccaggattctcacccttttccctgcactgggatttttaaaaggctccaaaagtgaatctaaagaacagcagaagttgagaaccactgctttcctcacatcatccagcctgcaattatattctatagtactgccgatttatttatgcctatcatctcaacaaaactgtcaacaacccaaggaaagctatcaaacaattctttatctctcctacttcatagcacaacgctgaagactacagctgattgcaactggtatcccactgaaattacacttactgtggaacaagatgtngaaatgaggatgctaanaagtgttacagtgagtctaaaa

SEQ ID NO: 55991 - DNA, 623 bp, Homo sapiens
  misc_feature 37, 588: n = A,T,C or G
tgggataccgggcccccccctcggaaatacttctagnattaattaacgcggggaaccctaaataattaataacaattgtcaacaattttaaggtttatatgcatgtgtacacacacacacacacacagagtttatactacactttgacatacttcatctcattttatctttgcagaacctttacgaggtaggtttggcaggagttgccaacttattttattaataaaaaatagaaacctaaattattttccctgcttttcttctcagtcataaaacatcttattttcctcactagctagaagttaataaataaaaagtactaagagttatatccctatattaaggataatacatttaaaacactgtgaagtcaccatttttacatctattttgccaaaatccagagatataacatctggaaggtaaatattgcaggaggagagactatttagtttagcatcaccagctacattaaataataaaccttccttctttcagtatgtgaacaactacagtaactaaaataatattcaacaggatatgggttgcattctcgaataaactgtatctatagttagaaatgaactntttctagcatcaaaagtgttctttacttgcttgtt

SEQ ID NO: 55992 - DNA, 616 bp, Homo sapiens
  misc_feature 57: n = A,T,C or G
cccccctcggaagtcttctagaattaattaaccgggcacccaaagggaggaaccccnagaaaattaacaaactaatggcttagggaaaagcgacaagttcttcctctgaaaccaaaagagagaagggaaaaattaagattattatcagtacagcatgggaacacttaacacttagagataaaatacatttttaaatggaccgttaaaaacacagcatgatgtctccaaaacatgacttcatgtccatcacctttcaagcacgcctagagaaattttaatctccaaaaaaacctgaatctgaaatcgtagtttgtatatattttttgattatcttttcttatttttttctctctaaaataccaataatcatagcttcaattttgtgacctctacaaagtaggttcaatatatttatttccctttcagaattcatgttgggtcacaaggggaccacaatgtacagtacttagcactctgcataagataaaggcacctaataactgttgtctttcattttatcgtagtttagattttgaagaaaaacaaaaagtagtcatgtcaaaaaatatgtggtatggcaggactcttgtgcttgtctctaatggagtaaaggcac

SEQ ID NO: 55993 - DNA, 510 bp, Homo sapiens
  misc_feature 28: n = A,T,C or G
cgggcccccccctcgaaatacttctagnattaattaacgcgggctgtaaatttaacaaatgaatttagcaaggatgctagatacaaagtcagtataaaacatcaattgtatttctacgtaccagaacaaagaattacaaaatgaaattttaaaaagaataccatttaaaatgaatccagcaacatataaaaagggttataaactatgaacaaattgtttttccaaagaaggtgaggtggaacaattgcatgtctttatccaaaaattagcctgtactgtatacaaagttaacttggaatggattacagaccaaaatataagctttaaaactataaaacttctagatgaaaacatacaggaaaggttttatgactttatattagtcaaatatttcttagatataacaccaaaatcaagatttcctaaaagaaaaaaacactgataaattgaacttcataacattttaaaacgtgagttatttaaggacactattaagaaaaaaaaaaaaaa

SEQ ID NO: 55994 - DNA, 617 bp, Homo sapiens
  misc_feature 21, 38, 184, 185, 198: n = A,T,C or G
ctgggataccgcggccccccnctcggggtacttctagnattaattaacgcgggtaagtaatctggatatgattaaagtatatgggaggatgtgtgtagtttatatccaatactatgccagtttatataaggtatttaagcattttcagattctagtatccacagaggctcctgaaacgaattanntctgtggataccntgagggaagaatgtatattcatgagtaaaactgatttcctatgatgacacaaagtagttaagtgaataatatgaggtctctcaattgaagctctagatgaacttcagcaccaaactttggtcctcattagcatcactgtctgaatgaactattaatacttcctcacatccaggcagctttccaccagttatgagtttctaactcatttctaaatttctaactcatttctaaaacatttctagaaaaagaaagcgtaaggcttaggccaactctttcgcttcccatgggaaatttccttggtgaaagcagtaactggttgatgattaagtccatgtctaattatcacttgtgcctggaagcatcacagacaattccattacaggaagcccaaatatcaatgtggtcaccacagaaagctg

SEQ ID NO: 55995 - DNA, 594 bp, Homo sapiens
  misc_feature 25: n = A,T,C or G
ggccccccctcggggtacttctagnattaattaacgcgggtatgtagtcttaagtatctcagagtttcaaacataaatgttcttgaggtcatatcttttccttcatgatatgaagaaaaaaataaaatattcttcctaacaaagaaagtggaagtataaagtctattggaaatcacctttctcttatgttgatgtataaacagaattccatatcttgtctggttataagcactatcaggacaatttttatttcaatagttaaaattgtacataataaagaattataatagctacttaaaacactaaaagttaatgtggctttttataggtttaggagaacaaatactgaactcttttgtgggaaaactcagagcattcattgttccggttatatctgaagttatttacaagtataattcatgaacttctattttatctgttaaacaaaattataggaggccattgttttggactgagctcctgttctgggccccaacaaaccagaccaaaccaaaatggagtcactcatgctaaatgccaaataatcaaacggaaactttaaaggagcatatgcagtcccaagcagaccagttt

SEQ ID NO: 55996 - DNA, 592 bp, Homo sapiens
  misc_feature 39: n = A,T,C or G
cccccctcgagagtcttctagaattaattaaagcggggngaagcaatatttcaccatacgaaactagaaaaaatagtttattacgcattgcatgcctgtatcaaaatatttcatataccccataaatatatacacctgtatacccacaaaaattaaaaataaagattttttaaaaataggaaaaaaggtggaattaataaataaaccttaaaagaaaaaggcttatgaaagaggcaaaatatataagcttcttgcagatctgattaaacaaaatcaaccatagaaagtagatttaaatcacatagaagaaatatatgtatataaatattaggagcaatacatttacacagttatatgttaataaatttcagaaacctctatgaagtttccagatatattaaacattccaaatgtttttttctacatgtatatgcagtgaaaataatgtataaaatgtgatatactgataacttgacaatattatcaaagaactactttttaaaaaaagaaaaactctgggtttgatacatttgctggtaaattcttcagaactttttttgaggaataaacaattgctgtatactacaaaatg

SEQ ID NO: 55997 - DNA, 583 bp, Homo sapiens
  misc_feature 573: n = A,T,C or G
cgggccccccctcggaagtcttctagaattaattaacgcgggcagagggtgattcccggccatagtaggccatgtctcagtctgtaccatcattacctttcgtaccagctgagtccaaagcttctccttccagaagacccaaccaacatcctcccagattctcccataacctacactcaactgaagattggaagatgaatgataagagaggagaaacttaacctgcatatcctcattccatttgaaagtctgagaggctggcagtttgggggcagatatttatttctgaatgttccctatatctggttgttgggtttttagaaagccctgtcctattggtttttttttatttatttttatttttttaaacagcctattgggtactctgtgctgatgctttgatcctcaaaatgcatacactgaaccagtcaccttcccagtgactaggtacatgatcttgagtaggctcagccttcagtttaattttaaaaaactttcagtgcagggctgggtggctcatgcctgtaatctcagcactttgggaggccaaggtgagaggactgcttgaactangagttcaaga

SEQ ID NO: 55998 - DNA, 598 bp, Homo sapiens
  misc_feature 33: n = A,T,C or G
gtaccgggcccccccctcggaaatacttctagnattaattaacgcgggcatggctgtaaacttgtgttttaaaattcagaatccaatcaaataaggatgaagaagtgctattccctttttttttctggtcatacttaatacagagagtcctgtattccttttaaaggagaataagttataaatcatacttgtgggccgggtgtggtggctcacacctgtaatcctagcactttgggaggccgaggcgggtggattacctgaggtcaggagtttgagactagcctggccaacatggagaaaccccgtctctactaaaaatacaaaattagccaggcgtggtggtgcatgcttgtaatcccagctactcaggaagctgaggcaccggagaatcgcttgaacccgggaggcagaggtttcggtgagctgaggtcacgccattgcattccagcctgggcaacaagagtgaaactctgtctcaaaaaaattatatatatatatatagtaatactttcggaaatcataaagattaaaaggaaaggaaattaatcggaattttgactataagcataaagatcgtctaatgcattatcagatttat

SEQ ID NO: 55999 - DNA, 405 bp, Homo sapiens
cggggccccccctcggggtacttctagaattaattaacgcggggtggggggcagtatctcagatgtggaggagactaaaaagggttaggaaattgccaaatacaattcaataggtgatcttccagatgaatataaatgatcaaaacttactcccaaagagagagaaaacctggatacaataatacctatggaaaaaaatgaactgttatccacaaaggggtgagaataacagccagttacatgtcatggaaaatggcacaaggtagaaagctccaggaattcatccttccagcaaacaactaggaacctggcaaaacctgtcagaattagtgattttggagctctggaatttagtcaaatagttgcagccttcagggaagtgcttgatgaagaaagggctggtaa

SEQ ID NO: 56000 - DNA, 596 bp, Homo sapiens
cgggccccccctcggaagtcttctagaattaattaacgcgggcttgggtggattcaggagttcagaagttcaaagataagactgtctctccatgtcctggccctgccaacctctgcttggtttgattctcagattccctcctcagagcagcaagatgactgctgtcaacacaagccattcttatagctcatgatctcagagtaagatggaccttccttttctgagcagacatccattaaatctcacggagggataccaattggctcttctggggttgcatattcatccttgaaccaattactgtggctggattggtcagacctgggttagaaggaaggatcagccccttaaactatactgaatgagttccctgcagaaaggaggggttctgccttcagaagaagagggaagggattctaggcaggaaaacgaaataatgacagctattcacagtcattcactgtgcttggcacagggaatataccagtaaccaggacagagaatttcactgtctttaaggagcttacattctagctggggaaatacacaaaaataaacaagcagatgaaataattacaaattatgttgaagcaagg

SEQ ID NO: 56001 - DNA, 606 bp, Homo sapiens
cccccctcgagagtacttctagaattaattaacgcgggatgcagtccataacacaaaacctattaaaattgactgaaaaagaaatatacaatctaatagacatatgtattcatcagtgttctttagagaaacagaatgaataaaatatatatgtatatgtgtgtgaagtgactcatggaattttgaaagctgacaagtcccaacatatgcatgcagggtgacttgtccaaccagggacttagaagagccaatagttttgcttcaattcaaggtgaacaggctcaagactcaagtagacatgacgtttcagttcaagtctgagagcaggaaaaaaaggcaatattccagtccatatctgatactggagctttgatctcatatgccttacacacagagaagaaactcctaccccagattcaagggaatgcatcttactgtcatttcaggatggcttcctgccaaaacaagtcaatcagaatgggaggaggtatcatgtgctatctgccagtgtaatttatctttccatgtagctattgaaaactattccaagtgtgcctgcattataacctaatctattgcttatctctaaaaaacaacctttgtgct

SEQ ID NO: 56002 - DNA, 247 bp, Homo sapiens
  misc_feature 31: n = A,T,C or G
accgggcccccccctcggaaatacttctagnattaattaacgcgggcattgaagagtatttcaaatgcaagaaatgaagaaataaatctttggctcacaaaaaaaaaaaaaaaaaaaaaaaaaaaaaaaaaaaaaaaaaaaaaaaaaaaaaaaaaaaaaaaaaaaaattaaaaaaaaaaaaaagggggccgccacggggggggacttcaaattccccttatagggattctttttaccccccctaatt

SEQ ID NO: 56003 - DNA, 501 bp, Homo sapiens
aacgcgggtctcgtctggcagctcatatcaacccacagggtcccaacctattgggtaggcttttttggaaaaagaagataagaatggtatccagtttgaagacactgttgaagataccattgttggaggtgttcagaataaatgctttaaaacagttttgtttacaatttaaattccaacaaatcctgagagttttctaacagtctaaggtgtccatggataccaaaaaagcaagttaaatctgttcattcttatctgacttaagaaaccaccttagtatctccatgaggtgttatgttatctgctgctagggataaagaggttaaaggagaagtgagtacctgttcttggttctagttcattctagtcatccaaagatgattttgaaactacagcttcacataggtgaggacaggcacaggtgttattcccaagtggtgacgggcaaactgggtaaaactatgatagtgctaatacctgacaacaagacacgcacatgca

SEQ ID NO: 56004 - DNA, 584 bp, Homo sapiens
  misc_feature 14, 16, 28: n = A,T,C or G
gggcccccccttcnanaagtacttctanaattaattaacgcggggaggataactcatttggataattttgttttcatatttatgctatagtccctaaattaaaattattaaaacatattaagtaccatcttatgatattctaccttctattcaaactcaatattgagagggtgaaatagccttgcctctgaccacatttggatgcctggaaacatatctgaatcttccttgttattacatctgctacttaggaggcttaacctcagttttctcatctgtgaaatgaggatagtaatactatagaccccaaatgtttgtattagtttaaatgaattgaggagactaccaaggatgtagtaattgttaaataaatgtaaatactattattgttgttatttttattataatttttaaaatttcttcttcatctccttctccccttcccattctttcgctctctttaggctgtcacagtgctgcaatgcaggcccttgagatggagcagtagcccttccaagttagagcagtttcatatgaagtttattttgtttaaacaggaatgaaatgaatactctgaatatttg

SEQ ID NO: 56005 - DNA, 372 bp, Homo sapiens
  misc_feature 28: n = A,T,C or G
cggggccccccctcggaagtcttctagnaattaattaacgcggggcgggtggtacgggtggcaagggtaattatgcaagcatatggaagagcacttatctagaaatgtggtcccttcagaatgcagtcttgacacattaaagttagtagtcatcatattttaaaagtgaaatgacagtggaggcatggggatagatacagggaatttcctttggtggcagttcaaaaataatcagctgctttttcctctctcaaaattatgctgctctctcttgtttcttcagatatattgctcctttgtccacacaatatactgagtgaaaacaggattggaaactcgagagacaaaagaaattcgaaaaaaaaaaaaaaa

SEQ ID NO: 56006 - DNA, 577 bp, Homo sapiens
  misc_feature 27: n = A,T,C or G
cgggccccccctcggaagtcttctagnattaattaacgcgggactttcatcagttggacatttgaatttaatttctcattttcttgatattgaaataaaatatcatttagaaatacattatgttataaaattgacattttttttttcctccccaatacagaagctccaccatgaggcgaggtggatggaggaagcgagctgaaaatgatggctgggaaacatgggtgtgttttaaaagagtaaaaataattatatcgaactgtctagttatttttcattcttctgttataatgtggtttaagttgttttctaaattgtaaattactttagacaccacatctttgagttttcacagtgtattgaaagccttatgatgtttataaactttatcccctaaactttactctcaggaattttaccctgaggaaataaatatgcctagtgcacaataatttactatatgatgattttattgcagcattgctaataatacagaaaaacaggataacacataaatatccaataataagggattggtcaaataaagtatctgtgtatagtggagcactgtacagtc

SEQ ID NO: 56007 - DNA, 554 bp, Homo sapiens
cgggccccccctcgaaagtcttctagaattaattaacgcggggtttcagggcttccttataaaccgtcaaaatgctaaaaacagtgaaaggagatgtctactaattaaaataagaatagttcctaaagaactaggttcacctgaatgacaaaagtttttaaaggtgacaccagggggagatctaataaaagcaacaggagttctagtacaattttaaagaattaagatagcaatagtggatatggtatctagtagaaaagcttcggaattggaattggaagtttcagggtctgcagattaaacaatatgcctatatttgtaccattttatcagaaaaacgtactgaaattattttagtatgaagactgtgctaactttttagacagttagagacccaaaaggagaagccacaatcctaccacctgttcacaactgttaaaatcttttcacattttctgccacctttgtctatgtgggagaccagaataggctgcccccaaatatgaaggattgttgagctgagggacattaagaagcagatgcaggaaagctct

SEQ ID NO: 56008 - DNA, 523 bp, Homo sapiens
cgggcccccccctcggggtacttctagaattaattaacgcggggtgtgagacatgaacaaccattcatattgcaaggtggggtaaggggagtatctttgccacatctctgcctcaagattaagagacagagtccgaaggttgggtcgcagtgttacttgaaagtagagagaagtgagccccacttactacaaaaacatcccgtatagtagtcataaatgcacagttggaaggattactttgaactcactgcttgagagcctttaaggtacactctaggtcatggggtccaaatttttgtctgccctgagctacactggaagaagaacaattgccttgggcgacacataagatacacttacactgatgatagctgatgagcttaacaagcaaacaaagctgcctccaccgccgaggaactcccaggcggcatagagtgagttgtattagacgcacttactgaccgctgtgtaagaactacgtgactggaaaaaccctgcggttacccatctgaatcgcgtcgca

SEQ ID NO: 56009 - DNA, 615 bp, Homo sapiens
  misc_feature 10: n = A,T,C or G
cccccctcgngggtacttctagaattaattaacgcggggccctggagccttcaatgccccctgtaggatggagtgggtgcataatacctgcttcattttgcagatgacaaaactaaaacccgtaacaagtttccggagcaatttgggactgcagagccaggataataacacaacattagactcctttccctgtactccactgaccattccacaggatccctaggtgaggctggaagaccccagacaggcattccaggggagggccagactgggctgagaaaagtgtgaaccttatagggtttcagactccaaagcaacacagtactgcacttgggagttagaagaattgaattctggtcttggctgtcccatgtatcagcggtcggaatcttgaacaaattacacaaactttctgaactgcttctgtaatcaaacctgtctgcttgtaccataggataaatcaaataaggtgaatgatgggcaaacctcattttattgctctctgctttattgcgttttacggacattgtgttttttacagattgaagatttgtggcaaccgcaccaaacaagtctatcggtgccatttttcaacatcgtgtgctcactttgtgc

SEQ ID NO: 56010 - DNA, 592 bp, Homo sapiens
ccgggccccccctcgaaagtcttctagaattaattaacgcggggtagttggcaaagttctatttcttgacttggttggtgattacaaggttgttttataataatccactatacatttgtttggtggttttatatattttacaattaaaaagaaaacactcatctcatatatgtacagttacactacagcactataaactcccaaatagatggaatacaactggatgtgaataagattcaaaggtaagatcagagagataaattcacaaatggaaaagagagttatctggggaatgctttatgaaagagtagcaacttcagctgagtcttaaaacctgacagagcacagtcacatgaaagcaaagagaaagcaccctaaggaaaaacagtgatacacaatgcatatatgctaacactgatgtatagttgaaaaagaggaatttgggacttataaagaggacctcattggatttagtgcaatgaggcgggcaaataaaaatctgaggttttttcattgtttactttataaatcttacaaatcactggcataaattgctactgtgctctacttctgaaatatactagaacaggaa

SEQ ID NO: 56011 - DNA, 572 bp, Homo sapiens
  misc_feature 10, 39: n = A,T,C or G
cccccctcgngaagtcttctagaattaattaacgcgggngaagagaaaaatctgtcatgatgggaattacatttattttttaggttggtgaatgtcattgttggctccatgtttagatttctgtataatttaaatttacattggcataaatgtaatttttttattatcagtttggatttaggtggcgagtagaaaaagaagtaatttcaggaaaaggtaattctttaaaatttttactttttaataggataaacttattttgttaagttactgaattggagtcattaagatcattcctaacatatacaagaaattattagctacaaaagtaaaattagagaaggtgtattcatgatacattattagcaaaggtctgaatataatgctttaatgattattacctttatacttttgcctttagaacattcagttgaatgttctgcatatttctaagtatgtagaaaatattttacaaattaaagatttcatagcaagacaactttcaacaaaaaagagaggtttatttttttcctttctttattaatttttggaataatgaattggtattactg

SEQ ID NO: 56012 - DNA, 525 bp, Homo sapiens
  misc_feature 28: n = A,T,C or G
cgggcccccccctcggaatacttctagnattaattaacgcgggctccggtttggtttcttgaatatactcccgctcctctagatttgaacatttgtaagctaaagagacaagttatctgttccccacaaaaccaatacagagtttgagacaggaatgggatagttaaaatagacattcctattaaaaaggcatgggtggggagaaatgggattccacagcagcccctgacccacagcaattcttaaattcaggcaggaacatgttatctgtttctcaagcaccagtgcagctccacaggagtgagtcttctgaagttctgtactctgaatcatacttgctttcccataaaaagtaaacattttcaactgagtagttttataggcctatttcatctgtttgctatctgcagtttgggggttcaaaggtctctttacattttgtactacttctttccattttgtttggacaaagttgaccttgcttttgccaacttttttttttttttttgcaataaaaaaaaaaaa

SEQ ID NO: 56013 - DNA, 558 bp, Homo sapiens
  misc_feature 460, 461: n = A,T,C or G
cgggccccccctcgaaagtcttctagaattaattaacgcgggtccccagcaagaaggggtctttttgggaaagggctattatcaattttgtttcacagtcaaaccatgaactgaattccttaccaaagttagttctacctacaccaaggaatgaacaaggacagcttaaaggttagaagcaagacagaatcagttaattctgatttctttcactgtcattatttcctcagttataattttgcaaaggcggtttcaacactacctatcagtactttttcttagagttgtgacttaataaaagagtctcaggttcacacacttaaatgaagaaggccccaggcttcagtttctaggccctggtaccagtattatcatttgtcttgaggaaatcttggcccattgtattttcttattatttattgtatcaataagtattattaggtttaagagaagaacagannaactaaaatagcagtgactaaaaatgaggtaggagtttattttgtatcacataaatgtccaggtagagagtccaagactgccattaccatccactgt

SEQ ID NO: 56014 - DNA, 582 bp, Homo sapiens
  misc_feature 15, 552: n = A,T,C or G
cgggcccccccctcnaggtacttctagaataataacgcgggactgtaatatggtctgtctttgcatgtgctgttttctctgcctagaatgcttttttactttttggtgaaactctacttatcctgctcatattttaatatctagcttaaatgtcacttcctctataaagcattccccatcatcccatcctgagttagtccctcacgctcctttaaaccagtacctactcttattttctcattctgaaatctttccatgaaagcaagaatcttagtgttctctttagctccccacctttcccacgcccctatatgctaagagcattgtctctacgtctgtaatgcctttcagagccacctgttttagttcctactgcccctgccctagcagtgcagttttctctctacctctgtcgctgccacctaagtccattttctgcctctggcctcactgttgtgctagagtcatcttttcaaaaagcacaagtagtataccattctcctgcccaggacttttcagtgcctcccacttctcttcagtaagtcaccctgngttgttggtccccactagccttgcttgtgt

SEQ ID NO: 56015 - DNA, 594 bp, Homo sapiens
cccccctcggaagtcttctagaattaattaacgcggggaagctgagcacgtgaagctcgctggttctgtgcgaagggtattcctggtgctgaataaagggtgttgctgtcaaggctgacaatttatatctgtgtgaggctggattttctttgcctactccaaccaaagcgacacatcacagcagactggatgcagaagcgtgcgtgggaatgcagctgttttccatggaaccagacgctacagagactgcaacgtgtaaaacactgccattcttttcattcctttgaataatttttttaaaatttgctatttaacacgtaatagttttttattttaaaatgaattaatacttttttttttttgagaaggaatctagctctgtcacccaggctggagtgcagtggccccatctcagctcactgcaacctccacctcccagtttcaagtgattctcctgctccagcctctcaagtagctgggattacagggcaccaccgtgcccacctaatttttgtatttttagtagagacagcgttgaccatgttggtcaggctggtcccgaactcctgacctcgtgatccacctgcctcggtc

SEQ ID NO: 56016 - DNA, 603 bp, Homo sapiens
  misc_feature 27: n = A,T,C or G
cgggccccccctcggaagtcttctagnattaattaacgcgggattcaataaatatttactgaatcctttgttctgtgttatatcaagtatacaaacaggaatgcccttgaggtttcctgcccttttttttgtttgttttttaatcctgggacatagggaagacctcagcaagccctatttctcaatgaattgtactcacagatttctttttttttttttctttttccacagccgccacctctcaccgatttattccttagcttggtgtttcatgtattcaacaaacgttttagtgcttagggcaagaagttcctgtcctcatgagtttatttcctagcagatagaactgtatcacttgccagtactactcagagtgtggcctgtggactgacctccagtctgtaaacttagtttgtagtgagataggaatttagaccagaatgtgtaatcaaccacattactgggcacaatgtttggtccagctggcgatttttttttcatagaaagcctttattgatgagggaagcaatatattgatttatattttggggtcacctttttatttcatggcacactggcactttcatgcatgctgactttgat

SEQ ID NO: 56017 - DNA, 603 bp, Homo sapiens
  misc_feature 28: n = A,T,C or G
ccgggccccccctcggggtacttctagnattaattaacgcgggggtttgaaaggctgttagagatgatacaggttgagtattccttatctgaaattcttgggcccagaagtgttttgagttttagatttttttcaatttttgaatatttccattatgtttaccagctgagcagctctcatacaaaaatgtaaaatccaaactgcttcaatgagcatttcctttgaatgtcatgtctgcactcaaaaaatttcggattttggagcattttagattttttgattggaatatctgtagtgtttttcaggtcatttaaaaagctctcattggtactgatttactgtatccaaaaaaaagcctgcaagtggttaaggttcacagtgataactatcaaatcagaatgactatactgattgtacccattcatccatttttaacttagtgatttggaacgtttcatattcaaatctaattttcataatttttaagtaaacctaaaagattgaggatacttgagaaatttgcatttatgatttccttcaaaaccagaagtgatggtatcagttattggatttgtaaacttagtttaccttttaagtgtgctt

SEQ ID NO: 56018 - DNA, 597 bp, Homo sapiens
  misc_feature 13, 42: n = A,T,C or G
ggccccgcctcgnaaatacttctagaattaattaacgcgggnagtcattgattagcacataaaatgtggatttttatacataccacacatgtgtgtacctgtgtgtttgtgtgtgtatataggcatatatggttaacaactcatctatatttaatcacctaaattatattttgaaaggattttctacactcttcaattgtattatattatttgcattcctttttcatttcttgtctaaaatatctcagaatcttttgttgcttgaatccctgaaatctaagatccaggcttctctttcttctcattagacaatatctttccaagccatttcatctacacccctaattcagttaccaagtactgcttgatggctcacaactttataactttaaatgtcttcctccgggatccaggctcagtgacccaaatatgtagattttctaaaggcaactcatagttatacatcctccttccatatttcctgtttttgtgaaacattatctctggtcctggagctgggaaatccagaggcaaaaggtaactagggcactgtcagttttcatgtaaaattcagcactatgtcctaacaatcttata

SEQ ID NO: 56019 - DNA, 461 bp, Homo sapiens
  misc_feature 16: n = A,T,C or G
cgggccccccctcggnagtcttctagaattaattaacgcgggtgtcttattttgtccaaaatctgtttctttgtctagaaagatcctttggcttgaataggagagctgtgtatttcataagagatatgattatatgtttgtctttcttaagacacttccctaaaagtttaaatagttccattgtcctgctttcagatgttataatgaatgtgactggtcttaaatggttaaaatgttactaatttttaatttttttgtgttgtaaaatataatgggaaaggcttttaatgccatctggaggcattctagagaactgaaaagggtagaatcattgaaaattcagttcttttgagtaacagtagaaactgcataaaaattcatgcaaccagaatgtaagctatttgggggaagttgtattttttaataaattattttataaaagttttaaaaaaaaaaaaaaa

SEQ ID NO: 56020 - DNA, 406 bp, Homo sapiens
cccccctcgaaagtcttctagaattaattaacgcggggtgggggactaggggagggataatattaggagaaatacctgatgtagatgacaggttgatgggtgcagctcaccaccaaggtacatgtatatctaggtaacaaaccggcacgttctgcacatgtatctgaacttaaagtataatttaaaaaaatttttaatacagcttaataagcatcctccatccagtttttgtacttactggaatgatttcacctttccatgtattaaaatcttttgcctgtttttaatgttcaatttgcaattaaattctatacatgggcgagtatatcatcaatcttaaaaaaaaaaaaaaaaaaaaaaaaaaaaaaaaaaaaaaaaaaaaaaaaaaaaggaaaaaaaaaaaaaa

SEQ ID NO: 56021 - DNA, 592 bp, Homo sapiens
  misc_feature 204: n = A,T,C or G
cgggccccccctcgagagtcttctagaattaattaatgcggggagggttcatagagtttctccgatttttagatacacccagcataacctaactcacctgtgctttttaatattcttctttggcttccataggctcttctgaaaacctaaccactatatgcacaaagttcttaccattggaaaacacctttaaatgatacacangagaaagtttccagaaaaatcatttcaaggttggagaaaacctattatacttttttaaataaaataggaaataataagctggattgaggtaatatatatttggctcctactcacacaaaaattttgaaaaagaaaaaaaatgtttaatttattttttaattattcatttgtaatcacgaaatatctgaactaaatatttgaatctctgcaaaggctgggagttgctatgtgttgttgggaccacactactctcatatcctgtgtaaataccccatgactgagtaaatattatcatgcaattttagaattagaagtttagatgttttgacctaaatgttttccagggttaaaatatccttcttacagaacagtgatcctcataagttta

SEQ ID NO: 56022 - DNA, 559 bp, Homo sapiens
  misc_feature 87, 503, 512, 528, 553: n = A,T,C or G
cccccctcgagaagtcttctagaattaattaacgcgggggtcaacagaaataatccaatcagaacaagagagagaaaaaacattggngaaaaaaaaagttaacagaacttcagggacctgtagggcaatatcaaaagtccaaaattaatgtcattggaattccagattaagaggataaagtgcagtacacacaaaaattttgaagaaataatttctgaaaaattcccaaatgtgtgaaaagacataagcctaaagattaaagaagcttaaggaatgccaaatagaataaactcaaagaagtctatactcttgacacattataatcaaaaattctaaacactgaaacaaagaaaaaaatcttaaacaacacacgactaaagaacaatgggattcagaaaactgaatttttcattataaaccatgtgggccagaaggaagtgaaataacatctttaaagttgtgagagaaatgagctgccaactgaggattctatatccagcaanaatatactntaagaatgaaagtganataaggatattctcagatgaagaanaactaa

SEQ ID NO: 56023 - DNA, 354 bp, Homo sapiens
cgggccccccctcggaagtcttctagaattaattaacgcgggacctccaatggtaaaaaccacaattacctttgcaccagcctaatataatgtgccaggagcactaaaattactccacgaagtactagaagcatacctctttgaacactactttgaatagtactgatgtattatactgctcttgcttttcaagtattttatattaaaactgtggccaggcacggtggctcacgcctgtaatcccagcactttgggaggcagaggcaggcagatcatgaggtcaggagatcaaaaccatcctggctaacatggtgaaaccctgtctctaactaaaactacaaaaaaaaaaaaaaa

SEQ ID NO: 56024 - DNA, 598 bp, Homo sapiens
  misc_feature 16: n = A,T,C or G
ccgggccccccctcgngggtacttctagaattaattaacgcggggattacgagtaaattttatcaagtaagaaaattcacaaatacatagtgtatgagtaatgaagattggctgtataagaatgtattacattctaagtaacagagctataatacagcgacatttattcaagtaaagcacttcggtatgaaattcagaaagcttgtcacatcccagtgaaatcaaagacaacatggactgtttcacactttctggcaaaatatctgagctacagtcttataagaagtacaaaaacaaacaaaacactaagaaaaaatattcccaaaagaataatgggtaaaggacataaagtgttcaaatggagaaaaaataagtagaagtaggaataaagtgattcaaactcaataataatcagaaaatacaaatgtgttgctcacaaaattatcaacacaaatattaataccaaatgtcagcaaggctgtggagaagtaagtatcacataaattttttggctgggacatcaataagaacaattttgatgggaaacttaagaatgtgaaaaaacaaaaaagccttttgagctaaccatatttcttgt

SEQ ID NO: 56025 - DNA, 592 bp, Homo sapiens
cgggcccccccctcgaggtacttctagaattaattaacgcgggtggccgcgatataacaaactagagcaagaagattcgtaagttagagaatagctcgaataattgagtattgagtatattcacttaatgaaggtaacagcattgacatttactcaggatgctgaatgtctaccttttcttgggctaaaatgatagtctctgatgtatttaacaaataattgtgacaaaactggtgacttttgctttattgataaaactgggatggtcacaagtctgtggaaaagtttatgtgaattattgaaaaaatgtaggtacatctttaggaaatgcacaattgacatttcagctaaggttttcagcgaaacattaaaaataatgaagatggtattttatgatttaaatatctcttttctgtttgtatagttgatcagatgttttgggaggttatgcagttgagaaaagagatgtcattggcaaagctgggttatttcaaagaggaactctgatgctctgcgtgggaccatgcctgaactccccgaataactgaaaaatggctgaatatttttatggttacttgatatttatttccaa

SEQ ID NO: 56026 - DNA, 593 bp, Homo sapiens
cgggccccccctcggaagtcttctagaattaattaacgcggggggggcaaatgcagctaactttgtgcttttattttgaagctaaacagttaacagaaacacaattttgtaaacagataatatctgtggtctgttgagttgctaggatttgtctttagatcaattggctttgagaagtcagcttaattccattttacggcccaattttgcctttttccccccctacaggctggccacttgaatacatgtcaaataatcgaaatatgaagaattcatttttattagaaaaggccttaagggtggaatttaagctcctattaacattcattcagtagaacttaggttactgatcagctcttcactgtgtaaagttgatactgattttggaagcagaatattgagtgacacagagccagaagttgtaaaactgcactgcaggtttcctgcccttttgctctgtaagcagtaactccaaatgtcacttcataacagttcttgtcaaccttaggcaggatgtatcaatgcatgtcagatgggggtagataactttggggcaggttatcacaacctaagagttggtggagaaaacatgg

SEQ ID NO: 56027 - DNA, 570 bp, Homo sapiens
  misc_feature 27: n = A,T,C or G
cgggccccccctcggaagtcttctagnattaattaacgcgggtggattctgtgggctgccagaaaggccaaaatgggcaatttttaaattgattgtgaaaagcattttattattggaatagctgacattcttgttgattatgcagggtaaaaaaaaataccctaacatttgaacatttggtacatgttcagctccttctgtacatcaaaagtgaatattaatgtacaatctacacaagtctctcaacttgtcaggaagtggctctgtaattgcttcctgacaagttctggcagcatttggttgtcatcactcaatcttacttgtatttaagattataacataagttaattgtttaactaaaaaattagcctgctcccaaatggacaaaagatataatcaaacaattcaggccgggcatggtggctcacacctgcaatctcagcacttagggaggccaaggtgggaggatcacttgaggccaggagttcgagaccagcctggccaacatggcaaaaccccatctctactaaaaacacaaacattagctgggcgtggtggcatgtgcctata

SEQ ID NO: 56028 - DNA, 600 bp, Homo sapiens
cccccctcgagagtcttctagaattaattaacgcggggggtttaaataaggaactgtggtaaaccaacagaaggcatcttgctcacgttaaagttgaggaaactgaggcctgggagaagtgaagtggttcatttagggtggcccaattacttactagatcctatttttattagataattattaagaggaggcctcatctgagaacacaggtctcttgcttctcagttgtcaatgaattgcatttgagaaggttcgaattagacctgttttgtttggaacacaccaacaaagctgtttttcagaatcagaaatctcaatattaggacaattactttggaatgaagatgtccccagcttaccttgacagctgtgaatattcattagccaggctaatgccaataaactggatagaactttgcatattttgggctcagacttcttgtaagatttcaagttgtgtaaagagaaagctcctagctagtgtcctgctgaacactagcttatttccagactgaattcagatccttcttctcgttgtttctgcattcccactagaattttaggtgactcaggcagggaggttatagctccttaaagttt

SEQ ID NO: 56029 - DNA, 598 bp, Homo sapiens
tgctagaattaattaacgcgggcgcctttatataacttcatgtgtcttgtccttatcctagaatatccttaaatgcccaaataacaaaataatttcctggggaaacaaaataaacctcatttaatcacttcccagtgtaaaattcattaatggtgatcttcttggtgtgtttagagtaaataaaatactgcctacgtagcacacttggtcctatatactttggctccagtctctcattctagtcacatttttcatgaatcccatccaccccctctagtccagtcatatggaaatattaggttggtgtaaaagtaattgcggttttgccattacttttaataccagtaaattctacagatgtcatgttttcccacaaccttctggatttacatttgttatttcctcaagcctaaaactgaggcaaaatttaaccactatctggacacttaagaaatcagcctggccgggcacggtggctcacgcctgtaatcccagtactttgggaagctgagttgggcggaccacgaggtcaggagatcgagaccatcctagctaatacagtgaaaccctgtctccactaaaaatacaaaaaattagc

SEQ ID NO: 56030 - DNA, 600 bp, Homo sapiens
cgggccccccctcgaaagtcttctagaattaattaacgcggggtgggtgtaaaaaagcaaagtatttaaatatataatagtactctactgtgtatgtccatacagtaaagtgaagacagactcacatataacattaatagttgatatttgcctactgtattctgtgtgccaataattgttagcaatgtacatgaattatctcaattatttcgtttgttcctctcagtgattctaatattcccattttgcagatgagaaaaatggaggcacaaggaggtttagtcacttgcccaggatcacaaagttggtggccatcttcttaggtatgactacaaagaacctcctagtgtagatattagctatgaaagtacccacagaaagcttctaagagtagtcactctaaggaagggactgcttggctaaaagatggaaaccagaagatttattctccctgaatctttggtattctatacatgagcgtgatctgtgcaaaaaataataaatccagtgtttttttactctgccttctggaattaattaggaagaaggacaacatgaatgctgctgtatatcatgtatttttaaagaaatgttgtctta

SEQ ID NO: 56031 - DNA, 432 bp, Homo sapiens
  misc_feature 14, 26: n = A,T,C or G
cccccccatcgganagtaccttctanaattaattaacgcgggtagatgatttctagcaggcaggaagtcctgtgcggtgtcaccatgagcacctccagctgtactagtgccattggaataataaatttgataaggtggtgaaaaaaaaaaaaaaaaaaaaaaaaaaaaaaaaaaaaaaaaaaaaaaaaaaaaaaaaaaaaaaaaaaaaaaaaaaaaaaaaaaaaccaaaaaaaaaaaaataaaaaaaaccccccccccccccccggggaaccccccattcccccctttaggaattataatacccccccctaaaagccccttttttaccaccctttaaccgggaaaacccctggcttccccaaactaaatgcctttaaaccaaacccccttttcccaattgggttttaaaaaaaaaagccccccccaatcccc

SEQ ID NO: 56032 - DNA, 594 bp, Homo sapiens
cgggccccccctcggaagtcttctagaattaattaaaatgtgattgaaacaatatatatcacaaaataagatgacagatacaaaagtaaacgtgattgataaatttaaataggctaaacttcctggcaataagaaaatatttttatagtagattataacataaaccacaaatcagtgcttgtatagacgagttctgaaaacttcaaactgtgaaagttgaaagtaaggtttaattcaggctagaaagcattagatcaatctctctttgtcttacacacacacacacacgccccattataatgatcaaagttcagtctgcactgaagtttaagtctaattgtaagtatctttatatattaaaaaaatccctgtgttaactgtaagacaaaataaacacatttagtggtatgagactttaaattaaatcagatcttagtccatgacagattaagtgcacaaaaaaataaatgttaataaaactgtagaagccctaaataacataattaacaaactagaacacatatacaaacatttataaagaatataccttcttttaaattgtccatggaacatcagaaaatgtaaagaatctac

SEQ ID NO: 56033 - DNA, 458 bp, Homo sapiens
cggggccccccctcgaaagtcttctagaattaattaacgcggggtgggagaaagtaaataactagggaacagaaaggagtcttcatagcatattcttaagagccgccagaattttaaaccatgtatatataattctttccaaacatgctcatttttcaaaatatatgatttatgaacctaaaagcttctgattttgaattttagaaatattcgtatcgcctatccttttactcacaagttttctaaacatcatgtcaaagtttgtcatctatatgttgaaaagagcacacaaagtaagaaacaaaatgttgacatcattctttttgttttcaaactgacctcaattcataaacccggcctcttttacaaaattattcaacagttgaatctgtgaccagttaattagttgtgaatccactcaatcaaatcatctcaattcactatttcctttttttttt

SEQ ID NO: 56034 - DNA, 595 bp, Homo sapiens
cgggccccccctcgaaagtcttctagaattaattaacgcggggggggcctggccagagcaataaagcaagaaaaaggaataacatttagagtagaaaggaagaagtaaaactatcttttcacagatgatattgttgactatgtcaaaaagcctaaggaaattacaaaaaagcttctagaactaataagtgaattttgtaatgttgcaggatacaaggtcaatatataaaatcaattatatttctataggctaacaagtaattaaaatttgatattttaaagataacatttataataacatcaaaattatggaatatttagagataaatctaagaaaagatatgaaagacttttatcctgaaaactacaaaacattgctgagagaaactaatgaagatctaaacaaatggatatgtcatgttcatatgctggaagacttaatctcgtaagatatcagttcttcctaaattggcatatagatctggcacaattctagcaagttgaaatctcagcagaaattgtaaaaattgacaatctgattctaaaatttattttgaaataccaaggacctagaatagcctaaacaattttgaaaa

SEQ ID NO: 56035 - DNA, 571 bp, Homo sapiens
gggccccccctcggggtacttctagaattaattaacgcgggtattcatgcatatactgtcttaatttttttttattgctttctatgacttatgcaccatgctaggcactgatgattcaatggcaattgagatggagtctctactagtgaaatgcacttttttgcctcttcatgtagatatgtaactttctggacagcagcctgcatttgccaggtgcatatgaagttctataaatacgttttgacttgattgtattataaattactttctagataagcagtatgatctataatctaaggtctatgagtaggactttttttccctaatgccagtactaactgtatgaatggaacaaattgcttaacttccatattacttacaacattgtgatatagtatctgccttaactaatacaagagtgttaaaaaggtcaaatgagataatgtatgggaaaatacctgataaattatcattagaaactaatgtaaatgattactttaaactgcaaaaagctttcacaagtagaaccgagatattaactttcttatccttaatgtacctgaagatttta

SEQ ID NO: 56036 - DNA, 592 bp, Homo sapiens
  misc_feature 388, 389, 390, 391, 392, 393, 394, 395, 396, 397, 398, 399,400, 401, 402, 403, 404, 405, 406, 407, 408, 409, 410, 411,412, 413, 414, 415, 416, 417, 418, 419, 420, 421, 422, 423,424, 425, 426, 427, 428, 429, 430, 431, 432, 433, 434: n = A,T,C or G
  misc_feature 435, 436, 437, 438, 439, 440, 441, 442, 443, 444, 445, 446,447, 448, 449, 450, 451, 452, 453, 454, 455, 456, 457, 458,459, 460, 461, 462, 463, 464, 465, 466, 467, 468, 469, 470,471, 472, 473, 474, 475, 476, 477, 478, 479, 480, 481: n = A,T,C or G
  misc_feature 482, 483, 484, 485, 486, 487, 488, 489, 490, 491, 492, 493,494, 495, 496, 497, 498, 499, 500, 501, 502, 503, 504, 505,506, 507, 508, 509, 510, 511, 512, 513, 514, 515, 516, 517,518, 519, 520, 521, 522, 523, 524, 525, 526, 527, 528: n = A,T,C or G
  misc_feature 529, 530, 531, 532, 533, 534, 535, 536: n = A,T,C or G
cggggccccccctcggggtacttctagaattaattaacgcggggtgggtggggagggatgctgcatttctcagctgggcagtaatcaatttaatggtcctttaaaatgtctgtgtattaaaaatttaagaataccacactttaatattaaatattcataaggtctagtatcttgataataatgtagatgttttaataacaattttttgtccttcttaaaataaaatgaaagaaacttgaaaaaaaaaaaaaaaaaaaaaaaaaaaaaaaaaaaaaaaaaaaaaaaaaaaaaaaaaaaaaaaggaaaaaagaaaaaaaaaaaaaagggggccgcccccgggggggacctccaattccccctatagggagtggtttaaccccccctcacnnnnnnnnnnnnnnnnnnnnnnnnnnnnnnnnnnnnnnnnnnnnnnnnnnnnnnnnnnnnnnnnnnnnnnnnnnnnnnnnnnnnnnnnnnnnnnnnnnnnnnnnnnnnnnnnnnnnnnnnnnnnnnnnnnnnnnnnnnnnnnnnnnnnnaaagggaaattgaaaccgttaatttttggtaaaaatccgggtaaaattttggtaaa

SEQ ID NO: 56037 - DNA, 573 bp, Homo sapiens
acttctagaattaattaacgcggggtggggaggactgctagaagcccaggcacaggagaccatcctggacaaaatagcaagacgccgtctctgtttaaaacaaaaaaaatcatggatttcaagaaaaaaaaaaagacccagcacacaacctacaatctttcattcattcattatgcaaagattttctgagctcctactatgtaccatgcccattcttggtacaatatctttatgtgcatagtatatatgcaatccaaaatattcagcctgatcagaaattctcctctgtttcttttgaaaaagtaaggccaaagaagaaatatttgaggctttcagtgctaatttgataataaaatcttgatgtatttctgttacttgataatagtaaaaaaatgtgtgagcatgaaattctaaacaaaattcattatatgaacttgtgacattctcatgcactgggttttttttcttccatttccaaacactaattgacagcacttgaaaacagtgattcagcttccgcatgtcatatgattcctagggactgtagctatatccctcaggccagtagactgg

SEQ ID NO: 56038 - DNA, 546 bp, Homo sapiens
gggtaccgggccccccctcggagtacttctagaattaattaacgcggggggctaaaatactgcattaaaactgagtaggattctgatgatgctgaagaagaggaggaggggagggaagaggagaaggagaatgaggaagaaaagaggtagtagaagaggaagaggagattagaaaaattatactaactctgatgtatttctgcaggataatagacagagaggatcctttctatgttaactagttcttcgagttcatgtaagtccttggaaatacattaactgaaatccttcacctcttttggggaaatgacagagccattagttcaaatatttggtaaattaattataaacaactgtaaacctccctgctctcactttctggagcaaactcaattgactacattattccaaaccaattgttcactctgactgtcccgtagcaataagaccaagtcagtaacttcaaggttccagaaatggactgtgtatctggactcatttgttaaattgtttccatagcaagaaaaaaaattctgaaaatgtaag

SEQ ID NO: 56039 - DNA, 598 bp, Homo sapiens
  misc_feature 585: n = A,T,C or G
cgggccccccctcggaagtcttctagaattaattaacgcgggatatagtttaatacttacttcatatcttatacttaaaaaaattccagacagatcaaagatttaaacatataaaagaaaaaaagcatattagagagaacataatttttttgtttttattaatttttattattatcttgaagtgaggaaggactttttaaataagacacaaattcagagccataaaagataacaaaaatagaattgcaaaaaattctttaaagtaagaaccatcttaaacaaagtcataaagcaaacaaaagcagggaagatcattgcaaattacactatagagaaagctaacttccctaatatgcaaacagttttcacaaatctctatgaaggccaacaactttacagacaaatggacaaagaatagaaacagaatgtcacaaaacaggaaaagatgttcaatttcacttaagatatacaaaaattttactgatattataataacatactactctttacttaacaaactgaccaggatggaaagtttgattatacattgtagttagaaaggttgtaggaaagtagacattctanacattggtggtgg

SEQ ID NO: 56040 - DNA, 418 bp, Homo sapiens
  misc_feature 385: n = A,T,C or G
gggccccccctcggaagtcttctagaattaattaacgcgggccatccaatttgtcttatacttgctgctgaataaaaagtcctgaaattcagtttaaatattggtctttgttatcccaaaatagcaatcataattatggtaaattagttgaattcacctttcatttattttgtagtaaatatctatttcacttaactttagtagataaagtaaccaactattgttcagctttttaaaaagccttcacaatacaattaaaaaaattatatgtagtaactaataaaagtaaaccatttctttaaaattcacggggtgtacttgcaaaacagttcatgtacacctgggaagatggagagagaactatgaaataagaatccacagggcncgggcgcggtggctcatgcctgtagtcccagca

SEQ ID NO: 56041 - DNA, 598 bp, Homo sapiens
cccccctcggaagtcttctagaattaattaacgcggggctcactgcaacttccacatcctgggttcaagcgattctcctgcctcagcctcccagtagctgggactacaggcatgtgcctctaagcctggctaaattttttgtatttttggtagagactgggtttcaccataatggccaggctggtcttgaactcctggcctcaaatgatctgcccgccttggcctcccaaagtgctgggattacaggcatgagccaccgcacctggccttaaaattttgtttcgtaaacagatcattgaagaaaacattatctgtcctactcatttccataaaaaaggacactatatgtggtgtatgtatatgtgtgtaaatatacatacataaatatactatatatataaaaaagccttaaaatttataaattaatatgcacatgcaagttatgattatttcatgtttcaatttaaaataaactaaaaatggcctttcttacaccagtgttcccattttaagcaagtttctttgtataatgtggctagcagcataactcatttttagtacaaataatatgatattctttcaattaaaatcaatatag

SEQ ID NO: 56042 - DNA, 405 bp, Homo sapiens
  misc_feature 320, 375: n = A,T,C or G
cgggccccccctcggagtacttctagaattaattaacgcgggttctatgttggtaatttcttcagaatcttgaaattttaagaaaccatttccaccatgcccttgtataaagagtaaaaaagatcaatagattttttaatgcaaactgcatatatctagatatatacatttacttcattcattacattttgacatcgcttgttattttatactctaaaatgtatactatgaaaacaaacaaattgaattttctactatgccaattaaaaagagaatgatagactatataaaatagcagatataatatctttaatagggtngctaatattcaattacagaaacctatattgatgctctgccactggctccatgatnatatcagaaatgagggggcatgcacaaaat

SEQ ID NO: 56043 - DNA, 606 bp, Homo sapiens
ccgggccccccctcggaagtcttctagaattaattaacgcggggtccctgggcaagttatctaatctctacatgtctcagtttccttatctatagaagaagaataataagtcagtcaccttagtgaattgtagagagtaagtgctcagctacacatcacctatatctatatatctatatctacgtaaacattttatagattctaagatgagaatagttgtatattaggatctctagactgagaaaatatgtataatatctacttctggttagatgtaaaaataggaaccttctatacccatggtaactccaggatcaaacaaagatcataggtatgaacgggactaccaaagagtaaatgtaaggaagccttgatgaactgacttcaacagagaagcgttcttcaccggcaagcagggagctacaggggtttccaggtggcgaactctggatctgggtatgagtgggaagaaagaaagttgacaaagatcaaaagactttgctggggagaagagacatccatcaagctactggtgatggtggggcaagtatgacactggactctgaaagtgccctgaatgatcagccgaatgcttctcctcaaccc

SEQ ID NO: 56044 - DNA, 556 bp, Homo sapiens
  misc_feature 51, 536: n = A,T,C or G
ggccccccctcgggggtacttctagaattaattaacgcgggggttgggggngaaagcagggcatttatatttctctttccagctcatgcagcatgtttgtgtaagatttggagatggttccctctagtcctctctctggcctcttgtagtttacttatgtacatgtgctggtcagtactcagctgaagactctagggaagctacagatctctacagtcctctctctctgtagctttctccacgtgggtactctgtcccgcttcccagactctcagccttgtctcctcagctctagagacctctgtgagctgctgcgtctcacctatgccccacccactgtgggtggccctgagctccaacaacattctctcctctctttattcttctgcccaaggccgtggagaggctgcctgtggttctcacagtggtctggcttcccagcttttctgtcacctacctaaccaagtccctgaattaagtcagattggtgcctgcctctgatgagatcctgatccaccactcttcactacttacanagactcctgatggcgattga

SEQ ID NO: 56045 - DNA, 484 bp, Homo sapiens
cgggccccccctcggaagtcttctagaattaattaacgtggggttttgagttttttaaatttttctcaacttttcactaataatacataatgcttttgtaatttttccttctgcaaagatagcaaaatgctaccctgaaacttagtcatcatgatacacagataactgagtcagcaaagctcttctgcaaaaccctaagcaaaaactgggcccttctcttccccaagagcaattcagaactaaacagaatcaaggaattggggctgggcgcagtggctcacgcctgcccgcaagttctctctataaagcacttttataatcaaaattgtttcctttcaatgtatgagtgatgtaatgcaacaaataaaaaattaaggtcttaaaacatctcgatgtaaaaaactaattcatgtcatttaatttcccccgaagtccctcaaagatgctaaaaattccatgtaaagtatcctttctcacttaccaa

SEQ ID NO: 56046 - DNA, 495 bp, Homo sapiens
cccccctcggagtacttctatattaattaacgcgggggttccagaagacagagaataatcccctgatctgctgaaatccactccagacggggggaacgtgaaccaacacagctacagctctggcagcacctgccacctccgagtccaagagaaaccacatgcacgcatccgtggcgggcattcctctgactgctcccaccaacacctaagctttcactccagcaagaccccacaacctcaggatggtccggcaactcttgggtgggacaagggtccagccccgccaggctaccagcccctgcccatcgaaccagtcaaagtgcgctctctcttgtatgctccaatctgtccctcccgaggctgtgtcccaggctggagaggctaagtgggtgacaaccaacttggcctcctacaagaacccacagggaggtcggaggcaatggcttgcatctgtaatcctaccactttggggggctgatgcaggcagctcacgtg

SEQ ID NO: 56047 - DNA, 544 bp, Homo sapiens
  misc_feature 69, 504: n = A,T,C or G
cgggccccccctcgaaatacttctagaattaattaacgcgggttaaataagcttgttgttctcatactntccatgggaaaaaattgagcatataccccaagatatttgtttataaattttatacacattctactacactgatagtgtatacatttgtaaaatataactatttttagtgatagcaatatcaatgcacatgcttcattctttcgaatatcttctaaatgcattcattttaatatctggtattaaatattgttatacttgaaaaagtaagaagatcaaaatggaagacacatgattggccatgcttactgaaatacgacactaatttttcaacctaattctccaactatgcaaaagtttttgtgaaaattcagccagtaaattttaatctttaacatcaatacattgtttctgtattgaactgtagatcagaaagttctacagtttttggtactttctactttattattattattactattatcatcatcatcattntgttcttgttattaccatgggtgagataatttttttttgt

SEQ ID NO: 56048 - DNA, 595 bp, Homo sapiens
  misc_feature 11, 537, 544: n = A,T,C or G
cccccctcganaaatcttctagaattaattaacgcgggcagcccaggggttgcaaactggtggccagtggatgctggtggttggaagatgatgagtgccaaatgcttactctgggcctggtaactttctaggtattctggatagattaactcattgaaacttcacaacaaccttgtgagagacatgttcttaatggtctccaatttccagatcaggaaactaagcaactcaccccaagggcatgctcatggacccttgaaaaatagagagatttcccagacatctaggtcttcagcttctctttaaaaagatctgaagctaggtggatgttgctgagttcacatcctgtccgggacagccagcagcagtccagctgattgaccacagtctccaccatccactcttgtgtgatgcctcccttcttccctgtttacaccgagtagctgacttcttttgctcttggtaagggaccacaagttatgtttgtttgtttgttcttttttcctagctgatttgatgaacatggcagtgccttangaaacantcaaacttagaagacagaagtttagacctctgggatgaggggaggtgacag

SEQ ID NO: 56049 - DNA, 604 bp, Homo sapiens
ccgggccccccctcggaagtcttctagaattaattaacgcggggggccaagtaagaggagttgaaatgagtaaagcagaaatagagctgctgaaagtttcttttatataaaaataataaaatactactttagatatagtagcattcacagggatgaaatatgcgaaaaatgggttctaaaatatttcaaagggaaaatgaagtgaaggaaacatcatgaaaggggaaaggaatgaggtaaacaagtcttaggaagagagttaagaaaaaattccgctggacttggccaaagaaagaaggggatctagtatctctatgaaggaaaaaagagtaaagccctcagtgtgaacccagtgagaacactgacaaatttgggaaaagttaaatactgatttcatccaaataaagcctctaatcttaagcataccaatactttggcataccagaagacaccttagaaatcaggatagcctttgcattcattttggtaagaaaactgatgctgagaggataaattacctaaaaatcttaaaacccaggcaagttagtcaaagaatcaagattagaattcaggtttccagagacagggctcattctaatgcctc

SEQ ID NO: 56050 - DNA, 604 bp, Homo sapiens
  misc_feature 28: n = A,T,C or G
ccgggccccccctcgaaagtcttctagnaattaattaacgcggggtcgatccaccctgtcctccgtgccacgctcaaagttgactaggggattacgaagacctggaaccatccggtgctctgagcccccgaccgtatctttactttatgtttactaggacttgtggcgtacgtccactagctgttcatccttgattcacattattcctttagaaaagttagtgtgacttatggcctgaacaataatctatgttttattcttccgtcaaagcctacctcattaagtatgttctctgaggacttgctagcctgacatatttcactgaattcctaatgggaacatagcatttgattatataccatctttttattctattttattacaaaattttagatatccagaagataatgagggcctactgcgacggtgcacgccttgtgatctcagcactttgtggggctggggtgggaggattgcttgagcccagcagtgggaggtttcagtgagctatgattgtgccactgcactctatcctggatgacaaagtgagaccctgtctcaacagaacaaaaataaaaataaaagcataaaaaaaaaaaaaagc

SEQ ID NO: 56051 - DNA, 601 bp, Homo sapiens
  misc_feature 27: n = A,T,C or G
cgggccccccctcgaaagtcttctagnattaattaacgcggggggagaaaataattccgagttataatcaaaataaaggaggcagcaggccccactgtgaaaaacctcagccctgagggcaagacacttggttcctggcccaaccccaggaactcacagagtttagaaccccaagggcattggcaatcctctagggcaggttaaatacatggttttatgagtccatgaaaatttagaaaaatagaaacaatattttcataaaactaaaagtatttgatttaaaaactgttgttttgctgaggttatatgcctctatgcttctggttttaaaaatcctttatttcatgaaacactggtgatggtagatgacagatttgattatgtccacacttgacaaaataaagttaataacctcatgtcagtcttctcaatatttctgaaatgataaaaggttacagaataaaataaaaattctgagaactaccaatgcagttcaatgaccccattttgtaagacgaaactgaggtccagagtggggggggcagtagccaactcgacaactgtaggcagttcaccaactcaaagggttaaaaaggtgact

SEQ ID NO: 56052 - DNA, 568 bp, Homo sapiens
cgggccccccctcggaagtcttctagaattaattaacgcgggcatttggatagtcaagtcaggaagtatgttacctgtttatagcttcatttattttacttctctggagttgtaaagactgaaactgatgcagatgtgaatattcaaccactccctgaagactccaggttagtaaccaggaggagagggcatctgcagctgatgctctctggctaccatccccagcaccaccaacccatctccaagctaacttctctggaccctcttctctcagctgtatatttaaagtttgttccctaagttatttacaataacttttcttgatccctgatttcaactgttgactgcaacccaataggaggttataaaatcaatttagtgggcttcaaccagcattttaaaaagtaaatagaaaatatcagattttatcacatgggtcaggtacagtgcctcacatctgtaatctcagcactttgggaggccaaagtgagaggatcatttgagcccaggagttcaaaaccagcctgggcaacatagcaagaccccatcttcacaaaaaaaaaaaaaa

SEQ ID NO: 56053 - DNA, 160 bp, Homo sapiens
  misc_feature 36, 103: n = A,T,C or G
ctgggtacccgggccccccctcggaatacttctagnattaattaacgcggggaagctctgagaattttttgtacgatcagccttactgctaataaaagcactntccacaggggaaaaaaaaaaaaaaaaaaaaaaaaaaaaaattaaaaaaaaaaaaaaa

SEQ ID NO: 56054 - DNA, 599 bp, Homo sapiens
cccccctcgagagtcttctagaattaattaacgcgggttataggagtttgtttggcaagaatgagtattccagtgcctggccactctgaacatataaatttgattactcaaacatccaaatggaggaccacatcatcagctgctacttgaagtggccagtctgtgcccaactactgaactgttcagagcccacagaaagggctacggtagagacatgtatggtatctcgtatacacaggcatgccttatttctttgtcttctaccccagtgctacctacctaaagacctctggtactcttccctttcctgggaaagaaattcaatcttgttttctcttttattattgtatcctctattctacagttatgccccaatagtagccaaaggaaaaagggggaagatgatagtttgactaaacaaataccagttcatacattcttgttccaataggagttatgggaggaaaaattattccaagcaatcacacaggatcaactttttctccttgtagaatatgtgtcatcacattggcagaatctcatccagttcttcaaagtggaaaaacaattaaaagcatttcctatcagatcagtaccaa

SEQ ID NO: 56055 - DNA, 606 bp, Homo sapiens
  misc_feature 23, 407: n = A,T,C or G
ccccccctcggaagtcttctagnaattaattaacgcgggggccccagagcgcttataatggagccgctgtcagcagaaccttctgccgccgccgccgccgccgccgtccctcctcttttttttcccggcagaggcttccgtgtcctctcccccaaccccctgcaagaagcgccgactccctgagtctggacctccatccctgctctggtcccctctcttcgtcctgatccctccacccccatgtggcagcccatgggtatgacataggccaaggcccaactaacagtcaagaaacaaaaaaaaaaaaaaaaaaaaaaaaaaaaaaaaaaaaaaaaaaaaaaaaaaaaaaaaaaaaaaaaaaaaaaaaaaaaaaaaaaaaaaaaaaaaaaaaaaaaaaaaaaaaaaanttaaaaaaaaaaaaaaagggggccccccccggggggggaccccaattccccctttaggggggttttttacccccccccctgggccggtttttaaaaaccgggggaggggaaaaacccggggggtccccaaattaaagcccttggaaaaaatcccctttttgcaagggggggtaaaaaaaaaaaggccccccccgattcc

SEQ ID NO: 56056 - DNA, 598 bp, Homo sapiens
cgggccccccctcgaaagtcttctagaattaattaatcacaattagactttgtttcaggttccattgctattttctctgcagcttcaactatttctgtcttttataggttaaattaatgaaaccaaaccccatttgggttcagtgaaatctgtgataggaattaaggtcagcaaagtcttcttccccttcaaggaatgattttttagagtatttgtgatttattcttggtatccatgattcttccttaaactagggttagaagttccttagagccctgacaaatgatacagtgcatttttactctcagcaaattatctgccaggaagaggttgaatcccaagtcctccctctttattttatagactggataggaaactgggttgtaaagctttcctgctggggatctctaatttccaaattgagtttaaactgctgattctctttcttccctccaagctctgatgttaaaataaatgttatctctccacacagctgcagtgatttaattgttgtgctgtatcaatcttaagttgcagaaattacttacacttcttttaattgtagacttaccattttagaatattaagtctgtttttg

SEQ ID NO: 56057 - DNA, 235 bp, Homo sapiens
  misc_feature 9, 25: n = A,T,C or G
acttctagnattaattaacgcgggngagcccccaaccaagcacctcccacgtctaactgcacccttaaaacaaggttggacattcagcagcctgccttccccatccccatcattaccttccaacttcaaaacactgctttaaataccagagtctgcccaaatcataattaacttggatcaaatggttgagtgttgtaactctactgcacaggacttgcaccaaaaaaaaaaaaaa

SEQ ID NO: 56058 - DNA, 336 bp, Homo sapiens
ccccccctcggggtacttctagaattaattaaagtgagtcacagggccagcacagattcactgtagaacaggacttccaagtgggatgaatcctggggtgggtggttaatttggaactgcctttggagaccagttacaacacaggtaagaaaaagatgctgagatgtaggaggattagcacagcctaaagcatgaataaaagcatgaagctgataaaatacaagaatacaggctagtgaaaagtgtagagtttgtaacttctggttccaaaatggtggcatagaagcaagttagttttacctcccattgtcctagaaaaccagaaaaaaaaaatac

SEQ ID NO: 56059 - DNA, 592 bp, Homo sapiens
cgggccccccctcggggtacttctagaattaattaacgcggggtaactttttttttaacctgataaagacttttattgagaacctatagcaaatgaaacagaagcgatctcgttaaagtcaagaataagacaaggttgccctctatcacagctactatccagctactttaacagctactttatttagagatatcctagccaatgcagtaacatcagtgaaaggaataaagaatggaaaagaagcaacaaaatgactgccctttgcaggtaatgatgttgatggtgtgtatgtgtataaaatccaaaataacttacaaatactaaaaataattcagctggatttctagttgcaagatcgaggaacaaaatttaatataactactatatacaaatagtaagcacattgaaagccaatagagaaattggtaacattggtttttttctggaggagaattgggtgcctgaggtaaaggggtgggaaattatcaatgcatacttttaagtttttagaaattggtaaatatattacctattctaataaacaaaaagtgctttaaaaaacgaaaaaaaaaaaaaaagcggccgccaccgc

SEQ ID NO: 56060 - DNA, 612 bp, Homo sapiens
ccgggccccccctcgaaagtcttctagaattaattaacgcgggggcagctgtgtcatctttctggggcccaggaggatctgggctggtttgtctggggagacagacaggatgttgtggaggtggggtggaacctggtatggagggattaactcagtcatggcattctccgaccaaaaccacacctgtgtctctggcaggctggctggccttgctcccatccctagaactgctgcctctccctggatattccagctcaattagtgccacatatgggggaaacgacacatcccagtgggatttccaacactccccctccccatgcaacaaagcaacttacttctggagttctctcccaaggagaggacacagacacagttgtttgctgtgttatatgttagctccgaacaatggttctcatttggctaagcatcaaaatcacctagggagtcggtgcaaaacaaaatatcccagtcccctcccctgaaacactgactcaggaggtttggttgggggccaggagtctgttcctaaatattccaggtagttctggtgcaggtaagtggccctgagacagtatgttgggaaatgctgacgtaaaggtatcagggccg

SEQ ID NO: 56061 - DNA, 580 bp, Homo sapiens
ccgggccccccctcggaagtcttctagaattaattaacgcggggggtctcaaaacaaacaaaaaaacaaacaaaacaaaatttcttacccaaatatcactccttgagtgaagcctgtcgtagctcccttatcatcagttccattctcttctgtggcaccctaggttttgtcactctcttctattatgtctgtgtatatttctcccagcatgtgatgaggtctaaaactgggacagtcagctctgtgtttccccacctacaacacctgacacatagttcactctctatagaggttgaatgaatgaattgtcctttacctaaattcatctttgaggttaaatgcaaggtttccttttagtgtttcaagttttagagagatgattttgggcttagtgctgtgtatagcattgactggggaaagaaagaggcagcagcattttaggtcataagcgatataaaggaaccagcattcttgttgggaaatcacaacatatatgacatatatacaaacaatacaaatacaaaattattgtcttgtcagaactaccatgttgacagcttcagggggtgccccagcagta

SEQ ID NO: 56062 - DNA, 600 bp, Homo sapiens
  misc_feature 567: n = A,T,C or G
cgggccccccctcggaagtcttctagaattaattaacgcgggccatggactgcgagcacattattagcgtgaggtccaatgatgtggtttgaaaaattggacaacagtttaaaactttatccaaaactctgtatcagctctttgtgcttctgtcactttaaatgataaaagagccatgacagaggacaaacgaagaggccctcagctcagctgcagcacaggctgttggtaaactccaacgtggtgctcatgcagaaaccatctggttgtctcatctttaaaaccatggaatcaccagggacacttctccacagccagagaatggctccatagaaaagcaacttccacattcatgtttgagaacgttcaaggatgaagataaaggaaaatggtgcagtcccctatgaaaagtgctactcacttttagtgcgactgttttgtcaaactcccaagtactcaaagccaacgggagatgtgatctcagagtaaaggtggtcaatctacaccgtataccaaagcagtctaaaactgaatagcacatttgaatagtgagggaacaccacattntcaaagtcctgccggcgtgtctcggcctcccta

SEQ ID NO: 56063 - DNA, 365 bp, Homo sapiens
ccgggccccccctcggaagtcttctagaattaattaacgcgggggccaaatgaaagttaccatttggcctgtgacaaacctgggaacaactgcctgctgcctgcgcgctctccacccctcagatgtgaatgaggccttcctgccaagagacctccaatacccttatctccaggccacatatgagagcagaccgattccatgttagacttatgatacctgaatttgcacccaggaagggggatgctgcaaacagcttaccttcagttacgaccaggtcagtcccgatttctcccatctcactttctcttagacaaaatccctgagagccaactacttactctacccaccccaaaaaaaaaaaaaaa

SEQ ID NO: 56064 - DNA, 493 bp, Homo sapiens
cccccctcgagagtacttctagaattaattaacgcgggaaggatcaagtaactcctgatagtgtgtcgcagcacagcttggctcaagccttgcaaatgctcgatgagagagaaagtatcgatgagacgtgaacgaatggcatcagctcggggaagctgcatctgcccttcttgttggtaagcggccatgtctgctaagaaaatgtaagcatcaagtgtcatttcattcttggagctgcaccaaggattacaggttttctgtcccctcctccccaccctctttgcccttaagattccttaatgtacccacatctacgaactaggagcagttgggcagaacaaacattctactaagactcggttttttgaaacaaaaggggctaagagtggtaaagacattgagcagtcgaccaagtggccaggcatcttcactttgtgacggcactaccaattaaaagctcattaaaaaaaaaaaaaaaaaaaaaaagcggccg

SEQ ID NO: 56065 - DNA, 604 bp, Homo sapiens
  misc_feature 28: n = A,T,C or G
ccgggccccccctcggaagtcttctagnattaattaacgcgggggaggctaaggcagctgtaacttgaaagactatatcagaaaagaggaagttacacagagaaagagctaaacaaatctttgtaagaatgccagctcctttggaggctgaaacaagagaatcacttgagcccagctacgcaaatccagcctgggcaacatagtgagacaccatctcttttagaaaagcacacacacacaaaaaaaaaccttcataagagtctcattgtgtacactgatgagtattaagctgtgcatgtgtagggtgaaactaggaaactctaagttcacatattcctcaaactggaagactttcaagttccaatcaccagaatgacagactttgtagaacttctgtatctttgcagaacatctataaaggatagatatatatatcctttacacacacacacacacacacacacacacacacacattaagataaagataaaataaatactttttcagacatacaaaatgtgagagaattcttctgtaagaaacctgtactgcaaaaaaggtgtaaaaatgtcatttaaagtgaagaaaaatgataccagatgga

SEQ ID NO: 56066 - DNA, 586 bp, Homo sapiens
  misc_feature 21: n = A,T,C or G
ccccctcggaagtcttctagnattaattaacgcgggtcaaaacatttcagtgaacaagttttagaagttcaacttcataacaattatttaatttgttcttttgatttttttttgtttttgtttttgagacagggtctcacttcgtcgctcaggctggagtgcaatggtatgaccatggctcactacagcctcagcctcccaggcccaagcgatcctatcacctcagcctcccaagcatctggtctcatgccaccatgtctggccaatttttattttttgcagagacagggttttgccatgttgcccaggatggcctcaaactcccgggctcaagcaatccgcctgtcctggcctcccaaaatatttcaggtaacagtggtaaagtagtttagtgaaaagagctcataagttttagtcccactttagccactgtggacaaattatataatttttctaggctcttacttctttatccataaaataaagtggttatagagtgccagcaccacctctagcttgccaagctccagccaaaggaggagagtaagtaaggaggtctctataccatggctcataaaaggcacaa

SEQ ID NO: 56067 - DNA, 575 bp, Homo sapiens
  misc_feature 27: n = A,T,C or G
cgggccccccctcggaagtcttctagnattaattaacgcggggatgtacttcttttttattgctttgactattgatctgtctttccacatacattttgaatttaggctgccaactttttaaataaaaacaaaacaaaaagaaaaagacagttgagatttgtattagaatatctctgaatttacagctcaatttgtaacttcatgttctttaacctctggctgcacattagaattatttgagcacactgaaagaaaatacaggcttggactcccacctcaaaccaattaaatcaataggctttattatgtagtcatgattcagacatgctggtttaatattttaacataattctaaccattaaaattaaagatatctgagactatatggtactttttatcatgaatattgctggtatctaaataaaaactaggaaatgaattataaaaattagttttcacttgttaaatctatagacctaatatttaagtaagattcaggccacatatcaagccacatggtcatcaagccaaactgaaaataagaaaaaacttagaaaattttcaaaagatttaag

SEQ ID NO: 56068 - DNA, 581 bp, Homo sapiens
  misc_feature 29: n = A,T,C or G
cgggcccccccctcggaggtacttctagnattaattaaattgtagtcaaatcttaaatgaacattacaaaagtgtgtgtgtaaaaatatgcaccattttgtgccattttttttttatgagaattggtgccaactatttggagaataccaaaggtaggaaatggtgtcctgctttcttgttctttctcctttttaaaacgctttctttagaattctccctttgcacttccagttccaagttgtttctcaatggtttgagaagaaagtggaaacttctcttttacaaacggatgaaaagagagagccctaatggaccacatctaggatgctagatcattgggtctggagcaaactacccagtttccaactctggctccagaatctaccatctgtgttaccttgggcaaataacctcagtaatccccagtttccatacttgtaaaatgtagataatgatattacccacctcatatgactgatgtgaagttcagagataacccatctaaggtgtttggcacaaggcccggtacacagtaagtgccaaaaaatgtttgctttgataatacaaagacaatattgggg

SEQ ID NO: 56069 - DNA, 613 bp, Homo sapiens
  misc_feature 532: n = A,T,C or G
cccccctcgaaagtcttctagaattaattaacgcggggcatttaggagatgaagcactacaggtggtgaaatgctctagcaatgaagcagggaagggagaggggggaaaggaaatttgagccaagcaacctgaaggtcaggggaagctggtcttatagatgttaagggaggaatccaagtaggcaaaggggatgaacagcagtgcaaaggctctggggcagcaggttgcccggtatgttccagaacaggaaggaggccagtgtggctggcatggagagctaaggctcaaaggagaaagtgaagagaaagaggtagtaagggaccaggaggaattgagcccggccagccgtgctactgatgttagctcacatgtcacagtgtgtgagggagatagagtccttgggaacaataatatgcagagcttttaaaaactttcatactgtagccatcaattccatcatcatggtggtggtatccctgggtggtggtggttacttggtagagtatacgtcaactcgaatttcttcctcanaagtatataaaatttgaaaagacctagaagtgatctagtggaatgaagacgctgagataccattgaggttggggaaactac

SEQ ID NO: 56070 - DNA, 592 bp, Homo sapiens
acttctagaattaattaacgcgggggtttaggaaagcagctcaggcctgtgagactggcgaggcacagcactgcctgctcagcacagctgaggctgtccccagaagtactgagtcacacagggctgacaacccagtcaggcttcagtcagctcacagctgttgaggagctgagataaagtaaggctttgaagttttagagaagacagccctcagggtctagggccccagatgaagtcaaatctcaggtaagtgagagtggcaagcacaatcttttgaagagaacagtaggacaaacaggcagtgactgttcttctgcagaaacatcagcttcaaatcatgatttttatcattatacacgccagctcaaaagcctaccaagaatgcctactcgctagtcctccctattaaaaatgactctgtgattttgttaggcactactctagctcaccaagctaatttttactcaataatacagtttgttctaccattgcaaatttgcagttttatatctatggtttgctttcttctattatgtgagggtactatgtaacatttttacagcattttggtttgcaccataattgtatatca

SEQ ID NO: 56071 - DNA, 603 bp, Homo sapiens
ccgggccccccctcggaagtcttctagaattaattaacgcgggtctgttatttaggaggatgaagtattcagagaaactaagtgacttcctggagacttattggcaagatactggagttattaggatgaaggtcttctgatttcttgttcagagtttactaaggaaccctggaaagttttggtgaaccattttaccctataaaccctatcacatttatcaaatgagtccttacaatttgcatcttatcttgtaaacagaaataaaaaaaatgataattattcagagtgtttaaatgctacaaatttgatataattgctaagcattattaaaatatatttaagtaataattttgttttgaaactaattgagatattcagatatttcacattttgctgacttcaccttctgacaagctattttttatttcgtattcatagacaaacctttaaaatatataaattgggtttttttatttttggtcaggtatcctaaaacttctgaaggtaacattaatttttatctgtcaggatgtactaattagagcttcaaaaaaattaaaacattatgcctgagttcaaactgctcatctgtttttttaaaaa

SEQ ID NO: 56072 - DNA, 612 bp, Homo sapiens
cggggccccccctcggaagtcttctagaattaattaacgcgggcccccacccagtaataataagttgtccctccttctcccctctgggtgttgtcagagaaggccaagtggaaagcaagattttcaccattgcctagtggtaatgagaaacctgccccattatgtcagtggaagccacatgagaggtaacaaagtgtccctctccctcaaagccatattgtgtcggcagaggcctactgaggactttccgcgcccagcagtaacaaactgtcagctctgggggatgtccatggaggcctattaaaaaacctggaccggccgggcacagtggcttatgcctgtaaccccagcactttgggaggccgaggtgggcagatcacaaagtcaggagatggagaccttcttggccaacgtggtgaaaccacgtctcttctaaaatacaaaaaattagccaggcatggtggcacatgcctgtaaccccagctacttgggaggctggggcaggggaatcgcttgaatccgggaggcggaggttgcagtgagctgagattgcaccactgcactccagcctggcaacagagcaagactctgtctcaaaaaaaaaaaaagcgg

SEQ ID NO: 56073 - DNA, 562 bp, Homo sapiens
cgggccccccctcggaagtcttctagaattaattaaattaaataaataataaaaagtcagtatccaaatttgaggtttctatatatctttatggtactctgttagtgtgtagaatgggtgaaagtgggaagaaaaaagtgtattttgtgataaccttattggaacattggttccaatgtttacatttaaaatatatcatctcacaaaggcattgtcatgattgccatttgcacacatcaatgagtggggaaaattgtgaaaatccattttatctaaactcagaacagtaggttaccatatcgatacctcttgcatgcatgtaccctaattcagagctactccatgtgcgactggtaatgtggactggtgctagtcagcaaactgtttttgtaggtttgcaatgattaagtacagaaattgagcatctgaatttggaaacttcaatagcaatttcacagactaattttatttctgttgaatctaattgttaaaactgggttttattttgtgtgttcttttttcattttctgagtaatatgtttttattggattttataaaagt

SEQ ID NO: 56074 - DNA, 611 bp, Homo sapiens
  misc_feature 44: n = A,T,C or G
ccgggccccccctcggaagtcttctagaattaattaacgcgggngaaaaatcattcattaaagcaacatgtttgatatttagttcaggcttttctaaatctagtttttctccccaccttaaccactggttaatatcctgtgaaacgtggtttgagaaatattccatatccaaatcactcagaataatttattagaacctacagtttgttgagaatttagtatattcccggtactatctcatttagatgaagtgagctacccagtgtcacacacacacacacacacacacgaaaataacacaatgccaagacttataagtgaatattatatgttttattccagcatggaaacagcctcttctgtttgatgagaatcatcccaaagttggcgtatgaagcttgagcttcaagtatggatgctgagctcttgacagtgggtgggcaaactgcagataatcattgttagaagggcttgtggaaagaacaatgaagtaaccagagcttacatgaaagaagtttcacttttcaaatgagataaactaatgttctttaaacaacccttttgttctaatgcttttcctactaattctaaatggaggtgaagaaaaacac

SEQ ID NO: 56075 - DNA, 597 bp, Homo sapiens
cgggcccccccctcgaaatacttctagaattaattaacgcggggtggcagaggcaggaaaaaaaatcatgtataagtgaatatgcacagtttaaacccatgctgttcaatgttcaactgtacttcaaagtaaaaagtttatagaaatagctgttttatcataatacatactcttaaaattttttagcaatataagattgcaaaggaaaatgttccttgttcttaaaatctcacccccagatataccacaattagcagtttgatctatgtaactatttaaacaaaggcattttgtgaatttagaggcttcaattatattataatctctataataatataatctctagattgtctttcagttcttaggttcttttaacccttatgcagagaagagggagggtggagaaaatctttgaaattaggtttgttcatgacacttttaagtgtatcttgaggtatttttctgtctgttataagggttgtttaggtgttagctttctttgaccctaagaccagggcctgcatatactacacaagctattcaacatagcagcctgctcaggagtcctgtccatctgtggctcagacctgtggttgc

SEQ ID NO: 56076 - DNA, 583 bp, Homo sapiens
  misc_feature 22: n = A,T,C or G
ccccctcgggggtacttgctanaattaattaacgcgggggagcatggtgatgggataggttgcgggagggatttatatatatatatatatatatatatatgaaagccctatgataatataacctttgagcaaagtcgaagtaagaatatgaacacctttcaaagttaatactttcctgttttcttttttttaacaagttgcatccttgcacatctatattcttaaaattcaaattgtttgatgttgtatctgcttgataattcttcaaaataatagagctatgatctcagcactgtacttcagcctagacgacagagtgaaacccccatctctaaatattaaaaataataaaaaataaaatgcaaatattataatatcttgcaaaccagcattagtgaatttggattatataggatcttatcactcctaccactttgatattttttaagttagtattttcactagactatcacaatcattttacactgttagacctaggttttggggtttttttttctttttgtttgttttttaattcttaaaggatgtgggactttttgaaatattgttttctatgtcttgt

SEQ ID NO: 56077 - DNA, 592 bp, Homo sapiens
  misc_feature 569, 582: n = A,T,C or G
ccctcgaaatacttctagaattaattaacgcggggtggttttattcattattgctaaaattgtctttcagttggtcaacaggtaaataaaactttagtccatccataaagtggattaccactcagaaaaaggaataaacaactgtatgaagcaacatgattgaatctgaaatgcactgtgctaagtgaatgaagctaaactcaaaaaactacataatgccattatggaaaaggcaaaactatacagacaaaaaaattgatcagtggttgccaagtgtttgaggtggtgggaagatgtgactataaaggagaattaaggaactttgggggagtgatagaaatactctacctacttattgtgatgctagtggttgtatgacttcatgcatttgtcaaaactcgtaactgtagattaaaaagtatacattttactgtatataaaaattagatcatgataaacctgacttataagtgaacaaagaaatcagataggatgggaggggggttcaatttgaagcctatgctttgcgggcagggcttcatttcatcatcattatctatataagtcgnttatgtctatgtnctgactctct

SEQ ID NO: 56078 - DNA, 318 bp, Homo sapiens
taattaacgcgggggcggaccttgtgaggctcagttgacccgttacttgcaaccctgaaaacaaatcatgtttttgacttataaaaaaaaaaaaaaaaaaaaaaaaaaaaaaaaaaaaaaaaaaaaaaaaaaaaaaaaaaaaaaaaaaaagcggcccccccccggggggggggatatttttatctttttggggggcgcccccccgggggggggccgcccatttcgcccttttttgggttggttttttggccccccccctgggccggcttttcctaccctgggggcggggaaaccccgggcttcccccctttttttcgt

SEQ ID NO: 56079 - DNA, 564 bp, Homo sapiens
  misc_feature 11, 554: n = A,T,C or G
cccccctcggnaagtcttctagaattaattaacgcgggccttcttgccatgttcacaacatggtgggaagcatcatgtgggcaagtgaacacatgaacacaaaggaaaaggggactgagtgctccattttattaaaaaaaaaactcacttctgagataattaacctactcctacactaatggcataaatccattcactccacccacagggcctaatcacttttcactaggttccagcttccagcactgttgcattgtaaactaagtttccaacacaggcttttgggggcacctattcaaaccaggtggcaagtattatacatgttttctctatattttaaaggattattttttattatggagtttgttgtggaatgtaattgaattactaaatacagtttgattcttttgaggctgtcttttatcattgctagagaggtccagagctgactttagggctaaaatgataagaaggcaataccattgtgagtatactactcagtttctcatatattatgaagtttttcccactctggctgtttggaatacaaactnttcctgtccc

SEQ ID NO: 56080 - DNA, 595 bp, Homo sapiens
cgggcccccccctcggggtacttctagaattaattaacgcgggtgataacttattgtttgtctaagcttgtggatacttttggagagagtgaattgaggcaagaaaagatagcatattgagatctaattgttctcattttgacatatataccagtcagtctatctgctatattatatagtctctctaaaataggtcttaaatgggcattgttatttttacttctgtgttatggtcattgaaagtccctaattagtgcaatgggagtgccaggtgaccaaaaggagttgttgatgggcactctgtgggtttgcaaagtgcaaacctaaaagactgagagatgagaaatgcattgctatttgtgaatttatgttttatctcacttcacttgaaaatttatgagtagcgtggcttaagggtgctggagttgtgtgttccagggcttgcccctactgataacacccttgttggcgtgaaagtgcaatgcaaattatgacagttacaaccttctgttttgtttaacctgtcagtagatttcctggctcagtgctgagggcaatggtgtgttcagctagtccatattcacctaaacttaaa

SEQ ID NO: 56081 - DNA, 470 bp, Homo sapiens
cggggccccccctcggggtacttctagaattaattaacgcgggtacttttcaggtaatatctcatgaaatccttgtgtattattatgtgtatgtattatcacctttttaaagatgagaaaattcagccataataaaagaagttaaataaattgtccaagagaatcagtatagtgtagagatgaacagcacagctagaaccagactcgctgggtttgaatttcaccatttatcagctgtgtaatcttgggaaagttatttagtcactctgtggcttaatttcctcatctgcaaaatggggataataagctgggtgtggtggcaggcacctgtaatcccagctacctgggaggctgaggcaaggagaattgcttgaacctgggagatggaggttgcagtgagccaagatggtgccacggccctccagcccaggcgacagtgtgagactccgtcttaaaaaaaaaaaaaaaaa

SEQ ID NO: 56082 - DNA, 626 bp, Homo sapiens
  misc_feature 28, 41: n = A,T,C or G
agactggggtaccgggcccccccctcgngggtacttctagnattaattaacgcgggggaataagattctatattattgcatccacagaaaagatgtactgatatactataaactctaggagaaaacttaattgaaatagtgttattaagtgttgaaagtaccataaaaatataagggaaaataagctttcctagaatttttcagtgttctagtttttaaacagtgatgttttttattaacctatttcatccattcaaagacaggcctttctccacaccacattttcctctaaaatcatgataacacttttaaattgatggtgtcttccagtgtgtatcagccagatggcagtgtgttacagttccaggaaaactcgttcacatcttccgtaagatcaagaaggctctggcatcagataagatcaaatgttgtctttctgttttaaatatgtgccgcaaagagatttgcttacaatctattgagaaagctaaaacagagcagacattgtcctgttgcggggtagatgaatagcctaagaatagtttagacaaattctgaaaacgaatttaccttagaagatgttcatgttagatctggtaaaagtaacatgttatttttctgtcaag

SEQ ID NO: 56083 - DNA, 312 bp, Homo sapiens
cccccctcggaagtcttctagaattaattaacgcggggtggaatcgccacacagagctccactgcagaagttgtctctgactctaagagagcccatgcatatatggtggcttagagtctaagaatttgggagaccctacagcaagtaccagtccagagcttctagataaagtgaaagctctgagactctatttggggcattgaatacagactcggaaattatcatgtttgacaacctattatgaatgtgctcaaattttttggagttacagaacctttagattaaaaaaaaaaaaacaaaaaaaaaaaaaaa

SEQ ID NO: 56084 - DNA, 611 bp, Homo sapiens
cgggcccccccctcggaagtcttctagaattaattaacgcgggcatcttacaaaaagaaactatatagtcaatatagtgatagagaatcaggggaatagagaatcctttctttttcagccactcttgagtcaagtctttaacatctacttagctgaaataattcaaaattatgctaacgtaccagggaagtagcttttctttgtgataagacctttgtgtaggttactgcctttttaaatagatttattttgatattttcaaaggcatggaattttttcccacaggattgatgtttcagtgtatttttttcctttgtattctacaaatttaatgaaatgacagggaaaggaaatttagtaatttttttttagtcaccatttttactttctactgttgagatatatatatcacctctcattagtcccttaatacatacatttacataatcattgccctccttccaatttaatattccaaatctttaaaatagccaagattattctattattgtttctccgctaaactaggaaaccttgttgattccaaagagtcgtgaatacaatgctgaattcagggatggctggaagattaactcaataaatatttataa

SEQ ID NO: 56085 - DNA, 524 bp, Homo sapiens
cgggcccccccctcgaaaatacttctagaattaattaacgcgggaggctgaggcaggagactctcttgaacccaggaggtggaggttgcagtgagtcgagatcatgccattgcacctagcctgagcaacaagaacaagcttctgtctcaaaaaaaaaaaaaaaaaaaagcacctaaaattaaccaaatcagtctgatgccaaagtccattttggcactattggatgccaaacaaaaagtaatcactcaaacatgttaggctttccctgcataaaggatgatttagaagacaattaaaatccataccagctatctacttgaaccttatgaagcccattctttgggaatgtctgggattttatctgtttttccatctgaaagatgagactacaatgaacaataggaagatgatttttctttagtaagagctgaggatatttttatatctataaactcttgaatattcttgcttcacaaaaggaccagcacaagttgcgctaaaaaaaaaaaaaaaaaaaaaaaaaa

SEQ ID NO: 56086 - DNA, 219 bp, Homo sapiens
  misc_feature 28: n = A,T,C or G
cgggcccccccctcggaagtcttctagnattaattaattttttaaaaaaagaattacacaatttagaaagaactggagttcatgctggtctcagaggggagcaaagttagagtagtgttagacatgagatctattgggagagaatgaaaagaggggcaaaatcatctgataaagctactggcagaaacactcttctttgcaaaaaaaaaaaaaaaaata

SEQ ID NO: 56087 - DNA, 387 bp, Homo sapiens
cccccctacgagatacttctagaattaattaacgcgggtagatgatttctagcaagcaagaagtcctgtgcagtgtcaccatgagcacctccagctgtactagtgccattggaataataaatttgataaagtggtgaaaaaaaaaaaaaaaaaaaaaaaaaaaaaaaaaaaaaaaaaaaaaaaaaaaaaaaaaaaaaaaaaaaaaaaaaaaaaacaaaaaaaaaaacaaaaaaaaaaaaaaaaaaaaaaccccccccccccccgggggaacccccaatccccccaaaaaaaaatttttttaccccccccaactgccccctttttacaaccctgtaaccaaaaaaaccccgggtttacccaaattaaacccctttcaaaaaacccccc

SEQ ID NO: 56088 - DNA, 594 bp, Homo sapiens
  misc_feature 14: n = A,T,C or G
gggccccccctcgnaggtacttctagaattaattaacgcgggattgcaccaatagttgccccttttagagagatacttgccccttcttactgcaacctaccaggctcatcttaagagcacaggctttctttagttacttggttctggattcaaatcctaactccatcacctgcttctctggtgtctctggacaggttgcaaaacttcttcaagcctcagtttcctcatctctacaagtagaggttagatgtcatgatagcacctgccacactggattgaagagttcattttaataatataggcaaagaaattggtgcaaaatagatgctcagtaagtggtagccatttttttttcaagtgccatcaagggagcctagcaatttccaggttaagattccctgtttcttcagatgaagacaaagaaatcaaagaggttaagtgatttgtccaaagtcatacagccaggccaggtacagtggctcacacctgtaatcccagcactttgggaggccgaggtgggtagatctcttgagcccaggagttcgggatccagcccggcaatatggcaaaactccatctctactaaaaaaaaaa

SEQ ID NO: 56089 - DNA, 584 bp, Homo sapiens
cgggccccccctcgaaagtcttctagaattaattaacgcggggggactctgagagaacgcccggccagggtgaacgccgcggcaggagagcacgggagactgtgaagagcatggggagcctttgtcgtgcagcgtgaaacccttgtaaaccctcatcccgagaccttcaaattttagcttgggagaccccagatcccctcaccctgggaagctccaaatcctctcagcctcaagagaccccaaatcctgccaccttgagggatttaaaatcccctcagcatgaaacccccaaagtacctcagcttcagagactccaaatcccttcacccagaggaacagcgaatctcctaatgcttagagcaccaaatattctgagcctgagaagccgcaattcccctcaccctaaggcaacccaaatccctcagcctgaggaaccctaaatatctcacccacagacagaccaaatttccccaacctcagataacctaaatagcctgaaaactcaatcccttcagcttcagggaccaaataacctcagtgtcaaagaccctaaaaccccttaatgagagatccaaatctccttt

SEQ ID NO: 56090 - DNA, 608 bp, Homo sapiens
  misc_feature 28: n = A,T,C or G
cgggcccccccctcgaaatacttctagnattaattaacgcggggacagaaacttgggtcatgcctacatgtataaaacaggaggggaaaaaacaatcaaataaagagagacaaaataattacaaagaataaagaaccaggttgatgtaatatcatagaaactaaagaaagggcattggcaaacacggaggaaaggccatgtgagacaaacagcaagaaggcagccatctgcaagccagcaagggaatcttctgacctgatcacactgacatcctgatcttgatcttctaacctccagaactgtgagaaaataagtttctattgcttaaaccaagcagtctatggtattttgttacagtggcctgaacacactaagacagctttaaaaagacataacttattttcttgaaccaaatactgttagcaggaatctgttcagacaccatgacagcggttaagcagcagctatggtctaactcagaattcccttgctgaatctctcatttcctacagtaacccacaaaagtattaataaaattaagtattattaaaattgtagatcagaaaacgcatccatacacgtttaatagactctaacaggtagaaagg

SEQ ID NO: 56091 - DNA, 597 bp, Homo sapiens
  misc_feature 32: n = A,T,C or G
taccgggcccccccctcggaaatacttctagnattaattaacgcggacactggcagtctttggaacaatgtttgaagtccttatacattaaataaaataagaactagataatatttagcaagtttggcaaaacaatattttcctggaaaaaatctttctacacacaaaatggttttatggtcccagactcattctctatttacagaatagaagagagaattctttttgcatatgatatttcttttcctttacttggaagaaatatagattcttgctattcaaagtgaggtctgcagaccagcaaccttggcagaacctgagagctagctagttacaaatgcaaaagctacttgttcctgctgaatgggaatctgtattttaacaggatctccataggactttgtgagcacattgaagtttgagagatgctgatctggatggccccaatttgacttatccccaaacctaatatacttgaaaaggggccgggcgcagtggctcacgcctgtaatcccagcactttgggaggctgaggcaggcagatcacctgaggtcaggagttcaacaccagcgtagccaacatggcgaaacctcgtc

SEQ ID NO: 56092 - DNA, 552 bp, Homo sapiens
  misc_feature 507, 510: n = A,T,C or G
gggccccccctcggagtacttctagaattaattaacgcggggggatgtactaatgaaagagggagccatcgtatccaggaaatcagaatccagtcttggaaaaaggcaaaggaacttctaggtacagtagaaaagcaaaggccaggatgacaaccaagcagcagctctaagggggaaaactgtccaaagaaggaaaaatgtctaaaaaatttacctgatgtaaattatggaaccctgtactgagatgctgttggaagtagtaggaagaactagcaaaaagcaaagagaaaagtaagaaactgaaaaagcaaggtagtttattaacttcaggaaaaactaaatgtagaaagaaaataatcactgatgcttccatatgaataatatttgcatatcatatgaatgaaaatgctgaatatggatttaaccaaaattgtaatctaatcacattgggatgatagaagatgagaaagggagatgggcagcatagatagcctatcctttctgccntantagggaatatataaatgatgtttaaaattgattaatagggct

SEQ ID NO: 56093 - DNA, 519 bp, Homo sapiens
cgggccccccctcgaggtacttctagaattaattaacgcgggggtggaggccaattgcatcacagcatcgtgaccgacttccccagttccccgccagccagcgaggcctgtctcctcaaacagccgccagagaacagcagggatgatggctggcaggcctgtggtggcctgcctgtgtaagcttgggcaagttcctgaacctctctggagcttctctctgcttttgtaaaatgagggttttgaaccagatatgccctctcggccagttctcaagaaaacccattgtcccctgtacctttgtcctcccacttcaagtctgtagtgcctttctccacttccaactgggaagccctccttatcaactgggaagcttccaactatgggaatctacagtaatgtacgggacaaccatttatcagttactcatgacttctggttttgccattttgctgttactggtctctagtgtttcgttttttgaactttttcctttgacttactttgtccaaaataaattgc

SEQ ID NO: 56094 - DNA, 596 bp, Homo sapiens
  misc_feature 115: n = A,T,C or G
cccccctcgagagtcttctagaattaattaacgcggggtggggaaacagaaactctagctcttgtgtgaggacacacatctggttatatatataaaatatatatttacatatatnaaaaaaatacatatatatatatacaccctttgacccagcaaatctacttgtgggaatctgccctatagatatacttttaagttttaagtataaacttaaaacttaaggggggcagttaaaaaaaaaataacatagaacacgtacatgcaatacaatgcacacttatggaactatgaaaagaataaaataggtctttaatacgtgcttatatggaaagctctccacagtattcagtgtaaaacggtgcaatgtagtgtatattttcccttttgtgtaaataacaagcacatatacattctcacacataatccgaaacataaatagaaatgttttcaaaaaaatttactgaaaatgtaagaaacttataacgtttgcttttggggaaaaggcaacggtggtaaaggaacttttacgctttatattcctttttttttttttttactatccattgggttatctgcctggtgagtttatgtaacta

SEQ ID NO: 56095 - DNA, 605 bp, Homo sapiens
  misc_feature 28: n = A,T,C or G
cgggcccccccctcggaagtcttctagnattaattaacgcgggcccttgatgcagggacaactgaggaatggacagtctgaagacctcagctcatgtgtgtgaatccagaatggatgcagatggtcaaggagaaaaggaacctctcattcattgagcatgattgtgtgctggacagtgtgccatggattcttgtaatgatgggaggcaagtaagaatcatttttccagatgcagaaaatggaaacccagagattttgtctaattttttattattgtctttaaaccaaccaagtgagacaggtaaaattcaaacacaaataccagttctcaaaacgattactgttgactcacctcattgggctgtgagtctgaagggctgggtttgatctcaattttgatacttatatgagaagaccatgtgtctctgtatgtgtgtgtgtatgtaatatacaaaatattagatattagcaaattgctgaccttaaatctgattcttaatctctctaccattaagctccctcaattataaaatgaccataattaaaccgctttgtagcatgtgttactcagaataaattaaatgtcatatgcctagcacataaaaa

SEQ ID NO: 56096 - DNA, 507 bp, Homo sapiens
ccgggccccccctcgaaagtcttctagaattaattaacgcggggagtgacttgctttagtccacagtcggctggatctcttacccggttggaccaggcgtgtaactgtcaactgccttattccaggtctataaagtgaggatattctgactaattggtctggggttggactcgatcatttttaaaagttccccctggtgattctaatgtgcatccatggttcattaccactgctggcaaagttgtttacatttgctcgcctatcttctaggtataggaactactccttgtcagttcctcaccctcaagtgtgccaaaagcatacccgactctcgcccattacagtcccagggaaaccctacctgcacaccaaatgaggaaggttgatcgcatccacctttctaaagactgctacctagtgctacacaaataatgctattaaactacattacgaaccttacacggaatgacctctcattgcctacacctggaacagggatgtggtggt

SEQ ID NO: 56097 - DNA, 548 bp, Homo sapiens
cggggccccccctcgaaagtcttctagaattaattaacgcgggatcacaacgaaggagatttgtttacctgtaagaatgccctgtgaacaaagtacaaatctatgcaaatgcttctaaaatcttgatgaattattttctaagaaaggataaattacagaaattgactcaaaaaaagtacaaaacctgaataaatcaatatctgtggcaaaaatttttaaaggcatcaaagaactatacttttaaataacagcatgtctagaaaatttctgagagaattatctcatgcttgtgtacttgttatacgacaagtaattcttatgctatttcagaaatacagaacatataaaaagatgaaaatcctcccaaattgttttgtgaagttaacataatcttgatgaaaagtagctcacaacaaaagaaacatggccaaattcacctgtgaatttgggtgcaaaaatcctaaatcaaagagaattaatttcagaacttttcaaaagtttgtttcagaaatgtgcagataatttttattagaaaaaaaaaaaaaaaa

SEQ ID NO: 56098 - DNA, 604 bp, Homo sapiens
cccccctcgagagtcttctagaattaattaacgcggggctctgggccaagtggagcaattgaccagtctggaagggcctcatcgttcattgtcaaagtttattgattgattgagtgacagagtgagactgtgtctcaaaaacaaacaaacaaaaaaaccccaaaacaacaacaacaaaaactaagctggataatagttttcttcccaggcatatatgagcatcagagacccaaggattataggtagggaaaaaatgtaggcaactgtattgaaggtgctctgatttttaagaaaattttaaaaattcactggatatgatgtatttggggtgattctttctttctttttttttttttttttttaacctagcagtaaagtacaggcccagttgggtcctacttaaagttttcctgtttgacaatttatcaggaattattattgcttaagatagctttgaagtaaattgtctgtgtcaaagaccttcctccacttctctcacttacctagctcttggcagctgtttccaaaatgtttgcactaactccatagattcatgtctgaaggattagatactccaggaacatctattgggagaaagtttaac

SEQ ID NO: 56099 - DNA, 435 bp, Homo sapiens
  misc_feature 30: n = A,T,C or G
accgggcccccccctcggggtacttctagnattaattaacgcggggggggaggcggagcttgaggaaaccgcagataagtttttttctctttgaaagatagagattaatacaactacttaaaaaatatagtcaataggttactaagatattgcttagcgttaagtttttaacgtaattttaatagcttaagattttaagagaaaatatgaagacttagaagagtagcatgaaaaaaaaaaaaaaaagcggccgcttttttttttttttttcttatcttaatgcagatgcttggacatctaccaccatgttaaacaggaggagtgtgatagcaagcatcctcgcatttctctagcattagtgacaatgattctaacatctcacccttaagtgtgatgctcgctgtaggttcctgatagatacgattttcatttttg

SEQ ID NO: 56100 - DNA, 581 bp, Homo sapiens
  misc_feature 28: n = A,T,C or G
ccgggccccccctcggaagtcttctagnattaattaacgcggggtagtgatttgggactattaaaaggaacattttttgtttgtttgttttgggggtgtctgaggaagtcctattttagacaagttgaatctgagctttgtggggcacatgtagaagaaaatgtctaacaagcacctggaactcagcaaagcctggagaatggacataagtggcaagaaagtagatgagatccccagagaagatatcaagccaacgagaagcctgctgctaaaactctatggaatgaatttaagaataatcacaggaaaagaaaccagaaaaagagacagaatgaatattcatagtaagaatatcagggcagactacttaacaactactaacaagcatatgcaaaaataaagttaaaaaagagagagcaattaatgctaaggatggtttcattaagaactcatagaaaaacagcttttcagaggaaataattgatacttcattccttgaacagaattttgggagcaattctaaacatacattccctgacaatgagctaaacaatacaacaagttttctaaaatttagctct

SEQ ID NO: 56101 - DNA, 506 bp, Homo sapiens
  misc_feature 481: n = A,T,C or G
ccgggccccccctcgaaagtcttctagaattaattaacgcgggagagaaggcgctcctctcacacatgaaaccacaactgtcgcacttccttcagctgaacaaattattatttccgttagaagctatcatctgtttaatataaatgagatatttaatgaagtttcgaattgtagacttatctctcccagtttgataagcactggggagatttaatgcattgaagggtcaacacaattacaattggaggcacatcaaactgcaggagaataataaacttgcagctctagtgaattagactcaataaggtttaaattgtgaaacgaggatttgtttcatttgtttttttttttaaattgtagattacaactgacagctttactgaaaagtaaattaaatattcaaggtctctgatgtaaagaaataaaagaacagtttctaaaagaatgtaatgcctaaattccaagagactctgggaaagtnaaaaaaaaaaaaaaaaaaaaaaaaa

SEQ ID NO: 56102 - DNA, 589 bp, Homo sapiens
  misc_feature 78: n = A,T,C or G
cttctagaattaattaacgcgggtgggtaaaagttttcaaatggtctgtataaccatctctcagcaagctgcattatntgaaaattcaactagataactcttaaagcctctttcacctgttcgattgtgctgtttgtgattttggcattttactaatttaaagtgcctattatatagaaggactttagaattcatgatgtattagactgtacataaaatatttcagacaggttaattcctcaagcttatttatatttgtaatttaattgatcaaagcatcaaagacctgcttatgaaaaccttaagatgtgtagcatctcaagattagggacatcacagaacttgctagattgagttaggacagcatattcctaaggaagaaattgatgcaattgaccggatctctttcggaaagttcaattctccctcttttactgtatttttcagtttacactattttaatgagtggaaataataattatttggcctagttcttgaaccatctgtagtacttgttggtcatttttcatgttgaggcagtgtgctaaattttgcaagtagaaagaaaggtaagatgcattttcttgcc

SEQ ID NO: 56103 - DNA, 604 bp, Homo sapiens
cccccctcgagaagtcttctagaattaattaagcccttgcttgctatgtcactttgtttaaaatggtccctctccccttgccattgatggggatgaaatgggctcatttgtcctgcagggaggcgcccagttttgatttggccaattgctccctcagggcaccagtccacctatgcctcatagctgctgtagcttggaaattgtatcaaaagtctggaagagtctgattctttttgttgttactgttggtaagaatgctgccggcccttccacagcccctggtgcccacctgccatgctgccaggccggatctgagagcgctgggttgaggagactcaggccttactaaaccagccacgctcgctcccacagatggagcaccctggcattttccagcaggcgacaggtccgagtgccttgccctactttattctcaggaacttggaggtgcagtgaggggaagtgactggccaagggccaggggagtccagtgacgcgcatcccagcgcctcctccccagcagcctggcctgttataaatgggaatcaagccagtgagctgcctggatccatggttcccatagaccaacttcatcctgggcaaa

SEQ ID NO: 56104 - DNA, 571 bp, Homo sapiens
  misc_feature 522: n = A,T,C or G
cccccctcggaagtcttctagaattaattaacgcggggggctatttatagagtctatattaagactacatattaagaacattgggttttattctgtgggtaacaaggagacacaattccaatctgtgtgctaatggaggggctatgaaaagagctgtgtaaagaaaaaaaacagtgtgaagacagaaatactagtgtatattagagatgttaagggcctgaaacaaagaaataacagtgggaacaggaaaaagaggtagatcctaaagatgtttaggaagttattcctacacaactgtggatcgtgtctctgtgtacatatagatgtgtatctaaaacacacacacacacacacacctcttcagcctttgttgtatctgcaaaatataatttccatttttccctttccctaattaccacctaataacatgccctgcataatcttgcttacagtaagcatttcaaggaatatttatgaaatgaatgaataaacaagtgagcaaagcttctgaaacatataaancataatcttatgtaaccataaacttagatcctgaaaagctgtatgtgac

SEQ ID NO: 56105 - DNA, 598 bp, Homo sapiens
cgggccccccctcgaaagtcttctagaattaattaacgcgggattaaatataagtatgccaatttccattacttttgtaaaagagaaacaatatactctttcagattgaaatatgaaggaaaatgatgacaaaaatataaatgtttttcataaccatttttcttattaagaacatattttagttccatgtcactggaagggaaaaaaagaacatattttaggaattaatatatctgtggaaagttataaacatttatctaatagtccagagattctgtcattttaatttctttttcttctgttaaatataaatacaataagctaatctataggctaatttttcatatgaaaaataaaagtaatgagaaaggaatagttctactagatactgtactataatatatagctataatacctaaaccagtgtggtgctaggagatgaataagcagaaaaattaaaaaaagaagagtgaagtaataggtctgcatacatctgcaatttcagtatgtaatgtagatagcacttcgaattattacagaaaagactgattattcaataattgttggaacaatcaggtagccattggaaaataaaata

SEQ ID NO: 56106 - DNA, 507 bp, Homo sapiens
attaattaacgcgggtggatcatttcaggtcaggagtctgagaccagcctggccaatatggcgaaaccgcatttctacttaaaaaaagaaaaagataaattggccaggcatggtggcaggcgcctgtaatctcagctacttggaacgtgaggttgaacctgggaggcggaggttgctgagagctgggactgcaccactgcactccagcctgggtgacagcagagcaagactccatctccaaaaaaaaaaaaaaaaaaaaaagaccttttaaaatatagtttgttagtattctatttgcctttatatgtatctagtatatgaaactgcaggttttagagttaatcccaaagatcattaataagcctgggtgacaagagtgaaactcagtcttattaaaaaaaaaaaaaaaaatagtacatggctagttttatgctccttaagaacagtttgagcagaatgttgctatgagttgtttaaactcataaaacaactaaaaaaaaaaaaaaa

SEQ ID NO: 56107 - DNA, 568 bp, Homo sapiens
  misc_feature 21: n = A,T,C or G
ccccctcggaagtcttctagnattaattaacgcgggctctcttgtaagttttcaggatgcatgactgtgttttgcagagcttttcctatcagcctgcttggtcttggaggacaggattcccctacaatcccacctgcgtcaccccagtgtccagctcaaagttgcatataggagggtggctgatgagggtcagggtggtgttggaggtagtggggcagtgccagtttcaaacagtgtatcctgtggatgtagagtgattatttgttaagcacctgcttgctaagtaggtgaatggatgaatgaatgaagagttgtaagctcatgaaggcagggaacatgtctgtcttatgcaccacttggctagcccacctatgtgcgcaattcatctctggtgagtgagtgaatgaatgagtgatgaatgaatgaggggtggcggttggtgcatgggctcagggccaggacacctgcattgcctctacagttctgtgattactgactgcttgcattacctcatccagactccattttttcatctgtaataagaaaatatgcagagtcaaaggagcta

SEQ ID NO: 56108 - DNA, 602 bp, Homo sapiens
ccgggccccccctcgaaagtcttctagaattaattaacgcgggtggcaagatctcagctcaccacaacctctgccttcttttttcttctgtttttaaaacttgtggtaaaatctagataacaaaaagtttgccattttaaccatttttaagtggacagttcagtggcattagttacattcccaatgttgtgtaaccaccactattatccatttccagaaggttttcatcacccgaaacagaaactctgtacccattaaatagtaactccccattctacccttctctccctccataacctctgttttaccttctgcatccatcaagttgcctgttatagataattcacatagaatcattcagtatttgtttctttttgtatcacgtatcaaaatttcctttttttttttttgcttttgagacagcctgggcaacaagagtaaaactccatctcaaaaaatatatatatatatataaatagggaattttttttaatgtttgctccttgagttttcaagatgaaataaggagaaaccccataactttttagctctcttttaaaaataaatgtctccttctgtgttctgtaatatgaggataaata

SEQ ID NO: 56109 - DNA, 478 bp, Homo sapiens
  misc_feature 38: n = A,T,C or G
ctgggataccggggccccccctcggaaatacttctagnattaattaacgcgggggggctctcggctctgaaggctgtgagacccctgattttccacttcacacctctctatttctgtgtgtgtgtgtctttaattcctctagctccactgggttagggtctcccccaccgagctggtctcggcaactattgtttggaaaactgttgtatagcttgcttggggagaaaaactcagagaagccccactgttgaacaggttgtaaattcactggtttaatcttctatgaatgcttttcagagattaagcctttgcctgatctcagcagcaaattctaatattttggatgcaagttatttcacagaagggactctgataggaagacagaatgtgaaattaaacatctatgtcttaggtctggcagaaatagatactgttaacatcagtgtgttgggtataaaataatctctcttctggtttc

SEQ ID NO: 56110 - DNA, 611 bp, Homo sapiens
  misc_feature 28: n = A,T,C or G
cgggcccccccctcggaagtcttctagnaattaattaacgcgggtgggacgtttctctgggatgcagtatgaattaagtgttgaatacttttgactttgaaataaagtaagtatgttttggaagcagtcttctctttccctcatccaggtgtttaacatattcttatagtgctccagggtctatatctgttgggccaagaaactcgttgtgtttggatatactgtatttaatgacatgcaatgttgttgcatttgtccatttctcccaaatcctcaaaaaagctgtagagggaaaaattctctggtttttatctacaagtgcattgtatatttatcaaaatatcagtgcgattttttaatgtagtacatgacatcgtttgcattaacgcatgccatgtactgcataacaaatatctcattgataaggtgtattctttatcctacaatgcgagggacggttacactgtatacatttagcgaatgtagaaactgagtaagagagtatttttggatctgcttcgttaaggcctcagtgacagtgctggtaccaggcttctttcagaattttcaactaggccttacttccacttaaccagtgaatcctacgctga

SEQ ID NO: 56111 - DNA, 599 bp, Homo sapiens
  misc_feature 46: n = A,T,C or G
cgggccccccctcgaaagtcttctagaattaattaacgcgggtggncctaaaaaaatccaataaatgcagagaccaagaagtttttaaggtaactttaaaaaaatctgtatataagttaaaatatacttaaaggcaaataaatgtggtcaacacgatgctctggcatgaaatatgcttatggtatcttgaaacagaagaggctatagagattcacagattacctacatcatgttttacactttcaaaagaaacaaaagggtactagagctatcaccatgtctcaaacactgttacacctgatacaccctgtatcattttgtataggcaccattaccccattctacaaatgaggaaactcaagtacagagtggttaagtcagttacccaaagccacacaactactgactacaggcatggcattctgaacgagttctgcctggctccaaagccacagctctttccacagtaaccacactgtccaaaaaaggaagcaaaagactcaatacatgtgagatcctctggccaggctcagcagccctgtatgtacagactccagtgggcctagatgagtacccaaatgcctctgtccttcttacac

SEQ ID NO: 56112 - DNA, 615 bp, Homo sapiens
ggggccccccctcggaagtcttctagaattaattaacgcggggtactgtctcttactggcttatatgttttctgtaggaaatatgagatagctaaaatgatctgaataattttatgtaattagatgtttcattttgaaccttaaaatacttttataagcactgcacatagtaagcagtaattaaaatttcttacaccccaaagtagtaaagaagtgtcattaaatgacagtcagtaggattgaattaggaatagccatcatttcctgctttcatataactcttataacccatggcagtataaacctcactttatcctctacctaaaaatttcagatttgtggtataacttaatgttgggctactctggtagcctaaaaatttcatatttctggtataactttatgttgtagctagtataacttatgttggtagttgtattgagtcagtgacttaacagtttttttcattacgtgaatttgactaacacttgagttaattttatatgttagacaaaatgtgagacacttacatatccatacttaacagtgactctgatgtgagtaaaattattcccattttagagatgagaaaagttagatctaagaatagtcaga

SEQ ID NO: 56113 - DNA, 507 bp, Homo sapiens
gccccccctcggaagtcttctagaattaattaacgcgggggggggtgatagttgctgggaccatggggacagcaaagatggtaagattggattctctatatattttgaaggagagccagtaagattggctgacagcttggttggcagacagaggaactgaggacagatatttgttctgagcaaatgaaaggaagaagttactatcaactgagatgaggaaaactatgtgtgaggcaggttttgggggcaagagcaagagtttacttactcacttgggcttattgagtttgagttgtctcttagacatccaagtggaggtgacccacaagtctggagtttggagaacgaaatctgtatctgggctggaggtgtagatttgggagttgtgagcatacacgtgacatctaatgccttgaacctggatgtcataacccagggagtgagggcaggtgacgagggctgacctgtggtgtatccctacctaaggggtcagtctgatgagaagga

SEQ ID NO: 56114 - DNA, 569 bp, Homo sapiens
  misc_feature 446, 476, 485: n = A,T,C or G
cgggccccccctcggaagtcttctagaattaattaacgcggggacaggccgaggttctgtggagggtggaatgcgctcgggggagctaggcctccgcacccgccttcgccgcgtctctagcgtcgacctgatagccgcacccaccctccgctgcactgtctggggcaactgggtggttttcccggtggtttgagactaacatttagccaggaattaactcacttctaccccgagggcccgatgagcagagagggctgtggcggatgtgagtgctcttggatatcgccaaggggagggaaactgtgcttgaggtgtgcaggagaagtcttcccttaaccgtagcctcgtagcaaccactgtgagttcttactagctccacttttcagatgaggaaactgaggcacagaaaacgatcacttatttgcccggagtcacacacctatcantggaggtggggcggcgcgggaaagaggatntaaactcangcttgtctggttcccaagctcctttacttcctactagctaggttataggatccagcaaagtcccccttctcaagggagcaacct

SEQ ID NO: 56115 - DNA, 596 bp, Homo sapiens
ccgggccccccctcgaaagtcttctagaattaattaacgcgggatttctattaacctgtacccacatctatgatgacaaaattattcttaataactaaggataattaagacaattctatctgtccacaggtcgaatggttcttagggtttataaatatctgttatttcaactgcatcacatggctgaatgacaagtactggatgatttaagcaaatgtcaccccgaaatactatgggaatcttaatagcctccttaataggcatagttaagaactacctgttttcttagcaacatgtgacttactaagggcttaattaacgcgggttatgaaaccagcttcaatttcagaggaagaattgttgaatttaatcaataaactgaataatgatgataatgtagatggcctccttgttcagttgcctcttccagagcatattgatgagagaaggatctgcaatgctgtttctccagacaaggatgttgatggctttcatgtaattaatgtaggacgaatgtgtttggatcagtattccatgttaccggctactccatggggtgtgtgggaaataatcaagcgaactggcattccaaccct

SEQ ID NO: 56116 - DNA, 580 bp, Homo sapiens
  misc_feature 80: n = A,T,C or G
cgggcccccccctcggggtacttctagaattaattaacgcggggtggaagtcacattatcagaggcgctgggagtggggngaaaatgcgggggggtgttggtcaaagcatacaaacttttggaaataagattaataagtttgggaggcttaatgtacagcgtgatgactatagttaataataatgtattgtattcctgaaatttgctacgagagtaatttttttttttgagacagagtctcactctgttgcccaggctgaagtgcaatgatgcaaccacagctcactgcagcctcaacctcctgggctcaggtgatcatgattgtgcttctgcactccagcctgggtgacagagcaagaccctgtcccaaaaaacaaaaacaaaaaaatgtgatcacagcagcattattgataaaaaccacaaaaaaaatgaagacaacccaagtgctcaccaacagatgaatgactaaacaaatgtggtctattcatagggtggaatattattcaagcataaaaaggaatgaagtaacgatagatactacaacctgaatgaacctgaaaaacattatgcttccagtcac

SEQ ID NO: 56117 - DNA, 584 bp, Homo sapiens
  misc_feature 508, 547: n = A,T,C or G
cgggccccccctcggaagtcttctagaattaattaataaatacctaattttactgaagaattggcaatatcaaaattcatttgctgtgtaatcaccaatagaatatttaagaatatttaagatattatattttaaatatgagtgaaaatactgcttggtcagcccttctcaacaccagagagctagaaacaagccaaaacttcttaagctccagaactgcaatgtctcatacagtaaccactagctatatgttacaatttaaatttaaatcaattaaaattaaataaaacttaaaattccatttttcagccacactagccatatgtcaaggactcaatagctatgtgtggctggtggataccacactggacactggagaaagtcctactaaacagtactgccattccacattggcaccatcttggggcatcagtcatcccaggaaatggatggtcaaatatgtaaaataagcaattaaatctgagggtataaaacatgtatttctttntttttttttttttgagacagggtttagctgggtcacccnagctggaatgcagaggtgtaggcatggctcactgcag

SEQ ID NO: 56118 - DNA, 616 bp, Homo sapiens
cgggcccccccctcggaagtcttctagaattaattaacgtgggacaatgatggctagttgtaccaaattccaaatggaaggatgccttcctcagacctttgtctattttatttgcaaaaacctagcaattaaaatcacactaatattccaaagaagtatctcctatagcctatgaatttattctaaaacctaatgcactcaatagacatttacagatttctcaaagactgccgggaaataaagatttttctaatcacagcacctgccctccaggtacttacaggcatttatgagtcattgaaaagatacatctgagaattcaattctagcatatcattggacaccacacaggtgagaaggaagtggggtccccattcagcccgtggtagagcctgcctcactggtgccaggtcacttgagattcgttactgaaatggcccaggacaatgtgttctcttccttctttgtgaactcactgtgctttatgaattataatggctgccattgattggcaacctattatgtgccagagactactacagttaggtgctttccacacactatcacatttaccctactcagtaactctgtgagataggtgattttatgctcaagc

SEQ ID NO: 56119 - DNA, 577 bp, Homo sapiens
cgggccccccctcgaaagtcttctagaattaattaacgcgggttttctcagccagacgtgggtggaaaatacagtatttgtgggatgcaaaactcacataaacagagggctgacttgtcatatacacaggttctgcaaggccaactagagtacttgagtatacgcgggggccttggagccgatgccccacctagaccaagggacaactgtatttgcaatatacgtactggctgagcatcccaactcggaaaatctgaaatgctccaaaatttggggttttcggagttgggacgctcgacctatactaagaagctgtagctgcttccgagggtcccacatggctgagactcagctcaaggctatacttcctgaaacacaggtcaactgttgcatgtcattgaaaaaattccagttcttcacttggacccttgaagaatactgaagagcagccactgtatgtctctaaatcccttttctacatcctaaccttctttcaccagcacaaactctggagctaacaaaaagataccaacttctcctcgtcgtcctggcctttccctgttggtggtttttttta

SEQ ID NO: 56120 - DNA, 612 bp, Homo sapiens
ccgggccccccctcgaaagtcttctagaattaattaacgcgggtgcagtggctcatgcctgcaatctcagcactttgggaggctgaggcggctggatcatgaggtcaggagttcaagaccagcctggccaaaacggtgaaaccccatctctactaaaaatacaaaaactagccaggcacggtggcaggcacctgcaatccccagccactcaggaggctgaggcggagaattgcttgaacccgggaggcagaggttgcagtgagccgagatcgcgccactgcactacagcctgggcgacagagcaagactccgtctcgaaaaaaagagaaaaaaaagattttctttttgtctttggttttcaactgtttgattatcatgcacctaggggtgggtttcttccatttatcctgcttgagttttgtcttcttgaatttgtggcttgatgtctctcatcatttttgaaaagaattgtagctatttatcccttccaatattgtctccagcttgtcctctctccctccttccaggattccaattccatatggcagactttcagtattctctgtctcctaccttctcatctatattttctattcttgggtttcactgtac

SEQ ID NO: 56121 - DNA, 593 bp, Homo sapiens
cgggccccccctcggaagtcttctagaattaattaacgcgggactccaagcattcatctttgaactaggtatctcatcaaataattctgaagcactgatgctcatcaacacatcaacccaattaggaaccatcaaattaggctccttccagtccagcaatatgtaactctatgacacacattaagttttaccaaatctctatttatttgtttgccttgaggtatttcagtattataattttataaccacatatcaagtagatgctataatttcatgccttacatgtacctaatttaatcatttatattattaaggcctatatttgtctctaatattagtatattctaagagtatgctttatgaattttaatcataaaaaatacattatatatggcaaagaggagaaaaataaggttccttccatctggggcagggtttcaacctcagcattatttacactttgggcttgataattctgtgttgtggggggagttctatgcattgtaggatgtttggcagcatctctggcttttactcactagataccagcactctcttgctagttgtagcgatgaaaaataactacagacatt

SEQ ID NO: 56122 - DNA, 479 bp, Homo sapiens
  misc_feature 21, 430, 442, 460: n = A,T,C or G
ccccctcggagtacttctagnattaattaacgcggggaagaagtgcctgcttcccttttaccttctgccatgattgtaagtttcctgaggcctcccagccatgtggaactgtgagtcaattaaacctcctttctttataaattacccagtctcaagtggtattctttatagtgtgaaaacaggctaatacaaacctctttccctttctctccaagactgaccttcttcaaggtgctattaccaacccaaacgctccggattgatttagttacagactaattgtcctaatttttataactttattgtccctctctatatgactttctttaggcaaatgctgaaaaaaataaattgatgtcttggtttgtttgatttgccttacctcatctcctgtcatagcctaatcagccgagatcaccagatatgaatntttactcagcanagtcaggttaattgcacncattgcacgagggagatca

SEQ ID NO: 56123 - DNA, 324 bp, Homo sapiens
cgggccccccctcgaaagtcttctagaattaattaacgcgggggagaacctcccttctagctctctgcagattatcagagccgccactgcagggatttgctcccgtgggcctatatgtctccccagataccttcctaaaactattagcttttatctgtctgtgtattcccctgttgtgaatggggaagtatttgagggcttgtttttttaggttcttgataataaatacctcaggtttcacagagtaatcaaactaaaagaaaacttcttttttatttcattttatttttttgaccgaaactccatctccaaaaaaaaaaaaaa

SEQ ID NO: 56124 - DNA, 603 bp, Homo sapiens
ccgggccccccctcggggtacttctagaattaattaacgcgggcctccaaaaactcaggggggatgtcctacttgtaaaagaagaaatgaaaatggacactgagaggaaatcagcagtcccagaggtaatatacttacacagttttttaaaaaacataaaatgatgcagaatgaagtttccactctattcaccatctatccagtcctcatgcctcccaacaagaggtaaatactttattattgtgtcatgtatctttccagagtttttctaagcaatttgcaacagatataaatatgtatccttatttcctaccttaccccatattgtacatgaaagaaaaaatatactatgtataacattctgtatctttttttcacttaatatattttgcagttccttttatatagatacatagttaccttcttcattcatttatacagctgcctactgtttctaaggctatatcactgataaagtctcatggatacactcaaggtttttttcagtcttttatcatgataaaccatgccgcaataataaccttgtactagtcatttttaacatgtgaaagtatatctgcaagatacatttccagaaatggg

SEQ ID NO: 56125 - DNA, 563 bp, Homo sapiens
  misc_feature 467: n = A,T,C or G
ccgggccccccctcgaaagtcttctagaattaattaacgcgggggctccaaaatttgatttagataaagtagaattcaacattcaccatttacaagactttacgaagggctatgtgtcattttgttctaacaagaaatgaagcaatagataaaaaacactaatatttcctctaacacactgctgacttctattgggagcatacagtatttgtttggctgtttgtacagaaaaatgataattaaacagaataaactaacccagagttgtattctttaagccagttcagaagggcatctttgttgaaggctgctgcagcagccacattgctactgttcagctgaatgtcagcaattgtttcagaggtgctcacaacttcaatgaggccagagcgatctcctgttgctaaacagccataaggcaacatcctggaaggaaaaaaatgggcatagagtcatattttccttanaatgaaacattaatttggtaagattttccctttactttttaaaaaaagttttattattattgatatacttgccattactatattattgtcatatgg

SEQ ID NO: 56126 - DNA, 503 bp, Homo sapiens
  misc_feature 474: n = A,T,C or G
cgggccccccctcgaaagtcttctagaattaattaacgcggggagaattgaacattttaaaatagggagaaaggactcataattctaaaagccagactaaagggctgcaaaacagcccttcgatgcatcagacttgtgcctgtgtatatttgttcatggcctgactttgagtcactgttcttaaagaaaaatatattctaaatccctctgtggctcccctcctcagtcacccaagacacttgacccagcagtgacatggtgaatttggcattgaagcaggaaagacaggagagccagagacatgccactgttaattccccatatgtgcataaaattcagatacctctgggtctatatttacttgtgtttagcatctgcacgtaaagaaagggaagttaccccctgctacctcccatcagtcaagcatcacctgattcaaggacatactaagccacagtcagcccatcccaactntttgccaaaatgcctaccccataaaaaaa

SEQ ID NO: 56127 - DNA, 511 bp, Homo sapiens
  misc_feature 17: n = A,T,C or G
cgggcccccccctcganagtcttctagaattaattaacgcgggtagatgatttctagcaggcaggaagtcctgtgcggtgtcaccatgagcacctccagctgtactagtgccattggaataataaatttgataaggtggtgaaaaaaaaaaaaaaaaaaaaaaaaaaaaaaaaaaaaaaaaaaaaaaaaaaaaaaaaaaaaaaccccccccacacaacacccccccccccccccaaaccacacctatatccccccccccccccgccctcccccccccaacctaccccactgacaaaccccggcccacccccaccttacccaccttaccccccttccccctcccccccccttccccatcccccaaaaggcccgccccgcccgccccccccaccacttccccctcctgcacggggaaaggaaaaaacggccataagtatctttaaaacccccccttaactttcccgttaaccccccccattttttacccattaggaccccatccccccaaccc

SEQ ID NO: 56128 - DNA, 590 bp, Homo sapiens
gggccccccctcgaaagtcttctagaattaattaacgcggggggagatgctgtctctgtcttccaagtctgtaagcatacctgccctttgctctggaggaagacactattctctaagtctattcactataaaaatatccttgtaatgatagtccagaacaaagatagtcattgcctctgcttaaatcatgtacagaattgcaagagacccacggagaattatctaccaacaatatgcatcatagaaatttagaaaacagaagaaaagtcactacagtcctaccactcttactgttaaggtttttgaaatatatagagttttagccataaatataaatgatttcatatagcatgtattttataaaaattggtttatactgtacattctatcttgtgatgtgatgtttttcacctgccactgtatcatgcccatttccctctctctgctgtctgtattcttcttgatgtggtgaagcatctttgcccaatcttctgttcccttgtgccctgctctctgcctaacatttaattgtactaagtatacaatcagagttttagaggttgaagagcagagatttcagatcatctggt

SEQ ID NO: 56129 - DNA, 515 bp, Homo sapiens
  misc_feature 27, 493, 494, 495, 496, 498: n = A,T,C or G
cgggccccccctcggaagtcttctagnattaattaacgcgggggttgagggttcaatttacccatctttaaaatggggagattggtctagtattagaatcctaaactagtagtaatgccctaagttagattttgtttagcgcaggcaatgtcttaaaagcatccaaattagctggtaaaatttaagatacttgacaatttgaacataaaatctgagggaaaaaatcgatttttcaagtctgggtaagcttctgcacatcagtaacaggtcagagataaaagcaactgaatatgctcttgtgataggacattcagccacattccccaccatagccctcctcttactagtggcttaacatcactgacccgcagacatttgtttctatcatgagttaaatcttctgtaaccaagatttttaaaccatgctttacaacacactgacactcggagcaggtttactttttttttgagagggagtttcgctctgtcacannnnanaaaaaaaggaaaaaaaa

SEQ ID NO: 56130 - DNA, 589 bp, Homo sapiens
ctagaattaattaacgcggggtgggggtaggcagaggtgatcatgaaagatctctttcaaatatggcctcagtgacattcaggcagaagaaataaaaatctaaaggtcccaacgtgagaacaagcttctcagaaacaatgctacctctttgtctttggcagattaggaagatttttacattaataagaattattaataacgactatagttcttactaggactaataaagactaagtcctatatttagtaagaactatttataaaaactggtaattcatacaaataatcttagtcattaaatttaatcaataggttatgtataaaactctgtatattaccaacagaaaatgttctaagttttcatagaacattttccaaaatggattatgttttaagtcacaagaaacactcaataagtttaaaagatattttaaaagattatagaagctgacaacaatgaaagaaaatatgagtgaatagaattatcctaaatacctgctgagtcaaagaggaaatcaaaactagaaccaccagctatttggaaaatactgagcagaagaacattgtccatgtaaattagaatgtgcag

SEQ ID NO: 56131 - DNA, 437 bp, Homo sapiens
cgggccccccctcggaatacttctagaattaattaacgcggggctgtaacagatgaattataaatcacagtggagaaaccggacaccatgtcctggcgattgaatgtagcatcactaatagggacagacaaacaatgtgagctccagctgtgaaacactgtacaagatatatcattaccaacacggttctccatcctggtacgcacagtaaggaatgcataacttggatctaatgataagtgaataccataaaaacccaaattgagaaatatattctataaaataactagcttatagtctttcaaaatgccaatgtcgtgaaagacaaagaaagacgaactgtccagaatgaaggagatttaagagatacgacagtcaaatgcaatatgtaatctctgtacggaaagatgattgaccaaactggaatgcagactgag

SEQ ID NO: 56132 - DNA, 580 bp, Homo sapiens
ccccctcgaagtacttctagaattaattaacgcgaggatatactttaagataaactattcttttttgagaataagcataaacataaaatgaaacaaaaatatgactcaaaaggtatttttttctaattttgacaaacttaaaatatatatgtattaaaagacaggaaggtttggcatatgctaatttatagggttagaggctggcagaactggaataatggcaaagctcatattcaaactcaagatctccctgaacagggcaattaccaggaggtcattgggttataaaaatgcacttgtgatgaactggtctctggaaggggtttggctggaaaatggcatgagaaaactcgttaaggtgaagaaaatagtcaatcctcacctaactttgtcaataggtccttgaaaaccaccactttacatgaaattttgcataacaaaatttgtataggccaatgaatataaataagagttaagttcctgtggcatatttctggtgagataaacatcaccaaacttccaaataaaaacacaaaacacttttaatattaaatattgaaataaatgtgaactctaccta

SEQ ID NO: 56133 - DNA, 507 bp, Homo sapiens
gggccccccctcgaaagtcttctagaattaattaacgcgggatccagttacaaagagctgtgaatgccagatgaagcataatcctcatttaccagaagtagagtccaaaataagactttctttttttatgatagcatgcaaaaaaaaaaaggctaaacaagaaaaactaacaataaggctgtggtaccccaacatactgttttgagagtggggaaggtgaaagcagaatggataatgaggaatcaaagactgaattacaaagaatagaaatagctatgccagcaagcaaagctgattattgcccaagtggctagtttggtatctaagtttatagtttttttttagaaagttgctgccgaacactatggagagtaacagattaggataaataatattagcaaccaaggggctataaatcctgctcccatctgggcacaataaacggccactgaagaacagtaagtaaagtttctgaagtcaacaccaaacatggcttggtcattactg

SEQ ID NO: 56134 - DNA, 530 bp, Homo sapiens
  misc_feature 38: n = A,T,C or G
gactgggtaccgggcccccccctcggggtacttctagnattaattaagtgaattttcctaaatagtgattctgttctattttcagatttgttggcctggagttgtagtattctgcttcctcattcccatgttgcgtgtgctttccctttttgttctcattggtttttccagaattactctgtttcattgatcttttcaaataaccaactctgagatttatatcttaattttactgttttactatttcatgattcttttcgttttgttcttaattttttcctttattattttcccaccttcttaagttacatgccattttaactttttcttccttaataaaagacagttactaacattgtaaggtacgacttttcctctaaatacatctttatccatatctcttaaatttatatttagtgttctaagttataaataatttataatttcagatttgactttattttttacctggagtttttgaaattatacttttaaatttccaggtagtttattttgttgttgttttttag

SEQ ID NO: 56135 - DNA, 552 bp, Homo sapiens
gggccccccctcggaagtcttctagaattaattaacgcgggccttaccacaaaaaaagagaaggtgttggatatatctattaccttcattgtggtaatggttatcacaaggatttggaactgtccaaactcatcagattgaacatattaaacatgtgcacttctttgcacataaattatacctcaataaagctgttaaaagtaaagatgtactatgaatttgtcaagcacctagaattggaggtgaggggagttttgcagataagtttttatattatttgccattaaagaaactttatattcttaaatcctgcctattgacatccttttgacaacagcatcactttacccacttacaagggcctggaacatggtggacacttaataaatatttgtggaatgaatagaccgtaaggtgcttttaacgcctaggcctggaagtggtgcacattactctaccgacactccattggttaaaactcagtcatagggacacattaactgcaatgggcattgaaaaatgtgtctggcttcattcccaaaaaaaaaaaaa

SEQ ID NO: 56136 - DNA, 584 bp, Homo sapiens
  misc_feature 542: n = A,T,C or G
attaattaacgcgggactgagttgatgtttcagctgagacttaaatggaaaaaaaaattagcctgtcttataagttgccagaagagcttaccaaggagaaggaacagcagatgcaaaggccttgatgttggaacaaactttagatattcaaggaatagaaaggatcatgaaggcctggtaaaccatggtagagaatttgtgttttaagtgtgaaggagagccactggagcatataaacagggaatcatgatttgatctgtgcttttaaggatcactctggatactccatggagaagagattgtaagctcctcagagtgtgtttagagcacatactgctgcaatggtggctaagactaagggagtggaagtggcatgagagagaaatgggtgtatttaatacttttagatacagatacatagtacttgttgatagattaaatgtaatgtaggaaggaaaataaaatgaagaatgataggtttttggcatgtgcgactaagtggatgagtttgctatttcatttggttttgtgacattgtgcanaaaataagctctttgaaatctaagtaagttgaaatctatgac

SEQ ID NO: 56137 - DNA, 514 bp, Homo sapiens
  misc_feature 437, 453, 461, 475, 476, 490, 501: n = A,T,C or G
cccccctcgagagtcttctagaattaattaacgccgggcttccactcacacactttggttctgtccttcctatatagtctctttgtgcatagtttcagacaatctattgacataaatttctttccttttttttttgagacagggtctcgctgtgttgcccaagctggagtgcagtgatgcaaacatggctcactgaagcctcaacctcctgggctccagtgatcctcctgcctcagcctcccatgtagctgggaccacaggcacgtgccaccatgcctggcaaattttttattgttttgtagagacggagtctcactttttgttgcccaggctgacttggactcctggggtcaagcagtccttctgctttggcctcccatagtgttgggattacagtcatgagctactgcggctggctgttaacatttttttaactnctttttgctatacagntgatcctncgtatttgtgggtnncacatctgtgggtncaaccaaccgnagactgaaaatac

SEQ ID NO: 56138 - DNA, 572 bp, Homo sapiens
  misc_feature 545: n = A,T,C or G
cccccctcgaaagtcttctagaattaattaacgcgggtcaggtcatgccttttctctgaaggttgaagagctgaaataaagggggagggctttagacagaaatgatctccggcaatgaggcacgaggtggaggtggatcctaagtaagaatcttcctctaaaataaggtgcaggccggtcgcagtaactcacgcctataaccccagcactttgggagaccaaggcgggcgggtcacctgagcctcccaaagtgctggtattacaggcgtgagccaacgcacccggcccatttccactgttttacaccaccctgtttgtggctgccccaggaaactctacagaccatctgctgcagactatgttgcagtactagtgataaaagggaggtggaagtgctaagctgacagcaaaggactctcaacgaagaggtgggctccaggggagatgggttcctaaggggccagctggagaaagggccactggggaagcagctactcaggcgctgggagcctcaccctgcagagatcttgctgtagtgcatgtangcagaaacgatgaccccaagcttgccc

SEQ ID NO: 56139 - DNA, 581 bp, Homo sapiens
  misc_feature 23, 58: n = A,T,C or G
ccccccctcggggtacttctagnattaattaacgcgggactgcctggtgagcaagaanagattccaaagactttgctttgaaaagcatctcccagcttctacttttttttaaggaaaagtagattttctttgtctttgtttttgttttaagcaagaacagaatctaatgacttttttcatgccatcgctttgaaatagcgtcgtcttcctttctttctctccctcttcctggcaaagtatatactggatttttattgccttcttgggtttttttccctacgtgtatcggccgttatgcttagccagtttattctttatttttttactggagtcattgccagtgatggaaacggtgtttgcttctctttcagtcaagatctgcacaaagtatagcattaggtggtatttattgtttatattatgagttctacattcatctttccagcactctgaagttatcagcaagttctcagtcagttcaaggcattggattctgcttgatttctttttaattcattgtttttgacccctttgagagttttaatagagaggagtctggaaggcagagatctccaccacct

SEQ ID NO: 56140 - DNA, 321 bp, Homo sapiens
cccccctcgaaagtcttctagaattaattaacgcgggtagatgatttctagcaagcaagaagtcctgtgcggtgtcaccatgagcacctccagctgtactagtgccattggaataataaatttgataaggtggtgaaaaaaaaaaaaaaaaaaaaaaaaaaaaaaaaaaaaaaaaaaaaaaaaaaaaaaaaaaaaaaaaaaaaaaaaaaaaaaaaaaaaaaaaaaaaaagggaaaaaaaaaaaaaacccgcccccccccggggggaacccccaatcccccctaaaaaaattcttttaaccccccccccctgcccgcgtttt

SEQ ID NO: 56141 - DNA, 382 bp, Homo sapiens
cgggccccccctcgaaagtcttctagaattaattaacgcgggtggggtggggtgctctgctggtcttcaattaccaagaattctccaaaacaattttctgcaggatgattgtacagaatcattgcttatgacatgatcgctttctacactgtattacataaataaattaaataaaataaaaaaaaaaaaaaaaaaaaaaaaaaaaaaaaaaaaaaaaaaaaaaaaaaaaaaaaaaaaaaaaaaaataaaataaaaaaaaaaaaaaaaaaaaaaaaaaaaaaaaaaaaacccccccccccccgggggggaaccccaatccccccaaaagggagttaaattccccccccccactggcccttttttaaaaaaggcgggaaaagga

SEQ ID NO: 56142 - DNA, 545 bp, Homo sapiens
  misc_feature 467: n = A,T,C or G
cgggccccccctcggaagtcttctagaattaattaacgcgggcagaaaagtaagtacgatgctctgagagaaagctaaggcaaacgctcccactgaggaacaccgagcaggttagctgggagggagacatcctgaaggagaagagagcggtggaacagaatgctaccacatacacctagaaggtgatcttgtctaaagatcctccatgcctctcaaacattttttggtccatgaaccacagaccaccatcacctatcactacttgctactgcccaaagaactaaaacctcatcaaaactaaagaagagaatgacactgtttctcgtaacagagcaatgaggtggacgccaagaaaatggcagccacagccccggaatggaggtcggctatctgggaacctcccttaatccgaacacagccagatctaggaaggaagccaagatcactctgaaggccaaaagtgaatnttacgaagtccatgcacaaaagcttatgtactccactgtgagaagagtttctccgacccacattcgtagcttgattac

SEQ ID NO: 56143 - DNA, 452 bp, Homo sapiens
ccgggccccccctcggaagtcttctagaattaattaacgcgggcagttggtctggttggcgatggtgatggcacgattcacggcttcggcctcgacctgcaaaacagcagcagagcatgagaatgtggctcagcccaccccacgagccgctacctttatcctccaccccagagagaggctaagatgaaggcgaggctgctggtctccaaggtcctaccccaggggacaattcaaaggagtatgacttgccttgtgtctctcaacattggtttggttgaactaattccctcctgtggctggacacagtggctcatgcctgtaatcccagcactttgggaggccgaggcaggtggattacctgagatcaggagttcaagaccagcccggccaacatggtgaaactccgtatctactacaaatacaattaaaaaaaaaaaaaaaaaaaaaaaaaa

SEQ ID NO: 56144 - DNA, 547 bp, Homo sapiens
  misc_feature 509: n = A,T,C or G
cggggccccccctcggaagtcttctagaattaattaacgcggggggagtagatggtgattgacaaaattgaccctgaattagtgaaataagcatggaagttcattatttcatcttctcttatatatatttgaaatcttttccaataaaagtttatatataacttggcaattaacttaccaaagcctgttttcttatttattaaacagaaataatcaatatctacagcagagataatatctccttatagatttttctgaaattttaagtagtatatttaaatcacatggcacacagtggctgttagataatttgtggggactcagtttgacccacttattgctgaattggctggtctgaagttagggagtttttgcgctattcctacagcatagcaatgctgggagggtgagcaagggacaagaaaaacctatgtccacatgagtcaccctttcaggcaccacaaagatgctggtgggagattttggcttttttgttttttgtttttttnaaaaaattcaatttttaaatgaattactattttttgga

SEQ ID NO: 56145 - DNA, 560 bp, Homo sapiens
cgggccccccctcgaaagtcttctagaattaattaacgcgggtccctgatcaccaatgatgctatttttaaatatgattattgaacattagtataggttttgctgcagtgtatgtttctgtctacttcttaattggattatttgtcttctaataattgatttgaaagtgttctttattgatggttatgaattttttgttagatatatggattgtatatgattttctgtattctgcagattgccttctaaccatgactttagaaggcctaaatttttaaattttaaggaaattcaattcacaaatttttatatgtgttatgcttttactttttcatttgcagaattatttctctccacaatattgcaaatattttctcctatatttgcatctggaagttttctaattatatcttttatcttaggtctataatccatttcaaggtgttttctttttgcctgcaattccagcactttgggaggccaaagcgggaggctcacttaagcctaggactttgagataagcctgtacaacgcattgagagcctgtctctaaaaaaaaa

SEQ ID NO: 56146 - DNA, 587 bp, Homo sapiens
  misc_feature 27: n = A,T,C or G
cgggccccccctcgaaatacttctagnattaattaacgcgggggagaatattgagttttcttagttgtaaagttggggagatggcaccttctcagaggattgtgaaaatatgaggaagaaacaaaacagtgcatgtaggagcacaaggccacacaaaggcattctattgttatgctcattctgcttctgtaatgacttttcataggtcattcttgtgaaccattttgttttgcaagcaaccaaggaaagaacatcttaagtggaaaatcagtggtggttgtgaacacttagagaatagcaatccacaggcaagaataatggtattgtttgtagagctttattaattggatattttttaaaagacattttcattcacaggtcattactatggttctcagcgatccaaatatgtagatcattggttttttttttacctgaagtagcttaagagtacttggatcagtagaataaatatttattgaatcaatcagtcagccaattaatatgatgttagtgatagacctgcctccttttatggaagaggtaacagatccagagaggtcaagtaatttagttgtagactgaaa

SEQ ID NO: 56147 - DNA, 546 bp, Homo sapiens
  misc_feature 103: n = A,T,C or G
cgggcccccccctcgaaagtcttctagaattaattaacgcggggaataatagctgcattggaggtaagaaggtacctcaagacattttctctaattgtgcagngaaaaaacaaataaaggagatgaagactaggctgctgtcattctgtgccatctctgacatctatggaaagcctagaggcccaagatacctccctccccagggtgctattgcagtatcttcagggtcctgagtctgaatgttcctattttatgtaagcattgtacccagaagaatgggtcagaacctctcctatggtctgaatgtttgtgtccctccaaaattcatatgttgaagtcctcacctccaaggtgattgtattaggagttgaggcctctagggggtgtttaggtgatcctcatgaataggactggtgctcttataaaagaggccctagggatctccgttaactcttccaccatgtgaggacaccgtgagaaggtgccatctatgatgaagctggcccttattagacatcaaattctctggttccttgatcttggact

SEQ ID NO: 56148 - DNA, 608 bp, Homo sapiens
  misc_feature 9: n = A,T,C or G
acttctagnattaattaacgcgggggttgttgtacagattatttcatcacccaggtattaagcctggtatccattagttatttttcctgatcctctcccttctatttttgctaaagtattttcaaaaaacaaaagttgttaagtttgtttcctttggctagaatatctcggaaatataataaacctttgatgaaagaattaaatatgtctggccaggagtttcagaccagggaacatagcaagaccccatctctataaataaataaatacaaactctcaagcccacaccagagctactgactcagaatctacattttaataatacatccaagttatccatacacacactaaaactttgagaatcactgacctacaacagtgctgtccagcagaactttctacactgatgaaaatgttttatatctccactgtcaatgttggagacatatcagacaggacagatacagaatgtctcaaattagaactgcacctaaacataatttcttatactactaaatgaaataaatctccattactctaatatatatatgctcttccactaaatataatgccagtaatatatccagagcaggctgggcactgtgact

SEQ ID NO: 56149 - DNA, 521 bp, Homo sapiens
  misc_feature 25: n = A,T,C or G
ctgggataccgcggccccccctcgnaaatacttctagcattaattaacgcgggggggggttaaaagcatatcttctacactagtgaaagtgcttgaatcagtgattctggaaacttctaaacttaaaattgggtagatacaaaatcctgtttcatttgatggggatataggagtttttctattgctgtggacatttttatttgaatctcttcagagtcttctttcagtggtgagttttctgaatgccttcaagctgtttgttccaagtactacttaaatataatatatggattgtaagtctcattctggggtccagttgcttgggtttgaatcctggctcttcagttacttaacataaccttaactgtttcacttaatcttacattactaagtttcctcatctataaaataaagtaagtaatcatatctatctcataaagcttttatgaggattaaacagattaatatatatgaagttcttaaaatatagaaaatacacagtaattatatttactatgagc

SEQ ID NO: 56150 - DNA, 556 bp, Homo sapiens
gccccccctcggggtacttctagaattaattaacgcgggggagagagagagagagaagcaaggagagcttgggagaaaagcagggtgggacccacagcaaaagtcaacatttcagacagttccgaatgaaaatatgtctctttctcatttttaacttgagttagaaaaaaatgccccatttgattaatagcaatcatgtatcactacacttacgaaagacagtccctgcgtcttctcttaactactgcagccagtctggtcaagcctgagagctgatcttggtagtgcccactggagttgtggtaaactatgggggactgtttttggcacagattttaccatagtaaaacgtatcatcctgagttaaagcccctgggtttagaggctcaagtcacccacaagcaaaaggttttatttctcatgttttttttccctttaattttctcattcactgcagatgactcatactctgaacttcttcgaaataaaatgcaggtactgaaccatactttttctctatccaaaggagaaaaaactttataattgtgaatgcctt

SEQ ID NO: 56151 - DNA, 526 bp, Homo sapiens
cggggccccccctcggggtacttctagaattaattaacgcgggcagtggggagaagccgcacacttttatggtttttatcttaaggaatcccactaggttctcaagaggaagaaccaagagaaatcccccagggatctaagaggggaaaggaaagaataatcattgtgaaatatgaccagagcattccccataacacaagcctactccccagaggaaaataatttaccacagtcttatcccacctgagagaagggtattctcagacttcatccttctctagccttccggtctcacctaaagaaagggaaaaaagcttcacatttgtgaaggccaagtttcagggacataggctcactacaaatctgagttttagtcagattataaaacaatcactcttctccacatgttagccctgcaccagcaggactctagtataataacaatggataatagatgaaggagctgaaagaaaaagactctacataaggacttaggaaagttcaaagacatcaaaaaaaaaaaaaa

SEQ ID NO: 56152 - DNA, 600 bp, Homo sapiens
ccgggccccccctcgaaagtcttctagaattaattaacgcggggatttctattaacctgtacccacatctatgatgacaaaattgttcttaataactaaggataattaagacaattctatctgtccacaggtcgaatggttcttagggtttataaatatctgttatttacaactgcatcacatggctgaatgacaagtactggatgatttaagcaaatgtcaccccgaaatactatgggaatcttaatagcctccttaatacgcatagttaagaactacctgttttcttagcaacatgtgacttactaagggcttaattaacgcgggttatgaaaccagcttcaatttcagaggaagaattgttgaatttaatcaatcaactgaataatgatgataatgtagatggcctccttgttcagttgcctcttccagagcatattgatgagagaaggatctgcaatgctgtatctccagacaaggatgttgatggctttcatgtaattaatgtaggacgaatgtgtttggatcaatattccatgctaccggctactccatggggtgtgtgggaaataatcaagcgaactggcattccaaccctag

SEQ ID NO: 56153 - DNA, 466 bp, Homo sapiens
acttctagaattaattaacgcgggagactacaaaatctttccagtttaaagatttttcttttccacagactaaacaaagtcagagtattttgtgttctactggtgcattgttactaggtaacctcaattttttgaatttccaagtaattgaaaggatcactttttggtaaatcctaaatgctcccaaaaaagaaacccagttttatctacttcttatgtttagccgttaaaaagaatgaggaaacctgctttgaaagaattaaactcttaaccttactttatagctgtaccagcttcttaaaaattgaagtttgatgtgaagtttttttattgaattgcaggttaaaccatcttacttcctactgcttgaaatctaaatccaaagagaatttgtggctcaaggatatcttcaaataaaagttttattgctaaaatgtcagttaaaattatgcctaggtaggtgctg

SEQ ID NO: 56154 - DNA, 603 bp, Homo sapiens
  misc_feature 7, 24, 582: n = A,T,C or G
ccccccnctcggggtacttctagnattaattaacgcggggctccagtttgaggctgcagcctgggacccagaagagcagtatctcagggcagcataaatggtttgcatctatcctagcgggacctcaccgatgctatgtcctaactactgagctacccatccagatttgacgagagatagtcacaaagaagtgtgcatttaccccacggccctgctgttttcccctgtagttctttaaaacatccatgggcattagaaggttctgtgatagctttacttatctaacaaagctggattttttttttcttttcatctgttgttttacaatttggtgactcctgttgtccttatttgatatgatcattaatacaagtttttaaaaacagaaacattttagagtaattttaacacttttatcttacccagaacataaaaaaatcttcattttcaatccttataactttgtgtgagggaaattaggcatcagggtgggaaacagaggtgacttttatttgtctaagtctaccaaattgctgaactagtaggtaaaactcccttcctcttaactgagctgactgattnttgctagatttttcttttcgt

SEQ ID NO: 56155 - DNA, 484 bp, Homo sapiens
  misc_feature 16: n = A,T,C or G
cgggccccccctcggnagtcttctagaattaattaacgcgggtgggagatcgaggtctgaacttgttgaaagttaaatgttgagcccataaagctactaaagagtaaagtatatggcttccctgtgtggttctggatgatggtttttagggtgatctttctggcttatttcaaggattgcaaaggatgaggcttctacaaatctgacttcaaataagtaagttatcactatactaggcacaaaaaagaaagccagcattacaactcatttactcaaaaaaaaaaaaaagtggaaatggcaatgactatgacttcaacatttgggttctagctatttatatatttatactttaacacaaattaccgaggcagctctgctcccttgtgggttgagactttggatatgaaagctttcatgctctctgagactagagttaagtcatagttctgctccttctgctccttggaaacagactcggattctt

SEQ ID NO: 56156 - DNA, 560 bp, Homo sapiens
  misc_feature 32, 506, 510: n = A,T,C or G
gtaccggggccccccctcgaaagtcttctagnaattaattaacgcgggaagctaactctttttttaaaaaagacccttaaatggtttattggttcttgaaatttagcctaccctcatttaacagatattttttctttgctatctaatactttttgaatattaaaatattacttaacatttatgaagcaataatttactcattggatttgcctcaattttaaccacatattagtaaagctgacaataaaacaagtgttgctttttacctgatttttaaaaatttgcccttgtaatttcattacaagaagatcagattaacataacggaggcaataactactctggtctgggatacatttgattgtttcagtggtaaggagtgttcaaacattatagaactgcacttctacatttgtagagatttttctgtctctaaatctcagggataaattatttttcaagtttttgaagttcttatgactcatcaatagcaagagtgattgtccnctangtaaaatataaatttttaaaagtacttactacatataaaataagtaattt

SEQ ID NO: 56157 - DNA, 629 bp, Homo sapiens
cgggccccccctcgaaagtcttctagaattaattaacgcggggtaaaggggaagaaagtttttttctgcatgtatcatataatgtaggatattagcttgggaaacagggcaagactctgtctctacaaaaattcaaaaaattaaccgggtatggtggcatgtgcctgtggtcccatctacttaggatggctgaggcagaatgactgactgagcctgggaggttgaggctgcagtgagacatgtttgcatcactgcactccagcctaggtgacagggcaagcaagatcctctctctcaaaaaaaaaaaaaaaaaagtaggggagggaaaaaaatcagtggacaaaagaatacttacttgccaaatacattctacaaaattagaggtaaaaagcacaggggcttgaaaggcatttcagcacaaactgaaataaaatgtaaatgttggatttagataaattagaaaagagtgctaattaaaaattgatctgtgatctctcatttcttgtgaacatatgacatcaataccttctgcctccatgatagatgtttaagctccttcgcataaaaaggaaagtgatgccctagcaatacagacctttcttatattgaaattattaatattggcctga

SEQ ID NO: 56158 - DNA, 598 bp, Homo sapiens
  misc_feature 27, 44: n = A,T,C or G
cgggccccccctcggaagtcttctagnattaattaacgcggggnaaagaagtttggtttagaaaggtattagacagacaaacccaaacaggactcttctacaagtaagtatcttacaattctagtcattatttgtggaaagaaatatatttgagatgattaattttagaacaaaaactgacactaagcctttgaaaggcgaataaagaggccataaaacaatgacggcttgcataagtcatacctctccaatcttgacaggtgttcctatcagggtaggaatgcagggaaggggacagcggtcccgacattctggatgagagaccacacgacagtctcgacacttcagagataatttgccaaattttatccgctttccacatggaacacaggattcaggtttaataacctgggataaaacagggcagaaggaacagagtgatatgaattagaaaattatcatcataatcaactaactttttttttttttttttcctgagaccgaatctcactctctcgcctgggctggagtgcagtggtgtgatatattcaagaaaaaatgtaaacatgtgtcactaaaaagtactaacaatgggcca

SEQ ID NO: 56159 - DNA, 501 bp, Homo sapiens
cggggccccccctcggaagtcttctagaattaattaacgcggggaaggggcccttggccacagtggaattaagaaatctggcaaaaagtaagctgttccttgtgcctgaggagatggtgaccctttatttcatctgtatttaaacctctctattccctgccataacatcttttgccacgtatagctggaattaagtgtagtcttggagctgttgtacatttaagaataaacttttgtaaaaaaagaaaaaaaaaaaaaaaaaaaaaaaaaaaaaaaaaaaaaaaaaaaaaaaaaaaaaaaaaaaaaaaaaaaaaaggaaaaaaaaaaaaaaggcggccccccccgggggggacccccaattccccctatagggagtcttttaaccccccctcacgggccgtcttttaaaaacgtggggacgggaaaaccccgggcgtaccccaattaaatcgcctggaagaaaatccccttttccccagttggcgtaataccaaaaaggcc

SEQ ID NO: 56160 - DNA, 548 bp, Homo sapiens
  misc_feature 14: n = A,T,C or G
taattaacgcgggnggaaaaataaactcaaactggcaactagcacccaaaatggcagctagtacccatttctctaaatggggagtgcagttgggtgggaaggtggagaaaattccaaacaagggtttccttcaagaggtttctcttgtcataccaaaaccttggaaacaatcttaatttatattaataggcaagtaagtaaaatgtggcaataagacaggttacagcattaaagaagaaaatctatgatcacaacacaggaagcaaaagtacatgcaatataaagtgaaaatgaatttcagttactatgtgagaaaccctgaaaaacatgcacatatatgggtagagaacaaaaagaaatgtaaaaatgaaactaggccagtcagggcgggattagtaatattatgtttttctttctaaaatgttcttaatatcttaacaataagtatacataaagtgtttctgctaagacttttataagatttccttacatagaaatagcatataatttttcagcacagcactatttcaggaaaaaaaaaaaaaaaa

SEQ ID NO: 56161 - DNA, 556 bp, Homo sapiens
cccccctcgagagtcttctagaattaattaacgcgggtactaagagtggtgtttaaacgtctactcttattagtgtttctctctgtctccttgttctcctatagttttttttttaaataaaaattattgctgttatttggtatacatttgtcactatatttgttgtgttttcatcttgttttatgtgtttttttaaatctttcaagttgtttagggggagagggactatttatgaaagtttgtaatttttattgtagtacttgctacaacaacagtagttgtatcatatttagcagaggaaatgtagtttgtcccctgtactgtttggttaaaaatgtaaattaaaaattaaaatttaaaattaaattatacagtcatgtaccatattatgatgttttagtcagcaacggaccacatatacaacagtggtcctgtaagattatattggagctggaaaagttctattgcctagtaatatcacagccatagtaatgccatagggcaacacattactcatgtgtttgcagtaatgctggtataaacaaacctgtgctgc

SEQ ID NO: 56162 - DNA, 441 bp, Homo sapiens
ccgggccccccctcgaaagtcttctagaattaattaacgcgggggaggagaagaatctgggagtaggaacaaatatttaggtgagtaaaataaaaccgttgatagaataacattccacaaatagcaatgacatgcataccagcctccccagtgctggtgagtcaatggtggacaagatagatgtgatccctttcctcatgcagcttatattctagttgggttcagcaaacaaaacaaaacaaaaacccagtaagcaaagaaccaacggaagcaagtttgtggtaagtcattgtaacaatatcaacaacaactagatgctgcagcagtcagcattggaggtgaaggacattttaggtagggtggggaaagcacctccaaggagttgactttgaaccaagacctaaagaaagaaaaagagccagataaggaaaaaaaaaaaaa

SEQ ID NO: 56163 - DNA, 335 bp, Homo sapiens
actgggataccgggcccccccctcaaaatacttctagaaataattaacgcggggaggtgtattgaagtcctccagacaaccctcagatttgatgatttcctagtagaactcacagaaataaagagctgttatactgtgaaaaaaaaaaaaaaaaaaaaaaaaaaaaaaaaaaaaaaaaaaaaaaaaaaaaaaaaaaaaaaaaaaaaaaaaaaaaaaaaaaaaaaaaaaaaaaaaaggggggcccccaccggggggaaccccaaattcccctaaaaggaagtaaaataaccccccctaattggccgtcttttaaaaaggtgggaaggggaaaaacc

SEQ ID NO: 56164 - DNA, 601 bp, Homo sapiens
  misc_feature 25, 519: n = A,T,C or G
ggccccccctcggaatacttctagnattaattaacgcgggctcccctccagaacctgcaacttgaatctctataacgtgaagtatggggatcttcatttgtagcagccttgtccaaaaattaatctgcacactaacgcataagaaccactgcatactctctgcagggactgccttaaatattaggttaaaatcctagtgttaaagttgtttgattaacaacattggcaatatcacacaatttgtttataaaatcctaatgaataggtctgtgttcaagttattatgatcgtatggaatattgccctttgcatgtttccatcccctacagaaactacagaaatggatctgctcgtgactcggcctttaaaataaattactatattgtttttaaacgtctccctcctgtcagctattaacgtatgttatgacctgaagaaaatatgtaaaacatcaaaagaaaagtcagcattgaaattggaatttcgtaattaaatgatatgtaaaatttgaatattatntgttcagtcttattcttccagaacctcagttacttttctttattaattcagacagttaccacagtactagtcagctattact

SEQ ID NO: 56165 - DNA, 607 bp, Homo sapiens
ccccctcgaggtacttctagaattaattaacgcgggggaatactttgttgaggattatggaacagtaaatagcctcagtaataataatagctaacactaattggcattaagcaccatttttaatagctttataaacattatatcatttaatcctcacaacaaccccatcagataaagtgatactgtcattcccattttaaagatgataaaactgagtcacagttaagttgcttgcccacgttcagagccagtaagcagcagaggtgtagagccaggcactctgactccagagtctgtaggctaaatcactgcacaatccagcatcccctcagtggaaaaagagctctgatgggcacgtccacatgaatgggcaggtcgttgccgcatttcatagacctgtctcaatacttgaatggttgcaacagtgcttaagaatttgccattggttgggcgcagtggcctcccagcactttggggggccaaggcggatggatcacttgaggtcaggagtttgagaccagcctggccaacatgatgaaactccgtctctactaaaaatacaaaatttagctgggcatggtggtgcacatctgtaatcccagctact

SEQ ID NO: 56166 - DNA, 586 bp, Homo sapiens
ttctagaattaattaacgcgggatgcagtgacctgagattccaccactgcacttccagccttgccaacagccttggttggtcctatttttaagaccctgtctcaaaaataaataaatacgtggttgcttgatatttttcttggatgtagaaacaaggtaaattagggctcttggtaaaacacattaatcatcatgtgcttacaggattttctaacacaaggaaacaggacttaaaagtaaataacttaagatcaaaacatgcaaacaaatacaaaaacttaccatccctgttcatttttatacttgtaagcagccccaagaatgtgacataaggcgcctccagccttgaaatccatgaaacactttgcctaaaaatgatacaaattacacatgagaaaaataaagcttctgacaaaattactcatgtcttaattctaagttttataaattcaaatatataaacaaatactaattaaacaacctccttaaacatcttcttgaataaactgaggaatcaatacatttttctaaaagtagattaggctgggcatggtggctcatgcctgtaatcctatccaggaggctg

SEQ ID NO: 56167 - DNA, 502 bp, Homo sapiens
ggccccccctcggaagtcttctagaattaattaacgcgggggaaagaagacaagaaagagaaagggctagaacaagtgggagatttgagttaagaagaaaaagaaatcaagtttctccataactaaaggaccagccagctaggattcttctgcccactcatacttgcatgtactgttcctctttgtctaaagaattaacacgttcttgaagtatgttctcctgtttttcaaaattcttcaagagaagtatttcttgaaataaggtgacatggtgcaggtcagataatttcatctgagtatctagttttagtttctgatgtctaaagagacggagttctgcatcgaaagtgacaaccagttctttgatctgagatggaaaaaatatttgcggatacgttagaagactagataaatgcatttttaaactatctaacagtactaatttgtatgaagtcattttttattatgcccttatggatggagaattgtgtgtgtgtgtata

SEQ ID NO: 56168 - DNA, 433 bp, Homo sapiens
  misc_feature 21, 37: n = A,T,C or G
ctgggtaccgggcccttcccncggaggtacttctagnattaattaacgcggggtggggggtagtttactttgttgtaaggacttgataacctggctacagcgttttctatgaaatctacttggatcccatgcctgaaatttggaagcatatgtacaaaaatcatttttacgttttatttttaataaatcattgtgtttgaccgtaaaaaaaaaaaaaaaaaaaaaaaaaaagaaaaaaaaaaaaaaaaaaaaaaaaaaaaaaaaaaaaagtggtctccaataacacaaggggggcctccccccggggggagctccagtttaccctaaactaactggtataagcccccctacctggccgttggtaaaaacctggagaaagggaaaaaccttgggttaacccaaataacccttttggaaaccaatacactttttg

SEQ ID NO: 56169 - DNA, 552 bp, Homo sapiens
  misc_feature 38: n = A,T,C or G
ctgggttaccgggcccccccctcggaggtacttctagnattaattaacgcggggtaggcggagaacgacccattacaaacgtctgccctatcaaactttaaatggtaataaaccaagccataaccaatggtgaccacaggtgacagagaatcaaaggttcaattccgagagagggaagcctgagaaacggctaccacatggcaaggaaggcatcacgcgcgcaaattacccactccccacccggggaggtagtgactaaaaaaaaaaaaagctcaggaagatgtgccatctgtcctttctagtacctgaccaataagtattgcatccattttataggaggaggaaacagaggaagacaacttaattattttgtgtttaaggtcactcacctagtagctaaactaaaattctaacccatatgggcttggttcggagcccatattttttattactactttatagctggaaaatgataactcacaaacactactcttgcccattaaataattggacccgcctcaattaacgcgggaagagcgcccaatacgcaaa

SEQ ID NO: 56170 - DNA, 604 bp, Homo sapiens
cgggccccccctcggaagtcttctagaattaattaacgcgggatcaataatataaacaactccaagccaaataactaaataactctgtatattataataaataactctaaagaacttttaagatgatcttcatgatcactgtttatactatgaacagatatgatacatacctgtgtctgaaggacgtaaaaaatctgtgtcacaggtgaaaaaggtctgatggtcctgagctgacaggttcatgtcatagtatgtaagtggctctttaccagtcacccaagtgtatctttaccaaaacacaacaaaatatttaaattgaacatgagagagcatctatctgctataacagacactacttaaattcaaaaatgtactgctacacatttggatgttttaaaatcttacaatcagtaaaacaaaagataacctcacaaactacttaaagtatgataataaaacatcaaagaccaaatagaaaaataatattcaataaacaactgcttctgaaaattgaattgggccgggtgccgtggctcatgcctgtaatctcagcactttgggaggctgaggctggtgaatgacttgagacctgcagtttgagacc

SEQ ID NO: 56171 - DNA, 578 bp, Homo sapiens
ccgggccccccctcggaagtcttctagaattaattaacgcgggtggcaacaaattataatttaccagagtaggtattgtattacatcagatgttaatattgtattaatgataattttttgcttttgataattgtactatagatatttaagtgagagctcttgtttgcagaaatatacactaagcagtggttcccaagtttcagcattcattcattcattagaatcacctggagggcttgttaaaccaagagtttttgattcagtaggtccagggagggtcctaagaatttgtacttttgttagaaatgtacttgttagttcccagatgatttcaatgttggtgttacttgtcaaggggatcatacttggaaaatcaccgcattagagaattcaggggtaatgagggaatcatgtctgcaacttaacttcaagtggttcgaaacaaaatttaaaaaaaaatgcatatacagacacacatacatctatattttgaaagatgagaaaggaaattttgtaaattgtcaataattgaggaatttgcaagaagcttttatgggagttctttgtactattcctac

SEQ ID NO: 56172 - DNA, 608 bp, Homo sapiens
  misc_feature 38: n = A,T,C or G
ctgggttaccgggcccccccctcggaggtacttctagnattaattaacgcgggagggactctttgcaaacagatgtctcatcctatttagtgcctcaaactagattctgttcagtcatgttacaagttaatatgagtctataatgctacaagaaaaacatttaaagtcattaaaggatcattttttcataggacacattttccataaacaactttttgaagactgatcgtagtccaggcactatcctatttcaggtccaaccatattcaggttgttctatgcttctcaggtttcaatttaagccaaagccatgtagcatcacaacgtgatggggcagtagactaaaggcattcattcactcaagcatccgtccctgcaatgtatacttgttgaataaacagtttcatctgggaacattgtaggtttgggacatgcttataggcatttacgtattttaagaaaagaagaaagaagcatgagaagaacaattgggagaaacagaggattaataagatgagaaagtactgaagcagtatttccctcacttaagaatgttgtgtaggcctactgattcattcatgaaatctcactgatggagtggatggatg

SEQ ID NO: 56173 - DNA, 544 bp, Homo sapiens
  misc_feature 27: n = A,T,C or G
cgggccccccctcgaaagtcttctagnattaattaacgcgggatcgataatgtattcaaagtgctgaaaataaaaaaaaaagaaagaaagaaaagaaaaaaagaaaagaaaaacaaacccctcaactaagaatctcatgtctagtaaaactatctttcaaaactgaaggttaagcaaagagataaagatgaataaaggctcagagaatttgttgctagaaaaatctaaacagttgttctgcccaaaagcaagtgacagcaagtgacaaattacatgacttagataaaacagatacatttctcaaaagacacaaactactaaaactgactcaagaagaaactgaaaatctgattagacaagtaaagaaactgaattaataattaaaaatcttcccacaaagaaaagcgtgaatgagattgcttcactggtgaattctaccagaaatttaaagaattaatagcagtcagttgtaatctcttccaaagaatggaaggtgaggtgacactttgccactgatttcatgaggccagtcttactctgatac

SEQ ID NO: 56174 - DNA, 608 bp, Homo sapiens
  misc_feature 28: n = A,T,C or G
ccgggccccccctcggaagtcttctagnattaattaacgcgggcaggcaagtaggagtggctggaaagtttgttgagttttttggaagtggagtttcacaattatctatagttgatcgaactacaatagcaaacatgtgtccggaatatggtgctatcctcagctttttccctgttgacaatgtgacattaaaacatttagaacatacaggtaagaagataaaagatcactagaataaacatgttacatttccaatgtgtttgataatattttataaattactaccttatccatgttatttactattcacaaaattacattatgttgaaacaacaactttcaagcaaacatcagatgtctttaaagagtgttgtgtcctgaaaccctagttccctgtgacacattgaaagcaatttaaaggaattattcaaaccattgatcctgacttgactgtttccccataatgatggatacctccacctctacttaggggtcataggttgcaatttaatggaagtcagccttaaacatattcacagcagtccccttctacaaccaagagtagaggagctatcagacaaaggggtttggggaccagtcttctatct

SEQ ID NO: 56175 - DNA, 531 bp, Homo sapiens
  misc_feature 38: n = A,T,C or G
ctgggataccgcggccccccctcggaggtacttctagnattaattaatctttctccagagtcactaaaatctcatcagaggaaataagaccacagtatttgattcacttcagcttggaaacaagcagatcttaacatctcattaggtattcccaatacagttttatcccccaaccaacacagatgatgttgtctgacttacaaggaaaaatatgtgattcacagtgactgccaatttctcttctgctccatgggggattcagcatttttgttctgttgtgtaggaggaaatccagcctgattgtcacttacccaatgtctcccatggtggcactctgtgggttgccttgttgggcacaaactccaaatcaggaatggctacataatttgcggaacccagtacaaaatgaaaacgcagggccccttcttcaaattattaagaatctcaagatagcaatagtagagcattaaacccagcatgggactcttctgagcacagggctttgtggaactacactaatcacacacctgt

SEQ ID NO: 56176 - DNA, 605 bp, Homo sapiens
cgggccccccctcggaagtcttctagaattaattaacgcgggagtcttgactattttggattccgaacctttttttagatctttcaggcttcggcaattcctataagaaggcataaagtctctaagaagaagctacaatctgtatctaggttagagaaggtggatgaattctgcagcagactcagacttggtgatcttgattcaatataggagacctcaaagatggcggcacttttcttcctgatgtggctggccccttgcataaatgacctgctacagcagagacagggcaggcaggcaacatccaagatagtgagtagttgagagggtgaacaacttatccctgtttgccctggaattccccggtattagtactgacagtcccatgccccagtcctgagcaaactggaatgtttggtcagccaagtaataaaagagtgtcccagagtcagcagtttaactttcttactttgacagttttggtttgggctatttcaccagaaacatgagcaattttaagatgaaattgcctaaaagtttgacttattgaggctagcccttaatatttagcctcaatcaagatgattttgagtcttccatttttc

SEQ ID NO: 56177 - DNA, 608 bp, Homo sapiens
  misc_feature 28: n = A,T,C or G
cgggcccccccctcggggtacttctagnaattaattaacgcggggtgggtgggagtagaaaattttgtgtatatcagggcagtatttttttatgaactataaatgattgtctttaataaatatgtgataaaatccaatttttattattttataaagacctgaacatgtgaactcttctcaattactttgtagaacactaacattctatgtgaagtattgcccaaaaatcaaatctaatcaactctctagatatacctatgattttataggaaataagagaatacagaaacatgttttaaaaatacagtgggacttcaatcagccatattgagaggaaattccaaggcaaatgacctggtttcttcaataaattacaagggaaacagatagaatgggagcttataaaggagacttaagagacacataacacaatgtttggaccctatttggataatgattcaaaaaaatgtaaaattgggccagatgtggtggctcacacctgtaatcccaacactttgggagaccgaggcaggcgggtcaccaagacctgcctggctaacatggtgaaaacctgtctactagaaatacaaaaattagctgggcgtggc

SEQ ID NO: 56178 - DNA, 593 bp, Homo sapiens
  misc_feature 524: n = A,T,C or G
cgggccccccctcgaaagtcttctagaattaattaacgcgggtccatgaaacacatttcttctcaaaatttagaatcagaaaaatgttcctttaaacaaaaacatatgtgtctttttgtcaaaccacaactacagaacttaaaatattttattttttgcctacttccaggaaactaagttaaatttactgctcaattgtagaactatattaggctatataattgtaatctcaatgtttatagttcctatgatgtgcatcattatcttactgtaagcagtatcaagtcctttcggaaacaatagaaaatttaggccatttaaaaggctaaattacattttggtggggcatggtggctcacgcctgtaatcccagaactttgggaggccaagacaggcggatcacttgaggccaggaattcaagcctggccaacatggtgaaaccccgtctctactaaaaatacaaaaattagccaggcatggtagtgcgtgcctgtaatcccagctacttaggaggctgaggcangagaattgcttgaacctgggaggcggaggttgcagtgagtagagatcatgccactgcactccagcctgg

SEQ ID NO: 56179 - DNA, 606 bp, Homo sapiens
cgggccccccctcggaagtcttctagaattaattaacataatttacataataatagtcccatattttcaacactggttatgttaactttttgtctttatctgccacaaacaagtatctttgaatgtgccttaaaacattgaaggcagggtcaaagtttttgatggcatttgaaacactctgtaagtgccttctatagagattgtatccatttatatttccctttcagcagtatctgactggctttcttgacacatctttaacatgcactgaagtagtatttttaatctgtgccaatttgagaggaaaaaattggtatttcctattttctttttaaaattataaaattaataacacacttataataaaactttaaacaactcaaaagcatacagaacaaaatgtgaaagtcccccccaccgtgtactcccacccattattagcagtttggggggtttccagattgttttctgggtacacattttctatgtgtgctctcatcggcatgtgtgtaacttctgaggcttcgtgcttagaaagactttccttaaaatggtaaaatatactactcaattcttaacctagcacttttatgttttctcagcatt

SEQ ID NO: 56180 - DNA, 586 bp, Homo sapiens
  misc_feature 9, 574: n = A,T,C or G
acttctagnattaattaacgcggggggacttttattttaaaacttagtagtagttttaaatgcatttatactttattacttaaaattacatatatttgaaaaatagatgcaagataaatttattccatcaattaactatatttgatgcactatggatttgaagatgttttgcagtaactctgaggcccataggttgagaagcagtgaattcagtggaagcactgatccccatagtgccaaatacagcttaaagatagtatgtaatgctccatgtatatagttgacatagacaggtactttgagcagttttaattatttataaaggaacacctgattatgaatattctacatttcattaggcagtaggatatgcagggtatatgtgtgtataggtgtgttgaatattcattcatttgctattctaggcattgaagaaagtggtaaacattaataataaaagctaatgttcatatacagatgttcctcaatttatgatggggtttcatttcgatcaacccatcataagtagaaaatattgtagtcgaaaatgtatttaatacacctaatctatcanacatcatagctt

SEQ ID NO: 56181 - DNA, 608 bp, Homo sapiens
tgggtaccggggccccccctcgaaatacttctagaattaattaacgcgggagggcgaggctggaggatcacctgaggtcaggagttcgataccagcttggccaacatggagaaaccttttctctactaaaaatacaaaattagccaggcatggtggcgcatgcctgtaatcccagctactcaggaggctgaggcaagagaatcgcttgaacccgggaggcagaggttgcagtgagccaagatcatgccattacactccagcctgggcaacaagagtgaaactctgtctcaaaaaaaaaaaaaaaatgcaacggagaggaattgtggatgttgtgatggaaaataaagaaaagaaagaaggaaatgctataaaataaaccagaaaccaatgagagaatttccaagcagaggcttgggtgcattggtagttagttgattttttttctgggctattctgtcacccagaatgagaaagaaaaagtagacaagattgaagattcttagctgaggccatgctcagcagaaagagaaacttgtgataggctctagggcagtaagggcaaccagtgccaagtttcattttaacactgacaggttggtcatggtgac

SEQ ID NO: 56182 - DNA, 600 bp, Homo sapiens
  misc_feature 22: n = A,T,C or G
cccccctcggggtacttctagnattaattaacgcgggggagggtgtctctagcaaacgcaatgtgtgctgcaatagaagggtaagacgtgagctcccagcaataacagcagaaaaaactaaaagcagaacagaaaatcccaaaaagataagttgtattatatcaacagagaacagaaaataaactaaggtaagagactaagcaaaccaaagttgcgattgccgaggtttaataggaaaaagcaaataatattcttttattatttagcacagtaagcaagatctgtttgttacacttttgggtcttgaaaatctttcctttaaccttttcaacacctgtttggtcatgctagatgaagaaaagcatagtatgcagaggatagatgtctgatctctctccttgaattataaattctttgagggcagatagtagtattttttgtttttcatctttatatctttcacagttcctagtatatagtatgacttaatgagtgtttgtttaacttagtttgaagctgtcaccttagggtaggctgaaaggcaatgtactgattagatttggcacaatttgttagtataaacggcctacttgttgtctt

SEQ ID NO: 56183 - DNA, 590 bp, Homo sapiens
  misc_feature 27: n = A,T,C or G
cgggccccccctcggaagtcttctagnattaattaacgcgggtctgtgaactggagctaaggctaagtggtctgtctgtttaataagagtttgaatcagatggcctggcatgaagagtcactggcctgagagaatgtcaggggcatttgtaaatgtgtaaagggctgaaaaatcctgagggattattattattgctattgttgttattattcacagacacatccaacagccattgtctgcctccttatctgtcatgctttctgcacgagcgtcagcctgagcttcaatctgtgtgtatatctgcagcttacgtccttgccacccctccagaacccagtttcatccttgtaggtttttccgaagcaggatttgcacaagtggcgtgttttcttaagtatttattttgcaggccatttactcggcatggctatttttacagtgggtaaggagcaaggctaaaaataacttagctcataaccagacaggttctgcatttgacatttacgtggaattcatttgcatctcatttgttcgcctttctgttaacaggtagaatgtaagaaagctcagccgaaagaagtcatgttccc

SEQ ID NO: 56184 - DNA, 574 bp, Homo sapiens
  misc_feature 13, 502: n = A,T,C or G
ccgggcccccccntcgaaatacttctagaattaattaacgcggggatgctatttaactagtcaccgaattcccactctaccatgtcatgtaggcacagtttaagtaaagtgcatgctttgccttcttcactgtgataaattgaaatgcaatgttttcatcaatatagcgtttattcccctctttcttacttgaatggaatccatttttaagctttttgattttttttgtcataaaaaaagcacataacattcttcataatagtattgttattcaactttttgtcatggttgaaatattaatgcaatactgaagtgtctataaaccagatttatttattaccacactgacaaaaagtacaactaacagttggcaggtagataacatcagaaaaatccatgctatgaaaaggaattttagtatgaactcatcaaagtaactagtaatttttaacagactctagtgacatatatgcctctctctctaactcaattataaaccctntgagggcaagtgttatgagtgagttgtgttcctccaaaattcatatgttgaaagtctaacctctagtacctc

SEQ ID NO: 56185 - DNA, 610 bp, Homo sapiens
  misc_feature 524, 555, 568, 584: n = A,T,C or G
cgggccccccctcgaggtacttctagaattaattaagcgggaccagcaaaaaatcaaagtaatattgtcatacattcctgctaagtataatatgaaatgttaaacggctcagagctaacgaatccatggtcttcattcagttggcttgtgaagtatctatccttgacttgcccttcactgctgtccttattcactttaaagctttgttcatctacatagtaaaacctatttattgaattttgagtactgtcttgaaggctttgacttcacaaaagaaggtacaatgataatttctcttaggaggatcctaactttaattgaagctgccaaaaacatgcatttataaagccagctttctaaataatacctatcatttgaataggattttctgttttcaaagtgctttgacatgcattgtccatgtggctacacggaaaaagtaccaggtaaagtggtaccatttcattcacagtgagcagaaaaatgatcagacctgtatgcacagcagttctagaatagattgngctggggaagaacttagtggtgtcagcctangctctttgaccangctatcatcggttcanatcctagctcactcagttgctggctg

SEQ ID NO: 56186 - DNA, 544 bp, Homo sapiens
  misc_feature 99: n = A,T,C or G
ccgggccccccctcgaaagtcttctagaattaattaacgcgggaggaaggtgttgcagtgagccgagatcacgccactgcactccagcctgggcaacangtgagaactcaggaaaaaaaaaaaaaaaagagtagcattgtctaaaagagcaagcaagtctgggtggaggaaaatgcagcaaggaatggatcaacatgccagaaacagaaaacagacagaagaatggagatatctatgaaaagaggaaagaaagaaacacaaggctatacgtgttgttcaatgctccaaaaaattttaatatgctgaatgcactcatgcatccatcatccaattaagtatccacaacttaaccacttaataaatattgaagcacccactgagtgccaaagtatttttctagaacaatggctctcaaccaggagggattttgttccccagagtcattgacaatgtcattgacatatttgtcacaactagggtagggagtgctgctggcatctagtgaatagaaaacaaggatgctgctcaacatcctccaacgcat

SEQ ID NO: 56187 - DNA, 521 bp, Homo sapiens
cgggcccccccctcggggtacttctagaattaattaacgcgggcccaatttgattaaactgtgtcttcaatctcttcatgtggataacatggagctcacaacagaaacagaagaactgtcatctcagcttttccttgttcatttgtgtttgcatttttaatatgatctttaattcagtttctttgcaagaatctttttttaggcacactggtaaattttcatgttgcacttactgcttatttcaaaggctccattaactatattatctagttttaactaaaataaccttcatgaaaaaggccaaagaaaatatgaactcaacagtagatatatgtgaatgggagaccagaagatattaatggaagcagaagcacacatcttgttgaagaggagaaaaatcaatcaatagaaactgactcagaactgacacagatgttacaactgtataccacatgttcaaaaagtagacatgagtgacataaaaaggatcaaacagaactttctaaagatgaaaatgggct

SEQ ID NO: 56188 - DNA, 605 bp, Homo sapiens
  misc_feature 586: n = A,T,C or G
acttctagaattaattaacgcggggagtttttaaatatctggaatgatataaaggagtatctttatgatcacatatatttttaaatagttattttgtgtgtttcgtattcataatataataatgtaatggctcttcattattctccagataagatccaaaacttttctcataatatacaaagtttttctgcatatgccttctatgcatccctccagcaacatctctgcctaaccaccccccttccccatccctgtttaccctccagatattctgtagttcatcatcgcctgtaccagtggttgtcaaactccggctggacccgaatcactgggagggcttgataaagccttcatttctgagtctcatctcaaagtgtcagattcagtaagtctagggtaggacccaagactctgcatttaaaacaggttcccaggtgatgccagtcttgctggtccagagaccctactttaagaaccactggactcttaatccagcccgaaatccttttctgttgctcttcatttttttttttcctgaactgactcctgcttattcactaggtttgagtttaggggagcctcctgngggagccttttcttactcc

SEQ ID NO: 56189 - DNA, 600 bp, Homo sapiens
ccgggccccccctcgaaagtcttctagaattaattaacgcgggggattttgttaatttttcttggtagattcttttattctgatcttgattaacagtaacttagctgcactttcacaccaaacaggtcttggaatcggaaatgatgctagttaaaatggtgaatataaagttggatttagtaaaaggtaacaataacttgttattaaaaagtttcaaagggataaaggcttgaaacctcagctatccagtttcatataaattatttacaagtctacgtgataatttgagatgggtcttaagagaggcagaggaatcctagggagggggaagtgaggcatggacaggcagagggactgcactattcaagggcatgatggagagaagtacgtgcctggatttccaatttccctaaggataattttacaccagatcttctttattttaaaaatccaatccttttccttaataaccccatctgtccctgataccaccatttttttctaccagtctctcaggctagaaattttgtggttatctttgcctcttctctccttcatcctgtaaatcctacctgttgggaatacattactgtccttcct

SEQ ID NO: 56190 - DNA, 473 bp, Homo sapiens
ggccccccctcgaaagtcttctagaattaattaacgcgggtagatgatttctagcaggcaggaagtcctgtgcggtgtcaccatgagcacctccagctgtactagtgccattggaataataaatttgataaggtggtgaaaaaaaaaaaaaaaaaaaaaaaaaaaaaaaaaaaaaaaaaaaaaaaaaaaaaaaaaaaaaaaaaaaaaaaaaaaaaaaaaaaaaaaaaaaaaaaaaaattaacaaaaaaaaaaccccccccccccccccgggggacccccaattcccccctaaaaggaatgttaaaccccccccccccccccccctttttaccacccgggaaaaggaaaaacccccggggacccaaaaaaaaaaccgttggaaaccaacccccttttcccactttgggtaaaaaaaaaaaacccccccccaaaccccccttcaaaaatttgcccaccccgaaagggaaaaaaaa

SEQ ID NO: 56191 - DNA, 525 bp, Homo sapiens
  misc_feature 27: n = A,T,C or G
cgggccccccctcggaagtcttctagnattaattaacgcggggaaggggcccttggcccaggtggaattaagaaatctggcaaaagtaagctgttccttgtgcctgaggagatggtgaccctttatttcatctgtatttaaacctctctattccctgccataacatcttttgccacgtatagctggaattaagtgttgtcttggagctgttgtacatttaagaataaacttttgtaaaaaaagaaaaaaaaaaaaaaaaaaaaaaaaaaaaaaaaaaaaaaaaaaaaaaaaaaaaaaaaaaaaaaaaaaaaaaaaaaaaaaacacaaaacaaaaaaaaaaaaaaaaaaaaaaaaaaaaaaaggggggcccccccgggggggggccccaaatcccccaaaaaaggggaattatcaccccccccccggccccattttaaaaaactgggggcagggaaaaaaccggggcgtcccccaaatattggggggggcaaaaacccctttttttcggaggggtaaaaaaaaaaa

SEQ ID NO: 56192 - DNA, 615 bp, Homo sapiens
ccgggtccccccctcggaagtcttctagaattaattaacgcgggatgaataaaacaatttcaggttaactattgtgaagttgaaagctcataattaacaaataaatgctgaacccctacaaatagcaagaagtctctattagaacctatggttgatgaagatatcactcacaatgcttttaacctttgagatgcttacaacttacttgggaaggcaaacccttcatgtacagaaagttaacacaggaaagagctgccaattagtgagataacttagtataaaggaggttgaattgagaatcattatgtagattctaattctgacttagccacgaactaccttaatgaccttaagcaagttacaatctccttgggccccaactggtcacctacttatagttaacatttattgaatgctcactatgtgtgccagatgtcttacacatattctctcatttcatcctcaaactgaagcaaagtaagtttaagtaactcatccaggattatactactagtatgtggcagaggactcaaccttgtattctgaaagttaaggcagtgtcagaatgatgtatatgtgtgcatgtgtgtgtgtgcgcatgcacatttgtgtgac

SEQ ID NO: 56193 - DNA, 595 bp, Homo sapiens
  misc_feature 7: n = A,T,C or G
ttctagnattaattaacgcgggcataatctagatagagctacacagtagccatgaggacacatggatttataaatttaaattaactaaagttaaatgaaatcatacattcagttccaagtcagaccagccattttcaagtgcttaatagccacatgtggccaggaatagacaggatactttcatcattgcagaaagtcctataggacaacactgatctaaagaaattcaaaaggacctgcgttcctcggcttctgaggagatctgaaaacgaaggcccagagggaaatggaaggagaagcagggcagagcttgaaaagtaatcgcattggaaagggccctgactgctggcttggatgccttgtgtaattaaagttctatcccaacttcttaaggaatgagtctcgtattaaatgactggctgtctgtagtgtcactgctgaggtagggagagaagacaattagggacaaggagtagtgttccatggaaaacacgttagctatgagtggcagcagcaaaaggtctcagaagtgagagaaatggacccaactaggtttgcaacaagctgaaacctgtaaaggctcatgtcagctggc

SEQ ID NO: 56194 - DNA, 604 bp, Homo sapiens
cgggccccccctcgagagtcttctagaattaattaacgcgggatagtaataatgatctatgtttaattgggctgacaaagtctcttcttttatactttatttacaaccttagactcctactcaaactgaccccttttaggagcctgctttttctaaaagcacaagaatttagtggtgaaggaaatacacgtattaaaggctttctaggattctctgcctcaaggtgttttgctaatgtgtaccagaacattcttgaaaggagaaaaagaaaagagaaaggaattctttgtaaagagaagaatctgcctttgggcacttttagcacaattatctattaatctgcaacctagttaagagaacgggaaataacatgtattgtgcatggtgctttcaataacaacagctaacatgcatctgaacatttactacattcccggcactatggaaatcttttctaatttcatttgctcatcacaaccaccagagaaacagagaatgatttttatgaatattatagagagagagaaaactgagacttgaagacattaagcagcttgcccagagtcacacagcgagtaaatggttgagccagaatttgaatcct

SEQ ID NO: 56195 - DNA, 431 bp, Homo sapiens
ccgggccccccctcggaagtcttctagaattaattaacgcgggcccgggtggagccgccgcaggtgcagatcttggtggtagtagcaaatattcaaacgagaactttgaaggccgaagtggagaagggttccatgtgaacagcagttgaacatgggtcagtcagcagccatccacactgatgcaagaccctccaccagcaattacaactctgaagactcagatgattgttagcatttttttctaataaactgtttttaaaattaaaaaaaaaaaaaaaaaaaaaaaaaaaaaaaaaaaaaaaaaaaaaaaaaaaaaaaaaaaaaaaaaaaaaaaaaaaaaaaaaaaaaaaaaaaaggaaaaaaaaaaaaaaaggggccccccccgggggggacccccattccccctttaagggaggctattaccccccccc

SEQ ID NO: 56196 - DNA, 518 bp, Homo sapiens
  misc_feature 10, 23: n = A,T,C or G
ccccccctcnaaagtcttctagnaattaattaacgcgggcaagatataaaatatctcccagtaccaaaacttgtcaaaaaacacagctaaagttttctcacttttcctgtctttttcactactgagaaggcattagggatggaattacctgagcatgcagacctgtgttttatttgcaataggtgaatattagcatataatattggtgtatataatatttcaagtgactataactgaaacagaacaggaccaataacaatggtagcatgttgacttatgaacatgaaaggtagcacaaacatacactggcacttgctcatgtgcattcacactcaaacacacacatacagatactcacacacagatacacacaaacacacagacccactgagtctgctcaacaaaatagctgagttccttgagattcccaaaagagaaatgagtcactgtggttaaccaaaattttggtctttcctctgtgcccattaattacttaactagcaatactgcaatcttat

SEQ ID NO: 56197 - DNA, 482 bp, Homo sapiens
  misc_feature 28, 107: n = A,T,C or G
ccgggccccccctcggggtacttctagnattaattaacgcgggatttttaattcatagataccctatctaaagttacaacagagtattactgacttggctgcatttngaaaaaaactattcagaaatactcacattgaaacttacatccctcatttttgataaaggcttttgtgacagatagttagttgttttccactatgttcttccttttgtccacaggaataaaattttagctggtcacttagccacccagtgagagaatacattcctggcctcccttgaagttgttgcttggtgtggaccaatggtatgtgagtggaaattaataatgggcacaacttccaggtcatcttcaacttaaaagacaactactctaggctgggcacagtggctcacgcctgtaatcccagcactttgggaggctgaggtggcgggtggatcacgaggtcaggagatcgagaccatcctggctaacacaatg

SEQ ID NO: 56198 - DNA, 571 bp, Homo sapiens
  misc_feature 9: n = A,T,C or G
acttctagnattaattaacgcggggcttaggaaaaggtagtgagagaacttggattctaggtaaatttttaaagtagatttcctgataagattaaattagacatatgagagaaagagaggggaggcaaggatgactctgaagccttgggtctcaactaccagaaggatggaacgatggtcaagtgacatagcaggcagagcaatttttggagaggagaatagcagttagcagttcagtttcatatacactaaatttgagatctctatcagactgtaaataagatgggttttattacacccaaatttatagatgtaaataggaaaaaaaattgatcattcaaagtaattatctagaatgaaaagaaaccaattgccagtttaagtcagtagtcttcaattactcttctttttgaaaacagaaacaacaaaagctggctatgtataaatgcattataacattacacttttaaaagaatggatcattatacatagatttttactttagaagcaaatgaataggtttaagtactctatatttatgtaagttactcaaacaacaatgtggctcttt

SEQ ID NO: 56199 - DNA, 546 bp, Homo sapiens
ccccccctcggaagtcttctagaattaattaacgcggggttgttgactgactcagtaactttctagtcatttttggttattcaagagaaaggtgcctgcttaatttggctcagttcaaaacttcattctcaagtctaattcaaaagtaccctttttctatttccagagaaatagaaagtaacagagtaacagagaccaaatgtgtctttctacatttatactcaaggatttaaaagaaaaaaactaataagagaaatggaagatataaaacaactatttgagatgtctaggggtaaaatgtacaatctctgaagtgaaaattttgctgcatttatttacttcagaaattgtaaattttggaagtaacagcagattaggtactgtagaagaaaagtttagtgaatctgaagacacagaaataggcaccgtggaaaccagagtacacaaagaaaataatctactaagggaagtcctaaaatcactgctgctttctgcctagaggcattttccagactacagtgaaagaaagaggaacctaggaattct

SEQ ID NO: 56200 - DNA, 587 bp, Homo sapiens
  misc_feature 10: n = A,T,C or G
cccccctcgngaagtcttctagaattaattaacgcggggtgtaacagtatatataggaagattatcaaaaaactctttggctttagaaggaaaaccactagtctaataattgtctctaaatgtgcaggtgacaatcaggctgccatatctaaaatgttactgtctgacatcaaccaaaagatgccaggaaaccgttgatagttaaactcaaactgcaagaaaatattaatgctattcccaaaacacagcacagctcatcacaaaccagggtcacatgaaagccacagtcagttactggtgttattcagtctctttatgccaattaaaataaattgcctaggtttgttgtaatagttaagttctgggtttaaaaaaaaaaaaccaggaagttgtcacattaaggcgtaaaataggactgcaaaaatcagcattgtgcgcaaatgaaagaaaaagatgccttaatatgttaaagtgcagttcctctttgcctaaagaggaaataactagtctaaatcagaggacaacaattttcgtcttgggcaatgctaggagaataaatcagtgaatgacacgggaatacaaacaga

SEQ ID NO: 56201 - DNA, 304 bp, Homo sapiens
ccgggccccccctcggaagtcttctagaattaattaacgcgggcccgtgggctgtgtctggtcaagaatgccaatgaaggctggatgctagaccggaatcaaagctggcaccccctggtccaagtcttaaactggatacgaaaacacacctgcacatagtatatactacgctcatctaggatcgcttgctgaaacagacaggtcgtcacatatttactcatcaaactgcatgatgggtgcagaagctgccatatcaaggttgcctttctatctgtgagcacccacatttcttctaatgatgata

SEQ ID NO: 56202 - DNA, 498 bp, Homo sapiens
  misc_feature 157, 158: n = A,T,C or G
tgctctgaaaaagcccattagtggccaggatccagtttaaggttttgggtagacaaccctgattgaaaagatctcccttcttctcccgttgctgtactcctttttctaacaaaatctataactggataagctttttccattttttttcggggggacnnccacagctttacatgcccacccttagacataaaattaataccggctttcttactgattaaatatttttctctggtcaggcatcttttactgtttaatttctggaaatgattaaaatgtgtgaagctgatgtatccaactataatgcccatcgttagctcctgggtacctatgcaaaatatgctgtagagagctggggctagaaggattatattccgtttagattgtagtagggcatttgttatttgttagtgaccccttctgggttggaatgtttatttgaatttatgaaattttacatgaagagtagttttggaacggtttggtttgttgtgactctcc

SEQ ID NO: 56203 - DNA, 313 bp, Homo sapiens
gcgggctactattcccagacttgagttaaattctcagttaatccccgaacattctccttacacaaacatgtcctttatacgaatcataaacaggaaaggctttcaataagactaaagaagcctagtttgtcctgtgtgaaatctggctaaaattacaacagaacaggttaataactcccaacagtacctgaggtgagaggggtactccattcttgaaccaacgatacgtgggtctgggttttccagtaacctaacattcccatcggagagggctcccactgactaactgagtatcatgacaaagagtctaccc

SEQ ID NO: 56204 - DNA, 603 bp, Homo sapiens
cccccctcgagagtcttctagaattaattaacgcgggcgcctgtaatcccagctacttcagaggctgaggcaggagaatcacttgaacccagaggcagaggttgcagtgagctgagatcgcgccactgcactccagcctgggcgacagagactccatctcaataaataaacaaatataaatacattaaatagaaataaaggaaactccctggagcagagggaagagtctcaggaaagaggagagaagagcccctgccgcagcacaggcccagcagccggaggaaaaaccacatcaaacaacggcctcaagaagcattcagagaagacactgcctcgagtgaggtaaaactagccccagactacaggctgcggtggtgctgccttgtaggaatcacactgttcccaaggtacttagcctcctcccagaaccaagctcaagaatattaaaagaaacacaaaaatattctgctctaagaaggtgaaattcacaacgtcaagcatctaataataaaccaggccaggcgtggtggctcacacctgtaattccagcactttgggaggctgaagcaggtggatcactcaagcctaggagttcgttatcag

SEQ ID NO: 56205 - DNA, 582 bp, Homo sapiens
  misc_feature 37: n = A,T,C or G
ctgggataccggggccccccctcggggtacttctagnattaattaacgcggggtgtcaacatgattatatgggatgaggtcctggtagtgtacatgcatttgctcaagttctaggatagcgatcgaaactatcaccagaaatatgctcttcttgtacatctaatatattgttccaaattatgatgctttctcagcactattcagtattattgtgagtccttgctgattaaaaaatctgtattcgtctatcgtatgtataaaacgttaagcacatgctggcttgtcaaatataaaagcgactgcaaatatttgtttgaagaaatgaaaactctgaatcatcaatgctgcagccaaactggaatcatacagaaactgaatttgttgtctctattctctcatatcgcaggcctctgctgtgattctgaatgtctcccctgaatctgactgcagattctccatacccaatctacctacaggttttcttagacaataaaaatcatacggaagttagcatacatgtatacatatacatatgtgcatatatgaatatgagtatattacatgtgtatataggtaatatat

SEQ ID NO: 56206 - DNA, 447 bp, Homo sapiens
gggccccccctcggaagtcttctagaattaattaacgcgggagaatagcttttggccagtggatgtgctcttttgagaaagtcaattctgagctgaaatttcatgttggaacagtttcctctataagactcatcttgaaaggttcccgcagaagataaaatgtcatcctcacactgggcctgggcagtgcgcacttaactgggagggggcacaggcacctcagaacttaactggttttccaaactctcaatctcaaaaaaaaaaaaaaaaggcgggcggggggagcactttcagtgttgatgaaaccaaatgctcgtaacctgggaccaccgcccaacacctgcagtccagccttcccccagggttgacagcatcagcctctggaccctgcagttgcagttcatttctgcgcagctctaatcgttagaaagttctgccttaccggct

SEQ ID NO: 56207 - DNA, 573 bp, Homo sapiens
  misc_feature 41, 514: n = A,T,C or G
aagactggggtaccggggccccccctcgggggtacttctanaattaattaacgcggggtggtttcataagaaagaactagatgcagatcctgccttcagtaaatttcctgtcttaaaaagcaaaaacaagcattaaaccggtatctctaatataacacagacaatgaaagagaagcatatatgctcctggaatccagacgggaacagaacatagatctagaaggccaggaaatcattcctgagtgggttctggaccgggagtggtggatcatgcctggctaatttttgtattcctcggtagagacagggtttcgccatgttggccagactggtctcaaactctggacctcaagcgatccacccgcctcagcctcccaaagtgctgggattacaggtgtgagccaccatgcccagcctccaactgttttataatagtactcagtatacattacacaatcagtaaatatttgctgattataaaataaagagaggcaagaaacattacataagactntatgctcatcctacatctggaatccattctttccgttatatgttcactcacatatatac

SEQ ID NO: 56208 - DNA, 588 bp, Homo sapiens
cccccctcgggggtacttgctaaaattaattaacgcgggggttggtgcaaaagtaattgcggtttttgccttgaaagaatggcgaaaaccgcagtgacttttgcagcgatctaataattgtcttctggtccaaccttcccttggagataccagcaggagttacaggaccattattgttcctagacaaagaattaagaagagttaggaacatgcacagttacccacaagggacatttgaatcccacttgccctcccttcattttctgctcaagagataatatataatagtaatcaccattatttcatggatgcctactctgtgttgaccattgtattgtaacaactacagcatcctaactaccctatgtagttggttactttatcctattttccccattttttttatatgagaccttgacaagtccaagaataacatggacttgccagggtctcatctaaagaatgaggaaaataggctaaaataacacagtggagctgcacttgaacctcagtccatcagactcaaaagccagggttttctcagctctcccttagttacttccaacatggtgcattcagagatgatgt

SEQ ID NO: 56209 - DNA, 585 bp, Homo sapiens
cgggccccccctcgaaagtcttctagaattaattaacgcgggactactgttccaaaaagaattccaaccgaccagcttgtttgtgaaacaaaaaatgttcccttttcaagttgagaacaaaaattgggttttaaaattaaagtatacatttttgcattgccaaaaaaaaaaaaaaaaaaaaaaaaaaaaaaaaaaaaaaaaaaaaaaaaaaaaaaaaaaaaaaaaaaaaaagcggccaaatttttttttaaaaaaaaaaaaaaaattcgggccaatttttttttttttattttaaaggggattaaaaaatttaaaaggaaaaaaaccttaaaaaaaataaacgtttaaaacaccatgtttcctaaaaaagaaataaattcttgggccataattttaaaaaaaagggaataaggtcccgttctttatttaaaaatttaaaaaaaaaggccaaaaagcttaattaaaattttaaaaaaaaagccaaaaaagccccatttaacccccttttaaaaaaaaaggggggccacactaacattaaacttttagaaaaagggggtaaacatttaaattaaatattttttggtt

SEQ ID NO: 56210 - DNA, 592 bp, Homo sapiens
ccccctcggaggtacttctagaattaattaacgcggggaacaggatagattaatacaacactgataaatgatacatgtgaagcctatggtacaagtttgaatttgaggcgtcgcacaagaattttaagtatccacgcatcccattacagcctcagacctccagaaattactttgttaaatatccatgaaggtcttcccgggccacatgtgtctaatcaatagggggtttactagacaacacttttcagaaggaaatatgtgaaggaaatacaattttattaacaattatctattttattatcttataaatattcaaaggaaatctttgttaattactaatatactttcctaaatgcaatacacctcatttacagactaaaacacattttagagtctaaagtagtggttctcaactgacagcaattagcaatgtctggtgacttttttggttttcacaactggaaggtgctactggcatctggggggtacaggccagggactctgctagacatcctaacatgtacataacagctgcatacaacaaagaattatccaacaccagtgtcaatagtgccaaaatatgaaacccttg

SEQ ID NO: 56211 - DNA, 583 bp, Homo sapiens
cgggccccccctcggaagtcttctagaattaattaacgcggggggtggcttagaatttactgctagaaaatgaggattgtggattttattttacgtaagagatgtgttgctttctttgcaagagaaaaaatatcttggacccaaagaggacttttctaaagagatagagatggctcagtaaaagcacacctcattactagaaaaacaacccaaaacatgtatattattaagagtgggttaacagtctcatttttacatgtaacaaagcaaaagtaaaattttaactccactgagagagccacttaagtggttgtagtgaccagatgagaacatgtcctggatttaaaaaaaaaaaaagttgtagtgaaaaaagttgtagtgaaaaaaaaaatagttgtagtgaaaatctttttgaaagtacaaaatgagaaatgagtctatcttttcagagttaatattcaccaccacgtttttattcttactttgctataaaaattgcctaggcagtttgagaaataccagagacattagaggcctgagtcacagagtaaaccaaaaaaaaaaaaaaaagcggccgccaccg

SEQ ID NO: 56212 - DNA, 599 bp, Homo sapiens
gggccccccctcggaagtcttctagaattaattaacgcggggtagaccctaagagaaggggacagatgactgtgatcagatttaggctagagggtgtctaaaacgtggctctagcaacccatatgtgctccgcaactgatgtgacagttcaccatggcctcagatcttgtcttctagtatgaagaatgattttgaaaacccaactaagatggaggaatggttgctggcatccacccaacagcatgtactgagccatcctgagtgacatatgggaatttccagtcccttcctcaaggagactatgatagtataaattcagacgctcaacacctactcattggtgctatctgcatgattgcttagttcaaggatctggggacacagggtccctttgctcatgagctgacactctagacaggaagcccaataatgaagtggagctattaatgttttatattagaaaactcagaagtgctaagacaagacagtgtcttagctgtaagacactgatgccataagttttagcatcatttttactctgtttatccgccagtggggttgacccttgggcaattccatcacgtggacctcgtttctga

SEQ ID NO: 56213 - DNA, 447 bp, Homo sapiens
ccctcggaagtcttctagaattaattaacgcgggtgtgggtgggtggggtgagttgcagaagggaatgggtcacttgctcctggttaaaatagcctctgatactccagcagattcaacagagatctgttgtgagatctgcaacagaatgtaagggctcttccatagctctcattctaattaaatgtgttaccaattaattcacttaggatgcttacagcagacagaagcataggtatatgcaggttaaaataaaagcagtaaggccgggtgcagtggctcatgcctgtaatctcaccactttgggaggctgaggtgggtggatcacctgagctcaggagtttgagacctgggaggtagaggttgcagtgagccgagattgcgccactgcactccatcctgggcaacagagcaagactccatttcaaaaaaaaaaaaaaaaaaaaaaa

SEQ ID NO: 56214 - DNA, 515 bp, Homo sapiens
  misc_feature 28, 52, 470, 471, 472, 473: n = A,T,C or G
ccgggccccccctcggggtacttctagnaattaattaacgcgggggacaagnaaaattatatatagcaggggagggaaaagagacggcaatggggattaatatcaagatcttgtcctaactattgtcaatttactttgtaaaaattttggtctgaccttgatagcccttcatccttatttatggagaagagaagggaatgcaagtaatctttctcaattatatctccatatacagagagactgggggattttgctgacaaaggcaaaaggtggagtctaagtttcctgttaaatcttagtaagtcagcagcagaacagtgacttgtgctcttaaaccaacaacaaaattctgtgggaaataatctcaatctttaacaacttcttcctaaccctaactaaaggagtctgcaagatttatgaagatcctctagtttttctttctccagtatgctctcagacacatggcactnnnnttttttttttttttttttttgagatggaaaaaaaaaaaaaaa

SEQ ID NO: 56215 - DNA, 609 bp, Homo sapiens
  misc_feature 31: n = A,T,C or G
taccgggcccccccctcggggtacttctagnattaattaacgcgggagatgtcaatagctgagagaaattagtttgaatactcaagcctctagagtttggcttccataatcttcaggtttaagtaatggctcctagccaagaagtaaccttaaaaaaatagcaactaaattctcatctcctatcaaagaagcaggcatttagcaaacaaaaataaatataactatataaagaaaaaaggacttcaaggctatgctccaaatgcagtcagaggttggtgccttgcaggttaagaaagaaatgttgattgactggaattgtttaggaaaggctacccttttcgagtcacagtaagactaattggaaaagcaagacaaccacccccctaccaaacgcgcatgcacacacacacagacacacacacacacacacacagacacacacacacacgcagacacacacacacacgcatgcatacactctctctctctccaggatgaaaagcataagtagctcaacaagacaaggacagaaggcccaggccatgggcctggccatgggggagtgtgcctggctgacaccagcaccacagggaaaaaaatcagctggga

SEQ ID NO: 56216 - DNA, 354 bp, Homo sapiens
  misc_feature 9: n = A,T,C or G
acttctagnattaattaaactcaaatctgactgacagaagagagtcaaagcctgccaaggaagaagaagcagggtccaatatcatagcaactgatttgaaatattaggtagttagacactagggaaaccctatcagcccatctctgaggaatgctttaataatttagacattgacgagaacattgagatttccactgaaatgaaggtgacacacataaagtgcaccttggagcccatatctaagatttgtttcagcccaaatcagtcctgttgccattggcagtgattacagcagtagtattgtgattttttttttttttttgacagtctccctctgtcaaaaaaaaaaaaaaa

SEQ ID NO: 56217 - DNA, 597 bp, Homo sapiens
  misc_feature 559: n = A,T,C or G
ccgggccccccctcgaaagtcttctagaattaattaacgcgggcccttggggctccatggttgctggcatctctgggttggataccaccacattctccttgtccagatgctggtgccaaaggcagaggacagttccagcatgcccagatcagcacagagccatggcaggtgtggaatccaaggtggtagtgccagtggagtgcagcctactggcccgagtgggtagagtgagccccatggtgagcctggagcccggcgaggctcaggcagggtactgctggctgtggagatttctggcaggtgaagcggcatggaaagaatcttgtgtcagtattctgtatattatagtgtaaaaatataaatattatatgcatagtctattcattctaacttgataatataaatatatgtacatatttcttattttcagatttatttggtttttccttttttcactcgatttgtcagcatatgcattttattagcttagttttaagaattaacattttggatttttatgtatttctgctttctaatttgtcaatatttcctttaattntattatttctgttcttctctgaagattgctcattgttg

SEQ ID NO: 56218 - DNA, 615 bp, Homo sapiens
  misc_feature 27: n = A,T,C or G
cgggccccccctcggaagtcttctagnattaattaacgcgggtggaaaatcgggaggacgcagctgacctgagcagcgccatccagtggctggacctgaccacagcacatggcagccttgggaacagcctgcagtctctggtgtcaccaaaacagatcacacttggggccaccaaacaaaccttaaatttaaacgaatagaaagcatacacagtatgctcccaaaccaccacagaattaaactcgaaatcagtcacagaaagcgatcgtggaaagaatgcacgcgagggccaaatgggaagtcttgggaaatctagaaacattttgaactgaatgaaaatgagaatagaacacatgaaaccctgtgggatgcggctaaggcagggcttctattagtaaggaagaaaagtcccaggtcaggaatataagctttgcccttaagaaattacagaaagagtggctgggcgcagtggctcatgcctataatcccagtactttgggaggctgaagcaggcagattacttgaggtcaggagttcaagaccagcccggccaacatggtgaaaccccatctccaccaaatacacaaaaattaaccaggcgtggtggagggcgca

SEQ ID NO: 56219 - DNA, 468 bp, Homo sapiens
  misc_feature 14: n = A,T,C or G
ggccccccctcganatacttctagaattaattaacgcgggtagatgatttctagcaggcaggaagtcctgtgcggtgtcaccatgagcacctccagctgtactactgccattggaataataaatttgataaggtggtgaaaaaaaacaaaaaaaaaaaaaaaaaaaaaaaaaaaaaaaaaaaaaaaaaaaaaaaaaaaaaacaccaacaaaaaccaaaacaaaaaaccaaaaaaaaaaaaaaaaaaaaacaaaaaaaggcccccccccccccggacgacccccaattcccccctaacaaaaggagctttacccccccccccggcccactgatcaacacctctctacctgaaaaaccccggcccaaccccaattaactccctttgaccaacaccccccttgccccaactggataaaaaccaaaaaccccccccccatcccccctccccaaaatttcccccccccaaacg

SEQ ID NO: 56220 - DNA, 564 bp, Homo sapiens
ggccccccctcgaaagtcttctagaattaattaacgcgggggagtcaatttctcagaaaactcttctgccatcgcaatgctcttcatattttgacaatatctacagatcacaggtgacaggagaatatggaaggttctacataaaccctaccatatcaagaaaataattttaatacagaactgattattctaccagaagactttcattgttactgatgaaatgaaaaacatatcaagatcaatcaaaataaccatctttaatataaaactaagtttatagactgtaagttcttactttgtcctcggggttccaatggagtttctgttctaaatcagtcccaaaattgccactgtgcaaaactgatgagcaagtcagcactataaaaacataagtcaaggaagaatctcagagacgatctcagagaacaaaaatcactttacagtctaaaaggattactcacacatttattgctaaggtctaaacccattttcttaaagacttaatgttacacagcagtggtactgtaaaactaaaaatgtgctgctcagagggtcacaacaaaa

SEQ ID NO: 56221 - DNA, 444 bp, Homo sapiens
attaattaacgcggggacaaacagcttaaagtacaatttcagtattattaactatatttcagttttcattaaattgttttttgcctaagtgtggcttctttttaggacttactataggtcattcagaactaagacaacagagccaacggaaattcaaatttttcagttatttaaaatatattgataatttgttaccttatataatccacgcacaccttcatacttatatattttcacaagtgtatcaaacattcctttatattgtcggtgtggggagttaacaacagcatcatactgtaacataaggcgagtttttgttacccataatgggtttgtaatgcagagggtcatggctcctaaaatgagatttcaataagattattcagcatacagatactttcgcacttatgacaacccatattagaaacagtacatttatgtaaa

SEQ ID NO: 56222 - DNA, 492 bp, Homo sapiens
ccgggccccccctcgagagtcttctagaattaattaacgcgggacttaaaacatttgtggcactatggaggtcacctgaaacgcctcatttacattaataaaacttgtaagaataaatatgaagcaaaaaatagaaaaaaatgttaaaaaagaatgaaattcaccattatatttaaacaaaatttatatacgtatatatgtatgcatattatatatgtagcaatattaattatttggagaggaatttaattttataaacattgttcaaataagcctagagatattttaattgggattgctttgtataatgacaaatcatctatatgtaggacacaggactccaatcctacagtaaaaatgtccttccacttaatagatactagaacattagctaaagagcattgctctttttctcaaacaatgtttcagtgttaataaagtttcactcaaaagtgacacgtacagctatgctgccagaaaaaaaaaaaaaaa

SEQ ID NO: 56223 - DNA, 606 bp, Homo sapiens
  misc_feature 28: n = A,T,C or G
cggggccccccctcgaaagtcttctagnattaattaacgcggggccaaatgttaccaactacttcaattttatcattcgtgacagagggatttatatccactttttttcttttaattttgtcttttcttcaaacatttttattaaccctcatacattttgtgaaagtataaaaataaaagcctgctttacattataaaactggttgcatgacttggctgaaaacagaatgtaaaagataagtttaatatttagcacaaagcagttagtgttttgatgttaatctgagccgacctatttaacattcctttaaggttttatggtgctcttttcccttgataaggtatgaagctaattaaaattaaaactcattactgattttgggcatataaaaatgtattatatatctaccttaagggaacagttacaaactagggtagtcctgagctacttttattttttaacatgttgattggaggtttacgttttgatgaaactgtatgttatcactatttctctggaattgaaactacaaggtcaccatttttctcttctttgagaatggaaaggtaatcattagatgttctattcatcaacatggaatgttt

SEQ ID NO: 56224 - DNA, 600 bp, Homo sapiens
  misc_feature 27, 39: n = A,T,C or G
gactgggtacccgggccccccctcggnggtacttctagnattaattaacgcgggcacctaataactgtcaatttaatggtagaaatttaatgtcagaaaagtttggtgcagttctctatgtcaaatcatagactagacagaggcattacttagtgatggtcacgtcaaacaaaatattacaccaaatgtttataaaaattaacaaatgattttgaaattattataacttacactataatgtatatcacttactaagcagttgaaaacattttctgttaatttacagaatataaatcaataaactttattaataaacagtatatgtatatattggttcacataaagcatcaaagcttttggaatctgtgagtgcttagggtggggagttagaaaatgctgatatgaattatatgtattgatgcatatgggaatttcccaaaggtcctaatgttcctggtttccattatagatctatgttcagttaacctcaatgtataattcacactttatataaaagactaatttttcaaagtaataggatatattacattattgatttccttcatgaaatgaaagaagatatactaaaaaaaaaaaaaa

SEQ ID NO: 56225 - DNA, 583 bp, Homo sapiens
  misc_feature 12, 94: n = A,T,C or G
gccccccctcgngggtacttctagaattaattaacgcggggcctgacgtggtttcagacatcttacctcatgttgtttacagcagactcatggngaagatatcattatttccattttatagggaagaaaactcaggctttaaagatgttaaataacctgcctaaattcatgcagcttgtatggaggagaactggaatctaggggtctaacattttcctacaactttattttcttataacttgtgttaaatacaagtctataacttgtgttaaatacaagtcctcaatcccttatcctcaattgttatatcttttttttatttaattttttcagacagagcttcgctctcttccccaggctggtctcaaactcctagacttaagtgatccgcccgcctcggcctcccaaagtgctgggattataggtgagagccactgtgcccagctcacgattgttaaatctaagggctctgaaaatagcaagtttttgtataattgtttcaatggcaagacctggcctggactgatgtgaagccgctggttgttgttattccatcacttcagctgcagaaatactgtgtttt

SEQ ID NO: 56226 - DNA, 595 bp, Homo sapiens
  misc_feature 37: n = A,T,C or G
ccccctcggaagtcttctaggattaattaacgcgggnaactgtaataataactgcgtttacttgttcatattgggtttttattgactaaaagcttccagcctctttttcatgcagccaggataacagtgataccaaaacctatcaaagattagaccatcctacccccaaaatataacaataggccaatatctctaaaaaatatgtaacaacagaaaaaaaagctaaataaaatagtagaaatagaatctagcagtgcattagaagaaatatatactttgtccaggtagggtttattccagtaatccacagatggttcagtactaagaatgatatacttacaattaatggatttcatcccatcaacaaatctatatgatcatttccatggatttcctaaaatacgttagacaaaacccaccatccctttaaaattgtttttaataaaacagaaatgaagaattccctaactggatgaagtagatttatctcagctcaaaaataaatagtatgtttaacgtggaaaggataagattaactccatggttattagcatactaaatattaaatttaattgaattaacctctggcaggagc

SEQ ID NO: 56227 - DNA, 532 bp, Homo sapiens
  misc_feature 26: n = A,T,C or G
gggccccccctcggaagtcttctagnattaattaacgcggggataggtgggaaggtgggtaaaatttgctgtttctgaaagagttggacaatatcaagagctttacagtgttcattagtcaattctcattagcccaatgattccatttatagacatgtataatcaaatacccaagcaaagatttacattcaaatctgtttactgaagttctatttataatacaatgcaatgaacataatagtatatatttacacgtaatgtaataaacacaaatattcaatggtataaaaatggtcaataaatcgtggcatagccacagcttagagtacctgtttaatgttctcagctattttaactttgctaaataatatttaaagatatgcggtagtcccccttcatctgaggaggacctgttccaagacccccagtggatgcctgaaacctctgatagtaatgaaccctatatatactgttttttcctatacatatttacatatataatacatacctatgattaagtttaatttataaa

SEQ ID NO: 56228 - DNA, 562 bp, Homo sapiens
  misc_feature 462: n = A,T,C or G
cccccctcgagagtcttctagaattaattaacgcgggaactgacaggataaatactctgctaatccttcatttgatgaatgatttaaacttagagaggttaagtaatatgctcaaaggttgcatagctgataatgagaaggccaggtctgaattctggaactctcatgttagaatttgtactcctcatcaacagtcaatactgtttccccaataatgaaaagaatcattagatttaaattctaattaattttgccacagattttagcaaaacctttattagtcatttttttaggcagcacaggtaagatgctgaaagataagaagttataaaaagaacaagagagaaggctcagatcacagacctcctcttggtttggagaaaatttattagaagcatgaagaaggatgaagattatttgagaaaataagcatttttactttgaggcttctcttagtaattntaacaggaatgctttgttttaatagagcaatttttaggttttttttttttttaacatataggaatacctactgttgatcagattttcatgacaatttaac

SEQ ID NO: 56229 - DNA, 528 bp, Homo sapiens
cgggccccccctcggggtacttctagaattaattaacgcgggggtggagaaagtaaataactagggaacagaaaggagtcttcatagcatattcttaagagccgccagaattttaaaccatgtatatataattctttccaaacatgctcatttttcaaaatatatgatttatgaacctaaaagcttctgattttgaattttagaaatattcgtatcgcctatccttttactcacaagttttctaaacatcatgtcaaagtttgtcatctatatgttgaaaagagcacacaaagtaagaaacaaaatgttgacatcattctttttgttttcaaactgacctcaattcataaacccggcctcttttacaaaattattcaacagttgaatctgtgaccagttaattagttgtgaatccactcaatcaaatcatctcaattcactatttccttttttttttttttgagatggagtctcgttctgtcccaggctggagtgcttgcagtggcacaatctcggctcactgcaacc

SEQ ID NO: 56230 - DNA, 605 bp, Homo sapiens
cgggccccccctcgaaagtcttctagaattaattaacgcggggaatgaggtaattcatgtttccttgggaatgccccacagagttaattgatattattatcattgttctgttttttactattttagaggtgctttggaatcatagaaggaatgtatggctttattaggaagggttgtattagggaaagcataaaaaaataggtaatgtactaaaaacttattgaaagatggttagacgatgcctcatggccaaaggtaagccatgctgaaaagaagttgtactttatttcgtaagtaataggggaaagattggggtttgaagtaggggttcagcaatctgcatttaacaagcccaccaagaaattctgatgcatagtaaaatttaagaacaattattatatgtacatatttatatagatgagaactattgttatatatacatgtttatacagattaaaaatgtacagatgttttaaataatattttaattctgtgtgtttttttacttaataatgtagtctagcaagtttctgatcagtaaactcaattttctcctacatgtattgtaaaattagaaatattttctactagaaaaaaaaaaaaag

SEQ ID NO: 56231 - DNA, 587 bp, Homo sapiens
  misc_feature 527: n = A,T,C or G
cgggccccccctcgaaagtcttctagaattaattaacgcggggggagtattagcctagaaattttacttagcattggtagagattaggagaataaataaaatttatctcactaacaaatacctctgtatgatttctcaggagcgttaacgtcatgaatcctgtggctcaccacttcatgtctgaaggttagtgagccaatgactcatccctcaaggctctggatttgtttacttatttagcaaggtatagcagaaaatgacagcatgcccttaacacaaagcttttcctctagtactcttgtccaagaagaggtaataaaatttactttaaaaaactactcagtaactgaatagtttatcaaggcattccattgagaagagaaatctttggggtataaaaaggaaggaaaatgttgtgaagggcatcactccctttttcaatagagaatgtgtgaaaaagtaaggaaacttttttcggttacttttcttcctttcataaatgtctcatgaggcggaaagaatactgncaggggagatattcttctttatacatttccataaattctactatttgcagtatattctgt

SEQ ID NO: 56232 - DNA, 616 bp, Homo sapiens
  misc_feature 584: n = A,T,C or G
ccgggccccccctcgaaagtcttctagaattaattaacgcggggactctaacaaaaatatgtctattatcagccaaagtagattttaaggcaaaaaaaaagcattactaaaatagatatgtcataatgataaaaagtttagttctccattatgttatagcagcctttaatttgtatgtccgtaatattataacttcagaatatgtaaggcaaaagttgacaaaaccggaaggaataatagaaaaatcatatgataaataagagaacagttgtacaaaaaataaaacccagtgaagatatgggagagctgaactacttgatataataaacttgaacacctttatgttatttttttctgcttggaacactttttcatatttcagactgttttcttatttaaaacctttctttaaatagaattttcacattaaagcatccagtttttttttcctttggtctggagtagaaaatctttcacacataaaacttcaccattagctaagataaattcctttttgtgtggaataacatgattgtaaatataaactgcatttcacaaataacatggatttgaatacttctcantgtttgagtcatttacaaactgtgtaaactgg

SEQ ID NO: 56233 - DNA, 583 bp, Homo sapiens
ccgggccccccctcggaagtcttctagaattaattaacgcgggactgtaatatatgaccttttcccctttaggcgtttactgaagcatttgaaagggaactaagaagacataaagttcaagagaatattggacctctaagaatacatgagaaggaggaggaaacagtgggtaaaagtctccactgtaataaatgccatttgatcagatgagtgggaagtacaaagatgatctttttaaaagaagaaggggccaacagggccttaatcatgagctctttaggaaaaggcaggatttcatgtcatgatacaggacttgcttattaataaggcattcaggttgctaaaatatgacgagacatggttccaaagaaaagtagtgtttttccgctacttaaaacttcccatcagtttttaagggtttatttgacttagcagttcaccaggggcttaaaaactactctaggctgacaaaattaaagaagagtaagagaagacagaacatcctagttggctatagacctggttgtaagaaacccaaaacagaagttttcattgcctttcaaaagaatggttacagaaacta

SEQ ID NO: 56234 - DNA, 434 bp, Homo sapiens
cccccctcggaagtcttctagaattaattaacgcgggggtgggggacacagtagccaaaccgtatcaacagtgttcactgcattttacagatcgggaaactaagcttcagaaaatttaagtgaattgagcaaggacgttgttgctaagtaatagaggtaggattcaaacccaaggagtccaattccagagctttcagtcttaatcaataagctttttttttttgttttttgggtctcgccatgctgcccaggctagtcctgaactcctggctcaagcaatctcttcgcttcagtctcccaaagtgctgggattacatgcatgaccactgtaccgaattccaataagcaatattttttaaggacaaaaaaagaaaagcaggacaaacagaaggtcaggataggagtcaacaatatggggggaggaaaagaaaaag

SEQ ID NO: 56235 - DNA, 594 bp, Homo sapiens
cccccctcgagagtcttctagaattaattaacgctggggttgggcagggcaaagaatgagaaaaatgttggtcaaagtgtacaaactttctcagttatcatatgagtacgttctggagatctaatgtacagcatagtaactataattaataatactgtacggtatacttgaaagttgctaagagtacatcttaagtgttctcaccacacaccaaaagaaatgtaaccatgtgagatgacagatacgttaataaccctgactgtggtaatcatttcacaatgtgtgtttgtgtgtgtttatcaatacatcaagttgtattgatatatacagttgaatatatacaatttatatttgttaattatacctcaataaagctggggagaggaagatccagatggaacatcaagagaagaagaataaaatatgtgaaatgaaaaattcactagatatgaagagataacagaaatctccagcaacaaattaatttaaaatagaacagaagaaaaataaaaggcggcgcactgaagaaccctggagatgcagacacaaaaatgaaggttatatcacccttctaggtatttgggcaaagggatc

SEQ ID NO: 56236 - DNA, 371 bp, Homo sapiens
cggggccccccctcggaagtcttctagaattaattaacgcgggcaagaaagtaatgtacaaaaggtgcataaaataagagattcaagacaaaaggcaacagaaggaaatagccaagataataagtgaagagagatgacaggtaacaactgtgtaccagactggagcagaagagaaggccccaggaaaactttcctcagttagattgatttgatagaataattcatgaatgaagacattggggaaagattcagacaattgttagaatgtttagcattaaataagtgaaaaatacatcaaaaactaagcaaccttccttctctgcatccctaaaaataagataattattaactccagagaaaaaaaaaaaaaa

SEQ ID NO: 56237 - DNA, 443 bp, Homo sapiens
  misc_feature 17: n = A,T,C or G
ccgggggcccccctcgngggtacttctagaattaattaacgcgggggatatgaaatattttatgtctaaccttaataagccccacctagcaatgcagggctacaatgatattgaattttaactagatctagagtacaacctctaagtgtagattcaacattaaagcaaaatacatgcaactagttttgaaattttgagtaaactgacaaaggagtacttttaaagtaaaaaaatcaaggaacacccaatgttaaaatataacatttgaaaaacatttcaaaaataatgaagctttaaattggcaaggtccgaaccatcaacttgcttcaatttgaacacttaacgcaaacaagaaatgcagcagctgtcagatgccgttagtgattcaactctgaaataaaaggttccaaccataactcttaaaaaaaaaaaaaaaaaaaaaa

SEQ ID NO: 56238 - DNA, 611 bp, Homo sapiens
  misc_feature 28, 538: n = A,T,C or G
ccgggccccccctcgaaagtcttctagnaattaattaacgcgggataccataagagcatacatgctatcaaacaccaaatttagcagtccaggtatctctggagtaggcataggaaaggtactgtgatcaaggacacatttatatggagccttatttccatttgtaatgttttgtcctttgagtttggtgttgttgctatcagtatttgtattactatgtatattatcgtgtaatgcaatgtgttagtcttcctttatattatgtttcatatttctttgtctgtttatattttataaataaacatttttaaaataattgaaaatgaggctttataaaaaagtctcttggaaaattatctttttaagtggaattagaggagaagatagtttctagaggggactgtggccataagatgggtttaatcagttatttaggtaggtagttttaaggacaggtaattcaaatcttgaatccaaacttttatatacccttgtgcaagttctttaaattctctaagtcttaatttcttcacagaanatagaaattaaaatgttttctatgtgttctttgtgagattaaattacgtaaagcacctaagagaccagtgact

SEQ ID NO: 56239 - DNA, 430 bp, Homo sapiens
cccccctcgaaatacttctagaattaattaacgcggggtaccctagggattcatctgttttcttcacttccctttgcatctgagatcctgctggaaaccacagcaacctgtatccactattaggaggtaaaaatcaataaaatggcccattcatttgtgttgtagctcaaaaaaaaaaaaaaaaaaaaaaaaaaaaaaaaaaaaaaaaaaaaaaaaaaaaaaaaaaaaaaaaaaataacaaagtacaaaggaaagaaacaaaataaagaatgcgcgggaatctttgatcgtgcactcatatgatcaccggaaaaaaacgatgagcacaggaaaaaaaatggtgggtcagaaaaaaatggcccgagagagaatcctcttttttacgcatgaggaaatatcgaaaagccccacacttatccactttgtgggg

SEQ ID NO: 56240 - DNA, 557 bp, Homo sapiens
  misc_feature 535: n = A,T,C or G
acttctagcaattaattaacgcggggatctaattttgatcactgcactcttttaaactaaagaacgctgatcaaagtgaccatttggagcactggtactctgatgaaaaagtttaaaaaatttcatagttgcttaacatagcagtaaaaaggccaagaaaaaagttagtttattaaatttcttttgaagatgtccatccacccaatacagagaaacagaattaaataaaacagtagtgattctgattgatcacaaacaactatctcttatttctagtctactttactgtggaataatctgatgcagaagatcataaattctttttttaattccttttttaaaaaaatttcattcagttcaagcagtctctctctttttttttttttttttaagagatacaataacaaatacatacggcccaaaccaggccagaacaaagaaaaaggaagttatattttaggtggtggactctcatgtgactttctttacttctgttataactgtcatgctattttccattcagtatgtgaagcanttagaaaatataaaatcttggc

SEQ ID NO: 56241 - DNA, 604 bp, Homo sapiens
ccgggccccccctcggaagtcttctagaattaattaacgcgggcttatgagttcagaagtgttccctcctttccaatttttttgaagtttattttaaagtttgtgaaggattgatgttaattcttctttaaacatttggtagatttttaccagtgaagctatttggatacctgatgcttttgaagaaattaaaatctgtgtttagttttatatgtgtcaagaaccaccatattaatagtttgtgtcttagtttggttatcaccttaatagtttacttatttaaatatctttagagataattcagcttcccaaatgaattgttaaaagatcaaatccatcaataattgacaagctgcaaaatttgcggctttgtctgaccaaggagttatgtttgaaaagctcagttctcttttaactgattaaacccattaactgcacaaaaccattcattcagtagacatttattgcacatccattatgtgttagatttagaggagaaattgtgacataagggtaataatattctaatttgctggtgccagagagactgtagcagcaatgtatgtattcagttatatacctgtaaaagaagtttcttatcacc

SEQ ID NO: 56242 - DNA, 609 bp, Homo sapiens
  misc_feature 16, 74, 83: n = A,T,C or G
ccgggccccccctcgnaaatacttctagaattaattaacgcgggcgtctacaagaatgaaatgctctatttggngatttcttngaaaattattaactaacgtttgagggggtgataaaaattttcagcagtgaataggggtaacaatgaaactagactgaccaagagttggcaactgttgaaggcataagggcacacagggctattctttaatctgtctgcttttatataaatctgaaattttccataatacagtttttaaacagtatatacttagaagaaactaaatatataaatgcagactatggctactataacagaactgtagctaaaatgtccacctatgttgcaaaatatttttccaggactaagcctttctttagttttttgaaaataattaatggtaatagtttctgagaaataatcactcacataaataaaaaaatacaccaataagagatgaatgctacccagcctgaccaaaatggtggaaccccatctctactaaaaatacaaaaaattagccaggcatggtggcgggtgcctgtggtcccagctactcgggaggctgaggcaggagaatggcgtgaacccaggaggcggagcttgc

SEQ ID NO: 56243 - DNA, 582 bp, Homo sapiens
cccccctcgaaatacttctagaattaattaacgcggggtggggtctagaaatctttagtctttaaagttccatcgattattttgacgcacagtgaaatttgggaatcaccaattttctgtacaatccataaatctgcatgtagtgacatactggtaaacctttattttttttgtatactaaaggaccagcagaattgggcccatgccaacatgtcacctctagggcctagactgccctcacttttgtttttttctaggttggtttcttagcactaccaagttgaacatgaacagtacgactcctgcctctaggaggcagcttggaatattgtcagtactggattttagagagcctggcttctgtgaatgaactcttggccttggttcctcatctgtaaaaagattttagagtagccttttgcctttaagtgtttaccataaactagataaaagagcattcccctttatctgcaacccctgtattagtgttattttcatatatagtccacttttcattaactgcactccaggtgtcatagctgtatcagccagtgtctctagactttcttcagtttgctataa

SEQ ID NO: 56244 - DNA, 594 bp, Homo sapiens
  misc_feature 32: n = A,T,C or G
gtaccggggccccccctcggaagtcttctagnaattaattaacgcggggggatggttccaaaagcagtcactcacaatttcttccttactgtgatgcacacagcaaaacagggaccacacatgctatcctttgttgaatttttcccttctggctttttcttcatctttggatttagtgtttccttttgttttgcaggccattctcaggatcaagttaaggtatttacctgcgttggcagaatatttcagggacatctgtcctgaagcagtccagtggtgacaattccctatactattctttcagtttagacttatatctggacaatctaggcaaggaactatcatttattgatcccttaccatgtcaaaggtcttcacattctaactcatctcatctctataacaactctaggtattatgacttgtgttttatagtttaggaaactgaggttcggagtagttaagtaacttatccaaggtcaaacagcttctagatggcaaaacctggacaggagtttatgactgcccaaatccaaagctcttaactctctttattctctatcacactattttctaactaaaatgttagttttt

SEQ ID NO: 56245 - DNA, 548 bp, Homo sapiens
  misc_feature 35: n = A,T,C or G
tgggtaccgggcccccccctcggggtacttctagnattaattaacgcggggaatatagggttttacacaatcactctggtgcacaatcatcttgatatggtttttaactaatttcaatcccagctgaacaccacctggatttatagacaactacagagcttttaagaatcatgagaacaagctaaaatgaaagataaattgcttttacaggacgcagaccaaaaggacttgaggccagtgtttccaacacatcatgaaatatatcatctagcaaacttcaattacttctttttgaaacaaattgtgtcccagtctgagatcacattttatgaatattctcgtaagttttacttatgattggctagtttaaacataaggaatttttttctttttaatctgttagatattgtgaggtgtcaacctaagaggctctgacacatctgaggaagtctggttttaagtactgttgagttctggaaagggacagattaaatgctaaaatgtttggtcatgttacacaggcagcagcgcaatcagagaagcagatg

SEQ ID NO: 56246 - DNA, 495 bp, Homo sapiens
cccccctcggaagtcttctagaattaattaacgcgggataaaaaattagctgggtatggtggcatgcacctgtagtcccagctactcaggaggctgaggtgggagaattgcttgaaccaggaggcggaggttgcagtgagcggagatcgcactactgcactccagcctgggtgacagagtgaaactccgtctccatttaaaaaaaaaaaaaaaaagtctgtaatttagttaatatagtgccaaagttactttcctgttctttataattgtactgtgataaggtaagatgttaacgttagaggaagcatggattagaattacaaacaccttctttgatctgtttttgcaccttttctataaatctaaaatgtattcataataataattttaaaataggcattaggaaatgtacttccagcacagcatagacagctttgttcaaatcctagagtcatcacttactagctgtatgattttgaaaaagttacttaacct

SEQ ID NO: 56247 - DNA, 590 bp, Homo sapiens
cccccctcggaagtcttctagaattaattaacgcgggggttgtagtgagcccagattacgccactgcattccagcctggatgacagagcaaaattgtctcaaaaaaaaaaaaaaaaagtattattaaacagtatcttatgaagtcaacaggaattcacaaattttcattactctccagttttcacagctgtcaattagctatctttaggagggagagtgtaggctgatgtaaagaaggaccaaaaaattgttcattcgattttgttaaaactttattaaaagattattctgaagccataggcttatctgagactaataaagctatgatgctaagtttagagttctccctgagaaaataaggttcatatttcagcttatttttattatcttcctgccaacaacctcatccagcctacaaaatagggtgctattctgaatacaaaacgttattttataaattttgatccaatatgcagaaatgatattggacttccaactttattattctatcaaagatgctattcttaacactatctcacaattttgtcaaaaatatttaggagattgatgaaaactgcggcccagtgtca

SEQ ID NO: 56248 - DNA, 604 bp, Homo sapiens
ccgggccccccctcggaagtcttctagaattaattaacgcggggatgaagattctcattcgtgcatctgaaatacacaacacagtgcacagcatataaagcacaacaattaccagtatggccatcgccattgttcttcagtagagattgatgggaaaaccgacaggccttggagtataatggtgaagaacctagaacatggagccaggctcccccagttcaaatcctagctctactgcttgttagttgggtgaccttatttaactgtctgtgcctgttttcttgcctgcaaaatgagcaaaataatagtacctacctcctagggctgctgtgaggactaaacaagtaatatgtacaaagctttatacagtatatgcaagtgagtgcaatagagcaccaggcactattctaatgatttattatacaaataaaaataagatgaatcaataaaggacctggggaatagaggtatcctttaacacaatcaaagcaacagttcctagtatctatagtatgctttcatagccactatgttatttaatcttctaatggaaacccaagaaaaacagaatcccatgatgtaaaactgagacctaaattctaag

SEQ ID NO: 56249 - DNA, 577 bp, Homo sapiens
acttctagaattaattaacgcggggatcacctgaggtgaaggtcgggagttggagaccagcctggccaacatggcgggatcccatctctactgaaaatacaaaaattggccagatatggtggtgcacgcctgtggtcccagctactcgggaggctgaggcacaagaaagaactgcttgaacccgggaggcggaggttgcagcgagcccagattgtgccactgcacaccatcctgggcaacagagcacgactccatctcagaaacaaacaaaaatttacaccttaactaaaggtatggatcctcagtgccacctacctgccctggagtgggcctggaatatctccggatatgagcttctttccattttcctcttctgttcttctaatttaaagaaaagaaaaagctgttcatttgtttcatcataccaaatttctaactcctgaatatgcaaacatgaccatattgcctataacctcccagtgactgaggcaggatttcaaacacatttatcacatctccctgcctccagtttcaggtatcgtttgaatttctggaaaagacaagaatatgcaacaaa

SEQ ID NO: 56250 - DNA, 596 bp, Homo sapiens
cccccctcggaagtcttctagaattaattaaaaagggaagcagaaaaggaatttgtggctataggtccaaattaaatagctataaatggaccacagaattattttaggccctttgggaaactctcaagaagttcagtgatctacttcatctggtcatacatccaaggctgactcaccgagagaatctctttgctagccccccggaggagaatggtgcaggccttggggtctttgcagtcagtgatgaaagtaaagtattcatctccaattttcttgatttccaacaggcctgctcctgttccaacatcatcttctctcagttcctctggtcggctgactatccgggccccacaggctctaatggacggaagaggtggggagaatcagatgatttcagatacttgtacccatttccctagtctctagggtctgtagctagggataagggcaaaagtggattgttggaaacatcacttaagaggtcttgcctgtccggtgaaaaagattttcagggggccaggcacagtggctcacacttgtaatcccagtactttgggaggccaggcaagaggattgcttgagcccagaagtttgag

SEQ ID NO: 56251 - DNA, 590 bp, Homo sapiens
  misc_feature 512: n = A,T,C or G
ccccccctcgagatacttctagaattaattaacgcgggggttgggtgtgtgtatactttgatgatgaagatttcacacctatcaagaagcaacagatgagtctaagataaataggctggactatttttattataaaaagtaatagcaaaggtgggaggtttttgtgaaagcctgcaccttgatattgccaacttccaaggtatttttaagcaaaatggaagggttttgttttaatcactttattgccaagctgagttttacccccatggtccctagaaccttctgagtgcttcccagtaaagttgaaagatcaaatttattctctttgtaggtaggtgaacattcacacacccagacatagctatatatgttttatatacctaaatatgaaatatacattttacagatgcttcactcgctttctttctgttcacagaagcccaaaaatgtatgtgccaaagggacatttaccatgggcttcaatcacgctgggtgaaggagaggggcactgntatgaggtgtctggctatctgaacgataggcctagctactgaacccacatttacatgcctggcattagttcacatgct

SEQ ID NO: 56252 - DNA, 609 bp, Homo sapiens
ccgggcccccccttcgaaatacttctagaattaattaacgcgggaagtaacttgcctaaggtcacaaagtaaataaatagaaagacggatttgaccctggcaacctgactccaaaacctttatcctaggctacctcttgttaatactgaacttagcatataagtgtattattgaagcattgtatgtgttgtgattatttttcacatctgacctctaagagtgtaagcctcctgagggcagaggcccttttattaatttttgtgtgactcaaacagtgaatgatttataaggggcatcctgtaatgttttgaagaacgaataaaagaatacatgaataaatgccatttggaaatgtaacatatctctaaagaatggaagattgtgtggggaataggtgttcagaaaatgttatgaaaattcaaaattcttcctacagaagcaatccttttccattggtaggagggccctctattctaggatcagctgtatactgaccagcatcagacatacacttccactctactctagcaaacttgaaaaaaatctagatgaaaaatcattcaattatctgcatgttaagtggctgtccattatgtagatatatgacga

SEQ ID NO: 56253 - DNA, 607 bp, Homo sapiens
  misc_feature 535, 560: n = A,T,C or G
gccccccctcgaggtacttctagaattaattaacgcgggtccccatcacctgcctatgcgtccctgaccgctctcctctctcctgatctaaggtgcattggctcttggtgcaggaggtccctctggcgctgtgccagccaccacacacctgctcccacacggttcccaggggaggctgtaagagtaggtacttacagacagcttattttcctgccatgtttgtgactgactgactgactctaggttgcatacccagcagccatcctcttctgtacccctcaccccagcttctggggagatctcctaaagggcgtggcctgggggctccggggcgtggcctgttgctctgagggcatggcctgagctccgagggcgtggtctaggcctcattcatctgcagcacctggcatatcagcttgcgcagctccctgcgtaagacccgtggaaagcagtgagcacgaggaggacagagtgcgggtggcagcgagaggcacctgcggaggcagttctggtggaagagccacacacacctcanaggtctgtcacagtctgctcctttnttttgtccgccacacgtaactgagatgctcctttaaataaagcgttt

SEQ ID NO: 56254 - DNA, 416 bp, Homo sapiens
cgggccccccctcggggtacttctagaattaattaacgcgggggatatgctatcactgactttgtgatagcaagtctaggtaaagcttatatttcaaaagtaatataagctttacctagatataaaataagttcagatggcaaaataaattgccctcatccagacctgcaagctgacaaaagaaaaaaagaatacttatacactgatataggcatttgatttgggattagtcctgaattccaaatgcattgcaaaagaggaggtctccaataacaagttcttaaattgaggcagtaattaatagcctaccaaccaaaaaaagcccaggagcagatggattcacagccgatatctaccagaggtacaaagaagagctggtaccattccttctgaatctattccaaaaaaaaaaaaaa

SEQ ID NO: 56255 - DNA, 612 bp, Homo sapiens
ccgggccccccctcggggtacttctagaattaattaacgcgggggggaagtccaagatcaaggcgagagcaaattcagcatctggtagggccctgcttcctggtttatagacagccaccttctcactgtgtcctcacatagtagaagggacaagcgagctctctggggtctcttttgtaagggcactaatcccattcgtgagggttctaccatcatgacctaagcaccttcctaaggcccaccttttgaaaccatcacattggggatgaggattttaacatgaatttggaagagactcagtcaattgatagcatcatgttaataggcaatccacatatctctaacaccactaattacaccagtgagaagtcttttctaacctccattgagctaatttacaaagcctttagagttgagggaaggtcaagagcttgaagtggctgtttctagaatgatgatgccttctgataagcatctttcaagtgacagcagaacatctttggagtacgtaagtagggtaaggtagggttagggtcgatcttagctcctggaaaataggttaaaactgacagccatatactgttgcctatgcaacactctttcaaagtaaat

SEQ ID NO: 56256 - DNA, 505 bp, Homo sapiens
cagcactattgatctgtactctcacgacttcatcatcctaccattcacattcaattctaaactgatcgctagttccttgcatacatggcactataacctatctttatgtctttgctcatgttctctcttattcagctccttttcaaaaatcagttaattgtctctacctcccagaaatgcacttggtcctcctcatacattggattctgatggtgtcctacccagatccccttcactgcacactgtaccattacccatcatctgctgggaatgttggccaataatagctcaattacagtcttgtttagagatgttcttcagccaaatgagagccagctttacctacagcagattacatcaaagtacaactagcttgtagctcacattcagtccactactagtttttatgaataaagctgcatggaaacacagctatgcccatctgtttacatgttgtctttcacactgcaatggcagagcagttgcaacagacacggagtgaact

SEQ ID NO: 56257 - DNA, 486 bp, Homo sapiens
cgggccccccctcggggtacttctagaattaattaacgcgggggggtgatccagcttagcatcaaaatcaggaccagaatctgggcctcctgactcctagtgccatgtatttgcatcttgaactggacttccttcccttctctgcaattgcaacctgagaagcccaggttaggtccaatcatcattgctttttgtctgtgccctcctatcctacatcagggaaagatatgcttcaccgaagcacctgggctctttcatttcattttggacagttgcaggagtttgttatttaaaagctgcataaataatgagcagacacagtcagccctgtttagccatggctaaaccttagaagggagtgtagaacaacccaaagtccagcctcttccagatgcaatttgaataacttaaaaaaaaaaagaatagaaggtcactatctatcttcacaagcatttatctgatcatagctttaatacaagctttctg

SEQ ID NO: 56258 - DNA, 468 bp, Homo sapiens
ccgggccccccctcgaaagtcttctagaattaattaacgcggggagggagaaataggaggagacgtccagctctgtcctctcttcctcactcctcccttcagtgtcctgaggaacaggactttctccacattgttttgtattgcaacattttgcattaaaaggaaaatccactgctaaaaaaaaaaaaaaaaaaaaaaaaaaaaaaaaaaaaaaaaaaaaaaaaaaaaaaaaaaaaaaaaaaaaaaaaaaaaaaaaaaaaaaaaaaaaaaaaaggggcccccccccggggggaaccccaatttccccctaaaggaagtcaaataaccccccctcattgcccgttttttaaaaacgtcggaatgggaaaaaccctggggtaaccaaattaaatcgctttgaaaaaaatccccttttccccagtggggtaaaaagaaaaaaggcccgaacaaatcccctttccaaaaatt

SEQ ID NO: 56259 - DNA, 506 bp, Homo sapiens
acgcgggacgcagcctgacggccacgggaaacaagggaggtgagtctatcactgccccgccggctgcctacggtttccccgatggtccccatgtgtatggaggggaccccctagcagagcccaggggtttccctgagttcagggggcaatgctgggaggaagtctgaggaggcctgcagctggagctgaccgcaaggtcacaggagcagagagggcagccggagacagagctgcagagatctgcagaggtgccctcggatgtgcagcagagaactggtcgaggcaaagctgggcgaaaatgacccaaacccacagtggggaagagtcacaaagagggttacaagggacaatcccaaggattcacaccagagtaaaaaaccctcataattcatggagcatcagggactccagaggggtttacctcaacagtggggaagattagcccaaggcctggggttggcaaatgttttctgtaaagggctaaatactaaaaactttttgctttg

SEQ ID NO: 56260 - DNA, 599 bp, Homo sapiens
  misc_feature 568: n = A,T,C or G
ccgggccccccctcggaagtcttctagaattaattaacgcggggtgggctttgagctttcttctagcaaacttgaggtctgtggctggtacccctcaggagcggaggggaactcttgtccatgagatgcttttaaccgtgcgcaataatgtgtagacgcatccaaaatcaatctggcctttagcccagcacttaactcttgggatgaggcctgctttgtaaatgttgataatccagagaaaatgagcttttagattccaaagacagccagatatcttccacttatgcaaaatgcagagaatcatatttaacaaaagatgttctggacaaatatgcttcttgagggatgaatatttaattataagggaaatgataaatcaaacattaatgggaaaatatgtttgccctcaagattcatgattttgatgggtctctggcaaatcttatactatgtttattggggttattttattgctggttattagtttttaattgtttgcttgttttctgctctgatcaatttttgtgtaagccgtgggtctattcaccctcttctctccattcccggnagcaagtccacatctggctgttggatgcatg

SEQ ID NO: 56261 - DNA, 612 bp, Homo sapiens
  misc_feature 24, 49, 50, 563: n = A,T,C or G
gccccccctcgaaatacttctagnaattaattaacgcgggtcccaaatnnccactgcagttcatggccgggaaacaatcacgaaatatctcaaactcttttagcacccactattgtattctgcatgcatgctgtgttcttttagtaatgctaataattacactacatggtatttttatcttagaaaatctatagactgaggaataacaccagccctgcatttttagaaaacaatttaaatcacatcctgttttctcctagaactgagtaaaataacatttaatcagtgctttgagacattaatgaaaagttaagatgatctcctctttaccaatatagttattatgacatagaaatagctcagcttcaagttcttactgcttgcctcttcttctccccagcccccaatttgtatttcttaacctacagtatctggtaatccactttaagaatgaatctcttcaaagaaatttgtccttccatttcttgtcttacctttaaagtgcttttgagaattctcagccggtgtagtttttcattcattacaggatcattacatctttntataaatgatagcttgtattccatctgggttgaaatacgatgttctcct

SEQ ID NO: 56262 - DNA, 505 bp, Homo sapiens
  misc_feature 9: n = A,T,C or G
acttctagnattaattaacgcggggccataaagagcactgcaactatatacaaaccaattcagcgtgggtggcatattgcctgttgtgtgatgggaaaacaaataccaaaatgtataatccctattcacttacaaatatgactaaaatacagggagaatgggagtcagactcatggcagatgtaattatgaagcaaatctggccgtgacatgccaatgcctatagtctggtaggaaggatggcacatatacatagataattattgagaaaggtaaaaggtgacaaaagtaccataaaagaagtacaaataaagctgtatgagaatttagaggagagagactatcttgttggaagtaaaatcaggaaagctttatgtaaatgaattttatgtatgacttggctgttgacatacaggtgatgtttagggaatgaagtattagactgcatttaccttgttaagtactgaaatctattttatcacatcacatttcctcttttttttttc

SEQ ID NO: 56263 - DNA, 510 bp, Homo sapiens
  misc_feature 26, 408: n = A,T,C or G
gggccccccctcggaagtcttctagnattaattaacgcggggagtggagttaggaaaactaggtaatgaaaagttctcttgatcccaggagtaaatcccagggaaggaaggtgtttcagactgattgaaggctaaggcctgaggggcttctcttctgtttcccatttgggattccagaaggaaatcgctagttaaggtgagtcagcagtacaattgggtaggcccagaagaggaaagagagcaaaatagagtagtcaggaaaagagggcccagtttgggcgcctgttagctcctgtgtggtgtgaaaggcactcagatgttcctgcatctctgatggaaaacacagaacctggctcagctgagagacaacagctctgtcatggggaggttgaagtgaccccacagcanagtggagaggaagttgttgaacagaagctgtggcagagactcaaagaagcctataatgctggtgagaactatggtggcctgagtcatctgaggtctgaggtc

SEQ ID NO: 56264 - DNA, 606 bp, Homo sapiens
cgggccccccctcggaagtcttctagaattaattaaatcaaaattaaataaaagtaataatgcaagtaattctgcctaccttccttctttactcaataaatgtaggtcttgtaactagtttgatagtgatgtcaattttcttttccacagagcctctcaaagtctggtaattgcaccttgctgaatgctactctagtacttaaatatattttccacacaagaaaggcactgaacacaagccaaatatatcttatttgatattcagttgaagaaacagtgactttttcttgaacctatagaaaatcctcaccgtgccggacagagaatgtataatggtctccccatcatgataccttctacttacactgactttagaacttaatccctaaccaacaagatgccactattttgtagaatgaggttgtggtaggtataacattttccacaaattcttttacacttctcccctcaagaggtgaaatcctcttccccgtcattggaataagagctggtcttggtgacacgcttcttaaaaacaaaatataacagaagtgatgctacatgacgcccaaggctaggataaaaaggctaatacagttgccactt

SEQ ID NO: 56265 - DNA, 591 bp, Homo sapiens
cttctagaattaattaacgcggggtgacagaaggaggtcagcagtagtaaagtcgggccgagcagaaggggttgccagaccgggatgatatgtgggactgatgggatagtgatgaggggctgctgtggtcagcctacagggtcaatgccatggggtcagtgctcactgccacattgtagatagccatgcccacagcccggtgatcattgatcttctcagtggacacactcttggtctcataagcaaggaagattcccagcagcagtggtggtggtggtggcggcggcggcaggaccttcggctactctgctggagccaatgtggggagggaagggcagacaggccgtatggtaggggaaagaacaccaaaatgcctcatttcaaataaaaaagaaaacagcagtctatacacagttgtttgttttggttcagtacaaacagaataaaaagtcattgcttttgatggtcagcaaacacccaattctgaggaggaggagaggtgatgcccagcaggtggattaggacccccagtggttggcggggtgcctggctttgcggccctctcccaggaggcagagagcacagctttag

SEQ ID NO: 56266 - DNA, 336 bp, Homo sapiens
  misc_feature 171: n = A,T,C or G
aattaacgcgggattactttattgccattggtattattacctaagatttatcatcctttctatattcagtacagaatcagaggatctgtgacagatattttggcaactctttgcaccaatatagagacatcatatagcattacaagcatagtaaaaattatattgatttgntttttttcagggccagcaaaaaatttctcaagtacataagcctaattgaatttcttatgttcagaagactcaaatatttcattttgatacagtgacttacaaattgtttttctagattgagtgctatatttgaagtaaatacagaccttcaaaaaaaaaaaaaaa

SEQ ID NO: 56267 - DNA, 481 bp, Homo sapiens
ccccccctcgaggtacttctagaattaattaacgcggggatgctcctggtttgtccatctactgctttgattccttggatcccacccattctttcactttaagaaaaaacaaataattgttgcagaggtctctgtattttgcagctgcccttttgtaagaagcacttttcccaaataaaacaattaaaaaaaaaaaaaaaaaaaaaaaaaaaaaaaaaaaaaaaaaaaaaaaaaaaaaaaaaaaaaaaaaaaaaaaaaaaaaaaaaaaaaaaaaaaaaaaaaaaaaaaaaaaaaaaaaaaaaaaaaaaaaaaaaaaaaaaaaaaaaaagggggcccccccccggggggggccccaaatccccccttaaggggggttaaaaccccccccccccgggccgttttttaaaaaaggggggaggggaaaaacccgggggtccccaaatataatggcttggaaaaaaatccctttttcccagggggg

SEQ ID NO: 56268 - DNA, 556 bp, Homo sapiens
  misc_feature 434: n = A,T,C or G
cccccctcgagaagtcttctagaattaattaacgcggggtcttcttaaagtgcaattatttccaaaacatttatatccttatatttattacttagctgattatgtataatatttgtaaatattggaaaatgctttaaacaatatatttaaatacctctccacctaactactcctcctcaaagtgtgcttttttcgatcagcaatatcaatatcttcaggacgtttattagaaatacagactctcttagctttgtgccgtggcagtaacctagtcaatgaggtttctccaaggcgcaggtattgctaattgagaaaaaataagaaatacagactctcgagccccacccaaacacattgaaccaaaactagcattttatcaaaaccccatctgattcatacatatattcaatgagttctatatgcttcttaaaatntaatttaagtgatttagacatagactgttatcatcataagggagagagaggaattatcatataggtgctgatatttaaaatatgtaacaaaagtattaaagttctctttaaatctgcatatt

SEQ ID NO: 56269 - DNA, 379 bp, Homo sapiens
  misc_feature 54: n = A,T,C or G
cccccctcggaagtcttctagaattaattaacgcggggtgggagaaggtcggangtataggttctgttttggaggcctgagcaccccaacattctaacaaatactgttgctgcaggacttttccttagttcagctagagaactccggcctgtgtagtgccttcagctaaggcgaacagtgagccgagatcgcaccattgcactccagcctgggggacagggtgagactccatctaaaaaaaaaaagagaacagtgaaaatgagagacaaaagtagctgattcccagcttcaattttgtctataatactaattttcatgaagagcaacataaactccttggagtgcagttaagtccatatctggagtcaaaaaaaaaaaa

SEQ ID NO: 56270 - DNA, 630 bp, Homo sapiens
cgggccccccctcgaggtacttctagaattaattaacgcggggtcatggaagtgatatagtgctcaatttgacaaactgtgaagttcttttttaattttataatattgtcaaaatcctgtgcctcaaataatgctcagtacactagaggtgatctataaatatttacagaataaatgaatagagagctgttttaacaccaatatcagagtactggataatactaaagggaagaaaatgagacaggagcaaaacggataccaaagaggcttcaatatatctgtaatgttttctgccttaaaaaagttaagtagcaacatttcctaagccaaatataattacttacgctaactgtcgtgtccaaaggtggaaataatttttcaagtactgtatgtgttctggttgtacccctgtgataaccacagcagtaaagctatctttttccttctcctctatgataagatgatgtagaaatctttcatcatcatttgtaatgtgaacagaatcagagggctttctgtttctaatatatccactatatattgcctctttatttttctccttcttctcaaaatcttctttagaaagcacaagctcgtgaacatcttgggaatctgcaggtttgcttatca

SEQ ID NO: 56271 - DNA, 578 bp, Homo sapiens
  misc_feature 560: n = A,T,C or G
aattaaccccacactttgggagattgagcaaggaggatcccctgagtctgggagtttgagatcagcctgggaagcagagtgagaccatgacttaaataaaaatttttttgtgttttgttttaatttttacttttctgagacagggtctcgctctccagcctgggtgacagagcaagactttgtctaaaacaaaacaaaacccccaaaaaaccactacagagtcattattctgtctgttgtcagtatcccaaagttcccgtttcacgtataaagtcttcatcacattaatttctaggtaaatttaccatctcccaacatgtagtctctgtaaaaataccagctatagaagttatctgaaagcagctgacttctatgatttctgcctatactttctttctctgtctcctccctcagggaatgctggaagaggagacaggccccagatttgggcaggaagtaaacagttttcaggctgaggccaatctgagcaggaacattccaatatttcttcagctacgttgtcccagcacttcactggttaaccttttatgtccaccatntgtggatttcacagctac

SEQ ID NO: 56272 - DNA, 421 bp, Homo sapiens
ccgggccccccctcgaaagtcttctagaattaattaacgcgggcacctgggcgacaaagtgagaccgtgactaaaataaataaaaaataataatgacaccaggttaaagaaggaaattcagaagataagcttcaacacacaaggaattctatgggggtaagaccacacaccattctgaaaatcccatcttatcttggctttacagaagtgagaatataattttttaccattaggaaaggatccaatagcagcagaaggaacgccagcatatattccatgaaaaccaccagccttactaaatccttggggactctgcagcctggttttaatggtatccagaggaaataatatcaagtcaacagaaacacctgctaccccaccagcctttgaaaaaaaaagagggaagaaaaaaaaaaaaaaa

SEQ ID NO: 56273 - DNA, 598 bp, Homo sapiens
cgggcccccccctcggggtacttctagaattaattaacgcgggagatgagcctaggttaagctgaatcaaggcattctgttattttgccatgaaataaagttatctattttttattctgctagtagaatttattaattttttatgacatgccagttttatgccagtacttcccttcttcttagaactaagtaatgtttttttcatagcaatggtgtaaataatgtcaaaggacaaaccatacttttaataaaactctcttatataataaaaatagttggaataatattttaaggtattttttaaatgaattcttcctcttgctagaataagctacagatctatgcaatgtttaattgatcagtgaattaagttttccacagattaatgagattttctaaatatttgaagtttaactagttttgccagtattccatcttttctttcctagtcatcatagcaaatatcacattttgaggtagattaaaagtaatttaaattatttatttgagagagcctaacaagtcattaagaatatttttagctacatacagattcaaagcttaaaaatactgaatatacttttacttggcatttaaa

SEQ ID NO: 56274 - DNA, 627 bp, Homo sapiens
cgggccccccctcgaaagtcttctagaattaattaaggaaagtaggtatatttaaagctaataatgtttggaaattgaatgagattttgggtttaagaatttctcggattaaaatacttaacctataataaaatggtagctatgtaagagtaaccttccctccagcattctcattcctcccacaccaagaaaagaaaggccatattaggacttatcatctgagtataaattattaatactgtcacaccaagtggaagcatgtgggaatgctcattgccctttagttaatttgtaggattgcttcattatacttttacgtatagtctgttcagagaaaaatattaaatttgtccttccccaacaaacttgatattgtagctgcttaaataatggctattgtattccaagcatcagctgagaacataatactcagactgtgtatcaaagttttgaactttgatatttgtctgtgaagagccttctgtgggaatggtggttgctgaggatggtgtatgatcataaatgttaacctaaatcatgcagtaacttgaccatggaatgttgtctgtgatttctctcctttgcctcatcttgattacagagaggtacagaaagcagtcaacactg

SEQ ID NO: 56275 - DNA, 586 bp, Homo sapiens
  misc_feature 28: n = A,T,C or G
cgggcccccccctcggggtacttctagnattaattaacgcgggtatctagtttgaacatcattaatctgtcctaaatttaagaactttctaaatcttatctctatggtagtccaacatgcagctctttttatcttgatattttgccatttatcattatcttatgtttatacatgtttagccagctcactacccatgtgacagttctcagatccaggtcaattttaattcattctgtatgtcaatattcatgagatgtagcattgaatgtgtttctttactctagccagaatatttgtgttttggtcttctaaacaaactaaatttgtgttgtaaaagatgctattctcaaaagcaaatagaactataaaaatatgattttgccctcataataaaccctttttaatatgttttatactataatgtaaatgttactctaagtgcattctaactgttcagaaatttttaaaataacaaatccagttatatttctttgtaatttttttctgaatttttagctatgaccagataatgattcaaaaaacatatgatatggtttggctgtgtctccacccaagtcttatcttg

SEQ ID NO: 56276 - DNA, 578 bp, Homo sapiens
  misc_feature 9: n = A,T,C or G
acttctagnattaattaacgcgggctcatgtcattcagatgtgtgtttctcttttgccaactttctggcctcttttaatttgctgcttctagtgtactgttagaaagacactaagtaataaaacttgttagttctatgtgaaaactgagagtgataataccatgagtgagaacatcaagaactatacttagtaagacacttacatggattttgtcaattggcttctcagtggctttacttaatggtctcattttctggatttgggctttgttctctataggaaagatgagctgataaatgtttaaaaccaggggagtggacgaatctcaaatttgtagcatttgctaatttccttggtgtaaataatctcaccaggtctgatttcaaactaccattgtggtatcactaaacacagactctgtgaaacacagaattaggaagagacaaacataaatggcctgctccagcacactacttactgtattgaagatactgtctagtaagagacttgtgtaaagtaacctgctaccctggtaacattagcattcacctgaatacttaaaactactagaaatgtg

SEQ ID NO: 56277 - DNA, 550 bp, Homo sapiens
ccgggccccccctcgaaagtcttctagaattaattaacgcgggattctcttttagtaagcttaaggctatgaaaagtataattgatgcatcatcctgtgacagtttataagtgttgaatctgttacgtttgttagtactttgaaaagtattgaaaaactgtttttctcctcatagatggatggtgacagttctacaacagatgcttctcaactaggaatctctgcagactatattggaggaagtcattatgttatacagcctcatgatggtaagcaagccacaattagaaccaaattctcaagttgaagcaagttagaaagtggacatttcattaatatggtgttctaggctacttgtgtctttataggaaaatttacaatcttgtgttacggttcaatgagaaagtctaaaaaggcgtaccattctatttttattagaaatagtcttcaaaagaatgagtccttgaaaagacttttactataaaaatacaccttgtctaaaatctgtacagtttcttttaaaatttgttatcgacttcctgtttaaatg

SEQ ID NO: 56278 - DNA, 591 bp, Homo sapiens
  misc_feature 567: n = A,T,C or G
cccccctcgaaagtcttctagaattaattaacgccgggggagaagtataccttacaaacctcacagggaagtagatccaactgtgcttatgcagatttaccttttacagcatctttgatgggtggggttttccaaggtcactgaggacagtgtaatttaagggaaacagtcaaggcttgaagcctactgttcaaacctcagctcttcagctcatttgctatacgaccttggaaaatcccttcacctccctgaccacctgatctcagtttcctcacatggaaaatgggaatcataatatccatctttttggattatggtcatgtaaaaaagctaacatacgtacatgtctagcatttggagaatgctttaaacacattaagtccaaggtcgcaaaacagcttttgcttttttccttattttcagtgctctgcctttatccaacgttattaaaaaatatatgatgagagaggagaaaagcaatttatatgaagggttaaagatagaaaaggggaatgagacagaagagggaagagctaagagaaaagtgaatgcatagagacagcacanaaggtgcagatgggtaagctagac

SEQ ID NO: 56279 - DNA, 587 bp, Homo sapiens
cgggccccccctcgaaagtcttctagaattaattaacgcgggggaggaaggtgagtaaaaatcacacccagaacagaagggaccatggcaccaagatgttgggtttcatccagacagtgatgagtaggcactgaagagttccctgagaagtgataggactaatctgtgtttcataaggatcaaattctggccacaatgaggaggatttggatggcatgggaaggcaggaagacaagggagaaaacctctatttaccccatcacatattctgcaatggtgcttaggttaaagtatgaccttgtattgttgcacaagaagatccactcacccaacagctaattagcaaagaggcctaataataataacctagatttcatttaatcctcatagccatcctgggaagctccatcttacagaagaggtaactgaggttcagaaaggttaaatgacttgtgtaaaatgtcacagtgagtgaatgacagagtgggacttgcattaaggttttctgatctcaagtccagttctctttctgctgcacgttgagagcaatgagcatttcagactcgactggtcaccctaaattcagt

SEQ ID NO: 56280 - DNA, 604 bp, Homo sapiens
  misc_feature 32: n = A,T,C or G
taccgggcccccccctcggaaatacttctagnattaattaacgcgggacgttgctgcagatttttcagtatcttggtttagtctcagtcattctaaggtaacgaaccataagttacagtctctttggctaaaccattgcttggaatagtgtccatggaaatgttgcagggtggatggaggtggatagatgctcttggcaatggcacctcacgctgcagcggggccatcggtctctgtttgtggaaccctgcgttccccacgtctgagctcctctgcaaactccgcctaactggaggcaagtgtctgtagcagtgtctcagtcggctcagtgctgctatcacagagtagctgagaatgggtaatttataatgattttatttctcatagtcctagaggctatgaagtccaaggtcaaggcatcatcatagggtgaaggcgaaagggcaagagacaaaagggaccaaacttgtccttttataaccatcagtcccacctgggatgcagagccattgtggccgaattgccccttaatactgaggtgatgtcctggcgcagtggctcacacctgtaatcccagcactttgggaggccgagacgggtggat

SEQ ID NO: 56281 - DNA, 611 bp, Homo sapiens
  misc_feature 18, 31: n = A,T,C or G
accgggcccccccctcgngggtacttctagnattaattaacgcgggggtctgtacacatatataatatattatatgtaaaatcattataacatctatacatgtttgtatacatgtatacatattatataggtgtgtatatatgtcacaggtgaaaaaatagataaacacatgggtaaatagatgatagagatatatggtatggtaagaataaaggcatggtaagaatgtacaggtgttgaaaggaatggaacagatggttaaagcaaattacttgctgtgtcaactgacttcaagtctttaggtatttgttgtaggaaatatacaatgctacaaatgtttcaaatgatttattttaatgttgtgttcaataatttattatcacaaaagggaaactccaaagagaataactttatacaagattggtatatttcaagaagtataaagagaaaatataaatgctctaaggaggatagtaaaacttcaactcatagcaaagtttcatttttcacatacgtagttaacttaacatctctctttggactaattttatctgaagaagttgacattttagcagctaaagagctacgcaaatagaaggtgtcaatgaaag

SEQ ID NO: 56282 - DNA, 489 bp, Homo sapiens
  misc_feature 223: n = A,T,C or G
ccgggcccccccttcgaaatacttctagaattaattaacgcggggactaagtcttatgctcctttcataccctatgatggttaacacctgctatgggatcaaaaggtatctgctcaaagacgtaataacaaaaagggttcttggtgctggtttaactttgggtttagacacctaagggagtggcaagggagggagcaagcattctaaatcaaatgcaccaggngaaaaaagcacagattagagcacaggctgcatgggatgtggtaaaaagcaacaaagtgaaaaacttgtgttttttaatttgggctgaatatagttaatatatgtagctcattttgcataaaagcaacggacaatatagaagtacggacagaatcaaactgagaagctgagacaactggacactcttcttagttcttttgtgggtgtggttgttttttttttttctttttgagatagggtctcaaaaaaaaaaaaaaaaaaaaaaaa

SEQ ID NO: 56283 - DNA, 607 bp, Homo sapiens
ccgggccccccctcggaagtcttctagaattaattaacgcgggagaatgctgcttcaacacatgtacagagtgacccagaaagctgcctatctttactgaagcccagagcaagaggcagttctgcagctggtgtggctggagggaaggcagctctgcagtagaggacacaggatggagctgaagcatctgcagcaggtcacggtgctgtgacctactgcagaactgacagttggcaagcccaactgacaaccacagtacagaattccagggatgtaaaaaaaaatctagttttgacaaatgtattggaaataggtcttggcttgccactgcacttctttagagattgaacaactgatcatgggatatgatgtaacaagacctgaaatatccattatgaattgcatgttatgagatctactggaaaatagcatggtatacacagttgctgtagacaagtaaggaacactggtctataggccatcaagctgaagcacgtgctatgggcacaaaaaggttgcatgtagaggtgactcagacctccatggcacctacctccatgcattgccacctttcaacccacaactgaggccctattggtgtttctta

SEQ ID NO: 56284 - DNA, 569 bp, Homo sapiens
cccccctcggaagtcttctagaattaattaacgcggggtaattatactggaaaaaatattttcagtcacaatctgtcacaagaaacaatggacactatataataaagtggtcaatttatcaagagaatatatatcaagaagatactataaatgcatatgctcccaagttcagagcacataaatatacatttataaaccacttgcaacaatggataaatcatacagacagaaaatcagtatggaaagagtggacttgaataagaatgtaaaacaaatagacctaacagacattcgcagaaaattccatccaacaacagcagaatacacaatcttctcaattgcatatagagcattctccagaacagagcatacattaggccagaaaatgagtcttaacaaatttcacaagattaaaatcatatcaagtatattttcctaatacaattgtacagaactagaaataacaggataaaaattggaaaactcacaaatatgtggaaattaggcaagatacttctgcacaaccaatgggtcaaaaaaatcaaagggaagtttgaaaacaattctga

SEQ ID NO: 56285 - DNA, 595 bp, Homo sapiens
  misc_feature 576: n = A,T,C or G
gggccccccctcgaaagtcttctagaattaattaacgcgggcttgattaattactgctgcaaccctgtgaggtattattaacattttgttgatatgggaaataagttcagattaacctactaacttgtccaagtttacatggctaaaaaaaaagatgaaggaggatttaaattcatttctaacttacaaccaaaattttgagctcttttcaccatatgaaactagacagtgtttgtgccattatttgaaaacacagcaaaaagttattgtaactgtaaataatttatcttattcatccacataacacataattcagcaaattttaaaaactgacagaagatttagttgattcatcaaaatttgagattaagaaaaactgtagcctggaggaattacatgagaaaagggattgtagtaggttgaataatgactcccaaagatatctagatcctaattcctagaacctgtaattgcacatttatgtggaaacagagagatgggggatatgatcttgttatgttgatatgatcttgtttgggggaaagtgtcctggattatctggatgggcataaatgncatcatgatagtctgtaag

SEQ ID NO: 56286 - DNA, 614 bp, Homo sapiens
cgggccccccctcggaagtcttctagaattaattaacgcggggaacagactctgagaacagaaaaaataaaaaataaatcaaaatgatgacctgcttaaaacaacactgatgaatctaataatttctgctatttaaacattatggtagttgtagggtaaacagcaggaccagaggtaagatgagagcctggattgtaacagtagctttgggtatggagctgccagtcagccatgagatacatatttaaataggtcttagtggttatctgtgggtgactagttgagaacaaggaagtgaagatctgatgtttctagcttgggtaatcaagaagacagctttgctattaagacaggaaacacagcaggagaaagacttctgaggtgagaaaaaggtgatgagttcagtgattgacaacaaattgaaatgtccataggctatttaggtggaaatgtctaagaagtaattcaaaatgcattcattcagggctgggcacagtggctaatatctgtaatcctagcactcttggaggctgagggacagttattaaaatatggacatcccaacagagaaggtaaacatcttgaaatgtcaaaaattttaagaaatgacttct

SEQ ID NO: 56287 - DNA, 553 bp, Homo sapiens
attaattaaaagaaacagtaagtacagctatcatttattgaacacttactgtgtcctaggcatggtactaaacatttttgttatataatcctcacaataatcccatgaaggtattcccattttacagatgaggaagttgaaactcactgatttgatgtcatgggtctaagatcacacatcagcaagtggcagaagaggagctcagatttcgatctgtctaactgcagagcccatgctcttacttcctaccctctgtggtatcatctcagagccaagcacataaaatgcaagcttttgtgctgctccttttcgtcaaagatgtgtgtcctccagtttcaagggactaaacacaaagtagttccctggaagtagaatcagaaggctttagaattaatttttttaagtcaaagtgcctctttgaaattattgttagaaaggaaactttcattaaatatgtggtgcttgatatataaatttggggtcagagggattaggctttgagaatatgtgtgtgtatgcatgacccagactgtgttgatagccatgatactga

SEQ ID NO: 56288 - DNA, 467 bp, Homo sapiens
ccgggccccccctcggggtacttctagaattaattaacgcggggtgttaggaataagtctcaggtttttggataggctctttttgggggggatggaggtagaattatcatgatgtagttctctctcatgtttcaaaaataatttttcagtagttagtcatgatgtaatatagtacaacacgaataacaacaggctaaaaattaggacaccctgcctttattctattaatactttttgccaagtattaagtgggtagttgaaagagctcaatgaatgtccgtgggcctcagatgtccatctgtaatatctttgaagttctgttatgaattgaatgtttgtttttcccccaaatttttatactgaattcctaagcacaaatatgatggtatttggaaatgagggctttagcaggtaattaggactagatgaggccatgagagaaggaacctcatgatgagattggtgcc

SEQ ID NO: 56289 - DNA, 349 bp, Homo sapiens
cccccctcgaaagtcttctagaattaattaacgcgggcatccgggaggagaggcagggtcctcctgggactgaaccatgtgaaggccctgcatccgggaggagaggcagggtcctcctgggactgaaccatgtgaaggccctgcatccgggaggagaggcagggtcctcctgggactgaaccatgtgaaggcattttgggggtaaacacacaggaataacagagatctataaaggacaagttgaagaggaaaaagtacatgggggtgtgaaggctaggatttatcccaattaaggtgatcaagcccaagttgcccaccacagtgaacacatagatccctaaaaaaaaaa

SEQ ID NO: 56290 - DNA, 491 bp, Homo sapiens
ccccctcgaaagtcttctagaattaattaagcgcgggtgaggagaatttgtgttaaaaaaagaaattgtgaaatgttaataagaatgtaattccttagccttacattgtggaaggactctgataaatataccatttctatttttgaaaaaacatagcacttttctcaaggcagagggacaagtcataattgtcagtcaaaaaatgagaaaagttgtctatctatctgtctatctgtctatctatctatctatctatccatcttagttttcccaaaacagaagattctagtcaacctgagtcagcataacaggaaagtcccctctgttttaaccctatataaagaaagtaactttgacggccaggtatgatggctcatgcatgtaatcccagcagtttgggaggccaaagtgggaggattgtttgagcacaggggttcaaaaccagtctgggcaacatggtgaaaccttgtctccacaaaaaaaaaaaaaaa

SEQ ID NO: 56291 - DNA, 474 bp, Homo sapiens
  misc_feature 38, 74: n = A,T,C or G
ctgggataccgggcccccccctcggaggtacttctagnattaattaacgcgggggattataactttattcaagnatatgaaaggaatataaactaaagatatgcagaattaaagagtttaaacaaataattagaacctaattattctagaatttgaagaatatctgagatcaagaaattactggatatgtttaatggcagaatataggactgttagtctgaaaaactacaaatgaagaaataagcagaagagagctgtggaataccagcaaaagctctaagtctaaatggaatgctagaatgaaagtgatattgaggcaaaatagatattcaaaaaggtaatgtctaatgattttccagaactgaagaaaaactttaaaccacagaatctagcttgggagtctccataaaggaaaaatacaaagaaaaccacgcatagatataccatagtcaaacttcctaaaaaaaaaaaaaa

SEQ ID NO: 56292 - DNA, 511 bp, Homo sapiens
taattaacgcgggatattgtttgaaaaacaatgaatgctagaaatactggtaatggaaataaagtgtttagtgtgcaatcagaaaactgggcacagaagaggaaagaatcagtaagctagaagacaagttaataaaagttattcaaagtggaacacagaaaaaaagattcttaaaacacccagagcagagcatctgagatttgcatatcaaatagtttaacattgaagagtctccaatgaagtagggtctcataatttattaaagaattgatcatttcatctatttttatcattttttatataatactgtcagatcatcagattgatgatttggaactgtagttataatgtaataggcatttaaaatctactaacaatttgcaatgtcctttaagtttgaggttgagtgccacaaaattatcagaccaagaataaaagggcagagatagaaatatatcaaaccataattttttctgataccttgaatatggatttaaagaaacataatcag

SEQ ID NO: 56293 - DNA, 427 bp, Homo sapiens
acgcgggggtggagaagtaaataactagggaacagaaaggagtcttcatagcatattcttaagagccgccagaattttaaaccatgtatatataattctttccaaatatgctcatttttcaaaatatatgatttatgaacctaaaagcttctgattttgaattttagaaatattcgtatcgcctatccttttactcacaagttttctaaacatcatgtcaaagtttgtcatctatatgttgaaaagagcacacaaaataagaaacaaaatgttgacatcattctttttgttttcaaactgacctcaattcataaacccggcctcttttacaaaattattcaacagttgaatttgtgaccagttaattagttgtgaatccactcaatcaaatcatctcaattcactatgtcctttttttttttttttt

SEQ ID NO: 56294 - DNA, 519 bp, Homo sapiens
  misc_feature 488: n = A,T,C or G
attaattaacgcggggtggggatggaaattaaacctaaaatatttgaaaattaaaccacttcaactttacattgtatacaatatcccagtaacagtttaaaacattactgttttaagtaactaataatttcattaattttggctttaaatttaaggtattactttgttactgatttgatatgatgtgaaccgcccataggatacattattcaaaacaaaagacctaatcctgaactatttcctccaggtacagggtattttccatgggcatctcaccccagtccagaatgagtacattcactgaatataaattttacattagactagaaaattaaaaaggaaataagacaaaatgctgaaaaaatgtatccaaaatctaactatttgggttatctgctctttaactaccataatcaatgttttatggttttttttgtttttttgtttttgagatggagtctcattctgtcgcccaggctctgtctcanaaaaaaaaaaaaaaaaaaaaaaaagcggccg

SEQ ID NO: 56295 - DNA, 396 bp, Homo sapiens
ctagaattaattaacgcgggtcctcacagcccaggctgactgactttcaggtgatgcaaactgagaggactttatggtctgtctgggtaatttaatgagtgaaattatcagacattacacaacaaggaggagctgggactatgctcggtggaaaagtgtgtgccctgggtgaggactcttaaatccaagttcttcttaatgccaacactgcctcgtggaacaccagttttctttgtgcataaacgattacctggaatcctcagccaggcaccatggctaatgcctgtaatcccagcactctggggggccgaggtgggcagattgctggagccctgaagttggagaccagcctgggcaacatggcaaaacctcctctctactaaaaaaaaaaaaaaa

SEQ ID NO: 56296 - DNA, 457 bp, Homo sapiens
cccccctcgaggtacttctagaattaattaacgcgggataagcagcttgaaactggctttaccaatcttgaaatttgaccacaagtgtcttatatatgcagatctaatgtaaaatccagaacttggactccatcgttaaaattatttatgtgtaacattcaaatgtgtgcattaaatatgcttccacagtaaaatctgaaaaactgaaaaaaaaaaaaaaaaaaaaaaaaaaaaaattgaaaaaaaaaaaaaaaaaaaaaaaaaaaaaaaaaaaaaaaaaaaaaaaaaaaaaaaaaggaaggaaaaaaaaaaaaaggcggccgcccccgggggggacctccatttccccctatagggagtggttttaccccccctcatgggccgtgttttaaaaacgtggggacgggaaaaaccttggcgtacccaaatttattcgcttggaagaaaatcccctttt

SEQ ID NO: 56297 - DNA, 424 bp, Homo sapiens
acaccgcattacaaaaaggatgcaatacccattaacgcacaccttgctcaacatcttggggtgcaaaactacttgttaattatttaaatatattcgccaaaatatatctgggagcttaagaggctacttacttgtacatgataatagtcaaagtataaatcagatcattaatttaaatcatatattataatcacagccattacttaaattgcaagtgattgcgcatacctgtttaatacctgtttacctatgaaagcatactacagctacttttaatgtttacttacttggagttaccccccgcgtaaattaacgctgggaggcattgaggcaaccagcgcaggggcttctgctgatggggcaggcggagcttgatgaaaccgcagataagtgatattctctgggaaagtcagagattaataca

SEQ ID NO: 56298 - DNA, 540 bp, Homo sapiens
  misc_feature 28: n = A,T,C or G
cgggcccccccctcggaagtcttctagnattaattaacgcgggcaaccaaatttactgaacccaggagttgttctggaattggaaactttaaattgcacttattaaagttgatgagtcagatgggactttggtgatagttctctcagacattagtaaagagtacccatcatctgctctattaaatgatcctcttttcccatagtgtttgccatgatatatgtgaagtgctttctaggaaacttaattgtgtgcctattgaattaaactctagttcgtggtttcctctctaacattgtccttggctggagtcattttaaaaaatatatcttttcttttcctgatgctttcttggtttataaaattgctgttacttgatctgtaattttgtgtgaaaacacacagtctaaattctttaatgccacttaactctataaaattctgcatgctgtttagagtcatgtttagaaccctggtctcctgattctgttttttttgagacagagtaggactccactgcagagaggaaaaaaaaaaaaaaa

SEQ ID NO: 56299 - DNA, 459 bp, Homo sapiens
cccccctcgagagtcttctagaattaattaacgcgggcagctgcttttgtagatagaagaaggagggctgttgaggcggttctggcgatcgatctggcggtctttcagttttttgtgcggaggcttgctgtactggtcttctcgggtgatgtagcttgacattccataaaatggtataatttctaaaatggatgattatgataaacccaaactcagtttacattttcaataataaattattaaatggtcaaatgatctggctcctgaagaagtctaaagtataaaggaagtctaaagtattactaaatagagtctaataaatattttttaagaaaatactgctgggcacagtggctcacgctttgggaggccgaggtgggcggactgtctgagcttgggagttcgaaactagcctgggcaacatggtgaaaccccatccctactaaaaaaaaaaaaaaa

SEQ ID NO: 56300 - DNA, 491 bp, Homo sapiens
  misc_feature 28: n = A,T,C or G
cgggtccccccctcggaagtcttctagnattaattaacgcgggggttgagggttcaatttacccatctttaaaatggggagattggtctagtattagaatcctaaactagtagtaatgccctaagttagattttgtttagcgcaggcaatgtcttaaaagcatccaaattagctggtaaaatttaagatacttgacaatttgaacataaaatctgagggaaaaaatcgatttttcaagtctgggtaagcttctgcacatcagtaacaggtcagagataaaagcaactgaatatgctcttgtgataggacattcagccacattccccaccatagccctcctcttactagtggcttaacatcactgacccgcagacatttgtttctatcatgagttaaatcttctgtaaccaagatttttaaaccatgctttacaacacactgacactcggagcaggtttactttttttttgagagggagtttcgctctgtca

SEQ ID NO: 56301 - DNA, 588 bp, Homo sapiens
attaattaacgcgggcttattttacaatcaccaatttgtaggtgaatccagataactgaaataatgccatgtgctctatgtatatgaatatattaaatgaatatagtcataataaatgaatatgtctttagaatatatatatgactatatgaatgtaagtcataagaatgaaagttctttggatcataaatactaaggtgaaattgagcttgtcaaaaacaaagtaattttaaaaatccagtaaaatactatcatatgtaatacaaagtaaccaaatgctaaagcggtagctctgttctctctgaaagctatacacttcatgcattacctgtgatttttccacggaagcattgtgcttgtcacacatggggcttatctccatgccacgttccctctctcggtctccttggcggaagaactcctccattatccggtccgtccactggcggtacagctggagaggctttgttgggttgctcagatctgcacagtgcaccatattctgaagaacctaaaatagatggatgcattctctattcactcctgttccttttttttaaaaaaaaacaaaaaagcggccgccaccgc

SEQ ID NO: 56302 - DNA, 567 bp, Homo sapiens
attaattaacgcggggcaaagcatttctattgtctatctttccagatagactgtgagcttctcaaggataaaggtcctatctccagaaccttgcaggatgtgacccacatagtaagtgctaaataaatactgaacacagcaattatgagtaaactgtaaataaggatgaaacaacttgataactgaccttcacgtttcttttaagtgactttttagtataatagttaatagcagggagcctttgttatcacaagatctggttttgaaaaccagtttcttaatgtgtattcttaggcaagttactaaacttctctaaacctcattttctttatcctcaaaatgagattacgtgtgtaaagtacttagtatactgtctgacacatagtaagtgttctataagtggtggctaaaaagatgtgttaaactttttgtctgtgttagataatatctgtgatatttaaagtagacatgtatagtgacataaaatattagtatgtatgagagcagatgattgacactttccacagttacataccaagtcaaaaagtgaaaaatctataactacta

SEQ ID NO: 56303 - DNA, 601 bp, Homo sapiens
ccccctgcggggtacttctagaattaattaacgcgggggatccaacatcattagtaacattctcaaaaataaacataataacatcaataatcatagtaacagaggaaaataaataagtgggtcttttttactatattcacagttcttttcccaacaaaacagcaaaagtatcaaaatcaacaatttcctaacaataaaatctgtcttattattaacaaggtatgaggacaaaaaattttttacaaagataaataaaatcatatcatttcaaatcctgaagtataaacaagttctatgtgtctaaaggtaccagtcatgtatatcctacaactacaaaagccaaatgactagagttaaaacaaaaacaaaaacaaaaggctcatattccaaagtatcaattacctttttaacccatccaaatttcttagtgttgtttcgtacaggcaatgaaagccatccttctaatcttgattctacaaataagcacaacatgtgaggctaaagataacaattctccttagataacaaagaacttaataaaattttaatatgaaatttataaaacaaataaaatatatcctttagaatttatcactataca

SEQ ID NO: 56304 - DNA, 422 bp, Homo sapiens
  misc_feature 27: n = A,T,C or G
cgggccccccctcggaagtcttctagnattaattaacgcgggtccctactacaacatgtttgtctaagcttggaaacaaagcacatcaatactcccatgtctctctgagagtccagggaggataaaatactgctcaagctttgcagcatcgtcctgaaatacggagaacacaatgagccatgccatggacatccagaggaacaagattgacatgtagagaaacactcctaaattagaaaaatacatgttgccaagaggacactcatgctgctggaggaagaaaataagatagaaatgaaacacccatgctccagcctcatgaaagactgctttccaaatacttttaaagaaaaaaaaagaaaaagacaaagcatacaaaaaaaaattcctccttgtaactcagctctaaaaaaaaaaaaaaa

SEQ ID NO: 56305 - DNA, 609 bp, Homo sapiens
  misc_feature 15: n = A,T,C or G
cgggccccccctcgnaggtacttctagaattaattaacgcgggaacttgtatcttatcctattaatgacaagaagccattgagttttcaatcaggggagaaaagacagtacaactatagtagagttttgacaagatcaaaagggcatttactgacaatattttatattagtttttccgcaactctagccaaattattttcctttcggaagaaaggaaagaaatggtacactaggattagagggagctgagaggctgaataaaggccacctaccgtagggaaggtcagcacctagtaggttaccaggatgctcggggagcactgcatggacagatggaggaggaggaggaggcagtcgggagcttctctcagcaagtaacacgccacttcagttccagaaaagctagctcatgcacgcaagcttttgggaaaagttagcaaatttcccaaaggcaaaaaggaagcacataatatgtttgaagactatccagacctcacaaatctaactggatgtgatttccagtaacaattagttttctacaaactaaatttgtagaaacagtatctcttacaataatttcagagtatgtgtcattatttctaaatatcc

SEQ ID NO: 56306 - DNA, 483 bp, Homo sapiens
cgggccccccctcggggtacttctagaattaattaacgcgggtgattattgtttttgggtagttttgtagctttctcttttttctctcacatccactattttgttctcttccttacccctacctaccctctcccaatgtgtctaaatggctcagagggtcctgagacattttgatctccctcctaaaggaagcactatgctcgtgcctggtacatagtagatgctcagtaaatttatgctgcataaattaatgaatttgcataacagtcagttcattgctgttgagcagtgggttctcaaactttattgtgcattgcaatgacctggagcacatggtaaaacacgaaatcccatgtctcacccccaaagtttctgattcagcagctctagagtggagcctaaaaatctgcatttctggccaggtgaggttgctcagccctgtaatcccaggactttgggaggctgagtggggaggattgcttg

SEQ ID NO: 56307 - DNA, 591 bp, Homo sapiens
cccccctcgagaagtcttctagaattaattaacgcgggccccctaaactcctctagctcctgctctagctctagctcctgctctagctactgctctagctcctctccagcaaaacctagagaaacacacagactttgtcagcagagagacctgagttcaaatcccaaagccactgcatatccactgtataaccgcaagcaagtaacacagcatctctgtccctcagtttcctcctgtgtaaaatcaataccactatctacctcctagggttgtagtaaggactaaagatgaggacatataaggccctcatacttaagtaccaacagatggtagatacttaacaaatatcagtccctcctggactcagcaatgatctgacattccacctcaatttaagagaataggattctcttctcagggtctttgttaataatgggctcacttagattgaatggtagacggaaagacatgtcaaatattacaggctagtaaaatatatgggtgcttggtaaagggtcctctaagtaattcactcataatgttctctgttgttgttagtactattgtttacttgtttgtctccccaaaaaa

SEQ ID NO: 56308 - DNA, 584 bp, Homo sapiens
  misc_feature 22: n = A,T,C or G
cccccctcgaaatacttctagnattaattaacgcggggggggtttagaagaagaatctagaaacacagctggactagggagaggtgagtgaggcactttcttggggtatacaatttaaggggattccaaagcactctgtaatcaagataatattttaacacaataatttttaaaaattaaaattaatgctaaaatgccaaaattcacaaacaacataccaaaatcttaaattcagacagaattggtaatactgattttcctcttgctgcaggcttcagtgtggtgcagcatggcagtgatctagaacagatggctcttgcattctataacagttatagagctttaactctgggctacatcatttctcagaatcttttaagacctagtgatatggtttggctctgcgtccccacccaaatcttgtcctgaatactcacgtgttgtgggagggagcctgtaggagtggaagataattgaatcatggggcaggtcttttctgtgctgttctcttgagagtgaataagtctcacgagatctgatggttttaaaaatgggagtttccctacacaagctctctgtctttg

SEQ ID NO: 56309 - DNA, 592 bp, Homo sapiens
cgggccccccctcggaagtcttctagaattaattaataatagtaggaatgatcaggtcctactactcatggatttcttttgagagcttaatttaaggagggaaccctcatctcagaaaaatttacatgactatgtagagatataaatttacatgtaatttcagaatattctgaagtctttaaaactttatttaagaaccttgcagtagtcccaaagtagttatactaacttatagaagaaacatccgtgtttttgctggagtgtatatggaccagtgataggcaagcacctaatagtgcaaaatttatatctgaaatggcatttgttcctttccttcttactttggcgtcaatgtctcgttcatgttgacttttttaagcaaagatcacttattcaccttggagttttaagtcatttatttccgatagccacagttgttattgaatttagcaaagcacaaattgccctgtagaaaaactgcatgctgtttaagtattttaatgttaaacattacaggacaaaccaattcttgctcccgaacctcttgtcatggataacctggactcaattatggagcagctaaatacttgga

SEQ ID NO: 56310 - DNA, 619 bp, Homo sapiens
  misc_feature 15, 28, 44: n = A,T,C or G
cgggccccccctcgngaatacttctagnattaattaacgcgggnaaacaagtaaaatttacaataagcaacaaaaaaacccaacgggatgagagagaatattatttcagggttgttgtaatagaaaaagtctagttttcagcaacagcaatgaaatacaaagcgtgcaaataaattaatgaaaaaataatggcccactaataagataacagatattaacagaaacagtcctagaggaatcgtaggcattgaaaaatctagaaaaagtctttaaattacctgtcttaaatgtgctgcaaagataaataacatcaaaaggaaaaacatttcagaagaatattgtctcatcaaatagaaaatattaatagagatagagattataaactgaagccaaactctaaagttgaaaattaagataactaaaataaaaaattcaccacaaaggttcaacaaaagatttaagtagacgaaagacacaaccagcaagcttgaggtcacttcaattcgtattatcccaactagcagaaataaaaaataatgaataaagatgaacagagcctaagataacaatgggatactataaaatgtgccattacaagcattatgaaaactcccgaaag

SEQ ID NO: 56311 - DNA, 441 bp, Homo sapiens
  misc_feature 11: n = A,T,C or G
cccccctcganaatacttctagaattaattaacgcgggcactggctttaccctaagtggcactgtctgagtccgtgatgggttccctcaaccttccactaactccgcccaccctttccctttctattgatttgggacagcccttgtcaacaaagcactgtaatttatttaatcttcacaatggagaggacatagatactgttattatccccattgtatagatgcaggtgaacccaagcagcctggctgctatactgcccaaaacataggctttggagacaaactaggttcaaaccatggctctgacactcagtaactatgtagtcttaagctagtactttgacctctattaataagctattgatgatgtaactgtttataaacatgcagcacactgtctgaaacacagcaaacactcaaaaaaaaaaaaaaaaaaaaaaaa

SEQ ID NO: 56312 - DNA, 611 bp, Homo sapiens
  misc_feature 28, 572: n = A,T,C or G
cggggccccccctcgaaagtcttctagnattaattaacgcgggtatatcaaagcctgaccaagtggaataaggaaaatatccaactagggttctctctctagctttcttgttccacctaaggggggtaaaaaagctgagaagcatttgtaaaggtgaaagcccaggggcactgtcccacaaaaaacctgagcctaatcacaggactacatacagactattctccccgctccacaacactcatcttactacaatcaacagagctcctgtaaaacaggaaatcacaactgaaagaatggtaaggctcaggctctatttaaaaaggagtctcatgcctgtaatcacagcactttgggaaaccgaggcaggaggatcacttgagtccaggaattcaagaccagcctagcaacacagtgagcccccacctctacaaaaatcaaaagataaattagccaagcatggaggcgcatgcctgtagtaccatcttctcaagagccagaggcaggaggatcccttgaacccaggagttgaaggctgcagtaagccatgatcgtgccactgcactctagcctgngtaacacagcaagaccctgtctctaaaaaagtaaaaata

SEQ ID NO: 56313 - DNA, 623 bp, Homo sapiens
  misc_feature 12: n = A,T,C or G
cgggcccccccntcggggtacttctagaattaattaacgcgggaaggccataaatatgctttcctctaatgcctaattctctcaataaaaatattagtaatatagatttacatagagagttaaagcatattatggtgttgctagagtattttcagcttctgtcccacatcgtcaggaagtagtgtgtacttaaaaaaatctatattgaagtaaaatttgtcattttcccatgtcctttattgtcacttgtattaaatagctagctctctggtgaattaccatttaatatatttttgtaaactctacccattggataaaatacagaaatgcattaaatagtctgtgattctggactaatgccaacactcatctctctttgaaggaaaacttttatgataaaacatcctatatcattatgtttggaccagataaatgtggagaagattataaacttcattttatcttcagacataaacatcccaaaactggagttttcgaagagaaacatgccaaacctccagatgtagaccttaaaaagttctttacagacaggaagactcatctttatacccttggtatacccttttaattcattcatgtattcaaaaatatttgctgactat

SEQ ID NO: 56314 - DNA, 515 bp, Homo sapiens
cccccctcgagagtcttctagaattaattaacgcgggtggtctaatcacctctaaaatgtgattacttaatactgttgcaacatcaaatttcaacatcagtttttgaggaaacaaacattcaaactacagcactgacagatggatgcaatggtctagctgcgagggaggctgcataagtaaatacctcaattttttaatctttccatcaggaggcaggttctgccagaaaggaataagcgactcagacagttttccaatgtttctgcctagaacacttcactaatatgcaatttcttcatggcctatgtaggcatttgtgaactttgctcaacataattatttatcagataattttaaagagttctcaagcttatgcaaacttgagcaacatttttattgaccagaaaatattactgtttcttatttcaatttatatgttactactaaaagtgtaaatacattttggcaatatgcagtgacaatgacttctttaattcagatctcaataaaaagc

SEQ ID NO: 56315 - DNA, 613 bp, Homo sapiens
  misc_feature 28: n = A,T,C or G
ccgggccccccctcgaaagtcttctagnattaattaacgcggggcaggtgagatactaaaaacacaaaaacaaacaaaaaaattgagttagaagaccagcctgaaataattgtgtgtgtgtatgtacacacatgtgctaaattcaaggagaagatgtaatagaaaataatattactaagttaaagataacgtggactatcttgatggaatgagctcactaattataaatgcaattaatgaaactaaccccacttcaagatttagtgaaaggtcattttcattgtgtatttactatttgctgagcactagtctaagttctttgtgctctctctctctctttctcttccttttttccctctacttcttttctttctgttatttttttcttcaaataattgtatagaatagcccaattatgatcttccctttgcctcagaaaaaactgaaacttagcataattgataattaacaagaggcagagacaagcttcagactcatgcatgccttattatagaaattaagcttgtaaacatttccctgttcctaaaattcaataagcatgaacacacacacaaaataagtttatctacaaaggaacaaagcaagtaaacta

SEQ ID NO: 56316 - DNA, 610 bp, Homo sapiens
  misc_feature 76: n = A,T,C or G
gggtaccgggcccccccctcggaatacttctagaattaattaacgcggggccagccggaagacacgccacccctgnaaaatcaagaaagaggccatccgggtacaacatagcagtaatgtcagactaggacacttcctgtttacaggagactataaaactttcgccctgtcctcacttggggctgacgccattttaggcctcagcccgcctgcaccctggtgctcattaaaacagcatgttgctccacaccgcctcctgttgtctgttggcacgctctcagggttcgaaccagtacaagaaccttacacttactagttttgatttttttaaaaactgagaattataaaatatactttagaaggattcctatccaaaaagctaaaataaaaatgcatagggttttagaggaaaattctgatgaaagaatgggagagagagaattattataactaaattcgatgaatgaattaatgagtatcaagatctatgctcagacccttgctgtaagatggctccatcaaaggcctgccccccagtggagtttctgcctcaagaacactagtattctttcaggttgtcaggccaggaaccttggtcttccttactcca

SEQ ID NO: 56317 - DNA, 591 bp, Homo sapiens
cgggccccccctcgagagtcttctagaattaattaacgcgggggtctttgacctatcaagctctcgtatcaagctgtaagactgagtcatggtagtctctcactgtaagctgggcctttcaccaagatggccttcttaaacaacctaccttctaaacatttaattcttttgagcttgatagtgcatcacactctaaatacaaaaaagatacgcacatcagtgccctggaaataaaggatgttacacgatccaggcatgcaaatctgaactcctaagaccaagaattccaaacatgcctgacaatcttgtccccttattgtaataaagagggataccatcagtctagattttattgagaatccttaagatttaaagcatagctgtggatgtggtgaagagaacaagccacacagctctgtttctggatatctaagtgatgatatccattaatgatttgaaaggctgaaatcaagatttaagtgatacgctcttggttaattggttacttaatttagtcagattcttagtgtaagagacagcttatctttttgctcccaattggtcccattaatagtttttcaccatactgga

SEQ ID NO: 56318 - DNA, 593 bp, Homo sapiens
ccgggccccccctcgaaagtcttctagaattaattaacgcggggcttgccaaagaatggttaacttactttaggggaagatagcattatcaaagcctctataattttttacccatgatgtcatctgcttgatacaaaattatgaggtatactaaaaatagaagcaattgaattaaatataataaaaaatcaataatataaatagacttagagatgattaaggtattagagttgttagacatggagtttatgattaattgcttaaggaaaaagacaaaaaggtggaagatttccaaagagacctcaatccattaaaaaaaagcaccaaattaaattgtgaaactggaaaatgtaaggatacaggtttgaaggaaaaggatggaaaaaatataccatttgaacactaaccaaaagaaagatagcatggttattttactaagagataaagtagattttaagctaagaaatattactgaaataaagaaagccacttcataatgataaaagtgtgaactgaaagaaagaacaacacagataattctcacaggtgtaatattgagtaaaaaattatatactatatgatttcatttgtat

SEQ ID NO: 56319 - DNA, 605 bp, Homo sapiens
cgggccccccctcggaagtcttctagaattaattaacgcgggtaagagaataaatactcaaaaagtaaaataatacataaattggataaaagccaaaattttgaaaaaaataagaacagatggatatcaggctgtataaaaatttatagtatgttaggacataggataaaaccacagatcaatttgtattggtgtaggaccagaataatttatcatttcacttaactgaatatagaatccagaatgagaaagcagtatttatgagaactttatggatgataaaagcagaagtttaatgggagagaatgaattacttattgctgttacagcagattgtacaaatggaataaaatgaagtcagatctctatgtctaccttatttataaaaataaatttgaaatattttaaagtgttttatttatttaaaatcatataaaaatgtttttaagaatatctaaatccagtgtaaactagagtttggaagaatgttgctaactctattaattcagataggctagattgtgctgctataaaaattgcaaaaacttaatggttataaaaataaaggcgtatatctcatcacattgtacatccatcctaagctg

SEQ ID NO: 56320 - DNA, 587 bp, Homo sapiens
gggccccccctcgaaagtcttctagaattaattaacgcgggggaggcataaagggataaatagatggagaacagaaggtttttagggcagtagaactattctgatagtgtaatgatggatatacctcactatacatttgcaaaactcatggaacgtacaacacaaagagtgaatacttatgtaaactatgaactttagttaataataatgtatccatttggctcatcaactgcaacaaaagtacactaataaaagatgttaataaaaaagaaaatgtgagtgtaggggagtaatgtggaaactctgtacttgccattcatgttcctgtaaacctacaactgattaaaacaataatctattaactcttcttaaaaaaaaaaagcaaggcagtgtgtcaccttttgtgtttttgtatcttacttaagggtcaagatttttaaatggcaccaaaggacattttcattttctccaatttcataagcctgaactgtattatgaggcaaacagctgaaatagaaaaccacctaatgagagcctgcctacattttctatgccttcttttctattaacttccatatgcctagtta

SEQ ID NO: 56321 - DNA, 440 bp, Homo sapiens
  misc_feature 28: n = A,T,C or G
cgggcccccccctcggagtacttctagnattaattaacgcgggtatgcatataaagtgtgccatttaatactatagcagctctatgaggaaggtgctattatttttcttattttacagaagagtaggttgaagctcaaggttgttgagttacactactggtaaatggcagagccaagagtcaaaccctggtctatatcatgagcctatcctgttgatcgtatatatgtactgatcacatatatatgttatactctctgtaaagaagatgatcttgaatcttctttctagcagatacagataatatggaacctcagagcatactgttaatgtgatgaacatttcccataatgttcttacaataaatatagcaatgagatttactaaatgatttcttatagtgttgccctgtggttgaaaaccctacaagtacaattttgct

SEQ ID NO: 56322 - DNA, 586 bp, Homo sapiens
  misc_feature 27, 40, 412: n = A,T,C or G
gactgggatacccgggccccccctcgngggtacttctagnattaattaaattatttgcctaacttaagaaaactactgtgcgtaactctcagtttgtgcttaactccatttgacatgaggtgacagaagagagtctgagtctacctgtggaatatgttggtttattttcagtgcttgaagatacattcacaaatacttggtttgggaagacaccgtttaattttaagttaacttgcatgttgtaaatgcgttttatgtttaaataaagaggaaaattttttgaaatgtaaaaaaaaaaaaaaaaaaaaaaaaaaaaaaaaaaaaaaaaaaaaaaaaaaaaaaaaaaaaaaaaaaaaaaaaaaaaaaaaaaaaaaaaaaaaaaaaaaaaaaaaaaaaaaaaaaaaaaaaaaancccgcccccccccggggggggcccccatttcccccttaagggggggtttttccccccccccctgggccggtttttaaaaactggggggggggaaaaacccggggttcccccaattaaatcccctgggaaaaaatcccctttttccacggggggtataaaaaaaaagggcccccc

SEQ ID NO: 56323 - DNA, 563 bp, Homo sapiens
ccgggccccccctcggaagtcttctagaattaattaacgcggggataatcaagaaaagcaaaactgaaaagatgaaaatgttttaatattcaagaagcaatcctgtcttttttactgaattaagggacttccctgcaataaaatcgattatgctcacataataaaggtatatcttaataatttaagtgaagaaataaaatctgtcatcactttcactttcatctggaaaatagtacctcgtaagttttttccgttgcagactataaacatagaagcaaatttattaacttggcactattatataaggtgcataatgagagtttgtaaaatggcaaaatagttttttctagtcctatagtcaatttatcatcagaatagcttcagactctatacaggttcattctataaacagtattggtgaaaaatcagatgtgtggtctgttttttgtttgtttgtttgagactatcattgttgaatatacatcaagcaaaatagttaaagaaaagcctttggagtaacgtcgtaaattaataatatgtatatgtgcacacacacacaaata

SEQ ID NO: 56324 - DNA, 592 bp, Homo sapiens
cgggccccccctcggaagtcttctagaattaattaacgcgggggttatggctgtggtagtattcatggaaggtaattttgtggaacggatggagaggaaggagagcctgacaagtcatatttatgaaggatcagagtacaaaatatcagaaatgttgcaaatataataacctcccccagaaaatccacatctctggactgccaaaacctgaataggacctagtgctctactctggatgggccaggtgacatattccctaaagtagctcatgaaagctttgaggcttgaaggcagctaccaaagccccggctaacactgcaggagtcctcctcgccttcccactgctgccagcagcccctgctcacacacgtgcatattcctcggtgtggacgtatgtgcgcacatacacatgcgggtacacacaatgccccagctggttgaatgccaccatgcaggggatacacccctttggttaagcgaaaccacactctaccttttgcccagggaggtaccgtcttgcctccatcacaagcctcaggagacccactccactgccaggggagcgctgccagtatgactcacactgactggg

SEQ ID NO: 56325 - DNA, 571 bp, Homo sapiens
acttctagaattaattaacgcggggcagtgtaattgcaacaattactgaagaaactatcattaaccgaaagtttttgtgaaggctatgtgttctagatagagttttgaatgaaaaggaccatagttcacaatgaagagaacatgtcagactagaggaatttaacatgtgaaaggtcaaagtcaaggatgataaattcagagttggagaacagctaatagatgggggatgaaaactaaaagaggtaagaaggagaaattagtagagggcctgcctggaagcttaattagactaataaatcactaagaatactctaaatatttgttaattatcaaatacacattatattctatcatattaataaaaatagttctcatttattggatccatgtcatttctcatgcaatgtgtacattgttttgcacatattatctcttttgaccatttcaacactgaaataatattatttttatttacagaatagcaaaccgtattcagggaaattaaataacttcccaaggcattttggtttgattaaaataaacaatgaagaaatgtaaaagctattactag

SEQ ID NO: 56326 - DNA, 585 bp, Homo sapiens
gggccccccctcgaaagtcttctagaattaattaacgcgggacgtaaataaccattttattgttgttttgctttttctgccttcaaactactcccacaggccaaatatagctggctgcttctttctgtaaataaagttttattgggccacagccatggccatcttttacatattgtgtgactgcttccacctgctaccctgcagcgttctatagtcacaacagggactgtatggcctgcaacatttactacctggtcctttacagaaaaagttttcggaccctgttcctaacctagcccacaagaacaaggctccagcgagagcacttcaaacctggaagtagagcagaggagaagacacttggagcttggtaacctttggatggtgctcctaataccatgccatgaatgtgcttccaacaaatatgggagaccaacttcgtaaacactgctttaaaacaatgaacatgccaaacatctgataccctgataggtctgctatcaattctaattccaaacaacctgctggtgccaattttgttttctctaaggaaggtaggagccaagaagggagaagaggaagacc

SEQ ID NO: 56327 - DNA, 577 bp, Homo sapiens
ccgggccccccctcgaaagtcttctagaattaattaaaaatctttctcccaacaaactttatttaattatggttgtttcatgggagaagagaaacactttattaaatttaatcattgattataaaattgcacctaaatttcaaaaatgtgaaaaatgagaaagtacaacttagaaactaggaaatatattaagtatgcatatttatttgtataattatttgcatcagaaatagggaaccatttaggagaggaaaagacaacaaagtcttcctaacagtgattatctctaaatggtagaattatgggcatttttttttagcttatctgcattttcttattttctacagtaaacacatattactgacataattttaaagaaacatgatattttaaagatgttatttagaccaacccttaatccattgcttgaaaacctgcaatgaatcctcaaataattagtcacttcagtctttaataccatagaaaccaatagctcccaaagcagcccaggcagctctaattatttgaaatgagagctgttgaaagcaaaggtctgcactgcctgtgccattagggg

SEQ ID NO: 56328 - DNA, 589 bp, Homo sapiens
ccccccctcgagagtcttctagaattaattaacgcggggcacttgtcctgatgagaatttgtcattagtgtgcattttattgctcaatctctaggacttctaaaatgagactgaaatgttagaaggtgttagaagtcccccagcacagtttctagaacataatttgaacctagttctttggcttcattaatcagcaatataaaagccatcaagaatgtttttcctggcatgtcatattttaccactgacagcacctctgttcttaaataacatgtgtcatttcagacatggatcatgctgtaaaagccctacaaccttggtgtctttaaatgataataggttcacttctagattgagacagagatacctaggaagcctgtacattgtagtaactttcaagatggttatcaaaatccacctgcaattgtaggaccacaaaagtctggcttttgtctaggcgcagtggtgcacacctgtaatcccagcactttgggaggccaaggcgggtggatcacttgaggtcaggaggagtctgagactagcctggccaacatggtgaaaccccctctctgcaaaaaaaaaaaaaaaa

SEQ ID NO: 56329 - DNA, 558 bp, Homo sapiens
  misc_feature 24: n = A,T,C or G
gccccccctcgaaatacttctagnattaattaacgcgggctgtgactctctgaggccttctccacttgcagatatgtttctccaagcatgtcacagttgaatgggtgaagttaaaataggaataggtttcttcaaacagcagagtacagacttgagcaaggcagcttgggatggaatcccagtgtactgctgtgtgatcttgggtaaatatttaatctgtgcctcagattcctcactgataaaactggaataaagcagtccctacttcaaagggtgttgtgactacctggttaaaaggacaaccttcggccgggcacggtggctcacgcctgtaatcctagcactttgggaggccgaggcgggtgggtcacgaggtcaggagatcgagaccatcctggctaacacagtgaaaccccctctctactacaaatacaaaaaattagccaggcgtggtgacaggcacctgtagtcccagctactagggaggctgaagcaggagaatggagtgaacccaggaggcagagcttgcagtgaactgaaatcgcgcactgcactcca

SEQ ID NO: 56330 - DNA, 598 bp, Homo sapiens
cgggccccccctcggaagtcttctagaattaattaacgcggggaatcattcagaataattttaacggccaatcttttttttcttttcttttttttttttttttgaaacagggcctcactctgtcacccaggctacagtgcagtggcatgttcatggctcactgcagcctctacttcctaggttcaagccatcctcccacctcagcctcttcagtagctgggactacaggcatgcaccaccactcctaactaacggcaaatctattatagtaaaccttcaaataaagttatacttaaggtatgattgtactttttagtttgtggaagaaattcagtatgaatgttcccacactagtgaaataagtattgatagtaatttagggtttagaaatagaatccttcatttttaaattaagtatgttatgatcaactaaatatgaacttggacttgctgaactattttcagtatatggttagcaagctatgacaataataacagtgataaaaataattagcatgagtaataatagtaataccatctaacacttattgacagctttttatgtgccaggaactattgtagaatcttttagtttcac

SEQ ID NO: 56331 - DNA, 287 bp, Homo sapiens
  misc_feature 28: n = A,T,C or G
cgggccccccctcgaaggtacttctagnattaattaatgcttgtaggacataataataacaattgaatgtctgcacagccgctttccacacagacatcataacaaaaaatttccaccaaacccccccctccgcgttaattaacgcgggggaggtgtattgaagtcctccagacaaccctcagatttgatgatttcctagtagaactcacagaaataaagagctgttatactgtgaaaaaaaaaaaaaaaaaaaaaaaaaaaaaaaaaaaaattaaaaaaaaaaaaaa

SEQ ID NO: 56332 - DNA, 604 bp, Homo sapiens
  misc_feature 17, 28: n = A,T,C or G
ccgggccccccctcggnagtcttctagnattaattaacgcggggaatgtttctggacacaaggaatgaagctgttttacttttaagataccaaaaagcaatcaccttgggatgctgcagacttattccacaggaacactgccaggactcaacgccttctggaatctctctcttcaaattgcctattataggacattctttggaaaaatccttaatgcagtaagccattattttttaagaacagattacagtttgggaaataactattcagtgcccaatatacacaaacagaataatcaaacttgtttactccattttttaaaaagttacgactataacctgaggtatcaggtatctaattactacaaaacgaaccaccacaaaacttatcatggctcaaacgataatagcttatcatttctcatgactgtaggttgactgagtggatcttaaaaattataaataaaagcataaataaaaattataaatgaccagaatggtgtattaggccttttcacatggctgataaagacatacacgagactgggtaatttataaagaaaaagaggtttaatggactcacagctccacgtagctggagaggc

SEQ ID NO: 56333 - DNA, 586 bp, Homo sapiens
  misc_feature 28: n = A,T,C or G
ccgggccccccctcggaatacttctagnattaattaatgcggggcagttccaacatcctgcaggaaataggcgcaaaagctttgtcactagttgaagaaaagctgcgatccaaaagggaaggagcatttggaaactcctgtcttattttttgttaataagaatggctgcagtgtccctggaacatttgggtcaaagaaatgagtccgaacttccagaaaaagtgcacacagaaccatccctttccctctgaaggactctggcaactccaaggcagagtagaatgcatgcacctttccacgtgttgtttggcccgaaactagtatgtgtgtggtcctctcacagatttgtcccggttttagttcacccttcaggactatgcttttgagccatgaaagctaacctttacttttcttctgcaagaccttgaggcgtttggtgcaactgatacatattatttcaaaccctcagtttctggagcactgagaaataaatcacaagttatgcgttgttaggatccaaacagcccatgcttctcatcatgcatcaagatgcgtcaacctcttatttgaaactaaagagaacaaa

SEQ ID NO: 56334 - DNA, 588 bp, Homo sapiens
cgggccccccctcggaagtcttctagaattaattaacgcgggcattaatttgttaaacattctctagttgtgacataacttctctgttcctctgttttcttattctaaaaagaaagatagtaatagctacctcccaagactattgtgagaattagaggagagaatagacataaaagaagcaagcataataacaaatatagtgtatcctctaaaagtgttatgtctgtttctatgtctcctgtcctgtggtccagaatatattaatagcaaatgcccaagtgcccacacttaaagctcagataatttgaaagaactatgatttaaagataaataattattatagatcaagactgtaaattaaaatggttcatgttaaaagttgtttgtatattttggtttgggccaaaacctttaaaacaaataggtttaattataagttggaccagttcattgaacatgtgggactctttggcaagttctgtaaagaaattagctcatgggaggtttaaaaatgaattaactttatttttacttgaaagtcagagtttagttcaacgaaaaagcctgctacaaataacttttgcttta

SEQ ID NO: 56335 - DNA, 567 bp, Homo sapiens
ccgggccccccctcgaaagtcttctagaattaattaacgcgggtccgtggtgttttctttgttattagaaatttgtattgactcataggcaacctctgagctgattatttttctatgcatggtacattcttttacatttaaattttttaaaatagtgatacattcacaaggttcaaaagtgaaaaagaatataaagatattccacaaagattctctttcctcaccctgtccctcatctaccttggtctcactgccgtcagtaatttctattcttatttcctccttagacaaaaggtagcataatatacagcgtgttctatggctttttttacttaatcttgtgggtcaagtgtctttctataagtatagaactttcttagttttttttttcttttaaatagttgcagagtagtgtgttttatagagttgccagcatttatctagctgggcgcctactgatggactttcgtttgttctgtttgtagtcggacgaggaaggcagccaggagataggatgggacgacagccagcagaagttcattgctcacgtccctgttccctcgcagc

SEQ ID NO: 56336 - DNA, 558 bp, Homo sapiens
ttctagaattaattaacgcggggtattaaagacctgataaaatatttccattttatttctaaattaagttttaaatttagtcccttgggttctaatgtattgttgttttcaacattattgctcacccataaataaaggaaaaacaggtcaggtgcattttatatttactcctgaatacacactcacacggactattgaatatactatccatgaggggtcagcaactcctgaaaagtggtgtgccaaaattctgactcttttccctctagtatttccagagtggggaagaaatattcatgtacctaacataggtagagagaatatgtgcccacctgtgggttgctaagtatccgagggtacaagcatttggtgggagtgggtgaatatggtaaaggctaccaaactgatgtaaaattgaagttggcctacctatagtctttagcacatgcaccataaagagcctgatgattgtcttctattacaaattaaaggtagtacttaaatcactttggaaataaaacaacaacaaaaagacctagagtttaatcatcaatcaca

SEQ ID NO: 56337 - DNA, 176 bp, Homo sapiens
cgggccccccctcgaaagtcttctagaattaattaacgcggggattagacttcaacatatgaatcttggggagacacatttagcccctagcaccataagttggtaaccagtgcagctagaagattaatgtatatagggctttgtaacctgtactttcatttttgtacatttaaact

SEQ ID NO: 56338 - DNA, 611 bp, Homo sapiens
  misc_feature 8: n = A,T,C or G
ccccctcnggagtacttctagaattaattaacgcgggaagccacatgactctagccacttgcacagtcaggccctctgtgcccaatcatgggacccattactctcttttttccccagtttcaattgcaagcccttctttccgccattcctgtttctattctcttaccttctctcaaatacagtagaagcttcctaagagcaggaattctctaactcaacactgtccaacagaactttatcctatgaaggggatgtgctaaatctgagctatccaacaacagcagctactgagcacttgaaatgtggctggtgtgaacgaacaaatgaatttaactaattttaatttaagtaactataggtggctagtggctacattattagtgcagcttctaagtattaataacaatgttaaattttgctccagtggtgtgatttgagagtcgccggccactctctgcattagacattcatttcttcaaactatggtccccatggcatgatatgttaacattggtggtgtatgaaacagttttctatgtagaccaacacttaaaagtttaaaaaataattacctattcattttaatttcatttttaaatgtatctaaactt

SEQ ID NO: 56339 - DNA, 619 bp, Homo sapiens
  misc_feature 24: n = A,T,C or G
tggggtaccgcggccccccctcgngggtacttctaggattaattaacgcgggtggccaaatccaaatagcaatagaattgtttattttttcaaattatgaaagtaatgacagtctccacctataccaattcacatcttcagaggtaaaaactatttacatagacttttaagaatgcctacatatgctatatattgttttataatttgtttttgcttttttcacatagtatattgtggacagctttgtatatctttatacctagatccacctaatttatttttaatggcacagtatcctgtctaatggatgcaacaatcctattgatatacatttagcttatttgctataatataaatatatgtgtgtgtatatctaattttttaaaaaaatcactagcatttcaatatagagtcacactttgttacaatgtccttcaattcttattgaactcaatcatgattttatgatcaaatcttcaacttctaccaattgcatataacaggaacaggcgaactacagctactgggccagatctggcctgctgcctgcttttgtaaatacagcttattagaacacatccacactactttatgtattgtctatatctgctttcaccac

SEQ ID NO: 56340 - DNA, 599 bp, Homo sapiens
  misc_feature 28: n = A,T,C or G
ccgggccccccctcgaaatacttctagnattaattaacgcgggtatatcaaagcctgaccaagtggaataaggaaaatatccaactagggttctctctctagctttcttgttccacctaaggggggtaaaaaagctgagaagcatttgtaaaggtgaaagcccaggggcactgtcccacaaaaaacctgagcctaatcacaggactacatacagactattctccccgctccacaacactcatcttactacaatcaacagagctcctgtaaaacaggaaatcacaactgaaagaatggtaaggctcaggctctatttaaaaaggagtctcatgcctgtaatcacagcactttgggaaaccgaggcaggaggatcacttgagcccaggaattcaagaccagcctagcaacacagtgagcccccacctctacaaaaatcaaaagataaattagccaagcatggaggcgcatgcctgtagtaccatcttctcaagagcctgaggcaggaggatcccttgaacccaggagttgaaggctgcagtaagccatgatcgtgccactgcactctagcctgggtaacacagcaagaccctgtctctaaa

SEQ ID NO: 56341 - DNA, 598 bp, Homo sapiens
  misc_feature 25, 39, 43, 524: n = A,T,C or G
ggccccccctcggaagtcttctagnattaattaaagggnaaanagttttaaaatattttaaagtggactttcagaatcctggtgcaacactgtattagtagatacaaccttaagaatcgatgacaaattctgataatacttttgacttcaaagtaaaaatgatgcttttaaaaatggatgtatccatgctaggaattttcctttgacagagtatatcatgctcagaatttactctaataaagaaatgtcagaaacttccccaatgttcgtttctgaaactgaaagtcaatttgattctttccagttgtcctagctaatgaaagaatgcagctcagcatcttgaagacggggcaagccttcctcatctccccacatcccacagtttcttatacccactgaattaaactgaaaaatgaacacctttctatgctttatatctctaatatctataaacaacaacaggaacaatgtttcctcttagataaagaagagaagctacaacactgatcattagagaaatgcanatcaaaccacaatgggataccatctcccaccagttagaatggctgttattaaaaagtcaaaaaataacagatgc

SEQ ID NO: 56342 - DNA, 566 bp, Homo sapiens
ccgggccccccctcggggtacttctagaattaattaacgcgggtagccagggccactttctctctgctccatcggtgtgggcagctcagactcacaatgcccaagagagcacataaggttctgtgtcactttgccatatgagctgccttactggccagaaccttaccttagtccagcccctcaatggtcatcccatggaaggaatcctatctaatcagcagacaccagggtaacagatagaaaggccatcagggctggttcctcagggtcaggccatgagaggcaccaggcttagaagattcccaagaggaattctaccaaatcttttctgaatggataatcccagtgctgttaaaattgctccaggtgcagaaaaagaaagaaggtggggggaagagaaagaaacagagaagaaagggagggaaggggagtagacagtggcataattctttaacaaagcaaacatacaatgttataaaactcacctaagaaagaaaactaccaaactctttggtttttaaaaaggaattgaccaatcctaaatataacagtaacagacacgatgc

SEQ ID NO: 56343 - DNA, 615 bp, Homo sapiens
cccccctcgaaagtcttctagaattaattaacgcggggggtaggttgttgaaacattgcaccttttggactaacagtttttaccaaaataggcagaagtgacatttgcagccacagctgtgtggcattgagcgtctaaggtatgtgtaataggcagtgtatcggtagcattgataccttggtcaacaccagtaagccatgtaattgcccagaagtgggctctaacactagttttaggagatgcagccaaaacgacaaagctggaggcctctccctctgagcttggcctccacttggtcaaaacagtccccagtttgtccctacgggacacaggcctgccttgttaggaaatcagcaacatttaggagcccacaatacctcacataactctgtgtacagtaacagagaatggaaatagggctgtaagcatgaacaaccagtcaagttacaaatatagaatactctctcaattccactttagttagtcatggagggacagtgtgagttttataaacttataaggaatatacaaacagttccaaatttaaaataacttgaagtaacttttaagtgtgtgaaaagaatatttttttccaccctgtccatttaagcatct

SEQ ID NO: 56344 - DNA, 606 bp, Homo sapiens
  misc_feature 27: n = A,T,C or G
cgggccccccctcgaaagtcttctagnattaattaacgcgggtgacttaagtcatttaacctctccttgattagagcttcctgagccatgtacactggcactgcaaatcacagacaggcctagatacagatcccctcaccccttgctacatccaaaggtggcctgggtggctggagcctctgggccagaaccacctttgtccattttcctcagtgtgcctacagcatcgctttccatgtgtgccataacttgggaatagttgggatgtgttgcttaactcctttgcaccattagttatctgtgagaccatctattccacactcttcattttttaaaaagagacaataattatttttaactcactgaagtttaaaactacctagcatttctgattaaaaaaaatttagaaggaaaattttaatgcatttatttcagatggcgttttaaatagatacaaccctttggaaacacaatatggtactacatagcaagggctgtaaaaatgaccatatcctttgccccataaattctacttctatacttttaaccttaaaaataattcagaaaaaagataaatgcatgaagacatttatgtctgcattcttt

SEQ ID NO: 56345 - DNA, 449 bp, Homo sapiens
  misc_feature 32: n = A,T,C or G
gtaccgggcccccccctcggagtacttctagnaattaattaacgcggggcaattttatccaaggctcaacttgatgaataactgctcatttggcacagtacagtaatagtctcccaaatatctggtcagcaattggatgacacacaggaagtccccttgaagaacactcctggcgctttcacttctttcccgatagatctaaagagaaactgtacattgtcttcctgacacctaaagactaatgtgacgcaatgaagtcgttggataaaagcgatgcaactccgtcaaatatttaataagacaccatggaagctgggagcattgtctctagttaacatgccaaagtctcgttcgttatcggaattaaccagaacaaatcgctccaccaactaagaacggccatgcaccaccacccccggagtcgccgccgagctgtggatctgccaatc

SEQ ID NO: 56346 - DNA, 569 bp, Homo sapiens
acttctagcataaattaacgcgggcttcttcatgtactttttaaaatctttaaaaacttatatatcttaatatttatctgattattgtctcccacaacattctctaagttccattagtatcttacacatcactgtttccacagcactcagcaaagaatctggcataggtcagggtcaagcatttaccaactgaatgaatgaagtaaaactccaaaatattgatttcataacgttgaattagatattctgaacagaaatattctattttaaaagtttacctataaatcaagtctagaatattctttctttccttggggatgggggaaaaacaagaagtccagagcactggccttcgctgccacaacagacagcccatcccagcagtggagaatcgctttagttattgggaagtgcgctataaccaaaaactaacacctagcatggcacacagcccataaaagacacttaacacatttctgttgaataaagcactggcacagaacaaagagatcaagctttggtctccgaagacctggcgagtgaaatgtgcaagtccattaacttcttga

SEQ ID NO: 56347 - DNA, 610 bp, Homo sapiens
  misc_feature 27: n = A,T,C or G
cgggccctccctcggaagtcttctagnattaattaaacgcggggcagtgtgcgttctgtaatttccccaggagcagaagctgccttgccagaccttttctgcgtggtctgaggtggccatcagccagctgttgttgtctaagaccttgaggtctggtagatgcaggtctaatattgatagccctatgcaaaccacaaagaaaactttgctaatgttttcatgtattacatgtgaatgcctgctgttgtctggcttatgatgggtctactttttctgttatttttttcccctctgatttgtgctagactttaagacctggaagaacttattttttgaacatttgatttaactgattttttggaaaatttcaaccataggtaaaagtagggagaatagtataatagtgtgataagctcctatgtacccacttaattccattagttatcagcccatgaccaatctttttcacaaatatttccatcctctctctcccacccagattatgggaaactgcttgaattcacattacagagcattattcattggtggatatattaattggaactcttggttgtaagtgacagaaacccaaactaaatacattttgatc

SEQ ID NO: 56348 - DNA, 588 bp, Homo sapiens
cccccctcgggggtacttctagaattaattaacgcgggggttcagcaaaccaacgtggcgcatgtatacatatgtaacaaacctgcacattgtgcacttgtaccctagaacttaaagtataatttttaaaaaatgataaaaaatttgtttatttgcttgttctttttcttttatttttgagacatgctttcactctgttgtccaggctggagtgcaatggtgtgatcacagctcactctagccttgaacttctgggtttaggtgatcctcccacctcagccttctgggtagctggaactacagatacgcaccacaacgcccagcaaattttttgtatttttaatagagacagggtctcactatgttacccaagcgtgtctcaaactcttgggctcaagtgaccagccagccttggcctcccgaagtgctggaattaaagacatatgccactatgcccagcccaaattttattgtttctaactcacacaaaacctctgcatcctcctataacaatgagaaaacagagttcagactagttatgtgatctgcacaagatcacacagcaactaagtatcgaggtgcatgact

SEQ ID NO: 56349 - DNA, 589 bp, Homo sapiens
cccccctcgaaagtcttctagaattaattaacgcgggctgcaagagaaaagcccagttttgacctttcttttaaatgaaaatggggtgaaaagcacaatgcaactatatacatacacacacacaatgcaaatacacacacacacacacacacacacacacacacacaattttttttcttgagacaaggtctcactccatcacccaggcaggactgcagtgatgcgatcatggctcactgcagcctttacctctgggggttaggcgtttaagtgatctgcccaccttggccttccaaagtgctgggattacaggcgtgaaccaccactcccggccaactatatatatacacctcaagaggctattacctgtaactaaccatcatacttttagactaacatttttttaaaatgcaaaaagttactaaataaagtatcatgtccagatgtggagtctcaggcctgtaatcccatcactgtgggaggccaaagcaggtggatcacatgaagtcaggagttcaagaccagcctggccaacatggtgacacccgtctctgctaaaaatacaaaataactagccaggcgtggtggc

SEQ ID NO: 56350 - DNA, 600 bp, Homo sapiens
  misc_feature 15, 583: n = A,T,C or G
cgggccccccctcgnaaagtcttctagaattaattaacgcggggggactgaccagcacaacattcttattttataatactttggtttctttaacacttataagtttcaactgaactttagttatcagtacttatattaataatggaatcaattctgtcatctcttaaaatgtttatgacattaaactcaggatttcacgttctaaccacatccacaatggaaatccttcaggtttcttattctcccactcctagcacattatttttggtctcgtgttacctactgattccttaatttctccatttctgtctatacctctcttatatgttcaggaaaggagtgaggaattaagaattctagtgtaatcatagtaagcctgagaaattcttggtaaaaatccaactaaagatatacatagacagttcagagctcacaggataaatctgggctggagacataatttgcgaatattcagcacagagatgccatttaaagacataagtctggattaaatcaacaggaagaagttgatagaaaagatgggtttggaaggaatattgaaatacttcaatatgtataagtntagtggaggaaatgtca

SEQ ID NO: 56351 - DNA, 615 bp, Homo sapiens
  misc_feature 27, 599: n = A,T,C or G
cgggccccccctcgaaatacttctagnattaattaacgcgggcccttaatcaaagatgcataaagaagaaaacaattaataaaatcaagtgctaatttaagtgcacatttaatatgttccaaacacaattctaaattaattttgtgtatttaactcatttattcctcataacaaatttgtaaaatagtgtaattacttccattttgcaagggaattgaggcagaaaatttgttgacttgcctaaggctaggtagtcgtaataacagaatgataccattaaaaggatactgaagaatcaaggaaaaggaacatctacttgaagactcaagaataaaaggctgtcactgaaagtattttatcaagaaaaccagaaaaacaatattggaaacaactcagaacatccattaaaagcttgctatggaacaggaaacaaaagcctgttattactgtacaaactgaatctgtcatgtggaagaaaatcttggtaagccatttctaggaaagtatgaagagataaaatgatatgaaagccaaggataaagaatagatattgaagatctggtaaataaatccagcttaagaatgcaagattctctcanaggatggtggaagagt

SEQ ID NO: 56352 - DNA, 534 bp, Homo sapiens
ccgggccccccctcggaagtcttctagaattaattaacgcgggggggggcagtgcttattgtaacaaaattaaaacaccattcactcattacacatttactgagacacttactgcaggtcagacactagtacatagcacaagacacactagataaaaattcctgccttcacacaacttacattccagttgtaggagagagacaataagcaagtaagtaaaatgtatgttacgttagcgcaaggggaaaacagctaactcatattgggtagaggtggcgatttgcaatgttaaacacatctttaggcctggcgtggtggctcacgcctgtaatcccaatactttgtgaggctgaggctggtggatcacttcaggtcgggagttcaagccagcctggccaacatggtgaaaccctgtctgtactaaaaatacaaagattagccaggtgtggtggcgcatgcctgctatcccagctacttggaaggctgaggtgggagaattgcttgaacctgtgaggcagaggttgcagtgagcct

SEQ ID NO: 56353 - DNA, 574 bp, Homo sapiens
ccgggccccccctcgaaagtcttctagaattaattaacgcgggcattatagcatcctttggggaaccatttaaagtaacattaaagacctttcatgtctacaatgacaaaaagaaaaaagctacttcattttctaacctttgcagattctcagtgatctttgattttccccttctcttaggttgtttcattgtaaatagggaagagaaggagatgacttaagttcattcccttccaccatatgcaacccaaccccaaactcagctagttctcacatgaatactacatgtgtcaagcctgtctcctcatgatgatcacctgacaggctgcccaaattctattctagaccattacatcataatctgtgatgatggaacctatgcaccactatttttcaagttctctaggtaagtctaatgtgcatcaggttgggaccactgcctgaatgaaatgactagttaaataggttatgtgctgaaattagtctcttatgttaatccctgcacactcagcagacaactgaaagctagtggtataggtacttctctggctaaacagcagcaatatttggaaat

SEQ ID NO: 56354 - DNA, 603 bp, Homo sapiens
  misc_feature 43: n = A,T,C or G
cgggccccccctcggaagtcttctagaattaattaacgcgggnggaaatattccaagacccgcggtggatgcctgaaactgcagagtaccaaaccctatatatactatgttttttcctatatatacatacttatgacaaaagtgtggtccatgaaccaatcaagctccatcctacatctacagaatcggaatctgcactgtaataagagaataaaaccaaaatactatctttccttacattagtctttataacatcagaaaatacatagtaaatgtatagtaataaaagttacatatacaatcctaaaaataacactaacgaatatttctaggataagtatataaagcatttagcaaatcactcctagaccaattcagaaaaaccaccaattaaatctcaattatattttactctattctctgaagccaaaattatagatgacacagtccaacaccaaaataaaatattttaaatcatcctcccagactatgtggtaacctccacacaggccattagttaagaatagtaacaattataaagatgttccaaggattttaagaaatacctccctaattatttcactcaagttcttcatttcatca

SEQ ID NO: 56355 - DNA, 612 bp, Homo sapiens
  misc_feature 35: n = A,T,C or G
tgggtaccgggcccccccctcgaaatacttctagnattaattaacgcgggcctgctttcattttatagctgcctagtactttagttcaactttctatttttactttatatttttatttatgtgtatatttaattttcactcttatattaaagcccaaggctccaatttttattttatgcctgtttgtttctcatcaccaaattgcacacaaatgtaaatcaatatataactacagggtgagatttattttgttttcactatatagtttgtagatttattttatgactatatgtgaataaatcaagtttatatgctaaatttatggacttttatttttatccattttaaatcaacttttatgtttcttaaaagaatccatgcagatagtttaaaaagttaaataaacataagcttataaaaaatatagctgttcctctcattctcctgctatcacctttggaaatttacctcccatccatttcttctcttatatacctttaaaattgtgagcgcatgcacacacacacacactcatcttttaaatatttaaatgtattgattgacacagtactatgaaataaaaggtaaaaatcttttacctttcttatactt

SEQ ID NO: 56356 - DNA, 595 bp, Homo sapiens
cgggccccccctcggaagtcttctagaattaattaacgcgggaattcttacttttaatagtttttgtgtgtatgtgggtttttttttggtaatattcttggtttttcactaggacctcagtttaaatatattttcccctcgtttcccccgccccccaaccgcaatggccctgtaactagtagtcttgttttgtttgaagcagagtcttttgttgaaaagattttcctctagtagagaagctcttttaaatgtttatattgggatttcttactaactataacaatagaacacttttccctgttgacttctatgaagtgaaaatatttactacatagtgaaataaaaagcaatctaatgtgtatttcattctattgcgttaaaaaattacattaaaataaacaggaagcattatactatccagtgctgttgtacagtgtgaaatgcttcagtatctctaaatactgtatttctctttctgcgggaaggttggaattgtatgaaacagggtggagttgattaggtggaattttgttttgttgttgttgctggttagcttatatggctctttgaaggacaggagtcccttggtgtctgt

SEQ ID NO: 56357 - DNA, 405 bp, Homo sapiens
  misc_feature 17, 28: n = A,T,C or G
cgggcccccccctcganagtcttctagnaattaattaacgcgggtagatgatttctagcaggcaggaagtcctgtgcggtgtcaccatgagcacctccagctgtactagtgccattggaataataaatttgataaggtggaaaaaaaaaaaaaaaaaaaaaaaaaaaaaaaaaaaaaaaaagaaaaaaaaaaaaaaacaaccccccccaaaaaagaacctccacatacgcccaaaaaaaacactaatttacccccccccacatgaccctctttaaaccacgaacaaaaaagaaaaacccccccccccccccaacaaccccccccccccccacatccccctttcaccacccccccccctagcccggaggccccccccgagcgccccgccaaacccttgcgcaaccc

SEQ ID NO: 56358 - DNA, 578 bp, Homo sapiens
  misc_feature 489, 491, 510: n = A,T,C or G
cccccctcggaagtcttctagaattaattaacgcggggggagatgaggaagtacctgggagcttcaagggctttgagcatcttatagaaagagctcatttactgatattagctcttattctcctagagctcagtggccttggacctttttgtgtttgagctgacctggtgattctccgttgtgagatgttctgtagcagtaatggatggaggctattgggccctgttatgcattttgtggattaactgaaatggaaagtttttgatgggtgataatttttttctgtaaattcaaccggcccacactggctcacagctgtggctgtcttgtctctccacccacaggagacacggatgtgtttggtgctgcctccgttccatcaatgaaggagccacagaagcctgagcagcccactccaaggaaaagcccctatggtccccctcccactggcctctttgatgatgatgatggtgatgatgatgacgactntntctcggcaccccacagcanaccttctaaaacaggtatgtgttcctgccttcgtttctagacttcagccagaaaaagacgttgcctaa

SEQ ID NO: 56359 - DNA, 509 bp, Homo sapiens
cccccctcgagagtcttctagaattaattaacgcgggggggttgggggggtaaatctcatatctgtctctttctactttctcactgcctatgcctgcattgccactttcttgcagaccttccttgctccagcttctctcctataatcctgaccacttaaacactatctttcccttgtcactctctcattcacccacaaaaaccatccatgactcctttttatattaaacagggctgaactcctttcactctacctaaagagagaaacttattttccaacacttatcaatacatgtaaagtgtgctccaatcaggtgcaactcctcattctttgtaagttcactgtacagtcatgcactgcataacgaagtttcaattaatgatggactgcatatatgatggtggtcttattataatgaagctgaaaaatccttatctagtattcactatactatacttttaatcattattttagaattgtactccttctacttactaaaaaaaaaaaaa

SEQ ID NO: 56360 - DNA, 602 bp, Homo sapiens
  misc_feature 24: n = A,T,C or G
gccccccctcggaagtcttctagnattaattaacgcgggaataggcaagtaaaatattaagtttcttttcaaactgcaaactatcttctaaaagatcctttctatatttgaagcataattttcactctgctctgtttaaacaatatttatcagtttaagttgtatttatttttagcagttcaattaaacaagaatcattactttggaaagcatattaattataaattttttttttcttgacagaatcactcacaaaaaggagacacggtatacatttttaaaattcagaaatatgataaatttagtaaagttccaggacacaaaatcaacatacaaaaatcagtagcatttctatatgccaacagtgaacaatctgaaaaagaaattgaagaagtaatctaatcccatttacaatacccacagataaaattagatacctaggaattaatttaaccaaataaatgaaagatttctacaatgaaaactataaatactgatgaaagaaattgaagagaacatcaacaaatggaaagatattccatgatcatggattagaagaatcagtattgttaaaatgtccataccacccaaagcaatctaga

SEQ ID NO: 56361 - DNA, 441 bp, Homo sapiens
  misc_feature 25, 38: n = A,T,C or G
ctggggtacccgggccccccctcgnggatacttctagnattaattaacgcggggtcggtttaatggagtgtccacgcggagataactgcgatattggaacacctgtgagagagattgttctatagggctggaatattcagagttacattcttggaagtttctgtttttacttgcatcaaacacccctctgttgttctccatcatctttagccttttgtcctccaaagatgagtactagggatcatgtgtttaaaaaaagaaaggctacgatgactgggcaagaagaaagatgggaaactgaataaagcagttgatcagcatcattggaacatggggacgagtgacggcaggaggaccacgaggaaataccctcaaaactaacttgtttacaacaaaataaagtattcactaccaaaaaaaaaaaaaaaaaaaaaaaaaaaa

SEQ ID NO: 56362 - DNA, 315 bp, Homo sapiens
ctaattttgtttgtgtttatagaagaaaccgggggaaaccatgtgagccaggagggacgaaaccttctgaccgcggaacccggccacctaagcctgccaaagagctgggattacaggcctgagccaccatgcctggcccagtatacattttaaaaaaaaagtgcctcacacttgttgagaaacaggaaagcatgacccctattgggctgggtgtgggggtctcaactatatatacatgaaacaaataaaaaatttaaagcggtcgccaccgagggggaacgccaattccgcctatactgagtaacattacccccg

SEQ ID NO: 56363 - DNA, 485 bp, Homo sapiens
  misc_feature 435: n = A,T,C or G
cgggccccccctcggaagtcttctagaattaattaacgcgggtactttgggttagtagaagctatacttcttttccaaggaaagacagactgtcttaagattctaactgtgcatcttggtgataagaagttcttagggttgttaaatagagccaggaagcgtgaagctttctctctagatcatgacaactcatctagtaccttgcattacaaaggagctctaagtccatttactttgcaaggaatgaagttccagtgattaatgtttttgagaaatttgtattgggattgtggggtccagaaggttgccttaagtaactgttttcatgactcctaggtccctagatgttgagaagctctggattgaagctgtcacaaaaatagtgagtgggctccgtagtcactccatttagcataatacagagtaggacagctntgtgacatttctcaggctatttcccctgacctctcatcaatgctgacgtt

SEQ ID NO: 56364 - DNA, 467 bp, Homo sapiens
  misc_feature 33: n = A,T,C or G
ggtaccgggcccccccctcgaaagtcttctagnattaattaacgcgggggagctactcttggtcttaatgagcaagaaaataagtttgagattacctctgtgattcttagatctttatcttatttcacaattttatgcaaggttatgtcagtctaggaattagtgggtcagataactgaaatgtgggaaaatacatagggcaaaattaggtaggcatccttgtcacaataattgaaagttcaaattcctttatcagcttatctttttaagtccctctctgtaaggtttctgtttcatgtaggtgtgtttactattcactgagtttgcattgagagttccactgttcttttaggagtatcccagccatttgatgctgcttcacttattgcttgataggaacctaagactatttaactgtttgctcctagttcattttcaaaaaaaatttaatacaaaaaaaaaaaaaa

SEQ ID NO: 56365 - DNA, 468 bp, Homo sapiens
cgggccccccctcggtcttctaataataacgcggcaggctcagctacaatcctattctgcctgacacacaactgcctgtctctcaggatttgacaatccatatatgaatcccctgaaaacttattggtgtgaaggaaacatcactggacacaacactgaaaatggccatagtccaggcatggcggttcatgcctgtaatcccaccactctgggaggcttaagccgctagatcacctgaggtcaggagtttgaaactatcttggccaacacagtagaaaccccttttatactaaaaatacaaaagttatccaagagtgttggtgcatgcctgtactcccaactaccagcgaggctgaggcaggagaatcacttgaatcccttaggctgaggttctggtgagctgatatcacgccactgcactccagcctgggcaacagaacgagactccgtctcaaaaaaaaaaaaaaa

SEQ ID NO: 56366 - DNA, 603 bp, Homo sapiens
  misc_feature 49: n = A,T,C or G
cgggccccccctcggggtacttctagaattaattaacgcggggtggggngaaaaactattccactagagacacccttaagagagtcacagcctaaagatacagacctactaaatactaaagactaagaaacttctaatattgaaatgcaaagaaaaaaattgaaaaaaacaaaaacaaaagcagaacagaacatcagagaccagtaggataataataaaagttgtaacctccatgtacttaattggaatatcagaagagaagaaaaagagaaagaataaatgtttgaaataatagctgagtgctttccaaaactgacagatgtcaaactaggaagctcggagaaaaacaactggaaaatcaccaaaaaaccacatgtaggcatattatttgccaacaaacaaacaaactttaaataaaccagataaaactacacctctctgcaaaatactcaaccagtattcctcaactgtccaggtcattaaataaaaacaggagaagtctggccgggcacagtggctcatgcctgtaatcccagcactttgggaggtgaaggtgggcggatcacaagctcaagagattgagaccatcttggccaacatggt

SEQ ID NO: 56367 - DNA, 587 bp, Homo sapiens
ccgggccccccctcggaagtcttctagaattaattaacgcgggtatgatcagttttcttctaaggaaatgaggaaggctgatgtgagcaccctagatttttggtcacctttccttccaccaatgttttctcatcactgtggcatgactgccttctctactgcttgtaaaactgtattctgaagaaccttagaggatatttagtaagtaacataataaaatagtgccctcatcctaaacctttgttcatgtcttccttcctaaaactgatcatttcactttaaaaaaaaaacaaacaaacacatttccttttttaaaaaatttaatttcattttattttaagttctgggatacaaaaaaaaatttttttttctttactctctttttgtttcattgttacttagggactcttgttaactgtttttggtggtatacttttttcatgtctatatacttttcttcagaaactgaatgtaataattgtttaaattattagcttggtcctttttatgtcaaaaatattgaaaaattattggctatgtttttaagttcagaaaagcataagatgatcctttggagttttatatca

SEQ ID NO: 56368 - DNA, 442 bp, Homo sapiens
  misc_feature 42: n = A,T,C or G
gggccccccctcggaatacttctagaattaattaacgcgggnaagcaatattagcaaatgaaataaccacacattgctggtcaagtgtaagataatgtcaaagtattagcattccttgagtttctaccaagagcaattattacttaacaccaaaagtgcagaagtataaatagctgactgtatcacagataaccaattatttgctgtccaaaacattagccatgagctacagaggactatttcaattcaaattaatgaaaataaaataaaatttagttccctcagtcatagtagccaaatttcaattgttcaatagcctcatgtgatcagtggctaccatactggacatcagatataaagcatttccattaagcagaaagttctattaaacagcactaaatgtggttaaaattccagccagatactaagaattaaaattgac

SEQ ID NO: 56369 - DNA, 555 bp, Homo sapiens
  misc_feature 9: n = A,T,C or G
acttctagnattaattaacgcgggcttctttccaccaccacaagctaagctccatgaaggcagggaattttgtttacctagtacctagcacctagctcagtgtctgatgcgtatttggcaatcaatgaatatttgctgagtgcataaatgaatgagtggatgtcatgaaccaagttctttttcagatacctatattattctattacataccttaaagtaaaggctcactcaaagaaaaagtgtatggcttttgactgcaaagacttgaagggcctcaacggtgttgatactgtttaaaaataaagtatacaaccctcatcaaagagggttttctagtactcagtatctcaaaatttcttcagggattccagaaaaaaaatggacacgtgagcaattcaaacttttgtctccaagaagattggtatgcttataaattgactcactctttgtttccatattgctacatatgctcaaacctaattccactcctggcttttaagatctggcctctcctgtactctccccagacatttgggctcataatttgtatgaatg

SEQ ID NO: 56370 - DNA, 391 bp, Homo sapiens
ccgggccccccctcgaaagtcttctagaattaattaacgcggggtggcttacacagagggagtttttcctttgacatcctatgtttattcaaaagctctaccctcacaacaactcttgcaaattagtgcacatggactgttttaccaagcatttagatttcacttgaacttgtgtatttgtgtgtgagtgtacatgcacacacacacagtcacacacatttacaggtatgggaagaaagaactgttaaattggaataacaggtcaggtgtgctggctcatgcctgtaatcccagcactttgggagcctgaggcgggcggatcacctgaggtcaggagttcaagaccagcctgaccaacatggagaaaacccgtttccaaaaaaaaaaaaaa

SEQ ID NO: 56371 - DNA, 392 bp, Homo sapiens
ctccaccgcggtggcggccgctttttttttttttttaggggattttagtcctttaggggaaaaagtaagtcctttttcttaaactcattttttcccatggggacaacaagggtccaaaaaaaggtcctttggaaaacagttcctgcttttaactaaacagcctttaaataaagcagggcgattttttcagtacccttgacacccaaatttaaaagtgctgttgcaacattaacaaaaacctttttttgaagcggttttggaaatcacattgaatcctgatgatccaacctagggggatccatactttgcaaactttaaaaaaaatttttttcccttaaacaaattttccccttaaatttcctttggaaattttgacttggaatcactttttt

SEQ ID NO: 56372 - DNA, 486 bp, Homo sapiens
tttttttttttttttagttaaaaaaattttttttttagaaaggtccttttaattagttttagggaaggtccctgaccacagggtaaatatattttttttcaaattggcaaactttacccctttaaaatttttacaaagaggatggtttttttacaggttttacaaaaaaggatcacttcacaatactggggacccagttacaatggaatctttttctcactttttattccactctgtccttataaaaaaaacaaaaagtttgggggaagttccttcccagggccggggaaagcccgtaaagcaaaatcaggggggcaaagggatccaaaaaaattcctgtttttttaaaaaagggcaatgccctgtttcccgggaaggttccttagatttaatacccacctgcacccaaccttaggggttttccaactaaatatccaataaaggggtctgccaggataacatggttgatgaaaaaaagctggataa

SEQ ID NO: 56373 - DNA, 480 bp, Homo sapiens
cggggccccccctcggaagtcttctagaattaattaacgcggggtagcagaatctaaaagataatcatgtgaacgggagattatatttaaaaaataaactttgaaattcataaaaaggaaaatgttaaagaatgtaaaattatactggtagaaaaaaaatttttttttttgaagatggagtttcactcttgttgcccaagctggcgtgcaatggcacgatctctgctcactgcaacctccacctcccaggttcaagcaattctcctgcctcagcctcccaagtagctgagattacaggcactcgccaccacgcctggctaattttttgtatttttagtagaaacggggtttcaccatgttggccaggctggtctcgaactcctgacctcaagtgatctgcccacctcggcctcccaaagtgctgggattacaggcatgagccattgcacccggcagaaattttttaaaaaaaaaaaaaaa

SEQ ID NO: 56374 - DNA, 603 bp, Homo sapiens
  misc_feature 573: n = A,T,C or G
cccccctcggaagtcttctagaattaattaacgcgggtccactgagaagtgagggtcaggtttgaagcctctttggtaacaggaatgctttgggaggccacaaaagttggcagggttggagggtgcctagcaccttggcacaagcaagcaccaggcaatcactcacacctacataaatatacagtctaaatatgaggaatggaaagaaatcatacatacataccatatatgataataaagacaattgtaccctaccccatcatcctcatgtactatagctacaaatctgcacagttaataatcttgtcattttatcacaaattgatatcactttacagaagcagaagtggggagtgctaaaagcaataccgaaagtcctggggctaaaaagagtgtcttgacagatttcagtgtaaaatttcaaatcttccaaaggatggagtaattctgggaggatgagtgaggatgaacaacagagggtggcccagaagaccacaccagaaaccctgtattctcctgggtagagctgaacaggttgggaaagccccacaggtaggcagttgctattggctntttaacagatggggcacatccttttcatct

SEQ ID NO: 56375 - DNA, 486 bp, Homo sapiens
tccaccgcggtggcggccgctttttttttttttttgggcccggggttttttttttttgggtttccctttaagaacctggatcccccaattttacccgttttttacccaaaaggtcccaggtaaccccaatttttcctgccaattttttgtccaaaagggccacttggccgggcccttaattaaaaaccgcccttttggaatttgggccaaccggtttaaaaatgccaaaatggaaaatttccttttgaaaaatttaaaaaaagggtctccccccttaaaaaataaaaggtggtttttcccaaaaatgtttaacattccggggtttcaggggacacccataaaaatctaaaaatttattccgggcaaaaaaaaggggaaatattttggctttccccggaaaacccttggcctccaaaaatccaaattttcccgggacctcggggaaaaaaattccaaattttaagcccattccctaatttttttttt

SEQ ID NO: 56376 - DNA, 328 bp, Homo sapiens
  misc_feature 290, 291, 292, 303, 304, 305, 306, 307: n = A,T,C or G
cgggccccccctcgaaagtcttctagaattaattaacgcggggtgttagctctttgaatgttcttgaaattttagactttctttgtaaacaaatgatatgtccttatcattgtataaaagctgttatgtgcaacagtgtggagattccttgtctgatttaataaaatacttaaacactgaaaaaaaaaaaaaaaaaaaaaaaaaaaaaaaaaaaaaaaaaaaaaaaaaaaaaaaaaaaaaaaaaaaaaaaaaaaaaaaaaaaaaaaaaaaaaaaaaaaaaaaaaaaaaannnaaaaaaaaaannnnnggggcccccccggggggggac

SEQ ID NO: 56377 - DNA, 442 bp, Homo sapiens
tccaccgcggtggcggccgcttttttttttttttaaaaaaaaaaaagggtctcctcctgtcccccaggcaggggagcaatcatagcatcctgtaacctaaaactttgggcctaaagggacccaacccactgggcctgtttccgtttttttttggaaagggcacccgggtttttaaggacttgggacggggttttttttttcctacaaccacctgcctggaaaaaccccaggaccctgtcccttgttcctccttttcaggggcttatacttaagtttacatgaaaaaagtgacaggaacctttccaaatgggggcggggtttctgacctggctggcatgttttagggggaaagggtagggggccacctgttacatcgcctcctttttcccacagggttaaaatgaggagggctttacgttactccagcccccctttattcatt

SEQ ID NO: 56378 - DNA, 396 bp, Homo sapiens
  misc_feature 27: n = A,T,C or G
cgggccccccctcggaagtcttctagnattaattaacgcggggggagagcatatacagtggcctcaatacctgcctgcctgacgaggccgaacttggatgcaaaggaaccgcttcgtccatgggacaccatgccaactggacacgcatctacctgacattggctatgagaccttctctacctacatcgatgcttctcactgcgtagggggggtaccttggcaccgtccaagtctaccactgtctgcagtggcgcatggcgcacaacgccccgccgcaaaagaacagagcaccgtccagactcatgtgaagactggggggctcattctcctgatctgagacgcccaatgcctgctgaggagagacttcacctgcccccatttccaggtcaacaggac

SEQ ID NO: 56379 - DNA, 502 bp, Homo sapiens
gcggccccccctcgtaaatacttctaggaataattaacgcggggtacttgtgtgttttgtgtaattattgaagtgcaatgatgtataaaaaagtggattcacctgtttttaaaaataaaacattgataaaaaaaaaaaaaaaaaaaaaaaaaaaaaaaaaaaaaaaaaaaaaaaaaaaaaaaaaaaaaaaaaaaaaaaaaaaaaaaaaaaaaaaaaaaaaaagggggcccccccccggggggacccccaattcccccaaaaaggagggtaaaaaccccccccaaaggggcgttttttaaaaaacgtggaaggggaaaaacccgggggtacccaaaaaaaaagagcttggaaaaaaaccccttttccaaagggggggaaaaaaaaaaaaggcccccaacaaaaccctttcaaaaaatttcccccccccgaaggggaaagggaaaattgaccccttaattttttgaaaaaaacccgataaaatttttggaaaaaaaactatttt

SEQ ID NO: 56380 - DNA, 287 bp, Homo sapiens
tccaccgcggtggcggccgctttttttttttttttggtttggggtttaagtcaaaggaaaacccagagggttctaactccctaaaaccaggtttttaaagggcccttgtttgttttttgaaccccaccagtgttaacaccccaccaaatggggggcccgttccattgttggccctaaaaaaccccgttttaatccccggttaaataaatttaaaaatacctttaaggggggggcccggacccaattttttgtccctttaagggagggtaaatggccccctgggcaaa

SEQ ID NO: 56381 - DNA, 476 bp, Homo sapiens
cccccctcgagagtcttctagaattaattaacgcgggggagaggttcttattgtccatcacgtacaaagaactctgaaaacactttaggggtttgcacgggctcgtctctagcacgccagaagcaaagatagacagacaaatacaaaaataggtattaaacacgagcaactggctgggtgtggtacctcacgcctgtaatcccagcactttgggagactgaggtgggcggatcacttgaggtcaggagttcgagaccagcctgaccaacatggtgaaaccccgtctttactaaaaatacaaaaaacattaaccaggcgtggtggcgcctgtagttccagctactcgggaggctgaggcaggagaatcgcttgaacctgggaggcagaggttgcagtgagcccagatcgcgccacctgcactccagcctggtgacagagcgagactctgtcaaaaagaggggaaaaaaaaaaaaagc

SEQ ID NO: 56382 - DNA, 319 bp, Homo sapiens
  misc_feature 16, 29: n = A,T,C or G
cgggcccccccctcgngggtacttctagnattaattaacgcgggggtgggcctgggccgcccgtcgtacctgatggtaggaggcagtagttccccgcttcccttccgcgggagggagagttaggttggcattggaaacatttttatttgcagttattttgtctacttttactactgtgccttgcttatgtttgttaggaccaaacctcaaagcatggctaagagtgttcagtagaaatgggaatctatggaaggaggtgctgaaaaagaaaattcctttctcaggaatctattgaaagaggtgcaaaaaaaaaaaaaaa

SEQ ID NO: 56383 - DNA, 435 bp, Homo sapiens
cgggccccccctcggaagtcttctagaattaattaacgcgggcctctcccacttactagctgtgtgatctgaggtgagctacttaacctctctgtgcctccatttcctcatctgtaaaatggaataataattatacatatttgaggcccggcagtggctcacccctgtaatcccagcactttgggaggccgaggagggtggatcacttcaggtcaggagttcgagaccagcctggccaacatagtgaaaccccaactctattaaaaatacaaaaattagccaggtgtggtagtgggcacctgtaattccaattactcaggagcctgaggcaggagaatcacttgaacccaggaggcggaggttgcagtgagccaagatcacgccactgcattccagcctggacgacagagcaagactctgtctcaaaaaaaaaaa

SEQ ID NO: 56384 - DNA, 455 bp, Homo sapiens
tccccgcggtggcggccgctttttttttttttaatattttttttttttttttttttttttttttttttttgggggcccaaaaaaattttttttttttttttggggtaaaaaaaactttaaaaaaaaccccgggggggaaaacccccccccaattcccttaacccccccaaaagggcccccccccctttggggggggccccccctttgggaaattaaaaaagggcccccccccctccttttttttgggggggcccccccccaaaaggggggggggggggggaaaaaaaaaggggcccccccccccttaaaaaaaagggggccaaaaagggggggggcccccccaaaaaacccccccgttaaaaaaaaaaaaaaaccccccggggggggggcccccccccccctttttttccccttaagggggggaaaaaccccccccggggaaaaaaaaggaaaaa

SEQ ID NO: 56385 - DNA, 411 bp, Homo sapiens
ccaccgcggtggcggccgcttttttttttttttttttttttttttttttttttttttttttttttttttttttttttttttcgaaaaaaaaaaaaaaattttttggggggtttttttgggccgaaaaaaaaggtcttcccccccgggggggaaaaaaaaacccccccccgggggcccccccctttttttcccccgggggggggggggggggggaaaaacccaaaaattttttgggggggcccctttttttttaagggggccccttttttttgaaacacgggaggttttttttttgggggacccccccccccgggggggggggaaaaaaaattttccccccccccttttttttttttttttttggggggggggggggggccccccccccccccgggggggggtttttttttc

SEQ ID NO: 56386 - DNA, 406 bp, Homo sapiens
tccaccgcggtggcggccgctttttttttttttttttttaaaaaagggagttttgttttgttccccaggctggaggaaaggggcacaattttggttaacggaaagcccccccttccggattaaaacatttttcctgcctgggcctccaaagaagggggaactttagttgcccccccccaccccgggttaattttttgtttttggagaaaaaaaagggggtttcaccgggtaacccgggagggtctcaatctcctgacctgggaatccccccccctaaccctccaaaagggggggaataacgggggtaacccaccggccccggccaaaattaaaattttttttttaaaaaacggggtctcccttttccaaccgggagggcaggggcaaattttggcttaagggaacc

SEQ ID NO: 56387 - DNA, 400 bp, Homo sapiens
tccaccgcggtggcggccgctttttttttttttttaaaaaaggggaaatttttggcctccttaaaaaaaaaaaaacacttgcccctcaatttggggggaaaaaaaaccaaatttccctttttttcccgggggggagagtttaaaatttttttttggggttttgccaccttacccggggggggaaccggcccttccttttacccttcggggcgttccaaccggaacccctttccctttttgccttctttggggaggccctggggggggataaaaaaaagttccccttgattcccttgtccggggtataaatcggggtcctttgtggcccccccaaaaggttcccctctttttggggggggtttaattttaaacctggaaacctttttccccttcttttttt

SEQ ID NO: 56388 - DNA, 439 bp, Homo sapiens
tccaccgcggtggcggccgctttttttttttttttcctttaaaaaggttttttttccacctgggaaaaatgagtccaaacccctgggtgttttttgccagggaggagtggggattagccagaaaaaaaaaaagggtaggagccagggtggggtttaaccttcacaggggctccctaaaaaccctccccaggaagggtggggtggcttgggggttaaccccggacctcaggcccggagaaaccccttggggaggagccccaaaacttaggcgccccccacctttttccccagggaaacttccagaacttaaggcacttggctcccaatttctcccgggagggggaccaccaggagggccccaaacccattccccttaaacaaaaaaagaagaaaggacctggggcccatttcctggcgggggtccccctgaaagtttctg

SEQ ID NO: 56389 - DNA, 425 bp, Homo sapiens
  misc_feature 16, 29: n = A,T,C or G
cgggcccccccctcgnaaatacttctagnattaattaacgcgggcaagagcagggacaatgttttctgtatgttctattgtgcctagtacactgtaaatgctcaataaatattgatgatgggaggcagtgagtcttgatgataagggtgagaaactgaaatcccaaacactgttttgttgcttgttttattatgacctcagattaaattgggaaatattggcccttttgaataattgtcccaaatattacattcaaataaaagtgcaatggagaaaaaaaaaaaaaaaaaaaaaaaaaaaaaaaaaaaaaaaaaaaaaaaaaaaaaaaaaaatttaaaaaaaaaaaaaaaagcggccccccccgggggggacctccatttccccctatagggagtctttttaccccccctcattggccgtgtttt

SEQ ID NO: 56390 - DNA, 489 bp, Homo sapiens
  misc_feature 43: n = A,T,C or G
gggccccccctcgaaatacttctagaattaattaacgcggggnaaacaaaaaaaaaaaaaaaaaaaaaaaaaaaaaaaaaaaaaaaaaaaaaaaaaaaaaaaaaaaaaaaaaaaaaaaaaaaaaaaaaaaaaaaaaaaaaaaaaaaaaaaaaaaaaaaaaagggggccccccccggggggaacctcaatttccccttatagggattcttttaaccccccctaattggccgtgttttaaaaacgtgggaatgggaaaaacccggggttacccaaattaattcgctttgaaaaaaatccccttttcccaagttgggttattaccaaaaaggcccgaccaaatcccctttccaaaaatttgcccaccctaaatggaaaaggaaatttgaaaccttaattttttggtaaaaatccgggtaaaattttggtaaaaaaacctattttttaaacaaatgggccaaattgggaaaatccctttttaattaaaaaaat

SEQ ID NO: 56391 - DNA, 412 bp, Homo sapiens
ccgggccccccctcgaaagtcttctagaattaattaacgcgggggaataaactttgaagttttggattttacttatttttatccccaaattgttgctattttttaggatctgaaacaaaatctttctaaaacattgttttagttgtcaaagcaccaacaggacattttgggatgtgaaatgtaatttcttggaatctgtaatttgtacttaatatttcaggcttgtatttaatataataaataggtgtttgttaaaaaaaaaaaaaaaaaaaaaaaaaaaaaaaaaaaaaaaaaaaaaaaaaaaaaaaaaaaaaaaaaaaaaaaaaaaaaaaaaagggaaaaaaaaaaaaaagcggcccccccccggggggaaccccaattccccctttaggggggctttttaaccccccct

SEQ ID NO: 56392 - DNA, 376 bp, Homo sapiens
  misc_feature 9: n = A,T,C or G
ccccctcgnaaatacttctagaattaattaacgcgggtgccacaaaacaccacgtatacttctaaagattttgactctagtccctgggtcctgacaggacttttggactcacctatggcctataggacctcaccatcctggagggaacgacacaatcccggctggcgtcgccacctactgagtgcaaagccttacggttttgaacaaacatatggcattgtttattcaagactgtattttttctaacagatagtagttaaacaaagcatacttacagaagcccatgggtgggatcaagtgctgtgttggcttcaggtttgaaccactgcagtcatagtggcggaagccacaaggttgcttgtgtccacccaactgc

SEQ ID NO: 56393 - DNA, 389 bp, Homo sapiens
tccaccgcggtggcggccgcttttttttttttttggaaaaaaacaaaatttgttaaatccttattttcaacctaaaaggtattttaaatttccaaaccttttttttttttaagccccaggtttttttgggaaaggcccgtgggaatgaaacaaaacctcccggaaaaaagggcccccgtgggaaaaacagattactgttgtaaaaagggcaaacccccctccaccaattgaaaaggtgggggttttgggtttcgggcccaccccaaatccaaggaccttgaatcctgtggtccccagggggtggataatttcagccaagggccaaaatacccccttctttaatcgaccaggtcggggtccttttaaaggtttaaaaaaaaaaataccgg

SEQ ID NO: 56394 - DNA, 329 bp, Homo sapiens
tccaccgcggtggcggccgctttttttttttttttttttttttttttttttttaaaaaaattttttttccttttaaaaagggggaaagggcccactttaaaaaccgggccccctttaaatttgtgaaaaaaatttcccaaaaaattttttttttaaactttttagggggggtttgcaaaaacccccttggggaaaacctttttttttggggaaaaggggcttttttcccccggtttattttttttaaaaaattctttggggggggggcccgccccccattttttttcccttttagggggggaaaatgcccccctggggaaaaaaaggga

SEQ ID NO: 56395 - DNA, 271 bp, Homo sapiens
  misc_feature 236, 237: n = A,T,C or G
gccgcttttttttttttttttcttttttttttttttttttaaaaaaaaatttttttttttttttttttttttttttccccctttttaaaaaattttaaaaaaggtttccggggggccccccccccccccttttagcccccttaaaagggggaaaaggcccccccggggaaaaaaaaggaaaaggggggggggggggaaaaaaaaaaaataaaaaaaaaaaaaaagagaaaaccggnnaaaaaaaaaaaaaaaaaaaaaaaaaaaaaaaaaa

SEQ ID NO: 56396 - DNA, 593 bp, Homo sapiens
ccgggccccccctcggaagtcttctagaattaattaacgcggggatataccaaatagaaatctaaattttgaaatatttgaaattgaagcatttgagtaacttatctgtgaaaggtccaaggagatgctctcctaccaaccctactaaatttgtttcctttctaggcctcactgaaccataagtgttttcatcaaaaaggagcagagtggcaggtccaaactatatacctgataactttaggattaaagggaaagatagtgtaccattgcctccctgcttttattgtcatttaaagtttcgtcttcatggtgagtgattctgtagccaagtttgtgaccacccaatgaactatatagctgctgtatgtcctgcagagctcatccagaatagaatgttcttgatcaaaatgagagtgctagaaagctcatgaggctacaaggctacaaagaaaagtatattccaatttgggatgttattaagataattaggcagcccactctactcccaagagaagaatgaccaatttaatctgttgtcaccaagcggtttacagcttaaggccttttctgtaaaaattaaaatgcactcaaag

SEQ ID NO: 56397 - DNA, 242 bp, Homo sapiens
tccaccgcggtggcggccgcttttttttttttttttaaaaagggtttaaaaatttttttttaaatggggaagaggtaaaaaatcctaggttaagtttaaagggatttctttccctatagaccttgccaaaaattttatggggctgtttttgagtaaaaaaaagtccccccgtaccccaaaagggcttccaaacatttgattttttttttttttccccccgttaataaattttaaaagtcctt

SEQ ID NO: 56398 - DNA, 520 bp, Homo sapiens
cgggcccccccctcgaaagtcttctagaattaattaacgcgggggtgaagggtggtatcttggcagttgaagctggggcaagaactctgggcttgggtaatgagcaggaagaaaattttctgatcttaagcccagctctgttctgcccccgctttcctctgtttgatactataaattttctggttcccttggatttagggatagtgtccctctccatgtccaggaaacttgtaaccacccttttctaacagcaataaagaggtgtccttgtcccgagaaaaaaaaaaaaaaaaaaaaaaaaaaaaaaaaaaaaaaaaaaaaaaaaaaaaaaaaaaaaaaaaaaaaaaaaaaaaaaaaggaaaaaaaaaaaaaaaagcggccccccccgggggggacccccatttccccctttagggagtcgttttaccccccctccctggccgtgttttaacaacgtgggaacgggaaaaacccgggcgttccccaatttattcgcttggaagcaattccccttttcccc

SEQ ID NO: 56399 - DNA, 437 bp, Homo sapiens
tccaccgcggtggcggccgcttttttttttttttttttttttaacaaaaagggcttttaagagagaacttttagcccccccttttatttttttaaggggaaaaaattttctttaaggaaaaaacgggtttccccaaggccccttttttttcccaaaagtttttttttcaagtttttaaaaattttttttttttggggcccctttttaacccctttccccctttggtgaaaaaaaccccctgatcccgggggcgggggcccccccctttatccccagaattttggggggttaagggggggggtttccctgggggcgggatttcaaaacccccccgcccaaaattaaaaaccccctttatttaattttaaaaaacctctcggggggggccccggccccccctttttttccccttttgggagggttatttcccccccggg

SEQ ID NO: 56400 - DNA, 294 bp, Homo sapiens
tgggtaccgggcccccccctcgaaatacttctagaattaattaacgcgggattgaagctgagacttacaataacaagttgagtggcaagcctggtatgctgtgtcttattgccagaatcttagtaaatgtaatgttttaaaaaaaaaaaaaaaaaaaaaaaaaaaaaaaaaaaaaaaaaaaaaaaaaaaaaaaaaaaaaaaaaaaaaaaaaaaaaaaaaaaaaccgcccccccccccggagaaccccaaattacacccaatggggggcccccccacgcgcccccactaaccgcc

SEQ ID NO: 56401 - DNA, 244 bp, Homo sapiens
ctttttatttttttttttttcacctttggaaacaaactccccccggaaaacaaaaaaatttggtttccggggggagtttggttgcaaagcctaaccttaaaggaattgagggaggggcccccccaggaaggaaccccgggcgtttatttggacccaccacgggaaaacccaacccggcccggccccggcagggggggaaaaaaaaaaacctttttttcaattccgggggggggggggcatggcc

SEQ ID NO: 56402 - DNA, 101 bp, Homo sapiens
  misc_feature 35: n = A,T,C or G
tgggtaccgggcccccccctcggggatcttctagnattaattaacgcggggctggcggcgggggaccttcatccggcggttcagggcgtcggactctccat

SEQ ID NO: 56403 - DNA, 535 bp, Homo sapiens
cggtggcggccgctttttttttttttttccttttttttttttttttttttttttttttttttttttttttttttttttttttttttttttttttttttttttttttttttttgggggggggaaaaaaaaacctttttttaaaaaaaaaaaaaaaaaaaaaaaaaaaaaaccccaaaaaaaaaaaaaaaaaaaaattaaaaaacccccccccaaaaaaaaaaaaaaacccacaaattgggggaaaaaaaaaaaaaaaaccccccccccccgagggggggcccccgcgcccctcaaaaaaaaaaaaaaaaattttttttgccccccccgggggggggggcccccccccttttttaaaaaaaaaggggttaaaaaaaaaaaaccattcccccccaaaaaaaaaaggggaacaccaaccttttttccccccccccacaaaaaaaaaaaaaaaaaaaaagggggggggggggccccccccccccctttttttttttaaaagaggaaaagaccccccccccccaaaaaaaaaaaaaaaaaa

SEQ ID NO: 56404 - DNA, 441 bp, Homo sapiens
ccgggccccccctcggaagtcttctagaattaattaacgcggggctgctctcgaactcctgaccttgtgatccactcacctcggcttcccaaagtgctgagattacaggcatgagctactttgcctgacctgaaatgtttttaaaccagaagactttttatagaccatatctgtcattgtttaggatctaagtaccacatctttgtattcggtcattatggccatgtagcaggatggcggggagacagagtcttgccctgtttcccaggctggaatgcagtggtgtgatcatagttcactgcagccttgacctcctgggctcaagcagtcctcctacctcagtctcctgagtagctgggaccacaggtgcttaccaccatgtctagcttgggtgacagagtgagactctgcttcaaaaaaaaaaacaaaaaaaaaaaaaaa

SEQ ID NO: 56405 - DNA, 396 bp, Homo sapiens
caccgcggtggcggccgctttttttttttttttaaaccaaaaactttcttttttttcctttcttttttttatttacttttttttttttatcccccgggggggggggggatttttaaaaccccgggcgcccgggaaaaaaacctaggccgggaaaccccccccccccttttcaacggccccaaaaccccagggggacttttgccaaggcccccccttcacttaaccgggaggggggaaaccccccggtttcctggggtttttaaccccccccccccccccggggccaaaaaaaaaacccccccccggagggccaattttttttgggtaccacggggtataaaaaaggaaaaaattggggggacccccacccccggggggggcaaaatcccaaaattt

SEQ ID NO: 56406 - DNA, 605 bp, Homo sapiens
  misc_feature 493, 510: n = A,T,C or G
ccccctcggggtacttctagaattaattaacgcgggcccctatagtatactttaaattgttattttagagtgtattccttctacttgttaaaaaaaaaaaaaaagttaagtaaaacagcctcaggcaggtccttcaggaaggattccataagaaagcattgttgtcataggagatggcagctccagacacgttgctcttgaagactttccaatgggacaaaataaggaagtcaaagacagtgatattgatgatcctgaccctgtgtaggcctggactaatgtgtgtgtttgtcttagttttttttttttttaacgttaaaaagtaaaaacagtgaaaacattttaaaatagaaaaaaaccttacagaaacagggtataaagaaagtttttctacagctgtgctatgttttaagctaagcattactaaaaaacagtcaaaaagttttaaaagattaaaaagtttataaagttacagtaagctaaggttaaattnttattgaagaaaaaaanattttctaaataaatgtattgtagcctaagtgtacagtggttataaaatccacagtagtgtgcagtaatgtccttggcctcacattcactcacca

SEQ ID NO: 56407 - DNA, 467 bp, Homo sapiens
tccaccgcggtggcggccgcttttttttttttttcccttcccatagggggccttttaaatttcttttaatggccttttaatttgggctaaaatttcccccccaaaattgattaaaaatcctaaaaccaaatttccttcctttatccccaaggcgggaaaaaaaactttcaaccttttttcagaaaatttgttttctatagggtttttttttataaaatggaggatgtccccttttttcccttgggggcggaaaggttttttttttaaaaaaggaaggaggggggaattttaaaagggtttttaaaacctttggggagaattagaactttttttcggtttgggaaatggaaaaattggtccaatttgaaacaaattttactttcccagggaaaatattacttttaaataaaagccatttttttcttatttatcccgggatccaattttcaaaaactttggagtatttt

SEQ ID NO: 56408 - DNA, 379 bp, Homo sapiens
ttttttttttttttggtttaagaattaattaacctgggggaccaaaattaacccaatttacccccaccctgcccttattttataaagggtttaaaaggtaattttaattttttttgaacaaagggttcctttctttaaaacaaattcccaaaaacccggccaattattttttaaattttccccccaatttctaaccaaattttgtaattgggaagtaacctttgcccccctaaactttttaaacagcctttggggccaaaaaatggaaaagtccaattctgcccaaaatgttgatgtgggaaaaaaaaattctttgccccccccctttaagcccccacccctcctaaacctcccgggggaccaccctgctcaaatcctt

SEQ ID NO: 56409 - DNA, 544 bp, Homo sapiens
cccccctcgagaagtcttctagaattaattaacgcgggatatcccaccttttacacattgatatgtcccaggactgatatgtcccaggactcagtcctcaatcttctttctcatgacttttactaccttgtgtgtgctaatgatttccaaatgcgtgtctccagcctagatctctctccttaattccagacttccataccaacctgcctacttgacatctctgtttgattggtcacgaactgttgggtatcacaaacttaccaggtccaagattggggtaccgatattctttctcatacctacccctcacatggtctttcctacttgcattaatggcaactcttgcagttgctctgctagaaactaaggtgtcgtcattgactcccctctctctctgacacctcacatctaatctgtcagcagatcttgtcaggagtacctgaagaatatatccagaagccagtcatatcttccatttccaagccaccaccatctgctctctagacgcatgtaatagactgttaattggtctgttttttttttt

SEQ ID NO: 56410 - DNA, 504 bp, Homo sapiens
ccgggccccccctcggagtacttctagaattaattaacgcggggggaacaaacttagagtttctattagttttcttatagcttgtttgttagtttgtttttgcaatcagtgttaaattgccatcagtctaaagtaatgtattataagatgttatttgtaagcctcatgataacctcatatcaagaagcctgcaactgatacacaaaaaataaaaagcaagaaattagacataccactggagaaaatcagcttcacaaaaaggaagacaggaaggaaagaaacaaacaggagatcagaaaacaaccagaaatcaaatgactaaatggcaggaataagtccttacttatcaacaataacactgaatgtaaatggactaaactctccaatcaaaagacagaataattgaatgtataataaaacaagactcaatgatctgttgcccacaagaagtgcacttcacctataaagacacttataaactaaaaataaagggaaggaaactga

SEQ ID NO: 56411 - DNA, 246 bp, Homo sapiens
  misc_feature 28: n = A,T,C or G
cggggccccccctcgaaagtcttctagnaattaattaacgcggggggggggcggctgggcgacagcaggctacttggataggggacgctcactctcctcagctcatccagcttctcctgtaacttccgcacctggctgtcggacccacctggagccgggacctaccccacactgcagcccttccagtacctggaggaggttcacatctcccacgtgggccagcccatgctgaacttctcgttcaac

SEQ ID NO: 56412 - DNA, 470 bp, Homo sapiens
tccaccgcggtggcggccgctttttttttttttttggggttttaaaaaagtcctttggccattttaaccattttaaaaaaaaaaaaggtcggcctttaatcctgggggccccaacctttttgtttaggtgaaaaccccagaattaaaaagggcttttttcaaaaattttggcccaccttcgggggttccccccaaattggtttttggtcctgggggggttttaatttaataaccggaattttagccaggatcctggtaccatttaaccaaacccggaaaatcaaattttttcaattttttccaaaatcctttttaaagttttcccttcggggggctcatagggaattttagcccccttggggttcctccgggggagggcaaattttttccaaggcccttaggacaacctccttccctttttagggcattttgaaatacccttcaggacccggggtttggttggaaaaaac

SEQ ID NO: 56413 - DNA, 404 bp, Homo sapiens
  misc_feature 6: n = A,T,C or G
cggtgngcggccgctttttttttttttttttttttttttttttttttttttttttttttttttttttttttttttttaaaaaaaaaggggggtgaaaaaaaaaaaaaaaaaaaaaaaaaaaaaaaaaaaaaaaaaaaaagggggggggaaaaaaaaaaaaaaggggggggaaaaaaaaaaaaaaaaccaggggccccggggggggggagcccgaaaaaattgttaaaacccacaaggaaaaaaaaccaaaaaaaaaaaaaattaaagcccccaaaaaaaaacccccccccccgggcccatcttttttggttaaaaaacccatccccccttttttaaaaaaatctttttggaaaaaaaaaaaaaatttaaaaattttttaaatcccccccggaaaaaaaaagggg

SEQ ID NO: 56414 - DNA, 409 bp, Homo sapiens
tccaccgcggtggcggccgctttttttttttttttggggcttcacactttgggggattttttttcccaatttttttaaatacaattaaccccctcttccccttttccagtttgtttatacaagtcctaaggggcaaaagggtttggattaattccttcaaaaaaaaaaggcaaggctggaaaactaatttgcttccaacaggttttttgggggggggggaagtgtttgaaaattaaaaaaaattaaaacattgtaccgggaaaattttacctaaagttttttaagccttttttgttttgggctccatgttcaaggaggcgtggaaactcaatgtaatgaaaatccccttttttgcaaataggggcttttttgaacagttaatccatttcctaatttgaaaaccgatccc

SEQ ID NO: 56415 - DNA, 410 bp, Homo sapiens
tccaccgcggtggcggccgcttttttttttttttttgaaaaaaacaaccccctttattaccttttggcaaaaaactttttttcttttttactcccccagttgtttaattttaaaacttaattcctaccccctccccttaattaaacaaaacccccttttaaaaaattggggggtttcaaaaattttttttttccttttgccgggaaaaaaaattccaaccggggaaacttttccaagggccaatttaaaaacccccctggaattattggctaatttttaagccctaaaattccccacatttttaagggttttccccccccgtttatttatttttaaaattcctttcagggggggccccggcccccactttttttcccttttagggggggtaaattcccccctgggcaaaa

SEQ ID NO: 56416 - DNA, 550 bp, Homo sapiens
gccgcttttttttttttcccctttttttttttttttttttttttttttttttttttttttttttttctttttttttttttttttttttttttttttttttttttttttttttttttttggcccccggaaaaaaaaaaaaattttcccccccccccccgggggtttccccccccccccccccccccccggggggggggaaaatccccccccaaaaccccccccccccccagggaacaccaccccccccccccccccaaacacccccccccccccaaaaaaccccccccccccccccccccaaaaaaaaaaaaaaacccccccccccccccccccccgcgatccccccccccccccccaaaaactttttcccccccccccccccccccaccgcggggggggggcgcagaaaaaaatcacgcgcgggcggggaagaaaaacccccccccccccccccccccccgggggggggggcgcagggccgccccccccccccccccccccccgtggtgggcgcggggccccccacgacgccgcgccccccccccccccc

SEQ ID NO: 56417 - DNA, 342 bp, Homo sapiens
cccccctcggaagtcttctagaattaattaacgcgggggcatgggggaatccgtacctgcctggttcagcccccatctaatcaagaattaatatactggaatacctaccttctattccctattcatatcatagctggcctatctgtcatattcatcctagaccatctaatggggcactgcctattaaaccattaacaagactttaaacattggcactttattttgcttgtaaatcttcacctactttgaagacgagggaacgcgctcctcccttctatttgttacttttcaagatctgtcaacatcactagggtagctcatcttaaacattttataaaacct

SEQ ID NO: 56418 - DNA, 452 bp, Homo sapiens
ctccaccgcggtggcggccgcttttttttttttttcccaattttttccccattttataacccctgccccccttttttatgtttcaaaacttttttaataagtttcaaggggggttaaaattctaaatttttttcccataataaataaggcccgtgggtttgttttttataaaaaacccttttttgggacccaaataaaaccaggtttatttggcaaattttacaaaaataattcccaaatttaagtggacctttttcccaactgaaaaccctattttagtttttggggccaccggaaaccaaaaccacccccccccccttttaatggaaaattcggggggctaaaaaatccctgaaaaaccagtaacctgttttttgaaaagctcaaaacactggcagggtttaagggcaaagtttttaataaagggccacaaaacctgtttccctaaaagg

SEQ ID NO: 56419 - DNA, 376 bp, Homo sapiens
ccgcggtggcggcccgctttttttttttttttccttttttttttttttttttttttttttttttttttttttttttttttttttttttttttttttttttttttttttggggggggaaaaaacatttttcccccaaaaaaaaaaaaaaaatttcccccccccccccccccttcccccccccccccccaaaaaaaacccccccgggggggggccccccccccccccccccggggttttctgggggggaaaaaagggggggggaacccccccccccccccaaaaaaaaaaaaaaaaaaccggggggggggggccccccccccccccttttttcaaaaaaaggggggaacccccccccccccccaaaaaaaaaaaaaaa

SEQ ID NO: 56420 - DNA, 563 bp, Homo sapiens
tccaccgcggtggcggccgctttttttttttttttttttttttttttaaaaccccccttcattagggggaaacttccaaaatttgccaacccccttttccaaatgcccattttagggggggggtttaaaacccaaagggtttttgggtttaaaaggaaatttttattggggggttaaaccaatttgggggaaaagttgccccattattgccggaaaccccgggaaaccctgggtttaaaaaaatttttaaccctaaaatccccccgaaatggggaaggggaaactcaaattcctttggggtttgggggggggaaaaataaaaccccctaaaatttgaaaaaacccgggctgaattttttgggttcggggggttttttttaaaacttgggggaccccagggaatgaatccccctatgccaattaatccggttgttttaaggaggggaacttttggggatttaaccgggggaatccctttgggggcccatccccctcttatttggggggtggggcttagcttgaattgtaaaaaggctaaaaaaattcctgcaaaaaaaaatttt

SEQ ID NO: 56421 - DNA, 397 bp, Homo sapiens
cgggcccccccctcggaagtcttctagaattaattaacgcgggctatcgatccagtctcttgacaaaccgagcaaggtgcccgggggcataacatgcgcggtcctatctctatgagttccatatgcccaataaggtctacgatctggatgtatgttcatgtacatactgatggtgctaccgctgtgaaaagtgtcatttgttcaacgattgggatcgtactagatctgagtacagaccgggactaattcaacatggtaactatctacttatattatctccctgcactataaggacacctataaattggcctacttcacatatcgcctttccacttaattgatatcatattaactaaacatttttcccactcctacacaaagaaaataactactcagt

SEQ ID NO: 56422 - DNA, 571 bp, Homo sapiens
ccgggccccccctcgaaagtcttctagaattaattaacgcgggggggtcacttgagcccaggaattgtgagatcaacctgggcatatagggagatcctgtctctatttaaaaaaagaagctatgtttacactacactatagtctatttaaagtgtgaaatggcgttatgtccttaattttaaaactcttgatgctggctgggttcggtggctcatgcctgtaatcccatcactttgggaggccaagacaggttgattacttgaattcaggagttcaagaccagcctggacaacatggcataacacgtctttaaaaaaagaaaagaatagaaaaacgaagcacagattgaaaaagaagaaaaactacttgctgcccttacttgaagctcaattatttaaaacaaagaaaaaaaaaaaaaatagcggccgctttttttttttttttgggactttaatatttttctcccattagtatcagtaatctcttaatgtttcaactctaataaacaaactttaagttcatcaagtttaggtgctgatttaatgaggaagtatttggccaagctctccaa

SEQ ID NO: 56423 - DNA, 474 bp, Homo sapiens
tccaccgcggtggcggccgctttttttttttttttgaaaaggaattttaatttttgtgccccaggcttgaattgcgggggtaaaatttggggttaattgaaacctccccctcccaggtaaaaccaattttcctgcttaaccctccaaattccctggaactaaaggggcgggcccccaccccgagttaatttttgggttttaaaaaaaaagggggtttccccttttggaccaggagggttttaaccccttaactaaaaaattggcttgcaacggcctccaaaagtggtggttttacgggcttaaccccccccccccaccaaaatttttttttaaaagtctttttctttaggctgttgggcctccttgaaaaaaacactggaggggaaaaattcttgtttcctccctttggggctgatgcaaaaaatccaggaattgttacctgtttctgcggttaaaaaatccagaaattgggaa

SEQ ID NO: 56424 - DNA, 496 bp, Homo sapiens
tccaccgcggtggcggccgctttttttttttttttttttttaaaaaaaaaaaaaaaatttttttttggaaaccattggcgggtttcccaaataaaggggtttttggggcctaaaccctttttgttgttaaaaaatgggccatggggcattgggccatttggggggcttttttagccctttccctaggggccccgtgcccccctaaggttaaccaaccccttttgaaaaagggaaatcctgccacccccccaagggggataaggggttttttttttgaccaatcaccaaaccggcttggaccctttggggttgcccctgcctcccttggttccctgcccaagtttttccctttttggaaacccctcaaaccctgttttaaaaaaaaggaaaacccagggcctttttttccaatttcccccagggcttgggacttggctttttaaatttggggaccccctgaaatctccccccctaggggtaaaaaaaaaaggctttg

SEQ ID NO: 56425 - DNA, 594 bp, Homo sapiens
  misc_feature 8, 59, 75, 76: n = A,T,C or G
cccctcgngaatacttctagaattaattaacgcgggcattcaatggagtactatataangaaatgagtaagaatnnttccttgaactaatatggagagattcccaggatatgttgttaagtgaaaaaaacaaaatgtgaaagagtctatatcatgtagaatactacagatgctcctcggcctctaatggggttacgtacggataaatccatagtaagttgaaaatgtactcaatatacctagcctagggaacatcagagcttagcctagcctgccttaaatgtgctcagaacatgtacattggcctacagttgtgcaaaatcatctggcaacactatacactgtagagtatgtgttgtttaccctggtaatcacgtggctgactgggagctgtggctctttgttgccgccaagcattataagagaatatcgtactatattttgctagcacaagaaaagatcaacattggaagtatttctcctgaatgcatatcattttggtaccatcataaagtcaaaaaatcataagtcaaactattgcaagtcagggactatatatatagatattcttttgcatttcattaccttttatata

SEQ ID NO: 56426 - DNA, 331 bp, Homo sapiens
ccgggccccccctcggaagtcttctagaattaattaacgcgggctgcgttggtggaggccaggatcaccaccaccatagactcacatgggcctatttcgtgcttgagactcttcttggacggtgacggttgagcatgggaacggaaagagaaccgcctgcattgcggagctggtatgctcaggaatcactatgtacgcgtggactggggaggaccctgcacctccactaatttcatttggagggaaatgttgatactagtaccgggaatatttgatagatagacggcatgctggtgtctggattcatgttcaaacctggaccttgcgtctg

SEQ ID NO: 56427 - DNA, 410 bp, Homo sapiens
tccaccgcggtggcggccgcttttttttttttttggggtataactttttttattggccctaaaaggcaaggtgaggaaaaattttcaccaaaaccaattttgggaaaaatttggatcccccattaaaaaccagaaaggtttttgttgtcctcttcacaaaatggaaaaaagggctctaaataaatcatcccttttgtttctcccctgggctttttaaccttttcaaattttttcaggatgatttcttttaacacaccttaacctttgcggttttccttaaccttcacccggttgtcccggtcctttgcctaatccagttggtcccccagttgccaataatccccctggggaaacctgggttaaggcctaaccttacttttgtccccgctttatttaattttaaaattcct

SEQ ID NO: 56428 - DNA, 570 bp, Homo sapiens
  misc_feature 38: n = A,T,C or G
ctggggtaccgggcccccccctcggaaatacttctagnattaattaacgcgggattcctgttccctttgtccatcccttaaatgtcatttctggcttcaggatggaggctatgcttcccagcctgtcagaatgtccaccctgcaggctgtatacctttaaagctctcttttctaaatgtataaacctcatcattttttagttcagagtagtaatgtacatgtgctgtttctattattagtgttatttttgtgtcccctgatgcaagctagatatatgttttcctcccttttaaccatgctccatttacatgtttttctacattgtaatatcaaccagtttgtaaataagggcaataaggaagtagctcccatcttatatttcattatttttgcaactatttaataaaaaaattaaaaaatattaaagcaaactaagaagaaaatgaacattagaatgaaccctatgttttggtacagaagtaaagcttgctatttgtgttattgaacaagatatttgatctttacaacctttaatttcttcatttgtaaatatagaaattggcagagctc

SEQ ID NO: 56429 - DNA, 443 bp, Homo sapiens
ccaccgcggtggcggccgcttttttttttttttttttttttttttttttttttttttttttttttttttttttaaaaacccccaaaaccccccccttttttttgggggaaaaaaattccccccccccccgttttttttaaaaaaagggggggggtctttttttttttttttaaaaaaaagggggccccccccaaaaaaaaaaaaattttttttgggccccccccctttttttttaaaaaaaggggggggggggcccccccccccccaaaaacctttttttttttttttagggggggggaggcccccccccccggggttccccccccccccctttttttttttagaaaaaaaaaaaggggccctttttttttttccccccccacaaaacaccagggggggggaaaaaaatttttttttttataaaaaaaaaaaactcttttttt

SEQ ID NO: 56430 - DNA, 401 bp, Homo sapiens
tccaccgcggtggcggccgcttttttttttttttttaccttaaaatttttattaaaacaatcttttaagttttaatcgtcccccaaaataaaaaatacccttttttgatctggccctgataggaggcaggactcggcccctacaggaaaaagtgacttttgacatttttaaaaatggatggcccttccctaaaacccctggaggggctggtttgggcccagggtcactgggccaggttgtttccctgccaacattgttccttcagggggggggaggcccccccctgtcagggaggaacacttaaaccctgcagctggttgtcagtctttgggcttttgacaaaaaaaagagagggaaagaaaaaaacctgtccccccctttaattaattttaaaagtcctt

SEQ ID NO: 56431 - DNA, 191 bp, Homo sapiens
cgggccccccctggatcttctgaattaattaacgcgggatgaatgaaagtttgtgactagtgctgaacttattaatgctaaggcagcccaaattatcaagctaataaaatatcttgcagctgcacatctggtaccataaataaaagttcctatacaaaagacacaccaaaaaatttgaaattgaacacttg

SEQ ID NO: 56432 - DNA, 444 bp, Homo sapiens
  misc_feature 427, 428, 430: n = A,T,C or G
taattaccgcggggctgagaaaatgccggcttaccatttctaccatcatggcggttttagtctctccaacaagaaaaaattatgaatttccggcattaagaaatgaacaaaagatgggagctgaaaacctaaagggcttgtttttggcccgtggaccaaataaataaacctatctgctttatctatgcggcggggggtttttattattttaacctaaagacgtcttttttgggaaaaaacaaacgtgtttttaaaaaaagccgggtttttctcaataccccttaaagggttttaaaatggtttcatatcgggtcaagtggaaattttaaaaaacttctttttaaattggaaataaaagttcacaacttgatttttacaaaaaagtaaacaaactgcacgcacctgtaaataagggtcttaatttttnnanaaaaaaaaaaaaaa

SEQ ID NO: 56433 - DNA, 507 bp, Homo sapiens
  misc_feature 40: n = A,T,C or G
agactgggtaccgggcccccccctcggaggtacttctagnattaattaacgcggggggctgactgtgctgcatctgacagagctgctggtgtttgtgaatctcaatctgggatcttcaaggaatgggcagacccaagagcatgcccttttggcttacacactgggtgtgagtcatctacttctcggtgctatctaaatggattacactgtgccaccctacagccagaatagaattaggactcgtgcaggaagtcagctctcacattaaaaaaattggtttcgacccctaccggtggcactggtgcctatttctggttggaatggagacaacatgctggagccaaatgctaacatgccttggttcaagggatggaaactgacgcataaagatggcactgccagtggaaccacgctgcttgaggctctggactgaatcctaccacgaactcgtcggacagacattcccttgcgcctgcctatccagatgtatacaaaattggtggtatt

SEQ ID NO: 56434 - DNA, 258 bp, Homo sapiens
tccaccgcggtggcggccgcttttttttttttttttcgcaactacctccccgggtgggagagggggaaattggcccccctgctgccttcctgggatggggaacccgtttttaaggctccttttcggaaataaaaccttgattccccgtcccccggggccaccatggggggcccgggaactcccatcaaaagttaatagggcaaactttcaaaggggtcccccccccccccccttaaataaattttaaaagtcctttca

SEQ ID NO: 56435 - DNA, 459 bp, Homo sapiens
ggcccccccctcggagatacttctagaattaattaccgcgggggtttttttttcctctaggcaaaaaaaaggcgatggcggcgatggtttttttcggcgccctggcgctgttcctgctgtccagcctttcccgttgctaagccaaggcctgcctggacccccaaatcaccctttcttactacaccatttttgaccctgtcttttccactgaaaccgttttctttggggaaatctccctgacatgcaaaaacagggcccaaaacttggttttttatgctgacgtgggggaaaaacatttccttgtcactcaaggccagaatggggggcgttatcaggtgtcctgaaccctgaaccaaaaaaccgcccacccaggcccctatgaggttaaatttttagacaaggagtcctacaccctcctaaggagggctcaaaggaataacgaggacttttccttcatcc

SEQ ID NO: 56436 - DNA, 384 bp, Homo sapiens
acgtcggcgacgaggacttcgtccacctgcgagtgttccaatctctccctaaggaaaacagcccttgactttatttaactcccaaaccaacaaacccaagcttgatgacctgacctttttctgaccctgacttgggacagggcctttcacccaaaaaactgacaaagtcttcctccgtttaccaaagcgtgcacttgtgaccctaaaataagcttcctttccgggctgtccccttggggggggaaggggcaggattctgcacctgcttttgcttttctctccctaaattgcatggggtggatttctttctttccaaatgggggatctaatttactttcaaaatattttaaaaatagatattttttaaaaatccaaaaaaaaaaa

SEQ ID NO: 56437 - DNA, 372 bp, Homo sapiens
gcgggggacagaggactggtgttgatttctggaggccagtgcagctgttccaaaagccatctccaggaagcttggtgtgtatgtacagggccatcggacgtggaaaaaaaaaggtctatgctccatcagcaagccctaccgactacaatggggactcgccaggctatccttcctccaaaccagcacccagcactttccttagctcctttttaatgcaaaagggccatcacagcagggaccctgggagctcctccagggggagaaatcaccctggctatgcaggaatgtggggcaactcttctaatattccacagcccagcagctactgtagcctgcatccacataaacgttggagctatccatcacactcct

SEQ ID NO: 56438 - DNA, 485 bp, Homo sapiens
  misc_feature 27: n = A,T,C or G
cgggccccccctcggaagtcttctagnattaattaacgcgggcctgaatcccgcgctcaacacccatggtcttttaaggataccctaataccacccgaggatcctgaggtggccatgcaccgatttccattcaccctaccatgctcaaacttaaaatccttggaaaaaggtgtgtgctgtacttgatgagaggcgcgaaaaataagaatctctgattgatagtgacctgttcggatgcctactctgcactttgtggaatcactacaagaaactctccttgtggtgaaggctctatgacgtgtgatcgttgacatatgataattcacaagcgactccattgacttgcacactccttctgaaatcgctaagcgaattacttacatccctgttgaacctgcacttgaggtgtaagtcaccattgcatgatgcttaagtcaactcttgtaataaattgatgaccagtggctttaaaaaaaaaaaaaaaa

SEQ ID NO: 56439 - DNA, 490 bp, Homo sapiens
cgtggcggccgctttttttttttttttggttttttttttttttttttttttaaaaaattttttttttttttttttttttttttttttaaaaaaaaaaaaaaaaaacccccttttttaaaggggggccccaaaaccgggggggggcaaaaaaaaaaaaaaaacttggggaaaccccccccccccaaaaaggggggggggggggggaaaaaaaacccccggggggggggggggaaaccccccccccgggggtttttttttaaaaaaaaaaagaggaaacccccccccccccccccggggggttttaaaaaagggaaaaaaaacccccccccggtcttaaaaaaaaaaaacccccccccgggggcctttttttaaaaaaacacccccccccccccacctggggccccccgcaaaaaaatggggcccccccagtgggggtttaaaaagggggcccccccccccaaaaaaaaaaaaaaaaaaaaggggggggggg

SEQ ID NO: 56440 - DNA, 397 bp, Homo sapiens
ccccccctcgtacgtacttctagaattaattaacgcgggggctgcgtgccggaaccatggcccaggggcggggcaggtttcaggcccacaaacccgcaaagaagtaaaacggcagcggcaccctttgaaaagaatcggggcccaaaaaaggggggtcgtgttttctctccaaaaagggcgcgcgtcgtgcaacagcaaaagctaaaaaaaaacctaaaagtcggattcggggggaagatcaaacttgacgtggtgataaaagccagcaccaccctgccaaaaaagctggctctgttgaaggccccacccaaaaaaaagggggcagttgcccccaccttttaaaaaacactttcttgaggacgctggccccagggcaggccaacatcccaccccttac

SEQ ID NO: 56441 - DNA, 456 bp, Homo sapiens
taccgggcccccccctcggagtacttctagtattaattaacgcggggcacaacacatcagggaaagagagcaccacgtgatggagtttctccagaagctccagtgataagagatgttgactctaaagttgatttaaagccaggcatggtggtttacgcctataatcccagcattttgggagtccgaggtgggcagatcacttgagctcaggaggtcaagatcagcctgggcaacatggtgaaaccttgtctctacataaaatacaaaaacttagatgggcatggtggtgtgtgcctatagtcccactacttgtggggctaaagcaggaggatcacttgagccccggaggtcgaggctacagtgagccaagagtgcactactgtactccagccagggcaagagagcgagaccctgtctcaataaataaataaataaataaataaaaaaaaaaaaaaa

SEQ ID NO: 56442 - DNA, 420 bp, Homo sapiens
gcgggagtggggggtctataaatttgttcttgtaacagcaactgtaaagtcggaagttttaataaatttttttctgcctggggtgttaaatttttatttcaaaaaaaatgtataaaaacttgtttttggggattcaaaggggtttgctaccccttgtaaaaaaaagtttgtaaaaaaaaagcgcttaatattgttttggcttcgcaaaaaaaaaaaaaatcacttttctgacctgtacttatttttctttccccccctccctctggaatggatatatgggtgggttcatatgatgtaggcccttgctgttttttaactggacctcgtaattttttaactgaaagcttgtcctttaaaagggattaaatgtccctttttgtaagtgaattggaaagtaaaaaaaaaaaaaagcggcccccc

SEQ ID NO: 56443 - DNA, 588 bp, Homo sapiens
  misc_feature 28, 44: n = A,T,C or G
cggggccccccctcgaaatacttctagnattaattaacgcgggnaattataacaatgaaatgtatcaccagccatctaatcaggggtgacaatgtaaataaacaaataaaaatacaagtttggaaattaaactgacaaatgactacagatacaaaggaaaataaatgaattggaagaggatgagagaatgccctaatcgactatatacaaaacatcttaaaatttctgaacttagaaggcacaggaatttttgtggtgcaattattctgatagctaaggctaagaaatttgataaaactcctttcttgtctacttcctcaccaaaagttcctaatctcataaaataaaaaaaattaccaataataggtatcttcagaatgaatttatatcaaacattcaagacacagacaaatctaattatacttaaagtttcagaacatataaaatgagaaacacctttaaaacttttatataaagcaagtatagcactatctatgcacatgccctaaaacatgccaaatatatactccaacatacaataagaatattcacaaaacaatttgatttataagtacttatgaagaaatt

SEQ ID NO: 56444 - DNA, 340 bp, Homo sapiens
attaattaccgcgggataaaaattattttgaggttttttttaggcccttttgtgctgtaatttaatataaaataacatgtttgccatacctactaggtactcaggggtatggcacacacttggggtataaatctacccttgaaaaatgtttgtctggtttgcaaaaaaaattacctttcatttaattgcaaatttgattgattaagggagtgcaaaccattttcccatctaatattggtggagtgcctttgatatgcgtggggctttcatgattttataaatgaaaaacctgtgttaagggatgggtcaggttttgtgctaaaaatcaaaaaatggggga

SEQ ID NO: 56445 - DNA, 331 bp, Homo sapiens
gcgggggaaaaaaaagttcctttcgccatgtttcaccaggctgctgtaataacctctgaggtggtatcctttaattcccacccttttaggttagtttctgaaacaaaacaagtgagtctggaataaacccctcaaagcccttcaaagggaaatggttttgtttttgaaatacctaaacaaataaccctaggttttcttttttaaaaaaaaaaaaaaaaaaaaaaaaaaaaaaaaaaaaaaaaaaagcgcccccccccgggggggaacccccaatcccccctatagagagtcatttacccccccctaattggcggggggcctcccccggggg

SEQ ID NO: 56446 - DNA, 332 bp, Homo sapiens
aattaatgaacgcgggagttatcctacttttttttttatgcctaagggaccccagcaaaggggtcttacctgcaacaagaatgctgcagtcattaaaccattctttaattattccctgacctataaaataaacctaaccctatgggcacttgggaggggctacccattcctaccaccctctatgtagcggcagctttgttgcaagctctgcaccttaccagggagggccacaattttcccatctaggactggaaggtcaccttcactccccatgtcaaactggccctgccaaacaaagagggaaaatccaagtgaactgttgtgaggcacaa

SEQ ID NO: 56447 - DNA, 381 bp, Homo sapiens
  misc_feature 22: n = A,T,C or G
cccccctcgaaagtcttctagnattaattaacgcgggtgaaatagaatgaatcctgaaatgcacctctgggatcgggaatggtctgtgtgttatcagctgcgactggttcactgcgtctggacaagcctcatggggactggggattctggccagtgtaatttctgtcaaccacggacgtttgccttcatgtgtagaatttactgttgttatgcaaattatattttcaattataaatgaaaaaaaaaaaaaaaaaaaaaaaaaaaaaaaaaaaaaaaaaaaaaaaaaaaaaaaaaaaaaaaaaaaaaaaaaaaaaaaaaaaaaaaaagagaaaaaaaaaaaaaagggcgccccccccccgggggggaccccaattccccctt

SEQ ID NO: 56448 - DNA, 598 bp, Homo sapiens
cccctcgaaagtcttctagaattaattaacgcgggagattaattgggaatatctgagtattaagtactttcttcagagtataagatgtttacctcatctttttacttttgtgtgtgtagttctttcaagttgtaggaaacattttaatggaatttaaactcaaaaacttgaatacaggacaatgcttgccttttcatgtatgtactacattttttgctaagaaatactgatatttctgtttagttgagctagaaatacttcttatttatacatttaggaaagcaaataatgcctactactccgacttttatagaagctacttttaaatcagaatatttaatttttgatattcatataattaatagaagttgcatttatattttttatggggcatagttccttatgtgtttttttaatgtattttcatactacatactgaatttgtatgtttttaaaattgttacatctagacaactgtaaacattatttttttagctagtgcaaacctagtacctgccatttttactaatttttgtctttaaaaaaagcaaaaaagcacattgacctaagttgaaaattaagtaagtttatttttaac

SEQ ID NO: 56449 - DNA, 460 bp, Homo sapiens
tccaccgcggtggcggccgcttttttttttttttttttgccttttgctaaatcatcacattttaaaaccttttccaaaaccactagagagggttttaggtttcaaaagtattctaaaatggactaaaaggccaggtagggccccttgtgggttatttccaaacccttccctttttttttttttttgaaaacgcccccttttttttaccccaaggaaaaactccaaggggggggagccctgttccccatggtttcttccccttaaggggggaaaaaaagccccctggccaaaccctgggaaaaggggggtatccggggccccccccctgcccgggtaattttttggttttttaaaaaaaaaggggtttaagggggggttcaaacctccgaccctggaaacccccccccttaacccccaaaaatggggggaataccgggggaaacccatggcccaaaccccc

SEQ ID NO: 56450 - DNA, 578 bp, Homo sapiens
cgggcccccccctcggaatacttctagaattaattaatttaaggcaagcaaaataagcaggaactttccttctacagtattcctgaatttgacgaatggaaaaaacatatagaaaaccagaaagcctggaaaataaagtactataaaggattgggtactagtacagctaaagaagcaaaggaatattttgctgatatggaaaggcatcgcatcttgtttagatatgctggtcctgaagatgatgctgccattaccttggtaattaagttaattttttaaaagcttttgttagccatccccctaccttctattcctttcctcccagtcctggttccctatgataagtctcttttgaatgctcaagctagttaattttaatttttcccccagatgatgctgtgcttgtataaacttctttaattgaaagaccttagtttaaatgtgtttttgattaaaatattgtaaaataacctaattttccagaaattaagaattagttattggccacttatacattttaattttgtaataaaatttattttatttttaatgtgcaaaatcgttacctggaatctttc

SEQ ID NO: 56451 - DNA, 390 bp, Homo sapiens
acgcgggcatgggagtcattgtccacatcatggaagaaggacaaaatcaccaccagaacactgaaggcccgaagggactaaccctgttcccagaagcccattttttttttttttttaaaaaaaaaataccctgtctttccctaaaaaaaaaaaaaaaaaaaaaaaaaaaaaaaaggaaaaaaaaaaaaagcgcgcccccccccgggggggacccccaatcccccctaaagggagtgatataaccccccctaacggcccgtttttaaaaaacgtggggacgggaaaaacccgggcgtaaccaaattaaatggcttggaaaaaaatccccttttcgcaagggggcgaaaaagaaaaaaggcccgaacggatcgcctttccaaaaatttgccc

SEQ ID NO: 56452 - DNA, 459 bp, Homo sapiens
  misc_feature 360: n = A,T,C or G
attaacgcgggcttatgctcttgtcctcttaaaaaaaaaaaattttcattggcctcatcccccatgaccagggcaactttgtcaacggcttccggcgtgtctttcccaaccaacagcaggtcctgcagcgaaccctggaccaggaccaacaccaacaagggatgggggggtagtgtttaccccggcctggccccctccaaaagtcacaaataagccccccacaaaaactggtaacactcttttaagcaggggcccttggggacttaaactgcccaaaaacatgaaggatggtgtcctgagccctcaaaggacggcccccacccctttacttttcccaaataaagctttttaaaaccctgnaaaaaaaaaaaaaaataaaaaaaaaaaaaataaaaaaaaaaaataaataaaaatatatttcttttttaaaaaaaaaaaaaatccgcccccccccggggg

SEQ ID NO: 56453 - DNA, 360 bp, Homo sapiens
  misc_feature 50, 71, 72: n = A,T,C or G
agggccccccctcgaaatacttctagaattaattaacgcgggggagtacntcagtacctttatgtttgatnngttgctgacaagaaacctgaaaaaaaatcccttaaaaaaaaaacccattaaagtgtagcaaaaccgaaaaaaaaaaaaaaaaaaaaaaaaaaaaaaaaaaaaaaaaaaaaaaaaaaaaaaaaaaaaaaaaaaaaaaaaaaaaaaaaaaaaaaaaaaaaaaaaaaaaaaaaaaaaaaaaaaaaaaggggccccccccggggggaaccccaaattccccttaaaaaaagtgtattaaccccccccaatgggcgggtttttaaaaacgtggaaaagggaaaaacccggggt

SEQ ID NO: 56454 - DNA, 576 bp, Homo sapiens
  misc_feature 16, 30: n = A,T,C or G
cggggccccccctcgnaaagtaccttctanaattaattaacgcgggcaggaaggaaggaaggaaggaaggaaaaaagaaggaaagaagacgtaaggaaggaaaaaacaccggtgttactaaaagcccccaataaaatggtttccccctgtgggtaagcctacaatgtggacgaatcttgaaaatattgtgctacgtgttatgtcagtcataacagctcccctattgtgcaattccgcttataggaaatgtccacaatatggtaatctatgcatatgggattgatcgcactaggtagttgctacctacggctgagggtcagggagagggtttgagacacaatgaggagtgactaatgtctacagggtttttctctggtcgggagtgactataggcaaagcaatttaattgtacatttttaagtaactaaaataatgttattagattgttactaaaataaagaacaaatacttgatgcaatgaataaccatttatctgatgttatgcttgagcatttcatgccttcatcaaaatcagtgatataatccatagatacatataggtgctacgtactcaca

SEQ ID NO: 56455 - DNA, 446 bp, Homo sapiens
attaattaccgcggttctgtgaagaatgcggccagtcctgaaaagcgaagaggaactttactcctcctgtcgccagctgaggaggcggaaaaaaaaactgaacacccatctttttttgtttgacacacaccaaatcttgcccaatgccaaccgggatgccctgttaaaagagttcagtgtaaatgaaacccacctccacctgtcccaggagaaatgcaacaggaggttaaaagagaagagagtcaccaacagcaggttttactcataaaacctggggtttgtgtgaaagggttttgtgtgtgcgcccatgtgtgtttgcatgtaggaaaacgtgccctattcacactctgggaaaaccctaatctgtgacatttttttttcaaccctgccatcagggactttttttaaaacccaactggcttgagtgggggaaattccctattatt

SEQ ID NO: 56456 - DNA, 622 bp, Homo sapiens
  misc_feature 582: n = A,T,C or G
ccgggccccccctcggaagtcttctagaattaattaacgcgggggtttacagaacagaggttgattgaacctgtctggtagaacctccgtgatcagcttagcattgtcagtcctgaaataatcttttgtgacctccatgatcagcttagcattatccggcctggaatatcttgagactcagcatacagcggatgtatgtaatggcaggtgcaaacaaacagaaaggtaaccaaatacaagtatttatgccgtacttactctattagaataaattagttaacataatatatacctctttttatcaaattggaaattaaactattggataactgttagattttttttcccccctataactattaaaattttttttaaaatcttgctactgcccattagaaaggatttgggaacatttttaaaaaattcttgcttccttttttgtttgcttttagttgatgcggatgaaattaaaaggctaggaaagagatttaagaagcttgatttggacaattctggttctttgagtgtggaagagttcatgtctctgcctgagttacaacagaatcctttagtacagcgagntatagatatattcgacacagatgggaatggagaagtagac

SEQ ID NO: 56457 - DNA, 443 bp, Homo sapiens
gaataaggcaccaaataattgccctaaacccttattttctaccttgaagttaaggtaggtttaataattacctggaatcatcctacacttcctaaaaggggccaaatttgaaaggctgtctaaccggttaggtggaaagggggtccccttctccctcttgtctgttggccaagctttgtgggtccttttgactggtaaccacccctgagtgtttttaaaacccttttgttgtttgtgggggcaaaaccattattctggccaattccaaccaaaaaaaatcaagtccagatttcttatctgagtttaaaatgctagaaaaaagttgcttgaatttatcaaatgcactgcatttttggcttcatcgccaagtggctctgtagttgaaggattatgttgcatcccaaaaaaaaaaaaaaaaccggccgcccccggggggaacctcc

SEQ ID NO: 56458 - DNA, 166 bp, Homo sapiens
  misc_feature 36: n = A,T,C or G
gggataccgggcccccccctcggaaatacttctagnattaattaacgcggggaacatggtttggcatcattaaaagttttactctatttcatttcatatgatagtaactttttccttcttttaattttgaggtctttatttttttctccccaaaaaaaaaaaaaaa

SEQ ID NO: 56459 - DNA, 658 bp, Homo sapiens
cgggccccccctcggggtacttctagaattaattaacgcggggcgcggaggatggggttggggggattagctgccttgggctgagtttgctggtcctgaagattacagttttggttagagagagaagcctgtctagcatgctgactcggtctacctcaagctttgaaagtaatgtctaaccctgctgccagtttatcacaagtgcattaaaaatatagagatctatcaagttccacatttatatgcaatcaaactgaaaaggaccagacaaacagtgcaaaggtcaaataattactgttttatattgggacagtacatttcagatttcaaccaaaagacaaaaatgcagtttaactcaaaggcacaacaattgaaacacagaaaataatggcatctcttggatgccttatttctaaattaaacaaagaagtacacaaattttgttcccttccctcccccattgcaagcccacaagctttttccaaagtcttgagcttttgatgctgtcccgcattgtggacttgtgaggcgcttggatgtagcaatgaaacaaaatgcttgagaggtctagtgaatggcattcaaaagggacctcaaagtgcagacatatctttttcaaatatgttacaggctgaactggctctttgaacactatcac

SEQ ID NO: 56460 - DNA, 562 bp, Homo sapiens
  misc_feature 16: n = A,T,C or G
attaattaacgcgggnaaagacctgatgacaatgtctttgttccaccagagtcattgcaggaagtggatgagttccacctcattttagagtatcaagcaggttgtaacctccatttctgacatccccactggtattccagttcacctagagctggccagtatgactaacagggagctcatgagcagcattgtccatcaggtctttcccgcggtgacttcccttgggctgaatgaacaggagctgttatttctcacccagtcagcctctggacctcactcttctctctcttcctggaacggtgttcctgatgtgggcatggtcagtgacatcctcttctggatcttgaaagaacatgggaggagtaaaagcagagcctcggatctcaccaggatccatttccacacgctggtctaccacatcctggcaactgtggatggacactgggccaaccagctggcagccgtggctgcaggagctcgtgtggctgggacacaggcctgcgccacagaaaccatagacaccagccgagtgtctctgagggcacccccagagttcatgact

SEQ ID NO: 56461 - DNA, 662 bp, Homo sapiens
  misc_feature 605: n = A,T,C or G
gggtaccggggccccccctcggggtacttctagaattaattaacgcgggatccatatttttgtagaatgtataaagaatgcctttcatgttggttggaatctggcatacctaatttaggtgtctggccaaaaagaatacatactacagcagaaaaatatagagaatatgaagcccgggagcaaacagatcaaactcaagcccaggagttacacagatctcaagatagagattttgaaactatggctaaattacatattccagtaatggtggatgaagttgttcattgtttgtcaccacaaaaaggacagatttttctagatatgacatttggttcgggagggcacacaaaagccattctgcagaaggagtcagatattgttctctatgccttggacagagacccaacagcttatgcattagctgaacatctttcagagttgtatccgtaagtaatacccttgcatatttatttgattttggttcttagttttacagagcttggtttaccaccttggaatttgttctgctttgcatgggctatattttactccagtaaatattttcttcttttttccccaaaaagaattaatgtaagtgatgtttntagtaccacttaaagtaatgctattttccagttatcctttctgaatccaaaaaaaaa

SEQ ID NO: 56462 - DNA, 379 bp, Homo sapiens
ccgggccccccctcgaaagtacttctagaattaattaacgcgggtgggtgaagccgccctaaggattttcctttaatttctctggagtaatactgtaccatactggtctttgcttttagtaataaaacatcaaattaggtttggagggaactttgatcttcctaagaattaaagttgccaaattattctgaaaaaaaaaaaaaaaaaaaaaaaaaaaaaaaaaaaaaaaaaaaaaaaaaaaaaaaaaaaaaaaacaacccaaaaaaaaaaaaaaaaaaacaaataaaacaaatagggatccgcgcgcggcccgcccactggccgacaatttacaacactgaaaaaacgaaaaaccctgccgtttcccaactaaatgcgg

SEQ ID NO: 56463 - DNA, 639 bp, Homo sapiens
  misc_feature 33: n = A,T,C or G
ggtaccgggcccccccctcggggtacttctagnattaattaacgcgggaagacggagagacagaagctagaccatgtttgtagatcatgctcaggacatagaagaatttagatgacccactgaacaattgtaagcaaggaagctaagatcactgtagctaatggtacttaatagcttggattttctcatttatactaggtcttaataatcagaaataggacattttactaagtttcaaccattaactgtttattataataataatgaaaataagcttttgtatctaaaaggatactatatggttacaaacatgttacctatcgcattaattttactaatccccttttaaccttcctccatatttctttcaaagatatttctcatactatctgtttgagtctatcaaatttctctgaggtactcactcattttcaagcaatgtatatcagaatttgaatgttttataacaacatgactaagcaagatgttactaaaatccatatgggtcagtaacatacaaaaaacctgatgaaattatttttaaaaagtttatattccacagagtttcagtttcctatttccttaatctatgtatttatatacatacatacaatatagaaaagttgatgcaaaaaacat

SEQ ID NO: 56464 - DNA, 536 bp, Homo sapiens
  misc_feature 27, 473: n = A,T,C or G
cgggccccccctcggaagtcttctagnattaattaacgcggggctcaaaccaatcttgaattggaatttcaagacataaaaaccactgcaggaacctgctggagaaacggcctctggtatctctatctgaaatatgattatcttaagttcgcaaagcattgtgtctgcagtgtgagtttgaaaacaacaatgttaaggcaacttcgcagcttcttaatcaagcccttctccatctctccgtgtggtttttggggtggtggaggtggagccaaaaaagagagggcagtttcccagggctgaagatgctaccatgactcataggatctatgcaaaccctgtaagtgaattctgaggaagaagaatgagtaatattttgattttattactgatggtaataagatagtatcatcagtgtggtatattctgattactgaattctattccctattttcttcctgtggccaaataaaatntgtgtgtgtaagctatgatatttagtggtgttatctgatgagacagggttagtggaaaagtca

SEQ ID NO: 56465 - DNA, 211 bp, Homo sapiens
  misc_feature 35: n = A,T,C or G
ctgggtaccgggcccccccctcgaaatacttctanaattaattaacgcggggttgtaattcataacttttgataccatttctgatgtgtaaaattggttgtcttgtaaatatcttataaagagttcaattgtaaataaactattgtggctgttaaaaaaaaaaaaaaaaaaaaaaaaaaaaaaaaaaaaaaaaaaaaaaccgccccccccc

SEQ ID NO: 56466 - DNA, 570 bp, Homo sapiens
  misc_feature 28: n = A,T,C or G
ccgggccccccctcggaagtcttctagnattaattaacgcgggcaatgcaatgggctgcaaaactataaggattagaaatgtgaacccacattttaatccaaattagggcaatttagaggtggtagcgtaaagaatagcttgctgtaatatacgccatgctgatacagaattggcttttggccttgtcaaaattaaattgtgctttctgtattgatggtgggcatgtttctgcaggtctctcattctaagctacaacaggccctaagaggtagaagtcacatacctgaattacctgtgaagttgctttcagatcatatcgttggttcactcttacagaaggatcactttaaaatatctctgcatttgtatcctcgcaatgccacaactaaaagacagttatctcataggtccttgattaaattaggaggctttttattgaacacaagaaatgatacttttcaggcactgggcagataacttgctagaaaggcattttttaactgtgctaagattgagctgagtgcgtggctggagacaccacacaacacggacccttgctaaggcatcta

SEQ ID NO: 56467 - DNA, 549 bp, Homo sapiens
  misc_feature 15, 28, 57: n = A,T,C or G
cgggccccccctcgnaaatacttctagnattaattaacgcgggtcttacccacaggnaaaataattacaaaatttagaagtgccagcatctcagtatgagaagtaaccagtgtaagaattctggcaccatgaaaaatctgaatgtagtgaccaccacaggatttcactagctctctagtaatggtccctgactgaaatagaaacttagaaatgacagataaagaattcaaagcatgggccaagcacagtagctcacgtctgtaatcccagcactttgggatgctgaggtgggatgattatttgaggttaggagttcaagatcaacctggacaacatagtgaaaccccatctctgctgaagatacacaagttagctgggcgtggtgtgtagtcccagcaactcatgaggccgaggcaggagaattgcttgagtccaggaggtgcaggttgcagtgagccaagatcaccactaaactccagcctgggtaacagagcaagactctgtctaaaaaaataaaaaaataaaataaatacataaaaaaaaaaaaaa

SEQ ID NO: 56468 - DNA, 603 bp, Homo sapiens
cgggcccccccctcggggtacttctagaattaattaacgcggggcttcaagatgtggccctttaggagagaataggttgaaaggcaaattctttttttcagctttagtcagagcctgagttttggaaaaaggaaatgatgagttgctccgagatataaactttctttcatctcttagaagaagtatttgtccttctgaaaaggttagtggcagttttgtccattgattttttttctaaacctttattacccagtttcatggtccatcacagtaagtaaaacaaaccaccctcccccagaccgcctccctccttatttgcacagggaaccttcaaacaattgggagcagaagcagaatgatgcctgtgaagcctttgccccttatcctcagctcgctgcctcccctcaactccctccccatatactgcggtagctgcatgactccagcaggattccaccatgaaggtcaggaagccttcagcagggggcaagcattgcctggcgaggatgtgggtgctccagacagcctggatcagagttgactccagtcttgggtgagaatgagattaagggctccaagaatgttttccttacaggattgaca

SEQ ID NO: 56469 - DNA, 444 bp, Homo sapiens
  misc_feature 28: n = A,T,C or G
cgggcccccccctcgaaatacttctagnaattaattaacgcggggggttcttgagttttaccaccacttagttcccactgaattttgtaacttcctgtgtttgcatcctctgttcctattctgcccttgctctgtgtcatctcagtcatttgacttagaaagtgcccttcaaaaggaccctgttcactgctgcacttttcaatgaattaaaatttatttctgttctagtgaaaaaaaaaaaaaaaaaaaaaaaaaaaaaaaaaaaaaaaaaaaaaaaaaaaaaaaaaaaaaaaaaaaaaaaaaaaaaaaaaggccacaaaaaaaaaagaaaatcaaaaaaaacccaaaaaaaaaaaaaataaacgcacaaaaaatgaccggggcgtccccccccggggggggggccaaaaccccccctttaggaaatttattcccccccccccc

SEQ ID NO: 56470 - DNA, 393 bp, Homo sapiens
  misc_feature 28: n = A,T,C or G
cgggcccccccctcggaagtcttctagnaattaattaacgcgggttctattcctacctttaaaaaaaaaacacttggaaaccacaatgtagagaaaaatattataacaaaaacgctttgtggataaacactgaaaaatgttgttgattgatgagataaaaattaacttctgcctgcccccaccccagcgcacacctgtgaagcccctgatactataaagacttaaacacctcaactgctttatatttaatagagagtgaggggagggaaacgagagtgtacgaataagtgaactgtgcttatactctccaatagttgcctaaggataatattttataattgcctctgtttttgatttattttacagttatgattgaaaaaaaaaaaaaagaaa

SEQ ID NO: 56471 - DNA, 551 bp, Homo sapiens
  misc_feature 26: n = A,T,C or G
ggccccccctcggaaatacttctagnattaattaacgcggggcatcaggcaacatctgtctagtgttgtcttcatcaagaacagactatatactaattcccactagaagctgtccatgccatacagaagatctattaaaaatgttttaaatggaaaatgtactctagaccacaggactaatgtaaattaatatacagtcattcattatttgttgaagttgatagaatttttgaagtgtaaacttgtgtctgaatgttttatttgttctttagctgaagttttgcaatttttatgtcaaaattcaattgctattaaacaagttgagatccagttataaaaaaaaaaaaaaaaaagcggccgctttttttttttttttcgatcaaatgaatctccatttaaattgagggggcaggaagtcctgttcctctccaatccacatccctctatcatccccaatatccaaagagacctgcattcaccttgctctccagcaacagaaacagcagactctgaccatttacagggctactgagcagcctcagtccccaagt

SEQ ID NO: 56472 - DNA, 503 bp, Homo sapiens
  misc_feature 22: n = A,T,C or G
ggtaccgggcccccccctcggngtacttctagaattaattaacgcggggagaaattatttgtatgaataatgaaataaaacacacctcgtggcaaaaaaaaaaaaaaaaaaaaaaaaaaaaaaaaaaaaaaaaaaaaaaaaaaaaaaaaaaaaaaaaaagcggccccccccgggggggcccctccgccccgccctttggggtttttttttcccccccctccttggcctttttttccccccgtcccgcctgggaaacccctgccctcccccactttcgtggccttgcaccccccccccctttccccggttgttttattggcgggggggcccgccccggcggcccttccctttttttgccccgccggaatggggaatgggaatggcgggggttattgtttgggtacccccccccttttttttttgtcaactcggctcttttcctatccggcgggccgaattcggccccttccctttttcttcaatccacccccccatgtttgggt

SEQ ID NO: 56473 - DNA, 528 bp, Homo sapiens
ccgggccccccctcggaagtcttctagaattaattaacgcggggggggtgccacattcttttaaaccagatctccggtgaactcagagggaggcaccatgccattcatgagggatccacctcatgacccaaacacctcctactaggcccacctccaacatcagaagtcatttcaatatgagatttggagaggacaaaacatccaaaccacatcataaagagtctaggagaattggccaggcgcagtggctcatgcttgtaatcctagccctttgggaggccgaggtgggtgggtcacctggggtcaggagtttgggaccagcctggccaacatggcaaaatcccatctctactaaaaatacaaaaattagccaggtgtggtggtgggcacctataatccaactactccagagtctgaggcaagagaatcgcttgaaccagtagggcagaggttgcagtgagccaagatggagccactgcactccagcctgggcaaaagagcaaaactcagtctcaaaaaaaaaaaaaa

SEQ ID NO: 56474 - DNA, 594 bp, Homo sapiens
  misc_feature 28, 118, 544, 558: n = A,T,C or G
cgggcccccccctcggaatacttctagnattaattaacgcgggcttgtcaacagcaaaaagtttctgccttgctttttgatttgataaaggaatttgaaaacaggttttaagatttcntggaaaaataatcaatattttggtatagttgcaactccattttcagccaacataaatatgttacctgcgaatgcatacagctgcaatgtgacattcaacttaaagaaaaatctcatcaggcttctttcctggactttgtaagacctatcttcccagagacaaatatccctcgcttcacagtcatgccttactcatgtcgtcggtttttggcagcaccatagtgtgtttgtggtgtatgctgtgtgtgtgtgtgtggtgtgcgtttgtgagcaactgttttcaaggatgaagcacacgaagagtaaaattagaaccaaaatatctgaggagcaccttgagaactcgctgagaattgcaactacttccatcgaaccagatattgatgcattagtttctcaaaaacaatgtcaaatatcccactagttntatgttgtcctctnttacttttataataaaaattatcgaaaaaaaaaaaa

SEQ ID NO: 56475 - DNA, 578 bp, Homo sapiens
ccgggccccccctcggaagtcttctagaattaattaacgcgggtcgggaggattagtttcttctgaagcctctccttggtttgtaaatgactgtcttctcttccctgtatcttcacaggatctttcctctgtattggctgtgtcctattctccttttcttttaggacaccagtcgtattggattgaggcccacccttatgacctcacttaacctcagttacctctttaaaggccttgtctgcaaataagtcacattctgatatattggggattagaatttcaacttaaaaattttaggtggacacagttcacttcataagagtatctattctgctctagtagatatggccagttttcaaaagttgtaccagcgtattcttccaccagcagtatataagaagtccaaatattccacatccttgctagcacttgtaactttttctctttaattttagttccctctggtagaaagccatttctttatggcaccatggtacagcttgtttactcaccagtgtaggagaacctcaagggactggggaaggtatcctggagtaaaacgtgtcagtttgagacta

SEQ ID NO: 56476 - DNA, 197 bp, Homo sapiens
ccctcggaagtcttctagaattaattaacgcgggggagagagagagaattttaatgtattttcccaaaggactcatattttaaaatgtaggctatactgtaatcgtgattgaagcttggactaagaattttttccctttagatgtaaagaaagaatacagtatacaatattcatatcagcctaaaaaaaaaaaaaaa

SEQ ID NO: 56477 - DNA, 613 bp, Homo sapiens
  misc_feature 25, 38: n = A,T,C or G
ctggggtaccgggcccccccctcgngaatacttctagnattaattaacgcgggattctcaaagggaaaggaaatatcagatgtttatttggttatagaatgctttttttttttttgggtccatttcctgctgtgttgagtattttgcttcaacagtattgccaggttcctaaaattgtctaaaaacatgatttggcttccatttttgcagctgcactgtaccatgcacctggtttctatatagtaacagtgtgcaattctaattattggactgtgccctgtttttagttttcaaatcaatttctaattctggtgattgtgtgatgtaaagaggtgctatgatggtcatgcaattaatactaaatattgaatcaatgcccagagctttattggattcactttgtgtgtgttagtgctctaaagtagcagtattattattaaactgtccccagagtaaccctgtaggcctaaagtactcagttttaagacaaacactacttcccatgcggggtactttccttatggtaaatgtaaacatgtagactgcattcgaggtgacctaaagtagagaggtcatgaactttgagaatgggcttcctttttggttcagtatt

SEQ ID NO: 56478 - DNA, 596 bp, Homo sapiens
  misc_feature 28: n = A,T,C or G
ccgggccccccctcgaaagtcttctagnaattaattaacgcgggcttggggttaagaggattggggagatgcggttaaaggatacaaaatttcagttaggcaggaggaataagttcaagagatctcctacatgtcatggtgactgctgttaataacaatatattgtattgaaaattgctaagagaggcgattttaagtgtgctcaccacaaaaaaaagtaagtacgtgaggcattgcttatgttaaatagcttggtttggccattccacaatgtattcatatatcaaaacatcatgttgtacatcataaaaatacaatttttacctgtcaatttaaataaagaaataagatttttgaaaaaggacaaaaggcaatagactacctttaaacttcatgaggttttgatgaacaaacttttctctagagttcaaagaagtactagaatacagatacagccagaacagctgcagagaagttgagacaggaacaggaggaggttaaagagtgactcatgaggctttgatcataatctatcaataaatgagatgactattgtttgctttgatctagttgtcagtaaacagctctcattcaag

SEQ ID NO: 56479 - DNA, 317 bp, Homo sapiens
cccccctcgagagtcttctagaattaattaacgcgggcgggagccattctcaccgctggctgcggtagtctgcagggcttgggatcctgcggggctgtgcctgctccctgcagccgccgtggtcgcgactcctccgggactggtgccagaaggaactgcgcccaccgaccccttctctcgccctcctccggcgccgcggagatggactccatttcctgagggggcggcagtggcccgtccccgggatcggcctcggccaccggccacctggcgccaggaagcttccatccctgcaaaggagaaaaaaaaaaaaaaaa

SEQ ID NO: 56480 - DNA, 452 bp, Homo sapiens
  misc_feature 46: n = A,T,C or G
cccccctcggggtacttctagaattaattaacgccgggaggtggtngaaaaaaaaaaaaaaaaaaaaaaaaaaaaaaaaaaaaaaaaaaaaaaaaaaaaaaaaaaaaaaaaaaaaaaaaaagcggccgccaacaaaaaaggaagccgcgccccccccctgtggggaagtcccatttcgcccctattgaggaggccgttttactgccccctcactgggccggggaatatcacaaggtgtgggccgggaaaaaccctggggtacccaaacttatttgcctggcgggaaataccccttttcagcccctggcgtaataccaaaaaggcccgcaccgaaccccttttggaaattgggcacagccggattggaaattggaaatagaacccgttaatattttggtaaaatccgcttaaatttttgccaaaagcccctaatttttaaaccacttggccaa

SEQ ID NO: 56481 - DNA, 499 bp, Homo sapiens
  misc_feature 329, 393, 397, 398, 433, 434, 435, 436, 437, 438: n = A,T,C or G
cccccctcggaagtcttctagaattaattaacgcgggagattagggtagaattttgtgtttttttttgtgacgaaaataaccttagtaattttgtttttgttttggtaactcaggacaactcacaccccctggttgtcttgattttttatttaaatgctgagtttaagtgcttgtgcagttggtttcttgaactgaacagcacactttatgtttattctattgcatgtcattgtctttttattctaagcaagaggtcagcaaattatggcccacaggccaaatctggctcaccctctgtttttgtaaataaagttttattggaacacanaaaaaaaaaaaaaaaaaaaaaaaaaaaaaaaaaaataaaaaaaaaaaaaaaaaaaaaaaaaaanaaannaaaaaaaataaaaaaaaaaaaaaaagggaaaaaannnnnnaaacgcgcccccccccgggggggaccccaattcccccttatgggggtgtttttaccccccc

SEQ ID NO: 56482 - DNA, 332 bp, Homo sapiens
  misc_feature 16: n = A,T,C or G
cgggcccccccctcgngggtacttctagaaataattaacgcgggggtggacagggaggcagcttgtgaatttttgttttactgtttaactttattaaaaaagaaaaaaaaaaaagagaataaaatgttttgacccttaaaaaaaaaaaaaaaaaaaaaaaaaaaaaaaaaaaaaaaaaaaaaaaaaagcggccgccaccgaggaggaaactccaatacgccctataaagaaaacaaaaaaacgcgcgccccccggccggggaaccacaacgcccccactggggaaaccctgacgcccccccactgaggcgccttgtaaaaaatccccctttg

SEQ ID NO: 56483 - DNA, 459 bp, Homo sapiens
cccccctcgagagtcttctagaattaattaacgcggggtcttgggctcggggtaggcagcagtgcaagtgaaggtcttcccatggttccatggctcggcacagcccggcaggacactggacacgctgtagcaggggtcacaggagctgccccgcgagaagtacctgacttgggcatcccggcaggagcccagccagggcaccaccaccttcgctgtgaccagcatactgcgcgtggcagccgaggactggaagaagggggacaccttctcctgcatggtgggccacgaggccctgccgctggccttcacacagaagaccatcgaccgcttggcgggtaaacccacccatgtcaatgtgtctgttgtcatggcggaggtggacggcacctgctactgagccgcccgcctgtccccacccctgaataaactccatgctcccccaagcaaaaaaaaaaaaaa

SEQ ID NO: 56484 - DNA, 261 bp, Homo sapiens
  misc_feature 26, 55: n = A,T,C or G
gactggggtaccgggcccccccctcnaaatacttctagaattaattaacgcgggnaatctagtttacagaaaaaatcttgtgctagaatactttttaaaagtattttgaataccattaaaactgcttttttttttttccagcaagtatccaaccaacttggttctgcttcaataaatctttggaaaaacaaaaaaaaaaaaaaaaaaaaaaaaaaaaaaaaaaaaaaaaaaaaaaaaaaaaaaaaaaaaaaaaaaaaaaaa

SEQ ID NO: 56485 - DNA, 542 bp, Homo sapiens
  misc_feature 28: n = A,T,C or G
cgggcccccccctcggaagtcttctagnattaattaacgcgggtctctgatcaggtatgatttgcatgtttcctccactccacaggttgtcatgtcacttccttgatggcatcctttgaggcacagaagttttaagttttgatgaagagtagtttatatatagatttttgttgttgctcatacttttattgttgagcctaaggaccctcatgatcgaaggtcatgaagatttactcctatgttttcttctaagagttttggttttagctcctaacatttaggttgttggtcaatttgtggtaatttgtgttatgaggtatatggtacgagggctccggcctcattctttttgcatgtggatatccagctgtcccagcaccatttgctgagactattctttccacattgaatggtttcagcccccttgtagaagtcagttggccattgacgtgtggtttatttccagactctcaattctttttttttttttttgagacggagtctcgctctgtcgcccaggctggagtgcagaaaaaaaaaaa

SEQ ID NO: 56486 - DNA, 610 bp, Homo sapiens
ccgggccccccctcggaagtcttctagaattaattaacgcgggaatacccttagtatggatcagcaaattaggggctctgagaagtcctttcattacaagagttgtttagctttgatttattgttttctaaacttatttgagctgggatgctttttcagagcagacacattctagtatattcttgttttatctgcactatagatatgtattgttacataccttcagcttggcaaggcagactaataatcttaaggaggttccaagacttcccttggtttaatgagaacattcaaaaggtgcaggcatagggtaaggtatgtttgaggacttgaatatctattaagaatagacaaaggattataatgtggtagaagagtttagcattcatagtctgtatagatcaaactgtcaaaacttctcaggtcacatgatggcccttaaaccaggtaatttctgtgtaacgtaagccatgtttaaaattgcttttttcttgacaactattcagaagtatatgtatgataaacattttttgagtgcctagtacctactagtcttacatattctgtggattactccacataaaatctataataaaatccacagaaagct

SEQ ID NO: 56487 - DNA, 549 bp, Homo sapiens
  misc_feature 37: n = A,T,C or G
ctgggttaccgggcccccccctcggggtacttctagnaattaattaacgcggggtggggtgggggtgggcagcagcatcccagccttgagatgcttcactttccttctctgtaaccagactttgaaaaattgttcgtttcatcaggctctgttcctcaatggccttttgctacgtgcctcccgagaaatttgtctttttgtataaatgacaaagtgttgaaaatgtgtttcctgaaataaatgtttcaaatgcagaaacccaaaaaaaaaaaaaaaaaaaaaaaaaaaaaaaaaaaaaaaaaaaaaaaaaaaaaaaaaaaaaaaaaaaaaaaaaccaaaaaaaaaaaaaggcggccccccccgggggggacctccaattccccttttagggagtcgttttaccccccctcattggccgtcttttaaaaacgtcgggactggaaaacccctggctttcccaaattaaatccctttgcaaaacatccccttttccccagttggcttaataccaaaaaggccccccccaatcgcctttccaaacatttgccc

SEQ ID NO: 56488 - DNA, 255 bp, Homo sapiens
  misc_feature 34, 76: n = A,T,C or G
gggtaccgggcccccccctcggaatacttctagnattaattaacgcgggtccttggagacctgaagggatgcagtngagcttaaaaattttcaaaagcttaccaatcagtccttattcatccctgagtagatgtgtagtggtattatgatggacctttactggacactgtcaagtaaccaaagtggcacttatgctttagtccaattggctatcccttttaccctggcatttcatcaaccagaaaaagaaaaaaa

SEQ ID NO: 56489 - DNA, 596 bp, Homo sapiens
cgggccccccctcgagagtcttctagaattaattaacgcgggacctggcggggcagaggtagcagtgagccgagatcagccaccactgcactctagcctggccaacacagggaaactgtctcaaaaaaaaaaaaaagaaagaaagaaagaaagaaaatagtttaaattcccttttctgtagaagcaaatcttgactatcaattttatgagaaaaggagcaatgacatataccatccagaacaatgttggaaaaccccaaaatatatatgacatagaatgttttgttattcttcataagaaatatttacctttaaagtgaactttacatagactaatacagacagtctcagacttaggattttttttttttacctttatatcggtgcaaaagctgtaagtattcagtggaaactgtacttcaaagtttgaattttgattttctcccatgctacaggtatggagtacaatgctctcatgtgatgctgggcagtggcagtgagccacagctctcatgtggccatgaaattgtgagggtaaacaaccggtactctacagtgcactgtgttgccagatgattttgcctaactctatgctac

SEQ ID NO: 56490 - DNA, 556 bp, Homo sapiens
  misc_feature 27, 31: n = A,T,C or G
taattaacgcggggggaaacaactggnacgncaaaaatttgtcacagaaatttccgagacccattaaaaaagttaaatgagaaataaaaaaaaaaaaaaaaaaaaaaaaaaaaaaaaaaaaaaaaaaaaaaaaaaaaaaaaaaaaaaaaaaaaaaaaaaaaaaaaaaaaaaaaaaaaaaaaaaaatttttttttaaaaaaaaaaaaggggcccccccccgggggggcccccaattcccccttttggggggttttttacccccccccccgggcccgttttttaaaaccgggggggggggaaaacccgggggttccccaatttaatgccctggggaacaaccccccttttccccgggggggtaaaaacaaaagggccccccccaatcccccttcccaaaagtggccccccccggggggggaagggaaattggaccccttaatttttgggaaaaaaccccggaaaattttgggaaaaacccccttttttttaacccaaggggcgaaatggggaaaacccctttttattaaaaaaaaaacccccgaaagggggggggggg

SEQ ID NO: 56491 - DNA, 599 bp, Homo sapiens
ccccccttcggggtactttctaaaattaattaacgcggcaggtttggtacatatgtatacatgtaaccatcattttaatatctcacacatgtaaatgcacatctttgtagttaccaatcaaatgtatgtgaggcaatgaaaggcattgagcagttacagtaaagggcagacatcaggcctctgccagtatgtacctgctgtgccttcctgcctgccctatttctttgttttcagtgtgcatgccagtcactgctgcttctggagacaggatggaaggatacatgtatgtgtacatttatggagaaaaccaatttatagatgtatcagagctctaagggattctctttcacttccttgggactcccaagcagaggaattaatagattaggagggtcttttggggggttggtttaaattttcagggcgatagaggctaacttctcgttggccttcatgaattttcaatatatcatcttttcgctgacttatccctgtttgatttctgagtttggattaataactatgttttttaacttcaacattctcacaaacaatttctgcataaaacttcttctttaaagcttaaaaaaaaaaaaaaa

SEQ ID NO: 56492 - DNA, 442 bp, Homo sapiens
  misc_feature 21: n = A,T,C or G
ccccctcggaagtcttctagnattaattaacgcgggcatgtattgaggtgtggcatgcagcattttggaaggaaaattgaagacgtgttcaagaaaacatgaacagaagcaaatgatgaaaatgagcattttacttgatgttgataacatcacaataaattatggagaaaaatacatatttggctaacttttaaaaaaaaaaaaaaaaaaaaaaaaaaaaaaaaaaaaaaaaaaaaaaaaaaaaaaaaaaaaaaaaaaaaaaaaaaaaaagaggccgcaaaaaaaaaagaagccgccccccccccggggggacctccatttccccctattaaggggcgtttaacccccccccccgggccggggaaaacccggcgggaccgggaaaaacccgggggtacccaatttaatttgcttggaaggacttcccctttaaaaggccggg

SEQ ID NO: 56493 - DNA, 261 bp, Homo sapiens
ggccccccctcgaaagtcttctagaattaattaacgcggggtcatcatcaaggttaacataaacagtgatgtcatgttgatcacatgtacctttaatatgatataatgaaaatggccctttatctttgtggtcttcctgtcccaaacccataatccatgaaattgtgagaaaaacatcagataaactccatttaagggaatttctataaaatacctgaccagtactcctcaaactggaatgtcatcaaaaaaaaaaaaaaa

SEQ ID NO: 56494 - DNA, 590 bp, Homo sapiens
ccgggccccccctcggaagtcttctagaattaattaagacaataaaaatgcattatacatttggtcaaaatacattttctatattatgaaggaaattcacaaagaggttgttgtttataaatcaatatgaagtaaacattaaatagttaaaaaaaagatgcagaaaataaaaagaaacccattaccctattcatccagagagctcttggaactaaagaaatgctttcatcagagttcgagttctaggatgcatgggaaagccagtgagaaaagtgaggctctcttcctgtctttctctcaaacatggcaaaggtttggtaccaacccccttttcaaaccccaggatttggtctgggagtgggagggaagatgtggcatccgaggtagaacctcccctccaggttcccattaggtcgtctgccagctgtgtctctctcaatgcacgtttttgtttaacagaatgcaccatcagtaagcaattcgattcacacctgaatcactgaagttgcggatcctggatgaaacccatcttactgcttttggaggtggagtctgtccacctacctgagggtaacaattgtttcatcctc

SEQ ID NO: 56495 - DNA, 185 bp, Homo sapiens
  misc_feature 28: n = A,T,C or G
cgggcccccccctcggagtacttctagnattaattaacgcgggatcctcacaaattggtgttctaatgtcttaagaacctaattaaatagctgactacaaaaaaaaaaaaaaaaaaaaaaaaaaaaaaaaaaaaaaaaaaaaaaaaaaaaaaaaaaaaaggcggccgcccccgaggggggaactc

SEQ ID NO: 56496 - DNA, 303 bp, Homo sapiens
ccgggccccccctcggaagtcttctagaattaattaacgcggggtctttccaaaaaaggtgcatttcagctgaaacctgaatgaaggaagaggaaaagccttttggctatttaaagtataaaccttccagataggggtggcagcaagggcaaaggctctgagacaggagtgtgtttgatgttattgaggaacagtaaggaggccagtgtggttggagcaaggtggataaggggacaaattgtaggaggtgacagcgattagggagtaggggcagatcatggagaaacgagtgtgccaaggtaa

SEQ ID NO: 56497 - DNA, 559 bp, Homo sapiens
ccgggccccccctcggaagtcttctagaattaattaacgcgggggtgactggtgttgcttctttcccatttacacttggtgagtcatcaactctactgagattccactcccctccaagcacctgctgtgattgggtggcctgctctgatcagatagcaaattctgatcagagaagactttaaaactcttgacttaattgagtaaactcttcatgccatatacatcattttcattatgttaaaggtaaaatatgctttgtgaactcagatgtctgtagccaggaagccagggtgtgtaaatccaaaatatatgcaggaaatgcggagaatagaaaatatgtcacttgaaaaaaaaaaaaaaaaaaaaaaaaggaaaaaagaaaacaaaagaaaaaaaaaaaaaaaaagagagaacaaaaaaaaaaaaaaaaaaaagaacgacaaaaaaaaaaaaactaaaaggcaaactaaaaaaaaataaatgggcgcccccccccgggggggcccccaattccccctttaggggggtaattttccccccccccatgggcgttgtttta

SEQ ID NO: 56498 - DNA, 311 bp, Homo sapiens
cccccctcggaagtcttctagaattaattaacgcgggccattgcactccagcctaggagatggaacaagactccatcccatctaaaaaaaaaaaaataacattttttttgcagccgggccatgtggtagaaaagtaaagcctagaattctgctaccctgtgcagctttgggacactgttccccacatcccagtttgtccagctccagccatggctcaaaggggtccaggtacattctgggctttacttttctctctcaatcatctcttctcaacagtcccccaaattcttaactcatttcaacattaactt

SEQ ID NO: 56499 - DNA, 602 bp, Homo sapiens
attaattaacgcgggtaccatctttgcagaaagcaagcggggagccagcactccacgtggccagagcagaaggaagagagagtgaggcaggaggtgctactcacttttaaacaacgagatctcatgagaactctatcacaagaacagcaccaaagggatggtactaaaccattcattttgtctccaccccacagtccaatcacctcccaccaggccccgcctccaacactggggattacaatttgacgtgacgtttggtggggacacagatccaaaccatatcataggggttcatcatactcttctgcctccactttttacctaatataaattccccactgaaaaatgttgtgtgatctggacccatttcctcatctgtaagatatagatcaaggagacactcttcaacctccctcagggaatgttataaaagtagaactaagataatagatatggaagaaaaagggaaaagttaaaattattacgcaaatttaagttaaataatatcatagatgaaatgctaagcagggcttgacgtaagccagtgagcgtaataatggcaagaactttccctcacctccccaccttccgtctagacggaa

SEQ ID NO: 56500 - DNA, 531 bp, Homo sapiens
  misc_feature 505: n = A,T,C or G
tccaccgcggtggcggccgctttttttttttttttcattttttttttttttttttttttttttttttttttaaaatttttttttttttttttttccccaaaccttaaaaaagaaaaccctaaaaaaaaacccccttttttttcccaaaaaaaccccaaaaggggggaaaacccccctaaaaaaaaaaaccccctaaacccaaaaaggaaaaaaccccaaaaaccccttttttggcaaaaaaaaccccgaaaaaaaaaccccaagggaaaaaaaaaaaacccccggggccccccccaaaaaaaaaaaaacccccccaaaaaggggggccccccccccccccccccccccccaaaaaaggggaaaaaaaaaacccccccccccccaggccccgggaaaaaaaaattaaaaaaccccccggggggggcccccccccccccattttttcccccttaaaaaagaaaaaaaccccccccccaaaaaaaaaaaaaaaaaaattttccccaanaaaaaaaaccccaaaaaaaaaaaaaa

SEQ ID NO: 56501 - DNA, 478 bp, Homo sapiens
tccaccgcggtggcggccgcttttttttttttttttccttttaaaagggttttattttttgtccaaataataaacatcctttgcccccataaattttactttccaaaaacaggacctttttaaaaaaaacccccttaccaccttttaaaaggccctgggattcctttgcttttaaataaatgctgggctaaaaaagaaaagtttgttttttcaggaatcacaagttggaactgatttttctccaaaggggaaattttaaagtgtagggtccctccaggcaaaaatttttcattttttatccccagcttccacaattacctttaaaaggggttaaaccaggtcaaaacagcccaccttaattaggcttcttcaaacaatgtctttatgctcttttaaaatgcaaataacccaaaccgggaaatcctaaaataaaaatttctgaccctgccttcccccgttaattaattttaaaagtcct

SEQ ID NO: 56502 - DNA, 581 bp, Homo sapiens
tccaccgcggtggcggccgctttttttttttttttggaaaccaaggggttttaaaaaaccttcattaaaacccggtaaaaggtcaaaaatttttttttgcctacccaaaaattgggggcacttttaccagtaaccccgggggtcccgaaatttgaaaccatagtctttttaaaaaccggggaaaaacctggttcccaccaaaattaccgggcggggggtcctttggccccggtttcccccgaaacctaaacctttaaataccaccaattggccccaatggtccctaaccttttttgaaaaaatccccccccgggaaataccttttaaaaggggggcccacttttaattccccccttcccgggggaaattttcagtaaccccaaaaaaacccgggggggggagaaaaacccatagtgaaaaaggctgccccaatttttttttgggcaataataaccggggggaaaaggaccccaataacctgttgtggggaaagtttttccgggcctacctaaaaccccccattaaaggtggaggggttattagggccaaaaaacccttcaaataatgggaaaaggaaaaaa

SEQ ID NO: 56503 - DNA, 230 bp, Homo sapiens
  misc_feature 37: n = A,T,C or G
ctgggttaccggggccccccctcggggatcttctagnattaattaacgcgggatgccctgggagatcacagacaagccgtccatgatttcataactcggaatcataccaccttacgcttagttgggactcttttattattacagcgtcactacactgtattcatgtgggggaacccacctgtatgagctctgacatgcctcgacaaacgcaggggtacccctagcatttg

SEQ ID NO: 56504 - DNA, 543 bp, Homo sapiens
cgggctcccccctcgaaagtcttctagaattaattaacgcgggggccgggcgcggtggctcacgcctgtaatcccagctctcagggaggctaagaggcgggaggatagcttgagcccaggagttcgagacctgcctgggcaatatagcgagaccccgttctccagaaaaaaaaaggaaaaaaaaaaaaaaaaaaacaaaagacaaaaaaaaaaataagcaaaaaaaaaaaaaaaaaaaaaaaaaaaaaaaaaaaaaaaaaaaaaaaaaaaaaaaaaaaaaaaaaaaaaaaaaaaaaaaaaaaaaaaaaaaaaaaaaaaaaaaaaaaaaaaaaaaaaaaaacggggccccccccgggggggaccccaaatcccccttaaaggggggtttttaacccccccctttggggcggtttttaaaaagggggaaaggggaaaaacccggggttaaccaaattaaagggcttgggaaaaaaccccttttttccaaggggggaaaaaaaaaaaaaggcccccccaaatcccctttcaaaaatttggcccccc

SEQ ID NO: 56505 - DNA, 471 bp, Homo sapiens
tccaccgcggtggcggccgctttttttttttttttggcaaaatttttttatttaaaaagggggcttaacttttttttgtaaaaaaaaattttgggaagggcaaattgggttaaaccctttaaaacaaaattagggggcttaaaaaaaaccccttcccttggggatgccctttttaaacggtttttaacccattcccaaatcccaaaacggcccttcttaaaaaacaaccagaatcccgggccctcccccctttttattgcaaaacctgttaaaataaacccagcgggccctgtttcttttgtttaacctccactttttaaacctttacatttcttttacccgggggctaaatcaaagcttttggaccccttttttgtttaagggaaaaaaaaattttgcttagggcccctgaattgcccccttggggggtttacaaaacattttttaaaattttgggaggggcccccactt

SEQ ID NO: 56506 - DNA, 391 bp, Homo sapiens
cggtggcgagccgctttttttttttttttttttttttttttttttaaaaaaaaaaattttcttttttcccccagggtggaaagggaggggccaaaatttggttaaataaaaaccccccccccggggttaaacccatttccccccccaaacccccaaaaaaacgggaaataaaggcccccccccctgcccccggaaaaatttttttttttttttttgggatttaaaaaaaaaaaggggtttcccccgtttaaccaaagggggtttaaacccccccccttttaaaccccccccttaaaaaaaattaaaaaaaccccccgggggggggccccccccccccttttttttccctttaaagggggaaaaaaccccccccgggaaaaaaaaggaaaaa

SEQ ID NO: 56507 - DNA, 452 bp, Homo sapiens
  misc_feature 16: n = A,T,C or G
cgggcccccccctcgnaggtacttctagaattaattaacgcggggggtggagaggagggagccggcatctgccgagcacctcctgtttgccaggcgctttctatacttaatcccatgtcatgcgaccctaggactttttttaacatgtaatcactgggctgggtgcagtggctcacgcctgtaatcccgacactttgggaggctgaggcaggaggactgtttgagttcaggagttttaagaccagcctgaccaacatggtgaaaccccatctctactaaaatataaaaattagccgggtgtggtggcgagcacctgtaatgtcagctacttgggaggctgaggcaggagaatcacttgaacccaggaagcggaggttgcaatgagctgagatcacaccactgcactccagcctgggtgacagattgagactccctctcaaaaaaaaaaaaaa

SEQ ID NO: 56508 - DNA, 435 bp, Homo sapiens
tccaccgcggtggcggccgcttttttttttttttttaaaaaaaaaagttttatttaaaagagtttcatagggtaaacaaccaaattgtcccactttgatttttttggaatacaaaactcgggagccaaagctaaagttgggtgtccaaaactctggacgggggggcttctctaggggggggggttttttaaaaaaaaaaattatctgggacccatacgtgataaataaaaatttcctttaaggcaaaggctggccaaaatgctgctgttattttttgcctcaaacaaacagtataaggggtcttgtttctaaaatccctccccccagttacttggggccaagtttccacatccccttgcgtttgggaggggggtaaaaagtgttggatccaaaggggttattatgggaagtccctttttggtaaaaggacaaacc

SEQ ID NO: 56509 - DNA, 270 bp, Homo sapiens
tccaccgcggtggcggccgcttttttttttttttttcccaacaggggtaaaattccccctgataaaaatcgaaatttgggtaaaggctggttttctaattccccgggtaaaaacccactccaaacctttttaatggcctttttagccttaaaagagaaaattaaaaaaaaggggttttaacccttgtttttttttttataaaaaaaaaggctttttttaatagtcatagggcattgggttaaaaacctgcccctgaacgggttttctaaa

SEQ ID NO: 56510 - DNA, 582 bp, Homo sapiens
  misc_feature 25, 38: n = A,T,C or G
ctggggtaccgggcccccccctcgngggtacttctagnattaattaagtgtgtcagtgtatgtacaatgagagtaccagaagagaaagaaaagacagaaaatactcaaagaacaatggctgaaaatgtttcaaattttgggaaaaacctgaatctacaaatctaaaaaccccactgaactctaagtaagataaacacaaagaaatttacatctaaaaacatcacagtaaaaataataaaaaacaaaaactatgaaaaatatcttgaaattagaaaaagaaaacaattcatatgtacaaaaggactccaataaaatcaagaaccaacttctcattaggcaaaataaagggtaaaaaacaggtatatgacatactcaaaatgctacaagagaagaaaaacatcagccaaaacccagcaaaactatattttgaaattaagatgaaataagagcaattcattgtaaataaaaactgaggcaatgtgttgccagcagacttgtaaaacatattaaagaaaacttttcaggatgaaagcaaataaaaaagacagtaatttaaattcattaggaaatgaaccaaacaac

SEQ ID NO: 56511 - DNA, 474 bp, Homo sapiens
  misc_feature 369: n = A,T,C or G
cggtggcggccgcttttttttttttttttctttttttttttttttttttttttttttttttttttttttttttttttttttttttttttatttttaaattaaaaaaaaaaaaaaaaaaaaaaaaaaaaaaaaaaaaaaaaaaaaaaaaaaaaaaaaaaaaaaaaaaaaaaaaaaaaaaaaaaaaaaaaaaaaaaaggggggggaaaaaaaaaaaaaaaaaaaaaaaaaaaaaggggggggggggggggggaaaaaaaaaaaaaaaaaggggggggggggaagaaaaaaggggggggaaaaaaaaaaaaaaaaaaaaaaaaaaaaaacacccgcggggggaaaaaaaacccccagccccttttttttttnggggggggggggggaaaaaaaaaaaaaaaacccccaaagagcctttgggagggggggggggggggcgccccaaaaatcctaaaaaaaaaaaaaagggaggggggg

SEQ ID NO: 56512 - DNA, 410 bp, Homo sapiens
tccaccgcggtggcggccgcttttttttttttttttcttttttttttaagaggggggggggagacctaattttttttttaatttttgccctttttgttaaccaaaagatttgttaatttaaaaaaaaaaaatttggtttttgtaattaagggggttttttaaaaaaaaaaaattaggacttttttaaagggttttttggggtttttaaggaaagggatttttttttttttaaggggggagggggggttaaaactctttttattgggaccccctaaaaaaatggggaaaaaaaaaaaatctttggttggaagggccaacttttttttaaaaaaaaacggaaaaaggggccttccttttttttttttaaaaaaagggggaaatcttacccttttcttttttaaaaaaaaatt

SEQ ID NO: 56513 - DNA, 605 bp, Homo sapiens
  misc_feature 577: n = A,T,C or G
cgggccccccctcggaagtcttctagaattaattaacgcgggaagcagagtagatttagcataattcttaggggccctaggattttcagaataataaataagcattggcttcaacttaaagttaccagctacgttagcccctaacaagagagtcatcctgtcctttgaagctttgatgccacatatttacttctcctctatagctatgaaatccctagatggcatcttcctccaatataaggctgatttgtctacattgaaaatttgtttagtgtagctatcttaatcagtgctcctagctagatctgttggataacttgctgtaccttctacatcagcacttgtggcttcaccttgcacttttatgttgtggagatggcttctttccttgaatctcatgaaccaaactttgctatcttctacctattcttctgcagcttcctcacctctctcagtcttcacagaattgaggagagttagaaccttgctctggattaggcttaagggaatgttgtagctggtttaacctatccagaccactaaaactttctctataccagcaataaggctgttttgnctttttgtgttcactggactagcatttt

SEQ ID NO: 56514 - DNA, 407 bp, Homo sapiens
accgcggtggcggccactttttttttttttttgttttcacccagggggaaaaagcaaattttttagtttacccgtttttaaatgaggggcctaaaaaagggcaggggctggttacccctatgtaaaatttaaacaaatccttttaggctgaatgtggaaggtaacccctttaatcctccccctttaaaaggccaaggggggaggatcatttaactaaggatttccttaacagcctgggcaacataaagtccgtttcctaaaaaatttccttttttggctaaggttttaaagtcggggcccacaggtttttaataaaccggcaaatttggaaaggactgggggaactgccccttcttctttttgcacaaaaaatagaaaagggctgcggtaaggataaaaataatggc

SEQ ID NO: 56515 - DNA, 494 bp, Homo sapiens
tccaccgcggtggcggccgctttttttttttttttgaaagtaacctctttttttttttaggattgggtttcaaccttttaatttttttggaaataaaagccctttttggcaccctaaaaattaaattcaacctagggggttttatccctttaggcttccgggctgtccctggaattcttgaccaaattgataccttcctccagggggctaccaatccggttttaacctttaaataaaaccccctccttttttctttagaaaccacccaaaatcccgcccgtaaaagaattattctgcaaaacttttttttttacaggggacaaaaggatccaatttttttcctgcccaccctcctgggaaactgaataaaaagggcccagggcctgtaaaacaaaggaattttttcctttttaaaaccttcctctgcagaaaaaaaaaatcccgggttgctgcccttaaaaaaccaggtaaaaaaatttttccagagaaccccc

SEQ ID NO: 56516 - DNA, 491 bp, Homo sapiens
cccccctgcaagagtacttctaaaattaattaacgcgggggtctctgtaaattttctgggctttaatgtaatgccactgtgtaaaaaaaaaggaagaaaatagtaatagccatttaatgttttatatttatcattttaaagatatttttgtcaaatttcttttaataataataaacatatgtaatctaaaaaaaaaaaaaaaaaaaaaaaaaaaaaaaaaaaaaaaaaaaaaaaaaaaaaaaaaaaaaaaaaaaaaaaaaaaaaaaaaaaaaaaaaaaaaaaaaaaccaaaaaaaaaaaaggggcccccccccgggggggacccccaatcccccctaaagggagtgtatttacccccccccacgggccgtttttaaaaaaccgggggaggggaaaaacccgggcgttcccaaaataaaacccttggacaaaaaccccctttttcccagggggggaaaaaaaaaaaagcccccccccaaccccccttccaaa

SEQ ID NO: 56517 - DNA, 515 bp, Homo sapiens
tccaccgcggtggcggccgcttttttttttttttgggggggacacaaaccaaaatttattttgcaagtgaaaggggcaccccaggaaacccaaaaaaaaggaaggcagggttgaaaccaaaaagcctggttaaaggaaaaccacaaaagggcctgcaggacccaaattgcggcccccagggaaaacccaggaggcaggctgtaaagtgatcctgggcccaccctaaaagctgggactggaggggctttagcaactcaattccaggtgcagcttttgcaggatttgctaaacaccaggcctgtcgggcatttttgttgaaacagcccccccgttgcacagttgtaaaacctggaccgttcccaaggattgggataaaccccatcacttttgccctggcaaaacgttttttgtccagggctggggccatgctcaggttcaaagggctaacctggttttggaacttcaacctctggggtgcctgaaggcaattttggaaaactcatttcctgccgtac

SEQ ID NO: 56518 - DNA, 345 bp, Homo sapiens
  misc_feature 25, 38: n = A,T,C or G
ctgggttaccgggcccccccctcgngggtacttctagnattaattaacgcgggggccgctgcggtgagccttgaagcctagggcgcgggcccgggtggagccgccgccggtgcagatcttggtggtagtagcaaatattcaaacgtgtatccccacacaaatgcaagctcaccaaggtcccctctcagtccccttccctacaccctgaccggccactgccgcacacccacccagagcacgccatccgccatgggagtgtgctcaggagtcgcgggcagcgtggacatctgtcccagagggggcagaatctccaatagaggactgagcactgaaaaaaaaaaaaaa

SEQ ID NO: 56519 - DNA, 509 bp, Homo sapiens
tccaccgcggtggcggccgctttttttttttttttccggagtttttttttttttttttttaacccgaaccaaaaaaattttcccagttccctaaacaaaagggggaaaaaatgaaggttttttttttgggaattccaccccccatttttctttgggcccccggggttttttttattaattttccaaaaaaacaaaccccttttttccaaaaaaaaaatccaaaagccccctttttaaacccccttttaaaaaaacggtttccctttcccccttttggattacccccgtttcaattccccccgggccaaaaaacccaaaagccttttatggaaatttgaaaaaccgaaacctttctcccttaagaaccttgggcccccaccccccaatttaaaaaatttttttcaaattccccaaaaaaaaaacagcccccgaaaacaaaattcccccctttttttttaaaaattttaaaaacccctttttaaaccaaaaaccccccccaaaaaccgggg

SEQ ID NO: 56520 - DNA, 346 bp, Homo sapiens
gccgctttttttttttttccttttttttttttttttttttttttttttttttttttttttttttttttttttttttttttttttttccccgggaaaatttgaagggggttttgcaaaaaacccggggaaaaaaaaaaaacccgggggagggggggcccccccgcctgaaaaaaaaaaaaccgggggggggggggggggccggggggggttggtgcccccccccccccgggagggaaaaaaaaaaaaaaaaaaaaccccccccccccccccagcccacgcaaaagaagggggggaacccaaaaaaaaaaaccccgtaaaaaacaaaaaaggaaggggggaaaaaaaa

SEQ ID NO: 56521 - DNA, 239 bp, Homo sapiens
cgggccccccctcgaaagtcttctagaattaattaacgcgggggcctagaccagcagacagagccaggagaggctcagctgcattccgcagcccccacccccaaggttctccaacatcacagcccagcccacccactgggtaataaaagtggtttgtggaaaaaaaaaaaaaaaaaaaaaaaaaaaaaaaaaaaaaaaaaaaaaaaaaaaaaaaaaaaaaaaaaaagaaaaaaaaaaaa

SEQ ID NO: 56522 - DNA, 475 bp, Homo sapiens
attaattaccgcgggtgaaaaaacgttttgtttcttgatggtgggggcgggggctccacaaacccaccaggttttgaatttgcctaaaccctgaataaggattggggatggcactgatcccacctccctggttgggatattgccctgtagtatgtcaaatgttcccctggggaaaggatacatggggccctctatcctattttggtcaatccctgaaaatctatggccgttacaaaataaaatttaaaaaataattccccacccaaacatatccctaaggtctaagggacactggaaaattaaaagttttaggacaaaaaaagctgttccgtgcagttgctaaccaaaaaaaaccagtgcgcctgcataaaaagtggacttcaggtaaaaatggccttgagaggaaaaagggacttttgaaaagaaaggtcccccccccagaattatttccggattctttagatctgaaagttag

SEQ ID NO: 56523 - DNA, 608 bp, Homo sapiens
  misc_feature 28: n = A,T,C or G
ccgggccccccctcggaagtcttctagnattaattaacgcggggtcatttgatcggaatatgcagtggaataggtgactcactgaaatgcctttataaatactggaacaaatcctgctgcaaaaatgaaagcgatcagactgtcttctgttcaagaatgtctattcccacctcttggtggaggaagttgggccaacactgcagtggagataaccacctttgcgataatgagagacagaccagaggactgctactctttttataggagctgcctatttctgtgtaattggcctgggctgcatgggctgcttttattcatggtgggaaagttaattattattattctggaaataccgcaagattatgttttctgtttccagggttatgtacttgtgtccagatgaataaagcagaaaaagaggggattgagtagcatttcccagattcttaagtactttgctattcgatttgcctttcagtgtagtgtacattgtaaaactcagatattgtcatgatgtttcacttggacataagacttattaatgtggtcacttaaggggtaaggaatttaagaactggatgaggttatttcttcctttactcttcaaa

SEQ ID NO: 56524 - DNA, 333 bp, Homo sapiens
tccaccgcggtggcggccgcttttttttttttttcataaaaaatttttttttggaataccatttttttttcctttaaaaaagacccttttacaaaaaacttccacgggttgtggctttcccagaaaaagggtaggccttcatggttggatttttcctccaaattccttattaatttttttttcctggcagggcctaacctttcccccccggggtaaaaaattccggttttttttgtccttttaaaaaaattaccttgtccttttccattttttaaggtaaaaatttttttgtccaaatttttacttgtccagagtttttttaacccccttttt

SEQ ID NO: 56525 - DNA, 510 bp, Homo sapiens
tccaccgcggtggcggccgcttttttttttttttttctttttttttttttgcccccagggaaacaagaacttttttaattccctttagggcccccccggaaaagaggaattgggggccttttgaaaaatttttgttttagaaaccaaaaaagggcccctttgccccatccccgggaagggggggcccccaattttttgttgggggccccccaattttggggcttttttttaaaaaaatttttaaaaattagggggaaggaattttcccttttaaggggggaagggggccccctttttaaaagggggggggaaaaaggcccctttttgggggggggcctttaagggttggttaaaaaaaaacgggattttttaaaaaggtccttttttgcccaaaaaaagcttgggggaatttttttaataaaccccaccgggaaatttttgaacggttttatttaacccccttttaaaaaccccctccagggttttttttcccacccccccaaaaaaaat

SEQ ID NO: 56526 - DNA, 463 bp, Homo sapiens
ccccccctcgtgcagtcttctagaattaattaccgcggggcttataattaatttttattagttgattgattaatgatgtattcgccttgttccccatttatcccctgtgtatttatactgggaagtgtttagggttcccttgggttaaaaacataagtgtctctggccataaaagtgatcttgtttacagcagtgcttttgggaaacatttttttttttgctgaaagagcttttctgaactgtgccctttaaattttggcttaaaatagaatggaacaagtttaaatttcagggaaatgtgagggctcttcctttttttctaaaaaggaattggctaaatgatcccttcatcacccttacttaaagtcctgaaaagagtttctgtaaataaaagggtcccacccttttaaaaaagaaggaaaaaactttttggggctccagggtggggctatttttttaaaaa

SEQ ID NO: 56527 - DNA, 613 bp, Homo sapiens
cgggccccccctcggaagtcttctagaattaattaacgcgggctctcttcctggcttgtagatagctgccttctcactgtgtgctcacaggaagagcgggcggtgtgtgtgtggagagtgaaagctagctctctggcatctcttctataaggacactgattctatcagattagggcccctcccttataaactcatttaatcttagttacttccctaaatgacctatctccaaatacagtcccattgggagttagggctttaacacagatttgggaagacacaaccattcaagttcataacagataatgaactttgttcaacagagtgatagcagttagacaagtgtgactatacagctggaaatattcattggcaagagattcatgtatttgggaaggaaagtgtgccagaaaaatcaggttgaaaaaaaaagaagaggctgggtgcagtggctcacgcctgtaatcccagcactttcggaggccaaggcaggtggatcacctgaggtcaggagttcgagaccagtctggccaacacggcgaaaccccatctctactaaaaatacaaaaaattagccaggtatggcggcaggcacctgtgatcccagctattc

SEQ ID NO: 56528 - DNA, 553 bp, Homo sapiens
tccaccgcggtggcggccgcttttttttttttttttctttaaaagtattcttccggggtgggaaaccctcccctcccaaacaccaaattcatttgaacctgtttttttttgaaaggaattggtttgggaaactggggtggggccaggaaaatcccccccttttgttggcggccctaggggaaaaaaaactccctttcacaaattttgggttttggtggaaagggattaagccagaacccccaacctgggaaaatggaccccccctaatcccccactttattttttttttaatgttcccccactgggggctttttttgcatttttggaggcctttttttttttttttttcggggttttccaacttccaaaactttgaaggagggcctttacctttgcttcctgaacctccttttaaaatttttaaaggtcagcctcaaaggaaccattgtttttccccttgggccctttggccttaaccaaaactgtaattttaaactggccaacaatttccccccgctttatttatttttaaaattcctttcaaggggggccc

SEQ ID NO: 56529 - DNA, 266 bp, Homo sapiens
gccccccctcggggtacttctagaattaattaacgcgagagaatagcttttggccagtggatgtgctcttttgagaaagtcaattctgagctgaaatttcatgttggaacagtttcctctataagactcatcttgaaaggttcccgcagaagataaaatgtcatcctcacactgggcctgggcagtgcgcacttaactgggagggggcacaggcacctcagaacttaactggttttccaaactctcaatctcaaaaaaaaaaaaaa

SEQ ID NO: 56530 - DNA, 479 bp, Homo sapiens
gcggtggcggccgctttttttttttttttcctttttttttttttttttttttttttttttttttttttttttttttttttaaaaaaggggtttttttttttttttccaaaaaaaaaaattttttttgggggggggacaaaaaaaaaaaaaacccccccaaaaaaaaaaagcccccccccccccaaaaattttgggggggccctcttcccccccccttttttttggggggaaaaaaaaaaaaaaattcccccccccccttttttttttttgggggcccccccttttaaaaaaaaaaaccccccccttttttcccccaaaaccccggaaaaaaaaacccccccattgggggggggtccccccccttttttcccccccttttaaaggggggggtttttccaaaaaggggggggaatatttttttttaaaaaaaaaaaaaaaaacgggggtatttttcttcttttttgggccccccccggggg

SEQ ID NO: 56531 - DNA, 127 bp, Homo sapiens
cgggccccccctcgaaagtcttctagaattaattaacgcgggggcagataatttttagcttagggcctggtggctaggtcggttctctcctttccagtcggagacctctgccgcaaacatgctccgc

SEQ ID NO: 56532 - DNA, 552 bp, Homo sapiens
  misc_feature 24, 37, 54: n = A,T,C or G
ctgggtaccgggcccccccctcgngaatacttctagnattaattaacgcggggnaaatttaattgctaaatagtggttggtgattctttacagtaggaattgtaataattttcttgcaaataagttatttactgctattgatattgaataatttgtcttttattcagatatatttcaaaaagcatgaatatatgattattcataaattgtatactttaccagtaagttttcagaggaaataaagacttttaaatccttttcaaaaaaaaaaaaaaaaaaaaaaaaaaaaaaaaaaaaaaaaaaaaaaaaaaaaaaaaaaaaaaaaaaaaaaaaaaaaaaaaaaaaagaaaaaaaaaaaaaaaagggcgcccccccccgggggggacccccattcccccctatagggagggaattaacccccccccctggcccgtgttttaaaaacgtgggaatgggaaaaccccgggcttacccaaattaaatcccttggaaacaaatccccttttccccagtggggtaaaaaccaaaaagcccccccccatccccctttcc

SEQ ID NO: 56533 - DNA, 581 bp, Homo sapiens
tagaattaattaacgcggggagaaaattagtgaaaggagataaagaatctattaagaatctcctggaaatatttgatggtttgttggagtatcttacagaacgcatcagtgaaacatctcatgagaaaagtgctccttgtcttctgagatgttgggcccctcttgggatggagatgaagcagaatccactggtgaaatcattagacttggagacacagcacacaccttttctctaagaagtaatggtgctcaatgtcctaatgaaatgctgtctaaaaaagccttagcctcaccaagttctaaatcacatgaagatatgttgtaccctcctagtgttttgtccaagagtaggacatcctttgttgaagacacggaaaccctttctgtgagtgggattccaaatgctaggaagctaggggagcctatccgagcagctattcctttacatccaccctaccacccttcagagcctcgagcaccctgccccataggaaaagaatacttgcattcaagtcactgctccccagccgtaaattctactggagagcatacggaattttctggggatctagatgatggac

SEQ ID NO: 56534 - DNA, 378 bp, Homo sapiens
  misc_feature 20: n = A,T,C or G
ccccccctcgggcgtacttnataaaattaattaacgcggggatgtgggggttaaaaataatctaaatgtgggtggctttggtgcatgtgagggaaccctggtttgttcaacctgtcacctcatttttgaagatcacttatttgaaaagttagatgcactctctggtgaggaaaatgacttgctcgatctggcttttggactaacaaacaaatcacggttggcctgccaaatgtgttagacaaaatctatggacaatttgactgttcgagggcctgaaacaggggctgatgccaaacaatcctttggtgggggcaaaacctcctgaactaaaacaaatgggaattttttcatggaattttacctatttttataattatt

SEQ ID NO: 56535 - DNA, 610 bp, Homo sapiens
  misc_feature 55: n = A,T,C or G
ccgggccccccctcggaagtcttctagaattaattaacgcgggcctcctgtgacnacttttccatggagatccgagcaccctaggccaaggaagagcactttgtttctcccaagccctggagctaactcgggcagaggcttggagagactgagatggaaagataccaggaaatgctgcaggcattttctcagacccaggactgaggccaggatgccatttttaattcaagtgtatacaaaatcagtcattcttaatgtggcgacctggcagtgtgatcatacatttctgtcttggggcaaagactggggcacttgatttagatcagggctggggcctctataaccagaactgtagaaagtacttcagcagtagacactggaattatgctctcccttgtcacaggacttgggtgagaggaaagctattaaggctgcagtttctcctgggtgatgagatttgcagccagagacagtttggtgtccaggaacaggtctgtgtgtgtcattgctataggctccagcctgctcccctcaggtcacagtgcaacagagacctctccactccaccctcaggcagcaccccaggcattcagagcacacgtgtctgaac

SEQ ID NO: 56536 - DNA, 350 bp, Homo sapiens
cccccctcgaaatacttctagaattaattaacgcggggtctgtctgtacagttactcatgtcattgtaatgatttcactcctaactgtgacatttttatcaaatgtgtgaataaatacataaagattggtacaaaaaaaaaaaaaaaaaaaaaaaaaaaaaaaaaaaaaaaaaaaaaaaaaaaaaaaaaaaaaaaaaaaaaaaaaaaaaaaaaaaccgccaaaccccaaaaaaaaaaattccacaataacccaaatagggagccttatcgccccccccattggaacctaaaaaaaaaaaaaaggggacaagggaaaaccacccccaaaccccaaccaaaaaaccccccct

SEQ ID NO: 56537 - DNA, 517 bp, Homo sapiens
tccaccgcggtggcggccgcttttttttttttttttaaaaagggattttccttttgccccccaggttgaagggcaggggcgtaatctaacctaattaaaccccccccctccgggtattaaaacaattttcctgtttaaccctcccttgtagggggaactaagggcacttccccccaccccgggttaatttttgttttttaaaaaaagggggggttttttttttttaaccaggttaatttaaaactcctaacctaagggaatccccccgtttgggcctccaaaagggtgggaataacagggggaaccccccccccccagaaaaaatttcttttttttaagggccaaaaaatttccccctgccccactttgggttattccccccccaggggcaaatttttataaggggggctaaaagtttttttttccttaaaaaagggaaagggaaaccccctttggggttgtgttctcccacccccctccccggtttattaatttctaaaagtcctctcgggggggg

SEQ ID NO: 56538 - DNA, 404 bp, Homo sapiens
ggggctacacaactaaaaataaaaaccttttggggccccttggtcctggaacatttatgttccttttaaaaaaacaaaaatcaacctttacaaaaagattggatgtatgaaatacatataccagctctggaagtatatatttcataccaaataactcatctgatgaaaacaagcttttggggcccaacacttcgggaaagagacccccccgtgatggattttctccaaaccctccagagataaaaaatgttcactctaaagttaatttaaggccaggcaggggggttcacccctataatcccaccttttggggagtccgaggggggcaaatcacttgacctcaggaggtcaaaatcaccctgggcaacatggtgaacccttgtctctacttaaaatacaaaaac

SEQ ID NO: 56539 - DNA, 506 bp, Homo sapiens
ccccccctcgtacatccttctagaattaattaaccgggcagctttgttgctattattttcttctgcatagagggctgctcatttcattatggccctggctccctgatgggccaaagctatatatatatatatatagatagatagatagatagatatatgagagagatatttccagccctactggggatgtttttcagaggatgtttttgttctgcgggataaagttatttcccaagttactctggccagttatgtcagaaaactatggaaggggctaaccacactagccgcacagccagggaaaaggttttccattaacatgtttccattatatcaccttatcaaaccctaaaaaaaaaaatccataaatttcattaaaacatggggactttgagtgttgggggatcggcaccataaaaaatctggttttgcatttcatgtcagggcacccaaaacataggccacacacaaaaaaaattaagtgtggaaaaaaacctagttggata

SEQ ID NO: 56540 - DNA, 338 bp, Homo sapiens
ctggaaccaaaaacctgaacaaaaagaacattcgacgggacaaaaccggcctttaaaaaacaacaaactataccccccacctttgttttcccaattaatctccacccctttcccccaccatttttatttattaaacatcaagggtggggggaggggtgggccctcccctgggttggagttcctttctcacccctgtgattgggaggtgtggaaaaggggaagggagggacagctcactggttccttctgcattacctgtggggtaaaaaatggaaactgttttcttccccagccccactccttgttccctacccatatgggccctaatttggggaaaa

SEQ ID NO: 56541 - DNA, 445 bp, Homo sapiens
attaattaacgcggggtagaagcaatcctgtaaagtttatttatcaagcagtgactgcttacagaacttcaaatatgtcaatagttgggtcataaaacctaaaagccaaaccccacacagaggggcaaaaatcccaattaaactcatgttataatcattagcgatctgggttgaaaaacatgagggtgtaacccttaaccctggaaggttacttgaaaaaagcccacacttggaagggttttgttttacaaatcacttgtttaaacacactcaggtaaaatttttttattttaactgttttacccccaaaagttatttttactttgtcctccagcaagagttttcataaaagtttccttttcaaatgcctttgaaaaaaataaaaaaaaaaaagtttgtctatattttaaaaattggttttaaaagtcagtttgaaacatgtctg

SEQ ID NO: 56542 - DNA, 332 bp, Homo sapiens
  misc_feature 28: n = A,T,C or G
ccgggccccccctcgaaagtcttctagnaattaattaacgcgggggggggggaggtcccacactcttttaaacaacccaatctcatgcaaactaactgaacaagaactcacttatcacccaagggatggtgctaggccattcatgagggatctgtccccataatccaatcacctcctaccaggtcccactccaacactgggaattacgtttcaacatgacgttcagaggggacaaatatccaaagcatatcaggaggatgcccatctcagtaggtgtcaacagggagagtggacagtgccaaagtcatacccaaacctaaatattctctaag

SEQ ID NO: 56543 - DNA, 193 bp, Homo sapiens
cgggcccccccctcgaaatacttctagaaataattaacgcgggggttttacaaagtagcttgtattttcagtattttctacataatatggtaaaatgtagagcaattgtaatgcatcaataaaatgggtaaattttcaaaaaaaaaaaaaaaaaaaaaaaaaaaaaaaaaaaaaaaaagaaaaaaaaaaaaaa

SEQ ID NO: 56544 - DNA, 618 bp, Homo sapiens
cgggccccccctcgaaagtcttctagaattaattaacgcgggcgagaggctgagactaacccagaaacatccaattctcaaactgaagctcgcactctcgcctccagcatgaaagtctctgccgcccttctgtgcctgctgctcatagcagccaccttcattccccaagggctcgctcagccagatgcaatcaatgccccaactaaatactaccgtatggcccaccataattacccccatactccttacactattcctcatcacccaactaaaaatattaaacacaaactaccacctacctccctcaccaaagcccaaaaaaaaaaaaaaaagcggccgccaccgcggtggagctccaattcgccctatagtgagtcgtattacgcgcgctcactggccgtcgttttacaacgtcgtgactgggaaaaccctggcgttacccaacttaatcgccttgcagcacatccccctttcgccagctggcgtaatagcgaagaggcccgcaccgatcgcccttcccaacagttgcgcagcctgaatggcgaatggaaattgtaagcgttaatattttgttaaaattcgcgttaaatttttgttaaatcagctcattttttaacc

SEQ ID NO: 56545 - DNA, 602 bp, Homo sapiens
  misc_feature 554: n = A,T,C or G
acttctagaattaattaacgcgggggaccatctggactcaccattccaatatccaaagttggtacctccatggaacatgtacctgaagtgagagagggtgggggaacaggtaaaagctgactcactgaatctttactttcatccccagctcccagctacagattcatattgcccccagtgtctttacttacatgttcacactggctcccaacttgagcatgttctctagtcctttggttacagctgacacagaccgtgtggagtgattctggccccagtaatccagccagcctgtgtagtactcagagtttacctagagtgtgaaatgaaaggagtgtgagtgagatggaactgagctggacccattcctatccctgattccctgactcctctctggcccctcaccaatggcccatggggttcatacttccgaagcagggtaaagattttggtcatgttgtcagctgcggaaaggaggcaaaagaaaaagataaatgtcgtggaagaggtgtcctttccccagactccactcccagcccttgcttgagacctgngccaaaatctacagtggtatagagtccccgggaggagccacacttgag

SEQ ID NO: 56546 - DNA, 531 bp, Homo sapiens
  misc_feature 31, 472: n = A,T,C or G
taccgggccccctcctcggggtacttctagnattaattaacgcgggactttattaacttacggatttattatataaatatatattcacctagcaacatatctctgccgtctctcctgctctcataatgaagacatagccgattctctgcccgggccccttgctgatgctcctccgggtctgcgtcgggcgtgggtctctggggaccctccagaggtggaggtgggctgatggcctggctgcctggtggttgatggttttgctccccctaccttttttttttgagtttattctgattgattttttttcttggtttctggataaaccaccctctggggacaggataataaaacatgtaatatttttaaaaaaaaaaaaaaaaaaaaaaaaaaaaaaaaaaaaaaaaaaaaaaaaaaaaaaaaaaaaaaaaaaaaaaaaaaaaaaaaaaaaaaaaaaaaggaaaaaaaaaaaaanggggggccccccccgggggggacccccattcccccttaaggggagtgttttaccccccc

SEQ ID NO: 56547 - DNA, 421 bp, Homo sapiens
cccgcggtggcggccgctttttttttttttttttttttttttttttttttttttttttttttttttttttttttttggggggaaaaaaaaaaatttttttttgggggaataagggggggttttttctaaatcccaaaaattaaaaggggggggggggggaaaaaaaaataagacccccccccccccggggggaaaaaccccgagggacacccccggggaaaaaaaattttccccccccaatttaaaaaaaaaaaggccccttttccccccaaaagggggggggcacccccaaaaaaattttttcccccccccccccccccccaaagaaaaaaaaattcccaaaaaaaaaaggttttttttttaaaataaaaaaaaaaaggatgtgttggtgtgaaaaattttttttaaaaaaagggggggg

SEQ ID NO: 56548 - DNA, 623 bp, Homo sapiens
  misc_feature 44: n = A,T,C or G
aaaaaactgggttaccgcggccccccctcggaaatacttctagnattaattaactctgtgttgttgtcttggggagtattcccaatgtatctttgatattgaacctggttaatttgtggacagccacaacaatggatagaattatgtaatctccgttatcactaaaatgttatcttcaagagatgttaaatatttatatgctttgttgactagctgacatgtgaattctgttagtgatgactaaagaatctggtattggcttaattgggcaattaaacaatctatggctctattttgtgaataaaaactaaaaagttacctggctacagaaaagaaaatgccagatgacacttaatacctacttgtgatatggagctgatgctgtacaagacctattgctccgtaaagaaagccgctgtccacacgtactcaggccctggcctggcaactcctgaaatgaagcgcccctcgccggagtgaaccaaaaaatcccccaatagtgagtcttattacccgcgcgcattggccgaatagtacccacccccctgccgtgtgaacaccagggcgtaaccaaaattaaatcgccttggaaaacaacccccttttcccgggctggataaaag

SEQ ID NO: 56549 - DNA, 374 bp, Homo sapiens
tccccgcggtggcggccgctttttttttttttttgacaaaaaaaaaaggtttatttttttttcaaaataaaaaaagtggaaaaggcaaaatttcccttttttttaaaaaaaacctttgaaaatttaaaaaggccctcccaatccccctttccttgggataaacagctagttttttggggggggggtttgtatagggtggttttccaccggggtttttgtccttttttttgggcccttaacccttttttccttaaactttttgggaaaggacttccaattttaaaaaaaaaaaggggggggaagttcccttcctgaaaccaggatggggtttgtttttttggttttcccgggcctggagaccctggtggggcctt

SEQ ID NO: 56550 - DNA, 512 bp, Homo sapiens
  misc_feature 21: n = A,T,C or G
ccccctcggaagtcttctagnaattaattaacgcggggaattcaacatttcttcatgataaaaaaactcttcagtagactatgaataataggttgggatatcaaagccctatcacaaggtaattaatggcaaaatattagaagcattatcttaaaagtgaagacagcagctctcatcgctggaagaagagccattggttgtatgccaaggaaagcaatgtggctagatctctgttttgaaaggagtttcctgtaggcactgtattgtggaggggaggcttttaaaatgctgactatgcctaatgtatttgagaatatccacctatgaatttctaaaaatgcttatctagaaaacatttcttaaaggaaaaaaacctcagctttttggttttctacagaaaaccaaagctagtcaggaatgcaaaggtggcttctgaatgctacagagttgcagttgttcacccacaggcggcaattgacacaccctaaatacttttccaaaaaaaaaaaaaa

SEQ ID NO: 56551 - DNA, 607 bp, Homo sapiens
  misc_feature 27, 583: n = A,T,C or G
cgggccccccctcggaagtcttctagnattaattaacgcggggtaaatttggaatgtaagcattttcacatgttaagtatgcctgaagatgatttaaagtaaccagaacttaagtccctaaaacaaagtgttttgtgaataagcaagaatattacaaatatttttcacaatttctatacaattttaaatcagcattatatttcaccacacttatctgcccagcaacagcctctggcatagtatgctgcctggcttatatcccttttctttattttctccatattatttgaactcagagcaggaaatgatattgatgcttaagatttaattatctaacaagattgctcctgaggataccacaaaatactattctgtctgaaactgcaaataatttctaattcctgttgactccttaagaaggttaaagaaccgattatctttattgatttacttagttctttggtacaaaaaaaattcctagctgttctaacacttatctaacatttaaaaatcttttagtactgaattatatctatgcacacactgaatattttccaagtatcttctccagctgatatacatntactgacaatagtacgaagtaagc

SEQ ID NO: 56552 - DNA, 404 bp, Homo sapiens
ccgggccccccctcgaaagtcttctagaattaattaacccggggagcaggagggatagcattgggagatatacctaatgctagatgacgagttagtgggtgcagcacaccagcatggcaaatgtatacgtatgtaactcaacctgcacaatgtgcacatgtaccctaaaacttaaagtgtaataataaaaaaataaaaaaattaaaaaaaatttaaaatatgaaaaacaaaaaacaaaaaacaccatcctttgcccactgcaacaggtgctgtatttggcataaatcaaataatacttgcatgggtctgcatctattaacctattattactataatactatactatcttaatttttataaccttaaaataaatcttaatattcagcaaaaaaaaaaaaaaaaaa

SEQ ID NO: 56553 - DNA, 397 bp, Homo sapiens
tccaccgcggtggcggccgctttttttttttttttcacagaattcaaaaatttaatccctcaaaaaagagggggaaaaagtttttacctccctcccccagggtttttttaaaggactttaaaaaggggggcctttttttatggttttttttaacaaaagcttttaagggaccggccccccccctatccggaattttttttttaaaagaacctccacattttttggtttccttcaaaatggggggctttataaaaaaaaacccccctgcaaatgccttgagggaaaaagggaaccaaaaaaatttcaaacctccccaaaatggtccagtttttcctttaaaaaagggttctaaaatatacatccaaccttccccccttaaataaattttaaaagtcct

SEQ ID NO: 56554 - DNA, 478 bp, Homo sapiens
tccaccgcggtggcggccgctttttttttttttttcctttttttttttttttttttttttttttttttcccccccccaaaaaaaaaaattttttaaaaggggggggaaatttccaccccactttgggtttttccaaaaacccccccccccattgggttttttggccccaatttttttttccccccccaaaaatttttaaaagggggttttggaaaaaaacttttgaaaaaaaaccccaaattttttttaaaggggccaattttttttttctgggggggaaccccccaaaaaaaccccccctaaaaaaaaaaaaaacccccccccaaaaaggaaaaaattctcccccccaaaaaaaagggggggggggggccccaaaaaaaaaaattttttttttttaaaaacccccccggggggggggcccccccccccttttttttctcttttagggggggaaaaaccccccccgggaaaaaaaaag

SEQ ID NO: 56555 - DNA, 616 bp, Homo sapiens
cccccctcggaagtcttctagaattaattaacgcgggcaatactagtaggtaagatttcactgtgtgtacacatacacatttgagattgtatgagaacatataatccatatgatatgttgtacattttatggaaatgtaatagaatctcacacattattttatagaaatagagtacagaagcatcacaagtattaaagttggttttagcaaggattaggattactacaattatttttactataataattatttttcttctatggaactcagaatcctggctacatttgaggacaggaatatgttgagcctgattttcctggtgtgtgtaaaatatttcctaggaataaattaggcactttttagaagcaatgttaaatcattcaggttttattttctgccctgaagcagaaatttaaaaaatgatattgggacctggaaggtttaatatagttcacagtgcctgaattacacctgctccgaaaactagctttgtatttcttatgactttgcataagaactgttcatctttggatcttgagcaccttacagataaaactttttatggcatctctttcatggacagtgattgatcttttcacaatgtatgtagcctct

SEQ ID NO: 56556 - DNA, 636 bp, Homo sapiens; identical to SEQ ID NO: 43088

SEQ ID NO: 56557 - DNA, 190 bp, Homo sapiens
  misc_feature 6, 39: n = A,T,C or G
actggngtaccgggcccccccctcggaaatacttctagnattaattaacgcgggcatgagaagacaaagataaggcaaatgcagcaaaattgtaataattggtgaatccaggtgaagggactatggctggtctttgtacttttttttccaacttttctgtaggtttaaaattttcaaaaaaaaagaaaaa

SEQ ID NO: 56558 - DNA, 227 bp, Homo sapiens
ccgggccccccctcgaaagtcttctagaattaattaacgcggggcagtgatttgcgattactttaaagctcaccttttttcttcccctctctgttcgctgctgtcagcataatgattgtgttccttccctatgggatccatctgttttgtaaacaataaagcgtctgagggagtgtaaaaaaaaaaaaaaaaaaaaaaaaaaaaaaaaaggaaaaaaaaaaaaaaaa

SEQ ID NO: 56559 - DNA, 530 bp, Homo sapiens
  misc_feature 33, 475, 522: n = A,T,C or G
ggtaccgggcccccccctcgaaatacttctagnattaattaacgcggggatgtcaagttcatttatgtgactctttggctcaacttacataatctttgttttgatatcacagttgtctaattattttactttgtagcttaaggcaggctgaattgttgataaaatggaaaaagtagtatattgttatataagcttctgaggtgtgttttgttgtataagccctggaggttaaaaagtcatcccttatgtatagtagttaaaggcataaaactgtgacttttagatattccacagaaccagacttatttgatgtggataataaccaatgatttagcattttgtttgcttttgttttattttatccgggttcattttttactcttcccatgtacatgaaacaggtggtggcgtgtagagatcagctgatccttgttttatggttaattgaactactttgtatccagggtttctgcanatccaaaagtgatttttcatctaggatctattcctaacagtctactncaatccca

SEQ ID NO: 56560 - DNA, 610 bp, Homo sapiens
cgggcccccccctcggggtacttctagaattaattaacgcgggtgtttccccagtttgtggcccctgagtgctggggggggaccgcggtgactgaacctagaaggtggagaggaatcgtcctcggtgcccagaggcggctctgcagccccgtgacggcgaccactgctcccgggccgtgcttccccaagtagtccgatggcagcggctgcgccgaggcgcccgactcaggagaggctcctgagcgctaggtccgcactgtggtgactgaacccagaagtcggggagcagttgtcctccgctgcacagaggctactctggagctctgtgacggcgcccagcgtgacccactcctgggccaggatacggaccgtcgtgcccatatctcctggctggtcgccctatcctcccgactctgcttaaaaccacgtggttcgatggctgccgcggctacgctgaggctctccgctcagatcctgcactggatggatcagcggacaacacacagaccggtaatctgggtcaatcagttctgccatcccacccagaacagaaaacagcatgaaaaactcactttaaccccctatgaatccatctccaaccagactgatc

SEQ ID NO: 56561 - DNA, 134 bp, Homo sapiens
  misc_feature 24, 45: n = A,T,C or G
gccccccctcggggtacttctagnattaattaacgcggggacagnatgggttaacaggactgaacgcgagcagccaaggtgtatggagcagctacacaggacaaacccctgtgtttcccaaagctagatacact

SEQ ID NO: 56562 - DNA, 573 bp, Homo sapiens
ccgggccccccctcggaagtcttctagaattaattaacgcggggaggcgcacggcattacctggtacccacctacagttttgcttcctgcagcacagagcccttgggagctgatgtcatcagggattcagaataggcctgaatggcctccttatcctttgagccctttttactactactccaaaataaatagcatttctcctagaagataaccaagctaatttatagttgacgttgaagccacataaaaatggttttacacggttcttcaatttgcaaaaggcaaagaggaaacaggaaaggcacataagtttagagtccaacaaccctcaacgattgcaggtggctgagatgtggggagctgccgctcttagacataagtacaagcatcttcaggaaacacacctgggaggtggacaagccaagctgaaaagggctcgtccacttgaaaatttaagccagcgaggaagcaaggtggggagatgggccatggagaccgacaccagtggacttagctggggggctgtttaaaatcaacgaggaacagattgttctgttaaatacttttgattta

SEQ ID NO: 56563 - DNA, 609 bp, Homo sapiens
cccccctcggaagtcttctagaattaattaacgcgggacacaaactggtgtcacctgtttcttgactgggatttggtttcctcattataaatatgggaggtagaacagagatctccaacgtctctcccatttatcacagtaattttcttattcacagtaatcattgttggatgttaccttttcagcttcacattctcaagatggtaaaaatcatgtatatagattatcagaactctaagcaaagatgactgtcacatctgaagctgaggtgccttaggtactctactgaccttgatgggtttggagttccccattgtttatcaagagctttttaattgctttggttctttagtttttctttttgcaaaaatccttcctgtcactttaactaaaaaccaaagatttgttttctattgataagcagactagagaaaaactgccttattttcagaagcatgtcttcattcaaagcttaggcttcaatagaaattcagactaatcactgaaatgactatttcaaactagtgaaatatctgggaaataaactgcttcaaaaatattttactgacatgaattttgctagtgaatacaaatacactgcctcaaata

SEQ ID NO: 56564 - DNA, 241 bp, Homo sapiens
catttgacattgtgttaagtggcctgaattgttgaaaactggattatgtttctcttctaaagaggaatgtgtacttggttgtctaatctctttggttttgcttttgtaaaaaatgcaagagcctatactttgtatttacctaatgaaccacagggacgtgggaaaaaaagaaaaaaaaaaaaaaaagagaaaaagaaagaagaaaaagaaaaaaaaaaaaaaaaaataaaaaaaaaaaaaa

SEQ ID NO: 56565 - DNA, 588 bp, Homo sapiens
cccccctcgagaagtcttctagaattaattaacgcgggaagctctagaccccaatgctttcatttacatgaaattaaaaaataattccaatttgttgggaaaagatggcacagctcagacacattgttccctatacaaatacatatataaagttgtgtataaaagtttacatatagttattatatataaaatttctcatatatgtatacacataaaactagcagagataatatctgacagggctatttcaagaaagaaaaattataggtcaatttctctcatgaacatagacgcaaataaaaaacagcaacagaatccagcaacatataaaaattatatcacaactaaaatgcatcattatggtgatgtgacattgatttaacatttgagaactgattattataattctccatattaataataggagaaaaagcccataatcatgtcaatagaaagaaaaaagcatgtgataaaattctacctcattcatgattaaaaaaatatatatatacacctatataaacaacatttcccaaactggagaataaagggaagttacataagatatacttatcgtaaagtatatct

SEQ ID NO: 56566 - DNA, 616 bp, Homo sapiens
  misc_feature 580, 591: n = A,T,C or G
cgggccccccctcggaagtcttctagaattaattaacgcgggacccatctgctaaatcatttgtcttttattttctttcaaaggctaaactgtatcgaagtctaaccctgtatttcctcctagtaaacacaatagatgttaaaagggaattcttttcccaaaataaccttttattattacaaaagccaaacataatcatttgagatataaaatcctggcaaacataatcgtggttaaaatttaatctgggccctttgggatctgtcccttcaaaggcaggtgagttgccctttaattcgtattgccacttcattgactcaatcactgttatttcagaaaaaaataaaaggaagtagcagaattcaagttacgcaaaacaaaacttgctgtctaacaagcactctttgaaagcaaagatgttttagtgttcagcttttaaattgagctatgtgattaaaaccaaccatgaccttaacggattttacccaaactcgtctaacttcagtatgttttgtcagagattaatcagttacttgttcaaacttaaattgagatagtgtaaatatcaaggtttcctagnataggacaganaagaaaaaaataaaacaatctcata

SEQ ID NO: 56567 - DNA, 311 bp, Homo sapiens
cgggccccccctcgggagtcttctagaattaattaacgcggggagaacagcgatgttgtgcgcccatttctcagatcaaggaccggcccatcttactacctccaagagtgcttttctctctaataagaaaacatctactttgaaacatctactgggcgagaccaggagtgatggctcagcctgtaattctggaatttcgggaggccgaggcaggaagattccttgagcacaggagttccagaccagcctgggcaatgtagcaagacgctgtctctatttatacaataaaatttttttaaaaaaaaaaaaaa

SEQ ID NO: 56568 - DNA, 174 bp, Homo sapiens
  misc_feature 49: n = A,T,C or G
cgggccccccctcgaaagtcttctagaattaattaacgcgggggtaatngttggaaaaactgttgggttgctatgcccatggccggacccgggtaacaagatcatttgtatcccaaatctcaagatcatataacaaacaaaataaaagttgaaattacttaaaaaaaaggctgg

SEQ ID NO: 56569 - DNA, 616 bp, Homo sapiens
cgggccccccctcggaagtcttctagaattaattaacgcgggacagaaataaaaaactaattaaatgttgaaatatttctttactagagcccatttgccatatttcatccacctagtaaataaaagagtaggacccccaggcctaagcatcaacaaatgctattaagtcagaactatcagcagtaatagtaggtagtttcataagtcagttgacttatttaatgaatgcttcctccacaagttatcagtcttcaaaaagctatatatttttctagtgaaatattttagatcaaaatgttggtgttctcacagccatttaagctagcaaccattgagtatcattgaattcatagcaataaacattgattaagtgtctaatatatgttaaatattaggcatatgaattttagaagaggaacatacaagcaaagaatgccaaacggaaatggaaataaagcgttctctagaaaagaggatgccagtcacaaatcccccagttgtttgtttatggttgctggaaaataaaaaaacaatatacacagaggaagtagtacaaactggagtcagacctgtacagccacacttaacattctatgaccttggcaagtcacttaat

SEQ ID NO: 56570 - DNA, 524 bp, Homo sapiens
cccccctcggggtacttctagaattaattaacgcgggccctgcccaccacctgttcctccccgtattaccacagctgatgctctctggaaagcaccatctcctgacaggaggccaaccagaacaaaaatagtgcattaaaccagcaaaactaagaaccctcagagtccatttcacccccttgccacctccactggagcaggtgctggtatccatgactgacagacccatagatggttcacatcacaggactctgttcagacaatgcctagtaccagcctggagcctggtagacttgctaggtggctagatccagaagagagataataataaccacagctcagctctcaggaagccacatccataggaaaagacagagattactatattaaggggacaccccatggaacaaaataatcagaatagcagccttcagccttagaccttccctccaacagagcctacccaaatgagaaagaaccagaaaaccaactctgataatatgacaaagcaaggttcttcagta

SEQ ID NO: 56571 - DNA, 280 bp, Homo sapiens
ccgggccccccctcgaggtacttctagaattaattaacgcgggcttatgacccgcacttactgggaattcctcgttcatggggagtaattgcaatccccggtaccggataacgaatggggttcagcgggttacccgagcctgacggcgtaaggtaggcacacactgagccactcagtgtgacgcgcgtgcaatcaagaacgtgtaagggcatcacatacctgttattgatcaatactgaggtggctgaacacatcttgtgactgtaaacaagtaggggga

SEQ ID NO: 56572 - DNA, 412 bp, Homo sapiens
cgggccccccctcggaagtcttctagaattaattaacgcgggcagaacagtcattttcagtattagattcctgtactattgtgttttgagtgtgttttggaaccttcatagaacacactttcttttggaatgtatttgattgataagaaagtttaaacattgttttcacctcaatgtagaaatacagtggttttgttttttttttcttttagtgctgacaaaataaaatactcatttttgcataaaaaaaaaaaaaaaaaaaaaaaaaaaaaaaaaaaaaaaaaaaaaaaaaaaaaaaaaaaaaaaaaaaaaaaaaaaaaaaaaaaaaaaaaaattttaaaaaaaaaaaaaaaggggccccccccggggggggcccccaattccccctttgggggggtttttaacccccccc

SEQ ID NO: 56573 - DNA, 573 bp, Homo sapiens
ccgggccccccctcgaaagtcttctagaattaattaacgcgggcatagcagtcttcagaacaagaaaatatatcaaggatacagagggaaatgcattatgataaagtggtcagttttccaagaagtgataataattttaaaggtgtatgcgcctagcaacagaccatcaaaatacatgaggccaaacctgatagaactgtaataaaaatagacaaatccactgttatacatggagttgtaaacacctgttccagcaattaataggtcaagtcgacagaaaaccagtaaagatatagttgatctgatcagtaccatcaatcaatttgatttaattgaaatttatagaataattcattcaatattggtaggatgcacagccctcttgaggcctcataaaacattcattagtatagacaacattctagatgagaaaacatatcctaccaatttttttaaaagaattatataaattctcagcaatggaatttaacaaagacttgtgtaacagaaataattgagaaatcttcagatttaaagattaaatgacatacttctaaataacacccaggttaa

SEQ ID NO: 56574 - DNA, 540 bp, Homo sapiens
  misc_feature 17: n = A,T,C or G
ccgggccccccctcggnagtcttctagaattaattaacgcgggcagtaatctaatatggccacagtagtcttgatgaccaaagtcctttttttccatctttagaaaactacatgggaacaaacagatcgaacagttttgaagctactgtgtgtgtgaatgaacactcttgctttattccagaatgctgtacatctattttggattgtatattgtgtttgtgtatttacgctttgattcatagtaacttcttatggaattgatttgcattgaacacaaactgtaaataaaaagaaatggctgaaagaaaaaaaaaaaaaaaaaaaaaaaaaaaaaaaaaaaaaaaaaaaaaaaaaaaaaaaaaaaaaaaaaaaaaaaaaaagggaaaaaaaaaaaaaaagggggccccccccgggggggacctccaattccccctatagggggccgattaaccccccctcattgcccgtgttttaacaacgtggggacgggaaaacccttggggttcccaaattaaatcgcttggaagaaaatcccctttt

SEQ ID NO: 56575 - DNA, 607 bp, Homo sapiens
ggccccccctcgaaagtcttctagaattaattaacgcggggtggtgaaaattgctaagaaatttttgaaagggtaatgtaaacctagattaactgtttttgaaaggtagtacagaactgaatgcacaactagatatcaatggtatgtactcacccagaaaaaagacttcagtacatacatgtgagggcttaaaacatagttataaagacgggatcacaatgggaaaaggattattcaataagtagggcaggcattctctatgcctgctagggaagtgtgacttgttatactctttatgtacagcaattggcagtctgtgaaacttttaaattcatatacataaccttttgccctgcaattccacttctagaaatttatcctaccaaacaaagcacatagatgtgcaaaagtatgtatttacaagtatattctttgcaacttggtaatgtcaaagaattggaagcaacctaaatatctgccataggtaggataaccatatgctttggctttttgaacactaccagtttatacctgctgttcttggataattattaatagtgctttcattctcaatgtctcactttagataataaattacagaggattg

SEQ ID NO: 56576 - DNA, 197 bp, Homo sapiens
cggggccccccctcgaaaatacttctagaattaattaacgcggggctctgtgtgtgcatgcaaactaaccgtgtcaacggggtgagatgttgcatcttataaaattagaaataaaaagatccattcaaaaaaaaaaaaaaaaaaaaaaaaaaaaaaaaaaaaaaaaaaaaaaaaaaaaaattaaaaaaaaaaaaaaa

SEQ ID NO: 56577 - DNA, 326 bp, Homo sapiens
cccccctcgagagtcttctagaattaattaacgcggggtgtgtcccaggcctaattccatctttccaccatgacagagatgcccttgtgaggctggcctccttggcgcctgtccccacggcccccgcagcgtgagccacgatgctccccataccccacccattcccgatacaccttacttactgtgtgttggcccagccagagtgaggaaggagtttggccatctcccttctcacgggaattttcagggtaaactggccatccgaaaatagcaacaacccagactggctcctcactcccttttccatcactaaaaaaaaaaaaaaa

SEQ ID NO: 56578 - DNA, 586 bp, Homo sapiens
  misc_feature 17, 28, 44: n = A,T,C or G
cgggcccccccctcggnagtcttctagnattaattaacacgggnggatagatcatatgttattccacaaatcacatctcagtatatttaaaataatacatatcttgcatagtatcttctccaaacaaactgggatgggtttagaaatcaacagtaggaaaaaactgaaagattcataatttttaaaacattaaataatatactcttaaacaagtgaatcaaagaagaaatcatgaggtaactatgaaatacttagaaacaaaagaaaatgaaaacataacatgccaaagcataacatacaaaaattgtgggacacagcaaaaatagtgttaaatcaatatttataactttaagtgcttacattaaaaagcaaaaatgatctcaaatgaacaatctaactttaaatgtaagacactagaaaataaatgaaactaaacccaaagctatcagaaggaaaataatagtaggtatcagaacagagatttttaaaaaaatatagaatataaaataatagagaaaaccaatgacactgaaagttggtgctttgtgaaaaccaacaaaattgatgtcttaatagacatataatt

SEQ ID NO: 56579 - DNA, 598 bp, Homo sapiens
  misc_feature 550, 572: n = A,T,C or G
ccgggccccccctcgaaagtcttctagaattaattaaccgggaccaaaccaatcaatcaaccaaacaaagaaaaaattccacaatgaaagaatgtattttgtctttttgcattttggtgtataagccatcaatattcagcaaaattatttctttcttttttaaaaaaatgtgaaggaaagtagcaatttatacaaggttgttggcccagggcgttaaatttaccgattttataaatgagaaaaacacacagaaaaagctacctcaggtgttttttgcctcagcaccttgctcttgtgtttctcttagagattttgtaaaactgatagttggagcatttattttcttaataaaaatgagttggaaaaaaaataagatatcaacaaccagcctggagaaggtgagagtccaattgtgcaacaactgttctgaattgtcttctgctagccaagaacctatatggccttcttttagacaaaccttgaaaacatttattaaaaaagaaaagatgacaaagaaaaagagagagagaatattggagatgccgtgaantttatagggtatgtgccattanggcttcttgcactaaaggatgaacat

SEQ ID NO: 56580 - DNA, 577 bp, Homo sapiens
cccccctcgaaagtcttctagaattaattaacgcgggggcagctgatacaaattgcagactgtgtaaaaagagagcttaatgataatattgtggtgccacaaataaaatggatttattagaatttcatatgaaaaaaaaaaaaaaaaaaaaaaaaaaaaaaaaaaaaaaaaaaaaaaaaaaaaaaaaaaaaaaaaaaaaaaaaaaaaaaaaaaaaaaaaaaaataaaaaataaaaaaaaaaaaaaaggggggcccccccggggggggcccccaaatccccctaaaaggggggttaaaacccccccccctggggcgggttttaaaaaagggggggggggaaaaacccggggggcccccaaataaaacccctgggaaaaaaacccctttttcccctggggggaaaaaaaaaaaaggccccccccatgcccccttccaaaaaatggccccccccaaaggggaaaggaaaatttgaacccttaaatttttttaaaaaacccgggaaaaattttggaaaaaccccttttttttaaaacaaaaggcccaaaatgggaaaacccctttaaaaaaaaaaaaaaaa

SEQ ID NO: 56581 - DNA, 623 bp, Homo sapiens
ccgggccccccctcggaagtcttctagaattaattaacgcggggcagggaattagaatttctctctctcttttaatagttttattttgtctgtcctgtttgttcatttggatgttttaatttttaaaaaaaaaaaaactttgctgatatttataattttgtatcataagaatgttttcctctacagtatttgtcatgccagtttataacaaaaaaaaatgcagggattttatttctattggaaacattacagctatgttttacttttggacagaatttttatttgtatagagtgcttactaatgttaaatagttcagagtatataacatttacattaaggactcatggtaggttttagggtaaggagtttaaaggaaataaatattcaaactgggtctcattgccaattttggtggaaatgagtttgtgtcatttcaattacaaagataaaagtatgccatataatttatttatatgaagatttatttttgtagtgtacatagtagtcatcaagtcttttgacagaagtatatttttaaagaatttatatgtgatgaatccataatgtctggagctttgctgagacatgagtgggcacagttttcattgtaaattacagcaaa

SEQ ID NO: 56582 - DNA, 268 bp, Homo sapiens
cgggtccccccctcgaaagtcttctagaattaattaacgcgaggaatgaaaactgtgtaaatagagcatcaacaagtacaaaattcttgtcttaattagtgggggtatataaaaattccttgtaatggtcaaatattttttaaaattgacattaataaagcatattttaaaagattctaaataaaagggtagcattattcttgaaaaaaaaaaaaaaaaaaaaaaacaaaaataaaaaaaaaaaaaaaaaaaggaaaaaaaaaaaaaa

SEQ ID NO: 56583 - DNA, 450 bp, Homo sapiens
gactgggtaccgggccccccctcggaatacttctatattaataacgcgggtgatgcctgttgggggccctctcagccctcctcaatgacctgcggcctagccatgtgatttcacttccactccataacgctcctgatactaagcctactaaccaacacactaaccatataccaatgatggctcgatgtaacacgagaaagcacataccaaagccaccacacaccatttgtaacacaaaaggccatgaattctggataaccgtattgatcagctctgaagttatgtggttaaacggattttcctaatccactgaccattgaaacctggcccatacccaggcagtcatatggaacggctctgcctagggcaactactaacatgcatcgtgagaatgccaagtatacctcacgtactgagtactttgaacatatatttcaccttccataccta

SEQ ID NO: 56584 - DNA, 332 bp, Homo sapiens
cccccctcggaagtcttctagaattaattaacgcggggagcgacggcgcctcgccaccgctcccctaaccggggagggcgagccggacccggggaccgcacgagggctggctcccaagggccagaggcgaggtgattgcccacagtgagtatcaaaagtccaaaagaatttccatctttctgagcatgcaagatgaaattgagacagaagagatcatcaaggacattttccaacgaggcaaaatctgcttcatccctcggtaccggttccagagcaatcacatggatatggtgagaatagaatcaccagaggaaatttctttacttcccaaa

SEQ ID NO: 56585 - DNA, 518 bp, Homo sapiens
  misc_feature 15: n = A,T,C or G
cgggccccccctcgngggtacttctagaattaattaacgcggggccataatccacactggaacataaccccatttgcctgagaatcagccccctatcccccacagtggctgtggcaaaaagagtctgagctcagacctgcctaatcctgccccaacctgatggtatttccctacccatcccagtgcccagtcacaaaagacaaactcttgggagctttatggccctacttatcacatgagaaacctgaacacttatcctgaccaacttagggcaagcttatatcccccttctactatcacagctggtgctctcctgaacataccacctcctggctggaggccaaccaactcaagatatgacagcaactcatgacaaaataacactgctccaaggaaggaaaaaacagctaactccactatctgcaacatcctggctaaacagaggtcctgtccatgtggcaacatcactgctatcataaccagcatttgagaaagccagcacactaaacatctacaac

SEQ ID NO: 56586 - DNA, 609 bp, Homo sapiens
cgggccccccctcggaagtcttctagaattaattaacgcggggggaacatacaagcaaagaatgccaaacggaaatggaaataaagcgttctctagaaaagaggatgccagtcacaaatcccccagttgtttgtttatggttgctggaaaataaaaaaacaatatacacagaggaagtagtacaaactggagtcagacctgtacagccacacttaacattctatgaccttggcaagtcacttaatctgagcctcacatttttcatctataaagtgaggataataatgctacttacctcactgggttgtgaagatgaactgagatattatccaggctgaagaacagaaaggaaaacaatgaataaaattgaacaagagtatagaacctgtgtgacaccattaagcattcctacatatttctaatgggagtacaggaaaaaaggaaaagaaatgaaggagcagaaaaatattctaagaaataatggctataaatacccccgatttgatgagagacattaacctatacatcccagaagaaaaagaaattacagacagatgcatcataagaaaaatgctaaaacccaaaaacgaaaagaaaatcttaacagcc

SEQ ID NO: 56587 - DNA, 587 bp, Homo sapiens
cgggccccccctcggaagtcttctagaattaattaacgcgggggatatgctggagaagcaagcaatactcaagtctcagtgacctagaacaactaagatttatttcttgctcacgcaacatgtccagccagaggggtgagggctgtgcttcacacagttaccgtgcaggacctgggataacaaagatgttcccattttatgatcgtcacaaggctccaggatttgttgcaacagagaagagaagatagagaagcacgcagcagcaattaaatgatgctgcttggaagtgacagacttctcacattatgtcgaccaaatcagatcacagtcacaccaacttcaagaagcacaggggaagataatagtcccacattcctggaaagagagaaagtcttgaaatattaataaatattagaaatgtctactctatatagcaaacacaacacaagggacaggatggccacttcagatcttgaaggatgttttagacagtgaccaaaaagagaattagatcgacctgtgtatgtctgattaaaaggaaagatttcagaccttcagaatggcagtgtgagggttttggtagaccc

SEQ ID NO: 56588 - DNA, 580 bp, Homo sapiens
ccgggccccccctcgaaagtcttctagaattaattaacgcgggggaagagaaggactggtcttgctgtctcaagggtagcaaagtccgaagaagtgaaagaggtggaacgggaggcaggagtggcaggcacacttgtgtaactttgagaaagtgcatattaatttctctctaacactttgcttttcacttctttaaaaatgtttctatacagtaccaatccttcttccaccatttgctttagtttcagtgcccatatcatagcagtgtccattattataaaagaagtcaaaagcagtctcaaataatcagaacccttctgccaggttgtctaatttgtgttctagcactgcttcttctgtcttcttgctcattgtctggcacgggtgcagaagcactcatctccattaagttacctcctattaattcctctagtgtagtgtctgttaactcttaaatttctccaagatccaaatcttgaaaccctcgccacaccataccatttttgccatatccagaatctctttcatgactttcttgattgattctgtcataaatcctgtgaagtcatgcacaacatct

SEQ ID NO: 56589 - DNA, 569 bp, Homo sapiens
  misc_feature 27: n = A,T,C or G
cgggccccccctcggaagtcttctagnattaattaacgcgggggggattcgtggtgttgctggagacccgtatggtgtctgcagtcagcgaccctccaacttcaactactggatcaaccatgtgtgagtgcatctccatccatgtgggccaggccggagtgcagatgggcaatgcctgctgggagctgtactgcctggagcacgacatccagcccagtggcaccatgcccagccacaaggccctggggagcagtgataactccttcaacaccttcttcagggagacccagcctggcaggcatgtgtcctgggctgtctgtggacctggagcctgctgtcatagcacaatgaagtcgctgtagagggaagggaccactgaaggtgccacctgctctccccgtctcaagcccaggcaggacctggccttagaagtgggtctctggtcgggaggctgaggcaggagaatcgcttgaacccgggagacagaggctgtggtgagccaagatcgcgtgattgcactccagcctgggcaacaagagtgaaactccgtcccaaaaaaaaaaaaaaaa

SEQ ID NO: 56590 - DNA, 423 bp, Homo sapiens
  misc_feature 28, 143, 144, 158, 159: n = A,T,C or G
cgggcccccccctcggaagtcttctagnattaattaacgcgggtgctggaataactggatttccacatgcaaaagaatgaagttgcactcctatccaatacatataaaattaactcgaaattaaaagctaaatgtaaggggcnntaaaaccgtaatannctctcaggaaaaaaacaacaggaacataccttcacaaccttgaatttaaattcttatatacgacaacaaaagcacatgcaacagaagaaaaaatacagaaatcagatttaatcaaaactaaaaacttttcagccaggtgcagtggttcacacctgtaatcccagcactttgggaggccaaggtgggcagatcactggaagtcaggagttcgagaccagccctgccaacatggcgaaacccccgtctctactaaaaatacaaaaa

SEQ ID NO: 56591 - DNA, 612 bp, Homo sapiens
cgggccccccctcggaagtcttctagaattaattaacgcgggtagcaaaatgttttaaaaagcaatcttatattagaaaacaaaaatgttgtcacttgaaataccaaaacaacatttctgagcgttgttgagggactggcaaagcaatcagctactataacaaatcagtagaaataaccctcccacaccagatatgcatgcagaaggaatggagtattatagagacttgatacaatggacatatgcacatggaggtacaaaacacacagtctaaatacaaatgaattccatcagatttactatacggaacatcagtagtgacagattgcacttcttacttaataacagcaaacttaatttctgaggggaaaaaaatggcgaagtcttatcccaaacaaatagcaagagaggtatcatcaaagagctaaaattttctttggcatggtaaagggggaaattgagtttaccaacttatttacatgacatttctctatattggtgagtaatgcaatgccattttgttacataaagtagtttgatgttttttaatatgccttcatataaatattttattcaatatgttgtatttgtgaattaacaaatgatattaaa

SEQ ID NO: 56592 - DNA, 565 bp, Homo sapiens
ttctagaattaattaacgcgggcaacctgttcaacccaccacagcctgtgcctgtgtgtacccttgagagagctgaggataggtctatactgcccagtgtcatccctgccagttgccatgtacattggggcctggtgatcaatccactccacctgctgccattagcatctgcacatgcctctgctggtctgagaagagacctgcccagtctgccggagtttgcacatgttgtccaggcatctggggattgaccagccctgcctgctgtagcctgcatctatgtgcactattgtggggcctgagggcaggcccgccctggctgacacatcccctatcagtgaccacatgcaatatccagggtcctggggatcaatccaccccacccactgagcaggtcatgcacactgctggggagcgggggtgggagaggaagatcagcaggcttgacccacaactaccaccactggggcccaaagactgccccacctggcatccccatccccagcaaagcctcgccacagcctccccaaacaaccacagccaatccactgaggaactcacagat

SEQ ID NO: 56593 - DNA, 285 bp, Homo sapiens
gaattaatgccgcgggcatcctttaatcaatgcttgtttttggcttgggataaagaactttgacaccagtttttttctcgggagctgtcaaagggccccttatttttgacatgaaagtgaaaatttttttgggaaaaaaaaaattgacctattttccctatcagggaaggcttttttttcgggtgcctttggaaagtatagggagccatatcattcttctgtaaaaaaggtaagttgggttggactttccactttgccctttctgctctggaaaaaaaaaaaaaa

SEQ ID NO: 56594 - DNA, 429 bp, Homo sapiens
aattaattaacgcggggcgtacgtaaagatggcggcttttgtaggggacaccgtgctgaggcgtgcttcctatgctatctctcttccgaggttctaacaaagttcaggttcccctccaaactttttgcaccaaatctccctgtgaggaaaattttttgccctcagttcccttttttctttatagggatgacccctgaaaatgtggggggtcaaaaaaatcccgggagcgatttggttctcgccccgtctgggctgactaccgccccacccacagggggggtgtccccccacagcggactcgaaaaacttgttttcgtcggaataaagtggtgggaaatccctgccccatctgtcgagatcacaatttgcatgttaactttagggagtctgtgtaaaccaccacaagcggttgacccaggccttccaaaa

SEQ ID NO: 56595 - DNA, 481 bp, Homo sapiens
ctccaccgcggtggcggccgcttttttttttttttttttccaaaaacggattccccctggtgggaaggccaggggggtaatttgggttaattgaaacctttgcctttgggttaaaaggaattttgggccctaattcccctaaaaaccgggaataaaagggggccacaaccccccccggtaaattttggttttttaaaaaaaaagggggtttttcattttggcccaggcgggtttaaattccctaacctaaaggaacccccccccctctccctccaaaagggcggggggaataacaggcgtaacccattaaactgggccccacccaaaatttgtttttttttttgtaacccctaagggttaactaagggggggagggaaataaaacactgggagttccccccctgttccaattgccctcctttggtggcccctcccccggggtcaaacgtttttttttttttggcctgcccctttcttttgc

SEQ ID NO: 56596 - DNA, 357 bp, Homo sapiens
  misc_feature 28: n = A,T,C or G
cgggcccccccctcggggtacttctagnattaattaacgcgggattcttgtaaaaaaaaaaaaaaaaaaaaaaaaaaaaaaaaaaaaaaaaaaaaaaaaaaaaaaaaaaaaaaaaaaaaaaaaaaaaaaggggcgcgaccccgaggggggcctcccattggaccttttttcgacttgttttttgcctgcactattctgcccgcccccccccggggggggccttgcaaccccccgggggggggcctttttcccccccccccagggggcccttttttaacccggtggggggggaaacccctggcccctccccaccttttttccgggggggagggcattttgctggggggggggtttttt

SEQ ID NO: 56597 - DNA, 430 bp, Homo sapiens
cgggcccccccctcgaaagtcttctagaattaattaacgcgggaggaactgtggcacacagagatgttcattttaaaaacggattcatgaaacactcttgtacttatgtttataagagagcactgggtagccaagtgatcttcccattcacagagttagtaaacctctgtactacaaaaaaaaaaaaaaaaaaaaaaaaaaaaaaaaaaaaaaaaaaaaaaaaaaaaaaaaaaaaaaaaaaaaaaagaaaacggggaggccccccaaaaaagaccccaaaaaaaaaacgaggggccccccccgggggggacccccaattcccccaaaaggggggagaaaaaccccccccaacgggcccattttaaaaaacattcggcagggaaaaaccccgggttaacccaaaaaaaaggcttggaaaaaaaaccccttt

SEQ ID NO: 56598 - DNA, 530 bp, Homo sapiens
attaattaacgcgggggctgggttctaaggaggcacccctctggggaacgcctccaccatggcctgggctttgttattcctcaccctcctaactcagggcacagggtcctgggcccagtctgccttgactaaccctgcctccgtgtctgggtctcctgaacagtcaatcaccatctcctgcactgaacccagcagggacgggggtctttataactatgtctcctggacccaacaacacccaggcaaaccccccaaacttttcttttataatgtcagggatcggccctaaggggtttctaatcgtttttttggctccaagtttgccaacacggcctccctgaccatttttgggctccaggctgaggacaaggctgattattactgcttgtcatatacaaccacccccatttatgttttcggatctggaaccagggtcaccgtcttaggtcaccccaaggccaaccccactgtcactctgtccccgccctcctttgaggagctccaacccaacagggccacactagtgtgtc

SEQ ID NO: 56599 - DNA, 353 bp, Homo sapiens
attaattaccgcgggcggggttaactttgtggtggtattgtcgtggggaatttttccgttgatacattcagcaaatttggaccactttgaccatggagttttgtgtccaaatccaatctgattttacctgaaaaaggccttgacccctgcttggaattgacctaaaaaacccactggacccttgggagctttttgccctctgggggggcccaaaaatatctgacctccttgggttaatttataactgatataaaactacattttctttataatataaattgcccctgtgagtctaaaacctttaagtgtgttaaaataaaaatattcaagctaaatgttactgctctctccca

SEQ ID NO: 56600 - DNA, 443 bp, Homo sapiens
tccaccgcggtggcggccgcttttttttttttttttaaaagaaaaataaaaagggtttttttgccggggaaccacccaaatgcctgttttcttcccaaagaaaaaaacctacccggctttttgccctggggaaaagggggaagggcataaaccctccttttttcccttaacccgttcaaaagggtttgggaaagaaaaaggaaatttttttttcaaaaccccttaacccttaaccactttattttcccttcccaaaaattcaccgttcttaaaaacccccttgggaaaacctttaaaaattgggaaaaaaaccaatccctgcggggcccccccggggggttccccttttaaaaccccccctttccggacccccttttttttatttaccccccccaccaggggccctttgggggaactttttttggacccaccttcgttttttg

SEQ ID NO: 56601 - DNA, 455 bp, Homo sapiens
  misc_feature 26: n = A,T,C or G
gggccccccctcggggtacttctagnattaattaacgcgggtacccagtctcgggcagttctttatagcagtgtgagaactaactaatacacatttattacctataattacctactatgatctggtattgttttaggaactgagtataaagaacgaagctggaggccaggcgcagtggttcacacctgtaatcccagcactttgggaggccgaggtgggcggatcccgaggtcgggagaccaagaccatcctggctacagtgaaaccccgtctctactaaaaatataaaaaaaattaactgggtgtggttgtgggtgcctgtagtcccagctactcaggaggctgaggcaggagaatggtgtgagcccaggaggcagagcctgcagtgagccgagatcacaccactgcactccagcctgggtgacacagggagactctgtctcaaaaaaaaaaaa

SEQ ID NO: 56602 - DNA, 613 bp, Homo sapiens
  misc_feature 27, 522: n = A,T,C or G
cgggccccccctcgaaagtcttctagnattaattaacgcgggaccatttatcataatgtagtaatgaagcaaaatggtcaaaactgggtgtgtgtgaacagagatacacccatattcgtgtatatacacatccacctacatgttttggtctgtggtttaagagactatttcaaggttccatttttataagctaaaacattctaagttaagatggaagaaagccctaaacacagtagattctgagtttttatgtgtattttaaccagagtttctgatagtactgtatctggctacctatatttccagatctaaagcaagaactactctaagtactgcatttggaatcctcctccattaggaatggccaggacaagtggagctagccattttcattacacggccatcccaatggacactggatccctggtccaactgtctaaaaggccagttgttcctttctgtggatgtggatgtctggccttcacctgaggtagagcggggactataaacacacatcaactntctttctggttgctttcttttccttcttttcaaactcttaaactcaggcctttatgctgtgagtgactagtccaagaagcacacattttgt

SEQ ID NO: 56603 - DNA, 427 bp, Homo sapiens
cgggggaaaaagctgggcacaattctttgcttatgatcataaaaaactgaatatgtcctatgtggacctggttatttagatatataataataattatttttaaagtaaaacatttttgttaactggaaaaatcacaggatatatccatcatttttttcaggacaaatagtttttactggggggcaaatgggttaaaattaccctatgttatttgcatttaggtttaaaagcaaaaaatctgtaaaaaaatctatgcaatatatagttggcccaaattacctttttttggggaaataaagttctaaaatatctaaagcattttactcttaaatggaaaagccctccaaaaaaaaaactatgggaaaaccatggtgggggggggaaaaaaaaaaccttccctcattttttgggaggaattaccttaaaa

SEQ ID NO: 56604 - DNA, 412 bp, Homo sapiens
tccaccgcggtggcggccgcttttttttttttttttggcaaaaaaaattcatttttttaattaactttttgaacttggggctgggccctaaaacatttaaaaaaaaattttttgcccctaaaaaagaaaacccccctggtccctgtcaaaaacccttttaccacactggaaccccccttggccccggcaaacatgtttttttgttgggaacattctaaaaaaaccttagggtttaaaagcaaaaccccctaaaatttggcggggccccaccccaaaggcaaatttggggccttccccacccttttgggtaaaagggaaaacatttttttacccgggggttgggaacaccctatttttgtaaaaggctgttttgaagaaaaccctccttgggtttgaaaaacccggaaccttt

SEQ ID NO: 56605 - DNA, 586 bp, Homo sapiens
  misc_feature 19, 32, 524: n = A,T,C or G
taccgggcccccccctcgngaatacttctagnattaattaacgcggggcaacagaaggaggtaactcctcaaaagtcttttccaggaaggttagtcaagacctatgctgatctgaccatgttaagagttatttattattactgttattagtttattactacaatttcctatcttggataatggtacagttggccctgtatatccactgtttctgcatccaccaattctaccaactacaaattgaatattcaatctgaaatggaatcatacagtattcacccttttgtgtgcctagtttctttcactcaaaagcataatgcttttgagattcatccatgtggttgcgtgtattactagctcgtttctttttattgttgagtagtattctattgtgtgaatgtatcagaattcttgacacgttcaccatttgatggctgtttggattgtttaaagttttagctattttgaataagcagcaataaatatttgctcagaatattcaatcaattgaatattgggatgtntgatctggaatgcagatcctgcacatatgaaaggctgcctgtaaaggacttgagcatgctta

SEQ ID NO: 56606 - DNA, 303 bp, Homo sapiens
gcgggcttcgccttgaggttgctgatcccaccccctttcttattcaagctgaagtgacaataaaaacaattttttttggtccccgaaatgtgtgcacaaaattactccttttaataaacccccagagggagaggggtgaacgtatttagcttcatgagcgtcaaaccctttaaaagctgcaccccggacctgcagcaaaagttccgcagtgagaccttcattgaggaggagctgggggaactcataaacaattttggggaggatacaaaaaagggagtgccccaaagggagggctggcccacc

SEQ ID NO: 56607 - DNA, 213 bp, Homo sapiens
ccgggccccccctcgaaagtcttctagaattaattaacgcgggcacgctggggctgttgcccctgcccccttggtcctgcccctagatacagcagtttatacccacacacctgtctacagtgtcattcaataaagtgcacgtgcttgtgaaaaaaaaaaaaaaaaaaaaaaaaaaaaaaaaaaaaaaaaaaaaaaaaaagaaaaaaaaaaaaa

SEQ ID NO: 56608 - DNA, 432 bp, Homo sapiens
gcgggggatgaaagtatcttcgttaatggaaacaagacctagaggattagtgtattgttcaaagctataaaatcaacccattagatgttttaaaaagggatgtacctatcaaacttttggaagaagaaatggacaagggaaaggggcgatagtgtaagtaaaacccttattttttggaggggggatttattaaagatgttgaaaagtcagtaagtcaaaaattttttgctcaaactttttatttaaagttaaaaggttcccacacaatctaaaataaattttgttaaaagctttccctctagggaatgggatttaaattaaaaaggggtgggatgggaaactgtgttttccatttaaagcccttctgcactattaaatttttaaccttgggcatgtattacttgaaaaaaatttttaataaccccaaataaa

SEQ ID NO: 56609 - DNA, 390 bp, Homo sapiens
tccaccgcggtggcggccgcttttttttttttttttgggatatttttaaggaagggggggtaaacctaaacccctttttaaatggggggctgttttaagcccaactaggggggtaaaatttttacctctctcaacagggtttttcccaagggcccaaaaacctgtcccttttggaactaacagtaaatttaacagggggattaaaagggttttggggccaaattaaaagtgaaactaaaattttttttggaacaaccatttttccccaggctcggagggtttgccccctttccctatcccgcttaaataaattttaaaattcctctcaaggggggccccggcccccactttttgtcccctttagggagggtaaatgcccccctgggcgaa

SEQ ID NO: 56610 - DNA, 607 bp, Homo sapiens
  misc_feature 25: n = A,T,C or G
gccccccctcggaggtacttctagnattaattaacgcgggcatgcagtatgaatactgtgtattttttaaaaaaatatttagtatcaaggcttcagaaaatgccatttacggcatcccttctgtatgtaacaaaaagacattcataatgttaggaagatgataaaaattcgctcttttaaagtgcagcttattattctcaattgctaaatacgattactctgcttttttttttttttcatttcttttgatgtcatatgtgagtatcttataatttagttcatttgttcagggtaaaatttgaaacaaaaaattttacctgtgcaaaatagttttttaaaaattatacatgtagctcaacttgaggtactgctatataaatattcactcacattatcacggaatttatgtatagtttctctaatatagaagataaaattggtgtcctcataactttaacaaagaaaaccctcagtcctatttattaatgggtagaattaaatatataattttatagctcagtttacccagtattcatctgcaaagccagattgctctcattgctttttatattttaaattgtagcttttagagacctatgatcctcat

SEQ ID NO: 56611 - DNA, 320 bp, Homo sapiens
  misc_feature 295, 296, 297, 298, 300: n = A,T,C or G
caatgaaggacacaaatgtcactggagaagaaagtgttaagaaaaagcaatagaactaattatgaagcccctcctttatgccagtcaatgtgttctaccccttctatctcacatctcacaataaccctgtaaagttcccctattttttagatggggaaactgaggcttagaagttaaattatttgcctaaggccatacagctaagaagcagcagagttagtatgtaaacaccaatcagcacaactactccaaagcccaagttctcctttaaacttacagtggaagagggaagccnnnnanaaaaaaaaaaaaaaaaaaaa

SEQ ID NO: 56612 - DNA, 352 bp, Homo sapiens
tccaccgcggtggcggccgctttttttttttttttttgggagaatttggtttctaacacacacctcctacggttaaagccccaaaaaggtggccgtttttttaaaattatcctccaaatctagttggatggtaaaattccgggggggctttagaaataaaaatttttccacctttaaaaacccctgaatttttttttgggacctacaaaaaatccccaaaatcctgagggctgggacaaactttttatttgtttccccaaagggctttttgtttttaagggagaacgtttttaaattccgggccatatggaaccaatgccccccccccgggttaattaattttaaaagtcct

SEQ ID NO: 56613 - DNA, 325 bp, Homo sapiens
ccccccctcgtacagtcttatagaattaattaacgcgggggggccggaggagggtttttcagggtcgtaggacgccgttggccaccactcctaggaaaaaggactggacaggtggcggccttgagggtccccggcacacacttttataggacttttgcgggagttgctctacttgagcgcgcccaccgccctaccttatcgaaacaccggggcctatcggtcccttgggagggcttcccgcgcacatgggctcaccagagaaaagttgggcaaacccaaacatgagcttcttttccaagctgccacctatctttgcctcgtgcgt

SEQ ID NO: 56614 - DNA, 485 bp, Homo sapiens
gcggtggcggccgcttttttttttttttttaatattttttttttttggttttttttttttttttttttttttttttttttttttttccccccaaaaaaagggggttttttccccccaaaaaaaaaaccccaagggggggaaaggggccccccccccctttttttccccccccggggccctttaaaatttttcccccccccccggggggggcccttttttaaaaaaaacacccccccccccaaaaatcccccccccccccttttaaaacggggggggggggggaaaaacccccccccttaaaaaaaaaccccccccgggtccccccccaaaagaaaaaaaatctttgggggggggaaaaaaaaaaaaaaaacccccccggggtcccccccccccccggggtttttttccccccccaaaaaatggggtaaaaaaaaaaacacccccccccccggaaaacccccgggtgggggggggaaacccccccc

SEQ ID NO: 56615 - DNA, 364 bp, Homo sapiens
acacggggggggtataaggaggcacccctctgggggggtgctccaccatggcctgggctctgttattcctcaccctcctcactaagggcacagggtcctgggcccaatctgccctgactaagtctgcctccgtgtctgggtctcccggaacagtaaatcaccatctcctgcactggatccaacagtaacttggggggggggaactacctctcctggacccaacaatattcaggcagggcccccaaactaattatttttaaagtctttcgtaaaccctccggggtcttttttcttttctttgggtccaagtccggaaacacggcctccctgaccatttttgggctccaaactgaggacaaggctg

SEQ ID NO: 56616 - DNA, 267 bp, Homo sapiens
cgcggggttcatggtggaaggcctttttcttcaccagaagagctgaggaaaaaaattaaaattgttggggggccctgtgtcctgttggtttaaacccacatggagggagtttcattaaatgctacctacttttaaaaaaaaaaaaaaaaaaaaaaaaaaaaaaaaaaaaaaaaaaaaaaaaaaaaaaaaaatttaaaaaaaaaaaaaagcccgcccccccccgggggggacccccattcccccttatagaaatttttttcccccccc

SEQ ID NO: 56617 - DNA, 466 bp, Homo sapiens
tccaccgcggtggcggccgcttttttttttttttccccttccaggaaaaaacctgaaacttttaaattcaaatccaatttttaaattcattaaaaatcctttttaatttgggaacaaatggttttggggttaaattaacccgaaaaaaaaaccggcccaattttttttttaaggttttttccccaattttggccaaatttttttgaaacaaaatttcaaatagcccttccccctttgggcacttgggcaaaaacctaacccagcacttaatcccaacgtaaaaccaccctctttttattggcttaggggcagttttttttttttaaacagggtcttttcctaacctaaaaaagtccctttaccgccccctacactttcctagcggctttttttttttacaaagggaaacccctcccataggggggcccagttaacctttgcccatttaaaccccaactttttttgg

SEQ ID NO: 56618 - DNA, 482 bp, Homo sapiens
ccgggccccccctcggaagtcttctagaattaattaacgcgggaccatggcaccttttgcacataacatgctttagattatatattccgcactcaaggagtaaccaggtcgtccaagcaaaaacaaatgggaaaatgtcttaaaaaatcctgggtggacttttgaaaagcttttttttttttttttttttttgagacggagtcttgctctgttgcccaggctggagtgcagtagcacgatctcggctcactgcaccctccgtctctcgggttcaagcaattgtctgcctcagcctcccgagtagctgggattacaggtgcgcactaccacgccaagctaatttttgtattttttagtagagatggggtttcaccatcttggccaggctggtcttgaattcctgacctcaggtgatccacccaccttggcctcccaaagtgctagtattatgggcgtgaaccaccatgcccagccgaaaagct

SEQ ID NO: 56619 - DNA, 604 bp, Homo sapiens
cgggccccccctcggaagtcttctagaattaattaacgcggggttcctgagctttgttttaaaaagcagttaaatcatttgaaaacagtttatttttttgtcttgctttgaagatgagttgtacaagaccatagctgtatgtggtgttgggctggttatccctcactatgaaggcaagcctctgagtactctactgaatgccctgtggagcttggggctttacaatctggctggtaggaacgggcgctattcctggccctcagaacctgaagctgttccctcaggtgcccttgaatgtttttttcccctggccttggatagtgcatgtactgctcagtgctttgctacatactctgggggactcgtcaggtagctccagagttctctgtgtagctgtatactctttagaatctgcgctgcacactgcagacacctaagtatctacagacttctgtctcccaactcaaattttgcagacctctgccttgcttctctccctccctgccctacagcctggacactccaggcagcgaggcagggcagctgtaggctcactttgtttgttttctgtctcacagggattattgtcatttgttgcctgatg

SEQ ID NO: 56620 - DNA, 562 bp, Homo sapiens
  misc_feature 455, 486, 493, 504: n = A,T,C or G
cccccctcgagagtcttctagaattaattaacgcgggcaagaattaagcttgcaacattggctttgctcagatgcagatggaagtgtgatcacaatcattttgaatccctcttcctcacttttttttctaagaaaataaacattttactgtttttatggatccttgtcttctcccattcatccagctcagtgttttaagatgatcctgggtgcagaagttgagccctcctttgcattgacactgataattagcctatagggctccctacccttccattaagaatctaccaagcattagcaaggctgaaagtggtctaagaggtgaggggacatcctatgactttttaggaaggcctgaaaccaccttgttacctttcattttgttagcaaataaaccatcctatattgtaactctcccccttcaaaatgctacatgagccttgccacttcctttntctcttacttccagcacactagacatagcanaagtgtntgcctactcanaaacataatacttttatgctgatgatggtatttggagatgtgaaagccaaaagcccct

SEQ ID NO: 56621 - DNA, 414 bp, Homo sapiens
  misc_feature 22: n = A,T,C or G
cccccctcggggtacttctagnattaattaacgcgggggagaatcaggttaaattaagtagaagcattttggaaactttgcctagtacttcatgacttttgaaaattataagtgaaaacagagataagtcctattcttcgctcacattatttcccacaggcctttccagatccttatagctaaaaatttcccttttgccattaactgtcattaaaaaaaaaaaaaaagattacagtctttatgtataaaaccgctgccctttataacattttatgtgacttgtttgcttcactagattgtaagcctttggaggtcagaaaaaaatgcatctaaatgtatctgccaccacatctagcacagtgccttacacttatttgctattcaataaatatattcattaaaaaaaaaaaaaaa

SEQ ID NO: 56622 - DNA, 471 bp, Homo sapiens
cggggccccccctcggggtacttctagaattaattaacgccgggatgtaatttatattttttttagatcctccctttcctatagagataaaagtgatttatcttggcaaaaaaaaaaaaaaaaaaaaaaaaaaaaaaaaaaaaaaaaaaaaaaaaaaaaaaaaaaaaaaaaaaaaaaaaaaaaaaaaaaaaaaagaaaaaaaaaaaaaagggggccccccccgggggggacccccaattccccttatagggagtgttttaaccccccctaatgggccgttttttaaaaacgtggggaggggaaaaccccgggggtacccaaattaaatcgcttggaaaaaaatccccttttccccaggggggtaaaaaccaaaaaggccccccccgatcccctttccaaaaattgccccaccctgaagggcaaaggaaaattgaacccttaaatttttggtaaaaatccgcttaaaatttt

SEQ ID NO: 56623 - DNA, 173 bp, Homo sapiens
  misc_feature 6, 25, 38: n = A,T,C or G
actggngtaccgggcccccccctcnaaatacttctagnaattaattaacgcggggaatgagtccactttaaatcctttaacgaggatccattggagggcaagtctggtgccagcagccgcggtaattccagctccaatagcgtatattaaagttgctgcagttaaaagctcgt

SEQ ID NO: 56624 - DNA, 277 bp, Homo sapiens
  misc_feature 24, 26, 37: n = A,T,C or G
ctgggtaccgggcccccccctcgngngtacttctagnattaattaacgccgggaataaagttaataccaaacttgagaaacaaaaaaaaaaaaaaaaaaaaaacaaaaaaaaaagaaaaaaaaaaaaaaaaaaaaaaaaaaaaaaaaaaaacacaaaaaaaaaaaaggaagaaaaccgaaggggggtgtacattccgccccccccccccggggggcccccccgcccccccccccgcctttttttttttgcccccctggcgggccccgggtttccccc

SEQ ID NO: 56625 - DNA, 212 bp, Homo sapiens
ccgggccccccctcggaagtcttctagaattaattaacgcgggggccgccaggggaacaaggtttgaacgagcagcgccgcaggcgcgctcctcggtgccgtgagcgcgccccggggccggccggtctgctcgggagcgcgccccgtggcccagccctgtctccttttagcataggggcttcggcgccagcggccagcgctagtcggtctgg

SEQ ID NO: 56626 - DNA, 248 bp, Homo sapiens
  misc_feature 26, 185: n = A,T,C or G
gggccccccctcggggtacttctagnattaattaacgcggggggcttacacagtatggccggcgacattagctagcgctcgctctactctctctaacgggaaagcagcggaatacaagagactgaactgtatctgcctctatttccaaaagactcacgttcaactttcgctcacacaaagccggngaaaattttattagtcctttttttaaaaaaagttaatataaaattatagcaaaaaaaaaaaaa

SEQ ID NO: 56627 - DNA, 470 bp, Homo sapiens
  misc_feature 17, 28, 48, 51: n = A,T,C or G
cgggcccccccctcggngtacttctagnattaattaacgcgggggggngtnaaaaaaaaaaaaaaaaaaaaaaaaaaaaaaaaaaaaaaaaaaaaaaaaaaaaaaaaaaaaaaaaaaaaaaaaaaaaaacaccaaagagaaaactaaaataagccctctgcccgccccgggtgcccctccactatttcccgggggcctcccccgggggggcccccttttcccctttttttgccctttttttccccccccccccggtcccttttttccccagttggcgtggggaaacccctgcctttccccattttttttcctttcggaccccccccctttttcccccttggttttttttggcgaggcccccccccggattccttttccaaatgttttccctttcgttgggttttgggccttttggcccctttttttttttttcccttcccccctaaatttttttccaacccctctttttt

SEQ ID NO: 56628 - DNA, 368 bp, Homo sapiens
  misc_feature 31: n = A,T,C or G
taccgggcccccccctcggggtacttctagnattaattaacgcgggagctggttgacgttatccaggagaatcgcgttggactcagggaagacctgcacaggatccgcacacagcaagaaggaggccatcagcaaactgggaagaggaccctcaccaggaaccacatctgccagcaccttgatcttgaacttctcagcctccagaacggtaaatcagacaccgcctattcaccagctcatctataaaaccccctgcatttcaccgcagaactggaacctattttaccaggacccctctctgcagcagagagctcttctctttctttcgcctattaaacttccactcttaaccccaaaaaaaaaaaaaa

SEQ ID NO: 56629 - DNA, 573 bp, Homo sapiens
acttctagaattaattaacgcggggaagaaatcatggaagcatgtgcaggcggtttttcctccagtgttggttacccaggacggcaatactactttaatagttcaggcagctctggatatcaggattattatccgcatggcaggccagatcactatgaagaagcacccaggaactatgacacgtacacagcaggactgagtgaagaagaacagctcgagagagcattacaagccagcctctgggaccgaggaaataccagaaatagcccaccaccctacgggtttcatctctcaccagaagaaatgaggagacagcggcttcacagattcgatagccagtgaggtggcatcttgggaagacatgacctattcgtgtaattattgcccatttggctcattccccaagcccctaattcattttaattcattttaaacaaaagcagagtacaccggtattgctccagatcgctcacatcacctgggacagtcccatggcccctatgagtcaactcacagcttgcggggagtgggccttctcctggccttgttcttgctcataaacaggtcacttcc

SEQ ID NO: 56630 - DNA, 236 bp, Homo sapiens
  misc_feature 198: n = A,T,C or G
cgggtccccccctcgaaatacttctagaattaattaacgcggggattggtctcagaggtaacaatgaaatactcataattttgtctgtggaactctggcagaattatgttacacatttggcgaagttgtctcttgtaatttatattttaaatgaaaaagtattttagagcttttaatgaaggggaagagtataaactntctttcatattcactctgtagttacagaccgtctcata

SEQ ID NO: 56631 - DNA, 557 bp, Homo sapiens
cccccctcggaagtcttctagaattaattaacgcggggggttccgagtgctgcgttcggctgtgctgggaagttgcgtagacagtggcctcgagaccctgcctgcctgaggaggcctcggttggatgcgaaggagctgcagcatccagagactatggaagagagtacctggatctagtttattccaaagacaggcaagcagtttgtgcctccactccaggatgactaactacaacgattacacgtaaaaagacaaaacaaggccgggcgcggcggttcacgcttgtaatcccagcactttgggaggccgaggcaggcgtattacgaggtcaggagatcgagaccttcctggctaagacggtgaatccccgtctctactaaaaatacaaaaaattagccggacatggtggcgggcgcctgtagtttcagctactcgggagactgaagcaggagaatggcgtgaacccgagaggcggagcttgcagtgagctgagatcgcgccactgcactccagcctgggcgacagagcgagactccgtctcaaaaaaaaaagaaaaa

SEQ ID NO: 56632 - DNA, 157 bp, Homo sapiens
ccgggccccccctcgaaagtcttctagaattaattaacgcgggatgctttaaatcatctctcgattatttataattcctaatacaatgtaaatgctaagtaaatagttgttagactgtattgtttagggaatagtaagaagacaaaaaaaaaaaaaa

SEQ ID NO: 56633 - DNA, 442 bp, Homo sapiens
  misc_feature 22: n = A,T,C or G
ccccccttcggggtacttctanaattaattaacgcgggctgcccacaaaaaaaaaaaaaaaaaaaaaaaaaaaaaaaaaaaaaaaaaaaaaaaaaaaaaaaaaaaaaaaaaaaaaaaaaaaaaaaaaaaggaaaaaaaaaaaaaaaaaatggggcggttctatggggggcccctcctttttctttttttttttttttttttggggggcgcccccgggggggggttttacttcttcgttttggggaaactcttgccttccccccctttagtctttttgaagaggttccccttttgcccccttgccttcttcccaaaattgtccgtgcggggggcctttcccagtggttgttgtgtttttttggcaatgggaatttgcttgccgtattttttcttttttttcccctctcgattttgggggcggaatcccttttttttcccatta

SEQ ID NO: 56634 - DNA, 601 bp, Homo sapiens
ccccccctcgaggtacttctagaattaattaacgcgggtgctgggattacaagtatgagccactttgcccaccctaaattagtatctttaattttgcctccgggcctgcaaaaattaaaacatctgctacctggccttttacagaaaaagaatgccagccactgaactatataattacttacagaataaaaacaaattaaggttgaaagagaatattgcatgtaatgaataatctgacaagatagatataatacagatatgatgatgtcggggggtgatgaggacagcatacatgaaacaatttatgcaactattctcagcaatcacattggttatggtattattagtattgctattctgatactactgtgtaatatacgagaaaacaagcgagtaattaataatgaggatattctagttcattattccctatccttgagaaccagaatttttaacatggaaaaatatacaccgatgtattataatacagaagtggttaagttttataaaaaagcatgtgtacagatatacacatatacatatatatcacccataactctgtcctagaaacaatgacaactcacagcagcaataatctcta

SEQ ID NO: 56635 - DNA, 578 bp, Homo sapiens
cccccctcgggggtacttctagaattaattaacgcgggcactgaaatacagtactgatgggctgaaaagcaagctacaaattaaatatataaattactacacaaatagtcacaatacaaacaaatgttttaataaaaatagaaacaaagcatactacacgaaggaagaatttcactaaatactagtgcataccaaatgagaaaaggaacaattaaccctaataaaagctggtctttcactacatatgtttgtaacagaactacacagcatgttaacaaactgaaaaaaaaaagacaagacagcaaaaataaactctataggtttaaatcttcaacttcagaccccagaaaagcatctttaaagtcagataagtccaggcatggcggctcatgcctataaccccagcactttgggaggctgaggtgggagaattgcttgaggctaggagtttgagaccagcctgggaaacacagcgagaccccatcgctacaaacaaattttttaaaaattaaaaaattttttaatttgtttaaaattaataaatttacttattaaataaatttatatttacgggcatg

SEQ ID NO: 56636 - DNA, 593 bp, Homo sapiens
cgggggcccccctcgagagtcttctagaattaattaacgcgggtcaaccaaacactaatctatgtaatgctatgaagagattttatagaggcaattaaaatctcaatcagttcagtttaagacacagagattatctaggtgggtctggcccaatcaggtgaactcttaataagcaagaagtcatctccagctagtggaggttagagagattcaaaaaatgagaaggatttgacaccctattgtgggcttaaagatggaggaagtcaagtgatgagaaatgcagcaacctctagaagatgacagccagcaaggaaacagtgacctcaatcctataaccacaaggagatgaattctgccaacaaccagtgagcttggaagtgataagaaccacagctccagctaatgccttggcttcagcctagtgagaccctgagcagagaatctagccaccctaagacagacctctaatctacagaactgtgagataatacatgaatgttgtgataagctgctgtgtatgtgtcattgtgttatgcaacaatggaatacaaatacaagcaggaatacaatacaacaatgggaataaaaatcca

SEQ ID NO: 56637 - DNA, 312 bp, Homo sapiens
ccccctcggaagtcttctagaattaattaacgcggggattgcattgaatataatgaccaatttatggagaaatgacaaatatacagagtcttttgacccatggacatggtagagctccccatttatttagatatttattaatttccttcagcaatgttttgtaatttttactgtgcagatctttcacacttttcctcagatgcatctaaaaatttcatctttttcatgtataaatacttaataacttatgatacttgtaataataaacagtaaatttccagtttttgctgacatataaaaaaaaaaaaaaaa

SEQ ID NO: 56638 - DNA, 291 bp, Homo sapiens
gccccccctcggaagtcttctagaattaattaacgcgggagactgaagtgggaagattgcatgagccctgtagtttgaggttgcagggagctatcatcatgccactatactgggtgacaataaaaccctgtctcttaagaaaaagacaatgcaaacgctaatatacactcaattcaagatacagcaaaaggggaaaaaaacaaaatatcttgacagaccattaaaaatgatgaaaccttaaaaaaaaaaaaaaaaaaaaaaaaaaaaaaaaaaaaaaaaaaaaaaaaaaaa

SEQ ID NO: 56639 - DNA, 307 bp, Homo sapiens
  misc_feature 28: n = A,T,C or G
cggggccccccctcggaatacttctagnattaattaacgcgggtatatttatatattaatatatgtaatgtatatttatatactaatatatttaatgtatatatttatgttttatatattttaatattcagtttattatatatgttacatacaaatatatatcactataaaatactgtatatattttagtatttaacatgtattttatgtatttccctttaaattaattatagagagaaaacacatatttttctgtaattgctctgctcttgctccctttctattgcataggaaaaaaaaaaaaaaa

SEQ ID NO: 56640 - DNA, 531 bp, Homo sapiens
  misc_feature 523, 524: n = A,T,C or G
cccccctcgaaagtcttctagaattaattaacgcggggggggtctcactttgttgtccaggctgacagaactgcatttttaattctatagaaatataattctttataggacttcctggtcaatacagtaatgtaagtttgagctcttgattcttcatcgccataattcccttctgcatatactgcatacggaaacatataattgagcatctgtgttccaggcattgtggctctaacccaagttgtctgagtatatcctagaagtctctgaagtactgtttatcttctttccctttttgttacttcttcacactttccttttggccacctttacagtgagtaaagtaggtggatagagacctttgaaaaagtatatctgtgttcctcaaacaagtcagttttagtgactattacctttggagataaagtccagttccttagagtggcttctgcagccatccatgatctctgaatctcatctcttgcccttcatatgtcaaataaactatagtttttgctgtttnnaaaaaaa

SEQ ID NO: 56641 - DNA, 482 bp, Homo sapiens
  misc_feature 16: n = A,T,C or G
ccgggccccccctcgngggtacttctagaattaattaacgcgggacagtgagggtgtagtagataaattcaaggaaataagagatttgtaagaaactaggaccagcttaacttataatgaatgggcattgtgttaagaaaagaacatttccagtcattcagctgtggttatttaaagcagacttacatgtaaaccggaatcctctctatacaagtttattaaagattatttttattaccataaaaaaaaaaaaaaaaaaaaaaaaaaaaaaaaaaaaaattaaaaaaaaaaaaaaaaaaaaaaaaaaaaaaaaaaaaaaaaccaaaaaaaaaaaaagggggccccccccgggggggacccccatttccccttatagggagtggtttaaccccccctcctgggccgtgtttttaaaacgtggggacgggaaaaacctgggggtacccaaattaattggcttggaagaaaatccccttttcccc

SEQ ID NO: 56642 - DNA, 611 bp, Homo sapiens
  misc_feature 413: n = A,T,C or G
cccccctcgagagtcttctagaattaattaacgcgggctcacagttgtattccagtattcaagatagattcctgatttttcaattaggaaaagtaaaatccaaaatgttagcaaaacaaagtgcaatattaaatgtttgctttatagattatattctatggctgtttgtaatttctctttttttccttttttatttggtgctgaatatgtccttgtaggctctgttttaagaaaacaatatgtgggaaatgatttaatttttcctattgctcttccttgtggaaaataaagtgttttgtttttttctgttttgtataaaaaaaaaaaaaaaaaaaaaaaaaaaaaaaaaaaaaaaaaaaaaaaaaaaaaaaaaaaaaaaaaaaaaaaaaaaaaaaagaaaaaaaaaaaaaaangccgcccccccccgggggggacccccatttccccctttagggagtctttttccccccccccatggcccgttttttaaaaacgtgggaacgggaaaaacccgggctttcccaaattaattcccttggaaaaaattccccttttccccagttggcttaaaaccaaaaaggccccacccattcccctttccaaaaattggc

SEQ ID NO: 56643 - DNA, 544 bp, Homo sapiens
  misc_feature 17, 29: n = A,T,C or G
cgggcccccccctcggnagtacttctagnaattaattaacgcgggatggatggattagatgtcctcaggtcttttccatcttcagtttctatgactgtggaataaatgttcagatagaaacttcaaaaaaaaaaaaaaaaaaaaaaaaaaaaaaaaaaaaaaaaaaaaaaaaaaaaaaaaaaaaaaaaaaaaaaaaaaaaaaaaaaaaaaaaaaaaaaaaaaaaaaaaaaaaaaaaaaaaaaaattaaaaaaaaaaaaaaggcggccccccccccgggggggccccccaacccccccttagggggggtttttacccccccccccgggcccgttttttaaaacggcgggggggggaaacccccgggcgcccccccattaaccccccgggagacacccccccttttccccgggggggaaaaaaaaaaagggcccccccccaacccccctcccaaaagttgccccccccgaggggggaagggaaattggcccccctaattttttggaaaaaacccccgaaaatttttggaaaacccccctttttttt

SEQ ID NO: 56644 - DNA, 583 bp, Homo sapiens
  misc_feature 13, 26, 486: n = A,T,C or G
ggccccccctcgnaggtacttctagnattaattaacgcgggggaaaaaacagacttattaatcaagtgttggaactccaacacacacttgaagatctctctgcaagagtagatgcagttaaggaagaaaatctgaagctaaaatcagaaaaccaagttcttggacaatatatagaaaatctcatgtcagcttctagtgtttttcaaacaactgacacaaaaagcaaaagaaagtaagggattgacacccttctgttttatgcctgctgtatttatagtaaccattttcctttggactgttcaagcaaaaaaggtaactaactgcttcatctccttttgcgcttatttggaaattttagttatagtgtttaactggcatggattaatagagttggagttttatttttaagaaaaattcacaagctaacttccactaatccattatcctttattttattgaaatgtataattaacttaactgaagaanaggttcttcttgggagtatgttgtcataacatttaaagagatttcccttcatttaaactaaattactgttttatgttgatctgcatatttctgtata

SEQ ID NO: 56645 - DNA, 388 bp, Homo sapiens
  misc_feature 19, 21, 23, 35, 238, 241: n = A,T,C or G
ggtaccggggccccccctncngnagtaccttctanaattaattaacgcgggatagaataaattggcttctgagtgttagctcagtgagctaggaaagcaccaatcgatatttgtttcctttagggatactttgttctcaccactgtccctatgtcatcaaatttgggagagattttttaaaataccacaatcatttgaagaaatgtataaataaaatctactttgaggactttaccangtnaaaaaaaaaaaaaaaaaaaaaaaaaaaaaaaaaaaaaaaaaaaaaaaaaaaaaaaaaaaaaaaaaaaaaaaaaaaaaaacaaaaaaaaaaaaaatttaaaaaaaaaaaaaaggggcccccccccgggggggccccccattccccctt

SEQ ID NO: 56646 - DNA, 604 bp, Homo sapiens
  misc_feature 13, 583: n = A,T,C or G
ggccccccctcgnaaatacttctagaattaattaacgcggggggttacaaaatatctcagcaagcatgaaccttctaactgtaggctgccgagacaacagtgtgcccaaagctgtgcaggtggatcagaccttatgccacatacaaacacacagcctgaatggggggcacaagtgatactcctgaggatgtcttaattagcagatgtattcatgcggagtgctgacatcaccaaactaaactatgggccatttctcttgcaagctttccagaatccactcacttattttaaatgtaaatattgtgggcactgtagggatatatttttaactttatttatctgatgtagatgacacttgtctatccagtagttcataggtcaagaaggtcccatggtaggccgggtgcagtggctcatgtctgtaatcccagcactttgggaggccaatgtgggtggatcatctaaggtcaggagttcgagacaagcctggccaacatggtgaaaccctgcctctattaaaaatacaaaaattagccaggcatggtggtgtgtgcctgtaatcccaggctctggggatgctgangcaggagaatcactggaacct

SEQ ID NO: 56647 - DNA, 198 bp, Homo sapiens
  misc_feature 44: n = A,T,C or G
cgggcccccccctcggaatacttctagaattaattaacgcgggnaagtttagaaaattacaagtttcagtaatagctgaacctgttcaaaatgttaataaaggtttcgttgcatggtaaaaaaaaaaaaaaaaaaaaaaaaaaaaaaaaaaaaaaaaaaaaaaaaaaaaaaaaaaaaaaaaagaaaaaaaaaaaaaaa

SEQ ID NO: 56648 - DNA, 460 bp, Homo sapiens
tccaccgcggtggcggccgcttttttttttttttaattaacaaacctattttaattatttgggggtaacccccacagaattaaaaaacattggaaaggggtacccccttcccccccggaagtgccccaggggaaaaaaggttccttgggggaaaggaaccacaaaggggaccctttgcaaactcggggcaaaggaaatcccttcggtgttggaacctgtaacccttacaggagaaaacccaaccttgggggaattgtttccaggcccacaggcaaagggcaaaagggttgaacacaaacccacaaacctcctggggtccctcttttttctcgttggcctttttttgtttctgctgaataatctccaagtccttttgtttgcgggcggaaaaaaaaacccctttttttgggccctttcctttaaccaagtcgttttgttttttaattttttttgggggggc

SEQ ID NO: 56649 - DNA, 338 bp, Homo sapiens
gccccccctcgaaagtcttctagaattaattaacgcggggagacccaacccttagatttcataagtacccattcccatagccagtaatgtcctcactcctctgtggcttggctgtacttgccatttcttaccacttacctatgaggtaatgcttgttatcttccatctaataaaaatctgctgcagatgtgaaaaaaaaaaaaaaaaaaaaaaaaaaaaaaaaaaaaaaaaaaaaaaaaaaaaaaaaaaaaaaaaaaaaaaaaaaaggaaaaacacagagggggaaagaaaaatcccccctaaaaaaaaaaaggtgcccccccccccgggggggcccc

SEQ ID NO: 56650 - DNA, 505 bp, Homo sapiens
tccaccgcggtggcggccgcttttttttttttttggttttttttttgggaataaaaaatttttaaaccttgggcaaatttttaaaaaaaaaggggggaacatttttttgaacaacccctttttggcctttaggggggttggtttttttggacaaaaaatggtggaaaaacctttttttaaaacttaaaaagggtttttttttaaaagggggttttttggcccccaaaaatcccttggggaaaaaaagggaaaaaaaccctcccaaaaaagggcatttaatttaaaccttgggccggaaaaaaacttgggggggcctttaaaaaaaaggaaggcccgggatttaaccccgggaaggtgccccttggttccccccttttttttaaatggggaaaggcccagggtttttaacacccccccctttcccttgggggggaaataaaagaacccccctcctttaaaagggcccttttgagggggccaaacccccccacatttaaaggggggg

SEQ ID NO: 56651 - DNA, 601 bp, Homo sapiens
ccgggccccccctcggaagtcttctagaattaattaacgcgggcttgggaaggtagtgtgaatgatgtaaaggtgtgccaaattggttctgcaaaattaaccttttttgaataaaatattcaattttctgaagcgagcaggctactttctcaagcaaaatttcatttgaatcctccacccccagcctgcagagagagagggagggagggagacctcttaagagttttatttgttctcttgcagtcttatgacttacttcttaatgaaaacccttattgttttctaagagaaaaaaaaagagaatgaatgcagtgttcgaaatgggattatgtagaatttttaggagcataaagagaaattgaagaattatgaaaacaaaggccagaaaagcaaacagtgttcttcctctacgtagcagccagatggcgttttaggcaaatacaccacaaactgcacagccaggtccccatctcaaagggctttccacggagcaaaagcagtttcgatcgtattgtcatcaccaccatcaactttttttttccactcacatgatgtatgccaatatcattattctcgttatttgtataaccgtcatcatcat

SEQ ID NO: 56652 - DNA, 348 bp, Homo sapiens
cgggcccccccttcgaaagtcttctagaattaattaacggggataaattgattatttgaaactttacaacacaattgcatcccaaatacaaattgtattgcttattcattatagctattcgtcctgtaatctgtttctaggtgaagcatactccagtgttttaggggttttgaaaataaatatttaaatttcacagtcaaaaaaaaaaaaaaaaaaaaaaaaaaaaaaaaaaaaaaaaaaaaaaaaaaaaaaaaaaaaaaaaaacaaacaaaaaaaaaaaagcaaaaaaaaaaaaaaaaaataaaaaaaagagtaaaacaaaaaaaaagggcgccccccccccggggg

SEQ ID NO: 56653 - DNA, 419 bp, Homo sapiens
  misc_feature 418: n = A,T,C or G
cggggccccccctcggaagtcttctagaattaattaacgcgggggctaacggttcccaaacagcccccgaaaacgctacgtgagctgggccctgggccagaggcagaaaacggacggaagaaaaggtctggccggagatgggtctcactctgtcacccagactggagtgcagtgagtggtgcgatcatagcttactgcagcctgaaactcctgggctcaagtgatcttctcgcctcagcctcctgagtagctggagctacaggtgtgagctacccagcatggctcatttgagatttctgagtagagaagtaacatgattaaacttgggtattgagattattaaaaaaaaaaaaaaaaaaaaaaaaaaaaaaaaaaaaaaaaaaaaaaaaaaaaaaaaaaaaaaaaaaaaaaaaaaaanc

SEQ ID NO: 56654 - DNA, 331 bp, Homo sapiens
gcgggggtctcaggaagcttctccccaccgctggtggggggctgcaggaaactggccttgttctccttagcccgtcactccatacagttttaggtgaggatggatgcgggcccttcccttgccggaaagtcactgttaaatttgcaggggtttgttcacacctggggaaaaaaaagaaaaaactttttctttgggtgaaaaagtctgacctggccaaaaaaaaaaaaaaaaaaaaaaaaaaaaaaaaaaaaaaagcgcgccccccaccgggggggacctccatttccccttatagggagtcattttaccccccctccctgcccgtttttta

SEQ ID NO: 56655 - DNA, 582 bp, Homo sapiens
cgggcccccccctcggggtacttctagaattaattaacgcgggggaagccaggaaactagttggggagtggcactcgcagctgcagcaaatctcaaaataaagaggcaacggcctttctcttcctctccatctccctatagcacaccttttatttcttttcttcttttttttaagcctcacgaaagattttacttgtagatcaactttcaaaatgtaggaagtcagaatgggtgacatcatcagaaaaatatgtggagctgatcacaagaagtgaagaacccagagcacgaaagcggttgtgactcctgggcccagggagttgacagcgtctgggcttcagaggagccagcgcctccgagttgtcttgaagtgaggctctgctgtagtcctgttcttctggctctaagatctgaatgttgtgaccactaatttgctctttcctggagggtaaccccagtttggtccacaaggcttgctgcccaatctttgccaacagttgaaccaagactctgaggctgatatgcaatgtcacttacaacattaatcagatactgcatttaagatcttgatgtggaagaaat

SEQ ID NO: 56656 - DNA, 615 bp, Homo sapiens
  misc_feature 431, 435, 566: n = A,T,C or G
ccgggccccccctcggaagtcttctagaattaattaacgcgggatgatgcaagaagaaaacagcaccaacagaaaccacatcgtaagaggtaattttgggggaaaaaagggtaattttgtaaatcctgtgttgtcactttaacatgtatgatgacattatttgtgcttattcttcaatattatacctttatactcgagaatctaaaaaactgtttaagacccaccctgcatggctgtcctggggattacggctaatgcatattcggcaaccttgtcccagaacacctgttcaacaaaccacggtttgcctcatttcagagtgttttgctatttggacacggggtattctttttcatcccccactgcaacctccgcttcccaggctccagggatcctcccacctcagcctgacctcagcctctcaggtaggnctgngaccacaggcatgcaccaccacgcccagctaacttttgtattttctgcagagatggggtttcctcatgttacccatctctacaaaaattaaaacattagtcaactgtggtgacacatacctaaagtcccanctacttgggaggctgagataggaggattgcttgggcctgggagaatgca

SEQ ID NO: 56657 - DNA, 469 bp, Homo sapiens
cgggccccccctcggaagtcttctagaattaattaacgcgggatgagaaaagacttcaatatctgttgcctgtcatatttaagaaaaattactgtttctactctctgtatctgattttaaaagaaaaaactattcatacctggcttccaggtaattgactttgaattcttacaagcaaaggtcattgtgtttttcttgaatagacatctaataaattttgcttggaagtataaaaaaaaaaaaaaaaaaaaaaaaaaaaaaaaaaaaaaaaaaaaaaaaaaaaaaaaaaaaaaaaaaaaaaaaaaaaaaaaaaaaaaaaaaaaaaaaaaaaaaaaaatttaaaaaaaaaaaaaaaagggcccccccccggggggggcccccaatccccccttagggggggttttttcccccccccccgggggcgttttttaaaaaggggggggggggaaaaaccggggggtccccaaat

SEQ ID NO: 56658 - DNA, 243 bp, Homo sapiens
ccgggccccccctcgaaagtcttctagaattaattaacgcgggtgatgggggtttatttgtaagaataagaggcaaaggaatgttagcatagcaaaaatgtgtttgaatgagttaaccttttaatcgcaaccctatgtgaataaaattactccactgttaaaaaaaaaaaaaaaaaaaaaaaaaaaaaaaaaaaaaaaaaaaaaaaaaaaaaaaaaaaaaaaaaaattaaaaaaaaaaaaaaa

SEQ ID NO: 56659 - DNA, 505 bp, Homo sapiens
  misc_feature 437, 456: n = A,T,C or G
ccgggccccccctcgaaatacttctagaattaattaacgcggggcaagagaaggcggtattgtaaatacgttatgtacagtgtatcctcatttttgcagatatcatatttgtgaacttatctacttgctaaaatgtatttgtaatctcaaaatcaatacttgaggtgttttcccagtcactcatagatatgcacatcccagagcagtaaaaatcttgagttgccccacgcacaccctcccagctatagtggaacaaggcggtgctctgccttcttgtattctttttgctgtccatttagtttatgctttccacacttctgtgctttttgttggtgattttgctgtttaaaatggcccccaagcgactgagctcagtggctcatgcctgtaatcccagcactttgggaggccgaggtgggaggattgctcgagctcangagttcaagaccatcctangcaatatcgtgagaccccccccccacaataaaaaattaaaaaaaataaa

SEQ ID NO: 56660 - DNA, 438 bp, Homo sapiens
attaattaacgcgggggctcgggggagttccggatgtttaccgttaccatggatcctggaggtgcccacaaatactgtttgtcgcctgggcaaccggagaaggacaaaccaggacctaggggggggggggggtcccggttgcaagggtgtccaatcccgtgcttggtttgcctttttttccgggcacttccttaagggactttacaaaaacacccttccacaaaagtcaaaccctgacctacaggaacggctatgcaattgttcgacgtccaaaagttgggatgggcggaaaccggttccatttaaaccatctgtcccaggctgacctggatgattgggccagaagggcaccagttttaacttatggccaacctaaacaagccccacctgcggattttatccctgcgcatgtggccttagacaaaagggcactgaaat

SEQ ID NO: 56661 - DNA, 479 bp, Homo sapiens
ccccctcgtggagtcttatagaattaattaacgcgggggtgagggaaagaggaaataatttttttctaaatgctggagttggaaaaccataaaaaatctctgctacctgctggcttttaaacttctacctgattcattggttgacaaaagcagttccctgcgcttactggccttatcgtatgtgtcaaatacttaaactgatttttgggaaaataaactttttttttcaaacaaatctttacctgtgttggcccaccaccatgttatttgccatgcacaatcccaggatttgatttctgttagaaaatattctgggtcttgatctggataaaatgactcatagagaaatgctcttgcgctacttttatagcatcccctgtatatacaaaaatatgtgtttatttgggcttctctcaaagttttagatagcctttttccgttctcctgccccacttttgcccaataaaaaaaaaaaaaaa

SEQ ID NO: 56662 - DNA, 400 bp, Homo sapiens
gcggtggcggccgctttttttttttttttttttttttttttttttttttttttttttgttttttttttttttttttataaaaaaattttttaaaaaaaaaaaataggggaccccccaaaaaaaccccaattttttttttttttttttttttccaaattgggggggggcccccccccaaaaaaaaaaaaaaaaccccaaaaatttggggggggggaaaaaaaaaaaagggggaaaaaaaaggggggaaagacccccaaaaaaaacccccccccgggtttttaaaaaaggttttttccccccgggaaaaaaatttaaaaaaaacccccggggggggggccccgcccccctttttttcccctttttgggggggtttttggcccccggggggaaaacgggggaa

SEQ ID NO: 56663 - DNA, 273 bp, Homo sapiens
attaattaccgcggggattataaagggaccagggaaggcggagggcggcgcattttgaatcgcgctacaacaaaggattagggggtggaatctcaccgggggtccaattacccttttctttgccttgctggcttgaccttaagcgaaattcaaaatggctggcggtaaggctggaaaggactccggaagggccaaaacaagggggggggccctctcaaaaaaacccggtttgcatttcccagggggccgttttcatccacccctaaaatctag

SEQ ID NO: 56664 - DNA, 523 bp, Homo sapiens
  misc_feature 28: n = A,T,C or G
cgggcccccccctcggaagtcttctagnattaattaacgcgggggtgggggagaatatacaggtttacaaaatcttgtaaattctcacagtgcttagtttcctgacttttcaaaaattggaattgtttttcctagctttcagtggagaaatgtaagctatgagtttaacatcatgttcactgtgttttggccaggattttgcaagcttttgtggaaaaaattatattgctttctttatcctgtttgtaatgtatgtatcagtatgcttccttgtattttactgtggtaaaattgtatcttgtatataaagaaaaaaagtctattatagtgaattaaaagaaatctttactctgaaaaaaaaaaaaaaaaaaaaaaaaaaaaaaaaaaaaaaaaaaaaaaaaaaaaaaaaaaaaaaaaaagggaaaaaaggaaaaaaaaaaaaaaggggggccccccccgggggggacccccatttccccttatagggagtcttttaacccccccccctgggccgttttttaaa

SEQ ID NO: 56665 - DNA, 515 bp, Homo sapiens
attaattaacgcgggggtcaatgctatagggctcatgggttgcaggggaggacgacagacctcaggcccttgcctaagtctccccatctcataagctggtcaaagtgtccctgcctgctgactcaaggcccagacatttatccattcctcccccaacctctccatttcttcacctacttgttcagtcagaaattcaaccaatattaaatgcctcttctctacacacatatgcaacacatgccaactctcaaggaatgcaatttagtggaggagaaaaagcaagtaaatatgcagtaacaatgcaaacatgtgccactacagggataggtaccaagtgctaaggaaacctgcagggatgaacaaccagcccagcttcggagggcagagaaaccagcccagcttcggatggcagagaaagcttcctgaaaaaggtagctacaagaacaaagagcatcaggccatgccatcaggtgggagacagtggtgaggaatgccacagtgggtggaacagcatg

SEQ ID NO: 56666 - DNA, 449 bp, Homo sapiens
tccaccgcggtggcggccgctttttttttttttttttttttttttttttttttttttttttttttttttttttttttttccccaaaaaggggggaaggggggttttttaaaaaaaaaccccccccttttaaaaaaattttggggaaaaaaatttaaaaaaaaagggaaaaaaaaatttgttttcccccaaaaaaaaaaaaaatttccccggtaacccccccccggttttaaaaaaaaaaaatttttttttaaaaaacccaaaaaaattttttttttttaaaacccgggggggggcccccttaaaaaaaaaaaaacttttggaaaaaaaaaaaaaaaaaaaggggggtcttaaaggaaaaaccctctttttttaaaaaaaaaaaaaacccccccccccttttttttaaaaaaaagggggaaaatttttaaaaaaaaaaaaaacccccccc

SEQ ID NO: 56667 - DNA, 155 bp, Homo sapiens
ccccccctcgtacatacttatagaattaattaccgcgggtagatgatttttagcaggcaggaagtcttgtgcggggtcaccatgcaccacctccagttgtactagtgcctttggaataataatttggataggggggtgacccaaaaaaaaaaaaa

SEQ ID NO: 56668 - DNA, 249 bp, Homo sapiens
  misc_feature 230: n = A,T,C or G
ccgggccccccctcgaaagtcttctagaattaattaacgcgggattcatgaacatggtttacctctctttccatttgggtcttctttaaggtttaccaataggattttatatttttgtccattgtggtcttgcttatcttaagtttgatttgtaaatattttatgtttcttttagtctattgtaaattgtgtatttttaatttcattttttttttttgttaatagcatantaaacacaccttgtctttt

SEQ ID NO: 56669 - DNA, 605 bp, Homo sapiens
  misc_feature 37: n = A,T,C or G
ctggggtaccgggcccccccctcggggatcttctagnattaattaacgcgggatctccagaagaaagaagcactcacatgggtcttttgctgtttgcttaattataaagacatcattttgcaagcagaaggctgagtttcatttgaaacaggtgcttaggtggtggtatttgtgaatacttttcattccaagcaagaagactaaagaagtagcaagtatgaatgacttcagggtttaaaaaaaatgtcttccagtttcaaccactaccatgataagcacagttgagactgcagcagtaaattccaaatatgtgtttctaatttgacgtgaaggatactaaaaatttatatttgtatatttaaatcctgcctcggcctcccaagtagctgggattgcaggcgcgcaccaccacgctcagcctgatttctaggctgaaaaggctgggactcaggtactttccccagttgggactgaactttctcatcagagaatgggcctcagaagcaatgttcccaaacttgtggttgggtcatcgtggaaaagaaacctcaaataagaaaaataattacaataagaaatggattttcttttttcccacaacagta

SEQ ID NO: 56670 - DNA, 432 bp, Homo sapiens
cgggccccccctcgaaagtcttctagaattaattaacgcggggctcaagtaatcctcccacctcagcctcccagtagctgggactgtaggtacacaccaccaggcctggcaaattacatttttttttatagaaaaggggtcttgccatgtttcctaggcagatctcaccatgtttcctaggctgatctcgccatgtttcctaggctgatctccaacttctaggctcaaaggagcctcctgcctcagcctcccaaagtgctgggattataggtgtgagctactactgcacctgaaccttttttttttgatagaaaatgtgaaaagtgcgttaacattttgaagcatgtatttgcccccaatttcaatgtgtatatatactcataaaattaaaagacagttttactttaagaaacgaaaaaaaaaaaaaaaaaa

SEQ ID NO: 56671 - DNA, 410 bp, Homo sapiens
gattcttcctttacctggtcaaactgggggaccagccccggtttcccctttcaaaaaatcagagtaaagcgggaagacctcaaaaagggtgatcttttgttctggggaaaaaagtgttttttttccaaaagggaagggccccgggggtttttgaaaaatcccttgacaggtctttaaataaaaagtcgggctgaaccggggcaattttacaaaacaaaaaccggcttgtgatttctgaaaaaaatgaagggggggaattaccttttacaaaacatccccagggttgggggggttaaaaaaggggatttccctgaatttaaaccccacccctccctttgttagttattaaaggaaacattctcaccccctaaaaaggggctaattcattttagggggtatagggcccaaat

SEQ ID NO: 56672 - DNA, 367 bp, Homo sapiens
ccccccctcggagatacttctagaaattaattaacgcgggcaagcctaaaatacttgaagcctcccttcaccatttcccgacggcatctacggttcaacattttttggaagccacaggcctttccacggaactttaacgtatttatgggctaaacttccctaactatctgtttaatcccccaacaaatatttcactttacatccaaacataattttggctccaaaccccccgcctgatactggctttttgtaaatggggttggactatttctgaatgcccccatcaatggaggagggtcttaaaaaaaaaaaaaaaaaccctaaaaaaaaaaaaaaaccgccccccaccggggggaacccccaatcc

SEQ ID NO: 56673 - DNA, 481 bp, Homo sapiens
  misc_feature 141: n = A,T,C or G
ccccccctcgaaagtcttctagaattaattaacgcgggggaattaactattgatacttgcaacaatgtgaataactcaaaataattatggcaaggtgaaaaaatcaatgacaaccaaaaaaaaaaaaaaaaaacatgtggntatgatttaacttttgtaaaattctagaaaatgcaaattaacctatagtgacagaaagcagatcagtgctatggtctgaaagtgtgtttcccttcaaaaagctcatgtgttgaaatctgtactcccaaggtgacggtgtggggaggtaaagtctttaagaagtaattagagttagcaaaggtcatgaggattgagccctcaggaatgggattagtgtccttaataagattcctgagagagcttgcctcctctctccaccctgtgaggctacaaagagaagactgccatctatgagccaggaagcagatcctcaccaaacacctaatctgcctgccccttg

SEQ ID NO: 56674 - DNA, 402 bp, Homo sapiens
accaccttttgctttttccacagatcattaacatttccttaaagtatgtaagtccctttgcaaatgcaaatgtcctataaattttcactaaacctttagaaaccaattcccttccccccatttttcactaacccactgtatttaaaaaccaaccaaccaaacaaaacctgtttggggagaggtcgtaaattaaactaaacatgtcctgccttttcgcagtctattataacagtgttttttaccacaaataataaagctaaaaaaagtcctgtcacttccattaaaaaaaatcgggatccatatttaagtgtatattaaaatactgtacagtaaaaagtccaaaacaaggggaaatgttttctttaaattaaactcattgcggccttttttaactcatccaaa

SEQ ID NO: 56675 - DNA, 126 bp, Homo sapiens
ttttttaacaacacaaaccccaccttttaaaggctatacccaaccttaacctccctttcctttttaccctataaaataaatcttactgttaaacaggtaaaatgggtctatttaaggctaaccaat

SEQ ID NO: 56676 - DNA, 574 bp, Homo sapiens
cccctcgaaagtcttctagaattaattaacacaagcacttgtttcttgcagagcactttgctgtaatttagaacaaattaaggggaaaaaatcattcaagtgctgttttcttcacaccatgaagtaagcatgatggaccaaagttaactattttaaaatattatcatccatttcttgtaattatgaatagcaataccatcttttttcttcaaaaaaaaaaaagacatcatgatctatgctattttcaacttgtttcctgtgcttctattaatggaaattgatttttcaagattaatgtaaaatgtgtttctgtttctcccattaagtctcttatttatattagatccaatgtatatgttcctggatatttttcaaataaatatatttttaatataatacagcaaattgtaaattgttaaaggaccatttataatgttttctccttgccctccctagcactgaaactgtggttttattattgtcttcacactgttgtttgtgaattaacttgagctccttgagttcctacttctaagagattatttaaactttactttttaccttcttagtatac

SEQ ID NO: 56677 - DNA, 553 bp, Homo sapiens
ccccccctcgaaagtcttctagaattaattaacgcggggggcatatgccccagcccctgtaccacccctgctgttgcctgggcagggggaagggggggcacggtgcctgtaattattaaacatgaattcaattaaaaaaaaaaaaaaaaaaaaaaaaaaaaaaaaaaaaaaaaaaaaaaaaaaaaaaaaaaaaaaaaaaaaaaaaattaaaaaaaaaaaaaaaggcggcccccaccggggggaaccccaaatccccccaaaaggaagtctaataaccccccctaatggcccgtgttttaaaaacgtgggaacgggaaaaacccgggcgtaaccaaattaaatcccttggaaaaaaatccccttttcccaagtgggctaaaaacaaaaaaggccccaaccaatcccctttccaaaaatttgcccaccctaaagggcaaaggaaaattgaaaccttaaatattttgtaaaaatccccgtaaaattttggtaaaaaaacctaatttttaaacaaaaaggccaaaatgggaaaaatcctttataaataaaaaaaata

SEQ ID NO: 56678 - DNA, 402 bp, Homo sapiens
  misc_feature 220, 221, 222: n = A,T,C or G
tccaccgcggtggcggccgctttttttttttttttaatttttttttttttttttttttttttttttttttttttttttttttttttttttcccccccccccttaaaaaaaaaaaaaaaaatttttggaggggggggccaaccccaattttttttttttttttaaaaagggaaaaaacccccccctgttaaaaaaaaaaaaaaaattagtgagcacaccannnaacacaattgaaggctgaatggaaaaacccagggaacatttgtaaatgcttaaacacggggtgggtgtcatttttaaaaaaaccaaggtaagggggaatcctataaaaaagggctgaaaaaactggccactgaataggaagttccttggggggcaaagggggctttacctgcccttaacc

SEQ ID NO: 56679 - DNA, 133 bp, Homo sapiens
gccccccctcggggtacttctagaattaattaacgcgggggtggggggaggaaagaatctaatttctagagttaccacattattagacttaacatgtccagtgttcaacaaaaataacaaaaaaaaaaaaaaa

SEQ ID NO: 56680 - DNA, 460 bp, Homo sapiens
tccaccgcggtggcggccgcttttttttttttttacactttcttacttttattccaacattaaaaattttcacagatggagtttttttttcaaacttctccttggaaaatgtccaaaaacaaagcttacaacctttccacatttccaaaattacttttttgggattatggaaatgtcccccctacagtttatctggaaaaaacacttttaaaaaaaaaaaacctttggagggttccccgggataaccggccttaaaaaaaaaccggcaaaaaatttcgggaaaaatcccaaatttaaagcccttttccttttaaaaaatttaaaacttttatagttttcggcaaaaaaatccccgggggggaacccttaatccggattttccccctcaatacccaagtaaaaaaatccttattcctttttccacccaagtttttttttttaacccctttttgaaaaaaaa

SEQ ID NO: 56681 - DNA, 549 bp, Homo sapiens
  misc_feature 11: n = A,T,C or G
cccccctcggnagtcttctagaattaattaacgcgggcatcctacatttttgtgcaagagagtccaactccccagattaaacctgaatatttagccttgaggtctgttggcatcagaagagaaaaaaaaaaaaaaaagcggccgcttttttttttttttttatttttttttttttttttttttttttttttttttttttttttttttttttttttttttttttttttttttttttttttttttttttttttttttttttttttttttttttttttttttttttttttttttttgggcccccccataaaaagtttttttcccttttttttatttgcccccccggggaaaaaacccccccccccttaaaagggggccccggggccaatttttttttgggggggggaaaaaaaaaaaaatttttttcttggggttttttttgactttttttcgcccccccccttttttaaccgggccccccccccttttacccccctttttgggggggggggggggggggccccccccggggggaaaaaaacacaccccccc

SEQ ID NO: 56682 - DNA, 397 bp, Homo sapiens
ttttttttttttttcaaccttttttttcctttttgaaaggtgaacagggccaccattaaattccggggcccccttacattggggtaaaaaacttccccaaaaccttttccttttacctcctttccgggggatttccaaaaccccttctgggaaaatccttttttttattaaaacctgaccttttttaaaggttttcacccccttaattgaaaaaatttcagggaccagggttttctttcagctttttcaccacttaattttcaaattacccaaggggagtaccgggcccaaattttaaaattttttttggggggggttttggccatgaaccattttttttgtaaatttttttttaaaagcccacccctcctaaaacggccatggaaccacctaattt

SEQ ID NO: 56683 - DNA, 496 bp, Homo sapiens
gggcggatggagctccccgcggtggcggccgctttttttttttttcccttttttttttttttttttttttttttttttttttttttttttttttttttttttttttttttttttttaaaaaaaaaaaaaaaaccattttaaaaaaaaacccccccggggggcccccccccccccaaaaaaaaggggggcccccccgggggggggggccccccccccgggggggccccccccccaaaaaacccccggggggggggggggggaccccccccgggcccccccccccccttaaaaaaaaaaaaaaaaaaaccccccccccccccccttaaaaaaaaaaaaggggggccccccccttaggggggggggagacccccccccccccccccccaaaaaagcgcggggggccccccaaaaaaaaaaaagtcccccaaacccccccccccccgaaaaatttttttggggggggggggggaaaacccctcccggggggggggggggg

SEQ ID NO: 56684 - DNA, 187 bp, Homo sapiens
cgggccccccctcgaaagtcttctagaattaattaacgcgggggtgcaggtggggaaaatggcggtgtctacagtgttctcgacttcgtcgctgaagctaaaccagccccagaaatatttgaaaatgaagtcatggccctgctgagagactttgctaaaaacaaaaacaaagagcagagacctgcgt

SEQ ID NO: 56685 - DNA, 408 bp, Homo sapiens
  misc_feature 345, 346: n = A,T,C or G
cgggccccccctcggaagtcttctagaattaattaacgcgggggcgggggtcttggagccaagctcttaggttcctcttatttggggcagtaccagtccataccagctgcgatttgtgagtggacctgtggtaagaagaatagaaaaggctctcagagataaggttttttacatgtgtaacaatcccaagatttcctagattaaaatcttaattgattttgaaaaaaaaaaaaaaaaaaaaaaaaaaaaaaaaaaaaaaaaaaaaaaaaaaaaaaaaaaaaaaaaaaaaaaaaaaaaaaaaaaaaaaaaaaaaaaaaaaaaaaaaaaaagaaaaaaaaaaaaatnngggggccccccccgggggggggccccaatccccccttaaggggggattttaccgcccccccc

SEQ ID NO: 56686 - DNA, 599 bp, Homo sapiens
cgggccccccctcgaaagtcttctagaattaattaacgcggggtgtaactataaatttactgacatctctaaatttaaaaaatgctgcccttcattcacatttgaaacattcggaatgtcattttaaaattacttctctttttttgaaaaataaactttaaaaattaaagtaacttctcagtctttcagcatggaaagattggggacatttagagacttggtaatttccatgcgagggcaggtggattgggttcctttgcccaaagcagaacgtgggacaggatcagcctcgtgagatagcacgtctggcctttggtccccttctccattgcttcctctctttatgtttctcttcctatctctccgagttgctgtttctttgtgagtctttttctattcagtctttgtgggagttggttcatcttttcctccatctaagttttttatcctcttcactttttttcctcttttcgtccttagttttatgtatcaactccccgtgcccccattttttttttgcttgaccttctctgtttccttttattcttgaataaatcttagtctctgtttctctttcccactctttcctctctcttact

SEQ ID NO: 56687 - DNA, 374 bp, Homo sapiens
ccgggccccccctcgaaatacttctagaaataattaacgcgggggatgctgtgctcttcaagcgaagggcaccaccacgttcaaaggctggcacacacactggtggcttttttgggccacatttaccaaaagccctgacttctgtggggctggtaccagaagctcataggaatttcctacacacttcaaccaaagtttgtttacctttgaactccctgctttttatctttgaaatgattcctcaccaggattttggaccaaaatgatcatgggtcctgggtggggaaaagaaaaggaacccctattttggttaaaaggatttatgcacgaccttttattcccaaaagttccaatggagctttttttaaagcctt

SEQ ID NO: 56688 - DNA, 611 bp, Homo sapiens
  misc_feature 582: n = A,T,C or G
ccgggccccccctcggaagtcttctagaattaattaacgcgggctagtgatgttttttgcagtacatttgaatggattgtagacactgcctcaacccttttgaggttttgatttggaaatagatttaaaagaaaacaggctaagataatatccttgttctcatttacaccctgcagtttggaccacatttgacctcataagtttttccttttaacagtaggaggcagtgtgagctttttattttttatttttcttaaggtggtcttagtaatataacatgttcatacatatcaagagagtacttggtataccttaggtctatgaagtgtggctgaaatctgaagagtcttgacaaagggatttacacccttgacaaaaccaaaagaaattaacaggccacaggtttctttaaagctgtgttaacatatcttgccttaaaatgtgtgtgtgtgtttttgctttgctttttttttttgcccaagaggcatctcagtactccagcaatggaggaagaatagagaattttgcctggcaatggtcctactgccattttttttttcccactctgatctcacttaagtntgatatcaaacacaattgggaggcaatag

SEQ ID NO: 56689 - DNA, 550 bp, Homo sapiens
cccccctcgagagtcttctagaattaattaacgcgggatgaaaactctggccttaaaaggtccacttttagtatataattgcctaattagcaatcatttttattttttgctcactccctggtctgaatctatctgtctattcagatattttttggtaggtttggaaaatggagaagtgagcctaattggtgcctaattgtctggtgtatcattcactttattcagtttgttctatcaatatgatttacccctcaaggttaacctagcaggttgctcagttattatctctcaaggtcacagtactagaaatacttggcttgcatcttttagatgccattcatgttatcaagctcaaattatagttggtcacaggattctaaagtctttatttgacttctcctttttgaactggctcaaatggaaaagtgtagttgcttttaaatgttaaaaataagtttaaactttatatttcccattggtttcccctattttgtcctttctttgtgtgcttgaaatattttatttttcagtttgtcctcataaggaatca

SEQ ID NO: 56690 - DNA, 466 bp, Homo sapiens
tccaccgcggtggcggccgctttttttttttttttgaaaacaaccttacttttgccccccaggtgggagggcagggggcaattttaatttaatggaatttcccccctcgggggctaaagaaatttcccccccaaaccctcttgaggagtggattaaagggcttgccccaccttaccaaacatttttttttttataaaaaacggggtttaaccttttggcccaggttggtttaaaacggttaatttaaagggatcggcctccttggccctccaaaagggcgggaataacgggcttaacccccccccccgggccgaacttttaataaatattaagtccctgacccttataaaaacccttaaaaaatacttttgggggttattaacaaaaaaattttttggaccccaaaaataaaaaatctcactagttcccggccttaacaaaagttaacccgggaaaaatttttaaa

SEQ ID NO: 56691 - DNA, 467 bp, Homo sapiens
tccaccgcggtggcggccgctttttttttttttttttttttttttttttttttttttttttttttttttttttaaaacccccccctaaaaggggggaaccccaaaaaaattaaaccccccttttaaaaaacccccttttagggggggggtttaaaaaaaaaaaatttttttggttaaaaaaaaaaaattttttggggggaaaaaaaaaaatgggggaaaaagtccccccaataaaaaaaaaaacccgggaaacccttggttaaaaaaaaattttcccccccaaacccccccaaaaagggggaggggaaaacccaatttttttgggggttggggggggggaaaaaaaaaccccccaaaatttttttaaccccccccctaaaatttttgggggggggggttttttttaaaaaatggggggccccgggggaaaatcccccccaaaaaaaaaaaaaaaggttttttaaaaa

SEQ ID NO: 56692 - DNA, 165 bp, Homo sapiens
  misc_feature 12: n = A,T,C or G
cggtggcggacncagcttttttttttttttgggcttttttttttttttttttgggggttttttttttttttccccccccccaccaattaattttttttttggggcaaaatttttttttttttaaaaaaaccccctgggaaaaaaccctttttaaaaaacccttgg

SEQ ID NO: 56693 - DNA, 203 bp, Homo sapiens
ccggggccccccctcggggtacttctagaaataattaacgcgggatcctagaaatcgctgtcgccttaatccaagcctacgttttcacacttctagtaagcctctacctgcacgacaacacataaaaaaaaaaaaaaaaaaaaaaaaaaaaaaaaaaaaaaaaaaaaaaaaaaaaaaaaaaaggaaaaaaaaaaaaaaaaggg

SEQ ID NO: 56694 - DNA, 310 bp, Homo sapiens
cgggcccccccctcgaggtacttctagaattaattaacgcgggcaatttatccgattcatttttaagctaggcataatcatgtacgtataggaaataaagccatctataatatatctataatatggctataatatggctataaatctataatatggctgaaggcagagggcagtggttcatgcctgaaatcccagcactttgggaggccgaagcgggaggattgcatgagtccaggagttagataccatcctgagcaacaaagcgagaccctcgtctttacacaaaaataaaaatcatctggcgatggag

SEQ ID NO: 56695 - DNA, 475 bp, Homo sapiens
ttaattaacgcgggacagcatgcattctcaatgggagatactaccgcaagagggcaaatgttgactcttgaaaggtgaaaaaaaatcttgaatataacaatggtttttgacccttcaaagggccatagtacataaacagatatataatacatttgtggcattaaagtttcctaggggtggctgggtagcgtggctcatgcttataattccagcactttgggaggccaaggcgggtggaccacttgaggtcaggagctcaaaaccagcctggccaatatggtgaaaccctgtcttttactaaaaacacaaaaattagctgggtgtggtggtgcatacctgtattcctagctacttgggaggctgaggcacgagaattgcttgaacctgggaggtggaggttgcagtgagctgagattgcaccactacactccagcctaggcaacagagggagactctgtctaaaaaaaaaaaaaaa

SEQ ID NO: 56696 - DNA, 474 bp, Homo sapiens
ctccaccgcggtggcggccgctttttttttttttttcctttttttttttttttttttttttaaaggggggcccccccggggggggcttccaaaaaggggaaaaaccccccctttttttaggggccccccattttttaggaagccccaaaaaaaaaaaattggaaaaaaaaaaaggggaagggggggggaaaggggtaaattttggggggggggccccccaaaaagggcccaaaaagggggcccccccaaaattttcccgggaggcccccccccccgggtttttggtaaaaaaaaaaccccgggggttccaaaaaaaaccaaatggggaaaaaggggggtaagtccccccctgggaaaaaaagggccccgggctttttttttttaaagacgaagccccttaatccctcccccccccttaaagggggggccccgcgccggtttaaaaaaaaagggggggggggggggaaaaaaggg

SEQ ID NO: 56697 - DNA, 582 bp, Homo sapiens
tccaccgcggtggcggccgctttttttttttttgggtttttttttttttttttttttttttttttttttggggggcaaaaatttttttttccccccaaaaaaaccccccggggaaaaatttttcccaaaaaaaaaaacccccccccggggaaaaaaaaaaaaaattttttttaaaaaaaaaaagggggggggggaaaaaaattcccccccccccaataaaacccccggggggggggggccccccggggggggggggggggggggttccccccccccccggggggggggggggggggtttcccccccccccgggaaaagggggggaaaaaaatccccccccccccccccaggggggggggggttttttgggggttccccccccccccccgccccctttttttttgggggaaaccccccggggggggaccccccccccggggggaaattttctttaaaaaaaaaaacccttggggggggccctttttggggggggggggttttaaaaaaaaaaaaactttaaaaaatatttttttttgttgtggcccccctttttttaaaaaaaaagggggttctccccccccc

SEQ ID NO: 56698 - DNA, 485 bp, Homo sapiens
tccaccgcggtggcggccgcttttttttttttttttatggcaattttttttttttattttttaaaccccatcaactttggttagggttagggggtttaacatggggcccaaaaaaatttttccaatgcggcccagggaacctaaaattttgaacccccctgcctagggaaacttgtttcgtctactgggttagtggccctaatggcttttaacctgcagcccaaaggtttttttaaataataaaactgcaaaacccccaaccccaaaaaaaaaatctttaaagtggttggaaaaggaggtcttttttaaaatacttttccaggaaaaatacaattttaaaaaaaggacctggtatttactgggtccaagtgtttttttttgatgggaaaggattatttggcaaagggacagaaatctgggggaacatttcctgctcctgtttccttaaccaccttcctaagggcatttttggcaccttggggtcg

SEQ ID NO: 56699 - DNA, 474 bp, Homo sapiens
tccaccgcggtggcggccgcttttttttttttttggctaattaattttaatttttaactttatatttaaccttaaggggaccatggccaggtctcccaaaaaaaaaaactcttttcaggggggttaattaacaaatttttttgcccccaaggtcccaaccctatccccaaaaagttttttttttggcccctttccttttccccactttcaaaccttgggaaccccaagaaaattttccctgtgttcccaaatcactaaaagggggggttggatcttcccgggaaccaaaaaagggcgggaaaaccaccaaatttttagaacacaactgtttttacaaaattccccacaaattaataatgattttctactacaccctgttttgttccccatcccctgataacccccacttgaaaaatacgattttataaaacctttcaggttttcacccaacctaaatttttttttccagggaaa

SEQ ID NO: 56700 - DNA, 289 bp, Homo sapiens
taattaacgcgggcccgcttttgcccaagaatgtcaggcaaccaccaggtgatggtgtggcggttgttgcactgcctctctaaaatgataactggtcacagccagcaccagggagaagcagtttcccaatggatacagagattggtaatcagaagcttccaacaaagtctcatgtttatgccaggcacggtggctcacacctgtaatcccagcactttgggaggccaaggcaggcgggtcacaaagttatgagttccgactagcctggccaacatggtgaaaccctgtc

SEQ ID NO: 56701 - DNA, 370 bp, Homo sapiens
ctttttttttttttttcccttttttttttttttttttttttttttttttttttttttttttttttccggggaaaaaccccttttaaaggggggggaaaaaaaaaaaaaaacccccaaaaaaaaccaagggggcccccccccaaaaaaaaaaaaaaagttttttcaaaaaaaaaaaacccccccaaaaaaaaaaaaaaaaaaaagggggggcccccccccccccccccccaaaaaaaacccaaccacccccccccctaaattgggaaaaaaaaaggggaaaaaaaaaaaaaaaggtcccaacccaaaaaccccccccccccaaaaaaaaaagaaaaaagccccccgggggggggaaaaaagaaaaaaaccc

SEQ ID NO: 56702 - DNA, 602 bp, Homo sapiens
  misc_feature 31: n = A,T,C or G
taccggggccccccctcgaaagtcttctagnattaattaacgcggggaaaacggcttcttttgaaaggtaacccttaacagagatgaaagtgaaagccaggtttcattgggaagccgatctgcacctaccgagggctgtaacttaaagccgctgtaaacgtggtagctgatccttgtatgcaaaggtttaggccctaagcttagaaactgttccttgcttgccttctacccccctcctctttttctagaattctcttaggaatctctagcttcattgaggacacaggtgtaagcagaagctgtgttctcagctccaagaggccgaccccacgaaagcctaagcaggtgaatttcgtaaagacgttgacagttggaaaacctgtgctttcagcacgtgataaatctgcagagtcagcagacaatgaagatttggcattcaagaactcctcaaatacttctcgatagtagctattcagagcctgccttgatagaccgaacttgctcatatttaaatcattaagatagaggaaagaatgtaacaactttttaaaatgtttcttaccccataaatacttgaagaagatatgttatattggaccatg

SEQ ID NO: 56703 - DNA, 472 bp, Homo sapiens
ccccccctgcgagatacttctaggattaattaacgcgggacaaatacttaagtcaaatattaagaaacaaaaaataatttaaaactatcagatttctttaaactaaaaaagcttttactgatagtatagcaatataaaataatttcacatattaatagaaggaaggtgctgggcatagtggctcacatctgtaatcccagcactttggagaccaaagtgggaggatcacttgaggtcaggagttcaggaccagcctgggaaaaatagcgagaccctgtctctacaaaaagtaaaaaaatcagcggggcatggtggcacatgcctgtagtcctagctatttaggagggtgaggtaggaggatctcttgagcccaggagtttgggcctatagtgaactacgattgcaccactacactctagtctgggtgacagcgagaccccatctctttaaaaaaataaaaaaaaaaaaaaaa

SEQ ID NO: 56704 - DNA, 592 bp, Homo sapiens
  misc_feature 16: n = A,T,C or G
ccgggccccccctcgngggtacttctagaattaattaacgcgggggagaatctttagagaaatgacgcgaaactcctgccttaagccctaatggcggcttcaatatcagccccactgagcatgaaattcatttacttaaataaaatctgaatctcagcccaaacctgggagattcaaaacctgagagcggtcttaccaaagacgcccgtatgtctggtgaagtcagttggatgcaagcagtttgtgctggtaccagggccccagctactgatgaagtggcaggagtccacagaagcctacttcgaagttcccggggcttccaggggagattgacgagattcctggggaggcgattcatgacagctgagttccttttggaggatccgtcttcaggcaggatatgattcatagtccagcgtttgagtgagcactccagtcagaacgaactctgcattgtgaacatctgaacagggtggaaacagacactttagttagagatccactgctgtgcgtgcacacatactcacacagggcaatgacggactcgctggcggactccactctacccaccgagttctgcttgtgctccatg

SEQ ID NO: 56705 - DNA, 243 bp, Homo sapiens
tccccgcggtggcggccgcttttttttttttttttctttttttttttttttttttttttttaaacaaaaggggggggtttttcccctttttttttaaaaaaaaaattttggaaacttcccaaaccccaaaaaacgcgcccgggtaaaaaaaattaaaaaaccccccggggggggggccccgcccccccttttttccccctttaggggggggaaaaccccccccggggaaaaaaagggaaaaaa

SEQ ID NO: 56706 - DNA, 504 bp, Homo sapiens
tccaccgcggtggcggccgctttttttttttttttaatttttttggaaacaagtttccttttttttccccaggctggaatgcaggggcccaatttcggttactgtaacctccacctcccagtttttagcaattttcctgcctaaccctcccaaaaaaatgggattacaggcgggccctaccatgcctggttaattttatttttttaggaaaaatagggtttcaccatgttggtcaggctgatttaaaaccctgacctcaagtaatcccccccccttttttttttttttaaaaaaaaattttccttttttttccccaggcgggaggccaagggggcaatttaatttaatggaaccccccccccccggggtaaaaaaaattttcctccctaaccccccggaaagggggaaacaaagggggggcccccccttccccaattattttttttttttttaaaaaccaagggggttcccccatttgggccgggggggtttaaaacccccccc

SEQ ID NO: 56707 - DNA, 361 bp, Homo sapiens
cggggccccccctcgaaagtcttctagaattaattaacgcgggctaccgggtggcagataccatgctggttgcttaggcacaaaagtaaaaggatgctgccctttaaacactgaacagaattgcaatctaacatgttacattttgaggtaaagaagtatgccaaggatcctcttatttgaagcataaaggagaagcctttaaatcagcctgtggtttttaggcaaagcttcctgggggagaggccattctgtgttgagttttgaaggatgtgtaagaagagttagccatttaaggaaagtagaaaggctttttcaggcaaagaagtataacaaagatgtggtggcaaaaaaaaaaaaaaaa

SEQ ID NO: 56708 - DNA, 527 bp, Homo sapiens
tccaccgcggtggcggccgctttttttttttttttctaaaaaacccggtttcccctttttacccaggaagggtttaaacctcctgacctgggaatttgcctgcctgggcctccaaaggggctggaattactggtggaaccccccgcccccggccagtacttttgtttttaaaaccaaaaagggtatttcaaaaacatactttaaatatatttttaaatctcccggaccttaacccttaaaacctttaaacttacccaaacttttaccttttctgggatttccccactttaaaaatccaatttttgttttacttaaaaaatttgaaacattctattttttctacttacccctaaaaaactgatggactgtttatccccaatcccaattaacataccaatattttaatatattaaaacccccctatatatataaacccaccttttccttttatttaaaaatatcatccttttgggcccaaaggtaccaaaattttttttttaaaaaactttataaaatttactaaaccc

SEQ ID NO: 56709 - DNA, 471 bp, Homo sapiens
ccaccgcggtggcggccgctttttttttttttttaatagttaacccacttttaaatcaaccatccaacaaggaattgcttggataccatttttttttaaactttcagggaagtgtaaataatccaaccccaaatttgcaaagggaaataaggaggctgtttattaaccttccccatttgatgggcgttttttttccactcataagttgttatcaaaccggtaaaaaaaattcaatctgataattttcaaaaaaagtccccagtccccacaaagttttagggtcaaactcagggctttggggctaaacctgttgcccccccagaaaaacagcatcctgaactttttgggcctgtttttcctttttgaacaactttgctagtctaaaatggcccactgactgcccccagtaggggacctcctaactacagaagggggtaaactttttttccaaaggatcggttagaaaatatt

SEQ ID NO: 56710 - DNA, 607 bp, Homo sapiens
ccgggccccccctcggaagtcttctagaattaattaacgcggggaactggtttggaatcctagttcctcacagtctacgtcaggctcaagcaagcttccgggatggtgtcctggaggccaagaagagaaagtgtttcctggagcgagtgatccaatgtgtggtcagccctgctgctgaacaggaggccgaagacgagagctgcccggaggactgggcagcagctgttccagcagagacatcagcaaaagccatctagaggtggatccagagtgtggactaacagagaaaagaagtggagggagagcaggcctgcagctggccgcagacatagccagcctccagaaccgcattgactggggtcgaagccagctccggggactccaagagaaactcaagcagctggagcctggggctgcctgacatgcgcgcaaagaggcagggcagcgagcacagctgttctccgacatggctacgtgatctcaggccttcttccttcacaattagctcttgcccctaccccacgccagctaatgccccttctgtgtccctgctctgcatgtttccattttccttaggtgtgaagtttgaagaggcaaacagtaattt

SEQ ID NO: 56711 - DNA, 513 bp, Homo sapiens
tccaccgcggtggcggccgctttttttttttttttttaggaaaaaaagcccctttaattttacttttgccaaaactttttcaaaattcctttaattttccaatttcttttaggggaaaactagggagtttgttgaaaaaaacaaaaaacaaatttttttaaaccctttgcccccaaaataacctttttttttcaaaacccttgaaaaagttttttgccttttttgggccccacctagcggggggggggaaaccaaactgttcacccgttggacaatttcaacaaaccccccccctgtggaaactttttgggggccccaatgtgggctaaaattgcccttttacctgggggggaaaagggagggaaggatggttggaggattaaattttggaaccggggtttaggccatttcccgtccctttcccaaactccaaaggcaatgatccctttgggggggcacctaaccccaaggggaagtgaaaaaaaaattttgaaaattttcctgtttccaaaa

SEQ ID NO: 56712 - DNA, 603 bp, Homo sapiens
  misc_feature 550: n = A,T,C or G
ccgggccccccctcggaagtcttctagaattaattaacgcccagcccagcagcctcgtgggaacagtcagcctgcccaagactcaggggagacatggaatctgatcccaggctcctcctcccgagtcctcagcctttgtgtgacccctggtctctcttgcatggtcatgggaagtgtcagagctcccgcagtcctggacttggtctggaatggtgtcaagccactgcccacccaccactgccttcccccttgctgcctctccccgcatgttttcccaggatgccaagaccagccctttcaccatcccctggcaccactccccttcccccaccctaaaggctcagcttagattcccacgctctcctacacctgcgctgcctcaggtccctgccgtggcctcgagccaagtgcgatatccctgactgtctctttcccgatgggcgtgagccccagggggcttcctggtcaccatggtgttcccagctcccagcccaccatggatgctcggatgctgctcacatgaggtgacagctgggccccccacactctntcaggacatgagtgcattggtggctgcccgcatgcggcacatccccttggccc

SEQ ID NO: 56713 - DNA, 504 bp, Homo sapiens
tccaccgcggtggcggccgcttttttttttttttttttttttttttttttttttttttttttttttttttttttttaaaaaaccttttaaaatttttggggggaaaaattaaaaaaggcccaaaaaaattttttttttttaaaaaaaatttttttttttttttttcccgggggggggtaaattttaaaaaaaaaaagggaaaattttttttttgaaaaaaaaaccccccggggggggaaaatttaaagggggggtttccttgggggggggggggaaaaaaaaaaaaaaaatttctggggggggaccccccttttttggggggggggggggggggggtttttaacccccgggggggggggggcgaaaaaagatttttttcccccccccccccccccaaaaattttttttatttttttttaaggggggaaaaaaaaaggggttttttttttaaaaaaaaaccccccccccccccccccgggggatttttttggggggggggggggg

SEQ ID NO: 56714 - DNA, 578 bp, Homo sapiens
  misc_feature 558: n = A,T,C or G
gccccccctcggggtacttctagaattaattaacgcgggggagattctgtctaaccaatggattcttaaaagctgtaattggagagatacagcaatggaagaagaagaaagaaagatttacaaggatgaaagggtctcaatccaccattgctggctttggagacgaagagggccataaccaaggaaatgtgagtggcctctagaagctgaaacagctcttagctgacagccagcaaagaaacagggagaacagctacaagagcaagggactcaatttgtccaacaacctgaataagcaaaaaaaaaaaaaatcagattcttcccttacctctctagaaaggaacacaatcctgtggacaccttgattttaggccattgagaaccatgttggacttctgactacagaactgtaaggtaacaaattggtggtggtttgagcttctaactttgttacagaaatagtattaatggtaaactaatataagatccatacttaactttttcctaaaagactcaaatatattgatttaggaactacataatattctagaataaatntaacttcttaaagtcagcat

SEQ ID NO: 56715 - DNA, 602 bp, Homo sapiens
cgggccccccctcggaagtcttctagaattaattaacgcgggacctctacaagctagtggggggcaaaggtacacccaggacccaaggaactatctatttagaactgaggggtttcccaaggactatgggcatggccaagaataagctggtgaaatcagatccagggactcaacaactgattctctgtttctctctctctctctctggggtatccctccctcccaccccatcttccacagtctctggcatctctatcccctatgaggcaccacgtaagacctcctgcccttagctctcttgctcaccacccaagaacctcaggacagaagcgagagcccattgctcctgctcagctcagcccggctgcggaggaacccttggcaggcagaacctggaggtgtcagaggctcaactcctccatctaaccagcaggctcccagagtccccggaagagcctgcgcagctgaagcagagtgcttctagatggagagtggtcactggggaaaaggacctggccatcaccttccaatacctgctgcctgtctccctgacccatgatctggcaagttaggcacagtcagacatggacagttgatccatg

SEQ ID NO: 56716 - DNA, 556 bp, Homo sapiens
  misc_feature 536: n = A,T,C or G
tccaccgcggtggcggccgctttttttttttttttttaaactttttgaccgtttttattttttttttaaggtcaaagggctggattgggtcttggaaccttcccaaaactaaaagcccccttgggccgtttttcccctttgtaaaaaaatttaaaaactgcctgagggcctttttgcaggggtcccctccaggaacccttgttttaagtgaaaaaagttttttcttggctttccaaggcccttgtaagttccatactcctaaaacccctttaaaaaaggttgtcttgcccccattgggccaaatccccaaaataagggatatttcccctaataaggatttttccaaaggggccctggccaggcccccacacataaaagggggggggggggggctaacccccactgggtggctgagctgggccccccaagtcccttaattttggccctttttgggggtgggggggaacaggggaataaaacttcccctcaaaattttttttcaaaaaaaagagacccttgccccccccccaccaaanaaaaaaaaaaagggtttttt

SEQ ID NO: 56717 - DNA, 516 bp, Homo sapiens
  misc_feature 38: n = A,T,C or G
ctgggttaccgggcccccccctcggaaatacttctagnattaattaacgcggggtggggggtcggttattttataagcaaagaagtacagccagtatgattctgaagcaactaggccacagtagaaaaaagttggagagtgaaatctcaagcaagccaaaaagtgatagatgagttaaaaaaaaaaaaaaaaaaaaaaaaaaaaaaagttgcctggcttggtgcagtggctcatgcctgtactcccagcactttgggaggctgaggtgggcggatcatctgaggtgaggagtttgagaccacactggccaacatgttgaaacccgctctctactaaaaatacaacaattagccaggtgtggtggcgcacgcctgtaatcccagctactcaccaggctgagagtggaaaatcacttgaacttgggaggcaaaggttgcagtgagcggagactgcgccgctgcactccagcctgggtgacacagtgagactttatctcgacgaaaaaaaaagaaaaaa

SEQ ID NO: 56718 - DNA, 415 bp, Homo sapiens
ccccccccctagtacatacttctagaattaattaccgcgggattgcttttaggatgggggataaaaaaggggggggaggtaaaaatttttattcagggggatattatcaaagcaccttcccaaccctacggaaatatatcacctttcaggtccagggttataaaacactaaccatttttaccccaaaaaaaactccctcagggcttttaataatcaaccctcctaaggggcggggggaaaaaagggatcctaaaccccccaagagaaaaaaacccccttaccttactatggacctcctttccctggggcaccattcttttcagggaaaaccttacaggccagaaaagagtggcttgacttttttaaggggctaaaggaaacttatttcaccctaaaaaagtttttctggagaaaa

SEQ ID NO: 56719 - DNA, 462 bp, Homo sapiens
attaattaacgcgggtcctgttttaagaacgaggccacagctgccatcgacctgaaaactgacaacctcatccaggctcccatccccacccatttggatacctgccctgccctgaccatcgcacccgggtttaacactatcatggactaccccagggccctggccctgaacaaaggattattacctgaatttgattctccacccaacctctttgcagctagaggcattttttacgggatggccaaaaatgctggacttgcctaaaatatttccctgaaattccctcctgcccttccctggttttcatcgggagggaaatgaccccaaatttgtccgcaaaatggacttgataccaaacactgggggcaccttaaaattttgcccctgtaaagtgccttacagggtaactgtgctgattgctttaaatgaggaaatgacccccagggggggaatgacacccct

SEQ ID NO: 56720 - DNA, 607 bp, Homo sapiens
  misc_feature 16, 29: n = A,T,C or G
cgggcccccccctcgngggtacttctagnattaattaacgcgggggagtagccagttaatatcaacttagtctttttaagtatgcatgataaaattccgaggttaattgctagaagtatatataatctctaaatgaatagtgatgagagatggtgggataatagggaagaaacaaaattttaaatttgagaaataagcatagaaaaggtggataaaacaaaagatggcaaaacaagtccaaatagatcagtaattacaataaatgtataagtattaaactagcccaaggaaaaattgaatattaaaacaaaccccaatcatatgctgtttacaggagacacatctaaaacaaggacataaagttgtcctgcagctgtgagtaacaatataggtgaatgttaataataatgttgaatgaaaaaaagctggtgtcagaagacatgtacattatgatactccagaagttcaaaaacaagtgaaacttgtttagacatgcggttggctgtctgtatatgtgggttccacatctatggactcaaccaactacaggttgaaaatattgagggggaaaattgtgtctggactaaacctgtacagacatttttcc

SEQ ID NO: 56721 - DNA, 516 bp, Homo sapiens
attaattaacgcgggggtggatactgggcttggggaggaaaaaagagggacctaccgcgggccgcgcaggcccacggtgggcatttgcaatggccctgtcgtgtcccctaaacaggtttctgctcctcagggcccaggaccatttggagtcccccctgccgaaaataaagtctttgcttttgcttttgggaggtcagtttgccagcagtaaaaaaacttatggaaagtccccatttgggattcttacctttccctctgaaaatttggcaaaaaattaaataaaccggacagtgtgtgccaagtctatatttaaactatggggccatggacaatctcctgaggagctgtacagttctttaaaaacctcccctggggaaaaaatggttccatttttacattcggactctacatataaaataaagattcacactttaaataagactttgacacagaaagaaaaactcacgcgaatagatgcccttgattttctgccattgaaaggaaaagtgaattaaa

SEQ ID NO: 56722 - DNA, 465 bp, Homo sapiens
ccgggccccccctcgaaagtcttctagaattaattaacgcgggactttttttgtggcctaacatattaggaaaccttaaatttgtgaaaaaatggaattaaaagattttaaaaatgtaaactatatttctcaaaagaagcaccatgcctggccctgtactgtattttttaagatactgttacatatatgaaattcttctggctcaaatggaagaaaatttttaaaggctaaagctagaagctgtcttgaagatcagtgatccttaattaccttagaaggctcagtacatttttactttgctgttaaaactagttagagggccccacatcagtgatgtccttttagataccatgtgccttctgaaaatagaaaaggttcaaattaaattattctttgcactgcaaatcatttgaatgttacttagggaaaatttcttttctaacaatttctgaaaaaaaaaaaaaa

SEQ ID NO: 56723 - DNA, 605 bp, Homo sapiens
  misc_feature 539: n = A,T,C or G
ccgggccccccctcggaagtcttctagaattaattaacgcggggacagttggcagagcaaatacttgacgatcctgggatgactgtttttttttcaattttgcatgtttttcttgtataaaatatacctaagatttaccctgggatgacttttaaatctctctttttaaaaagtctttgttccacagtattccttgattttctgctatgccatgcattggacaagactaaacatctctttgcaaaagaataacctgatgccttttttcttcgtgtttagggctcaaaatttgggcggggaactggactcactcagccttctcaacgcacgtctgctcggagatcatttgggagatccaagagattcagtatcactcgctcccttgatgatcttgagtggtccacatgtgccaggagatgtgggaatggctacccctgaagtcatatggagaaatggggtcctcatcgcacaccatacacaaacatcatctcacaaatggattaaagacacttaagacctgaaaccaaaaaaactcctangagaaaacacaggggaaagctccatgacatcagtttcggcaatgatttttttttggacatgacact

SEQ ID NO: 56724 - DNA, 444 bp, Homo sapiens
cgggccccccctcggaagtcttctagaattaattaacgcggggtctgggaaacaggatgtgtttcctttttttaaaagccaattgacagattacacctaaatactcctccttttgtatcattcagccttttgttttagtttggtaagttttaagaaatttcagcagcaaagttgttattcagtgggcacgatggactccaaatgcctcaagttatgtatacctgtcccagatgtaaacttcattgtcctttgttggatgatattttaaatggatataaaataaattggtctaaagggctgccctccttgttgtgtttttaaattttagttaaaaactgctacagcttatgactttgtactttaagataattgtattgatcttttttcagattccttgtattttttaataaagtaatcttaaataaaactcaaaaaaaaaaaaaa

SEQ ID NO: 56725 - DNA, 361 bp, Homo sapiens
tttttttttttttgggccgcctaaaaaaaaaaaaaaaaaaaaaaaaaaaaaaaaaaaaaaaaaaaaaaaaaaaaaaaaaaaagaaaaaaaaaaaaaaaaggcccccgggaaaaaaaaaaaaagggggcccccccccggggggggccccccctccccccttggggggggttttttccccccccccccgggccctttttttcccccggggggggggggaacccccggggctccccccattttaccgcctgggggcccctccccctttcccccggggggttaaaaaaaaaagggccccccccgttcccccttcccaaagttggcccccccgtgggggggaagggaaatttcccccctttttttt

SEQ ID NO: 56726 - DNA, 424 bp, Homo sapiens
cccccctcgaaatacttctagaattaattaacgcgggagtgttgaaagaaataggatggaaatagaaatatccaagtagcaaccacaaaaaaactggaatgtctgcactaacatcatacaaaacaaaccaaatgaaggttaaaaatattgaaattatacaaaatatgttctatgactaaaatttaatgaaattagaaataacacagagataggaactatacatatttgtgcaaatttaaaaagttatgctgagtgtggtggctcacacctgtaatcccagcactttgggaggccggggagggtggatcacttgaggtcaggagttggagaccagcctggccaacatggtgaaaccctgtctctactaaaaatacagaaaattagccggatgtggtggtgtgcgcctgtggtcccagctactcgg

SEQ ID NO: 56727 - DNA, 392 bp, Homo sapiens
aataacgcggggtgggggcgggaaaaaagccaaaaatcttagatccgagggcataattgctgggtggaaagacccaaaaaacagatctggaggcggcagcccgggatggaatggtttgggctgggacatgttggtttggtctttttttcccccttggattatgaaaaatcttttggattatacctaattgtggtgattatccgggcggaaacacaaaagggagagaaattgtacctttttgagggaaataatgtttttgatgacaagggaaatagggtttttctataaatttgaaggcaacctgggttgataaaacctatatagtgaaccctcacatattggcttccctctctctcaaaagtaattatatttttctgactaaaaaaaaaaaa

SEQ ID NO: 56728 - DNA, 363 bp, Homo sapiens
  misc_feature 297: n = A,T,C or G
ccgggccccccctcgaaatacttctagaattaattaacgcgggaatgaatgaaacattttgtcatataagattcatatttacttcttatacatttgataaagtaaggcatggttgtggttaatctggtttatttttgttccacaagttaaataaatcataaaacttgaaaaaaaaaaaaaaaaaaaaaaaaaaaaaaaaaaaaaaaaaaaaaaaaaaaaaaaaaaaaaaaaaaaaaaaaaaaaaaaaaaaaacgaccaccacaaaaaaaaaaaaaaacaaaccaccaaaaaaaaaancaaacccccccccccccgggggggccccaaaacccccccaaagaggagggaaatcccccccccccc

SEQ ID NO: 56729 - DNA, 527 bp, Homo sapiens
  misc_feature 27, 44, 56, 70, 423: n = A,T,C or G
cgggccccccctcggaagtcttctagnaattaattaacgcgggnaagaaaaatagnatttatggctcagnaattcagccaggaactggggaaaatggtattatcccatcagcccaaatattttcccatttttgtggtcacattccagagtcttggggaaaagggtaaaagaagcaggggaagaaccagtggtatgttggtaaatgcctctctaaggaaaaaaaagtcctgatttgtagcacttggtgattgtcataaggtaaaaactcctactgtgactgatttcaagctcccagctggcaagctggccacagccacaccactgaaaggctgagattaaaaacctgaaaactaggccaggcacagtggctcatacctgtaattctagcgctttgggaggccaaaggtgggcaaagtggcatangggatgtggagggaggggctgattacttgaggccaggagtttgaaaccagcctggccaacatggtgaagcccagtctctactaaaaatacaaaaaaaaaaaaaa

SEQ ID NO: 56730 - DNA, 516 bp, Homo sapiens
accggggccccccctgcgagagatactgtctataattaattaacgcggggttgtaggatacatttatattaagtataaatacacagtgcacagttttgattgtgtttcttacatttcaagttttaccaataatcttaaatcttaaaaagattaagataatctttaaaaatctaaaatcttaagaatataaagagtattacacttaaagactgaaaaataatgtagagatggcaacccctaaacccatttaatattcttggtcaaatcaagaatattaaattgagaagagtactctgaaatgtaaggatgttggatttggaagcattttctaccatgtttataggtgatactattctattatacaataaatctaacacacatgtacctgaccaataatagtttaatagaatatgaaaatagaggccgggcacggtgcctcacgcctggtatcccagcactttgggaggccgatgtgggcagatcacctgatgtcaggagttcgagaccagcctgacc

SEQ ID NO: 56731 - DNA, 472 bp, Homo sapiens
aattaattaacgcgggggagtaaaacttgcctgctgttctggcccctggtcctgtcttgtcctccagcatggtgtgtctgaggctccctgaaggctcctgcttggcatttctaacagagacactgagggggctgacctccccattggtttgggctggggacaccaaaccacttttttgggagtactctacgtctgagtgtcattttttaaatggaacggaccgggtgcggttcctgaacatatccttccatacccagaaggaaaacgtgcccttaaacagaaacgtgggggatttccggccggaaacggacctggggcggcctgatcccgattactgaaacacccaaaaggacttcctgaaaaacaaccggcccgggggggacacttactgcaaacacaactacggggtgggagaaagcttcacagggcaggggcaattccatcctaaggggactgtgtttccttaaaaaac

SEQ ID NO: 56732 - DNA, 543 bp, Homo sapiens
cgggcccccccctcgaaagtcttctagaattaattaacgcgggcaatcactgtaaatttttattttctatttcctattgataattaaatatgtacataatatagacactgttgtatagaactaaatgaattgggttgctatgcttgagtgggtagtgaaatggaaatatttgatgaatactgagagttcctaaaatgctagagcaaatttccgagggaaaggggggcatcgtgtgtcttgggaaggttgcagcaggttgtttcttcaactccctaagaaatcattgggaaggactcaactgcaaactcgggatcagatacaaaatgggtctttccttcccctctcccccaaaaaataggagcactaaattttaaaatctactcaggtgacagttgctttgcaatgaaacttatcccattgaaattttcagtgttaaataaaaagagatttgtgatatttttaaatataaacttttacatcagtagtcagcagcctgacaattgaaatttggtaagtcgatatattttaaaatattttgctctc

SEQ ID NO: 56733 - DNA, 571 bp, Homo sapiens
  misc_feature 23: n = A,T,C or G
ccccccctcggaagtcttctagnaattaattaacgcgggggtgttgtgctagcgtgccacggcgtctgagtgagtgtaaagcgctggcaatgagatattttagtgtgttcgactcaagcgtggagatagcgcgcactgtagacgcttccgtgtgtgtgtgcgacgtctgtgaaatgtgtaggattgttgtgagcttcaccgaaaatggaaataggtactaatgagcaaaactaggctgttttactaaagcatttagtgaacgctattgaaaaagcaggtaaatccaaacacaggaatgattgcaaagaggagcttcactcccaaggccacgtttgccaccacagcctccccagaattttaggaagggtcagacggctctggccaagggagagttaaccagaccacgcctcatctccagacatccctgaaacttcttcctatggaactttcttctaggcagcgttgccatcccttcctagagtctccccagcttccctcctgtctctggtggccctcacctcacagacgtgagactgactccaagtcctagaactctgaccccagaggtcca

SEQ ID NO: 56734 - DNA, 577 bp, Homo sapiens
ccccccctgtacatacttctagaattaattaccgcggggtgaaaagacatattgcaaaacaggaggtcgggggcttccacaacaaaggatgtggaaaaaaaaacttgcaggatccagcaaaaaaaaaagggatgtgatcctttcaaacctaagtgggtggggagatctatttacttctcccaaagtaaataaaactcttaggattgaattttgccaaccctgggaaaaaaaaacacccaccccatgctaaaactcagggacggggaggggagagtccaggcaaaaaggcaaaaaaatggcagtctaccgtcccccccggaatctcattcagaggggtcaccttgccctgccaggtgacccttgccatggaccctggcactgaaatgatcccttccctacttaattaactacataagttaccacaacactccaaagctacacccaggtggcagggccaacaaaatacaaaaatgggtgatatacaaatgatgttcatcaccactgaattcaactgaatttatctcacaaaacgatcttgtccccctaaaagctcctctactcccacaaaaattacaag

SEQ ID NO: 56735 - DNA, 535 bp, Homo sapiens
aattaacgcgggggggggaggggaaaaaaaaaaaaaaaaaaaaaaaaaaaaaaaaaaaaaaaaaaaaaaaaaaaaaaaaaaaaaaaaaaaaaaaaaaaaaaaaaaaaaaaaaaaaaaaaagggggccccccccgggggggaaccccaattcccccttaaagaaattaatttaaccccccctaatggcccttttttaaaaaacgtggaaagggaaaaaacctgggctaaacaaaattaaatcccttgaaaaaaaatccctttttcccaagtgggtaaaaaaaaaaaaagccccaaacaaatcccttttcaaaaaattgccccactttaaagggaaaagaaaaattgaaaccttaaatttttttaaaaaatccccttaaatttttttaaaaaaaattttttttttaaacaaaagggccaaaatggaaaaattcttttttaattaaaaaaattaccccgaaatggggtaaatttttttcccatttgaaaaaaaaattcctttttaaaaaaacgggaactcaaattaaaaggggaaaaa

SEQ ID NO: 56736 - DNA, 386 bp, Homo sapiens
ttttttttttaaaaaacctgtgccatccttatgaagccaaaaaatgtttgcttttgtaaaaaccttttttgagatttattaaacataaaataacctgaccttatttaaagtgtcctattagataagtttccaccccttggggaaaacttccttcctacattaaaaaaagtaaacatttccttcttccctaaaagggacacaaggcccctcctgataacccctcccaaaaaaaccaccaatcggtttccattttgcatttggaatttttatggaaatgaaatcatatagtatgcctttttttttggccgggcttttttcacttggcataattatttagaaatccatatgcccccatctggaccctcgaataatttctttctttaaaa

SEQ ID NO: 56737 - DNA, 497 bp, Homo sapiens
ggcgggaatgaaaattttttttttactacagaaaagggagcattggggctctgggaaattttatcggggttttctcctggcttttttttccctctgggaaatttggggaaaatcaccctccctacctttcagttttcttttctgggaaacaggaaaactgacccacttatttaatatccagggccctttccggctgggaggggctttgattttaaatgaaaatttatttcaaaaaagatggggccaatcaaattgagtcatccaggcttccttttttagcttctgtttggggagttgtctccaaataaaaggagatgtcccttcccaaaaacttttttttttttcccttacaaaactttttccaaagggcgaggccacagcaaagagatggggccacctaccctttctttatccctttcctttcctttcacccccatcctttaactcttttcaggtccctttccaaacagagtaccctttaccaaaaaaaaaaaaaa

SEQ ID NO: 56738 - DNA, 519 bp, Homo sapiens
aattaattaccgcggggagggaatgggtgctgttaaaaaaggaatgccccacaggtgttaccttggcaaaactgggaaaagtctacaatgttccccaccttgctgtgggctttgttgaaaacaaacaagttaggggcaaaatttttgccaaaaaattaaatgtgcgttttgagcactttaagctctttaagacccgatatattttcctgaaccgtgtgagggaaattgatcaaaaaaaaaaagaacccaaagagaagggtccctgggttaaactaaagccccagcctgctccacccaaaaaaccactttttgtgaaacccaatggaagggaccctgacctgctgaaacctattccctataatttcatggcataatgggtgtaaaaaaaaaaaataagggacctctgggctccaaaaaaaaaaaaaaaaaaaaaaaaaaataatttaaaaaaaaaaaaaaaagggcccccccccgggggggacctccattcccccttatggggagtctttttcccccccc

SEQ ID NO: 56739 - DNA, 238 bp, Homo sapiens
gggccccccctcgaaagtcttctagaattaattaacgcgggggatcgaatggtacttacaggtacctctcttagggactctgtgatccctaaaatatcagaagaaaatgtctgtctttctgtccaaatatctacttgacttgggggtaagtcaaaaataaaagtaggtgtccaaggattttactttttggcgaaaaaaaaaaaaaaaaaaaaaaaaaaaaggaaaaaaaaaaaaaaaa

SEQ ID NO: 56740 - DNA, 429 bp, Homo sapiens
taattaccccggcccggcgggggtggggggaacgtggggggggctgtgtttcacgtgactaagcagtgcccgccgccgtcaccagttatgctttcactccgtttccagagaccaaatgttttgctggaaaaggggacctgtgtctgggtctgccctgaaaacttaccaacaaaaatcctcttttctgggctacggattaaccaaaaatggccaagtttttttcagttaaacagtccctttacttgtgtagtattggaggaaaaaattcaataaccggttgatctcgtgaaaaaaaaaaaaaaaaaaaaaaaaaaaaaaaaaaaaaaaaaaaaaaaaaaaaaaaaaaaaaaaaaaaaaaaaaaggggggcccccccccgggggggacccccattcccccttaaggggatttttttcccccccccccccgg

SEQ ID NO: 56741 - DNA, 548 bp, Homo sapiens
aattaattaacgcgggcagctaccagtcgtttatgtgcagccttcttatcgttctgcattaatgtggtgtgggagtattattcatacggcttggactttaccaagaagggcgtatttaagtttacagttaacttccctgataactatccaaagggggactgcccaccctgggggttcaattttcctgtttttcacccgttagtagaccccacctaaggtgacctggatgtaaaaagagcttttgcaaaaggggggcggacccttaatcattttgggcgggtttaaatgtatgcagggagagttttttacaaaattgatacagcaggccccctgaacccagaggctgcagtactgaataaaaaaaatattcatcttttaaaaagtaaatttgttgacagtgtaaaggtgtgcactgctcgtttgtttgaccaccctaaaataaaaaacccctatgcatttagcttttctccatggaatccttctgtacatgataaacccaaaaaaaaaatgctgactcaaaaaaagcctgaaaaccagcacaataaaag

SEQ ID NO: 56742 - DNA, 453 bp, Homo sapiens
cgggcccccccctcgagagtacttctagaattaattaacgcgggatatcaaatataccgtatactttagaaaatgtctcagttgcttttattaaataaaatgttgatggtttgaaaaattaaaaaaaaaaaaaaaaaaaaaaaaaaaaaaaaaaaaaaaaaaaaaaaaaaaaaaaaaaaaaaaaaaaaaaaaaaaaaaaaaaaaaaaaaaaaaaaaaaaaaaaaaaaaaacaaaaaggaaaaaaaaaaccccccaaaaaaaaagggggccccccccccccggggggaacccccccccccccccaggggggccctttcccccccccccccccggggggtgagccccacaccggggggggggccccccccggccccccccaaaaaagaccccggaacccccccgccccttgggggggggggggataaaaaaggggcccccccccccccccccccc

SEQ ID NO: 56743 - DNA, 424 bp, Homo sapiens
cgggccccccctcgaaagtcttctagaattaattaacgcgggcatctgcatggtatcccaaataaataaaatgtgccactacccttgcaccaaaattattttatgatgggtaaagttagacccttgagaggtttttttttaaaaaaaaaaaaaaaaaaaaaaaactttcccaaaatgcctctctgtaaagccaggatcagaatataggtgtcctaacttcctatctaagagttacgaatttctaactcagtctttgagagaaggtgtttatcctgaaccagaaactcaatgatgtatacctgtttaggtattaaatagttgtgtttatatgcccaaaaatttgactttaggtatatgtgatatgctttggttccgatcaagcaggaggtcataagtttactcaaaagtatccaaaaaaaaaaaa

SEQ ID NO: 56744 - DNA, 190 bp, Homo sapiens
  misc_feature 174, 175, 180, 181: n = A,T,C or G
cccccctcggaagtcttctagaattaattaacgcgggtacaatagaatttctggagtacagattaaactatttgcactaacacacgtgacgtgcatgatttaataaaataactttactctccctacgcatgtttgagttgaatatcattgaagttcttaatgctgactctactnnattgnnggttgttaa

SEQ ID NO: 56745 - DNA, 332 bp, Homo sapiens
ccgggccccccctcgaaatacttctagaattaattaacgcgggagtgaagagagcacggatcggatgtcccttcagaaacgaagcctcattgcggaagtcctggtgaaaatattgaagaaatgtagtgtgtgacatgtaaaaactttcatcctggtttccactgtctttcaatgacaccctgatcttcactgcagaatgtaaaggtttcaacgtcttgctttaataaatcacttgctctccaaaaaaaaaaaaaaaaaaaaaaaaaaaaaaaaaaaaaaaaaaaaaaaaaaaaaaagaggcggcccccaaaagaggaactaaaaataaatcc

SEQ ID NO: 56746 - DNA, 617 bp, Homo sapiens
ccgggccccccctcggaagtcttctagaattaattaacgcgggataggagagacttagcagaaaatacttggcttgccagggccacgttctacttcattgctttcttttataagtgcaaggagttatttccatcagttgacatagatattattcactaaaattttcagcagactcaaaatagagaggagactttaaacttacatgttagcataaaacagacttctctctcattgcatgcactagatcaatattatcatctgtattaagctatctgaatttattcgagacattaagaaaaagacagtacatggtgggaaagctgcacatttctcacaaggaaaaaaacattctatatttgtagcagaaatcagtggtttgaaaagtcatactttgcagatatgaacctgaaaatcaaagtgccattgttaaatcatcctaaagtgtactgtgggtattctccagcatacttgaaaatgaataaagttagattgctcacattgaagctaatggttgagacaagacacctgccagagtgaagtttgattcctatgggtgagaagatgtagatgactattgttctcactaaagttctaaaataatagcaagtgtagagaag

SEQ ID NO: 56747 - DNA, 551 bp, Homo sapiens
  misc_feature 27, 43: n = A,T,C or G
cgggccccccctcggaagtcttctagnattaattaacgcgggnaaatccaaaacaaagttgaaaatcaacacaaataaacttctaaagcaatccaaaaaatggaggaatagataaacatctttaaaagaaatcaatcagagcatttggaattgagaaatttgaaattgaaaggaattgaaatactttcaagagaaaatttaaaaatacaattgaaagcttcaccaattgactcgaccaagctgaagaaagaatttcagagcctgaagactggtcttttgcactaacccagttagacaaaaacaaagaaaagagaattttaaaaaatgaacaaagtcttcaagaaagataagattatgtaaagtgaccaaacccatgaattattggcattgatgagagagaaagagaaaaagtaaacaatgtgaaaacatatttaagggaataactcaagaaaattaccctaatcttgctagagaggtagacatctggatagaagaaacccagagaacacctggcaagatactatacaaaatgaacatcatcaaggcatata

SEQ ID NO: 56748 - DNA, 472 bp, Homo sapiens
  misc_feature 23: n = A,T,C or G
ccccccctcggaagtcttctagnattaattaacgcgggagagagggagagctaatatttactgaactttacactaagcatgttatataccttatttgatctcatttaattctcatgactgctctctgaggtagaaaccactaaccttatttgatctcatttaattctcatgactgctctctgaggtagaaaccactatgatctccatgttacaaatgagaaaactgaggcttagacagcctgagataacacagcaaataagcagaggagccaaaacttgaacctattcaggctgaccgtagagcttactcccttaaacaagtatgtgataccatttttcaataagaacaatacagctccaccttacgttttgctagtcaaaatgtcttcacctcaaaatgtcctcgcctcttgtgttttccttaccaaaaactctctacacttaaaaaacaaaaaccaaaaaaaaaaaaaaa

SEQ ID NO: 56749 - DNA, 192 bp, Homo sapiens
cgggccccccctcgaaagtcttctagaattaattaacgcgggaggcggagcatgtggtgagttgagccgccggacaagggggaaaagagctcggggggcgggttcggcaccattcatattcttccgctcggtaggaggtggaggacacgaccctcaaccgttgctcctgtagcttccgagtcctggtggtgt

SEQ ID NO: 56750 - DNA, 152 bp, Homo sapiens
  misc_feature 139, 140: n = A,T,C or G
gggtaccgggccccccctcgagagtacttctagaattaattaacgcgggaaggaattataggactaattctctttttgttgtgtgtattttattccagcatccgtacttcaaacatagtcaggttaataaactgactcnntacagtgatgaa

SEQ ID NO: 56751 - DNA, 485 bp, Homo sapiens
  misc_feature 25: n = A,T,C or G
ggccccccctcggaagtcttctagnattaattaacgcggggagtaaatgaatacagttggccctctgtatccagaggtttcctatccgaggattcatccaactgcagactgaaaatatttggggcccacgcctataatcccagcactttaggagactgaggcaggagatcatttgaggccaggagtttgagaccagattgggtaacatagtgagacatcgtctctgctaaaaataaaaagctagctgggtgttttggtgcacacctgtagttccagctactcaagaggctgaggtgggaagatcgcttgagcccagctgttcgaggttgcagtcagttaagattacactgctgtggtcaggcgtggtggctcatgcctgtaatcccagcactttgggaggctgaagctggcggatcatgaggtcaagagatcaagaccatcctggctaacacggtgaaaccccgtctctgctaaaaaaaaaaaaa

SEQ ID NO: 56752 - DNA, 590 bp, Homo sapiens
  misc_feature 346, 486: n = A,T,C or G
cgggcccccccctcggaagtcttctagaattaattaacgcgggtactctagtagggacagggtttcaccaggttagtcaggctggtctcgaactcctgaccgcaggtgatctgcttgtctctgcctctccaaagtgctgggattaaaggcttgacccaccatgccccctcccggaaaatatctttcaaaaattaaggtaaaattttaaaagttttcaaaaaccaaaagctgagagaatttattagcagtaaacctgcaccaaaaaagtccaagaaagttcttcagggaaaaaagtatcaggtgatgggtaacatagatctacacaatgaaatgaaggataccaganatggtaaatatatagatatatattacatacattttttcttattttaaaaatagggaaattgaatatgaaaaacacatgcatgacaatagtaccataaagggctaagggtgggggatgaaactaaaggtttaaatggtctngacattttatactagggggtatattacttgtatgtagactacactatgttcaaagagcatattggaaaccttaatttaaatattgaaagtaaagagggttagct

SEQ ID NO: 56753 - DNA, 604 bp, Homo sapiens
cgggcccccccctcgaaatacttctagaattaattaacgcgggatctataactgatgggtttagtaatctgctcatttcttgctctgaaaattgtagtcagcaaaagagatcatggaagaaatcactgtaatggtagtaatagtaacacatgccatttgtattgtgccttaggtttaccaggtgtttccaaatacattagcatatttgatatgtgcaggactagataccttgggacctgccacactccactttcaagatatgtattagcttcattagaattaaagggacttgaactcaggacctgcagcctattctttatccacatgtctctggtagggctacatccagatcacaccatgacttcttatagagcaagagaaaataatattattatatcttcctttgcctaaaatctctccacttattcttttttatgattctgcaccagttcactgggttattctatgattccatatttttttttaaaaaaatcatatttaaaatgaacttacaatgtctgaattttcctggccttgagtcacagaagtaatatgtttcagatggctgcccaatatgtattatcatgtaatacatatctgtgtc

SEQ ID NO: 56754 - DNA, 503 bp, Homo sapiens
ccgggccccccctcgaaagtcttctagaattaattaacgcgggagcaataatcagtggtgcttttgtacctaggttttatgtgattttaatgaaacatggatagttgtggccacctgctgactatttgtggtttaaaataaaaggtttacttgtctgcagaaaaaaaaaaaaaaaaaaaaaaaaaaaaaaaaaaaaaaaaaaaaaaaaaaaaaaaaaaaaaaaaaaaaaaaaaaaaaaaaaaaaaaaaaaaaaaaaaaaaaaaaaaccaaaaaaaaaaaaaaccccccccccccccggggggacccccaattcccccataaaaggattttaaaaccccccccccccgccccttttttaaaaaccgggaaagggaaaaaaccccgggtgacccaaaaaaaaaacctttgaaaaaaaacccctttttccaagtggggtaaaaaaaaaaaagcccccccccattcccccctccaaaaatttgccccccctatgggggaaaaaaaaa

SEQ ID NO: 56755 - DNA, 569 bp, Homo sapiens
cgggcccccccctcggaagtcttctagaattaattaacgcgggcagagttgaatgtaataatgtttggtatttaattcttgataattcttaaccaacttttcctgttacaggagagaaagaattgcaaatgccaggcatctgtccactttagccctcctccaatgctaagaaagagggatggtgacgtatactacagagacgcaaatgaaataccaaacagtcttgaattacaagaaaaaaaggggatttttttttttttctaatttcagacttggctttttacttagaggacattctgatttgctctcagaaacatctgatttggggttaaactaggcggctggaggatgtttacagctttgaggcttcaaataagtttccatatgcagggagtaactttaaacaatgtttgaataattaactgctaagtcttatattttatgtgtatctatttcatcctctgtctctttcttactagaataccatataagaatattttctctgcagtatttatatttatactattttgctatgagtggcctttgtattttattatatgcattaaata

SEQ ID NO: 56756 - DNA, 324 bp, Homo sapiens
attaattaacgcgggcaacgatttctggctagtgccacgaggtttacttgactgttgtgtgaaaagctgataagaaaaccatccagaaaaaagctcttcgttttacaaacatgaaaataaaacatgtaattttggattatgaaaaaaaaaaaaaaaaaaaaaaaaaaaaaaaaaaaaaaaaaaaaaaaaaaaaaaaaaaaaaaaaaaaaaaaaaaaaagaggccgcaaccagaggaggaacaaaacatcccccaaaaaaaaaataccccccccccccccccgggggccccccatttccccccatgggaggggcaaaaccccccc

SEQ ID NO: 56757 - DNA, 528 bp, Homo sapiens
cccccctcgtagagtcttctagaattaattaacgcgggatctttaagcttatcagttatttgtccaattaaacacttttcaccagtatttagtccgagttgtacagacgatgtatttggattttgtcatggttcatctacagactcaaaacataatcattttaaagtaccttgggagtgtgtagagtaacttctataatagctttatgatcctgatgatgttttttaaacacaataaagttggatcttccatgttacaatcacagaattaaaaccagtatttaaagtggaaaagtattaaaatattatggacaaaaaaaaaaaaaaaaaaaaaaaaaaaaaaaaaaaaaaaaaaaaaaaaaaaaaaaaaaaaaaaaaaaaaaaaaaaaaaaaaaaaaaaaaaaaaaaagaaaaaaaaaaaaaaagggggccccccccgggggggggccccaattcccccttaaggggggccgtttacccccccccactggccgggtttttaaaaatgggggaaggggaaaaccccggg

SEQ ID NO: 56758 - DNA, 625 bp, Homo sapiens
cgggccccccctcggaagtcttctagaattaattaacgcgggggctcttccaccatagtaggacacagtgagaaggcaccatctaccaaccagagggtgggtcctcagcagacactgaatctaccagtgccttgatcttggacttcctagcctccagaaccgtgagaagtaaatttctgtttatttaaacagtcaagtaaaatcaagctgggtaatcatggcagaaggtggatttgatccctgtgaatgtgtttgctctcatgaacatgcaatgagaagactgatcaatctgttacggcagtcccagtcctactgcacagacacagagtgtcttcaggaattaccgggaccctctggtgataatggcatcagtgttacaatgatcttggtagcctggatggttattgcattgatcttgttcttactgagacctcctaatctaagaggatccagcctacctggaaagccaaccagtcctcataatggacaagatccaccagctcctcctgtggactaactttgtgatatgggaagtgaaaatagttaacaccttgcacgaccaaacgaacgaagatgaccagagtactcttaaccccattagaactgtttttccttttgtatctgc

SEQ ID NO: 56759 - DNA, 451 bp, Homo sapiens
tccaccgcggtggcggccgctttttttttttttttgaaaacctcttttaaatatttgggggggacccccacaggaattaaaaaaccttggaaaggggtacccccctcccccccggaagtgccccaaagggaaaaaggttccctgggggaaaggaaccacaaaggggcccctttgcaaactcagggcaaaggaaatcccttcggtcctggaccctgtaacccttacaggagaaaacccaaccgtgggggaactggttccaggcccacaggcaaagggcaaaagggttgaacacaaacccacaaacctcctggggtccctcctttttctcgttggcctttttttgcttctgctgaataatctccaagcccctttgtttgcgggcggaaaaaaaaaccccttattttgggcgttttcctttaaccaagtcgctctgttttttaatttttttttg

SEQ ID NO: 56760 - DNA, 632 bp, Homo sapiens
  misc_feature 614: n = A,T,C or G
gccccccctcggaagtcttctagaattaattaaccggggcatcaagaaaagcacctctcttcacctgaaagctttgaagactagagacacgctttacacgttttaacaagtatattgagtccacgtttggtagcatcagttgttgagttaaaaagaaaattattgcatttgatctggatggattttaaaagaatataatgttcaatattaaaaggataattcacatttgccaccataatgttcttttttatgtaaaaagaagaacttggagacattaacatgaaaaagtcttttatcattagctcatgtatctgaggaagagcagctgtctttttatatgttttttgacaaatcatattgtattcttttgtacaaaaaagaactacttgtattctagaagaaatatgaaatgcttaatttataagcgggctggagattttttccaatattgttttctttgaaaatgaaaggggatcatctattttagttttggggtctgggaactttttgaaaatttaatttgtggaccaatgttttgtgaaagctaaagagggcaggggttaaaatagggcttgaatttctcattctgtatagaccagcaaacttccctgtgncaggcaagtttacatcac

SEQ ID NO: 56761 - DNA, 473 bp, Homo sapiens
tccaccgcggtggcggccgctttttttttttttttttttttttttggataaatggggggtttttagccagggaattttggtccctgggcttaaaaacccttgaaattaaatggaccccttcggggaatttctttttaccttagccaataccttaaaaactttgggaaaatgccgtttaaaaaacccccccaattaaaggggatggtaaacctttttcccatttttaaaactttttgtaaaaactttgggttttaaaaaggggttcctccgggaaaaaacctaggggaaccggaatttccccccttgcccggggtttcggggggcaacgggtaaaaccggccatttttttttcccctgcgggttccctaggggcctttcctaaaaaaaatacccggaccctcctgcttttttaaatttttaacccaccccccgtttcctaaaattttgagaaaaaaaccaatttttaggttggg

SEQ ID NO: 56762 - DNA, 196 bp, Homo sapiens
cggggccccccctcgaggatcttctagaattaattaacgcgggccagatataatgccagaatataatatgcaggcaatcgtggatgtctctgacaaagtgtgtctcaaaaataatatacttttacattaaagaaatttaatgtttctctggaaaaaaaaaaaaaaaaaaaaaaaaaaaaacaaaaaaaaaaaaaaa

SEQ ID NO: 56763 - DNA, 605 bp, Homo sapiens
cccccctcgagagtcttctagaattaattaacgccgggggaaaactaaaggacatgaggccaaattgtttaatttctgagtttgttttctcatccaccatatgaagttaatcatgtataattgcactacaggttatacacataaatattactgtattaaatacctggtggctatatgattggagaaagtaaactagggcctcttcggatgcatctagtaagaggaatccagtagaaaggcactgaatcttggctgaagtcccataggtttttttttaatagatgtgaatagtttttataaaagactgaaaatggaggttaatatacctattgtttgctaatttttcataaaatacactgatgttatttttatgttcaagctgtttctcagctggattactaaccaaaagttaccacgttatgtggtaccacaccacactttgtgacaaatagttttaaaaataacacgcaacaactatggctgttatgcttttaatggaagcagatacaaaattcatcaatgcaaaagaatgttttacatactcattaacatagtgattaatgtaaattatattttgacttataaaatacagtgtgtttggcctc

SEQ ID NO: 56764 - DNA, 477 bp, Homo sapiens
cccccctcgagagtcttctagaattaattaaaagagctgtgctgtgaattccacaacttctgttaaataatttgtattccattatatatattttgcacatctcaggggaccataatgaacatatgaaagggggggggggtgccatcaaatagagaaaacaaatagaagaggtgaatggagactagctggataaaaataacaaattacttcttctctgatgttgtgaaggtcaggttcaggaagcatcaattcacagttaatccggagtaacaatgatctgaacaccagctgttcccaggtccctctttttcatagcccaaccagcatctaaaatgtaaatttaaattacattgcagtcaccatggggagaagaaacctgttcagtggaagcagaagcattgttccttttttaggttggcgcagctttgcaaaactctacccaggataaaccacttatcaccaccaagtgtacttgaa

SEQ ID NO: 56765 - DNA, 501 bp, Homo sapiens
cgggccccccctcgaaagtcttctagaattaattaacgcggggagcagggacaaggcgattgcctgcttctcatctttatagaaggggccttgagaaagacttcttgtgaagtgatacagaccatcgtttggaggtgctcttaacctttttccaaaatgacatggctttttgtctcaggggtactgaagcaggactcagcatgtcagcaacaggctcagaagagagatgagttttcagtgggacagagtcagggcatctgagccagggaaagtgatgaattgtacaataaagcccttttgaatctgctctcctctggcttatttcccctaaggcatgtgagtacactgcggatctggttatttttcttatttattttctgcattgagtaatacaatttttgagactcctatgaagagggtatctaatgtacatgactctgtaagtacaatattatgatctggagtgcgaagattgtccttctgatggctcgagtctgaaat

SEQ ID NO: 56766 - DNA, 255 bp, Homo sapiens
cgggccccccctcgagaatacttctagaattaattaacgcgggtatatcaaagcctgaccaagtggaataaggaaaatatccaactagggttctctctctagctttcttgttccacctaaggggggtaaaaaagctgagaagcatttgtaaaggtgaaagcccaggggcactgtcccacaaaaaaacctgagcctaatcacaggactacatacagactattctccccgctccacaacactcatcttactacaatc

SEQ ID NO: 56767 - DNA, 594 bp, Homo sapiens
cgggcccccccctcgaaatacttctagaattaattaacgcgggattcagataatgagcttttggagaatatctttttcctatcactagcaaagatttacctgggaactgtctaaagtctacacacatatttccaaagcctttaaataccaactgcagcatggagagagaggggtggcagaagctgaaatgcctcaaaagccatttaagtgttacgttgcaggattttcagtccttctcgttatgtaaaagtagataaatatagacgttattctcaacactaccctatagtatcacagtggtccaaatgccagagcttacagataatgtcatcacagtgcctagaaactcgaactgtaatatatcgtaacattttcttggtgtttcttaaagtttctttccacaatacaaggtcctctctgcctcttgtttcttggagagttcaccccactgatgagtcttccttccctgttggactcagtcatttggggaacagtcttagaagcacatatcaaccaaggaagaaacttcctggatatctattgcacacttgcccaggtctaataaacactaaaggggggaaattgaaaggagct

SEQ ID NO: 56768 - DNA, 548 bp, Homo sapiens
ccgggccccccctcggaagtcttctagaattaattaacgcgggacacctccaaggatttctaccaattatttaaaaaaattaacacaaattctacaagtatctttcagagaattaaagacaaacaaacacttcacaatttatttaagaagctggcattactctgatacttaaaaaccaaaacgaaacaaaatctacagaagaatatccctattatacatagaaacaaaatccttaatgaaatattaacaaaaacaattcaactataacaattcaaattcaattcaaataactcactatatttgattatacactgtaaccaaataaagtttattacaagaatgcaaggctggtacaatattcaaagatcaatgtaatctaacatattaacaagttaaagaaaaatcacatgataatatcagtcaagaaaaagtatttgacaaaatttaacatccattcattatatatattccaagaaacatagagacagaggaggactttcttaacttgataaagagcatatagaaacaataacaagaaaagcaaaaaa

SEQ ID NO: 56769 - DNA, 290 bp, Homo sapiens
  misc_feature 24: n = A,T,C or G
gccccccctcggggtacttctagnaattaattaacgcggggaagcgccagctggcaccccagtcccgagctcctagctaggtcacgagcgtgccctgcaaatcctaggatccgggtgccgccagcaccaaatcaggggaaggccaacacgctgtctcggctggaggagctgctgaaacagctgaaggccgtggaggatgctcttgcacgcaagcaggccaaggatccctgggaaagcataggccgtgccccacaccggactggacgcatttttatacatagggtaagcgc

SEQ ID NO: 56770 - DNA, 192 bp, Homo sapiens
  misc_feature 16: n = A,T,C or G
cgggcccccccctcgngggtacttctagaattaattaacgcggggaaggataataggttgaggcgaccaacctaccgaggcctggtgatcgctggttgtccaagatagaatcttaattcaacggatgatacgcccacagagccctctaaatgcccttgaaagtaagactgttagtccagagaggatcagctc

SEQ ID NO: 56771 - DNA, 394 bp, Homo sapiens
acttctagaattaattaacgcgggtggcagcaagcaaaaagagatcgtggaggaaaactgccccttacaataaacatcagatcttgtgaaacttactatcatgagaatagcaagggaaagacctgcccctatgattcaattacctcccacatggtccctcccacaacatgtgggaattcaagatgagatttgggtagggacatagccaaaccatataattctgcacatggcctcttccaaatctcatgttctcacatttcaaaacaaatcatgccttcccaagagtcccccaaagtcttaactcatttcagtattaactcaaaagtccacagtccaaagtctcattgagacaaggcaagtcttttctgcctatgagcctgtaaaaaaaaaaaaa

SEQ ID NO: 56772 - DNA, 445 bp, Homo sapiens
tccaccgcggtggcggcccgctttttttttttttttttttttttttttttttttttttaaaaaaaaacctttttttttaaaaaaaaggaaaaaacccccccaaccccaaaaaaaaaattttttttggggggcccccccatttggggtttttttttcccaatttttttaaaaaaaaaaaccccccccccccccttttcccctttttttaaaaagggcccaaggggaaaaagggggtggaaaaatccccccaaaaaaaaaagggcccgggggaaaaaaaatttccccccccaagttttttagggggggggggaaattttcaaaaaaaaaaaaaaaaaaaaaaactgccccggaaaaaatttccccaaggttttttaaaacctttttttttttgcccccctttttaaaggggggggaaaaacctagaaaaaaaaaaacccccttttta

SEQ ID NO: 56773 - DNA, 549 bp, Homo sapiens
  misc_feature 494: n = A,T,C or G
cgggcccccccctcggaagtcttctagaattaattaaaattaaataaaatggtaaactcggttgcttcctgcactagccacatttcaagtgcccaggagccccatgtggcaaatggctgtcacgatgaagaatgcagatgacagggcctttcatcattaccaaaaatcctactggacagaggcactgctttcaccattcccaccaaaaagcagagcttctccgatgagagtaaaagcaagattccggccaggcgtggcggctcatgcctgtaatcccaacactttccgaggctaagataggaggatcacttgagcctagaagttcaagatcagcctgggccacacagtgagatctctttctataaaaaaataaaaattggccagctgtggtgatgtacacctgcagtctcagctacttgaaatgctgaggtgggaagactgcctgaacctgggagatcgaggctgcagtgagccttgatcacaccgctacattntagcatggacaacagagcaagagaccctgtctcaaaaaaaaaaaaaaaaaaaaaa

SEQ ID NO: 56774 - DNA, 451 bp, Homo sapiens
tccaccgcggtggcggccgctttttttttttttttattttttaaaattaatttggcttattacggaaaacaccccacttatttcacctaccaaaaaaaactgcttcagggcgtttaaaatgaaaggcttccaggcagttttttgtttaaaaaaccctaaaaaagggacaaggctaaaacccccaggatttctaccctttaccaggccctttttgggttggctggaggacctttgaaaaacatggaaaaattggtgctggaaatccccggggctattcctcattgttattacaaagtgaggttctttgtgtcccccctggtttaaaaacccttttccaatattgataaaatagtccccccttaaaaactgaaatggcccaaacccaaaaagaaagcccaactaaatcctcaaaaaacccttttagggacaataaccgatgaggaaaaaatgg

SEQ ID NO: 56775 - DNA, 229 bp, Homo sapiens
cgggccccccctcgaaagtcttctagaattaattaacgcggggggctatgtccgctcctcggaccttagtgggtgcgcccagaacaaacacactacaagttgtagatccatgaatagcctactaaagccctacgatctctactattgtcatagattacgcttctgcctcctgccagacacacaacctctcaataaaaaatacatgtacttactgaaaaaaaaaaaaaaa

SEQ ID NO: 56776 - DNA, 429 bp, Homo sapiens
tccaccgcggtggcggccgcttttttttttttttttttaaaaaaaaattttctttttgcccccaaaatgggaagggggggggggaaatttgggttaattgaaccttttgcctccagggtaaaagaatccccccaccctaaccttttaaagaggggggaataaaaaattttgcccaccaccccaagatttttttttttttttttttgggttttaaaaaaaaaaaattttttcccctttgggccagggttttttaaaacctttttttaaaaaaaaattggggccccggccccccaaaagggggggaataaaggggggaaacccggggccccccttccttttttttttaaaaaaaacccttgggttaaggggggcccccagggttcccgggaaaaaaaaaaggggcctcccccccccttgttgggggaaaaa

SEQ ID NO: 56777 - DNA, 323 bp, Homo sapiens
  misc_feature 26: n = A,T,C or G
acttctagaattaattaacgcggggnaaaaaaaaaaaaaaaaaaaaaaaaaaaaaaaaaaaaaaaaaaaaaaaaaaaaaaaaaaaaaaaaaaaaaaaaaaaaaaaaaaaaaaaaaaaaaaaaaaaaaaaaaaaaaaaaaaaaaaaaaattttaaaaaaattaaaattggcgccccccccgggggggggcttttttttcccttttttgggtttttttttgccccccccttttggtttttttttttaacccttttttttgggaaaccttgggttttccccttttttttctttggggaaccccctttttttttggggttttttttt

SEQ ID NO: 56778 - DNA, 577 bp, Homo sapiens
  misc_feature 28, 562: n = A,T,C or G
cgggcccccccctcgaaatacttctagnaattaattaacgcgggctttcagattcagaatcaactgcactcttgaaagtagggatggaagtttttaagccactctcatccctcccaatagtttgaaataaatgttgtgtataaaaaaaagaaaaacacaaaaacaggccagctgttgcatctcagcggggcgcacatgttatccacaagcaatggacctttggggaagggggagtttttagtttgttttacaaatttttcctgcaaaagtggaatcactgtattttcattttaacttatatttgaaattttatttagttcttgaagtagatctgcttcttcatcttgacatgtaatggtcagttgtacgtaatgtatttatatgttaatttgttatgtatatagatgtgcaagtcttgtcagaattggcctcagtgtagttaaagggcagaaggggaagatactgactagtcatagaaatacctcattcgcctgtgggaagagaagggaagcctcttcagggtgagtgaatggcaaagcggttgcttctggctcctccttcncctgtggtcttggaa

SEQ ID NO: 56779 - DNA, 458 bp, Homo sapiens
tccaccgcggtggcggccgctttttttttttttttttatcacatccacataactttttttatagtttgttatcatggttctattacattattataaatctctggcttggctaaatttatcctttatcctttatcatgggttttttttttgggaaaaaacagggtttaagggttgggtcctttggggtttcaggattccactggggcccttgaaatgtttctcccaaaaataggggggaactcctgtaaccaaaatcaaaggctttccaccattcaaaatggggaaaaaaccaattccaagtttaagggaaaactttcctttgaattcccagctttcttcgaccttaaaaaacaaccaatttttaagcccttttcttgaccattattcggaacccacattctctgcttctgatgggacccctaaattttttttctttttcggggggaccctctccacaa

SEQ ID NO: 56780 - DNA, 146 bp, Homo sapiens
  misc_feature 17, 101, 118: n = A,T,C or G
ccgggccccccctcganagtcttctagaattaattaacgcgggtaaattacaaagaaataggtagattgtatgaacatacccacaaatgcctatgatttangttaccaatgtattctnttctcatttgggttttgcttctgtctgt

SEQ ID NO: 56781 - DNA, 268 bp, Homo sapiens
  misc_feature 71, 72, 73, 74: n = A,T,C or G
cggtggcggccgctttttttttttttttggggaacactttagaaaaacttggggagaaaggttgggttttnnnnaagaaataaaacccccccttggggcccagtgaacccttctttggaaaggggcccaccaaattctaaaaatcccccccaaccaaatttattcagtaacccaaaccccccctttcccccaaaaccctatcaggggggggggggtaaaatttaaaaaaaaaaaaaaaaaattttaaaaaaatcaacaaaaaataccc

SEQ ID NO: 56782 - DNA, 307 bp, Homo sapiens
gttggttccagtgccatatggaaataacaactttaaggggttttttttttttcttttcggaaaccatttgtaaaacactcaaagtattgtttactgtatccagctttttttttgggatcctttgggcctttattacagggtgcataattcctaaaggccacccttttttaaggttttggccatccaccctaaaaactgttcagggaaaaaaggaaaacccatttccaagtttaaacgtttaataaggtctaaaaataaaccttgcttttaaaaaaaaaaaaaaaaaaaaccggccccccccgggggg

SEQ ID NO: 56783 - DNA, 428 bp, Homo sapiens
  misc_feature 24, 304, 305, 306, 307, 308, 309, 310, 311, 312, 313, 314,315, 316, 317, 318, 319, 320, 321, 322, 323, 324, 325, 326,327, 328, 329, 330, 331, 332, 333, 334, 335, 336, 337, 338,339, 340, 341, 342, 343, 344, 345, 346, 347, 348, 349: n = A,T,C or G
  misc_feature 350, 351, 352, 353, 354, 355, 356, 357, 358, 359, 360, 361,362, 363, 364, 365, 366: n = A,T,C or G
gccccccctcggggtacttctagnattaattaacgcggggtacttagagtttctgtttgattcttttttaataaactactctttgatttaaaaaaaaaaaaaaaaaaaaaaaaaaaaaaaaaaaaaaaaaaaaaaaaaaaaaagcggccgcccccgcgggggagctccaaattcgccctatagggagtagtttaaaaacgcgccccctgccccccgggggacccccccttgcccgggaaaaccctggctttaccccccttaattggcctggggttaatccccctttcgccgggtgaccccttgnnnnnnnnnnnnnnnnnnnnnnnnnnnnnnnnnnnnnnnnnnnnnnnnnnnnnnnnnnnnnnngggcccccccaatatttctttaaaaaacggggcaaatttttgtgggatagggtcatttttta

SEQ ID NO: 56784 - DNA, 498 bp, Homo sapiens
ccgggccccccctcggaagtcttctagaattaattaacgcgggggacgcatccgctcttggaggaatatatgcactgcaatagtgcgcacctcaacattgtataaatatgtaacagacagtgtaataacgtttctttagtttgaatgtgcacgttgcagagctaatcaatgaaatgaccgagactttaattataatgaaaataagaaacttgactattgctagagagttatactgtggatttttatcctgggtaaaatgggacaactacgtttgtatatgtgtatgttgctatgcaattagcattgccttcttggttcaaggaaatactttcctaaagcactattggtagatattaaagattaaaatctaatgtcatgtggcaagatctacatgtctagagaacactgtgctctattaccattatggataaaagatgagatggtttctagagatggtttctactggctgccagaatctagagcaaagccatccccgct

SEQ ID NO: 56785 - DNA, 287 bp, Homo sapiens
ggggttttttttttttgttttggggggggtttttttggggggaaaattttttttaaatggaagcttttagcaggccccccacccaaataaacctttttgttttttttttaaaaaaaaaaaaagggaaaagggaaaaaaaaaaagggaaacccaaaccccttgttgtttgtttgtgcccaaccctttccacaaaaaaagctagtttgggggtgaaaccccactttgtctgtccccttcaaaaataatattaataaactggactgtttacaatcaaaaaaaaaaaaaaa

SEQ ID NO: 56786 - DNA, 263 bp, Homo sapiens
cgggccccccctcgaaagtcttctagaattaattaacacggaccaaggagtctaacacgtgcgcgagtcgggggctcgcacgaaagccgccgtggcgcaatgaaggtgaaggccggcgcgctcgccggccgaggtgggatcccgaggcctctccagtccgccgagggcgcaccaccggccctgcactcatgagggcttccaatgtgctgcccccctcttaatactcaccaataaattctacttcctgtacaaaaaaaaaaaaa

SEQ ID NO: 56787 - DNA, 384 bp, Homo sapiens
tccaccgcggtggcggccgctttttttttttttttggggggcggtttttattcaaaatgtttttaaaaacacccttgttttttttaaggacaaaaccaaaaatccccccttgaaaaacctgggaaactttgtccaaacttttccaaaataggggcaattttttgcttaaaccctgtttgttaaccaaaaaaggaatttttgcggggcctcagggaacaaagggaacctgggcggggaggggaaaaaaaaggccccttttaaataaaacttaacttgccttaggggcacattttgggggggccacaaattgagggctgtttttggaaaaatccggtttcaccacaggatcccttttgtctactgggctaccccccgggttggggg

SEQ ID NO: 56788 - DNA, 626 bp, Homo sapiens
  misc_feature 565: n = A,T,C or G
cccccctcggaagtcttctagaattaattaacgcgggcctgtagtcccagctactcgggaggctgatgcaggaggatggtgtgaacccagaaggcagagcttgcggtgagccgagattgcaccactgcactccagcctgggcgacagagcgagaccctgtctcaaaaaaaaaaaaaaaaattggtagcccaaaccagaaacccagagccgacgagctcagcaaaacctcagcaaaacctaagcagcacaagagaaataaaagaacaaaagaaaactacacgaagacacatcattatcacactgcttaaaagagtaatggcgagagactcttaaggcagccacagaaaacaggcatacataaaagaaacaaggataagaatgaccttttctcagaaacaatgcacgctggaaggccacagagcaacacggaagaactcaccatgacatacgccttccaaatcctcacagctactaggaaggcagaaggattgcttgaggccaggagtttgaggctgcagtgtatcacaatagtgcctgtaaacagccagtgggcactgtagcctgngcaacagagcgagaccccgtctgctaaaaaaatttctctggccggatagtgccactacact

SEQ ID NO: 56789 - DNA, 516 bp, Homo sapiens
gcggggggggggttttctcatcattggagtggttcaggctcctgaaacattaaaggtgaatcccccaaccttttctttttggctttgccaggaaaaaaaaaatttttttataaaaaattctttggaatttaggaaagggattttcgggggggttaaagtcagatttttttccccaacaaaaagaatcttttgaacccggtttttatcccttcttttcccttcccttcccctaaatcaaatcaattttaattgccccttatttcacttaacatacacttgatttttttttagggaacccccctatattgaattcaaaattccctacacccagctttaaaactgaggtgggaattttctgttgcccataaaacctggatatcattctgggtatatagaaggtaaagggaatattacagggttacctgccttttatgtaatatacccaaactcatttagcattgaaggggccaaatgcttccccccatgcttttctgtttccaaaaaaattgaaaaaca

SEQ ID NO: 56790 - DNA, 494 bp, Homo sapiens
  misc_feature 433: n = A,T,C or G
gggccccccctcggagtacttctagaattaattaacgcggggggcgccgcctgcgtccttcccactccaacgctgggtgacattgagctcaccagcgccaccgtccccggcgaagttctgcgctggtcggcggagtagcaagtggccatggggagcctcagcggtctgcgcctggcagcaggaagctgttttaggttatgtgaaagagatgtttcctcatctctaaagcttaccagaagctctgatttgaagagaataaatggattttgcacaaaaccacaggaaagtcccggagctccatcccgcacttacaacagagtgcctttacacaaacctacggattggcagaaaaagatcctcatatggtcaggtcgcttcaaaaaggaagatgaaatcccagagactgtctcgttggagatgcttgatgctgcanagaacaagatgcgagtgaagatcagctatctaatgattgccctgacagtggtaggatgcat

SEQ ID NO: 56791 - DNA, 520 bp, Homo sapiens
  misc_feature 429: n = A,T,C or G
ccgggccccccctcgaaagtcttctagaattaattaacgcggatctgagagtaactttgtacccatcactgattccttctgagactgcctccacttccccagcagcctctggtttcttcatgtggctgcagatggcaggatttcccaaaggtttctggctgaaacatattccgtggtgtatctgtacagcagtttcctcatccctgcagctgtgtttgaacaggtcatttaccatgctgtcctccaggttcaacagtatggctccaaaggatgaaatttcattctgattttctggctgaagactattctctttgtgtatgtccaccacagttactttatcccttcatctgtggatgggcagtctcgctgtattgcccaggctggagtgcagtggcatgatctcagctcactgcaagctctgcttcctgngttcacgccattctcctgcctcagcctcctgagtagctgggattacaggcacccgccaccacgcccagctggttggtggagaatttgaact

SEQ ID NO: 56792 - DNA, 229 bp, Homo sapiens
ctggggtaccgggcccccccctcggaaatacttctagaaataattaacgcgggcagttgacacaaaatagactacgaagtggctttaacatatctgaacacacaatagctaagacccaaactgggattagataccccactatgcttagccctaaacctcaacagttaaatcaaaaaaaaaaaaaaaaaaaaaaaaaaaaaaaaaaaaaaaaaataaaaaaaaaaaaaaa

SEQ ID NO: 56793 - DNA, 140 bp, Homo sapiens
ccccctcgaaagtcttctagaattaattaacgcgggcattcaagaggcaataccaataagttctacatgctggattcaaggtctacagacagagtgttacagtgggaaagaattgattgccaaggaattcctccatcatc

SEQ ID NO: 56794 - DNA, 515 bp, Homo sapiens
cccccctcgagagtcttctagaattaattaacgcgggattgtatttctttataaatttactgtcatatcaattgctggaaaatgctatgatttttctattattaccttctaagttgtattctctcttacactgtagcctcaactaaggcaattctgctatgtttgttcttcactatgatttactgtgtgccaaaggagttttgacagggtacagagtattttactaaaagtatttttaaatgtttctcatgtgatttctgtaccttcttcctcctgccccttttgcttttttaaagaaactggggaaggatttatgaatacaccaccaccagagtggataatgcttagaattctttattggtggccctactatggtgatgatctagaactgacttacttcaggacagaagaaaaaaacaatcacacccttaacctttaagccagttagatcagggggttgcaacaattgggttaaactttgggtatacattggaagcaccagggcatgtttgctt

SEQ ID NO: 56795 - DNA, 458 bp, Homo sapiens
tccaccgcggtggcggccgctttttttttttttttttttttaaaaaagggtttttttttttcccccaaggttgaaggccgggggggaattttgggtaaatgaaagccccccccccggggttaaacccttttttcttccttaacccccaaaaaaggggggaataaagggcccccccaataaaccgggaaaattttttttttttttggggaaaaaggggtttcaccctttaaaccgggaagggtttaaattcctgacccttgaaaacccccccccgggcccaaaaaaggagcttttttttttttttaaaaaaaaattcttaaatttttaaaagggtcaaaagttgggcaattttttaaaaccgggaaaaccctgccttttggggcccccaaaaggaattttacccttaattttcccggaaaaaggggcacattaggggcccccgccaaacccatttgttt

SEQ ID NO: 56796 - DNA, 393 bp, Homo sapiens
cagcatgagaaaactgttattacccttccctcagttcaaccctttggggagtgattaaaatttaaaaaaaaaaaccttttcactcagttgccctaagccgtatgcctggcttgctttttttaaagactgtcccaaaaaaaaaaaaaaaggaaaatttggtttttcctttttttggcgggtttcacacccttgcaaaaaacccacctgaaaaaaaaattctcaggctttacagcaggcaaccttcactatgattttcacaattctgattctgtatccccggggggttatcccatttgcttttttgggagggggtttattacgtggaacatatatcccgatgtgtctgagaaaatctttgtctttttggggggagggcagagggcggttcttttt

SEQ ID NO: 56797 - DNA, 451 bp, Homo sapiens
cgggccccccctcggggtacttctagaattaattaacgcgggcattctcccatagataaatgaaacttgaaatgtgtaaactttgaagaacataaaaacttcatggtggtttcttattaagacagtggactagacatctaataaaacttctttccaaaaaaaaaaaaaaaaaaaaaaaaaaaaaaaaaaaaaaaaaaaaaaaaaaaaaaaaaaaaaaaaaaaaaaaaaaaaaaaaaaaaaaaaaaaaaaaaaaaaaatttaaaaaaaaaaaaggggggggcccccccgggggggggccccaaatcccccctaaggggggggttttaccccccccccggggggggggttaaaaaaaggggggggggggaaaaaccggggggacccaaaaaaaatagcggggggagaaaaaccccttttgggagggggggaaaaaagaaaaagggcccccccg

SEQ ID NO: 56798 - DNA, 247 bp, Homo sapiens
  misc_feature 29, 34: n = A,T,C or G
acttctagaattaattaacgcgggggggnggtanccaaaaaaaaaaaaaaaaaaaaaaaaaaaaaaaaaaaaaaaaaaaaaaaaaaaaaaaaaaaaaaaaaaaaaaaaaaaaaaaaaaaaaaaaaaaaaaaaaaaaaaaaaaaaaaaaaagataaaaaaaaattttttggggggcccccccgggggggggttttattttcccctttttggaattttttttaccccccttttttgcccccttttttaa

SEQ ID NO: 56799 - DNA, 402 bp, Homo sapiens
tccaccgcggtggcggccgcttttttttttttttgggggcaaacaaagatttttttttcttaaaacacaaaaaaaaaacccgttaaccttcccatggcaaaaggaattgcgggaaaagggatccccttccctggccttttcccagaaaaaacagaaggacctacaattttttcataatggataaagggaaaatgggccccccctggtttgggaaataaaaaggttaataaagaaaaaaaagcaccttctaaccaaggggggccccggaaaaccctggggtgggaaaagggaaaacaggtatcccctcccctaaaaattcccaaaaaatggactttattgctcctgtaaagaaaatatttcattccagggttttttggggggatggagaggccaaaaaaaaaa

SEQ ID NO: 56800 - DNA, 472 bp, Homo sapiens
taattacacgcggggcaaccatgaggatgtggaggaagtgtttgtgttccttatgcacaatggccaacacagtccttcagcatgtccagttataaaaggaagggcaaatcaaatccttccaccattcttcctgtgctaaacctacccaaaggggataaggttggcctgcaaatgggcaatggctctttctatggggaccaccaacgcttctccacttttgcaggatccctgctttttgaacctaattaaatatttgactaaaatccctccattttgggaaaaacttgtacctgacctgatttgttccaatctgaggaacattaaagtggagggttttactttgctgtataaaaaaaattatgggttgcaatgttgttcaccctacaggcacaccaataatgttggacaattcaggggctcaaaaaactcacccacaaaatagttttctcaaatgaccttgactaatatactc

SEQ ID NO: 56801 - DNA, 533 bp, Homo sapiens
aattaattaccgcgggggatgacccaggaaccccgtttttacttttcagcggcaggcgaagggggcatgaggaaaggaggtgggtctaggcaggggaaatgggggtccccccaaacggaaacggctggcactaccaaaatcaacctctttttggaaaaagggtaatctctctccaaaaactgaggacccttcccttccccatatatggagcccacctgggttggggggcccaggtcctaatttaaaaatcccgggacgtcccagttcaaattcaggttcaacgggtttcatctccttcaggggggtaaagtctgctctctcctcctaaaaaaactcccaagcctgtttcaactttggtatggacacagtttctagggtggcttgggatcttggggaaagccaaactgaagtgagtagtgaatatagtatggacaaggcatgggttgaatttcctacttgggatcggcaactaaccctttatgtaagggctgttcaatctacaataaatcatgtgaaaaaagaccgtccaaaaa

SEQ ID NO: 56802 - DNA, 510 bp, Homo sapiens
aattaattaccgcgggtatcaaagccagccaccattcggggggacttctgctttcaggtgggcaggaccatcattcatggcagtgtttcagaaaaaagtgctaaaaaaaaaatcaccctatggttaaaccctaaaaaactggttgactacaagtcttgcgctcatgactgggtctataaataaaagggggacacaacaccattttctttcagcacggcggggtgtgtccctgaacacatcttttctttcctttgacttaaaggcaacaggatggatctttcttttataaaccatatttcccaataaagctttgggaacccggaaaaaaaaaaaaaaaaaaaaaaaaaaaaaaaaaaaaaaaaaaaaaaaaaaaaaaaaaaaaaaaaaaaaaaaaaaaaaaaagagaaaaaacacaaaccaacatatttttttaaaaaaaaaaaaaaccccccccccccccgggggccaccctttttcccctaataagggggtttttcccccccccccctt

SEQ ID NO: 56803 - DNA, 505 bp, Homo sapiens
taattaacgcgggggccttgagggaccctttgtttgtcgtgagggggcaggggcacaagtcctggatgttgtgtttatcgaaaaggccaaaggctgggggcaagtgcacggggcacagcggagtctgtcctgtgacgcccaagtttaagggtctgggcggcggccggttgggtctgtccttttttggttgcaccggggcgcttcccaaccccaacatgtacccggtttgttcccagcaaaaaacaaaaagacaaacttgaaagtttaaaaataaaactggtaaaccccaaaaaaaaaaaaaaaaaaaaaaaaaaaaaaaaaaaaaaaaaaaaaaaaaaaaaaaaaaaaaaaaaaaaaaaaaaaaaaaaaaagggggcccccccccggggggaacccccctctccccctaaggggatttttttcccccccccaaagggccccggttttaaaaccgtggagatgggaaaacccttggcttccccaaattaacccccttggaagcaaa

SEQ ID NO: 56804 - DNA, 498 bp, Homo sapiens
attaattaccgcgggggtggttagcgtcggcggtttttggcatggcaattttttctggcccggctggcccaatcctgtcgtttaatccgaaggaaaatgtcaagtttcaaagggagggggcccaggttcccaggcccttaccccaccaaaaaaaacaaaaccaccttactcctgaagtattttttgtcccccccctacctaccttactggacaaaccccaaattttttcttttttctcccagttgggccctggaacccggttcaggctgtccaaaattaaagggactgaaaataccaaaggctttccttttggggagtttgagtctgaggatgttcccaaaatatttgctgaaacaatgaacacctccctgttgggggaaaaactctgggagtgtcattttatcccccctgaaaaagtccttaaaaacctttttaaagactgaatttttccattaaaccacccttcttttccttcagtgaaccggtttaatcggaatc

SEQ ID NO: 56805 - DNA, 513 bp, Homo sapiens
  misc_feature 10: n = A,T,C or G
cccccctcgngggtacttctagaattaattaacgcgggcagagtgccattttttttttgttcaaatgattttaattattggaatgcacaatttttttaatatgcaaataaaaagtttaaaaacttaaaaaaaaaaaaaaaaaaaaaaaaaaaaaaaaaaaaaaaaaaaaaaaaaaaaaaaaaaaaaaaaaaaaaaaaaaaaaaaaaaaaaaaaaaataaaaaaaaaaaagggggggcccccccccgggggggccccccaacccccccaaaggggggggaaaaacccccccccccgggcccgggtttaaaaaccgggggggggggaaaaccccgggggaccccaaaaaaaaggccggggaaaaaaaccccctttcccccgggggggaaaaaaaaaaaaggccccccccgaacccccttcccaaaagggggcccccccggggggggaagggaaaatggaacccttaaaatttgggaaaaaacccccgaaaaatttgggaaaaacccccccttttt

SEQ ID NO: 56806 - DNA, 448 bp, Homo sapiens
accttgggaaattttcttgcttttttacctcaatgatcatccaagaatgggaaattcttgggctcatctggaagggaccccaagttttatgtcccattaatgtctcacaaatcaaaattccaagaaaaataaaaagactatagtccatcccttatataaaattcttaggactcccaactgggtggctacagttgggggggctaaaaatttaatataagggccccaactggactgtttctttctgaggaccacaagggcaggatctgtccaggcttgaaaatggcttttttttccatgtgtcttcacattatctccctctgttggtatgtgtgtccaaattccctttttttttttttaaataaaaaaatttatactgtctacaagctttatttagtttaagtaaaaaaaccaaaaaaaaaaaaaacgcggcccccaccgggggggacct

SEQ ID NO: 56807 - DNA, 585 bp, Homo sapiens
cccccctcgaaagtcttctagaattaattaacgcggggtcgccttggtgtacaccacaatggctgagcacttcctgacgttgctggtagtgcctgccatcaagaaagattatggttcccaggaagacttcactcaagtgtggaacaccaccatgaaagggctcaagtgctgtggcttcaccaactatacggattttgaggactcaccctacttcaaagagaacagtgcctttcccccattctgttgcaatgacaacgtcaccaacacagccaatgaaacctgcaccaagcaaaaggctcacgaccaaaaagtagagggttgcttcaatcagcttttgtatgacatccgaactaatgcagtcaccgtgggtggtgtggcagctggaattgggggcctcgagttcttttccaactcagctcgaaggccacctcttccagaaagcctctatagcactcccatcagaagagatcacgtctttctacaaccctcccctccatgactttcatggctcttagagcctctgctgtctctgcctcatcctggaagtatcacaatcctccaccacactgaacccctcaaggtagg

SEQ ID NO: 56808 - DNA, 278 bp, Homo sapiens
ctccaccgcggtggcggccgcttttttttttttttttgggttgccccccgggtaagagccttcctaaaagtgtaaaaccttggccttgatattagggcaaccccattttttaggatagccagaaaaataaaatttggaaaaataaaaattttaaaggaaaggtaaagggttaattttcctggggggcccctccccccctttatttaattttaaaagtcctttcggggggggccccggcccccactttttttccccttaagggagggtaaattcccccc

SEQ ID NO: 56809 - DNA, 560 bp, Homo sapiens
  misc_feature 519: n = A,T,C or G
aattaatgaacgcgggaaacaaactacccctcaggaacgggattagtcgccaagaagcagaagacggaggatgaggtattaacaagtaagggtgacgcgtgggccatgtccttggcaaaagtgaaaaagtccaaagctccccagggcggagacaataataaaactcggcccctggtgaaatgacccccctcccccacttgcccatggcctgggactctttgcaatgtacataacttttaaatgcaggggcaggggaaacagctttccttgaggggacttaaaagcaaagggaacccgatatgcttcccgcagccggggacaattctccaggactttttttttactttgagcacttgcctggagagatttaataaaacaggggtttactgccccccctttctcacctcctaattctcttgggctttttgtgttttccttttctaaccctcctccttccctttagccttcatttgtgggaagaaaaaaacttgatttagtgccggaaaaaaaaaaaaaaanaaaaaaaaaaaaaaaaaaaaaaaaaaaaggggaaaaaaaaa

SEQ ID NO: 56810 - DNA, 534 bp, Homo sapiens
  misc_feature 22: n = A,T,C or G
cccccctcggggtacttctagnaattaattaacgcgggggacgtcagtgtgctctgcctccgaggaaaagctgccaaaattttctcctgctgcaattcaagttggctgggggccggtagtgagatctagggctacttcaacaaaactttgctgcccttcctgctcctcttgtcttcttttctcctgataccttttgatgctctgcacatgttatttgcatagcaaaggcactaagctttccaggaagagagggcaccacttccacccccaataagtcttttttcccgtcttttctttcttttcctttccttttttggggggtggggagggagagaaagggggtttgcaaaggcagcatctcagagtgatagcctagatgtattgaaggcatctcttattctgccaaatcggaaagtcagttctctaaagcccgggttagccagaccatagggttttattctggctgcagaataactggctggtgtggctttgcaaaggggggcaaaaaataaaaaaataaaaaaaaaaaaaaaa

SEQ ID NO: 56811 - DNA, 387 bp, Homo sapiens
tggcggccgctttttttttttttttctcctttttagtttttttttttttttttttttttttttttttttttttttttttttttttttttgggggggggttttttttttaaaaaaaaaaaaaaaaaaaaaaaaccccccccccccccccaaaaaaaaaaaaaaaaggggggggggggccccaaaaaaaaaaaaaaacccgggaaaaaaattggggggggggggaaaaaaggaaaaaccccccccccccaattttttttcccccccaaaaaaaaaaacccccccccccaaaaaaaaaaaaaaaaaccccggggggggggggcccccccccccccttttttcccttaaagggggggaaaacccccccccccaaaaaaaaaaaaaaaaaaa

SEQ ID NO: 56812 - DNA, 189 bp, Homo sapiens
  misc_feature 111: n = A,T,C or G
cgggccccccctcgaaagtcttctagaattaattaacgcgggggcgattcaacctgtgtgctgcgaaggacgagacttcctcttgaacagtgtgctgttgtaaacatattntgaaaactattaccaataaagttttgtttaaaaaaaaaaaaaaaaaaaaaaaaaaaaaaaaaaagaaaaaaaaaaaaa

SEQ ID NO: 56813 - DNA, 584 bp, Homo sapiens
  misc_feature 28: n = A,T,C or G
cgggcccccccctcggggtacttctagnattaattaacgcgtggagtcggcctcactttcgcctttccccgcatctacttgtttccaaggccagtggtacttaactgggtcaagttgcctgtggaccttcaggaacagaattgccatgttcctcactgcctgcaggaaaggctccattccaagcccagtgaagatgtgtgcctatccagccgcccaccaaggatgtcatctgtagaatgggtggagggcaggggtttatttggtgtatatttttacattaaaatgcacttaatatcactttgtaaagcccagatgagtgcaaatgtgcctgtaacttcctcctttaatctgtccaggtagtatttagtctttagtcttacattttctttctccctttatttcatgaaattccttgagaaaacttcaacagtaaagaaagaaatttcgttcatctcacaactcttccaaacgaggaaacttagtgaaatatttcagagcttctagatgtgaggtacaaaacttgggatcaaatggaatcttgattcactaaccaatttaagatctgacttctaattttaggaact

SEQ ID NO: 56814 - DNA, 312 bp, Homo sapiens
  misc_feature 9: n = A,T,C or G
acttctagnaattaattaacgcggggcatcattggctatgatgttggaagaccaatctttaacacccgatgatattgccccaattgttcgatcgctgacaggaccatgtgtgatcagactgctatctgaataaaataagatttgtctcaactcaccggtccctccatcagatactccatgacacgccacacttgctcttgattttaacctgggtcgtccttactctaccctacttacacgtctgtatagccctcagttgcaaaggatctctgtggcagtattaccctgctacatcaatctgtggggacaaca

SEQ ID NO: 56815 - DNA, 650 bp, Homo sapiens
  misc_feature 33: n = A,T,C or G
ggtaccggggccccccctcggaagtcttctagnaattaattaacgcgggcattaaaaaaaaaaaaaaactcctgtgtcggtcagaacaacttgctacttatcatttttgtataaaaaggaaattagtctttttctttttttggtaaatttttgaaaaatattgctaaaagtgcatttaaggagattgggagacaattagcagaatggagaaagtaagtcttttttttttccaaattattaattgtcctgtgtctatgtacctctagctgttcttttttgtacttttctggttccaaaccagtttattctgtggttctataataagttttgatataatcttggcttcttaaaaactgtgtatcattaaaatatatgttctgcaagaattaaaactgagtccatgaaaataccataggaagacataaaactttaaaaggcaactcaaagatgatggaaacgcacttacaagtggtgaccaaaatttttaggtgaagtcgagcactctaattagagaactggaggaaccacatataacacttaacttcccctaccctgcccctccccaaaagaaaccatgacaaacctagcttttaaaaaatattttaagaaagagaatgaactgtggaatttattggcagccaaggaatgtg

SEQ ID NO: 56816 - DNA, 519 bp, Homo sapiens
tccaccgcggtggcggccgcttttttttttttttaatttttttttttttttttttttttttggcccaaagagagagggggagggggggttttaaaggaaaaaaccccccccttttaaaaaatattttgggggaaaaattttttaaaaaagggggaaaaaaattggggtttcccccaaaaattaaaaaattttccccggtaataccccccggggggtaaaggaaaaaaggtttttttttaaaacccccgaaaatttttttttttttaaaccctatgggggggccccttttaaaggcaaaaaccttttggaaaaaaaattaaaaaaaagggggggtttaaagggggaattcctttttttttaaaaccaaaaaggaccccgggccccctgttttaaaaaaaaagggggaaaatttttaaaaaaaaaaaaaatccccccccaaaggggggtctctgggggtaaaaccccctggggggcaattttttttttgggggggggggggtttttccccccctttttttt

SEQ ID NO: 56817 - DNA, 159 bp, Homo sapiens
ccgggccccccctcggaagtcttctagaattaattaacgcgggcctttccaacttggacgctgcagaatggctcccgcaaagagggtggcgagaagaaaaaggccgttctgccatcaacgaagtggtaacccgagaatacaccatcaacattcacaagc

SEQ ID NO: 56818 - DNA, 186 bp, Homo sapiens
  misc_feature 16, 45: n = A,T,C or G
ccgggccccccctcgngggtacttctagaattaattaacgcgggngaaaaaaaaaaaaaaaaaaaaaagcctactcttaattttttttcatgggctgtaaaaaagagttaatatcccactggcaatagcatgtgagcccctgcctaataaatacttgtgcaccagtggaagaaaaaaaaaaaaaaa

SEQ ID NO: 56819 - DNA, 554 bp, Homo sapiens
tccaccgcggtggcggccgctttttttttttttttttcttttaaaaagggaaacctttttttaaaaggggggggccaggtaaaaaaggaatcctggccggaaatcataaaccataatcaggtttttttaaaaacagtaaattttttccctatatttaccttccatcgaaggttttttattttggttaaccaggctaaaaaaaaccattttaccaccttaaaattttttacctttggttggtccaaaaaagggaaaattttaattccggagaggaacccttcttttttggcagtaaaaaaaaaaaggcggtttggggggcaccaaccccggttttcccgggtttaccttttgggggctaaaccccgggggacccggggggggacggttaacccctgaccaaagtccagggggccgcccctcccagggtaaaagcctaagccagccggaaaaacaaaaacccaccattttggcttttgggggttttacctggaaaccaagggttcccccccgggtaattaatttttaaaagtcctctcgggggggggccgggcccc

SEQ ID NO: 56820 - DNA, 600 bp, Homo sapiens
  misc_feature 541: n = A,T,C or G
cgggcccttcctcggaagtcttctagaattaattaacgcggggggacagcatcttttttcaattaggcagcaacctttttgccctatgccgtaacctgtgtctgcaacttcctctaattgggaaatagttaagcagattcatagagctgaatgataaaattgtactacgagatgcactgggactcaacgtgaccttatcaagtgaggacccactaacaggggctgcatttacaccaaaaccatgaaggtggcccaagtcatcactgagaagtagtacaagcaccgagggaatgacttcaacaggaacaagaaagcgtggaaggagatcctagcaggaagctccacaagaagatagcatgttacgtcttgcattggatgaagcaggttcagagagacctagtgacagctatctccgtcaaggtgcagaaggagagatcattgaagtagattttcatgcaaaaaaaaaaatgttgaagtctttggacttcgggagtctgtccaaactgcaggtcactcagcctacagttgggatgaatttcanaacaccagttggagccggttgaatctttctgctatgctgtaatattttcagtaaaccca

SEQ ID NO: 56821 - DNA, 287 bp, Homo sapiens
ccgggccccccctcgaaagtcttctagaattaattaacgcgggattgtgtttttaatttatttattaagatggattctcagatatttatatttttattttatttttttctaccttgaggtcttttgacatgtggaaagtgaatttgaatgaaaaatttaagcattgtttgcttattgttccaagacattgtcaataaaagcatttaagttgaatgcgaaaaaaaaaaaaaaaaaaaaaaaaaaaaaaaaaaaaaaaaaaaaaaaaaaaaaaggaaaaaaaaaaaaaa

SEQ ID NO: 56822 - DNA, 127 bp, Homo sapiens
ctgggtaaccgggaccccccctcgagcgtacttctgagattaattaacgcgggcaagcaagtaatttacagagcttgcctctgaatgactccaaagctcctgctctttctgctgctatctactgccc

SEQ ID NO: 56823 - DNA, 253 bp, Homo sapiens
ccgggccccccctcggaagtcttctagaattaattaacgcggggacctcgctcctcttccttgcttcctcactcaccatgtgatatgcctgcaccttccaccatgattggaagcttcctgaggcctcatcagaagccaagcagatgctggtgttatgctggtatagcctgcagaaccatgagccaaataaaacttttttttttctcaaaaaaaaaaaaaaaaaaaaaaaaaaaaaaaaaaaaaaaaaaaaaaa

SEQ ID NO: 56824 - DNA, 481 bp, Homo sapiens
ccgggccccccctcggaagtcttctagaattaattaacgcggggggcttgactcatccctatatgtggagcgcggatactcagtgcggaccttgcaagaataaatacatgatgtatagtattaaaactgtatatgatattgacatcaggcttttatcacatcgatctaactcaaattgaggagattatgagtgctttagtcacaaacataactcccaataatgccattgatctcctgggaaacatatgttctgctccacgatcatggcttatgatgggaggtgataggattcgcatttcatggactgtcttttaagaatggtactgctctataaaaaaaagatgagcgatttgctctgcactactgtaccaaccaaaaatgacttactgtctctggtaatgtcttggccattagacatctggggctcaacacttactttgctactactgaagatgatcaatgcgattaatatatcactcat

SEQ ID NO: 56825 - DNA, 275 bp, Homo sapiens
tccaccgcggtggcggccgctttttttttttttttttttttttaaaaaaggttttttttttttcccccaagtttaaattaaagggcccaaatttaatttatttgaccccccccccttggggttaaaaaaaattttttcccttacccccccaaaaattaaaaacaaaaaaattgcccctttccccccataaaattttttttttttttttgaatttttggggggggaggggggtacaaattttccccaaggggggttaaaaaccttgaaaaaaaaaa

SEQ ID NO: 56826 - DNA, 259 bp, Homo sapiens
tccaccgcggtggcggccgctttttttttttttttcgtcactacctccccgggtcgggagggggaaatttgcccccctgctgccttctttggtatggggaacccgtttttaaggctccttttccgaaatcaaaccttgattccccgtcacccggggtcaccatggtaggcacggcaactaccatcaaaagttaatagggcaaactttcaaaggggtcgtcccccccaccccgctttaataaattttaaaagtactttca

SEQ ID NO: 56827 - DNA, 561 bp, Homo sapiens
tccaccgcggtggcggccgcttttttttttttttttttttttttttttttttttttttttttttaaaaaaaaattttttttttggggggtttttttaaaacccccaaaaatttggggaaaaaaaaaaaaaaaattttttaagccccccccccccttttagtttttttaaaggtttttttttaaaatcccccctttttttttggaaaaaaaaaaaaaaaacccctttgggaaaaaaacccccaaatttttttaaaattttaaaggtttttttaaaaagggttttttttgggggggggggtttaaaaaaaaaaacatttggttgggggaaaaatttttttttaaaaaagggggggggggggggttttaaaaaaaaccctttttttccaaaatttttaagggggggggggaatttttaaaaaccccccggggtttttttgaaaaaggcccccaaacggggggggggggggggtttccccccaaaaaaaggggggggtttaaatttttaaaaaaaattttttaaaaaaaatttggggctttttttgggggggggcttttttttta

SEQ ID NO: 56828 - DNA, 458 bp, Homo sapiens
cgggccccccctcggaagtcttctagaattaattaacgcgggactgaaaattttctttagctttttaagatcagcatacactgtagttaatatatttgttatttttattacaaatcagggcaaagtgcaattgctggggaagaacatcccagaggttcaattctgcgggaagtgcacctcaagttcctgctgacgggactgctttcaggactgcccgcaccacagtttgctattcgtatgtgtccaccgttgaccacaaaaaacatcaagatgtatcagccactgctggctgttggtgagtatttgacctggtctttttttttttaactcactttataagatgtttaggttttctagtttctagaagatcctttattctttttgaggatgctttaaaaggagatagagactaagtgaaactgtaaatactcatcctggaacttaaaaaaaaaaaaaaa

SEQ ID NO: 56829 - DNA, 197 bp, Homo sapiens
gggccccccctcgagagtcttctagaattaattaacgcggggatgatctgaatctctgacttattgattatggaacctgtcaagtagttttcaactctcccagtgaggataattaaacatgctcagcctgaaaaaaaaaaaaaaaaaaaaaaaaaaaaaaaaaaaaaaaaaaaaaaaaaaagaaaaaaaaaaaaaaa

SEQ ID NO: 56830 - DNA, 343 bp, Homo sapiens
cccccctcggaagtcttctagaattaattaaccgggctccttgtaggatatgttatttcttgtccactctcacgaaagggatgggattctagtacatcccctcgtcccctaaataaatgaaaacccccaacaaaacacaatgccagcagaaacaaaacacagattttaaaatcacacacaaaagccagccaatcctaacagaaattatttatgagacggataatgcgtgaatttgacaggcaacaaaagggtgaggaggacctcctcgtctggcccacaagctgcatagctgtgccgaaagtttggttctttagttaaattaaaaaaaaaaaaaaaaaaaaaa

SEQ ID NO: 56831 - DNA, 166 bp, Homo sapiens
cggggccccccctcgaaatacttctagaaataattaacgcggggtgcatttccatccttgtaaacccttcatagtactcagtcctgtatcgctcagtaaacattgctcttacttaaaaaaaaaaaaaaaaaaaaaaaaaaaaaaaaaaaaaaaaaaaaaaaaaaaa

SEQ ID NO: 56832 - DNA, 623 bp, Homo sapiens
cccccctcgagagtcttctagaattaattaacgcgggtgaggcgggagaatcgcttgagcctgggaggcagaggctgcagtgagccaggtccatgccactgcactccagcctgggtgacagagcgagactccatctcaaaaaaaaaaaaaaaaatctactgcctgactaccacacaggccccatgagcttgtcactttatctttggcccttcctttcaaatgggcacaacctcaccttaatgtgtacacacacacacacacacacacaaacattcagtctataacaacaaagatgacacggtagagcagtggagaaaggatggtcttttcaataaatatgtttatggaaaaaatgtatgttgattctctacttcacatcattcataacaaattgtagatggattgttgatctaaatgtgataggtaaaacaatagagcttctagagaatgcctaggggaatttataatcttgaatacaccaatatttcttaaactacatacataaagtactaaccataatggaaaaagttaattacatataatacaattaagaatgtttgctgattttaaaaaatctttcaggttgcttggtggatacaatatgtgttgttccagtgatggat

SEQ ID NO: 56833 - DNA, 179 bp, Homo sapiens
  misc_feature 138, 141: n = A,T,C or G
taccggggccccccctcgggggtacttctagaattaattaacgcggggggggccgccgccatcgctctcccgggcttagaaggcccggctactgacgcgcagtgccagaccttagccctcacggtccttaagtctcgngtncagccccttcgcctcgcagcctggcccaaacccccccc

SEQ ID NO: 56834 - DNA, 530 bp, Homo sapiens
attaattaacgcgggtcagcaccaggttcttgtctgtaccaagttggtggagcccttccacgcccaggtgggctccctgtacatcgtcctcggggagctccagcatcagcaggagtcttggtctgctgtccaggctgagtgcagtggcgcgatcttggcaccaggctctatcctgccatttctgtatggattgcctgtagtggaaaccaaatggttgatgaaggaaagttatttcttttttttttttttttgagacggagtgtcgctctcgccaggctggagtgtagtggcatgatctcagctcactgcaacctccgcctcccgggttcaagcgattctcctgcctcagccttccgggtagctgggactgcgggcatgcgccaccacgcctggctaatttttgtatttttagtggagatgggggtttcgccatgttggccaggatggtctcgatcccttgaccttgtgatctgcccgcctcggcctcccaaagtgttgggattacaagcgtgggctaccgcgcctggcct

SEQ ID NO: 56835 - DNA, 484 bp, Homo sapiens
tccaccgcggtggcggccgcttttttttttttttttctttttttttttttttttttttttttttttttttttttttttttttttttttttccccccccaaaaacccttttaaaaaaaaaaaccccccggggggccccccaaaaacccccggggccccttttggggggggggggcaaaaaaaaggggggggccccccccaaagggggggggggggcttttgggggggggggggaaaaaaccttccccccccccctttttttttttccccccccccttttttaaaaaaccccccggggggggggcccccccccgggggaaaggggggggcccccccccccggggggggggggggggggccccccccaaaaccccgaaaaatttttttttaaagggggggggggggggggaaaatcccccccgaaaaaattttttggggggggggggggggcccccccctcccctttttccccccggggggggaaaa

SEQ ID NO: 56836 - DNA, 190 bp, Homo sapiens
accggggccccccctcgaaatacttctagaattaattaacgcggggaaaggaacaacacctaaacccaaagggcagctgttgcagcatccagttcatcttaagaatgtcaacgattagtcatgcaataaatgttctggttttaaaaaataaaaaaaaaaaaaaaaaaaaaaaaataaaaaaaaaaaaaaa

SEQ ID NO: 56837 - DNA, 239 bp, Homo sapiens
ccgggcccccccctcgaaatacttctagaattaattaacgcgggttgtgcatcatttaaaacattttgtatgtttcttcttatctgtgtatacagtatgttcttgaatgatgttcatttgtcaggagaactgtgagaaataaactatgtggatactgtctgtttatattataaaaaaaaaaaaaaaaaaaaaaaaaaaaaaaaaaaaaaaaaaaaaaaaaaaagaaaaaaaaaaaaaaa

SEQ ID NO: 56838 - DNA, 439 bp, Homo sapiens
  misc_feature 199: n = A,T,C or G
ccgggcccccccctcggggtacttctagaattaattaacgcgggcatgaacttaaatctgtgattcattgccttaaaactttctctcttagaatttccataccgcatgccaaaccagtaaaatggcttttaaaaatgtatagtagacaatgtcagtttgtataaaagtaccaagtgaaaatatttattacatgcattgngaaaaaaattgtttacctattgaatgttacctgtttatgtagagctctttagatgtaataaaagaaaagccttcagttaaaaaaaaaaaaaaaaaaaaaaaaaaaaaaaaaaaaaaaaaaaaaaaaaaaaaaaaaaaaaaaaaaaaaaaaaaaaaaaaaaaaagggaaaaaaaaaaaaaggggggccccccccgggggggaccccaaatcccccttaaagggggtgttttaccccccccc

SEQ ID NO: 56839 - DNA, 420 bp, Homo sapiens
gggcccccccctagaatatacttctaatattatataacgcgggggacaaactgaaggtcccggtaagcatcgcgtcagtacttatggcgcctgccgggttgtggtgacgaaagcagttgccatggagttgctctgagtaaccctgaggcattgggcacgccaagactggagaggaagcgactgcgggaatgaatgcctaatggtggagtttcagccatcagtgacagatctggtaaatgaggagccaaggacaggactactaccactgaagcgtgcaaagtcggggaaatcactgacccagtccctgtggctgaataacaatgttctcaatgatctgagagactttaaccaggtggcttcacagctgttgtagcacccagagaacctggcctggatcgacctgttctttaatgacctgac

SEQ ID NO: 56840 - DNA, 462 bp, Homo sapiens
  misc_feature 37: n = A,T,C or G
ctggggtaccgggcccccccctcggggatcttctagnattaattaactttttaaaagatttaaacatgagagaaaattgtcttttaagtttatccacgtattcactatttctggcaatgttctttcctttgtgcagtttcagatttccatatggtgtcattttctttcttttaaagagttttctttaatatctctttagcatatatctgctagttatgagttttctcggcttttgattatctggaagagtattttgccttcattttgaaggtttaaaaaattttaaagacggtgtcttgctctgtcacccaggctcaatcatggctcgctgcaaccttgacctcctgggctcaggagaatcacttgagcccaggaggcggaggttgcagtgagccaagatcgctccgttgcactccagcctgagtgacaagagcgaaactttgtcttaaaaaaaaaaaaaaa

SEQ ID NO: 56841 - DNA, 518 bp, Homo sapiens
gggccccccctcgaaagtcttctagaattaattaacgcggggggtccccctctttgtgagggctggagcatggcacggcatggattaacacggcagaggaacaaaggtgtgctctgagcttcttcatatttcaccttcaccctcacctgtgttctcttccctctctcccaataaaagggctcccattataaatgccatgtacttctcttgggaaaatagacccccttgcctagagtaagttgttaactgagggctttaaacctggaggctcttcctgaaagtatgttcatgaataccccaagcatcaaggtctaaataattttcagaagattagaattgggtagatatactgttggatatagccatggtaaatttaactgaggaattaaatccttgttaattttggtgtaaagatttgtatcctggcctgtttattcaggtgggagatgttctgtataattttgaagtatagcttgaactcctagaacaagagttaaaagttctttttagctcattca

SEQ ID NO: 56842 - DNA, 147 bp, Homo sapiens
  misc_feature 40, 94: n = A,T,C or G
agactggggtaccgggcccccccctcggggtacttctagnattaattaacgcgggggaggaactgctcagttaggacccagacgggaaccatgngaagccccagcgcagcttctcttcctcctgctactctggctcccagattccac

SEQ ID NO: 56843 - DNA, 391 bp, Homo sapiens
  misc_feature 16, 96: n = A,T,C or G
cggggccccccctcgngggtacttctagaattaattaacgcgggtggttaatctggtttatttttgttccacaagttaaataaatcataaaacttngaaaaaaaaaaaaaaaaaaaaaaaaaaaaaaaaaaaaaaaaaaaaaaaaaaaaaaaaaaaaaaaaaaaaaaaaaaaaaaaggaaaaagaaaaaaaaaaaaaaagcgggccccccccgggggggacccccattcccccttttgggaggcctttttccccccccccctgggccgtctttttacaacgtggggatgggaaaaccctggcggtaccccatttaattcgcttggcagcacttccccttttccccgctggggtaataaccaaagaggcccgaccgattcccctttcccaaa

SEQ ID NO: 56844 - DNA, 596 bp, Homo sapiens
cggggccccccctcggaagtcttctagaattaattaacgcgggggacaccaagcaaatgcatcgtatgtccccttggagacgtttttatgcagctgtgtatgttactatccagaaggagtcgggggtagactttcccgtgtaagctcagtccataaactggttacttctgatcctggaacgtggacttcacatgataggtctggatctgtttctgttgggatcacaggtaaggaaaatgtccattcaaatggtaaagaagggaggagggtgtttttttttttttttttgccgtaggcaccattctgcatcttgaacccagactgaagtgtgcctctcacagatggaaggtgcacacgctcctgtctcctcctcactctgccacgttcacttggctttttcattggtgcctaggaatttaagaatatcgaagcgagagcagtaacaaaccatagatgagcagactcccacaccgggttttcttgcccgtctttaaggcactgtttctaaattttgaacttagctctgaatccccaagaacttgagcacagcaagggttgctgagctgctgtcgccgcagccctggcccctggtgctg

SEQ ID NO: 56845 - DNA, 596 bp, Homo sapiens
  misc_feature 28: n = A,T,C or G
ccgggccccccctcggaagtcttctagnattaattaacgcgggggacaaactgaaggtcccggtaagcatcgcgtcagtacttatggcgcctgccgggttgtggtgacgaaagcagttgccatggagttgctctgagtaaccctgaggcagtgggacgccaagactggagaggaagcgactgcgggaatgaatgcctaatggtggagtttcagccatcagtgacagatctggtaaatgaggagccaaggacaggactacgaccactgaagcgttcaaagtcggggaaatcactgacccagtccctgtggctgaataacaatgttctcaatgatctgagagacttcaaccaggtggcttcacagctgttggagcacccagagaacctggcctggatcgacctgtcctttaatgacctgacttccattgaccctgtcctaacaactttcttcaacctgagtgtcctctatcttcacggcaacagcatccagcgcctgggggaggtgaataagctggctgtccttcctcggctccgtagcctgacactccatgggaaccccatggaggaagagaagggtatagagtaccagggtctgta

SEQ ID NO: 56846 - DNA, 607 bp, Homo sapiens
ccccccttcgaaagtcttctagaattaattaacgcggggtggggaacaggagaggaaagcagcccttccccatgagcctcaccccgtgaggacactgagaacacaggttaccatgtgcactgcttctttgggtctgtgttactctgagtcctccagagaaagaaccaataggatagattagatagacagataatcaataggtgggtagacagataatagataatcaatagataggtaggtagagagatattgatatggtttggctgggtcctcacccaaaatctcatcttgaattgtaacccccataatccccatgtgttaagggtgggaccaggtgaagggaattggatctcgggggcagtttccccaatgctgttctcatgatagtgagtgagtctcacaagatctgatggttttataagcacctggcatttcccctgctagttgttattctctctcctgccgccctgtgaagaggtgcctgcttctcctctgctttccaccatgattgtaagtttcctggggcctccccagcaatgtggaagtgtgagtcaaccctctttcctttataaattatctagtctcaggcagttatttatagcagcat

SEQ ID NO: 56847 - DNA, 580 bp, Homo sapiens
  misc_feature 28: n = A,T,C or G
cgggcccccccctcggaagtcttctagnaattaattaacgcgggcatgtaccaggccaccttcagctcctaggaatgtggtttttaacatcaatgaaacagcccttattttggaatggagcccaccaagtgacacaggagggagaaaagatctcacatacagtgtaatctgtaagaaatgtggcttagacaccagccagtgtgaggactgtggtggaggactccgcttcatcccaagacatacaggcctgatcaacaattccgtgatagtacttgactttgtgtctcacgtgaattacacctttgaaatagaagcaatgaatggagtttctgagttgagtttttctcccaagccattcacagctattacagtgaccacggatcaagatggtaagttccactgctgttctctcaaaacagacccataatttcttttgatgcataaatatccctcatgggcatgtatttattgcaggtgctatgcagtcatatacgttatacactgcagaggtaatgcactggttgttgttcttgttctttcctaaaactcagaaagatatttttatattacttctcagcag

SEQ ID NO: 56848 - DNA, 557 bp, Homo sapiens
cccccctcgaaagtcttctagaattaattaacgcggggcccaaaacaatccttctccttccaatgtgggccccaggggaagccaaaagattggatgccctaatagttagtctcacagcagttcatggcctgtaaatgtgaggactgaatagaacaaggggactaaattaactctaaggttccatcttaactcaataattttttatttttggtatgaatacacacacatactattaggtacattatgtcaggtcacaggaaaagaatctttgccttcttgtggtttagtgcaagagatgagtggaataaatataattcagtgtggtaagtcacataacagaagaatacacaaaattaataatgatcaatggtagttcttgcctactgccatctcattaagctactctcctaaagttaaagcatatataatttaatgtagtgggttgaatagtgtccaccccaaattcatgtccaccctcagagtgtgaacttatttggaaataaagtcttcataaggtaaggaagggtagaatcaagatgagatgatactgcattaag

SEQ ID NO: 56849 - DNA, 459 bp, Homo sapiens
tccaccgcggtggcggccgctttttttttttttttacgggaaccaaattttttttttaaatcagtcgtcaaatcacaacttatccaaatgaatgggtggcacctttgttcttaaaaaaagggcccaaatttggcccaaacccaatccagtttttttcaaaatcccttttgtaaaaaacctgacttatttcatcccttgtgtaaatgccgcccaccttttaaaagtaaaatcaaaaccttccaacatttttttttttcataacatataaaacattttccctactttgcctaaggattaaccccacttatgggcccaaacacccttaacaggtgggaaaagggatgtaaagttattttgctcccaaaatataacttttttttaacctccacggggttaaaaaaaaaaatttcccaatgacaataaaacattctgtttgtttcaaaatgctttttagtttta

SEQ ID NO: 56850 - DNA, 604 bp, Homo sapiens
ccgggccccccctcggggtacttctagaattaattaacgcgggggctctgcagcctggcggagacgggaggaggagcggagggagaagtaggttgcgagctcagcacaggctccggcgctggttcccgcagctgagtttgggagatgtctaagtgattttttttttttcccggaaggcaaatggctggcgtggaagcacaacccgctttcactcttcgaatttgtgcttagctcttttcttgtaccttgcgactcgtgaccaacatgctgtgatgtgtgccgagggaggaattggtcagctacacaacctggatcttaccacagtttggatatgactgaggctctccaatgggccagatatcactggcgacggctgatcagaggtgcaaccagggatgatgattcagggccatacaactattcctcgttgctcgcctgtgggcgcaagtcctctcagacccctaaactgtcaggaaggcaccggattgttgttccccacatccagcccttcaaggatgagtatgagaagttctccggagcctatgtgaacaatcgaatacgaacaacaaagtacacacttctgaattttgtgccaagaaattta

SEQ ID NO: 56851 - DNA, 563 bp, Homo sapiens
  misc_feature 525: n = A,T,C or G
ccgggccccccctcgaaagtcttctagaattaattaacgcgggcttacaagctaatttgatataaatcttgatgtatgtctgttactgaatagtaaaaaaatgtgtgagcagtgaaattctaaacaaaattcattatatgaacttgggacattctaatgcactgggttttttttcttccatttgcaaacactaattgacagcgcttgaaaacagcgattcaggttccgcatgtgatatgatacctagggactgtacctatatacctcaggcgcactccactgactaatcagaagataagaagtacctctcaccttcaatcaactgaaatgtgtcagtaaaatacatttggcataatcttcacaaatgtcagatttggccatgacaggataggcacagtattcctgacagttttagcacaccaaagtctcatactcccggttagaatgagaaggaaaataaccacttttgtctgctatgctggataaaacttatacaaaacaagaggaaatctatgacatgccacnttgagtctctgactaacatgttataaaatgcctgactg

SEQ ID NO: 56852 - DNA, 420 bp, Homo sapiens
ggcggccccgcttttttttatttttttaaatattttttttttttttttttttttttttttttttttttttttttttttttttttttttttttttaaaaaaaaaacccccccccaaaaaccgggggggggggggaatttttaggggggggcccccccccccccaaaaaaaaaaaaaaaatcccccaaagggccccccccggggggggaaaaaccaaagggggttttttttaaaaaaaaggggggggcccaaagggggcccccccaaaaggggggaaaaaattttttccccctaaaaaaaccccccaaaaaaagggcccccccccccccatgggcccccccccccccccggggggggcttaattttttttttcggggggcgcccccccgggaaaaaaaaaagggggaataaacccccccccc

SEQ ID NO: 56853 - DNA, 438 bp, Homo sapiens
  misc_feature 16, 29, 45, 84, 398: n = A,T,C or G
cggggccccccctcgngggtacttctagnattaattaacgcgggnaaaattacaaaaggtataaatagccacaatgggaaatanccaggagaaaaagagagaagggaacaaaaacaataaaaactgatgtaataatatgagaatcttccaaagttactgacagacaccaaaccacagacccaaaaagctcagagaacacaggacaggataaatactagaaaatctgcaccttggtatacatattcaaactgtagactagcaaaaagaaaaatctttttttttttttttttggagacagactttcactcttgtcgtccaggctggagtgcaatggcgcgacctcagctcaccgcgacctccgcctcccgagctcaagcgattctcctgcctcagcctgngtgacagaacaagactccatctcaaaaaaaaaaaaaaaaa

SEQ ID NO: 56854 - DNA, 475 bp, Homo sapiens
tccaccgcggtggcggccgctttttttttttttttagtaaaaacagcttttcatcatgttggccaggctggtctcaaagtcctggcctaagggaatctgccccccttggcttcccaggggctgggattataggcttaacccaccacccccaccctaatctattaatgttttttcaggataataaaaggaacattccaaaaggttttaaaggaaaactggatcaaagggggtcacaaaacagtcacaaaatttacctacttttacaaaaagctgtattttgccctcaaagggctaaataaaaacccttgctaaattccaaactaaatttaccttgggtttatttttttaaaacactcataatttaaccttttttgttactccaattcaggggacacaattcccaaattcaaagctttttgatttaacatcaaagtaaccaggcccttctgtcaaaaaaggagtgatctgctaaatc

SEQ ID NO: 56855 - DNA, 242 bp, Homo sapiens
  misc_feature 23: n = A,T,C or G
ccccccctcggaagtcttctagnattaattaacgcggggcggtggcgacaacccattcgaacgtcatgccctatcaactttcgaggtagtcaccgcgcctaccatggtgaccactgtgtgacggggaaatcaaggttctattcctgagagggagcctgagaaacggctaccacatccaatgagggcagcgagcgcgcaaattacccactcccgacccggggaggtgctgacgaaaataaaaa

SEQ ID NO: 56856 - DNA, 432 bp, Homo sapiens
cccccctcggaagtcttctagaattaattaacgcggggggatgggaaggaacctgaaggcattttttccagagtggtgcagtaccactgaggactgttgctgtattgattaggaaaagagacagagtaatttgcagtttgtttgatttatacttttgtttatctacaacccaataacagacatgagggatggccctgtctctctgggacagagcctcacagatgatgtccatgttttgtgtgaatgaaactcaaacactcaaaaaaaaaaaaaaaaaaaaaaaaaaaaaaaaaaaaaaaaaaaaaaaaaaaaaaaaaaaaaaaaaaaaaaaaaaaaaaaaaaaaaaaaaaaaaagaaaaaaaaaaaaaaaaaggggggccccccccgggggggaccccaatttccccctatagggagtgtttttaccccccc

SEQ ID NO: 56857 - DNA, 471 bp, Homo sapiens
  misc_feature 28: n = A,T,C or G
cgggcccccccctcgaaagtcttctagnaattaattaacgcggggtgggtagcctaagctgattttctgctggttacacgtgtctctcacaccacatttcctcaaagctaatctgaattctgtaggctaaaaatattcatgtagcaaatctgagaattgaaaactgcagataaccggccgggtatggtgactcatgcctgtaatcctagcactttgggaggccgaggtgggtggaccacctgaggttaggacttcaagaccagcctggccaacatggtgaaaccccatctgtactaaaaatacaaaaatttgcctggtgtggtggtgcatgcctctagtcctagctactcgggaggctgaggcacgagaatcacttgaacctgggaggcggaggttgcagtgagtcgagataacactactgcattccagcctgggtgacagagtgagactccaccccaaaaaaaaaaaaaa

SEQ ID NO: 56858 - DNA, 517 bp, Homo sapiens
cccccctcggaagtcttctagaattaattaacgcggggcatatgaggtttattatgcttcatgacataagacaagaagatggaataaagaacttctttactgatgtttatgatttatatataaaattttcaatgaatccattttatgaacccaattctcctattcgatcaagtgcatttgacagaaaagttcagtttcttgggaagaaacaccttttaagctgaatggagaaaattccaaaataaattatatcaccacaatggtgtatactcaaaaaaaaaaaaaaaaaaaaaaaaaaaaaaaaaaaaaaaaaaaaaaaaaaaaaaaaaaaaaaaaaaaaaaaaaaaaaaggaaaaaaaaaaaaaaaaagggggccccccccgggggggacctccatttccccctatagggagtcgttttaccccccctcctgggccgtgttttaaaaacgtggggacgggaaaaaccctggggttccccaatttattcgcttggaaacaaatccccttttccccag

SEQ ID NO: 56859 - DNA, 362 bp, Homo sapiens
gggccccccctcggaagtcttctagaattaattaacgcgggacactagcatttttagtggctgaattaatgaaaattctgattaggcacttgcttgcttgtggaaaagccaacatcccttgttcccacaatattacaaactgctgaggtactgtttctatgtcaaacaggagaagttaatttgaaggtcatgaaaaaattttgcagaaggaatgaatgcctttaagttattgagaccacctgttgacacccagaagtctgcttgttcaaggtgttatctgagactgaagaaacacaggctctttcccttggttccctgaaactcctccttccttactcgctaaccctaaattaaaaaaaaaa

SEQ ID NO: 56860 - DNA, 535 bp, Homo sapiens
tccaccgcggtggcggccgcttttttttttttttttaaaaataacaaaaattttttcctaaaccttaaaatttacaaaattttccaaacaacccatacaaattggtcacaacctttttttaaagggggaaatctaccctttccaccattttttttaaaaaggcctaaaatctttgttaaatgcccccattttggtcccaacaataaagcttggccatttacagcgtaaaaataaagttaaacttggctaaaccatattctaaaaacctggttacctgcttttaaccactccatttaaacccccaaaaaagggggaaaggaccccataaaattaaactcccccccccctcaaaaataaattaaactaaattaaattaaaaccccccccccccctgcagctaacctgacaactaccttatttcacagggcttttttcttaacccaggatggggaaaataaataaaaccggggagggcccactgtttttaaccgtttcacaacaatccaaataatacttcaaccctttgctcatgctt

SEQ ID NO: 56861 - DNA, 261 bp, Homo sapiens
cgggccccccctacgaaatacttctagaattaattaacgcgggaatgaggatgaagattcaccaaataagctatatactttggttacctatgtacctgttaccactttcaaaaatctacagacagtcaatgtggatgagaactaatcgctgatcgtcagatcaaataaagttataaaattgcaaaaaaaaaaaaaaaaaaaaaaaaaaaaaaaaaaaaaaaaaaaaaaaaaaaaaaaagggggccccaaccaggggggggc

SEQ ID NO: 56862 - DNA, 376 bp, Homo sapiens
ccccccctagtacagtcttatagaattaattaacgcgggtgtatcggcgaaggggggacacctttcttggaggatcttgctgcacccgttccaccaccccatggtgccgagtgctccaaaataaatccaaaggtgaggggagggggctctcccaaaagggacaaaattcagcaaagaaaccaccctaaaaaactcctctcctccctggctggggtctactcacctgaaactcggccagcccaaacccaatttggttaactttgggcaaaaacccaccataatgagacctccttgtgtatcccactcacattttttggccctgtaactgaaacatgggaaacaagtggaaatgtcaggagggtcctgaacactattt

SEQ ID NO: 56863 - DNA, 339 bp, Homo sapiens
aattaatgaacgcgggtctccttatcctcaggtacagttaacactacaatgtaagctataggtggagcatcagcagggagggaggccttttttcatccttgaggatggggcaatgaaatgagggggcaagtccctttcttttttgaaaatcttcccccccttttcctgtttacatgaacccaaacaaaatgcattttctagtgccttctgcccaatcatttttttcctttgagagaaacgtactgggctacaaatttctgccttgttttgcaacattgccccattcacacagatttttggggataataagggaaaataccctacaaaaaaaaaaaaaaa

SEQ ID NO: 56864 - DNA, 351 bp, Homo sapiens
gcggtggcggccgctttttttttttttttttcacctttgaaaaaaaattcccccggtaaaacaaaattttggggtttcgggggggtttttataatttaaaaagtttccccctcccaactccaaaaagaggccattttaaaaagtttttttttttttaaaatccccccacctttaaaaaaacccccaaaaacatcctggaaaaggggggggggttggccccttccccccggggggcccccccccggttaaataaattaaaaaaacccccggggggggggccccggccccccctttttgcccctttaagggggggaaaatgccccccggggcaaacccggggcaaaaggggtt

SEQ ID NO: 56865 - DNA, 549 bp, Homo sapiens
  misc_feature 41: n = A,T,C or G
taccgggccccccctcggaatacttctagaattaattaacngcgggaacctaatacaatataaatgctatttaaatagttgtcgtattgtttagagaataatgacaagaaaaaaaagtacatcagctgtgtccaaccctttaaatgtgaggacttttttgcttatctgtggtggcagatatcacaaaaattgtacatggaccttttttgttgttgttgtttagctcatcagttgtcattagtgtattttatgtgtggcctaagacaattcttccagtgtggcccagggaggccaaaggttggacatctatggtgtacatattcagtacagatgcaattcttttttctgaatactttttcttttttttttgagacagagtctcactttgtcacccagactggagtgcagtggtgcaatctcggctcactgcaacctctgcctgctgggttcaagtgattctcctgcctcagcctcccaagcagctgggattacaggcatatgccactacgcccagctaatttttgtaattttagtagagacagggtttca

SEQ ID NO: 56866 - DNA, 448 bp, Homo sapiens
gcggcgtttgcacggagagcaaccactgcctccttacgggggtggcagggcgtccgaagtttgatcccactaacaaaagtccaaaacctccccagtaaatagttttgtgtcttttcaaaatatcgggaaaatattttttttctcgctgatcgcctaacttttactgacaaacctggaaagttgcaaagggtgggagtgcaagggcccgatctgggttgactgcaacctccacctcttggattcaagctattttcctgcctaaccctgccgagtagctggaattacaggcttgtgccaccgcacccagctaattttgtattttttagaagagagggggtttctccatgtgggccaggctggtcttgaactcctgacctaaggtgatccgcccacctcaccctcccaaagggctgggattacaggcgtgacccaccgcccccggccaaaa

SEQ ID NO: 56867 - DNA, 483 bp, Homo sapiens
agaaaaaatttaaaaccaccatttccttccatagggaccttttttcagagttttctaccccagtcttatttttctagccagaaaacttttgaaaaaatactgttacactaatactaactgtaaactgtctggagaaaaaaaaaaaatttgagaaacctttggttgggggaagttaaagtgatctttcaatatcataactaacttcttccatttttcccaaaatttgaatattaacgctaagggtgtaaaacttcaaatttcaaataaatctttctatttttttaaaattcacaaaattttatataccccactgctgaaaaaaaaaaaaaggattgttttaaaagtaaaagccaattttgattttaaatataagaagggagggcttattcccaatacctagggatatggcttcgttgcattttacagtatcttcaaaaatacaaaattaataaaataatccctcctcattaaatattttacaaa

SEQ ID NO: 56868 - DNA, 479 bp, Homo sapiens
  misc_feature 440: n = A,T,C or G
ccccctcgaaagtcttctagaattaattaacgcggggttaaatttatttttaagtgttttctttcttgtagctattaaaaattggattttttaaatttatttttcagatacagtcatgcatcacttaatgacaaagatacattctaagaaatgtgttgttaggtgatttcattatttttgaatgtcataaagtatacttacacaaacctaggtggtatagcttactgcacacctaggatatgttgtatagaatattgctccttgactacaaaactctacagcttgttactatgctgaatatggcaggtaattatagcacaatggtaagtatttgtgtatctgaatatatctatacatagaaacggtacattacaaatacagcatgattatttttggggtatatgttgttcatcatttaatgaaatgccactatgtggcanatgactgtagttcacagtcagaagttaccaatgatactg

SEQ ID NO: 56869 - DNA, 434 bp, Homo sapiens
tccaccgcggtggcggccgcttttttttttttttttttttttttttttttttttttttttttttttttttttcccccccccccgtaaaaaccccggggccccttttaaaaagagagagaaaaaaaaaaaaaaagggggcccccccccctttttttttaaaaaggggggggtttttttttttttggccccccccgaaaccccccccccaaaaaaaaaaaaaatcccccccccgggaaacccttttttttttccccccccccaaaaattttggggggggaaaaaacctttccccccccttggggggggtaaaaaccccccccttggggggaaaaaaaacaaaaaaggcgggggggggtttttaaaaaggggccccccaaccccccccccctttgcccccaaaggggggggtaaaaaatgtgccccccccccccccc

SEQ ID NO: 56870 - DNA, 483 bp, Homo sapiens
cataatttctcattatcttaaccacagtggggggatgatgactttaaagcttttacttcacgtcctcatacccttttataaaaataaatgaaccgggctgggtaggggggctcatccctataatcccaccacttggggaggccgggggggccaaatcatttgaggccagaaaattgaaaccaccctgaccgtcttggcaaacccccgtctatcctaaaaatacaaaaaatacccaggcttgggggcccacccctggggccccatctactggggaggctgaggcatgaaatttgcttaaccccggaaagtaaaggttgccgtgacctgaaatcaccccactgccataaacatgacaggctttgggactttgtataacctgtatgttttataagggaccatgcttaatttctcaggaaaataaattgagatttcttatttaaaaagaaaaaaaaaaaaaaaaccgcccgcccccgggggggacct

SEQ ID NO: 56871 - DNA, 396 bp, Homo sapiens
  misc_feature 248: n = A,T,C or G
gggccccccctcggagtacttctagaattaattaacgcggggatggttgtcacaaaaacaaaactatgccttctcttttttttcaatcaccagtagtatttttgagaagacttgtgaacacttaaggaaatgactattaaagtcttatttttatttttttcaaggaaagatggattcaaataaattattctgtttttgcttttatgtggtcttaattctttgtcttgtagagtaaaaatattacctanaaaaaaaaaaaaaaaaaaaaaaaaaaaaaaaaaaaaaaaaaaaaaaaaaaaaaaaaaaaaaaaaaaaaaaaagggaaaaaaaaaaaaaagggcgcccccccccgggggggacccccatttccccctttagggattggttttacccccc

SEQ ID NO: 56872 - DNA, 534 bp, Homo sapiens
  misc_feature 32: n = A,T,C or G
attaattaacgcgggcaccaattttcccgctnaaaaaaaaaaaaaaaaaaaaaaaaaaaaaaaaaaaaaaaaaaaaaaaaaaaaaaaaaaaaaaaaaaaaaaaaaaaaaaaaaaaaaagggggggcccccccgggggggaacctcaaatccccctaaaagaaatttaattaaccccccctaatggcccttttttaaaaaaggtggaaagggaaaaaacctgggctaaacaaaataaaatggcttaaaaaaaaatccctttttcccaagtgggaaaaaaaaaaaaaaggcccaaacaaatcccttttcaaaaaattggcccaccttaaagggaaaaggaaaattgaaaccttaaattttttgaaaaaatcccgtaaaaatttttgaaaaaaaattttttttttaaaaaaaaaggccaaaatgggaaaattcttttaaaaaaaaaaaaaaaaaaccaaaaaggggtgaagttttttcccttttgaaaaaaaaattcctttttaaaaaaacgggaactcaaacttaaaagggaaaaa

SEQ ID NO: 56873 - DNA, 566 bp, Homo sapiens
  misc_feature 28: n = A,T,C or G
cgggcccccccctcggggtacttctagnattaattaacgcgggctagcacagcattgcccaatagaaatacaatggaggtcacaaatgtgacccatatagttaattgtaaattttctaatagccacattaaaaagaaaacagcacaaataaacaaatgagaaaatctatttaactcaatatattcaaaatatttcatcatgcaatcaatataaaaaatttctttttgttggtcatgatggcctgcgcctgtaatcctagctacttgtgaggctgaggcaagaggattgcttgaggctaggagtttgtgactagatgggcaatatagtaagatgtcatcttttaaaaatgaaaaaattagctggccactgtggcacacgcctgtagtcccagctacttgggaagctgaggtaggaggattgcttgagcccaggagttcaaggctgcagtgagctatgattgtgcttatgaatagcctctgcactccagtctgggcaatagtgagtcggtcaaattccatttccccctccgccccatacctcttcaaatgttttaaaaaaaaaaaaaa

SEQ ID NO: 56874 - DNA, 487 bp, Homo sapiens
aattaattaccgcggggtgggaggaggggactccgggaggaggaacatggcgggggcggacctcgttctcattcctgatgtggacatcgtactccgacggcgttttaaagtttgtgctgatccgagtccactcggctccccgttccggggctccggttgcaaaaagcaaggaaatcgtgcccggttacaagggggctgattcccatgcggacttctacaacaaagtgtcgggcgacatgcaaaaccagggctgcaactgtaagtgttggggcggggggcccttttcccaccagagtcaggacaaaaaaattcacgtgtacggctattccatggcctatggccctgcccaccaccccttttaaactgaaaaaatcaaagccaagtccccccactacaaggtcacctgggctaacaatggttactgaccactcccagcccggggcctgttgcctccaccagccatttaaaaccccccgcctttgcctgc

SEQ ID NO: 56875 - DNA, 532 bp, Homo sapiens
cgggccccccctcggggtacttctagaattaattaacgcgggggcaccaagatggccgcccccgtggatctagagctgaagaaggccttcacagagcttcaagccaaagttattgacactcaacagaaggtgaagctcgcagacatacagattgaacagctaaacagaacgaaaaagcatgcacatcttacagatacagagatcatgactttggtagatgagactaacatgtatgaaggtgtaggaagaatgtttattcttcagtccaaggaagcaattcacagtcagctgttagagaagcagaaaatagcagaagaaaaaattaaagaactagaagtaagtttttattggcaataggagttaacttttgggagaaagtagtaatcttattgtgtcatattaaatgaaaatgtatgcctgcctgccaaagtaatgtcatattatttttattttctataattacgttggagccgtgaagctgtcatattcatattcatagcgcatataagaccaaaacaaaaaaaaaaaaaaa

SEQ ID NO: 56876 - DNA, 559 bp, Homo sapiens
attaattaccgcgggggaagggaatgaaaagcaacccccttgttgaagccatcattaccatccacatcctttttattcctgcacctgcccctgctgggaggggggctaaacacaacatttctgacccccaatggaaataaaaaccccacagctgaaacaatcaggggtttataaacttaatttctctttccctagtggggatgggcaaaaaccctacacttttcgtgttcggacccgtttaaccccattttgggaaagtgctcacctttggagtgaatggacccacccattccagtgggggagcattacttaaaagggacaatcccccaaattcccaccctaaaaaacctaaaggattttgttactgaataccacggaaacttttcggcctgaagtggtgtgtctaagggactggctgaaagtctgcacccaaactacaggaaacaactttgcctcgtaagtgaaattcccccaaagggagggccctttggggaggggcctgggccctccccatgcacccagcataccccttactgggcccccctatgttacaccctaa

SEQ ID NO: 56877 - DNA, 191 bp, Homo sapiens
  misc_feature 29: n = A,T,C or G
cgggcccccccctcgaaaatacttctagnattaattaacgcggggaaatgaactaaggtgtctaccatgattatttttctaagctggttggttaataaacagtacctgctctcaaattgaaaaaaaaaaaaaaaaaaaaaaaaaaaaaaaaaaaaaaaaaaaaaaaaaaaaaaaagaaaaaaaaaaaaaaa

SEQ ID NO: 56878 - DNA, 549 bp, Homo sapiens
attaattaccgcgggactgggggtgtaggtccattatgggaggattttacttatttcttacatggaaaaaataacatctttagtaatcactgccaggggctttaaactgcaaatgagtaaaattttgtccccataaataaaatttggactctttattattaaaattttttatttgtatgcgggggtatataatatgtgtatatatgtatgccttatagggcattttttgactcaggcctacaatatgtagaaattactttagggaaaatagggtttccctcacctctaccatttatcttttgtataaccaatagggaaattatatgcttttattcatttaaaaaggtacaattaatttgttattgactacaaaattttttctatgatcataatatttatacaaaaatgtaaataaaatccggccaggcacaggggctcacgtttgtgatcccagcacttggggaggccaacacaggtggaatgcttgaggttaggatttcaaggccaccctgcccaacgtggagaacccttgtctctactaaaaaaaaa

SEQ ID NO: 56879 - DNA, 453 bp, Homo sapiens
gcggggaacagaaggaaggctcattttttctgctcataacacggtccttcggcactgtagcttgggggggggggctgcaaattatttttgcacccacctaaaaaaaatacggaactttaactccttgccactaaaaaaatgccctcctttaaaaaatatcccttccgcatgtctcgtctcagggcccggtttttgggggaagtccccagccctactaattccaagtctatgaagggggggaaactgttaagtgacctgccctgggccaaaaaaagggaaacttatgatgggtatccaaatcaccacccttaccctgaactcatgcaaaccctccgattttttggactctacagagatgaccttcgggattttttgggtgagcaaaaccaactaaaaacgcttcggggaagggacaacccaaggaagggagaggggaaaagagcaccaaaaggg

SEQ ID NO: 56880 - DNA, 156 bp, Homo sapiens
cgggccccccctcggaagtcttctagaattaattaacgcgggctcgtgagtcatttaaatgtgtacaatgtacacactggtacttagagtttctgtttgattcttttttaataaactactctttgatttaaaaaaaaaaaaaaaaaaaaaaaaaaa

SEQ ID NO: 56881 - DNA, 292 bp, Homo sapiens
ctccaccgcggtggcggccgcttttttttttttttttggcaacacccccccggggggggagaggggaaaattgccccccctgctcccttcttgggaagggggaacccgttttaaaggctccttttcggaaaaaaaaccttaatcccccgccccccggggccaccagggagggccgggaaaaaacaacccccggttaaataaatttaaaaaaacctttaagggggggccccgaacccaattttttgtccctttaaggaagggaaaatggccccctgggcaaaaaaagggaaaa

SEQ ID NO: 56882 - DNA, 583 bp, Homo sapiens
  misc_feature 28: n = A,T,C or G
ccgggccccccctcggaagtcttctagnattaattaacgcgggcccacaatggtcttgcggttccgagcaatgcggtcaagcaaggggggaagccagttgacattggcttcacagtgtgaatccaagaatgtgatgacatccccagttgccactgaggcccccagcattcgggtccttatcagcccttcccgtttcttggttcgaagaatcctcacactggggaaaagggccatgtagtcttcaagaggcttcttcaggtgctctcgatcactgaagtcgtcgaccagtacaatctcggcgaccagctctggaggcgagcgattgagcacactgtggacggtgcggaggagggaggaccagccctcgttgtggaaggggatgatgatgcttgtgttgggaagtgtctccaggtagcgcttgctgttgcagtttgggtgccggatatctgggagagagcgattcaaggagattttatcactgacgtagatgttaaatccattttctcggtatgcctgatccactctctcagcatcggtcatggggtaaggtcttccttgttctccatttcctacgcgctgagcg

SEQ ID NO: 56883 - DNA, 322 bp, Homo sapiens
  misc_feature 28: n = A,T,C or G
cgggcccccccctcggggtacttctagnattaattaacgcgggtccttctgaatattgtactctggttcccaatggtgggctctgccgccagtgccatgtgggtctgccctgcagcatccagtgatcatccacaaacacggctcactcctgcccctcactgcccaggcctggcccttaccatctcccagacgaacatgaccccttctcctcggacttgctaggtgggctgaacccggtgtgtgctgctgaacacaaccctcctgggggaaggaggaaaaaagacacaaacaaaaacaaaagacagaaaaaaaaaaaaaaaaa

SEQ ID NO: 56884 - DNA, 217 bp, Homo sapiens
tagaattaattaacgcgggaacgagagaggcaccgggatcgtgaccgagaccgcgaccgagagcgtgaccgatagcgcgaatatacgtcatcgtgtagaagtctgaagggaagtaggatgcactcttgcaagacaaaacaggctgcatgggggaaaaatgacgcttgtccagcagtgggctgcttgtgatggaactgaacctggggggatggatggg

SEQ ID NO: 56885 - DNA, 188 bp, Homo sapiens
  misc_feature 35, 36: n = A,T,C or G
ccccccctcgaaatacttctagaattaattaacgnncgggcatattgaaaagcacagaggatttctttagtgtcattgccgattttggctataacagtgtctttctagccataataaaataaaacaaaatcttgaaaaaaaaaaaaaaaaaaaaaaaaaaaaaaaaaaaaaaagaaaaaaaaaaaaaa

SEQ ID NO: 56886 - DNA, 483 bp, Homo sapiens
  misc_feature 24, 467: n = A,T,C or G
attaattaacgcgggccaacttantctgtaggtgaaaaaactgctcagaattatctatgaattcaatttgttttacatattgaattgaaaaacatgatgtatattttgcaagattttaaagacactgaattttccaaaaatgcaactaccatacacatgtagacaaaattgttccttgctttgggcagaactttctgagagttggccaccttttggcaaattccgtgcacagcagcattgctctggaaaggcacttatagccgactgcatttgtagcacacacattcatggtgattccagagataaccagcttctcaccaccttatcacgtcttccggcatagttgtgcccaaacataaacattttattgttcttattaattcaaaataaacaacttgccctttttgtctctttataagtagggcagcatcacgatttttttaattgtggtaaatacatgtaatatntaccatcttaaacatt

SEQ ID NO: 56887 - DNA, 205 bp, Homo sapiens
cccccctcgggggtacttctagaattaattaacgcgggggcttaacacaaagcacccaacttacacttaggagatttcagcttaacttgaccgctctgaccacaaaaaaaaaaaaaaaaaaaaaaaaaaaaaaaaaaaaaaaaaaaaaaaaaaaaaaaaaaaaaaaaaaaaaaaaaaaaaaaaaaaaattaaaaaaaaaaaaaaa

SEQ ID NO: 56888 - DNA, 242 bp, Homo sapiens
  misc_feature 185, 186, 205: n = A,T,C or G
ccccccttcggggtacttctagaattaattaacgcggggatagaaagcatctaaaagtttaggctcaagatcaatctttacagattgatattttcagtttttaatcgactggactgcagatgttttttcttttaacaaactggaattttcaaacagattatctgtatttaaatgtatagaccttnngatatttttccaatactanttttttaaaaaattgtatgatttaacatatgaacctc

SEQ ID NO: 56889 - DNA, 231 bp, Homo sapiens
  misc_feature 106: n = A,T,C or G
gggccccccctcgaaagtcttctagaattaattaacgcgggcattttctaggtgctttttgatcaacaaaataacttgtatcttctgcttaactcctttatactancctggagaaaagtattttccatattttcaataaatgtcagacactattgagaaagaaaaaaaaaaaaaaaaagaaaaaaaaaaaaaaaaaaaaaaaaaaaaaaaaaaaattaaaaaaaaaaaaaa

SEQ ID NO: 56890 - DNA, 309 bp, Homo sapiens
cggggccccccctcgaaagtcttctagaattaattaacgcggggggttgtggggggttctgtgtgtcagtgaaaactctctcaactttgttgggtccttcaacctggcatctctgctcagcaagcacaataattaaagctcaatgtagatcaatggtcttgactctattggaaagacaatgggtataatctagattacatgtgtgattatttgtttttctgtttaaactgttttttcaaaaaataaattttattctgtaaaaaaaaaaaaaaaaaaaaaaaaaaaaaaaaaaaaaaaaaaaaaaaaaaa

SEQ ID NO: 56891 - DNA, 549 bp, Homo sapiens
tccaccgcggtggcggccgctttttttttttttttggccttaagggggaggggggggcaccctccattccctccccgggggacccaagggtttttttcaaaaagggttttttttttaaaaaaaggtcccaaaaaaaaaaaaataccttcccttttgggaaataccagaaaatttttccccttgggccctttaaaaaacatccccggggccctttatttttgaaaccaataatttttttctaaaaaaagggttccccggcatccttgtaatttttataaaacccaaaggggcccaggactgggttcccacaccccttgaagccctttttaaactttttaagtctggcacctttccccctcttgaaacctttgttgaaccacaaacaattttaatccttgataaaaacaaggaccttttttttttttggacctttttgccccaatttttgccccaaatagaacccctaaaacatgttttaaggcccctaaggcctttcttttcaaagtttgggggttccctaaggtttataaccaaccttacctcattttt

SEQ ID NO: 56892 - DNA, 503 bp, Homo sapiens
cgggccccccctcgaaagtcttctagaattaattaacgcggggacttcactttggtgccaatggacagaaaattctacctgtgctacataggagaagtttggaatgcacttaatagctggtttttacaccttgatttcgaggtggaaagaaattgatcatgaatctctaataaatttaaatctcttaaaccagtaggtgcttaatattttttgatttgattaatgcccatttaaatctcatgggttctattaaaaatatatatatatagggccccaatccattgccatcaaattgcccttggacttttccaaggtatattatggggttttatgcaaaattccaagctaccatgtaactttttttaaccatttaacaaggagggggaactgtttcctaccttctttacatgttgtgcactgttgtggtccagaaatgccaaacctttttaaagatggtgcaactttgagtccttggcttgactatacaggtcttgaacttcatg

SEQ ID NO: 56893 - DNA, 429 bp, Homo sapiens
cccccctcgagagtcttctagaattaattaacgcgggaagcaaagaaatgatttttaatctgtatgtaattgttttaaagcacccattttaagagaaaatactgtgcaatgaagaaaccagtttaggcatttgctataaactgaaatattccaaaagaatcatctataacagccctgtaaattcctttaaaatgataactaacaggacagtttgaccaattttttttaaatatacttccttttatgtgttcaataattaaatgcctttgggtccttcaaaaaaaaaaaaaaaaaaaaaaaaaaaaaaaaaaaaaaaaaaaaaaaaaaaaaaaaaaaaaaaacaaacaaaaaaaggaaaaaaaaaaaaatgggggccccccccgggggggacccccaatcccccctatagggagtggaataacccccccc

SEQ ID NO: 56894 - DNA, 475 bp, Homo sapiens
  misc_feature 177, 178: n = A,T,C or G
aattaacgcggggggccctatcaactatccgctgccggctcgatatgaacagtgggaagtacgacctggagaacccgccgacgcccatactgaacagacaggggcaagcgaacccgggcgtgctagctgacatcagcccagcttcgagggaaccggcacactacaacaacgctgtgnnctccataaccggcgtccatcaggacagacggcgatacatctggaactggacgcagaatgcggagaatgctacagagcgcgcacactgaccacgatcgatgcaagcgactgtcacctcatggggaccgagcccaaccagactgctgagagtgaaccttcacacactacaaaatcacacccgcaaaccttagacctgaacatggccctccaatagaatgagctgagcttgcacagataccagaaggcagccaagctcttccaggggaagattctctttattctggtggacagtggtatg

SEQ ID NO: 56895 - DNA, 622 bp, Homo sapiens
cccccctcggaagtcttctagaattaattaacgcgggctttagtgatatctgtgacattttattcccccccaaaaaaagcatgcacagtctgatgaaaatggggcaaaacgttaacatctgtttaatctcatagtgtgtgactttcttgtatttctaaaatatttcctaatttaaaataaaattttaaagagattacaagtgaccaaataaaccaaggaccacatacttgtatggtgttcaaaacgaaatcactaaaatctagagaactaatctcagttaacaaaagccatccgaaggctcagatatttcccactgactcacatacagattagagtaagatttacttcacaataagagcaggctcatttatgtggcaaagtttggagaagcttcacagataatttactactcaagaccacatttacccaggttgtatcagtatcagttgtatctagaaccaggaggctaaaaagaaaaaagaaaaaaaaaaaaaaaaggcctagatgaaaagccaaaataggtgatacaaagtccgtacaataaaacgcataccctttactcagaagagaatccaacaaactctcacacagcaattgattttttagcccaaacaagcttgtt

SEQ ID NO: 56896 - DNA, 581 bp, Homo sapiens
  misc_feature 28, 50, 491, 549: n = A,T,C or G
ccgggccccccctcggggtacttctagnattaattaacgcggggtatatngatgaaaagaaagtctgctttccaccacaaactcccagcctttccttaccccaaccccccaatccaagcaaccatattcaatcacatatgtctaggagaaatatattgtatctttcattcttatctttggcatatgaagatctttttgtatttagcacatatttcttacttttttaaaaaagaccgcatgccttgctagtgtagatgaaccataatttattcattttccgtaatttattttaccattttctattgacagatatttaggttgtttttagccttctacaaacactgctgtaatgaacaatacatatataagtctttgcattagttagtatctatacagaatgtattttcaaagtgtgactgtaagattgagactgaagttatgaaaagttaaaactatttcaatcccatgttggctttatttataatagaatntaacttatttcttgggcttgtggaaggggaaaggagctcttaattactttgtattctntatccatctctccatttaaaaaatattgcaaa

SEQ ID NO: 56897 - DNA, 325 bp, Homo sapiens
cccccctcgagagtcttctagaattaattaacgcggggaccctcgttttgccatgaaccagagaatcagtcagagtgctccagtgaaacagccaccacccctggctccccagagcccacagggaggcgtcatgggtggcagcaactccaaccagcagcaacagatgcgactgcagcaactgcagatggagaaggagaggctgcggctgaaacagcaagaactgcttcggcaggcaatgcggaatatcaatcccagcacagcaaattctccaaaatgtcaggtaggctcttatctgatgttttagcactggaaaaaaaaaaaaaaa

SEQ ID NO: 56898 - DNA, 231 bp, Homo sapiens
ccgggccccccctcgaaagtcttctagaattaattaacgcggggctgtgtgactttgggcaagataacttatcctcttgtccccatgtgtcattggagataaactacccacttaccagattgttgtaccatgctgggcaaacactaagtgcttaataatggtagcccactgaaaaaaaaaaaaaaaaaaaaaaaaaaaaaaaaaaaaaaaaaaaaaaaaaaaaaaaaaaaa

SEQ ID NO: 56899 - DNA, 567 bp, Homo sapiens
cttctagcaattaattaacgcggggaaggtatgcttttacctgctgtgacagaaagtcaatagacagtgctggcaattaacttagctattctatttttgttctttcattaaaaataagattaaatatttaaggcaatttttttttttttttgagacagagtttcgctctgtcgtccaggctggagtgcaatggcgcgatcttggctcactgcaacctccgcctcctgggttcaagtgattctcctgcctcagcctcctgagtagctgagattacaggcatgcaccaccacgcccagctacttttgtatttttagtagatacagaatttcaccatgttggtcagggttgtctcaaattcctgacctcagatgatcagcctgcctcggcctcctaaagtgttgtgattacagacattagccaccatgcccagccttaaggcagatcttttgaaccggactattgaaatttaacttaaatgtcagaaatctttaaaaggtggacacgctaaactaagcacttttctggataaatttaatactcaggaaaatagaagagatttagaaaatc

SEQ ID NO: 56900 - DNA, 530 bp, Homo sapiens
cccctcgagagtcttctagaattaattaacgcggggtgggcaaagttctggttaaggtgagatggccaggaagagcaccataaacccagggtaaggtttgttatcaaatttaagtcttctccattgattagagtctctagtgatttagtcatcctcctcttcctggtgcacagagggagacgcccttacaaatagagatttcctttatagacatcaatttccttacaaaaggaactctgctttcaaagcttttcctgtgcctgccttttcccaaaataatcagcacaaaataatccttatgccaaagaggcatgttttggggagatatgccctgagccccatcattgtcattgtcaatttcatggttgttatgctgtattaaaattatgcaagatgccagacgtggtggctcacacctgtaatcccagcattttgagaggctaaggcaggtggatcacctgaagtcaggagttcgagacagcttgaccaacacgttgaaaccccgtctctactaaaaaaaaaaaaaaaaa

SEQ ID NO: 56901 - DNA, 144 bp, Homo sapiens
aacgcggggcagattttttagcttaggcctggtggctacgtcgttctctcctttccagtcggaacctctgccgcaaacatgctccgcagacatcggtcagccaagaacatccgagcttgatcccctcttgttttattggactgg

SEQ ID NO: 56902 - DNA, 631 bp, Homo sapiens
cgggcccccccctcggggtacttctagaattaattaacgcgggagtcatttaagaacttaaacttaggaactaaaacattttcaaatgtggggaaatttcactttcaagaaagctagaaatgaaccacctcacagtatcaaagactagaatatttatgtttttaaaagtaatctgaattctcgttttttttgtttgtttgtttgttttaaatgagggactcattctgtcacccaggctggagtgcagtggcgtgatcacagctcattgcagtctcaatcccctaggctcaagcaatcctcccacctcagcctcccaagtagctgggactacaggcatgcgcctctatgcctgactaagttttaaggttttttttttttttttttttgtagagacagggccttgctatgttgcccaggctggtctcgactgaggtctccattcttataaggagaaacaaaaagtattaatagggaaaggaggttatgacttcaccatcagcatacccaaatgagaggctgattcctccatagtttcaagtgactattaaaaaggaataacacaagccatggaagactgaattagcatcaagaaatctacatcatactgtgaaataaaacaaacaaaaaagta

SEQ ID NO: 56903 - DNA, 500 bp, Homo sapiens
  misc_feature 37, 38, 52, 53, 73, 74, 89, 98: n = A,T,C or G
gccccccctcgaaagtacttctagaattaattaacgnncggggtgtcacttnncattctgaaaaagggaatgnnaaaccttgagcacangctaacatngaaagagataggcagaagtcaggagggtttctttggggccagctatgttgtagctagccttttagcattttggattttgaaatgtcttgaaggcagaaggagaatatatcatctatgaacagtatttatggagtagctgaaatgctaccatatcataggcagctaaaatctgtttatccatttgggaaggtggcttttcaggtagttatttggctgctcacctggaagaactcacagttcatttttagagattggtttttaaactttggtgttaggacccttttatattttaaaatttgatgagaacccgaaaatgctttggtgatgtagatataataaccagggtttactgggttgtaaatgaaaaattaggaattaaaaaaattgcctattaaaaaatga

SEQ ID NO: 56904 - DNA, 601 bp, Homo sapiens
  misc_feature 23: n = A,T,C or G
ccccccctcgaaatacttctagnattaattaacgcgggggggcccgtcaagctgcacctgacaggacttcctgatccatttgctaaggtggtggttgatggatctgggcaatgccattctatagatactgtgaagaatatgctcgatccaaagtggaatcagcattatgacctgaggtgaagtgaaatctgcaagagtcctgctcgctcaaggcctgcatacaggaaagaagcaggggaaaagcgttacaaacagcttttgttctacagcattttaaaatataacaggtatattgaaaagtctgattcagttacaatcagtgtatggaatcacaagaagatccataagaaacaaggtgctggatttctccgttgtgttcatctttttccagtgccatcaaccacctcaaagacactggtttaatattgaatttatcaaatatttattgagcacctacctgatgcaatgttctactgggttggagtggaaaatacaaagactacgatatggtctcctccttttatcaattcacaaataagtagacagatggcatacggttgtaaaattattcagctatcagaggttggatttatgcaaacct

SEQ ID NO: 56905 - DNA, 460 bp, Homo sapiens
  misc_feature 22: n = A,T,C or G
cccccctcggaagtcttctagnattaattaacgcgggctatgatatttattataatattgagtagtcattgcttttatattaaccagatgtactagcccattctcacactgctatgaagaaacacccaagaatgggtaatttataaagaaaagaggtttatgcaggatgtgcgtagtggctcacacctctaaatcccagcactttggggaggttgaggctggtggatcacctgaggtcaggagttcgagaccagtctgaccgacatggtgaaaccccgtctctaatacaaaaaaattagccaggtgtggtggcacatgcctgtaatcccagctacttagaaggctgaggctggagaattgtttgaacctgggaggcagaggttgcagtgagccaagatctcaccattgtactccagccttggtgacaagagcaaaaatctgtctcaaaaaaaaaaaaaaa

SEQ ID NO: 56906 - DNA, 637 bp, Homo sapiens
cgggcccccccctcgaggtacttctagaattaattaacgcgggggatgaaatccaaggtgaatcttttggttggtgattttgatgatagccacaaagcaagcaggctgtatggtagccttgaaaaccaacaggccacaatcacagtgaaaacctcaggttggcagccactggaggatacaaaatgagtttggatctccttcaatgccccattcccagagaactgtcattatttgacctgctggtagttccctaaaggacgtgcaaggatgtttttatttgactggacacttgaagcttgccctgtatgaacagcccccatcttcccatgcttgtcaaaaatcagaggcaactaacactgcggcttcctgagagtctcactctgtcacccaggctggagagcaattgcacaaacacttggctcactgcagcctcaacttcttgtcctcaagtgatcctcccaccttagcctcctaagtagctgggaccacagtggagacggggtttcaccatgttggccagtctgctttcctcctaacctcaagtgagccgcctgcctcgaagatgctttatttatatgcgctttggacacactttaataaatgctctattgtatacagtttgaactctatataacat

SEQ ID NO: 56907 - DNA, 478 bp, Homo sapiens
cgggtccccccctcggggtacttctagaattaattaacgcgggctttctttcaataaaacgcagttgcaaacacctgaaaaaaaaaaaaaaaaaaaaaaaaaaaaaaaaaaaaaaaaaaaaaaaaaaaaaaaaaaaaaaaaaaaaagaggaaaaaacataacaccctataaagaaataaaataaaaaacactaaatgggccccccccccgggggggggcccctgttccccctttgggggttttttttttccccccctttgggcccttttttttaccctggtggtggggaaaccccggggcttcccccattttttccttttgaaaaattccccctttttcctggggggtggaaattgaaaggggccccccccgtttccctttcccaaaattgtcccccccttaaggggatttggtaacttttgggcttaatttttcgaaaaacctccgggttaatttttttaaacccaccttttttttt

SEQ ID NO: 56908 - DNA, 508 bp, Homo sapiens
  misc_feature 89, 472: n = A,T,C or G
ccgggccccccctcgaaagtcttctagaattaattaacgcggggttcagactgctattgaaggaaattctttgggggtaagtgacttangaaaattaactacctaactcagctcttgttaatgagatagttactcctgaagaagttggatttttagaagaaaaaaaaaggaaagtcagttactactaggtaaggttagtgggtacacacagttttctttaaagaggaacacaagattcagcagtgaagcctggagttctgatttcgaggcttgataactctggccttgtctctagtactcggagttctgactgtcctttggaggaaactgtatactttggctgcagcttcagtggcaattcttaggtaaagccaagggctaaatccagaattcaggagcaggattgggatggtttgctgccactatggcagtactgaaatttagcaagcaattcttttttttctcaccctgngcaacaagagcgaaactccatccaaaaaaaaaaaaa

SEQ ID NO: 56909 - DNA, 615 bp, Homo sapiens
cgggccccccctcgatagtcttctagaattaattaacgcggggaatttaactttacttcaaaactgctttctgcctattaggagtgaggatacctaagtaatgctgatagaacaggacaatgttgggcttttctccatgttataagccactactcagcaatgcatcagtaaatacctattcacccactgtatgccagccactgtgcttatatgcaggggatgcaaaggtgcatgagacctgccctctacctttaagaacagtataatggagaaggggagacaaaccttgtgacagattccttatgtactgtgataatacacagtggcagcagctaaaatgtctaggtttgcttagctttgtattcagtaataataagttgatctaagagttcagcataaactgaatgaaatgccatttaatggtagaggaaccaagcattaaggcagtactacacttaattttttaagcaaatatgtaaagtatattttcaaacttttctaatgttatggccccaaatttcttagttttggcctttttactacctatactatttttactgttttgttttgtctccatgtggtagtacttctgtgaactctaaagggaaaaaaaat

SEQ ID NO: 56910 - DNA, 208 bp, Homo sapiens
cgggccccccctcgaaagtcttctagaattaattaacgcgggctcttcatttattttgactgtgatttatttggagtggaggcattgtttttaagaaaaacatgtcatgtaggttgtctaaaaataaaatgcatttaaactcaaaaaaaaaaaaaaaaaaaaaaaaaaaaaaaaaaaaaaaaaaaaaaaaaaagaaaaaaaaaaaaaa

SEQ ID NO: 56911 - DNA, 580 bp, Homo sapiens
  misc_feature 27: n = A,T,C or G
cgggccccccctcggaagtcttctagnattaattaacgcggggagaagggtgggaagagagcataagcatcccattactgcagcccacatgtatggaatgatggagcaatgggacaagtacctggaagacttctccacctcgggggcctggctgcctcacaggtatgaagacaaccaccataactgctactcttacgcactcacgttcattaactgcgttctgatggcagaaggtagacagcaactggacaagggtgaatttacggagaagtacgtggtcccgcggacaaggctggcatccaagttcatcacactctaccgggcgatacgggagcatggcttctacgtcactgactgtccccagcagcaggcacaaccccctgagggcggcggtttgtgctgagagctatgtaagcgcagcctggacgctggagggtagggtggttgctacctttaatcagtactatggatttctaaatgcatttaactgtggttaataaaagcgtgtatgggccgggcatggtggctcacacctgtaatcccagcactttgggaagctaagacaggtaggtcacctgag

SEQ ID NO: 56912 - DNA, 528 bp, Homo sapiens
gggtaccgggcccccccctcgaaagtcttctagaattaattaacgcgggatttataaatcatgcactctaagatgagttcatcaacattgtaaaagccctcttttctgttttcaggtttttttttttcttatcgacaaggtctcactctgtcgcccaggcagaagcacaaaggtgcagtattggctcattgcagcctcgaactcctgggctcatattttcagggttttttgttttttgttttgtttttttgagacagagtcttgctctgttgcccaggcagtagtgcagtggcgcgatatattttcagtttttaaacgtcagaatttttgtttaaaatgcctttttgggctgggcacagtggcttatgcccataataatcccagcactttgggaggccgaggtgagcagatcacctgaggttaggagtttgagaccagcctggccaacacgatgaaaccccgtctctactaaaaatacaaacaaaattagctgggcatggtggcggacatctgtaatcccagctactc

SEQ ID NO: 56913 - DNA, 456 bp, Homo sapiens
  misc_feature 17, 28: n = A,T,C or G
ccgggccccccctcggnagtcttctagnattaattaacgcgggactcattgaacttgctatattaaccttttttatttcccattttttgttctgttccattgtttctgttcattcaggttaccatctggtgtcatttccttactccaagacaactttgctctcacctgactcttttgtacggttattgtctagtatataatatttctatagttacagacttaaaatatagaaaaaatttatttttaaaccaattaagagaaaagagaagaactatgcatttatactattatttatggttagataattatctttactggtgattttttaaagtgtggatttaaattactctctagagtcacttgctttcagcctgaaggactttgtttagaatttataatatttcttgtaaaatggttctactagcaacaaattctctcaacaaaaaaaaaaaaaaa

SEQ ID NO: 56914 - DNA, 377 bp, Homo sapiens
cccccctcgaaagtcttctagaattaattaacgcgggcaccatcccagccagcatggtgctatcccagaaaatatggcaccattctaaccaacatggcaccaccccagcctcaggtattcctttatagcaatacgaatggactaagacactggcatagcaataacactaataaatatatattgactgaatgaaagaacaaacatgttatctttctgaaagaatatattttttggccgggcttggtggctcacgcctgtaatcccagcactttgggaggccgaggcgggtggatcacgaggtcaggagatcgagaccatcctggctggcatggtgaagccccgtctctactaaaaacacacacaaaaaaaaaaaaaaa

SEQ ID NO: 56915 - DNA, 499 bp, Homo sapiens
cgggccccccctcggaagtcttctagaattaattaacgcgggggagtatacgtctttcttttattctcagtgctgatgatagagtcacagtattttttctgggtgaacatggacagaaaagctggaaaacagaatggggagatacagtggatttcagcacccttacatctatcgggttacctttgccacagctaatgaatcctcagcgttgctaattaggatgtttaacgaaaagggaacattgaaggatctgatctacaaggcaaaaccaaaagacccatttctaaagaagtactgcaaccctaagaagattcagggcctggaactccaacaaataaaaacatatggacggcaaatattagaggtactgaagtttcttcatgacaagggattcccttatgggcatcttcacgcctccaatgtgatgctcgatggggacacttgccggctgctggaccttgagaattccttattgggcctgccttccttctaccgatct

SEQ ID NO: 56916 - DNA, 336 bp, Homo sapiens
cgggccccccctcgaaagtcttctagaattaattaacgcgggcatgtaagatataatatagtcaggtaacatataatgatgtttcggtcaatgaccacatataggaaggtggtcccacaagattataatactgtatttttactgtgccttttctatgtttggctatgtttagagacacaaatactcaccatgttacaaacagctacagtattcagtacactgagggccatacagttttgtagcctaagtgcaacacgttataccatttagccagggtgtgtagaaagctgtaccttcttggtttgtgtgaatacactttatgatgtgtgcatgatg

SEQ ID NO: 56917 - DNA, 352 bp, Homo sapiens
  misc_feature 315: n = A,T,C or G
cggggccccccctcgagagtcttctagaattaattaacgcggggtcttttctgtgtttggtcgatattaataatggcaaaatttttgcctatctagtatcttcaaattgtagtctttgtaacaaccaaataaccttttgtggtcactgtaaaattaatatttggtagacagaatccatgtacctttgctaaggttagaatgaataatttattgtatttttaaaaaaaaaaaaaaaaaaaaaaaaaaaaaaaaaaaaaaaaaaaaaaaaaaaaaaaaaaaaaaaaaaaaaaagaaaaaaaaaagagaaaaaaaatnaaagaggggccccccccgggggggaccccccatcccc

SEQ ID NO: 56918 - DNA, 574 bp, Homo sapiens
ttctagaattaattaacgcgggggagatcatgttttcttaatatgctggaatttaaaaattgttttacttgtatcgaaattaaccttgatttataactatttttgtaataaaacaatgacagctgtagtaactatgatgggtgtaacaacatttttttaaagaagggaatctgtttatcgcttttcaaaatattttctaaagtgggggaagaaagtttatagactttccaagcacatttatggttttttattactattattatggttttaaaaagagtaactttatttctttttgtaaggaattaagtaatatcctttacagttctgtgaaaggacttattttttaactgtaatatttattagttttaaaatatttgtatctcatttgtaacaatttgttttaattttttatatatatgtttttatttttaaaaaacataccagttgaatggggttaaagctttcaatatcttaaaatatttataaaacatttcactgttgcaaaatcacttccaaaatgatagctatctaacaactaattactaatttttaaagaacaaatcacacatttaaa

SEQ ID NO: 56919 - DNA, 165 bp, Homo sapiens
  misc_feature 43: n = A,T,C or G
cgggcccccccctcgaaaatacttctagaattaattaatgttntctggaaaaatgttcatatatatgtatatgaatgtctctttatgctgaagggctctgattgggcaaaataaaatactctaatctctcctgaaaaaaaaaaaaaaaaaaaaaaaaaaaaaaaa

SEQ ID NO: 56920 - DNA, 428 bp, Homo sapiens
  misc_feature 29: n = A,T,C or G
ccgggcccccccctcgaaatacttctagnaattaattaacgcggggtggggacagacttgctggaggaggagatcaccaagtttgaggagcacgtgcagagtgtcgatatcgcagctttcaacaagatctgaagcctgagtgtgtgtacgtgcgcgcgtgcgtgaggccctgccacgattaaagactgagaccggcaaaaaaaaaaaaaaaaaaaaaaaaaaaaaaaaaaaaaaaaaaaaaaaaaaaaaaaaaaaaaaaaaaaaaaaaaagccgcccaacgggggggagggaaattaaaaccttattgggggtggttttgggggggctcactggttgcccttttataaagtcgtaattgggaggaaaatggggggacctaactaattgccttggcgggaaaacccctttggttccccaggttaattac

SEQ ID NO: 56921 - DNA, 584 bp, Homo sapiens
cggggccccccctcggaatacttctagaattaattaacgcggggtggggcccctacagactccgtattttatttttttaaataaaaaacgatcgaaaccatttcacttttaggttgctttttaaaagagaactctctgcccaacacccccacaaggtttgtaattaaaactgtaaatagtctttgtaaatttaattatatatattttctatttaaaagaaaaaaggagaaaaaaaaacaggggtgtgggcgccaggactgaagaatgaggtgtgtgtgtgttggggagtgtagttgtggggagggttctctttcttaagtgcccttcaaaacccgccccacttttggagttttttggtgatatggcagggctgggcctgatgggagaggcacccagcctgagcgctgtttttgttggctttgagtcgttaggagtttgttccattcaactaatataaaagccaaatttgtgagcctcctctctgaggctgggcctgtggaagccgttggatatttttgaacaggacttggattcgttttgtttccttcccccttttctttcctactcatttgtcctgtcttctt

SEQ ID NO: 56922 - DNA, 591 bp, Homo sapiens
  misc_feature 17, 28, 562, 572: n = A,T,C or G
cgggcccccccctcggnagtcttctagnattaattaacgcgggatccccatgacttaatgtacagtataaagcataaatagtaaaattacccaaagacaaagaggaatgggaaggtccagttgattagcttcttgtttagagaagcagattattccgggggttaggaaatagtttcctgtaaggcatgtttagctttcattcatggattgatggcaatataaatcgctcttttgatgtgagaaaaatataatgatggcattacatcaattataaatttcatgagggtagggactgtgttcggtttaccttgtgtccttagctcccattttaatgtctgacccatggaaggcatttcattaaatatttgttgtcatctgtctatgttttcttctttgtctttctttagcttccaaaaagagttgtttttatattcataatttcttatttcatcagtaatgtgactcccctagaagtattggttaaaatacagatctttcttggaaggagactgttttgtttgaagcaaatgacttgggagatgacttaagaacattcaggctntaggtgtttntgtagaaagactaatatta

SEQ ID NO: 56923 - DNA, 506 bp, Homo sapiens
  misc_feature 18, 20, 31: n = A,T,C or G
taccgggcccccccctcnanatacttctagnattaattaacgcggggaggttttctataaactgtatcattttctgctgagggtggagtgtcccatccttttaatcaaggtgattgtgattttgactaataaaaaagaatttgtaaaaaaaaaaaaaaaaaaaaaaaaaaaaaaaaaaaaaaaaaaaaaaaaaaaaaaaaaaaaaaaaaaaaaaaaaaaaaaacccaaaaaaaaaaaaaaaaaaaaaaaaaccggcccccccccgggggaccccccccccccccccaaaaaaaaaaaaattcccccccccccccgcccggacttaacaaaacctaaaaggggaaaacccccccccccccccccctaatgccttttaaaaaaaacccccctttcccacccccccttaaaaccaaaaacccccccccgaggccccctcccaaaagttggggtaattttaaaacaaaaaggaactttaaacctcttcaattcttttaaaatccccccca

SEQ ID NO: 56924 - DNA, 459 bp, Homo sapiens
cccccctcgggagtcttctagaattaattaacgcggggggtggcccaggcgcgttaagctggttgggacccgggaaggcctccctcttaaggtctttcccacacctctgcaccttgttacctgactttcggcttcaggatccgcagcgtgcacccgcgttccatctgtcttctgagactttgcccttctccaggaagagcactcaggagaccaggaaaatggccacagggctcctgagagccaaaaaaagagctggcaagcagatgaattaactcccccaagcttctagctgtgtttctactcagtgggagagatttggagtgaatcatgagggtcaaccacacagtgtctacaatgctccctacatgcatggttcacagacaaaccatgagttgttccggggctggaggaataacggttgtattaaatgtgttaaagtaacactaaaaaaaaaaaaaa

SEQ ID NO: 56925 - DNA, 465 bp, Homo sapiens
cggtggcggccgctttttttttttttccctttttttttttttttttttttattttttattttttttttttctttttttttttttattttttttttttttttttttttttttttttttttccccccccacaaacatgggggggggcccaaaaaaaaccaaaaaaaaaggggggggggccccccccccaaaaaaccccctaaaaaaaaaaaaaaaaaaaccccccccccccccccaaaaaaaaaaaaaaggggggcccccaaaaccccccccccccttcggggggggggccccccccccaaaaaaaaacccccccccccccccccccaaaaaaaggggggggaaaaaaaaaaaaagcgggcccccccccccccccccccaaaaaaaaagggggggggggccaaaaaaaaaaaaaaaaaccccccccccccccccccgggggggaaaggagggggccccccccccccc

SEQ ID NO: 56926 - DNA, 488 bp, Homo sapiens
  misc_feature 402, 403, 404, 405, 406, 407, 408, 409, 410, 411, 412, 413,414, 415, 416, 417, 418, 419, 420, 421, 422, 423, 424, 425,426, 427, 428, 429, 430, 431, 432, 433, 434, 435, 436, 437,438, 439: n = A,T,C or G
attaattaccgcgggacgtgatgttggaaaataataggaacctggcctcccggggaatctgtcttcctgccctgagtgttccctccttgttagagcaaaaaagaaatccctggactttgcagagggaagaaaaattaccaaccgacccacacggcggggagtgcttcaagggtgtaaacacagaggggacctttaattgggaaagtagggcgggaaacaccccttgaaaaaatcaactgggattcacttttcagttacatctgagtgatctacagctattccaagctgaagggaaaatttcggggtgtaagcttttaaaaaaccccgtcagggacattccctcagtttcaccgttggaaaaattttcttccagtgtcaaaccccccctttaaaataaatatnnnnnnnnnnnnnnnnnnnnnnnnnnnnnnnnnnnnnnaaaaaaaaaaaaaaaaaaaaaaaaaaaaaaaaaaaaaaaaaaaaaaaaa

SEQ ID NO: 56927 - DNA, 478 bp, Homo sapiens
  misc_feature 34, 323, 324, 325: n = A,T,C or G
gggtaccgggcccccccctcgaaatacttctagnaattaattaacgcgggttgcttggcagttgcagtgctgctgtctcgggggggttttcatctatgagggtgtttcctctaaacctacgagggaggaacacctgatcttacagaaaataccacctcgagatgggtgctggtcctgttgatcccagtctctgccagaccaaggcgagtttccccactaataaagtgccgggtgtcagcaaaaaaaaaaaaaaaaaaaaaaaaaaaaaaaaaaaaaaaaaaaaaaaaaaaaaaaaaaaaaaaaaaaaaaaaaaaaaaaaaaannngcccccccccccggggggaatccaaaataaccccatatggggggccgtaccccgcggggactgggattggctttaaaaagagtggaaattgaaaaccccctggggccccaatttaaaagcgttggaaaggaaaaacccttgggggccccgggt

SEQ ID NO: 56928 - DNA, 593 bp, Homo sapiens
gggccccccctcgaaagtcttctagaattaattaacgcgggtaacattaaggctttcttattgtaaaaatgttcatgaacgacattttactcaatagagattcttcattatcttcatggtgttttgttgtgttactgtaatatcacttatgaaatcctattggtggatatcgtagtctcctctagatattttgccataatacatgccaaaatacaagtccctgctggacattctccctaagcacatctttgtatcatatcttttaattgcagaagtaatgtgtgaatatattttccttataaaagatgcaaacattacaaaaaggcaaatgtaccctttgaccatatcccaaaggatagtctttatcagttcattatttattgctgatcatttttctgttcatatatacatgcgtgtctcagtaaaaattataaaatgggggataattataatacctacctcataatgctttgtgaggattaaatgaattaagatcgataaagtgcttagaattgtgcctgacatgataaatacatactcactgaatgttagtcatcgttattatattcatcatcatcagtattattatttgt

SEQ ID NO: 56929 - DNA, 339 bp, Homo sapiens
ggagctccccgcggtggcggccgctttttttttttttttttttttttttttttttttttttttttttttttttttttttttttttatttttttttttttttcccccccccgggggggggttttaaaaaccccgaaaaaaaaaaaaaccccccggggaaaaaaaaaaaaggggggggttttcttaaaaaaaaacccccctttaaaaaaaaaaaaaaaaaaaaaaaaacccccccccccccaaaaaaaaaaaaaaaaaccccggggggggggggcccccccccccctttttttcctaaaaaaggggggaaaaccccccccccaaaaaaaaaaaaaaaaaaa

SEQ ID NO: 56930 - DNA, 258 bp, Homo sapiens
cgggcccccccctcggggtacttctagaattaattaacgcggggaagtttctgtattaaaaaaaaaaaaaaaaaaaaaaaaaaaaaaaaaaaaaaaaaaaaaaaaaaaaaaaaaaaaaaaaaaaaaaaaaaaaaaaaaaaaaaaaaagcggccgcccccgggggggaactccaattcccccctctccggggggggtttcccccccctccctggcgggggttttaaaaccccccccctgggaaaccctttttttaaccc

SEQ ID NO: 56931 - DNA, 234 bp, Homo sapiens
cagccggcggggagaaagcccccagcccaagggaaaaaaaaaagaaacaaaggcccggggagccattgggcagaaaagcccagggtctaggggctgatccccgggcagaggggcacagggggggggccccccggggccacacgggaaaaaaggggcggggggcacacaaaaaaaaccccaccccaaacaggagcgggggagctaaaaagaaagaaagggtaaaaaaaaaaaaaa

SEQ ID NO: 56932 - DNA, 580 bp, Homo sapiens
cgggccccccctcggaagtcttctagaattaattaacgcggggatgggggagtagatgccgcttttgcagtggctcgcactgctgtggccactgctgaccactgaggctcccagcggagggtgttcacagccaggtcccgggccacggagctcccttacttgaagttctccttcagcatagattagacgtgatccactttgctttcttgcttctcacctcgcccccttgcacattgcctgacaccctcatattggccagctgtaatctcgtgactatgggactgaggctcaatcttggcttggggtgtttgaatgtctatagcaaaggaattcataatgggaaatctttttcatttgagaaattgtatgatatttattggttgtgtctactgccaacatttatatccaattctaagatttctgaaaaaaaattcttatcccttgctgctcagaaaaagtttacggaaaacaccagttcactaaaagcaccgaaatctgcaaagcctgtcttccgctagaacaacgtctacaaatgtgaagatgatgacttctggcacgcggtcatgagggtggggaatgc

SEQ ID NO: 56933 - DNA, 556 bp, Homo sapiens
acgcgggggaacacaaaatggcgacacgtggttagcattcgtcgccaacgagaaattggggtcggcccgaaagctctagaatgcacccctcttcctccccggggccttccacctccgcgagttttatgacttaaaaaagcccacaggctggtctgaagaggaagacaaacataaagatgaagtgcttaattcaaggtcacacaatgtcggggatggacctccagatttccttactgacctgcattatcttgtggatacctgagtgaattccacaccacccattttatagatgaaaccactgagacatggagcaattgactgagtagtcactgccccacccctgcctggagcctcacacatgactcgcctcctctcagtgaccacaggaaaacaagctcagggctcccactgattgtacattatgagacggagtcttgctatgttgcccaggctggtcttgaactcctcacctcaagcgatcctcccgtcttggcctcccaagtgtcaggattacgggcatgtgctatcacacccaacctgatacattgcctttatc

SEQ ID NO: 56934 - DNA, 239 bp, Homo sapiens
ccccccctcgtgcgtacttctagaattaattaccgcgggaattacaggaaaagagctgatcgttttttcagcccagagcagcaacctcttgaaagtcagaagtctctaatatatcatttgtctttttcccaggggggtaaaatagggcttaagggcgggtatttttccccagctgacctaaagtaaataaaactttttgtttaaaaaaaaaaaaaaaaaaaaaaaaaaaaaaaaagggg

SEQ ID NO: 56935 - DNA, 352 bp, Homo sapiens
tccaccgcggtggcggccgcttttttttttttttggcaccttaaaggggttttttttttggattcaaaaaggggccataccccaccaaaaatacctgaaaccataaccagccctttggccccgggacctcctaacaaacttccggggcagttggaattaaaaaattttggcaaaccaaactaaacccttaattttgagaaccacaggggccacccttgggatgcttcatttttgaaaccttttggacagtttttggcggggaaattgctccccccccaccgggatgcaaaaaatggcttcccaaaatttggtggaacccaaaacctgggttgtttatccttgggaagggccc

SEQ ID NO: 56936 - DNA, 551 bp, Homo sapiens
attaattaacgcgggtagataatttttagcaggcaggaagtcttgtgcggggtcaccataaccacctccagttgtactagtgcctattgaaataataaattagataggggggtaaaaaaaaaaaaaaaaaaaaaaaaaaaaaaaaaaaaaaaaaaaaaaaaaaagggggccccccaccggggggaacctcaatttccccttaaaggaagttatttaaccccccctaattgccctttttttaaaaacttcggaatggaaaaaaccttggcttaaccaaattaaatccctttaaaaaaaatccctttttcccaagttggttaaaaaaaaaaaaggcccaaacaaatcccctttccaaaaatttgcccaccttaaagggaaaaggaaaattgaaaccttaaattttttttaaaaattcgcttaaaatttttttaaaataattttttttttaaacaaataggccaaaatgggaaaattcttttataaataaaaaaaataaaccaaaatggggttaattttttttccatttggaaaaaaaattcctttttaaaaaa

SEQ ID NO: 56937 - DNA, 628 bp, Homo sapiens
  misc_feature 38: n = A,T,C or G
ctggggtaccgggcccccccctcggaaatacttctagnaattaattaacgcgggatttaaagactacaataaaaccaaacatgcttataacattaagaaaaacataaagaacatgattgaaaccaagttgaaaaatagcatatgccttggaggaaatgtgctcaaattactaatgatttagtgttgtccctactttctctctcttttttctttcttttttttttattatggttagctgtcacatacaacttttttttttttgagatggggtctcgctctgcactccagcctgggcaacagggcaagaccctgtctcaaagcataaaatggaataacatatcaaatgaaacagggaaaatgaagctgacaatttatggaagccagggcttgtcacagtctctactgttattatgcattacctgggaatttatataagcccttaataataatgccaaggaacatctcatgtgtgctcacaatgttctggcactattataagtgcttcacaggttttatgtgttcttcgtaactttatggagtaggtaccatttgtgtctctttattataagtgagagaaatgaagtttatattatcaaggggactaaagtcacacggcttgtgggcactg

SEQ ID NO: 56938 - DNA, 175 bp, Homo sapiens
cgggccccccctcggaagtcttctagaattaattaacgcgggatggtgtttacgtgatccacacttgaaatactagatcagtagacattcactaatataccaaaataaaatgaaaaattgagtttttccgtgaaaaaaaaaaaaaaaaaaaaaaaaaaataaaaaaaaaaaaaaa

SEQ ID NO: 56939 - DNA, 177 bp, Homo sapiens
  misc_feature 38: n = A,T,C or G
ctgggataccgggcccccccctcggaaatacttctagnattaattaacgcggggtctgggtgaaaactgacaatgaagtgtcttctacttcccccccctaaaatccgctggaaagttggacactcgacctgtataccctacggtgcttaaagggcactccactattatctaaaggca

SEQ ID NO: 56940 - DNA, 397 bp, Homo sapiens
tccaccgcggtggcggccgcttttttttttttttttcttattggaggattttaatttcctctgccagcctgtttagaaaagggaaaataagcccctttgggccttgggctttggtttcgcctttctgaaaaaacaaaaaagtccctttttaaaaacccccccgtggggcaaatcgcctttgggtgggctgttcccccccgggcagcggttagagtctgaaattttttgggccacccttttttttttcttcattttggctttttctccgctggagttcttctttgaaattatttccaaagagttgggggtcttcatcacccttttttttgtttccttcccaggggcttttaaagtgtaaaatgaaaacctggcgggcccaaaaagtagggtctttttt

SEQ ID NO: 56941 - DNA, 164 bp, Homo sapiens
ccccccttcgaaatacttctagaattaattaacgcgggcacctgtgaggctggccagcaccgtggggctgtgggaatcgctcttatttatatttaaacaccttggattttcaaaaaaaaaaaaaaaaaaaaaaaaaaaaaaaaaaaaaacaaaaaaaaaaaaaa

SEQ ID NO: 56942 - DNA, 597 bp, Homo sapiens
cgggccccccctcggaagtcttctagaattaattaacgcggggcgatggctgtggccctgggttgtgcaatccaggcatccttgaatcaaggctctgtgtttcaagaatatgatactgactgtgaagttttccgtcagcgcttcaggcagttccagtacagagaagcagctgggcctcatgaagcatttaacaaactctgggagctttgctgtcaatggctgaagccaaagatgcgctctaaggaacaaatcctggagctgctagtgttggagcaattcctaactatcctgcccacagagatagagacctgggtgagggagcactgcccagagaatagagaaagagttgtgtcactgatagaagacttacagagagaacttgagataccagagcagcaggttgatatgcatgacatgctcttggaagaactggcaccagtgggaacggcacacataccaccaaccatgcacctagagtcacctgcactccaggtaatgggacctgcccaggaggccccagtagcagaggcatggatcccacaggcagggccaccggagctgaactatggtgctactggagaatgtcagaactttctg

SEQ ID NO: 56943 - DNA, 367 bp, Homo sapiens
tccaccgcggtggcggccgcttttttttttttttttccaaaaattaaaaatccgggttttttttttggtccagttttaaaatttaaagtaaattttggcggtttcccaaaaccaaaaatgttttttggccccccggcccggttaaaattggtcccccaaaatagggccgggtttaaagggaaggggaaaggggggccaaagggaaccaatggttgtaggacatccctttggcccaaatccgggggggggggggaaaaaaagggggaaaaaaagggccctccaaagccccccaggggaaaaggaggggggcttccctccctgcagcggggctggccctgtccttaaaagccctttaaagggggttttt

SEQ ID NO: 56944 - DNA, 306 bp, Homo sapiens
cgggccccccctcggaagtcttctagaattaattaacgcggggcgttgcaacggtttcaatgtgtcgcacagctatggtctcgcctatagaagtacacgcaactttgttcaatgcccatgtacttttccaaattgataatggaacgaagaaggcgaatgtttatctgccaactacgaatatcctttttctaaatcacatcattcctctctttcgttagaggcaatttatcctgtactttcatatgaccttaataggtgggatgtatttgggggttttttttgtttgattacagatgatctccttgg

SEQ ID NO: 56945 - DNA, 273 bp, Homo sapiens
accgggcccccccctcggaaatacttctagaattaattaacgcgggacactagagcttcctcatcaggttacccagaagtgggtcccatccaccatccaggtgtgcttggatgttctccaccctcgaggtgtacgctgtgaaaagtttgggagcactgctttataataaaatgaaatatactaaaaaaaaaaaaaaaaaaaaaaaaaaaaaaaaaaaaaaaaaaaaaaaaaaaaaaaaaaaaaaaaaaaaaaaaaagaaaaaaaaaaaaaaaa

SEQ ID NO: 56946 - DNA, 398 bp, Homo sapiens
  misc_feature 28: n = A,T,C or G
cgggcccccccctcggggtacttctagnaattaattaacgtgggtgctcttaaaagcattcagttttaaaagagaacagcataaaagtttgaaaaatttgcagcctgacaatgcaatagaaaataaaattccattttctgaggagaaattcaagcggctgcagaaatttgcataagtaacaaaaagccaaaagttaatccccaagacaatgggggaaatgtcttcagggcatgtcagaggtcttcaaggcagcccctcccatcaagccctggaggcctagaggaaaaaggagtttcgtgagctgggcccagggtccctgagctgtgtgcagcctagagacttggtgccctgcgtcctagccactccagccatggctgaaaggggccaacatagggctc

SEQ ID NO: 56947 - DNA, 385 bp, Homo sapiens
tttttttttttttttcaacattgaaagccttttttaaccttgatccttttcctatttaaaatttcgggaaaaaaagggggtttaaaattttttgggatctaattcttgcctttaaaaaacctaccccaaacctttgtctttcccctgttttcggggccttttaccaaagggataaccaagggcacctccttcttttccgggaaaaacaaaacaagtttcacctgcctcccccagggggtaccaagttcccctagggaagaaaaaagccccaccccctttttttttccttgtcttccccaggagggggacctttagaaaccccctcccccccccctttttttggcctgggcttgaggtccacccaggtccgcccttaaaaggggga

SEQ ID NO: 56948 - DNA, 445 bp, Homo sapiens
cccccctcgaaagtcttctagaattaattaacgcggggttctaagtgttttttgtatgtattaacatattttatatctaaaacaatgttataagataatcactttaattatcaataagaaaattgaggcatgaaatgttaagtagcttgcttaaacagctagtaactggtgttgctgatggcagagcacatccatgcagactgactccagagtcccccacactcttaattttaatgttatattgctacctataatataatatataggtatataatttatatataatttatatttgtaaaaattatatgaacttatatatataaacttatatttataaattatgtacttatatgtgtaaattatatttatatttataaatataaatatagagagaagttcaggcaattgttactaggaaacataaagaagtgaaaaaaaaaaaaaa

SEQ ID NO: 56949 - DNA, 544 bp, Homo sapiens
tccaccgcggtggcggccgctttttttttttttttggaaaaaaacaaaatatgttaaatccttagttccaacctaaaaggtattttaaatttccaaacctttttttttttaatccccaggctttttttggaaaggcccgtgggaataaaacaaaacctcccggaaaaaagggcccccgtgggaaaaacagtttcctgttgtaaaaagggcaaacccccctccacaaactgaaaaggtgggggttttgggtttcaggcccaccccaaatccaaggaccttaattcctgtggttcccagggagtggataatttccacccgaagatttttaacggggcctttaacactaaaccaaagggggcaatgtttttttttgggtggccctttatccatcgggtttgaaaacccagaaaaagcattttccctaaatttttttaagggggctgcctaagaaggttctgcaaaccaataccacccccccccgggggggaccccccccctcccttccccgggtaattaaatttaaaaagtcctctggggggggggc

SEQ ID NO: 56950 - DNA, 561 bp, Homo sapiens
cgggccccccctcgaaagtcttctagaattaattaacgcgggggacttcttagccttcagaactgtgaactaaataaacctctattctgtataaattacccagtctatggtattcagttagagccacacaaaatgtaacaagacagaatattgatagccataagtaggtttgctgctctgacatttacataaaaatgtagaagtgactttggaactgagtaatgggtagaggcttgaaaaatctggaagatcaggtcagacaaagcctgtattatctaatggagcattaagggtgattttggccaaggcttagaagagaagactagggaaagtctgaaccttcttagagattacaggaggtccttgaacaacttgggtttcaactgtgtgggtccacttatggactttcttctgcctctgtcacccctgagatggcaagaccagtctccctcctctccccttctcagcctgcttaacaaaatgacaaggatacagacctttatgatgatccatataatatagtgaattatatttactaaatacaaaaaaaaaaaaaaaaag

SEQ ID NO: 56951 - DNA, 222 bp, Homo sapiens
ccccctcggggtacttctagaattaattaacgcggggaagcataatattgggaaaaaaaaaaaaaaaaaaaaaaaaaaaaaaaaaaaaaaaaaaaaaaaaaaaaaaaaaaaaaaaaaaaaaaaaaaaaaaaaaaaaggggggggaaacggggggggggccccatgggggggttttttttggttctttttttgggccctttttttggcccttttttttccggg

SEQ ID NO: 56952 - DNA, 262 bp, Homo sapiens
gagattacggagcatcccaagattgatcataaagctgagggctcacaaagtgtaccaaataatcaaagctcctcctcagctacactgctacctgcaatctgggattgctctgaccaagggaattgatcccaacaccttgcagtgctaaatgtctaatgaacctattttaatcgctgactacataaaatatgaagacataaacccagttgccatctgcgtgacaataaaacattaatgctaacactttgtaaaaaaaaaaaaa

SEQ ID NO: 56953 - DNA, 450 bp, Homo sapiens
  misc_feature 26: n = A,T,C or G
ggccccccctcggaaatacttctagnattaattaacgcgggggatctcggggtagccaggctgctccaagacagtggatatcgaggcagtcgtgaggcccctactccacctgggagcaggggaaggacgtggttgcctggcctgggctgcgcccagcagcttccccccagtcctgccctcccagctgtcgacccagatgggatgttcggatcggtttgtaattaaacctgggaatggccacaaaaaaaaaaaaaacaaaaaaaaaaataaaaaaataaaaaactaaataatactaaaagtaaacataattggaaataaaatattctggaactagttaataaaacatttattgggggccccccccggggggactctccattatccccttttggaacgtatatacccccccccctttgaccaaattttaaaaaatctttatgtggaaaaccc

SEQ ID NO: 56954 - DNA, 191 bp, Homo sapiens
  misc_feature 34: n = A,T,C or G
gggtaccggggccccccctcgaaatacttctagnaataattaacgcgggcaatcatgacctcttgatgtctccatggtgacctccttgggggtcactgaccctgcttggggggtcccccttgtaacaataaaatctatttaaactttaaaaaaaaaaaaaaaaaaaaaaaaaaaagaaaaaaaagaaaaaa

SEQ ID NO: 56955 - DNA, 560 bp, Homo sapiens
  misc_feature 190: n = A,T,C or G
cttctagaattaattaacgcgggaggaattttaagtttaggctgcatttaatccagattagcagttaacctacactatttggcatatgttctagattttttcagatacaaagctaattgttaggaagccacaccccccaccccttatttttagaatagcaataatattgtacacatctgtcatgctacgngaaaaaaatggaatctggctttcatgtgaatacaaaggttacaaagtctatattttaccatcattaatactgaatattatatttcaataagaatctttagaattttaagagaaatttgagtattaaaaaaattatctaatatacccaattagaatcttttcacatgagactacagagaaagatttgtatttgtaacaaaaaattagctgggcatggtggcaggtgcctgtaatcccagctacttgggaggctgaggcaggagaatcgcttgaacccgggaggcggaggttgcagtgagccgagatcatgccattgcatttcagcctgggcaacaagagcgaaactctgtctcaaaaaaaaaaaaaaaagc

SEQ ID NO: 56956 - DNA, 405 bp, Homo sapiens
tccaccgcggtggcggccgcttttttttttttttttccttaaaggaaataaaaacttttttttcaaaataacctttaccaaaataaaggtggggccctaataattgcgggcccccaaattcctcaaaaggggtttaaaaattatttccaaaatttttttccccctttttaacttaaacctccattccctggttgaaaaatttagccaaatccattcaacctaaaaaaaaaaggtaaaattttccaggttttttccccagggggcagaaaatcaacacccccaaaaacccaagtgttgttgtccccccaggcccagggttttaatccaaagtgacgggcaaattaccggcctgcaccaccccattaaggttgcacaaaaaacagccactttagaatctccggggcc

SEQ ID NO: 56957 - DNA, 237 bp, Homo sapiens
attaattaacgacagatgaccaagactcagttcaatgagcaaatctccatactgtacccttcttttttttttcattactgtgttcacttatgctttatcataaacattttacatgcagctatttcaaagtgtgtcggattaattacgatcatccctttggtcaatcaatacatgtgttcgtgctactaaaaccaaggattctcgctcgcgccaagaagagcgccttcagcccaaaaa

SEQ ID NO: 56958 - DNA, 364 bp, Homo sapiens
  misc_feature 43, 278, 279, 280, 281, 282, 283, 284, 285, 286, 287, 288,289, 290, 291, 292, 293, 294, 295, 296, 297, 298, 299, 300,301, 302, 303, 304, 305, 306, 307, 308, 309, 310, 311, 312,313, 314, 315, 316, 317: n = A,T,C or G
cgggccccccctcgaaagtcttctagaattaattaacgcgggnacttaacatacacgttaactgcagagtaaattgctctgttcccagtagttataaagtccttggactgttttgaaaagtttcctaggatgtcatgtctgcttgtcaaaagaaataatccctgtaatatttagctgtaaactgaatataaagcttaataaaaacaaccttgcatgattaaaaaaaaaaaaaaaaaaaaaaaaaaaaaaaaaaaaaaaaaaaaaaaaaaaaaaaaaannnnnnnnnnnnnnnnnnnnnnnnnnnnnnnnnnnnnnnnggaataaaattacccccgccccctgcccggggggtaacaacatttcc

SEQ ID NO: 56959 - DNA, 489 bp, Homo sapiens
  misc_feature 16, 18, 59: n = A,T,C or G
cgggcccccccctcgngngtacttctagtattaattaacgccgggcacctgccctgggnaaaaaaaaaaaaaaaaaaaaaaaaaaaaaaaaaaaaaaaaaaaaaaaaaaaaaaaaaaaaaaaaaaaaaaaaaaaaaaaaaaaaaaagaccgccccacgaggggggaggcccctcctttccctttttttattaaattttttcccccccccccccccggggggggcccccctttccccctttttgggggtttttttccccccccccttttgccttttttttcccccctttttttggggaacccctctttttttcccattttttcccctttgggccccccccccttttttccctttggtttttttgcggggggcccccccccctttcttttttccaaatttgcccccctttttttgggggggggatttttttcccttctttttttgggcaaaattccctttttttttttttttatccccctttttttttccc

SEQ ID NO: 56960 - DNA, 582 bp, Homo sapiens
  misc_feature 17: n = A,T,C or G
ccgggccccccctcganggtacttctagaattaattaacgcgggggttaaggctccatttctcattttcccaacttttatatgattgtctatgggcagtttgaatttctggttttcaatttattttttaatgattaattcgtattaaggcaacaagacagtacaacaaataatctctagagaggtccactttgttgctgaagtaaacgttacttgttgcaacccgaggatgggcatgaggtttggccttaggtattcctgtctgggaaaatggagggggtgatattagtggttccctgtactatatcacagccaagagagattagagagagaaaatgtagatcaaggcgagctgcctacaaattactctgtctccaaaggcaacgtgaaaagaaatgatggggaggaaaaaaccccatagattgaattagcactttgactctcacttaattcaacgattttctttcctagattggcttttcttactcttttctgttagtagatttatttataaacaccacaagaagatctcttgggatcagaattatataatatctttgaagtaaattattgaaatatccta

SEQ ID NO: 56961 - DNA, 469 bp, Homo sapiens
tccaccgcggtggcggccgctttttttttttttttaaatccttttccttttttttttctaaaacggaaataatttaaataaccctattttaaggttggggaattttttttgggccagtaaaaatttacggtcaaccccccgaaggaaatttttatttcaagtcccaacctttaaaatccaaaaatccctttggggttttttaaaaaaaattttaattttttaatggaaatccggaatggggaaaatatggtccaaaaacttcctttaaatttttaaaatagggaaaatttaggggttttttttttttttttttgggaaaggggggttcacttttggggcccccgggggaaaaaaggggggggaatttaattttagggaacctttttcccccaaataaaaaaaattttttttttttaccccccaaaaagggggggaaaaagggggggcccccaaaccccggggttatttt

SEQ ID NO: 56962 - DNA, 491 bp, Homo sapiens
  misc_feature 38: n = A,T,C or G
ctgggttaccgggcccccccctcggaaatacttctagnattaattaacgcggggcaggatcatgaaatatacaggaagttgtttacatattacaaggaaggcaatattttcaccaaaacaatagctggggcattttacagtattttagtatgcctcacgcactgacattttacccaccttctaatgaataggcttgaagcacaactgcttgtactataagaatagttctggcccaaaaagaactctgaagatgattcagccttctgcatctggatctcttgatggaagagaaaatgagctgcccgcaagcttgtccaaaaggaaacatcggaatgaccacttaacatctacaacttccatccctggggttattgtcccacaatctaatgaaaataaaaatcttggaggagtcacccaggagtcatttgatcttatgattaaagaaaatccatcctctcagccttggaaggaagagggaaaaaaaaaaaaaa

SEQ ID NO: 56963 - DNA, 442 bp, Homo sapiens
cgggcccccccctcggggtacttctagaattaattaacgcggggacctggtggccatcgtgacacaactggagcaagtttccaggaggagagaagaattccagtgaagcagcagctgcacgtccgaggcttggggaggacccaggactgtgtgggtttcttacctgcctgagccacctcagggaatcttccagcctaatgcaggcatttctgcacctttggggtcatgctttgtagcagtgtctcccttgcgacctcgcaataaattggccccacggggtgattttgacagtcaaaaaaaaaaaaaaaaaaaaaaaaaaaaaaaaaaaaaaaaaaaaaaaaaaaaaaaaaaaaaaaaaaaaaaaaaaaattaaaaaaaaaaaaaggcggccccccccgggggggacctccaattccccctatagggagtcgttttacccccc

SEQ ID NO: 56964 - DNA, 135 bp, Homo sapiens
gggccccccctcgggagtcttctaaaattaattaacgcgggggatctgggacagatttcaccctcaccatcaatagcctggaagctgaagatgctgcaacgtattactgtcatcagagtagtagtttaccggtca

SEQ ID NO: 56965 - DNA, 436 bp, Homo sapiens
ttttttttttttttggaaatttaaaagggcaaattttttaatttttttaaacccttcaatttccaaagggcttttaggggtttaaaaaaaacaaaaattttccaataaaccaataaccattcccaaatggtttaaggtgaaacattttttgcccagttttttctatagccctttcctatttacctaaccaaactttttcctgaaattgccaattttaaaaaaataaaaaaccaaccttttttttcttttcggttttttaaaaacaaattctccactttgtcttccaggctgaagtacagggggggaatctcacctaaacataccctaaccctttggggttaaaggaatctcggccctaacccccccaagtacctggaataacgggcttccccccccggcctgggttaattttttgttttttaagaaaaaagggggt

SEQ ID NO: 56966 - DNA, 192 bp, Homo sapiens
cgggccccccctcgagagtcttctagaattaattaacgcgggctgatcacccgaacttactgcaaacttgtgattcatggggaataatagctttgcccaagcccctttacagaatggggctcaacgggctacgcccatcctgacggcatacggtaagtacacggtgaaccagtcagtgtatggcgcgtgcaa

SEQ ID NO: 56967 - DNA, 473 bp, Homo sapiens
cgggccccccctcggaagtcttctagaattaattaacgcggggacacagcctgaacagaacctgtgcttcggggagcagtggggagaacagagcgtctcagaggcttgtttcactctctagtgtaagtcttctgtgccttttctgttctaaagaaacttttggaattgctacctgcttattgtattttttttggtctctttaaactgctctgacaagttcaatacaacatttcccacttaaaaaaaaataggcagtatgaatatcacacaaagagcagtggatgagcctttaaatatcaggcaaaataaacagaccagaaaaatatggacattctagaagctgaggcattttttaaatagctgttttgtttttataattactttgtttggataaatgttaaaaaaaaaataagtggacagcaaagttaacagaataaaaatagagcctgctttgaaatagaaaaaaaaaaaaa

SEQ ID NO: 56968 - DNA, 540 bp, Homo sapiens
cccctcggggtacttctagaattaattaacgcggggatggcagccatcttaccttccatcagaggagcctcaccgtacccaggaagaaagaaggtgaaagaggaatgtgaaacaggtggctgggacccagaaaccctcttaccctgcacctctgtcatacttctcccggggcatagggagagttattctgcttctctttgccttgttttgtaacatggggtagttgttggtgcagccatgttgtgctgagtgaacatatattaagatctttggaacctttaggagactgaaaataggtaagtatgaattagtatttctggaatggtattcagagaacttcgtaccatttttataaatgtgaaaggtaacctaattagaacagcttggcacttgtcagtacactactagatttcaaaatcagattctacttacagggagaaaaaaaaagcccaatatgttgaacagtattgaaattgttgcataaataaaagtccatcattgtagaccagcttactgaagcaaaaaaaaaaaaaaaaaaaa

SEQ ID NO: 56969 - DNA, 523 bp, Homo sapiens
  misc_feature 13, 29: n = A,T,C or G
ccgggcccccccntcgaaatacttctagnaattaattaacgcgggggatctgtatatatattgccatacgaatactctggcacttgcttgctcatttactcatactccggcgttcggtgcggcacaaccccgacatattaaaatggacaagctgtgtggcaagctcacctattaaaacgcatcatgcctgggactgcctttaacttaatatacatgctaatatccatagtgcgtaaaacatactctaaaatggaatgaatgaaacccccattaatttgattgctgccaactcatgagagacttcatgaggtagttttggtgctgtcttgtagcgagttattaatcatagtaagattttttcgtctgcattcgctgtggatgtcccatattaacaatagtgattttactcagacacacccctttgacagtctttccaaatattaaaatcgttagaatctgtatgctgcgaactgaacactgctcaagccatatagcagttttcatacagggtgcattataaaat

SEQ ID NO: 56970 - DNA, 496 bp, Homo sapiens
tccaccgcggtggcggccgctttttttttttttttttttttttttttttttttttttttttttttttaaaaaaaaccccccctttttttttttgggaaaaaaaaaagggtttttcccccccggggggggaaaaagggggggcccccttttggggggggggcccccccccccaaaaaaaaacccccggggggggggggggttggggggaaaaaaaaaacccccttttttttccaaaaagggggggaaaaaaaaaaacccggggttttgggggtttcccccccccaaaaaattttaggccccccctttttgggggggggttttacaaaaccctttaaaacccccattttttttggggggggaaaaaaccctttaaaccccccggaaaaaacccctttttttttaaaaaaaaaaaaacccccgttgtgggaaaaagccccccccaagggggtttaaaaccttttttttccggggggggaagggaaaacccccaaaaaaa

SEQ ID NO: 56971 - DNA, 586 bp, Homo sapiens
  misc_feature 38, 73, 108, 113, 114: n = A,T,C or G
ctgggataccgggcccccccctcggaaatacttctagnattaattaatgcttgtaggacataataataacaanttgaatggctctgcacagtccgctttccacacagnacatnncataacaaaaaaatttccaccaaacccccccctccccccgcgttaattaacgcgggggggatactgcgagtatggcggcgtcaaaggtgaagcaggacatgcctccgccggggggctatgggcccatcgactacaaacggaacttgccgcgtcgaggactgtcgggctacagcatgctggccatagggattggaaccctgatctacgggcactggagcataatgaagtggaaccgtgagcgcaggcgcctacaaatcgaggacttcgaggctcgcatcgcgctgttgccactgttacaggcagaaaccgaccggaggaccttgcagatgcttcgggagaacctggaggaggaggccatcatcatgaaagacgtgcccgactggaaggtgggggagtctgtgttccacacaacccgctgggtgccccccttgatcggggagctgtacgggctgcgcaccacaaaggaggctct

SEQ ID NO: 56972 - DNA, 236 bp, Homo sapiens
  misc_feature 22, 35: n = A,T,C or G
tgggtacccgggccccccctcnaaatacttctagnattaattaacgcgggggggtggggggaactcttggaagggaagaagtatcacttctttctcaagtggagtgtttacaccttgctgtaacatttgaactttcacaagagatgtaataattttgataataaaattcttaaccataataaaaaaaaaaaaaaaaaaaaaaaaaaaaaaaaaaaaaaaaaaaaaaaaaaaaaaaa

SEQ ID NO: 56973 - DNA, 370 bp, Homo sapiens
cccccctcgaaagtcttctagaattaattaacgcggggatggtggaagggttcatgtgcaagtgatgcacgtcggctttagagctgagcagcgtctgctgctagccagcaagtaacagggaacctcagtttcacaagttcaaggaactgaatttggccaacaaccagaataaactacaagcagattcctcaatctccagataatagttcactctagctgacacattgatctagcctgcaagactctaagcagagaacccattgaacttactcagatttctgagctacagaatggagagataatagatgggtgtcaggttactaagtctgtggtaatccgttatgcggcaggagggaaaaaaaaaaaaaaa

SEQ ID NO: 56974 - DNA, 198 bp, Homo sapiens
ccgggccctccctcgaaatacttctagaattaattaacgcgggcaaaaatgaagtttttaattgctattgttttatataggattgaaagaaaataactcctttattaaaaacaaatttatctgtaaaaaaaaaaaaaaaaaaaaaaaaaaaaaaaaaaaaaaaaaaaaaaaaaaaaaaaaattaaaaaaaaaaaaaaa

SEQ ID NO: 56975 - DNA, 305 bp, Homo sapiens
ccgggcccctcctcgaaatacttctagaattaattaacgcggggagaactgctatcgagtttctcaaaatctcttccttgtgtaaaatgtggttgtcgatgattaccttacaggggtttttttaagactaaatgagatcgtgtacattaaatacaggcactcaggctgggcatggtggctcacgcctgtaatcctagcactttgggaggctgaggggagtggatcacttgaggttaggagtttgagaccagcctggccaatatggtgaaaacaccatcccatctctacaaaatacaaaaagttag

SEQ ID NO: 56976 - DNA, 177 bp, Homo sapiens
cccccctcgaaatacttctagaattaattaaccgcgggactcatatcctgaaaagatgtgatttcatctatgaaggggtaaaatattggtttgtatttaattgtttgaaataaaagtgatccctataaaaaaaaaaaaaaaaaaaaaaaaaaaaaaaaaaaaaaaaaaaaaaaaaaa

SEQ ID NO: 56977 - DNA, 248 bp, Homo sapiens
ggccccccctcgaaatacttctagaattaattaacgcgggacccagaactttgtaaaatttaaaaatatatatttaatctgaagaaaggtcattagcccagagtgaccctctgaaatacagccttttaaatatgcactatggaacaaacaccgctatcaaggtttttgctgtaacaataaagatggttattttagtcatctgtcaattattcatagcactggaaaacaaagtaaaaaaaaaaaaaaaa

SEQ ID NO: 56978 - DNA, 593 bp, Homo sapiens
  misc_feature 40, 42: n = A,T,C or G
ccccccctcggaagtcttctagaattaattaacgcggggngnaaaatttataatttagtcaagaggtttccattttttctggtgagcaaggggaaaagggggcatgtactgtagcagccggagccacgacctgggccttgctccgcccctcctagaaaggccctgctccctcagcagatcacaggcaggggtgggtgtgagcctgaagtgacctcaggccctaggaagctgctcttccttcgtttacaatggaaggcaagtgagtgttgtcgcgatgtgagtgcccagcttaggatttgccctccaaagcccagtgtcttttctgtagatcaaagaaacaaatcctttaagtcctcctgttcacctgctttactggcagatgaagcctagtcatggttcaccagggggaataccaaactcgccctgcagatcggtagtaattgtgcggagatgataggaaacaggagaggcctctaccgctgaaaagcacgggtctgaaagggcaggtgcctgtcctggaaaccaccttctcttggggcatccactggctgcccttctgcctgttgccaccaggtggggctctctcccagctc

SEQ ID NO: 56979 - DNA, 359 bp, Homo sapiens
  misc_feature 22: n = A,T,C or G
cccccctcggggtacttctagnattaattaacgcggggggaataaaatgcacattgtaggacattttctaaaaaaaaaaaaaaaaaaaaaaaaaaaaaaaaaaaaaaaaaaaaaaaaaaaaaaaaaaaaaaaaaaaaaaaaaaaaaaaaaaaaaaaaaaagaggagccaaaaaaaaaaaaacccccaaaaaaaaaaaatggggggccccccccgggggggggctcccttttccccttttggggggtgttttccccccccctcttggccgggtttttacccccttggggttgggaaacccctggggttccccaatttttttgctttgggggcctttccctttttccccggtgggtttttg

SEQ ID NO: 56980 - DNA, 328 bp, Homo sapiens
  misc_feature 21: n = A,T,C or G
ttaattaacgcgggatgtttngttatgtaattatgtatactagattttcttaatatactgtgtgtgtgtgtgtgtgtgtttgtgtgtgtgtgtgaatcagagcttatttcaataaactgagaaataatttttggttttcagaaatggagttgaagtaggcttgctctgcctgtggtgtgcttttctttattcctttactttcctaataaacttgctttcactttatggattctcctgtaattctaaaaagaaagagagagagagagaaaggaaaggagaaaggaagggaaagaaagaaaaggaaagaaagagagaaaaaaaaaaaaaa

SEQ ID NO: 56981 - DNA, 589 bp, Homo sapiens
ggccccccctcggaagtcttctagaattaattaaataggtcaaaattccctctgttggagtagccttccgattatgtagatttctttattgctccctgagttgtgaaacataaacccaagcattgacttactggaatttgactgctgtgttgataaaatttctgatatggtgtcttccaatgatttaagaatagctttcccctttctttactccaggaaatgaattttcacaaggtctcaggacaccatttttcaagtgctttagttaaagagactgacttcttggtgggcaggcctcttctaacaatgagctcacttctgcaaagcattcagtctgtggctttattgccatgaatcatgaagctttcacactccgatgcactaaaataatgcctcttcaattaaatatctattggcattgccatgaattggccactcttggatatgtgtcctatgttatgagcccaacatgtcagtggactgagaatcctctattagctacctctgtgtgtagcactgagcagactaacaatcctcagagtcatctaacaaggagagtcctgaggttcatgggattcttggagacatt

SEQ ID NO: 56982 - DNA, 641 bp, Homo sapiens
cccccctcgagagtacttctagaattaattaacgcgggtggttttcaaatattgaaccagcattgcattcctgatacaaaccctgcttggttatggtatattattcttcatatacattgctaggtttgatttgctagtatgagggctattggtctgctgtcttgttttgttttaacagatcttctccgggtttaattcctggataatgctggcttcataaaatgagttcctccttctgctttctggaacagattgtatagaattgatttatttgtaatgaatgtttggtagaatttagtgaaaccacagggagatttctttttcagaatatgtttaattacaaaatttcattttaaaaactgttatataaccattcagtttatctatttcatcttaggtgattctggtagtttgttgtttgagaatttggtccgcttcatgcaaactgttgatttatgtacacacagttctttgtaggcattccctattatccttttaacacaattccaatcagaaatctcagcaggacctttttgtagagatagacaagcttattcttaaatatatatcgaaaggcaaaagaactagaagagtcaaccatactgaaaaaaaaaaaaaaagcggccgccaccgcggtggag

SEQ ID NO: 56983 - DNA, 612 bp, Homo sapiens
  misc_feature 28: n = A,T,C or G
cgggcccccccctcggggtacttctagnattaattaacgcggggacatacatatttctagggcttttgatacagattgctggtttgctcaccagttggaccagtctacactcccatcaacagttgtagtaattcatatttctaatgcttctgaaattataaataaaagtttttaaaaatatgattctttcagttcacctgagctacttgaagacccagaaaaattgattcttacttgtctttgttatcaagaccctgtttcatacctaagtactggtgaaacatgctctagtttgtgagctatttgagtagaactaatggaaagatgaaataatagtacatcaatagttacaatgaagaaactaattatcccagagagtttttgagcatatgggtagtgtttgtgaatttaagtttgttccccacattgtcagtttattctaaaattatcaccattttagacttaaagaattttaaagccaaaagataagcaaacagacttgcttaggtcctgtagcaaattaattcagaccttgaacaacatttcattgtgctgtttaggaagtgttaagtatattgagattttccatattactgtgttactatcatactt

SEQ ID NO: 56984 - DNA, 363 bp, Homo sapiens
cgggccccccctcgaaagtcttctagaattaattaacgcgggccactgagtgacacaggccatgctatatttgcaagaaaaaaatgagccaggaaaaacaagtgtaggtcactggggatgagcaggcatccaccccttcaaaactctgcatggaagaggtaatccttataagaggcacagcttaccaaggcacagaccctccagttcttgttgtagctgaataagatggtaatatcctggctgcttggttcaaagtctgtgactcagcagtgcattctggtatcacagacctggggatcaccatcaagttcctctgcctggggaaccggatccaaacctggatcgcctggctatgatcacctg

SEQ ID NO: 56985 - DNA, 576 bp, Homo sapiens
  misc_feature 35, 164, 191: n = A,T,C or G
tgggtaccgggcccccccctcggggtacttctagnattaattaacgcgggaaaaagtgccaacaacatctctctagaatgtggaagttattcgattttaagttaatttatcataaaagaaactatggagctcatggcacgtacaaggcttgctattaagaactntaaaaaataggccagacatggtgtgtntaaagaagagacactggatgaaatagcccagatgatggtgtatgtccccaaggaggaacaactcttttcttcccagggctgcaagtctatttcccagaggattaactacttcctgtcatgaaggctagaggaagacttcctggaactgcctttcttccactaacaggaccctgggacctgtaggagcaccccgtttgggactgtgaggtgtttgagggtgtggactggcatccagcagccactaacaaacacacaactggtgtgtaaaaggcaggccttacattagaagccaagccaatcctttttcttttttttggaggtcccaccgagatagataggaacttggattgctgaattcaaaaacagagcccattcttaagatcac

SEQ ID NO: 56986 - DNA, 624 bp, Homo sapiens
  misc_feature 10: n = A,T,C or G
cccccctcgnaaatacttctagaattaattaacgcgggctcatatggagaattaggaaatattgcactttaatgcataagacaccttgtaaaatacccataaaattttaactggctgcagtgttaatgaagcaaataccatggagttataatagcttttgaatgtgatttatgcttacagctaatgaacagatgaaaagcactgtccttttttaagtaaacactacacactccagatggattgcaaaaatttattaaaattggagacactgttttaatcctcttgtgccatgagactccatcaggcagtctacaaagaccactgggaggctgaggatcacttgagcccagaagtttgaggctgtagcaagcttcaaaggccactgcactctagcttgggtgaggcaagaccctgtctcaaaaaataagacaagacttttagccacatttacagacttcaattaaaatgctacatgggaatgcagaatatcagatattttattgtcatcaagtaatcagtgagagagttcaagttggattgagatcatcatgtattctgcaattataatagtcccaacatttccaatcctcacctttcaagcagtaagctgcatgcttgcttgtt

SEQ ID NO: 56987 - DNA, 565 bp, Homo sapiens
cccccctcgagagtcttctagaattaattaacgcggggggggcgtggtgcgcgggcctcggccaggcctgagatgccgggagggtttgaccctggggctgcatggacagcttagcgctcggccgctggcgacagcggagggcggaggatctgcaggttccgggggacgtgaaacgggtatgcaggagattagaagccagtgggcatgagcgtggctgccaccaggtgaatgcctgtgccctggcgtcctggggcccagaggaccgggagcttccatcaagaggctgcctcccagcaccaaggccagagagtggccaggggaggctaagtacagggatttctcagaatggtggaaggagctcagcccagccttgcccaagatgtattgcaggggaatctggacattttagccataccaagaatcattagaagatgcaagctggaaaaaagaaggtcccagttttggttttgaacccttcatgttgcagcaaatgtgaatctcctacagatgggtttggggacttacctgttcaaatagcagcccggtgtcctctgtgggtgggggg

SEQ ID NO: 56988 - DNA, 596 bp, Homo sapiens
cgggcccccccctcgaaagtcttctagaattaattaacgcgggcgcctgtagtcccagctgcttgccaggctgaggcaggagaatggcatgaacctgggaggtggagctttcagtgagctgagatcacaccactacactccagtctgggtgacaaagcaagactccatatcaaaaaaaaacaaaaaacaaaaaaagaattcactaaatttggatcacatcctattaaaatacagcaagtctcatcggatttctgcaattttatttctatctcacttaagaaatgtgaccgatggcagcttgcttattaatgactttatgaattagaaacattacaagaacattttaacattttttaaaaacatcagcaaaagcttatacattataattatgtgtgctttaacagtaaatctacaaaaatctgtgttattccagtgtcatctaaatgacgggttggcaaactttttctgtaaagggctaaatagtaaattttaggggttctgggccatacagtctttgttacacctattcaactttgctatgaagcacaaaagccgccatagataatatataaacgaagaaacatggctatgttcca

SEQ ID NO: 56989 - DNA, 181 bp, Homo sapiens
  misc_feature 28: n = A,T,C or G
cgggcccccccctcgaggtacttctagnaattaattaacgcggggtactaaggccaagtcttatatcaggcatgtctcgtctgcacctgacctgactggttgcttatccaaccctgctttgtgcttctcacctttgggagggatgccttgccacctgagtcttacttggattcctgaacat

SEQ ID NO: 56990 - DNA, 592 bp, Homo sapiens
  misc_feature 558: n = A,T,C or G
cccccctcggaagtcttctagaattaattaacgccgggagaaagaaaaaactgcaaacacagccggacatcagaaggaacaaacgggggacacgctgcctttaagaaacataacaggcaccgtgagggtccacggcttcattcttgaagttagtgagaccaagaacccacctaatcccgggcacaaaaccacctcaatctcccaaagaccgaaagccctggtgtcgctgggaccagagaactttttctgagagcctatcgtgtccatggagagcagctgaggtaaatcctggaggtgactgtccccctaggagatgatgtggatggggaaatagttcatacgcagctcagcgaccttgaagcggcatccgaggagatgtggccacggggcaggcgaccgacaccagcgagtccagagggccagcgtgtgcaccactgtgtgtctccagagacttcaggaagcagccaccacgcccgaggaatgcaggaagatggacacacggctggggaagtacaatgaaaggccaagtaggcagcctgttctcctcagatcagtccnccacgaacactcattcccgaggactcatccaata

SEQ ID NO: 56991 - DNA, 169 bp, Homo sapiens
cgggcccccctcggagtctttgattaattacgcgggggagagagagccttagccctggattccaaggcctatccacttggtgatcagcactgagcaccgaggattcaccatggaactggggctccgctgggttttccttgttgctattttagaaggtttccagtgtgaa

SEQ ID NO: 56992 - DNA, 393 bp, Homo sapiens
aattaattaacgcgggctcttgaaactttttgtagggggtttttaagaaccttattctcacatatttaattggtcttgaatattaaaggggctcttaaacgtttggggtctacatgcaaatgtggtactaaacagggaaggaatccttttttttagctttggctgagggtcccacccttcggtcaggttttttttatctaaaaaggcaaagggcatttatgtaaaaaattgtgctcagggcaggatttcttttccacaaaggaaaaacacttgcaaagggccagctaggttaaatctttgcccgtttttttcattaaataaattggggttttaaaagggctgtaaaaaaaaaaaaaaagcggcccccaccgggggggacctccaattccccct

SEQ ID NO: 56993 - DNA, 490 bp, Homo sapiens
  misc_feature 428, 429, 430, 431, 432, 433, 434, 439, 441: n = A,T,C or G
cccccccccaaaaccccggcctaatggtgtgagaagcggacccaccccacaaaaaagaccccgggagaaatcccggacccgcccagagacgggccgggccatcaaaaacagggagagttttaaacttttctaccccagggcagccggggggggggggggacgaaaggccgggggggacccggggggggacccggaaacagaaagggacagggggagaaacaagggaggccggaacacgggggggacttaagaaaacaaagggggggcaggacatgggccccctagggggggcaaaggccccgggcgggggccagacataaacagccgcaaaaacagcgggggctaggggggaaggcccggggctaaatctacaaaactttcccgaaaacaaaaactaggggggaaaaaaattaatttttaaaagggtnnnnnnnaaaananaaaaaaaaaaaaaaaaaaaaacaagaggggccgccccggggggggagcc

SEQ ID NO: 56994 - DNA, 483 bp, Homo sapiens
aattaatgaccgcggggggggggtggtttttttttttttttgggaggacagagtctaccacttttgcccactgcagtccgcagcccggcctgggcaacagaagcgagtactccgtctaaaaaaaaaaaaaaaagggtaaatttttgccccccttttaaaaaaaaaatttctgattagttttcaaaattttttccacacggctggaactttgggggcttgtttttattttggaaggtccctacccaacccaaatgaaatacctttaatttaaattttcctggcctgaaacaatttaaaagggttttcactttcccagtctagggagggcaccattttccttagggacagcccttttaaataacaataaattgttttttgatctaaaaaaagggaaaacccttatataatagaagggggttatcaaaagggaaaacccttatataataggagggggttatttatagatttttatcggatctataa

SEQ ID NO: 56995 - DNA, 371 bp, Homo sapiens
attaattaccgcggggctttctcttttgcggtgctcggggggtggtacttctcctagttgcagccaggcttcataccctattgccctgcccgttaaaccacccagggggtacaaaatggtttttggaaaagggagtccccactggccctccagggaacccccgtccaaacatctacaactttctatctcctgacaagtttatggggggccaaaaccagtctttaattaacccaaaataaatgcgggtgtgggaagtaaaatttttttttccatataaattgggtggggacccacgtgtcccagtgtgtgttgatcttggctagattcactctgccttgaaacaaaaactggcaatggaatatgaaaggacc

SEQ ID NO: 56996 - DNA, 582 bp, Homo sapiens
  misc_feature 23: n = A,T,C or G
cccccctcgggggtactgtctanaattaattaacgcggggtggggagaacaggtgtccttctaaattacagcacaagctacagcctgcgtccagccataacccaggagtaacatcagaaacaggtgagaatgaccactttaactcaccgggcccgtcgcactgaaataagcaagaactctgaaaagaagatggaaagtgaggaagacagtaattgggagaaaagtccagacaatgaagattctggagactctaaggatatccgccttactcttatggaagaagtattgcttctgggactaaaagataaagaggtactgctaaagtcagacagcccaacaggtgatgttttactggatgaaactctgaaacacatcaaagcaactgaacccacagaaactgtccaaacatggatagagctactcactggtgagacctggaaccccttcaaattacagtaccagctgagaaatgtacgagagcgcatcgcaaagaacctagtagagaaaggtattctaaccactgagaagcagaatttcctgctatttgacatgactactcatccagtgaccaatacaacagag

SEQ ID NO: 56997 - DNA, 447 bp, Homo sapiens
tccaccgcggtggcggccgctttttttttttttttggccgttaaccgggaaaaaagctttttttttttagggaagccttacccgggagaaaaattgtaaaaaaaaaacttcccacaaaccttatttttttttttagggcccaaattcgttcctttcgtttgggaggaaaccccccccttgtttgatttggccccccaaaaaaccccagggccgggcccctttcccaaccctcccgggccttaaaccccccctgccccccaaattggggcccggggaattggggtttttagaaggtttgaaattccgggggttttttttaaaagtaaaccccattgccttaaatttttttagccccccccgtaaataattttaaaaaaccctctaggggggggccccggcccccattttttgtccccttaagggggggtaaatccccccctgggcaaa

SEQ ID NO: 56998 - DNA, 583 bp, Homo sapiens
  misc_feature 23, 545, 567: n = A,T,C or G
ccccccctcggaagtcttctagnaattaattaacgcgggggcatctctgtttggtgctttggatccatttcctcggtacttacatgcgcttgtcacactccaccagccgagtatggtgaagcaaatggacagtcagactgtttttcaggaagccttggacgcatgccagtgataaactggtattgcttgtcttctcagccacgtggtgtgggccttgcaaaatgatcaagcctttctttcatctccctctctgaaaagtattcctgcgtgatcttccttgcacataaatgtggatgactgtacggatgttgcttcagagtgagatgtcagatgcatgccaacattgcacttattgtatgaaggctcacaaggtgggcgaattttctggatccaattaagataagctggtacccaccattcttgaattactctaaccatgtgttctgatcccataaccaggcagtggctattgacaacttgtccttttttaatttccgactacataaaatatgaagacatatacccagttgccatctgcgtgacantaaaacattaatgctaacactntttaaaaaaaaaaaaa

SEQ ID NO: 56999 - DNA, 398 bp, Homo sapiens
ggactccaccgcggtggcggccgcttttttttttttttttggcctgaaaaacatcaacactctttttttttagggagtgagggaccccaaagggaggtctccttccccttgttctcctaacacagttaaaatcccccaaccctggccccttccaggtggggggggaagggggccaaccaaaaggccctatttttaccaccaacccaaaaccgacgggtgtccctccctaataaaaaaggcccaggacccaatccttttttccaaccctccccctccggaaggttaaaacataaaggggctcccaacctgggttttgccttttaaccaaaaacaccttttttcctaaccccgtaaccaaaagtgtgttttttccaaaaaccacaaacaggcccttaaag

SEQ ID NO: 57000 - DNA, 540 bp, Homo sapiens; identical to SEQ ID NO: 43414

SEQ ID NO: 57001 - DNA, 376 bp, Homo sapiens
  misc_feature 15: n = A,T,C or G
cgggccccccctcgngggtacttctagaattaattaacgcggggagccagatggggctcccacggtgcagctgcgggctgaagggctcctcaagcgcggccagagtgggctgaggccgaggaggcgccgagagccagcgagggatgccagcaagctgtcacctctcagaaatacaggaagaacatcaataatgttcgaagttataaagtagtaggtttctatcaagagtaaaacataaacgaagttataaagtagtaggtttctatcaagaataaaacataaacgatcaaagaattccttataaaaacatttttttatttctaggaatcaaaacataaatataaaatttgagagtccaccaaaaaaaaaaaaaaaa

SEQ ID NO: 57002 - DNA, 461 bp, Homo sapiens
ccaccgcggtggcggccgctttttttttttttttttttttttttttttgaaagagagggtttttttttttcccccccgttttaaagggagggggtaaaaccaaaaacaaataaaaacccccccccgggggaaaaaaaattttccccccccaacccccaaaaaaggggggaaaaaaagcccccccccaaaaaaaggggggggtttttttaaaaaaaaaaaaaaagggggttcccccctttaccccagggggggctaaattccccacccaaaaaaaccccccccccacccccccaaaaaggggaaaaaaaaagggggaaaaccaccccccccccccaaaattttttttttttaaaaaaacctttccccaaatttaaaaaaaaaaaattttaatttttccccccccctaatgggggagtttttttttaaaattttttttaaaaaaaaggggggaaccccctttt

SEQ ID NO: 57003 - DNA, 130 bp, Homo sapiens
ccgggccccccctcggaagtcttctagaattaattaacgcggggattctgtaaagagtttagggtttgattttataaaatccaaaatgagccttttattgaaaaaaaaaaaaaaaaaaaaaaaaaaaaaa

SEQ ID NO: 57004 - DNA, 327 bp, Homo sapiens
cttctacaattaattaacgcgggcaaattgaatcaagataattatattcttcaagccaagttaagcagctttgaagaaacaaacaaaaaacaaaggtggttacattttggagaagcagctgatcctgtcactggagaaaagttgaagcaaatccaaaaagaaatacaagaacaagagacacttcttcaaggatatcaacaggaaaatgaacgattatataatcaagtaaaagatctccaagaacaaaaaaaaaaaaaaaagcggccgctttttttttttttggttttaaacctttaatgagaaaaaaatatataataccgagctcaa

SEQ ID NO: 57005 - DNA, 135 bp, Homo sapiens
  misc_feature 9: n = A,T,C or G
ccccctccngaatacttctagaattaattaacgcggggggtcaggacagaccccatccttcaggagcacaccagcctcaaagactccatatactgcctgagcagccgcctgagggtctcggccaccttctgacag

SEQ ID NO: 57006 - DNA, 591 bp, Homo sapiens
  misc_feature 44: n = A,T,C or G
cgggcccccccctcgaaatacttctagaattaattaacgcgggnaatccaagtggcatttttaggaaaggttgcagcatttaatgccatgtggtatgtctgttcgtcaagtgggtggcaagggaatatccaagctggcattttggatatgatgggccttttactttcctgagtgacatgccacatgtcaagaaatactgctccccacccccccactcccatcacatttacgtgaacaattttcatttagttatttcccgttccatatggtgttaaaacagtcgtattaaataaagattatttctagttttcagtggtaatttaaatgagaggatatgtaataattgcttattagatacttatccaaatgaaatataacagagtttacagtacttaaaatggctggttatggtcttggaaatgtttgaaaattcattatcctgaaaaaaactttaccattctgttttacccttgaggtattttttggggaaaaatgtttttgataactattaatctaaatatagtataattataggcaaatttcactgcctagttttattgatatcctgagtctacagctagtccattcgta

SEQ ID NO: 57007 - DNA, 545 bp, Homo sapiens
tccaccgcggtggcggccgcttttttttttttttttcttttttttttttttttttttttttttttttcccccccccccccttttttaaaaaacccggggggggccccctcccccccccaaaaaaaaaattttttttaaaaaccggttttttaaaaaccccctttggtttccccccggggggccccccccggggcccccccccccgggggggggaaaaagccccccccccccctaaaaagggggccccccaaaaaaaaaaaagcctttttttaaaaaaaaaaaagtttttttgggggggggccccctaaaaaaaaaaaaccggggggaaaaaaaatttttttgggaaaaaaccccccttttttttgggggaaaaaaccggggcccccccggggttttttttttttttgggccccccccctttttttccccccctttaaatattataaaaaaacctcccggggggggggcccccaccccctttttttttcttttttaagggggaaaaacccccccccgggaaaaaaaaaaaaattttttttttttta

SEQ ID NO: 57008 - DNA, 330 bp, Homo sapiens
  misc_feature 10: n = A,T,C or G
cccccctcgngaagtcttctagaattaattaacgcgggtcacatttgtatataaccaggagatggccaaataacatctactgcagtgattttgcaaattcagcatagtcaatgtatccatcattgttcttgtcatcatctctcaaaacaccatctattatgttaatcagttcatcttcactcattagtggtgcctgttcactcccttcctacaaaatacaaattagacaatgatgagttgcgcattttaccggaagaagtgcttaactaacgtccaaaatatccatgttctttcatggcactgtttattaaaaaaaaaaaaaaaaaaaaa

SEQ ID NO: 57009 - DNA, 257 bp, Homo sapiens
acacctactagcactactagacatgaactccaaggcaagaataagagtatagtcattaccaccaaccttctttcacgtaggtacactacctatcaggtgggttcatatcctagctccatcacttctgacgatggcaaccttgaggaagatccttcatcttggagcctcaactactccatccataaaatggcaataataataataatacctatgtcacagagctgtctcgaggggtgaatgagtcaaatcatgtcaag

SEQ ID NO: 57010 - DNA, 584 bp, Homo sapiens
  misc_feature 24: n = A,T,C or G
gccccccctcgaaagtcttctagnaattaattaacgcgggaaccactatccacataaaaatgcagagcagattagcacccaaagcctcctttgcgcccactcctggctattaccttcaaaatgctacctaatgagaggactcagagtgccatataaaactataaaggtgacaactggaacagaaattaaaatcttgctaaatattggaaacaacaataaaaaggattgaaagggaaagaaagagttaatattgctatggtttggatgtgtgtcccctctgaatttcctgttgaaatgtgatccccaaagttggaggtgggacctagtggaaggtgtttggggatggatccctcatgaatggcttgatgccttcctggaggtaatgaatgagttctcactttgttacttcatagagagctggttgtttaaaagaggctggctcctctctcttgctccctttcttgccatgtgacatgcctgtttcctcttagccttcttccatgagtaaaagcttcctgaggcctcaccagaagctgagcaaatgccagcactatacttcctgtgtaacctgaagaaccatgagc

SEQ ID NO: 57011 - DNA, 582 bp, Homo sapiens
  misc_feature 31, 57: n = A,T,C or G
taccgggcccccccctcggggtacttctagnattaattaacgcggggccgcgcccgngaaccagcaacgcggcaaagggtcctgcacgtacccgcgcgcggccagggaacgcttgctgagggcgctgctgtcgttggtgttctgtaccgcgcctgcccgacgctcacggctccgggggcccatggccagaagagactcaggaatggcagtctgtcacggttgtgagccgccccttggttagcacacacctcacggacctcggtagggggaaaaaaaccacccatgcccctggacttccccttccgccggcacttgtgcgtcacttccgggaagagcgcatctcgccaaccagaattgaggagggtgtagccagtgctaagttcgcttgcggctgacctttctttggaatgttgtgagttccatttgtcccagaatacggtccgctaccgctgtgacatgagtgttagggaaggcgggttgtcacgtttctacaagccttccagtcaaaagggaaaccttgcctaagtccttgtagttgagaaatctctaagaggtgagtctgtggggactgacgacttggct

SEQ ID NO: 57012 - DNA, 627 bp, Homo sapiens
cccccctcgagagtcttctagaattaattaacgcggggacctcgtgatccacctgcctcagcctcccaaagtgctgggattacaggcgtgagccaccgtgccctgccttaatttttgtatttttagtagagacaggatttcgtcatgttggccaggctggtctcgaactcctgacctcaggtgatctgcccacctcagcctcccaaagtgctgggtgcccggcctgaggcatatcttaatagtatatagtaattaacagaagagtttcatagtacaatataacagtcaacgtttttgttttgtttctgcatacagacaacactaagcagttgagatttgaagatgtagtaaaccagtcaagtccaaaaaattgtactgtgtactgtggaggaattgcgtctgggttaacaggtacaatgtttggttttctaatcacctctgaggagcttcatcactgttcatatgaatttcatgatacacatcagccatgttttatttgtatgttttgttttatagatcagcttatgagacagacattctcaccatttggacaaattatggaaataagagttttcccagaaaagggctattcatttgtcaggtaacactctactttgaatatcatta

SEQ ID NO: 57013 - DNA, 522 bp, Homo sapiens
  misc_feature 21: n = A,T,C or G
ccccctcggggtacttctagnaattaattaacgcggggaggtggttacatgaaaaaaaaaaaataactgacacaactaaggtaaaatgaatacataaaaataaaaaaaaaaaacatgagaaaaaaaaagcaaaatctgagatacgatgaatggattataagcaaaataaaaatggggcgacctgctggtgggaatgtcccattgcatccaacatgggaagaaaataaagcctcccttagaccagatttttacaaagatgaaaaatgctatacccctggactgtacccttctgagcttgttcaaaccaccatttcattacaaatccatgtgctgaaatggtataggcactggatctctctgatgccaaaaactctgatactgttcatattaagtgcatataaattacttctattcttagtggacttcacgcttatgattgttctgctgaagactgtgttcaagaagatgagagaggtgctcaagacctggttaataatggcaaagaggactctaagatggatc

SEQ ID NO: 57014 - DNA, 628 bp, Homo sapiens
cccccctgcggggtacttctagaattaattaacgcggggcttcccaacaacgatggataaaaacaagcccagactgcaaacactacaataaataccaaactctccaatgcctagaaacatcaaccaggaaaacatgacctcaccaaatgaactaaataaggtactagggacaaatcctgaagaaacagagatatatgacctttcaaacaaaaaattcaaaaaagctgacttgagaaaactcaaagaaattcaagaccacacagagaaggaatttagaattatatcagatgtctttaacaaataaattttaaaatgttttaaaaataaagtagaaattcttgagctgaaaaatgtaattggcataatgaagaatgcatgagttttttaatagccaaattgatcaaacagaagaaagaatttgtgaacttgaaaacagcctgtttaaaaatacataatcagagaagacaaaagaataaatagaaaacaatggggcatagcctaaaaagggccaatttaagagttattggccttaaagaaaagatagaaattggggtagaaacgttattcaaggggagagtaacagagaactttccaaatcaagacaattatatcaatatctcaattcaag

SEQ ID NO: 57015 - DNA, 311 bp, Homo sapiens
cgggccccccctcggaagtcttctagaattaattaacgcggggatgaaccgaacgccgggttaaggcgcccgatgccgacgctcatcagaccccagaaaggtgttggttgatatagacagcaggagctgtggccacctgagaagcttcaagagatagaggaattcaaagagaggttacggaagcggcgggaggaggagctccttcgcgacgcccagcagaactcctgaggcctccaagtgggagtcctagcccctcccctgatgaaatatacatatactcagttccttgttattcgaaaaaaaaaaaaaaa

SEQ ID NO: 57016 - DNA, 186 bp, Homo sapiens
  misc_feature 10: n = A,T,C or G
ccccccctcnaaatacttctagaaataattaacgcggggggctgtcgggctgctgtattacgtgcctgctcggcgtatttttgcacactgcctataggttagccctgctctgcaagaagtagcaccagttcaataaaagttgctttctctcaaaaaaaaaaaaaaaaaaaaaaaaaaaaaaaaaac

SEQ ID NO: 57017 - DNA, 468 bp, Homo sapiens
  misc_feature 28: n = A,T,C or G
cgggcccccccctcggggatcttctagnaattaattaacgcggggctgacgggcggaggaggccctagcggggctgggcgcgctccccctcgctttccctccggcgtcctgctccggccctctcgcgctgcactgactatccctcgcatgactgctcaggcgcggatatggcttgtggccagcaaaataatgcagacggaacctataaatgccactaagcgagctggacctatgaggaaacaaggacatgaccaaaaggctgctgccaaagctgccttaatatatacctgcactgactgctagacacacatgccataccctaagaccttcaagcaggactttgagagcaagcatgctaagactgcacttactacacaaatagctgatgttcaagcataacgctgtttacaggtgaatacatgacacctttgactcttctactgtctcataccttaggtaacatacctg

SEQ ID NO: 57018 - DNA, 450 bp, Homo sapiens
tccaccgcggtggcggccgcttttttttttttttttttaaaaaaaattttccttttttgccccaggtggaaggcccggaacccaatttaatttaattgaaacccccccctcgggaactaaggctttttccggcctaaccccccaaagaagtgggaattaagggcccttgccaccacaaggcggggaaaattttttggttttttaaaaaaaaaccgtttaacccaggagggccaaaatttccgaacctggaaacccaccaacttgggcctccaaaagggcgggaattatgggattaacccacccccgccccgggccttaaatttttaaattaaatttttccccaaaaagggattttcccccttgttccccaggctgaagggaaagggcttaatttaacttaaccaaaccttttgcttccaaggttaaaggaattctccgccctaacccccc

SEQ ID NO: 57019 - DNA, 539 bp, Homo sapiens
  misc_feature 29: n = A,T,C or G
cggggcccccccttcgaaatacttctagnattaattaacgcgggcaccgatgactgagctgctgactacccccagcatctccaactcaacctcctctttctgcctctacccaaattttaaaactttcaaacatgggtttaaaaatggtaatgagtaaagttgcatccaagtgtatcaaataaaactaaatatccataaatgctgtaataattcctgctttgatgctgaactaaagaattttctgccaggcgtggtggctaacacctgtaatcccagcactttgggaggccaaggcaggtggatcacgaggtcaggagttcaagacctgcctggccaacgtggtgaaaccccatctctactaaaaatacaaaaattagctgggcatggtggcaggcatctgtagtcccagctactcaggaggctgaggcaggagaatcacttgaacccgggagacagaggttgtagtgagccaagatggcaccactgcactccatcctgggcaacaagcgagattccatctcaaaagaaaaaaaaaagcg

SEQ ID NO: 57020 - DNA, 575 bp, Homo sapiens
  misc_feature 536: n = A,T,C or G
ggccccccctcaagtctttgaataataacgcggacagaaaattcaagaaaaaagagatgatacaaattatgaatatcagtaatgagagattatcattacatatcataacaatattaaaggataacaagggaatattatgaaaacttcatgtcaataatttcaacaactttgataaaataggtaaatttatttaaaaacatattaacaaaactggcatagtaaaccaaagaaatcaaaatattcctttattgattaaagaaattgaatttgtcgtcaaaagcattcctaaaaaaagaacttcaggtttagatagtttccctggagaattctatataacatttaaggaggaaataatattaatcctacacggactctttcagaaaacataggaggtaaaaacaaaacacttcctgatttatgagacaggcataatcccaacagcaaaacctgacagatattacaggaaaataaaagtataggccaatattcctcatggttctaggcacaataatctttaacaaaatattagcaaacanacttcaacaataaaaagtaaaagtataatacttcatgat

SEQ ID NO: 57021 - DNA, 462 bp, Homo sapiens
cgcgggaagaaatgtctgtattgtatttgaagactgtttgccataaatctgaaatttgaacctatgtatttcaatttggtatgctaaaaagttctgaattaatgtaaagttttttgttataatattgtaatctcagttcaaaagttaactgcaaatataaaacccaatgatttctatatagtaaaaaaaaaaaaaaaaaaaaaaaaaaaaaaaaaaaaaaaaaaaaaaaaaaaaaaaaaaaaaaaaaaaaaaaaaaaaaaaaaaaaaaaaaattaaaaaaaaaaaaaaaagggggcccccccccggggggaaccccaattccccctaaaaggaggtaataaacccccccccaaggccccggttttaaaaaaagcggaatgggaaaaacccgggggttccccaattaaaatcccttgaaaaaaatcccctttttcccaagggggaaaaaaaaaaaaaaagccc

SEQ ID NO: 57022 - DNA, 616 bp, Homo sapiens
  misc_feature 38: n = A,T,C or G
ctgggttaccgggcccccccctcggaaatacttctagnattaattaacgcgggatagggcctatgagacttatgagacaccatcaaacagaccaacacaggattgtaaaaattacggaaggagaagaaagagagggaaaggggcagatagattatttgaggaaataatggctgaaagcatcccaaattaggagaaaggcatggctatgttatccaagaagctcaatgaacgctaagtaggataaacccaaagagacccacaatgagacacactataatcaaattgtcaaaagcaaatgacagagaagtttgaaagcagcaagagaaaagtgatgttcaccatgtacaaggaagcctcagtaagattatcagtcgatttcttagcagaaaccttaaaggccagaaggaataacattatatatttaaactgctggagtgaaaaaaaatcaaccaaggattttgtgtagggcaaaactgtctttcaaaaatgaaggaaggccaggcaaggtggctcacacctgtaatccaagcactttgggaggcccaggcaggtggataacttgaggtcaggagtttgagaccagcctggcatacatggtgaaaccctgtctctacta

SEQ ID NO: 57023 - DNA, 361 bp, Homo sapiens
  misc_feature 17, 28: n = A,T,C or G
cgggcccccccctcggnagtcttctagnaattaattaacgcgggggagcgggacgcggggctaggtcagagtaggaaggagtcgctgagctgaatctttgtggagtggaggttgtggtgagctgagatcgcgccattgctctccagcttgggtgacagagtgagtgagactccatctcaaaaaaaaaaaaattgttatattttcccggcagttttcttctgaacctttttgctaattgtcggaataacttgtagaaaatgagactttggaaagcaagggttctcaaactcgttttgaaaacagcaaaggattccaggcttggtctcaactccaaatggttgtctttgaagcttggtgatgc

SEQ ID NO: 57024 - DNA, 518 bp, Homo sapiens
tccaccgcggtggcggccgcttttttttttttttggaactgacgggttcaaatacacccctgaatttaaactcattttggggcttaattttttccttaaagggaatataaaatgcccttccgggggcctcccccactttaacccttagaaaaaattcaaaaatcttcccatttgggcctaaagggaaactgttcgggctaacacatctttttttttttttttttttaaaaaaaaaattttccgggccattttttttttaaaaaaaaaaagggggggtttaaaaaaaacttttttgggggggaaccccttttttaaaataaacccgggggaaaaccatggcccaggggaaatttcccttttccccccccccctaaaaaacccccttttaaaactttgggggggttttttaaaaaacgaggccccagttgttttccaaaaaaattaaaaactttttttttaaaaacgtttttttttttaacccccaaaagtaaaaaaaattttttaaaaaaaaaaaaaaa

SEQ ID NO: 57025 - DNA, 474 bp, Homo sapiens
gcggggagtcggggctttgtgctgggcctgttttcctggggccgtcttttctctactcaaaaacaaaagggcactctggaacttcacccaacaggactcgtgacctaaatgcaaataaccactttcaggggggaaccttctcccccagctttgcataaaaaaaaccttccctgctgggcttttattctcccaaaaaaaaggactttctcaggccctgtttgctaccggttaaacaactctgaaaaaaatgcccatccttggggtttcctaagctcctgcccttggcctaaagccccagctttgatggcaggccctaattttaaactttagggctccctttaacctaaccctacggcctcccatgcatctgtactccccctgtgtgccacaaatgcactacgttattaaatttttctgaagcccagattaaaaaattatctgtccacctggctcaaaagacaaaaaaaaaaaaaa

SEQ ID NO: 57026 - DNA, 220 bp, Homo sapiens
tttatttccaaccccagtgtgccatcataatgttggatgtaccatcgagagttatttacaaaaatgtccctaactggcatagagatctggtccaagtgtgtaaaaccttcccctttgtgttggggggcaccaaagtgttttttagggacgggaaagggaaggcaaattcctttgttttccaccaaaaaaaaaattttcagccctacaacttttctgccaa

SEQ ID NO: 57027 - DNA, 229 bp, Homo sapiens
ccccctcgaaatacttctagaattaattaacgcggggtaagatttgccgagttccttttactttttttaacctttccttatgagcatgcctgtcctggggttgaccagtgagccagtaaattatcttattgctttaaaaaaaaaaaaaaaaaaaaaaaaaaaaaaaaaaaaaaaaaaaaaaaaaaaaaaaaaaaaaaaaaaaaaaaaaaaaaaaaggaaaaaaaaaaaa

SEQ ID NO: 57028 - DNA, 433 bp, Homo sapiens
tccaccgcggtggcggccgcttttttttttttgggtttaatcccttttttgaaaatgtccaaaaacaaacaattccttaggtccaaaaagtaaatttggggttcccaggtcctggggttaaggggtaacaggaattaaaataggtttggggtttttttttggggccttaaaaattttttaaaaccaaacaaaaataatggttccccaacttgattaatttcctaaaaccctgatttgcccacctttttaaaaagtgatttttacggtttttggattatttttaaaaaagctttttttttttaaaacaaagaggaaagggaaaaattccaaaattgtaaccctaacctttttccacaaaacattttttttaggaaaaatactcctcattacccatatactcccatttttaaaattcacaaagtgttttttaaaa

SEQ ID NO: 57029 - DNA, 210 bp, Homo sapiens
cgggccccccctcgaaatacttctagaattaattaacgcgggggcgattcaacctgtgtgctgcgaaggacgagacttcctcttgaaagtgtgctgttgtaaacatatttgaaaactattaccaataaagttttgtttaaaaaaaaaaaaaaaaaaaaaaaaaaaaaaaaaaaaaaaaaaaaaaaaaaaaaaaaaaaagcggccgccacc

SEQ ID NO: 57030 - DNA, 267 bp, Homo sapiens
  misc_feature 27: n = A,T,C or G
cggggccccccctcggggtacttctanaattaattaacgcggggatatcttatagaaaacaaaaaaaaaaaaaaaaaaaaaaaaaaaaaaaaaaaaaaaaaaaaaaaaaaaaaaaaaaaaaaaaaaaaaaaaaaaaaaaaaaaaaaaaaaaaaaaaaaaaaaaaaaaaaaaaaaaaaaaggcgcccccccccgggggggacccccatttccccttttaggggtttttttacccccccctcttggccctttttttaaaaccttgggga

SEQ ID NO: 57031 - DNA, 207 bp, Homo sapiens
cggggccccccctcggggtacttctagaattaattaacgcgggggttccctaggcacctccattgtcttcccgccttgggagcatgaaataaataaagtgtgaaggggaacatgaaaaaaaaaaaaaaaaaaaaaaaaaaaaaaaaaaaaaaaaaaaaaaaaaaaaaaaaaaaaaaaaaaaaaaaaaaaggaaaaaaaaaaaaaaaa

SEQ ID NO: 57032 - DNA, 386 bp, Homo sapiens
tccaccgcggtggcggccgctttttttttttttttgggggaacctccttattaacccctggtggcttaacgtgccctttttatgttagggaaagggttttttccttaaaccctggaaacccacccttggttaccccaaacttttttaaggaacctccctaatttttaacccttaaaaaaataaaaagccggggtctggcttggaataacccttgggctaaaaaaattttgggggctattttaaaccccctaaaaaaaccattaaaactttttttatataaaaaagaaccttttaaactttctaataattgggggccccacgggagaacccctttaaattcccttaaaaaactttggtttaacttccaaaactgggcaaacttttta

SEQ ID NO: 57033 - DNA, 452 bp, Homo sapiens
ttttttttttttttggtttttttttttttttcccccccttttttttttttttttggccccaaaaaaatttttttttgggcggggttccaccttaaaaaaaaaaccccccaaaaaaaaaaaccccccttttttccaaatttggcccggggcctttcccttaccccccttttttttttgggccaaaagttaaactttttccccccccctttttttttttttttggggccccctttttttaaaaaaaaaccccccccttttggcccggaggacccgggggaaaaaaaaaccccaaatttgggggccctgggccccagggttttcccccttttttttaagggggttttttaaaaaaatgggggggaattttttttttttaaaaaaaaaaaaaaattgggggttttctcccccttttttgggcccccgggggggaggcctttttttttccacccccc

SEQ ID NO: 57034 - DNA, 383 bp, Homo sapiens
gggccccccctcgaaagtcttctagaattaattaacgcgggtcaattaagtgggaattttctggaagatggtcagctatgaagtaatagagtttgcttaatcatttgtaattcaaacatgctatattttttaaaatcaatgtgaaaacatagacttatttttaaattgtaccaatcacaagaaaataatggcaataattatcaaaacttttaaaatagatgctcatatttttaaaataaagttttaaaaataaaaaaaaaaaaaaaaaaaaaaaaaaaaaaaaaaaaaaaaaaaaaaaaaaaaaaaaaaaaaaaaaaaaaaaaaaatttaaaaaaaaaaaaaaaggcggccccccccggggggggccccaattccccctttaa

SEQ ID NO: 57035 - DNA, 570 bp, Homo sapiens
cgggccccccctcggaagtcttctagaattaattaacgcgggggaagaaaaataaaacaggataagaagacagtagcaggatgacactttcacagagagtgatcactatgatctgataaggtaccatttgagcagggacttgataaagtgacagaataagtcagaaagcaagaaagtagatagtgaaaagggaaaataaagaaataatctggataaaactgttaggaggtgaagaaggccgtcaccctgaaagggcttgccacgtgtagaacatcaaacctaagacacatcctgtgaaatagaattcaagaataaaaaaagttcctgaaagttgccacagaaaaaaactagattacagacaaaagcattacaatggttaggttcagggaatcaagagtattctcatcagccactgtagacaatacccaatctcaatggatactgacatgatcacaaaaagaaaagcaattatatattatgtgctggaagtacacaacgtcacttctaaatattcttaccagaaaattgaacctgagtctgatcaagcctctgaatcaactaccgtttacc

SEQ ID NO: 57036 - DNA, 562 bp, Homo sapiens
tccaccgcggtggcggccgcttttttttttttttttaatttttttttttttttttttttaaaaaaaacttttttttggaaaaaaatttaaaattttttaaaatttttttccccaaaaattttttctggtttttaaaaaggaaaaaggggaaaaaccccccttttttcctggaaaacccccacccccttttttaaaaaaaaaaaccccttgggccccttttgggaaaaaaaaaaggggtaaaaagggccccccaaaattttttaaaaccccttaaaagggggggtttgggggaaattaaattcccggcccccccaaaattccccttaggggtttttggggggggggcccccaaaaatttttttaaaaaaacggaaaaaaaattcccccgggtggggggcccccctttttgtcccccaatccccgggggggccgggggggggggaccccccccccccgggtttcagggggcccagggccttttaatttccccctggcccccccccggggcccaaaagggaaaaacccccttttttaaaaacaaaccgggggttttacccctggg

SEQ ID NO: 57037 - DNA, 580 bp, Homo sapiens
ccgggccccccctcgaaagtcttctagaattaattaacgcgggattctagtgtggaacaaaaaacagtgaacacaagtgcttacttgtggatactatcttaccaacggatcacaaagttctctttttggtgtactgttgttgacagggattgtgtactgtttcgacccaagtactgctgtatcctgtgtagtactagatctgtatctcttgtctgaattaaacatttttagttgctgtgtaaatgttaggaagcaaagtagctttgaattttctctgtaagagaataaaagataaaataatgtattttctttatttcacattttatttggagatatttaaatgaaatagaaagccatataacatagctataattactacctgtttgctatttttgtttaacttattttgtagcttcctcactggtttgtgttgctaagcaaacgtatacaaacagaaaaagagcttcctaaattgcacatttttgcacctcttgtgcattctgcaagaagacaatgaatccatgtatttctatataagtatcttcttcatttttaacctgttttcatttgtaatgatgct

SEQ ID NO: 57038 - DNA, 589 bp, Homo sapiens
tccaccgcggtggcggccgcttttttttttttttcccctcatcaatttttttggaccttttccagggtcctaggcccattaaaccttccaaaaaactttgcccctgcttttgaggaccttactttctaaaaaaaaaaatcccccttttttaaaagggctttttgttgggggttttctgcaaagtcctgaggaaattttttgtaaagggacctttgggtttaacttacccccttctttttttaaaaaatagggggggaaaaaagaggagggtttttaagggcaaacaatgacaaacctttcgggatgggtggggttttaaagggaaataaaccccgtctcttcacctaaggaaaaatttgctgccgtaaataggatgagggaaatattctgggggatccaaccaaaggaaccagggtgccttaaaccctgaggggacccaaaaaaatcatgcggcctttttccaagtccatggcccccaattaaaaatggttggggacaaaacaaaaggctaaaacaggaaggtattcttgtccccctgccaaataaaaaaattaagggatcaaatttgagggcgggctttaaaatttta

SEQ ID NO: 57039 - DNA, 472 bp, Homo sapiens
acttctagaattaattaacgcgggcacaaataaacagtgaattctcgtttaaaaaaaaaaaaaaaaaaaaaaaaaaaaaaaaaaaaaaaaaaaaaaaaaaaaaaaaaaaaaaaaaaaaaaaaaaaaaaaaaaaaaaaaaaaaaaaaaaaaaaaaaaaaaaaaaaaaaaaaaaggggaaaaaaaaaaaaaggggggccccccccggggggggcccccctttcccccttttggggggtttttttcccccccccctggggggggtttttcccccggggggggggggaaacccccggggtccccccttttttttcccttggggccccccccctttttggcggggggggttttagggagggggcccccccccttccccttttccaaatttttccccccctggggggggggggggattttgccccctttttttttttttaaaacccccgttaattttttggtaaaacccctttttttt

SEQ ID NO: 57040 - DNA, 426 bp, Homo sapiens
tccaccgcggtggcggccgctttttttttttttttttaagggggcacccaaaaggttccctttttatggggttgaaaaaaaaattttaatttaaaattttaacaaaaaaaggggttttttttaaatttaaaacccttaagggcttttttcttaggattaggggcaattttaaaacaaacttttttaaaaaatttggaaccctacccttaaacccctccctggtttaaaaaaattttcccccttgccaaaaaaaattttcctttatttttggagaaaaatatttttcccaaaaattaaaatttttttgttaaatttttcatccccaatttccagaattaaataatttcaaaaattcctttcagggggggccccggcccccattttttgtcccttttagggagggtaaattgccccctgggcaaaata

SEQ ID NO: 57041 - DNA, 349 bp, Homo sapiens
ttttttttttttgcaaaaataacttttattatgtaaaaatttcccttaataaactaccatttttttttggggaggaccttccaaaaaacaggtccataactgaattatccttgcccttgattataaaaattcttgaatgacccccttaccccttttttctggattacctgaaaacctttacaaggctgtaaggttgaaggcccttctccctgcctgtaaacctgctcctatcacatcacaacgggagggactttttttttcttttttaaataaaatctttacaacagttcaaatgctttttccaaaatgcatcatttaaaaggctttgttgatttcatcaaaaaacaaa

SEQ ID NO: 57042 - DNA, 345 bp, Homo sapiens
  misc_feature 3, 14: n = A,T,C or G
ganatacttctagnattaattaacgcgggggtttttgtatacaaaagtttacatttttatgtatatttttcttgtgtaaaaactgatgtaatatgtgtatgaaacactgtatgtattatctgtatatagtgtgacaaaatcatttttctttctttcttttggatgtattaataaatcttgctgtgaagtaaaaaaaaaaaaaaaaaaaaaaaaaaaaaaaaaaaaaaaaaaaaaaaaaaaaaaaaaaagcccccccccccgggggggccccccatttccccctatggggccccctttcgccccctctctgtccccccttttttaccccctcgactcggaaaaccc

SEQ ID NO: 57043 - DNA, 490 bp, Homo sapiens
ctccaccgcggtggcggccgcttttttttttttttggaaatttttttttagcccgcccccaaaaggggaaaaaaaccccctttttttacccaaaaacctaattaccggtatttaagaaaaattaatttaaaccggccgggcggggaaaatcactttccctttccctttttcacctttaaaaaaaaaaccaattttcctaaaaaaggtaaaaatttccaatttttaatggatttatttaaaacccctaaggtattctaacccaaccctttttccttcaaaaaaaaaaaaaaaaattgggggccccccctggggccccaaatttaaacctaatttaggtccaaagggctttttccatcacttaatacccacccttttgtttttccctaaaaattttattttcccctaacccagaagtttttgccccaaaaaaaaaggtaaatcctgttttaaggaatacccaggggaatttaaaagggccttattttccaaa

SEQ ID NO: 57044 - DNA, 313 bp, Homo sapiens
cccccctcgagggtacttctagaattaattaacgcgggagaaagggaggaaggtgtcgagctctcctgctgcaggcagctgtgcaaggggagcggcaggcgtcttacctagaactagtgtgaagctgtcctccccgcgcagctcaatgtgttaaacaataaagctgtgaaggaagctggcattgcaggatgtacgtcaggcactgaagatggtgttacaaataaggggtatgtttctcacctgtcatcttcaggggaactccgtatcaaagagctttggaaagggtaagtcccttaagaaaaaaaaaaaaaaa

SEQ ID NO: 57045 - DNA, 176 bp, Homo sapiens
cgggccccccctcgaaatacttctagaattaattaaatcatattcaccttcctgaatcagagcacaatcttgattttgatgctattttactaaggttttttttttttttttttaacaacattggtgaatttaaccctgcaacataaataactatcactcagcaaaaaaaaaaaaaa

SEQ ID NO: 57046 - DNA, 557 bp, Homo sapiens
  misc_feature 455: n = A,T,C or G
ttctagaattaattaacgcgggcactgtcctagcagaagctctccatgaggaccccacccctacagcaaacttctgtctgggcatctagatgtttccatacatcttctgaaatctaggtggaggttcctaaacctcaattcttgacttctctgcactcacagtctcaacaccacatggaagctgccaaggcctggggcttgcaccatctgatgccattgctcgagctctacgttggcccctttcagccatggccggagtggctgggatgcagggcgccaaacccctaggctgcgcacagcttgaggaccctgggcctggtcaatgaaacaacttttcctcctgggcctccaggcctgtgatgggaggggctgccacgctataatgagagggctcccactgggtccctcccacaacatgtgggaattatgggagtacaattcaaggtgagacttgngtggggacacacaaccaaatcatatcagacttcctttttcttgagaagatctctgttctttaagaaaattatccctatctagaatatccagaaaaatcctaa

SEQ ID NO: 57047 - DNA, 481 bp, Homo sapiens
  misc_feature 28, 79: n = A,T,C or G
cgggtccccccctcggggtacttctagnattaattaacgcgggatttaaaaagaaaaaaaaaaaacaaaaaaaaaacanaaaaaaaaaaaaaaaaaaaaaaaaaaaaaaaaaaaaaaaaaaaaaaaaaaaaaaaaaaaaaaaaaaaaaaaaaaaaaaaaaaaaaaaaaaaaaaaaaattttttaaaaaaaaaaaaaaggcccccccccccggggggggccccaatttcccctttttaggagttttttttcccccccttttttggcttttttttaaaacctttttttgggaaaaaccttggttttcccaaatttttttcctttggaaaaattcccttttttcccatttgggtttttaaaaaaaaggcccccccctttttctttttcaaaaatttgcccccctttttggggaaaggaaatttttcccctttttttttttgtaaaaaccccctttaattttttttaaaaaaattttttttttta

SEQ ID NO: 57048 - DNA, 520 bp, Homo sapiens
tccaccgcggtggcggccgctttttttttttttttggctgggaaaaaacccttttagggctgttaataatggaaaaaaaaagtatccggtttaatttttttttctaaagaaatttaaaaggctttcttggcggggccaagcccaattccccatggacccctttttttttggggggggggttcccaaattttttgttccaaaaagaaatggcggccttgttgggtcccccaacccaaaaattctcaaaacggtaaaaaaccttaaacctcccgacccctttttaaaaaaccccccccccttttgggtgggtggcaaaaaaacggaacataattttctgggccccctttggggtaaatttaagaaaaaccccaagccggggaatcattgaaacccatacagggcccccagggatgggtccccccctggacccacacaaaatccccaccctaaaactaaaccccggggaacccttcctttgtggaaacaaaaaatattttggcctgaccgggggctccctttt

SEQ ID NO: 57049 - DNA, 130 bp, Homo sapiens
  misc_feature 30: n = A,T,C or G
accgggcccccccctcggggtacttctagnattaattaacgcgggatttcgcagagttatatctatagttttagtaacaatttcttatgtattctggataactgaaaacaactaaaggtgttgggcgtta

SEQ ID NO: 57050 - DNA, 324 bp, Homo sapiens
tccaccgcggtggcggccgctttttttttttttttttcccaactacccccccgggccggaagggggaaatttccccccctgctcccttccttgatatggggaacccgtttttaaggctccctttccgaaataaaaccttaattccccgtcacccggggccaccatggtgggcccggcaactaccatccaaaatttaataggccaaactttaaaatgggtcccccccccccccccccttaaataaattttaaaattactttcaagggggggcccggaccccactttttgtccctttaaggaagggtaaattgccccctgggcaaa

SEQ ID NO: 57051 - DNA, 426 bp, Homo sapiens
cccccctcgagagtcttctagaattaattaacgcgggcgatgcatgctgaggggcagtggaagcatggaagggagactgggtgctggggaaagggaaatgctgacacttcaataaaaatttgaggttcggccgggcgcgcagtagctcacgcctgtaatcccagcactttgagaggccgaggcgggaggatcatttgaggtcaggagttcaagccaacctagccaacctaatgaaaccccatctctactaaaaatgcaaaaatcagcaaggtgtggtgccgtgcgcctgtagtcccagctactcaggaggctgaggcgggagaaatgcttgaacccaggaggtggaggttgcagtgagccaagatcacaccactgcactccagcctgggcaacacagtgagactgttctcaaaaaaaaaaaaaaaa

SEQ ID NO: 57052 - DNA, 179 bp, Homo sapiens
cccccctcgaaatacttctagaattaattaacgcgggcagcttaaagaggatgcatgaaataacccttttatcgcttataaatagtgccagttatgtgttcccgccaaaaaaaaaaaaaaaaaaaaaaaaaaaaaaaaaaaaaaaaaaaaaaaaaaaaaattaaaaaaaaaaaaaaaaa

SEQ ID NO: 57053 - DNA, 555 bp, Homo sapiens
cgggccccccctcggggtacttctagaattaattaacgcgggccaacagtgcctagcacacccgcagctgctaaactaccaaacctgcgttaaaaatttcgggtggggcgacctcagagcataacccatcctcctagcagtacatgactaacactccaccagtcaaagcgaactactatactcaattgatccagtaactagaccaacggaacaagttaacctacggataacagcgcactcctattctagagtccatatcatcaataaggtttactacctcgatttggatcaggacatgacccatggtgcaagacggtattaagaggttcaacgtgttcaacaataaaagtcctacttgatctgagtccagaccggagtaatgcaagtcggatcctatctacttcaaattgctccctgtacgaaaggacaaccacaaataaggcctacttcacaaagcgccttgctgagcaaatgatatcatctaagctgagcaggaagatgaagcagaagatgaccagtctgaggcttcagggaagaaatctgtgatgggagtgt

SEQ ID NO: 57054 - DNA, 563 bp, Homo sapiens
tccaccgcggtggcggccgctttttttttttttttcccggcttttttcccaaaaaaaattttttgggccaataccacccccttcctttttttaagggcaaaaagggggaaacctaactttttttgccaaaaccaacagtggcgggccggaccttaacatgcttttcctttaccctccaaacccctgtgggcaaacaaaaacaagcccctgaaaatcccgggagggttctaaccccccaaaacttttaaaatcccctcccctggggagccccaccaacctattttcatccgggaaaaggaccttggacccgggtaaattttggttaaacccccagttcccccactaaatacctgggaaattttaaacagttaactaaacctttataaaccataagtcccccccccttcccccctcccaagggggggaggatccccccaatgggattccccaaatgcctttttatttcttaaaaacctagggattaattaaatttttggaaaaagcccccgcttaaataaattctaaaagtcctctcgaggggggccccggcccccactttttgt

SEQ ID NO: 57055 - DNA, 507 bp, Homo sapiens
  misc_feature 37: n = A,T,C or G
ctgggataccgggcccccccctcggggtacttctagnattaattaacgcggggccgtcctgatcatcctcactggtcgcccgaccgcaagagggtggtgctcctgacacacaccggctagtggcttattacttgcgactggacctctggtcctcattcgagatcctccacgacgaacacaccagaaatctgacattgccactttctccagcaccgagatcgtcaatgtcgaaataccataaacatcttactgacgcttacttgctgaagaataccctgcggaagcccactcaccatgaacgtgagatcttggacacagataaagacaagtatgatatcaccgaccagcgcaagattgaccagaacgctgaggactcacaaagtttaccatatatcaaagctcttcctcagctaacacggctacctgcgatctgtgtttgctctgaccatgggaatttatcctcacaacttggggtgctaaatgtcttatgaacctaactgaatagct

SEQ ID NO: 57056 - DNA, 354 bp, Homo sapiens
tccaccgcggtggcggccgctttttttttttttttcccttaaaattttgttttgccaccaggttggaatttaaggggcacaatttcaacccattgaaccttttgcctaaaaggttaaagcaatccccctgcctaatcctcctaaatagcgggaattaaaaatgcccccccccaccccaagttaatttttgttttttaaaaaaaaagggggtttaaccttgtggcccataagggtttttttttttgaacctaataacccccccgcttaattaatttttaaaattcctttgaggggggggcccggaccccactttttgtcccttttagggggggtaaatggccccctgggcaaaat

SEQ ID NO: 57057 - DNA, 336 bp, Homo sapiens
tccaccgcggtggcggccgctttttttttttttttgaattccttcggggggggacctttaacaaactttcttgtaaaaaaaaaggcaacatacttaataagttattggccctcctgaggccattttccccgggggggcccaaggaacccggggaaggaacccgggggccaaaaattttccaaaccgtcctcctaagggttggggaaccaaaaaacccacccttaacctaacccgggggcccccccggttaaataaatttaaaaagtcctttcagggggggccccggccccaactttttgtccctttaagggagggtaaatggccccctgggcaaaa

SEQ ID NO: 57058 - DNA, 659 bp, Homo sapiens
  misc_feature 16: n = A,T,C or G
ccgggccccccctcgngggtacttctagaattaattaacgcggggacacacaggtggggtgaccgctctctgttgggacccagtccagcgggtgttgttctcaggcagttcagatcactctgtcatcatgtgggacatcggtgggagaaaaggaacagccatcgagctccaaggacacaacgacagagtccaggccctctcctatggcacagcacacgcgacaattgatctcctgtggcggtgatggtgggattgtcgtctggaacatggacgtggagaggcaggagacccctgaatggttggacagtgattcctgccaaaagtgtgatcagcctttcttctggaacttcaagcaaatgtgggacagtaagaaaattggtctaagacagcaccactgccgcaagtgtgggaaggccgtctgtggcaagtgcagctccaagcgctcctccatccccctgatgggcttcgagtttgaagtgagggtctgtgacagctgccacgaggccatcacagatgaagaacgtgcacccacagccaccttccatgacagtaaacataacattgtgcatgtgcatttcgatgcaaccagaggatggttactgacttctggaactgaaaggttattaagttgtgggatatgaccccagtcgtgtcttgat

SEQ ID NO: 57059 - DNA, 604 bp, Homo sapiens
cccccctcggaagtcttctagaattaattaacgcggggctgtcttgggttgatggcaaaaggaattaaaaagggatcaacatgagaatcgttgtaaaggtagataatgtttagctcaataagcagttacaaagctgagttaagaaggacaagttcttagtctggcgcccagagaaaatcaagtgacacaaatgagaagctggcaggtgggatgagaaattattctgaataaatttaaaatccaagccgacatgttaggaaggtactgacgaacaaatttaagtttggaacttaaataaagtaaggccagagatacagacttgtgaattatctgtacagagaaacttcaaaatcaaacaccttgtaaatcatatctcactaaaacaaacaattagttacctaagaaggctctgggagaggatgttcaagggaagaatcttgaggaatacctacccttagagaagagaaaggagagcagagagaaaaattgagaagaacgaataatcaaaattaaacctctggaagtcaagaataaaaaggtttcaaggtgaggataggctgggcgcagtgactcatgcctgtaatcccagcactttgggaggctg

SEQ ID NO: 57060 - DNA, 424 bp, Homo sapiens
tccaccgcggtggcggccgctttttttttttttttcccttgggctccaaccttttgaaaaacaaaaataaaaagggctttttttttttttttaaggcctccctaaaaggaatttgggggagggccatggttcacctaaaaaattttgttttaaaacctacgggtaaaaacagttgccatacccccccccccacttatttaaaaaaataaaacccttttgttttcggggattatggtttccctcatttccaaaagtcaacctttcttttaggggaaaaaaccaaccccccaccccttggagggacttttccccttttaaagcaaaaactttttggttaatcctgacccacacttgttacctaaacccccaccccctttgtccaagctccagcaaaaaaataaatccccccaccaaaccctttttt

SEQ ID NO: 57061 - DNA, 111 bp, Homo sapiens
aacgcggggctcttcggggaagttgtctgcagcactcataaggtccagcgtttgaaataccgacgtaggctttcctacaatacagcctctaacaaaacttatggctgtccc

SEQ ID NO: 57062 - DNA, 642 bp, Homo sapiens
  misc_feature 9, 25: n = A,T,C or G
acttctagnattaattaacgcgggnaatgaggggcgtgtaaacacaatatcatccccaatgtgtcttgtattatcataagttagatgttttagtttaaaaatcagaaagacattcttagttaatctttgaaaactcatacagtggtattgctagtttaaaatgagtcacttacttcatatcctctcgttcagtttagtaagcaaaggcttcttggcttctctggtgatggggtttgttttcatcgggcatacgttttctgcaatggtttagtggctggggtgagccactggcagtgtgcttacctgttgtctgaaacatagatagatcccacgttgatgtctgaacgaccgtcttttgaaaactcatcgggagtgaatggcatctcgttgtaagtactctaatatacagtgtgtagtttgtttctgttgttcacttggagtggatccagcttcactgtcatgtgcgaacacagtgacacgtttggccagtgacatttcaatcactgaaaatgtgctctacatctcgtatggatttctaggcctgatatccaacagaaagcatagacgtctcaggttattcgttactctaaggtaaaaccatctaggatgattttcccccttgcagttatgttatcattctta

SEQ ID NO: 57063 - DNA, 431 bp, Homo sapiens
tttttttttttttttttttttaaataccggggggggttttttttaaaaaaaccccgggagggtttaaaaattttaaccccgggggaaacagccccttttttgcaattgtggccctttggaaagtaaaacccactgggtttctttagggaaaaaatttcctgggcttaaaagcctttgccttttttggtttttttgaaaattcaaagaagtggttttttcctgcctggccctttgggggaccattttggcttattacccccgttttccaggttctttttgaaaataaaaatgatggcaggggccccttccctgtttgccctttgtttttaacccgggttgaaaagtaaaattttaaaggggtttgccccctagtaaactaaaattttttaaagaaaaaaacggtacctttctcgaaatctaacttgggcttt

SEQ ID NO: 57064 - DNA, 422 bp, Homo sapiens
ccccccctcgtacagtactttataaaattaattaccgcgggggaaaaaggccctgaagaaaaacaacccccgggggggaagcctgaaaacacttacccttcatgagtgcccccaccatggcctgaatgatgcttctcctcggactctttgcttatggatcaggagtggattctcaaactggggtgacccaaaacccatctttctaagtgtcccctgaagggacagtcacactcacttggggcttgagctctgactcagtctctagtactaactaccccacctggtaccagcaaaccccaggccaggctccacccacccttatttacttaaaaaactttctcttttttggggtccctgatcgcttctttggctccttccttggaaacaaagctgccctcaccatcacgggggcccaggcaaaa

SEQ ID NO: 57065 - DNA, 491 bp, Homo sapiens
  misc_feature 455, 478: n = A,T,C or G
cggggccccccctcggaagtcttctagaattaattaaccgggtgtggtggtgggcacctgcagtcccagctactggggaggctgaggcaggagaatggcgtgaacccgggaggcggaggttgcagtgagccgagatcacgccactgcattccagcctgggtgacacagcaagactccatctcaaaaagaaaaaaacagaccaccggttccacggagaaaggagagggcacaggaagctcttcctggtgtttgggatgttcgtgatcttgattgtgctgaggattttacaggtacagaacaacttatcaaactgggtggacaaagcaaagaggaatgaaagaggcaacacattaataatgtattatttcctcaattgtctgtaagctacagaaaatctggggtatacctgaagtatatgatgtttattgtacatcggttatgcctcactaatgctntataggagtgagagagggagtangtggaggcagatg

SEQ ID NO: 57066 - DNA, 448 bp, Homo sapiens
  misc_feature 39: n = A,T,C or G
cccccctcgaaatacttctagaattaattaacgcggggnaaaaaaaaaaaaaaaaaaaaaaaaaaaaaaaaaaaaaaaaaaaaaaaaaaaaaaaaaaaaaaaaaaaaaccaaaaaaaaaaccaaaaaaaaaaaaaaaggcggccccccccgggggggacctccaattccccctatagggagtctttttaccccccctcattggccgtgttttaaaaacgtgggaactggaaaaaccttggcgtaaccaaatttaatccctttgaaaaaaatccccttttggccagttgggttaaaaccaaaaaggccccccccaatcgcctttccaaaaagttgcccaccctgaaggggaaatggaaattttaaccttaaatatttggtaaaaattcccgtaaaatttttgtaaaaccacctattttttaaaccaatgggccaaaatgggaaaaatcc

SEQ ID NO: 57067 - DNA, 192 bp, Homo sapiens
  misc_feature 108, 111, 112, 144, 146, 149, 150, 151: n = A,T,C or G
atgagcaaacctactcctgcatagcccctgaaatgaacaaaagacagtctatttgcatgcatcataagccttcaaaaaaaatttttacttttttttttggacgggggnacnntcactcgggcccccccgaacaagaaaagaagnancannnacgaaacacaagggtaagtgaaacttaaaaaaaaaaaaaaa

SEQ ID NO: 57068 - DNA, 474 bp, Homo sapiens
tccaccgcggtggcggccgctttttttttttttttccctactaggggggccaacagccttttttataccaaaaaacccctaaacaaacaaagttttttaacaaaaacccgggccctgatccagggaaaatcccgccctttttttttttttttttttccccccctaagggcccccccaggaacaaaaaaaaaaagggcccccgtttatttttttccccccttcccattggtttaaaacccggaaaaggggtggggaaaaccccccccccccaaaaaaaaaccccctttaagcccccagaaaaaaaaccttttttttaaaaaaacccccccaccccccccccaaataaaaaaaagggcccaaaggccttgggccccccttgggggggaaataaaaaaatcccctttgggcttttttggcccccacccccccacaaaaaaaaattttggccctggttttcccaaaaatgattttttc

SEQ ID NO: 57069 - DNA, 326 bp, Homo sapiens
gggacttttaagaagatgaaggtaagtaaaagcggttggtgggactgaaaaaccaaagttaaaccctttttggaccttctgaggactcatcgtggaaccaacgggcacagttggcaaccccttcatgacatcacaccctgttccaaatgaaaccatcatagggctcccataaaatgtaataaatttttcccggggagaaaaacccaacccccccaaccaggggcaggataccctaaaaaaacatctacccccaaaaatcaaatttattgggactatccaaattttgtgtggcatgatggttttgaccttggggatcattttggcat

SEQ ID NO: 57070 - DNA, 415 bp, Homo sapiens
ggggcagctaggaataatggaataggaccgcggttttattttgttggttttcggaactgaggccttgattaagaagggacggcggggggctttcgttttgccccgttagaaggtgaatttttaggcccggcgcaagacggaccaaagcaaaagcttttgccaagattgttttctttaataaaaaacagccagccgaaccgttacaccaaccggggggggacactctggtcccgccccccggacctgttgctcggggagcgggactacggcccccccattgacctggggggggctgggtgcttcatggcaaaaatgtggacccgcagccctattttgcagggcaacacggagcaacaccaactcgccctaataagtcagctttggggttccatcacccctgaggtggggccaaacg

SEQ ID NO: 57071 - DNA, 195 bp, Homo sapiens
  misc_feature 25: n = A,T,C or G
ggccccccctcggggtacttctagnattaattaacgcgggcttctcccatgtgcccttgaaggaaaaataaagtgtcactaccgtatttcttgttttcatcaaaaaataaaaataatttaaaaaaaaaaaaaaaaaaaaaaaaaaaaaaaaaaaaaaaaaaaaaaaaaaaaaaaaaaaaggaaaaaaaaaaaaaa

SEQ ID NO: 57072 - DNA, 440 bp, Homo sapiens
aattaattaccgcggggtttaaaaagcactccttgaacatacttctgaaattgcaggaaaatgttcatcccccataggaagtggttacagaaaagcaactaacctgggcagttaaaagggagactatcctaaccacatctaatttataaagggataaaaataatttttatcatacacttttaagggacttatccctttttacattatttctaaaaaaatatagctggccccaatcaccatcctttcctgttgtcttttaaaggtcatggctaaaaggtgaccctggtaaatttccccaacctggtaatgaaaaatacaaacctgttgaaaggcacaggctcccattgttttttaaaccccttataaaaacacttttggttcatctaaaccatcgttggggtgactgttctgatccctcccctaatcttcactgggggagg

SEQ ID NO: 57073 - DNA, 372 bp, Homo sapiens
cgggccccccctcgaaagtcttctagaattaattaacgcgggggctgttgcaaaggtagagagggagaagtgacgatggtgatcgttgctgccgcggccgatatggaacccaagcagtggcgaagggaatcgcaaggcccttccctgaccattttctactgtccctgcgcgaggctgagttatgaacttcggtttggtttctttctgcaatccctgcagggccataaattcttggcccttaagactgggtggcccataacagactcagtgataccatcagtaaccacaattcacactggagtcaagttatctgattcccacaccagttggagaactggagattccttagaacttttactgtcatgttttcaa

SEQ ID NO: 57074 - DNA, 498 bp, Homo sapiens
  misc_feature 410: n = A,T,C or G
ccccccctcgtgcgtacttctagaattaattaccgcgggttagcaaaaccccttatctgcaaaaaattcaaaaattacccaggggtggtggtgcgtgcccaggttcccaggtcctcgggaggctgaagaggggggaggatcccttgaccttgaaaggttaaacctgcagtgagctgggatcgccccactgcactccagttgggttaatggaaaccttgttttttaaaaaaaagaagggggggtgttaacaccaacaaaatactctttttttaagtgtaattaagtggaaaatcaaaaaagggaattgtttaattaaatcttacttaccaaatctaacacatgaaatgtaacttttgcttatggaaaaccgtgttattttattgaaaaactttaaaggtttgagaccttanaaaaaaaaaaaaaaaaaaaaaaaaaaaaaaaaaaacaaaaaaaaaataaaaaggggaaaaaaaaatttgggggggcccccccgggggg

SEQ ID NO: 57075 - DNA, 366 bp, Homo sapiens
tccacgcggtggcggccgctttttttttttttttttttttaaaaaaggagttttgtttttcaccccaggttgaagggcaggggggaaatttaatttaattgaaacctgggttctggggttaaaaaaatttttggcccttggcccccaataaattgaaattaaagggttgccccaccccccccggttaatttttttttttttaggggaaaggggttttccccttttggggaaggggggtttaaaactcttaacctaaaggaatttcccccctttaataaattttaaagaacctttcgggggggggcccggaccccacttttttttccttttaaggggggtaaattgccccctggggaaaaaaaggga

SEQ ID NO: 57076 - DNA, 277 bp, Homo sapiens
ccccccctcgtgcgtacttctagaattaattaacgcggttttattcttggagtccaccatcctgaaactgtgcaatcctggggtgatacttttgctcaccaacaaaatcacccccaccgcctcccaaaacccgactccttctgttagtctaaggaattttcctctccccctgggagacagagtgagattctgcctaaaaaaaaaaaaaaactgcatgtattctgttttcaaaacaaaattaagtgcatataatccattattaaaaaaaaaaaaaaaa

SEQ ID NO: 57077 - DNA, 406 bp, Homo sapiens
gggccccccctcggaagtcttctagaattaattaacgcgggcccacaaagccaaaaataatcactatcaggcccttcagagaaaaaaaattgtgggctgggctgtgtgttttactcctgtaaaccctgtaatctcagtgctttcggagaccaagacaagaagatcacttgagccccagagttcaagaccagcctgggcaacatagtgagacctcatttctacaaaaaaaaaaaaaaaaacaattagctgagcgtggtggtgcacacttgtagtcctagatgcttgggaggctgaagcaggagggtcacttaagcccaggagtttgaggctgtagtgagctatggaggtactactgccctccagcctatgtaacagagtgagaccctgtctcaaaaaaaaaaaaaaa

SEQ ID NO: 57078 - DNA, 490 bp, Homo sapiens
  misc_feature 23, 36, 457, 458, 459, 460, 461: n = A,T,C or G
tgggtaccgggcccccccctcgngggtacttctagnattaattaacgcgggtatcgggacattattggatgctatcatttgtagaatgtcaacaaaagatgttttatgaaatgtcagaaatattaacaaaaattctcagcattaaagaaaacattgattttccaaaaaaaaaaaaaaaaaaaaaaaaaaaaaaaaaaaaaaaaaaaaaaaaaaaaaaaaaaaaaaaaaaaaaaaaaaaaaaaaaaaaaaaaaaaaaaaaaaaaaaaaaaaaaaaaaaaaaaaaaaaaaaaaaaaaaaaaaaaaaaaaaaaaaccccccccccccccccgggggggaccccccccccccccaaaagggggggaataacccccccccccaggccgcggaaaaaaacccaaggggggggggaaaaaaccccgggacaccccaaaaaccgcccggggaaacaacccccccnnnnnccgggggggaaaaaaaaaaaggccccccc

SEQ ID NO: 57079 - DNA, 398 bp, Homo sapiens
acttctagcattaattaacgcggggtttttgtttgtatttttactatatttcaaaacattttaaaactagtaattttaaacattgttattgctataaagggacatagtttgaaaccagaaaaaagatgacctttcttgtctagtggtcttttcatattagtttacttactaatcagtagcagtataaagaatattcaattttattctattggaaatcagtaactatggttctgaaagataactgctgatgtatcttgttcctttgtaagaggaaggaaaaaatgatattttttgattctgtctttgcaatgtttatctttaaaatggcaatcaaatagtcactaaaattttttcttccatttaaggaactgagtaccttttcctaaaaaaaaaaaaaa

SEQ ID NO: 57080 - DNA, 441 bp, Homo sapiens
gcgggcttacacactggggtgaaaaacaactagtggggggggttaacaaagtggattccactgacccaccctacagccaaaaaaaatttgaggaatttgttagggaagtcagcccttactttaaaaaattgggctccaacccccacacagtaccttttgggccatttttgggtgggaagggggacaacttgctggagccaagtgctaacttgccttggttcaggggatggaaagtcccccgtagggatggcaatgccagggaaaccaccctgtttgaggctttggactgtatcctaccaccaactcgtccaactgacaagcctttgcgcctgcctttcaaggatgtctacaaaatggggggtttgggaactgttcctgtgggccgattggagactggtgttctcaaacccggtatgggggtcacctttgctccagtcaacg

SEQ ID NO: 57081 - DNA, 372 bp, Homo sapiens
ccccccctcgtgcagtcttctagaattaattaacgcggggtagtacccatggcggccatgattttgtggcggcgggtttcggttactgcgggggcagcttttgtctggccggccccttgccactcccctgggattggggggctccctcactcgtggctttccaagaggctgctgctcctgttccacacaggggaaaccatggaaaaaaactttttgccatcaaaccttctaaattctatgacaggcgttttttgaagttattgaaattctactttgcatggactgggatcccagtaccaattttcataactcgggggaatgttttcatgggccaacctgacctaccaaaatttccaaagggctttgtcccaa

SEQ ID NO: 57082 - DNA, 503 bp, Homo sapiens
  misc_feature 487: n = A,T,C or G
taattaacgcgggattagagttaatttgagtcagtgtactttatagtgtgaatcctgtgagctaatacagtctatacttatttcttccctacctgtttcacatccgtaagatttaggatatacattttttgagaggtagtctgtctgatacaatgtaaatgacaaaacataattccttgttaggcccagaacaaactggagtctagcctggagttaaattgagacttctaaaatgattggaacaaagactaagttgtgccagatgtaaatcaacccctcttttagtttactttagactttgtattagctcatcttttttgtagtaaatctatagttttaaggtttctcaagatgtggctctacctactatgatgaaaattgaagtgggtcaaaagaattagatgtacagtgaagggaaaagaaaaaaaatgggcgaagagagggtggaaaataaaaggattcttttttcttcctttctgtttctcgnatccctgctccctttt

SEQ ID NO: 57083 - DNA, 477 bp, Homo sapiens
  misc_feature 22: n = A,T,C or G
ccccctcgggggtacttgctanaattaattaacgcggggggccaaggcggcgaccggagcgcgatggcgggggcggcgggactcacggcagaagtgagctggaaggtcttggagcgaagagctcggaccaagcgctcagcttaacctgcgacgcttatgattagagccaacaatttgaaatggcctgctcacctgatgcagtcgtctctccgtcttccgctttcttaaggtctggctcagtttatgaacctcttaaaagcattaatctgccaagacctgataatgaaactctctgggataagttggaccattattacagaattgtcaagtcaacattgctgctgtatcaaagtccaactaccggtctctgtcccactaaaacatgcggtggtgaccagatagccaagatccaggacagcctatactgcgctgctggagcctgggctttggctctgcatacaggcgaattggtgatga

SEQ ID NO: 57084 - DNA, 394 bp, Homo sapiens
  misc_feature 32: n = A,T,C or G
tgggtaccgcccccccccctcgtacatacttnatataattaattaacgcggggggttcctagtgacgcgttcggttgtgcggggaagttgcattaaacagtgcgcctacaaaaccctccctgcctgaggaggcctcggttggatgcaaaggacctgcaccttccaggggacaaaatcccaactggcaagcacctacctgactttggctataaaaccttctctacctccatgatgcttctcactgggtggggggggtccctttgcagggtccgagtctcccactatttccaggggcgcagggcccacccccaggccgaaaaaaaacaaaaaacctcaggattcatgtaaaacgggggggctttttttcctgaacagaaaggcccaaggcttgctg

SEQ ID NO: 57085 - DNA, 214 bp, Homo sapiens
actaatagcaattaattaacgcggggaggcaggactgttattagccccattttgcagatgaggaaatgggaaccttagggaggacgttgtggcttgcctgagattataaagctagtagaatacaagtccagattggaaaccaagtctgactcccaagcttctaaccatacatcatcactcaatatgttctttattttctaaaaaaaaaaaaaaa

SEQ ID NO: 57086 - DNA, 487 bp, Homo sapiens
tccaccgcggtggcggccgcttttttttttttttttttaggcccaggtttattccctcacatggggggttaacatacccagcacaaaggcccggcccccttggaaaagggcacccctcctcccttttgaggggattttgccctcacggtttaaaaagggaaaggatggttttttttttcccctcactagggcctagggaacccaggagcaaatcccccccccccttccttttttaacccaaggaaaaccccccttggggacttttatttccaccctttttattaagtggaaaagggattgccctggccccaccctttacggggggaaaatttaacccgtaaaggaaaatcccttttggttaaggccccgggagggaccaaataaccccttcaaaaccttttccgggaaaggggcatttcctgggcttttgggctgcttaacccctgccttgccagaaagggtaggaaaaatggatgggcctcatttt

SEQ ID NO: 57087 - DNA, 380 bp, Homo sapiens
  misc_feature 15: n = A,T,C or G
cgggcccccccctcnaaagtacttctagaattaattaacgcgggattttgtgagaagtgactttatcttcatttggggtagaaaaatatttctttatgtagtagagacaaattattctcattttgcaagtactttcaatttaagctacaaattgagaaaaccgttataaataagaataaaataggccaggcacagtggctcacacctgtaatcccagcactttgggaggccgaggtgggcggatcaccagaggtcaagagtttgagaccagcttggtgaaaccctgtctctactaaaaatacaaaagttagctggggctggtggtgggcatctgtagtcccagctaattggaagggtgaggcgggaggatcgcttgaacc

SEQ ID NO: 57088 - DNA, 361 bp, Homo sapiens
ctccaaaattatttattttttatgtgttcctcacttaaaaaacgtctactgcttattactggatatttgtattactaatacccttacctattttactttgggttttaaatttagttaaaacttacccgtaaaagtctgttcaaacccaaagggtctggcttggtttgtttaaaatacttttattttattaaaagggatgatttttcttgggggaatattttttttctttggggggctatgtgtttaaataactttcacttgaaatcagctgaaagctgtaatatgtctttgaattgagccttgataatttccaaacaagagaaatgaaaccttacgggatggcttgaatttatggggggtt

SEQ ID NO: 57089 - DNA, 481 bp, Homo sapiens
cgggccccccctcggagtacttctagaattaattaacgcgggtaggaactttagttaaatattttcaaccatatctatgcaaacactatattcctgtgcagattaatcttctgcagattaaatttataggtactctactagatagcttctggtagagaaaaaagctattgaagaccattttggtttttcattttctttttttgtttgtttgttttgagacaggctcttattctgtcaaccaggctggagtgcagtggcacaaacacagctcattgcagccttgacttcctaggctcaagttatcctcgcacctcagcctcctgagtagctaggactacaggcacgcctggctaattttttaactttttggtcccactatgttgcccgagctggtctcaaactcctgacctcaagcaagcttcctgccttggcctcccatagtgctgggattacaggtgtgagccaccatgcccagccctag

SEQ ID NO: 57090 - DNA, 529 bp, Homo sapiens
tccaccgcggtggcggccgctttttttttttttttggttttttcccaaaggcctttttttccggtttcataaatttaaattccggggccaaaggatgttttttaaattttaaacctttttttgttggcccgttttgaaaaacagccggaaaccatattttggtccgaaaaaagcccctttgggttttttttgggaggagatttccttttttccttccccggatcccccccccctttttttttccggcgggtatataaacaaaattttttctatagtaccgggaaatcctttttttataattcggatttggccccccatccccccccttttcctcttcccctctttcccaaaatttgggttttttttcctatttggaaaaaaatccatccaaatttttacccagtcttgtagggggggtttttgctcgagggacctgtaaatccttttttccacggacaattttggcacttgggggacacagggtttttaaaaactccgttgtatccttccaccagggggggcttttttt

SEQ ID NO: 57091 - DNA, 550 bp, Homo sapiens
gcggtggcggccgcttttttttttttttatcccttttttttttttttttttttttttttttttttttttttttttttttttttttttttttttttttttttttttttttttttttttttttttttttttttttttttttttacccccccacaaaaaaaaaaaaaaaaaaaaaaaaaaaaaaaaacaaaaaaaaaaaaaaaaaaaaaaaaaaaaaaaaaaaaaaaaaaaaaaaaaccccccccccccttaaaaaaaaaaaaaaaaaaaaaaaaaaagggggggggaaaaaaaaaaaaaaaaaaaaacccccccccccccccggaaaaaaaaccccccccccccccccccgaaaaaaaaaaacccccccccgccccgcccaccccccccccacccgccccgccaaaaaaaccaaaaaaaaccaacctctatcccaccccccaaaaaaaaaaaaaaaaaaaaaccccccacaccaggcgggggaggcccccccccccccaaaacaaaaaaaaaaagctttcccccccccccccctcctccccccccccccccc

SEQ ID NO: 57092 - DNA, 361 bp, Homo sapiens
tccaccgcggtggcggccgcttttttttttttttgggaagccgaaaatcaaagtccttttttattaaatgagtttttttccccattttgaccttcattttatttccaatggtaaaaaaattttttataccagggatggactgattttcattttcccaaatcaaagtcacctgtccttttacccaaaattgtttttgcttaaaccccaagagggaacaccttaaaaatgagtgtttctgtaccccctttatttttgctgatcaacagtttgttaaaaaaccacctgcaggtttgttccctaaggtctgaaacagtaaaaaagtcaaaggggtcataaattcacctgtaaacaaccttatccc

SEQ ID NO: 57093 - DNA, 182 bp, Homo sapiens
cgggccccccctcggaagtcttctagaattaattaacgcggggactgattaaaatgtcaatgtaatctatctgacctatcaactattcgatggaagtagccgatgcctaccatggtgaaccacggatgacggagaaatcaaggttcgattccggagagggagcctgagaaacggctaccaca

SEQ ID NO: 57094 - DNA, 224 bp, Homo sapiens
cgggccccccctcgaaagtcttctagaattaattaacgcgggagagcaaactattttcaggttatgcttacaataaaatatacttaagaaaatgactgaagatgtatgtttttgaatgttttgattaaataaatgtacacatttagaacacaaaaaaaaaaaaaaaaaaaaaaaaaaaaaaaaaaaaaaaaaaaaaaaaaaaaaaaaattaaaaaaaaaaaaaa

SEQ ID NO: 57095 - DNA, 386 bp, Homo sapiens
tccaccgcggtggcggccgctttttttttttttttttctttttttttttttttttttttttttttttttttttttttttttttttttttttttttttttttttaaaaaaaaccccccccccccctttttttttttttaaaaaaaaaaaaaacaaagagggggggggggggggggccccaccccggaaaaaaaaagggggtttttttgggggggttttttttaaaaaaaaaagggccccccccccccaaaggggggggggggggccccaaaaaaaaaaaaccggggcgccttttttccacaaaaaaaaaaaaaccccccccccccccccccccggggggggggggaaaggcccccccccccccggggggtttttttttttttttccc

SEQ ID NO: 57096 - DNA, 524 bp, Homo sapiens
  misc_feature 8, 459, 479: n = A,T,C or G
acttctanaattaattaacgcgggggccaaagtcctgaagatctaggcttgaaggagggggcatcttttttctccattgtagtagtgtgtcttgctaaataacagaagggactcctgaaaagaaaatgacgtgagccactgagcccagcctacttttcagtttttaacataatttttgttttatccacaacttttcaagtattgaaagtagaataaaaacatgggttcttagtctttagctatctgttaaagcctatgaatgccttcttaaaatcatgtttttaaatgcataaaatatataggattacaaaggaatctaattatatcgaaatacagttattaaaatgttaaaagataagttatatattaatatgcatgcttctttataaatgcattaaataagagttaatagctatcctaaatttgaaatagtgataagcataatgaaaatagatgcanaaaactaatgtgatatgaanatatctgggtttttcttttgatgatgaagtattgctaatattacc

SEQ ID NO: 57097 - DNA, 630 bp, Homo sapiens
cgggccccccctcggaagtcttctagaattaattaacgcgggcaagataatcctaaaaatgtgtgtgcattaaataacaatgcctcaaaatatataaatcaaaaattaacactgaaagagaagtcgaaaacccacaattatatatagatgtttcaatgctcctctctcagtaactgatataacaagttgatagaaaaatgtagatgacatgaataacactgtcaacaacgttggcttaattgacagttacagaacgcttcatctgcgtagctgaatacacattcttcttaagtgcacatgcaacatttacctcaaatgtgttacacaaaaataagtctcagtaattttagaggaattgaacattaaaaagttacctgaccgcagtgaagttaaattagaaatcaataacagctatctgagaatatcctaaatagttaggaattaaatcacatttctaaataatgcatggattaataaagacacaaaggaaattagaaaatattttgagtaaaaatgaaaactgtattaaatttgtagggtacttagagatttatagcttgaagagtttaaattagaaaaaaagtctacattaagaaactaggaaaaggagccaaaataacccaaagtaag

SEQ ID NO: 57098 - DNA, 457 bp, Homo sapiens
tccaccgcggtggcggccgcttttttttttttttggggcccgggggccaacctggggagaatttttaaaaaattccctttttggagggggcctcctttaaaggcccctttttaaaaaaaacccttcctcccaagttcccctttccctatttttaaaaacttccctttaagggagtccccaccccaattttggggaaaaatttaaaaaaaatttttttcgaaatttttttaccggggctttttttaaaaaagaaatgcctaaaccctttcccaaaaaatggaaaaatttccccccccccgggagcccagattaaatttcccttcccccgggactaaaaccgggattttttttttaaaaaaaaaaacttttttccctttttaaaacccttttaacccattccggaacccctttaaaaacccccggggcccccttttcctccccccccctttttaaaggg

SEQ ID NO: 57099 - DNA, 440 bp, Homo sapiens
cttctagcattaattaacgcgggcctatgaatctttacatgttcatttaaaaatttcagcccaatatattaggaaccccatttaaaacgccattgtagtaaatgacaagttagtagatttctgtgtgttctttttttaatagaagaactaatctatgtaatgcattcctgaatctaaaatacccttagttaagactataaaacagtcatggcttagggcatgaacaaaaactgctggtttatctagtcctgaatctttttctaccttcaaatcttatgtctcaaacctaaggctaggctaggccaggtgcggtggctcatgcttgttaatcccagcactttgggaagctgaggcgggaggatcacgtgaagccaggagttcgagatcacctggggcaacatagtgagattccatccctataagataaaaaaaaaaaaaaa

SEQ ID NO: 57100 - DNA, 291 bp, Homo sapiens
agaattaattaaccgcgggggttgctaacaattgtttgaacactgttgataattctctcatgaacactctgctatacagcattagatttatatatttatgtatatctgttgtgtatataattgagagtagaattgctgagataaaagtgcatacataattatgatttacttcttgactttaaattttttttgaagtgtatttttttaatttccaatattaaggatattttagtaatagtatttttaacctccgctatttccactatgggctggatcatatagttcttcatg

SEQ ID NO: 57101 - DNA, 567 bp, Homo sapiens
gcttttttttttttttttttttttttttttttttttttttttttttttttttttttttttttttttttttttttttttttttttttttttttttttttttttttaaaaaaaaaaaaaaaaaaaccccccccccccccaaaaaaaaaaaaaaaattcccccccccggggggggggggccccggaaaaaaaggggggaaaaaaaccccccccaaaaaaaaaggaggaggggaggatctctcccaaaaaaaaaaaaccccaaaaaaaaaaaaaaaaaaatttttttttttccccccccccggggggaaaaaaaaaaaaaaaaacctttttttttttttaacccaaaaaaacaggggggggggggggaccccccccccccccacccgccgcttcacaataaaaaaaacaaccccggaaaaaaaaaagaaccccccccaaaaaaaacaacccccccccccccgaactagaggaaaaaaaaaaccaaaaaaaaaaaaaaacaacacaccaccccacaaaaaaaaaaaaaaaaccggcccccccgccccccccaccaaaaaaaaaaaaaaaaaa

SEQ ID NO: 57102 - DNA, 467 bp, Homo sapiens
tccaccgcggtggcggccgcttttttttttttttggtttttttttttttcccggagggggggattttttaaccttttcccctgggaaacccccatttttaaattgccccccaaggtccaaaaaaaacctttcccattaaaaaggggcccctttttttttaaaaaaaacaacccccgggggtttaaaaaatggggtttcaaaaaaaaatttttcccggaaaaaattccccccccccttaaaaaaaggctttagggcccccccaccctgggcataaaactttgggcttacccattataaaacccccccctttttaaaaaaaaccaaaccccccttgggggcccttattttttcccttttaaggaaaaggggggttgttttaaaaacccctttttaaaaaaaaaacccctggcccttttccaaaatttttaaaaaccttttattcccccccccccgacctttatttttaa

SEQ ID NO: 57103 - DNA, 449 bp, Homo sapiens
attaattaacgcgggcaacatgtatggcttaatatgtatatacattgtgagttactgtcataatcaagcaaattaatataacaaggatgtaatttagtgacatcaatgaatcaaaaggagtggagacaaagctggaaatagagcatttgaacaacacaataatccaactagctctaacatacatatacagaacactctacccaccaacagaatacatattattctttagtggagatgagacattctccagtatacatcagatgttatgtcacaaattaagtctcaaacatttaaaaatagagatattatacaaagcttcttctccaaccacaatgatacaaagttagaaatcaataatcaaaggaaaacaagataatcacaaatttgagcaaattgaagaacaccatcttaaacaaccaatggatttttaaaaagtcagaaggaaaagc

SEQ ID NO: 57104 - DNA, 574 bp, Homo sapiens
gggccccccctcggaagtcttctagaattaattaacgcgggtactgaggctggtgaccagcacgaagacagaccacacaaacaccactgaaggaacgcttgactatttatgaagaaggaacatgttggattcacacatgcaacctgaaagtgaagaatgttagcagatttatttctgaattattttatatacatgaagttttcactagttttttaagactattttcaacttagcatgcctacgttcatacatttccaaaagacttgcaatggttcgtgccttcattccatcttttaaaaatttgtatgctgtactacatttgtctactctccttccaaatagttatatccaaaactgtttttccctctcccctaccttgtcccccctattaaaatagaaacagggattgattaatgtcccgctcctgaatacatgtaaaatttgtacaaaaatatcttctatgaaaatgatttgtaatctgtagacttattacctgagagatgtcttgatgtaaaatcccatcctttgagttgtgggttttttgttttctccaaataaatctgatctttaaagc

SEQ ID NO: 57105 - DNA, 516 bp, Homo sapiens
cccgcggtggccggcccgcttttttttttttccctttttttttttttttttttttttttttttttttttttttttttttttttttttttttttttttttttaaaaaaaaggggggcctttttttctcaataaatccccccccccaaaaaaaaaacccccccccaaaaaaagtttccccccccccccccccccccaaaaagggggggcgggggggacccccccccccccccccccccccccccccctttttccccccccccaaaaaacaaaaaggggccccccccacccccccccccccttttttggaaaaaaaaaccccccccccccccccccccccctaaaaacccccccccccccccccaaaaaaagggcccccccccccccctggggaaaaaaaaccccccccccccccccgcccccccgacacaaaaaaaaaaagggcccccccccgaccgccccccccggtgcccccgctcccccccccctccggccccccccaaaaacaccccccccccc

SEQ ID NO: 57106 - DNA, 168 bp, Homo sapiens
ctggggtaccgggcccccccctcggagatacttctagaaataattaacgcgggggtaaagctttgtctaaagtcctcattttcttttaaaattgaataaaatttctgtatacagaaaaaaaaaaaaaaaaaaaaaaaaaaaaaaaaaaaaagaaaaaaaaaaaaaaaa

SEQ ID NO: 57107 - DNA, 495 bp, Homo sapiens
tccaccgcggtggcggccgctttttttttttttttcccaacctggtttttttttttgggctcccacctttaagggtaaaaattaatttttttttttaaaaaagagggttttaatcttaaaattcccctattttttttatttttttttccccctccccgacctttggtttcccagtttcccatttaaaactttttttttcccaaaagggttccacccacccccccccaataaattttcccttttccgccggggttaaaaaaaggcgtaaactgggcttaaaaggacccaattcccccggggtaagggattaaagggtctttaaaccccctggggttaaatcttttttaaaaaaacccccttcaaattttttaaacccccaacacctttaaaccaaaccttaaggcggttaaagcccccttcttttaaatcaaaaaccttggcccttctttgggtttaaatcgggggctcggaagccctttctctaaatttttttta

SEQ ID NO: 57108 - DNA, 600 bp, Homo sapiens
ccgggccccccctcggaagtcttctagaattaattaacgcgggatgatcacttgagcaagatgatcactggagtcaaagtgtagtgagctgtgttcacgctactgccctccagcctgggcaacagatcgaagccctgactcaaggaaacactttttttgaaattaatagttaaaagcattttgtaaaataaatctccaggctcggatagtttcagtggtgaattctaacaaatgtttaaagaattaacatggattctataaaatgtcttccagaaaacggaagaggaaaaaacacttcctccattaccttgataccaaaaccagacaaaaacattacaaaaaagagaaaattacaaatcagtatctcttatgagtgtagatccaaaaatctccaacaaaataccagcaaaggaaatccagcaatacataaaaagaatacaggttaagcattcctaattcaaaaatcccaaatccaaaatgctccaaaatccaaaactttttgagccctgacatgatgtcaaaagtagaagattccatacccaacttcatgtgacaggttgcagtcaaaatgcaggtgcacaatgcagtttattcagcatc

SEQ ID NO: 57109 - DNA, 609 bp, Homo sapiens
  misc_feature 592: n = A,T,C or G
cccccctcgagaagtcttctagaattaattaacgcgggctatagcattctgttgaagatgtaattacattttctcaatctgtgatgtcaggttgctttttgaagtataaaggtttaagaaatacataattacatatgatttttaagtgatcttctcggtcttcagttgattttttccatatataaatttaaggtagattcattttacatttggtatcatgttaaaatgctcccaaaactacctactgtataataggtattgcaatattgttgatcaccttcaggatattattatcctgaaatgtctcccagtggtccaagctgggacagtttgagcaacaaaataaatatgagaggattggattataacctaaaaaataaagtcaatatctataaatccatgttgatttaaataaatgattgactaaataaatacttggcagaaaagaagcaaatcttccttacagaaaaattccaaataatatatgtagaacacactttcaggaggtggaacttaatttacctcttcttgaatatggactggactgctgacttttaaagaacagagtatgaagagggaaaagcagtaactntacagtgaagaggcctg

SEQ ID NO: 57110 - DNA, 513 bp, Homo sapiens
gccccccctcggagtacttctagaattaattaacgcggggggaatgaggggactgaggagcgaaggccattctttttggaataatgataactaaaatgttctaaaattgattgtggtgatagacagaaaactctaatattctaaaagccactgaattgtacactttgagcaaactatatgggatataaattatgtctcaataaagctgttaaaaaaaggcaaaagagaattgcctaaaacaatcatcaaaaacggtattttaatggccggatgtggtggctcaagcctgtgatcccagcactttgggaggccgaggtgggtgggtcacccgaggtcaggagtttgaaaccagcctggccaacatggtgaaaccctgtctctactaaaaaatacaaaaattagctgggcgtggtggtgggtgcctgtaatcccagctacttcagaggctggggcaggacaattgcttgaacctgggagaggttgcagtgaaccaagatgaagccactgcactcc

SEQ ID NO: 57111 - DNA, 599 bp, Homo sapiens
ccgggccccccctcgaaagtcttctagaattaattaacgcgggggataaaccagaagaaatctagagctattcacatcataatcaaactggttgaaaaataaagacaaagaaaaaaatcttgaaagcagccagagagcaacattttgaatgacagtggattttctcaccgtaaagcattgaggctagaaggaaatgccacaatattcttaaagtgctaaaataaaagcattgtcaactgaaattctttatccggtgacaatgtatgtcagtaaatgaaagtgaaataaaagcatttttagatgaaggaaaatgaagagactatcttgctctctaaaagaactgctgaaggaagttcttcagatagaagagaactgagaacagaaggaaatttgggacattaagaatgaaggaagagcaacagaaatggtaaatatccgggtaaatataatagacatttttcttttgagatctttaacgtatatgtgatggtttaaaaaaaaaattataatattgctcagtagggtgtttaatgcatgaaaatgcaatatataagacaactatactataaaggggagagagggtaaaagcttttgtatgc

SEQ ID NO: 57112 - DNA, 202 bp, Homo sapiens
  misc_feature 38, 89: n = A,T,C or G
ctgggataccggagccccccctcggaggtacttctagnaattaattaacgcgggggagagaaagaaacaataccttttacggcatgtanataggaagaagacctggattttagttgctgctctgatgtcccaacttgggtaaggcaacataacataaatgtcagtttcttcagatttgtgatgaatctgattatccatgctc

SEQ ID NO: 57113 - DNA, 511 bp, Homo sapiens
  misc_feature 27, 47, 64: n = A,T,C or G
cgggccccccctcggaagtcttctagnattaattaacgcgagggggngtgggagagtacagggnaaaacagatttgcattgtgttaaacataataaataagtaaatgacacagtgtgttagaaaatacttagtgctctggaaaaaaagaaaagttgagtaagaaggggaagacaaggctgggagaaggtagaagagacagtttgcaatattaaatggttgttcaagccaggcctgcctcattgaaagggtgaaatcttccttcactggaaggaagtgagagaattagtcaagcagctatctgaggaaagaacattccaagtaaagaatatacagcccatacattgttggatgtgtgtacattgaaatttttgtgcagtaaaatgaatatttcatttacctatataatcattttacataaaataaaatatattttgaatgtgagtttgttccaaacaaatcattttcttgccttcaaaaccactgagcttaaagaactctttcaagtgtcat

SEQ ID NO: 57114 - DNA, 598 bp, Homo sapiens
ccccccccggagtctttagattaattaaatgtgcaaaaagtctagaatgaaaaaagaataaaagagctgatttgagatttacattgtgacccaaaagacagaatatgatgtttgagtccaatcggttaattgtctaataaaacattcttgaaggatgagtaaaacagattttacagtctccacaagataacattcacattgccatagatataacagatgtatctcattatctacagaaccaggaaaatatgactcattcataagagaaaatgttattaatggagactaaccctgagatgatccaaatgttggaattagaagacaaatatttaaaacagcaactgtaactgtgctctaggatataaaggaaagtatactgacaatcaatgaaagcatgggaaatatcagttaagaaatagaaactattaacaaaaacaggactaagtgcaaattataaaactcaagaatacagtatctaaactaaagacaaacaaaaagaaacactggacaagcttaacagcagagtaaagacaacaatagaaagaaacagagattcactgttcacagcaacctggatggaattggagaccattattct

SEQ ID NO: 57115 - DNA, 461 bp, Homo sapiens
ccgggaccccccctcggagatacttctatattaattaacgcggggcgcggggtcacacaaatttacctatataacaaaaaccgcacgtgtaatccagagaaactaaaataaaattaaaaataaaaaacatgacactgtcaatgaatcacttaaacatcctatccacaaacaaagactcatgtgtgagacacacatcgacagcaaaatgacacaaattaaaaaataaaaaacacaaagatatgccgggcaaatagaatcaaatagaaagccataacagaaatagtacagcaaatacacattgtcaaaattaaaaactaaaggggttgagattgatcttattttgtcaaaaggaatgctgtgacaaaaagatataatggccataattgtgtgtgtgtgtgtatgtgagcgagtgtgtgtacatgtgtaataacacagcaatgtaccctatgtgaaaggattaa

SEQ ID NO: 57116 - DNA, 275 bp, Homo sapiens
ccgggccccccctcgaaagtcttctagaattaattaacgcggcggcggcggcggcgactctggacgcgagccgggcccttcccgtggacagccccgctcccagatgtaaagaacgcgacttccacaaacctggattttttatgtacaaccctgaccgtgaccgtttgctatattcctttttctatgaaataatgtgaatgataataaaacagctttgacttgaaaaaaaaaaaaaaaaaaaaaaaaaaaaaaaaaaaaattaaaaaaaaaaaaaa

SEQ ID NO: 57117 - DNA, 607 bp, Homo sapiens
gggtccccccctcgaaatacttctagaattaattaacgcggggaggtaccagagtaaacagggggcctgctattcatccttggggttctggaatataccggtcttaccatgtacccctaaatttgtcttcaactctgttctaatggtaatccgatagcctgggaccaacctttatctctgtcctatgggtcttttatgcctgcatctttggcttggcctataccctttcctccattaccttttagtgattcttgctaggagcattctagcaacaaaacgattatctcttttctcagattcccatttcccatgttctttaagtagactagaagcctgtttttctgttaactgccacaaggggactggatttccctacctttgaatatgaggttgaaggacttgatgcatattgagaagggtgcggaattagagaaatggaggctacaggaaaagtgggaggaagcaagaagaatactcatgaaaatcttccatatgctcatgaaaacagcagcccttgaatttgagagatcaatgtttatttgcacatttgacattaaagactaacctctggaagacttggagcttgggtttagaacttgcaaatggc

SEQ ID NO: 57118 - DNA, 324 bp, Homo sapiens
cgggccccccctcgaaagtcttctagaattaattaacgcggggggtgagtttgggtcagtgtgggtgagtgtgtaggtgagtgtgacagagtaaatgagcaagggtgtgtgtgggtcttctgggtgtgagcgtagtgagtgtgaatgcatcaaggtgcctaaaaatacaaggacagatgccaaatataagcatttttaccttgaagctgccttgaattgagtttcgcaggaaaagtgtattaaaataattcttaaaaaaaaaaaaaaaaaaaaaaaaaaaaaaaaaaaaaaaaaaaaaggaaaaaaaaggaaaaaaaaaaaaaa

SEQ ID NO: 57119 - DNA, 614 bp, Homo sapiens
cgggccccccctcggaagtcttctagaattaattaacgcgggccactcccctatttaaccagtgtgtcccctctaagaatctttatcctcatggttcacatggtgtattagtctgttctcacactgctaataaagacatacccgagaccgggtaatttataaaagaagtttaattgactcacagttctacatgactagggaggcctcacaatcatggcagaaggtgaatgaagagcaaagtcaagtcttacacggcagcaggcaagagagtatgcccaggggaactcccctttataaaaccatcagatcttgtgagacttactcaccaccacaagaacagtatgggggaaaccacccccatggttcaagtatcttcacctggctccacccttgacacgtggggcttattacaactcgaggtgagatctgggtgggacacaccatatcacgtggccacaccatatcacatggctttggaacccttcagggtactgggtgcatggatatgtgtaatgttttattgcttctcttttgaggtgccacaaaatacccttctctgcttggagacgcaggctccaggaaaaggaaggagaccaacagatgagaagtgactt

SEQ ID NO: 57120 - DNA, 610 bp, Homo sapiens
cgggccccccctcggaagtcttctagaattaattaacgcggggagtgctcggatgatgtctgagtttccaacagttcttggcatccctgagcatgcaagctgctccccatctgcagggtctttccctccccttgaatcggaactggttttgtgacttgctttgaccaacagaatgcaatgaaataacattctgggatttgtggtgccaggtcttaaaggatggtcagcctctgcttcccctcttttggagctcaattgacaagctgtaaggagggctgggctagaccattaatggttagaggccacgtggagcgaggcccttggagggtgagaggccatcttggttgcttgggccgcagctgagctcccagatgaacatacagcagagggtgcggttatcccacggggacccctcggtcatccagctgaactcaggcaactcacagactcgggaaaaataataaaccactgtgtcaggccactaagttttgggatggtttgttatgcaacaggaagaggagaagagcatgcagagactctcagtggtatttggtagtcttttgtttcataagttggctggtgggtttccagagatacgttgattaataca

SEQ ID NO: 57121 - DNA, 561 bp, Homo sapiens
  misc_feature 25: n = A,T,C or G
ggccccccctcgaaatacttctagnattaattaacgcggggggaggggtgaaaggggactgggagttttcgtttagcaataaaacttgatgaggggagcaagactgatagagggaaagttttgagtgtaaatacatgaaatcttggatataagggacctcggaccagttgccattttgttgtaagaaattgttaagattgctcgggctgggccgagcgcggtggctcatgcctgtaatcccagcacttgggaggccgaagtgggcagatcatgaagtcaagagatcaagaccatcctggcaaacacggtgaatccccttctctactaaaaatacaaaaattagctgggcgtggtggcacgtgcctgtagccccagctactcgggaggctgaggcaggagaatcgcttgaacctgggaggcagaggttgcagtgagccgagattgtggagtgcactccagcctggtgacagagcgatactccatctcaaaaaaaaaaaaattgtttgggcttggcattgtggctcacgcctgtaatctcacactttgggaggcaaggcgggc

SEQ ID NO: 57122 - DNA, 254 bp, Homo sapiens
cgggccccccctcgagagtacttctagaattaattaacgcgggggatggaataggcctcccctgctttgctgctgttctttggccttgtcccctgcctcttttcttggaccacctacaaggacctagagggacacagtactgggggcaggagctgggaaaggcctgccatggttcactgatgtaagaaatagagactcactcggagaattccttgaaatacagcaactagcgcacctttggcaatgaggagctg

SEQ ID NO: 57123 - DNA, 524 bp, Homo sapiens
  misc_feature 441: n = A,T,C or G
ccgggccccccctcggaagtcttctagaattaattaacgcgggggatactaatagttaatactaattttttttaaatcaacaagatcttcatggctggtaggacatacaccttacaaggtacgtagacccggtgggagtgggtgggaggcaacagttatagtacagtcttggcacacctggaaatattagtgtgcacccaccatcaaagggacatgcatttcattcattcatcaattcattcattcaagaaacatttattaaggatctaccatgaaccaggcactattagaggtgcttacaccagtttgatcacactaacttcatgtaaatcaatactgaaaaatatcgtccaggcgcagtggctcacacctgtaatctcagtactttgggaggctgaagtgggcagatcacttgagcccaagagtttgagaccagcctgngcagcattatgaaaccctatctctacaaaaaatacaaaaagtagccaggtgtggtggcacatgactatggtcccagctactcg

SEQ ID NO: 57124 - DNA, 403 bp, Homo sapiens
ccgggccttccctcggaagtcttctagaattaattaacgcggggactgtccccaggggcatcgctcatcaggttgaacttgagggacttctgcagcccggcctcatcctcgtcctccactggcttcacgggctttggggacttgctcttcttgcctttgcttttgtttcccttggaggccttgccactgggcttgggggcatacaggtccttggtctccttctccagggtgatggcaacccttatggactcttccagattgggatacattcaggtgccatcaccctggagaaggagattgagcggcgccaccatgggctacaccgcctggtggtgaaggtcagtgaccgcggcaagccctcacgctatggcacagccttggtccatctttatgtcaatgagac

SEQ ID NO: 57125 - DNA, 595 bp, Homo sapiens
  misc_feature 45: n = A,T,C or G
cggggccccccctcggaagtcttctagaattaattaacgcggggngccccccatttttcttaatatccaagtagagaatggtgatttactctgcctataaatgtctaacagtatgcagaggagtcacagttgtttccttttgaatcttctaggaaactcaatttaagaataaggttataggagaaaatgacattacactccactgtgttgatcagatttatggagtgtttgatgagaaaaagaaaactctctttggacaactgaagaaataccctgagaagctcatcatccactgcaaagaccttcgagtgttccagttttgtctgaggtacacaaaggaagaggaagtcaaaaggattgtcagtggcataattcatcatacccaggctcctaaactgcttaaacgattatttctgttttcctatgcgactgctgcacaaaacaatacagtcactgatcccaagaaccataccgtaatgtttgacacacttaaggactggtgttgggaactggaacggaccaaaggcaacatgaagtacaaagcagtgagtgtcaacgaaggcataaagtctgtgagaggtaagctttccatgct

SEQ ID NO: 57126 - DNA, 610 bp, Homo sapiens
  misc_feature 28: n = A,T,C or G
cgggcccccccctcggggtacttctagnattaattaacgcgggcttatgggataccattaagatggccaatatacttctaatgggaattctaaaataaaaagagagaaaagagagcagcaaagttatttcaagaaacaaacagtggctgagaactctcaaaatttgagggagaaaatggcctaaaatttaatgaaactttaccaactagtagcaacacagggagacccatgacaagacacattttaatcagagattcaaatgttaaaacaccgagaatcttgaagtcagcaagaaaaaatgacttagcatgtacaatgttacccctataggatgaccagcagatgtctcagccaatagcatgcaggcaagaggttgtaggatgacatactcaaagtgctgaaaaaaatggcaaataccaaccaagaacactatgtctgccaaagctatcatttcaaatgaattaaaaaataaaaataaagaatattcaagatcaacgaaaactgtattaatttatgcacactaggcctgtattaaaaaatgctagtcattcacattaaaaaataaaataatgatgagagcaacatagaattatgtaaaatataaagtttt

SEQ ID NO: 57127 - DNA, 610 bp, Homo sapiens
cgggcccccccctcggggtacttctagaattaattaacgcggggagtggtctttctggagaggttataggtcactcctggggcctcttgggtcccccacgtgacagtgcctgggaatgtattattctgcagcatgacctgtgaccagcactgtctcagtttcactttcacatagatgtccctttcttggccagttatcccttccttttagcctagttcatccaatcctcactgggtggggtgaggaccactcctgtacactgaatatttatatttcactatttttatttatatttttgtaattttaaataaaagtgatcaataaaatgtgatttttctgatgacaaatctccctggtgcttgtatgggaaggagttggagtacataaaaaggagaaaataacaaaggtggactgcaccctagagtttcttatgggactgcatctctggacttaatggagctttgggaggtagaggttaggagagctgtagggcagggccaccacagcacttaatgtatacaaagtttccccaaaccacaatcccatggctgtgtaagtagtgtacaggcttagtgtcagctcccaattgcctccttaacctgatgccttt

SEQ ID NO: 57128 - DNA, 376 bp, Homo sapiens
  misc_feature 23, 36: n = A,T,C or G
tgggtaccgggcccccccctcgngggtacttctagnattaattaacgcggggaatctaaaaaaaaaaaaaaaaaaaaaaaaaaaaaaaaaaaaaaaaaaaaaaaaaaaaaaaaaaaaaaaaaaaaaaaaaaaaaaaaaaaacaaaaaacaaaacaaaaaaaaaaaaggctgcccccccccggggggacccccattcccccctttaggaggtttttttaccccccctcattgccctttttttaaaaacttgtggtctggaaaacccctgccttaccccaatttattcgctttgaaaaaattccccttttccccagttggctttttttcaaagggcccccccccattcccctttccaaacatttccccatccctaatt

SEQ ID NO: 57129 - DNA, 612 bp, Homo sapiens
  misc_feature 27, 562: n = A,T,C or G
cgggccccccctcggaagtcttctagnattaattaacgcgggtcctttgtttacctaggacaagaccaaacacagactttcccctttttgcctggatctgctgataagaccagacacagacccttcaacttcccattctctatcttatgaatgattagctgagattaaaactgtttgtccctctgaaacttgctagaaacagagataaacatttcctcttcagctaactgacctagacttcccctgactgcaaaacgacccaaacaataaatcatcccacctgtaacttgtctattcttccctataaaatctaagggaaaatcaacctacagaaacattctgatattcagatgtagggtgttcttctattacaagggcatgaataaaatcaatgttctctggttctcttctttgacaccatcctttccccctttgtattctactgttttttttcatcttcattagtaactactttagtcactaatgtaaactgatatcatggatctgttatttaaccaaaaagtgggtattttaataaggaagagtgtttaaaaccctacanattgtacagacttattcaattttttcttaggtttgttttctctattgctg

SEQ ID NO: 57130 - DNA, 560 bp, Homo sapiens
  misc_feature 37, 522: n = A,T,C or G
actgggtaccgggcccccccctcggggtacttctagnattaattaacgcgggggggtggggacagagtctcgctctgtcacccaggctgcagtgcagtggcgcaatcccggctcactgcaacctccacctcccaggttgaagcaattctcccgcctcagcctcccaaatagctgggactacaggcgcacaccgaccgctatactcggctaacttttttctgtatttcagtagagacggggtttcaccatgttgcccaggctcagtctctattttttaaaagaaaatatattttgaaattttgaaaaataataaaaaagaaatgcaaacagataaagatacggaaactagacagaaattgttaaattacagatgtgctccaagatataccacaactagataacacagcttccaaaaagacaaaaaacaaagataacagaaaggagaaataataaaagaaaaattcccagaaatagtctctagactgaaaaagcccacagagtaaccagcacagtgaacagaanacaaacaatgaaacacctcacaacaagggcatcctcat

SEQ ID NO: 57131 - DNA, 591 bp, Homo sapiens
  misc_feature 574: n = A,T,C or G
cgggccccccctcggaagtcttctagaattaattaacgcgggggggtggggcaaaatgctatggtctgaatttttgtgtccttccaaattcatgctggaacccactgtggtggtattaagaggtagggcttttaggtgactagtttgttaggactctgctctacgaagggggtcagtgcccttgtcagagaggcttgagggagtcttccacctttctccaccacatgaggatgcagcaagaaggtaccatctacgaggaacaggccctcgacagacaccaaatctgctggcgcctttatctttttttttttctgagaaggagtttcactcttgttgctgtattaaatacccaccaatgcaggagtggctttggaactgggtaatgggcagaggctggaagaggaaaaggctagaaaaagactgtattgctatgtacagaccgtaaaggggagctctggtgagagttctgctttggtttggatgtagtttgtctccactaaaacttatgttaaaaatttgggccaggcgcagtggctcacgcctgtaatcccagcactttgggagggccgagtangcagattgcctgagctc

SEQ ID NO: 57132 - DNA, 452 bp, Homo sapiens
  misc_feature 28: n = A,T,C or G
ccgggccccccctcggaagtcttctagnattaattaacgcgggctgatgtcttccccatgattagactggagttatgcattgggggaagaagaccacagaggtgaaacgtcatgctcatcacatcaaatcttggctgggcgcagtggctcatgcctgtaatcccagcactttgggaggccaagcctggcagatcacctgaggtcaggagtttgagaccagcctggccaacatggtgaaaccctgtctctaccgaaaatacaaaaattagccgggtgtcatgacacgcacctgtagtcccagctacttgggaggctgaggcaggaggatcgcttaaaccccagaggcagaggttgcattgagctgagaacgtgccactacactccagcctcggtacagagcgagactccatctcaaaaaaaaaaaaaaaaaaataacctgattaccactgggc

SEQ ID NO: 57133 - DNA, 577 bp, Homo sapiens
cgggccccccctcggaagtcttctagaattaattaacgcgggcagtagggaagagctatacatgccctctaacaacaaccaagattttaatggtcgtcatttcactttatatgagatatttcttttcaatgggttcaatgtacacaaattttcagtgcatccaaattattaatataagagaagaggctacaattgactacctgttatattccctgagttgttttctgatcaccatggtatttattcttaaaaaaattacacatatccatacagagaaattaaataatttttataaattatctggttctttaaaaaaaaaatagaaatagtagacaaaagaaaaagtaagaatctaagggatttgaataccacattttataagccgatggatatgtataaggagaatttaaacctaagacacaggaaaaatacatctctctcaaatatatatggagccatctcaaaattgaccacattaggctaaaaagaaaatattaataaattatgatataataaattagaagcctaaaataaaagatagccaaatcccccacatcacccaaaaaaaaaaaaaaag

SEQ ID NO: 57134 - DNA, 207 bp, Homo sapiens
gccccccctcgtaagatacttctagaattaattaacgcgggggggagcagtgtgaagaagaggcgagaacgacccccggaccgaccaaagcccgcacgccactgcattccttgaacagctcttaattttcattttcattgttcgtcttcttttattctttttaattttttttttttttatttttctttttaaattattttttttttt

SEQ ID NO: 57135 - DNA, 552 bp, Homo sapiens
ccgggccccccctcggaagtcttctagaattaattaatatcaggattccaaagggttggggaaagaaaaattaagggggaaaagactttcagctccttagatctcctggaagttgatttagccagaaagaaagggacttgcaacaatgcccaacactgtgtctgcacctgttatcagaagcagcaataagcaagtagaacacagacctaggtatttggaagacagagcccttattgcccactctgattctgcaagatttaggcaagctgttctaggaatatgtgcacagtcatctgacactgaggcatgaggaatggctgctctatgctaagatccaaaatggactgaaattaaatgcaatttaccaagtctaaacttttattggaagttataagcctgtaatataattcaaaattccagacagactttcagtgcgattgttgtgtatgtggggagacagcttcctggtgcttcctactccatcatcttcccagagttctctcagaataacttacttttacagcagtttctgatctggaaaagtattataaa

SEQ ID NO: 57136 - DNA, 614 bp, Homo sapiens
cccccctcgagagtacttctagaattaattaacgcgggggtgctggcatctgcttctgatggggccctaaggaagctcccaattatggcagaaggcaaaggggaagcagatggcatcacatggcaatagcaggtgcgacagagaaagtgccattcactttcaaacagagtttgcttgaactcagagacagaactcactcataaccacacagagagtgataagctattcatgaaggatctgtcctcattgttacagtaggtagctagtcaggcataagcagggcagcagagggctcccccaacccctcaagaaatgtcacgcaaccatcaggtgatggtcaggtggttgttacactgtctcttcataaaatagtattaattggttgcagccagttacagagaagggtagtctcccaatagataaaaacacctgaaactgttgatcagcagtttcccgataagatctcaggagtttgggaagtgggtccagacatgtacattaagaagcaagatggggccatacacagtggttcatgcctgtaaacctaacattgtgggagaccaaggtaggtggactgcctgagcttaggagttccagaccagcctgggcaacat

SEQ ID NO: 57137 - DNA, 460 bp, Homo sapiens
ccgggccccccctcggaagtcttctagaattaattaacgccggtcacggagtcaagggcggcagccacctcctgatgtggaccaggccccgcccccacgccctgcagccaggtgaactgacagacaccaggggtagatctggggctgctgataaaaaggaatgagcccccaggcctgtggcagaatcagggaccaccccaggcagagcactccatccttctaagggggagagttgagccctgagccctggggctctctgagctgagagttgctaggggcttgccaacaaactccctttctgtcccaagtgggggctgcctagaatccctgggccgtgggagcagccacactccgtgaagctttgcacaaaggaagggaaaaggggaagtctgcagtggacttgaaaggccctgagtgattaggacctggaccaggagtgggagccaaaaaaaaaagcaat

SEQ ID NO: 57138 - DNA, 562 bp, Homo sapiens
taccgggcccccccctcggagtacttctagtattaattaacgcgggggcgatgggctgatttcaggcagtgggagccactgaacaagcttcaggacgctgaaaggggtggacaggactgggggcatctggggtccatgggtttttaaggctgcagtgtttgatggcacactcagcggggaggccttggggcctggggctatgagaccctttggtgaccgattttcaggggcagtgacataattagattatttgtggccaggccgggcgcggtgcctcacatccgtaatcccagcacttcaggaggatgaggcgggtggatcacttgaggtcaggagttccagaccagcctgcccaacatggtgaaaccctgtttctactaaaaatacaaaaaattagccaggcatggtggtgggtgcctgcagtacgagctactcaagaggctaaagcttgaacctggagaatcgcttgaacccgggtggcagatgttgcagtgagccgagatcgtgccactgcactccagccccggtgacagagtgaggctccgtctccaaaaaaaaaaaa

SEQ ID NO: 57139 - DNA, 607 bp, Homo sapiens
  misc_feature 27, 50: n = A,T,C or G
cgggccccccctcggggtacttctagnattaattaacgcgggcctagccncacagtgaaaccctgtctctactaaaaatacaaaaattagctgggcatgggggcaggcgcctataatcccagccactcaggaggctgaggcatgataattgcttgcacccaggaggcagaggttgcagtgagctgagatcacactgaagcaggagatgtaaagagaaaaacaagttttctcttgctgggctgactcactccaagacctagcaataggcagcagagctctggcagggctttgataacactatgcgcaaaaccagagccctcaaggaatgtgctccagagtcccctctcctcccattcccaggcgagggtgggaaagcaggtttttctcttttcccaacttccccctcccctttgataatccttccttagtgatactcaaggttacttcacagagttttacaattcctgtttctcttctgtgcaacatgacaaggtcacaagacgagcttgagtaagatatgtaccagatgcaaagcctgctttagtttgataagttcctgttttccttccaatgcagctgcgaggtcacgatctatgctaggatgatg

SEQ ID NO: 57140 - DNA, 635 bp, Homo sapiens
cgggccccccctcgaaagtcttctagaattaattaacgcgggagatgaagaaaaactaagaatttgttgccactacatttactctaaaagaataaaggagttctctaaacagaaaggaaacaaaagaaggaaacttgagatgtgaggaaaggggaaagaaggtgataaacagaagtattgataaatacaatagacttttcttctcctcttatgttttctaaattatatttggtagttgaaacaaaaattataacaccagcgtggttctaaatgtatgtaaaggaaatacttaagaaaattatggccgagtgcagtgactcacacctgtaatcccagtgttttgggaggccaagacaggaggatggcctgaggccaagagtttgagaccagcttggggaacgtagcgagactttgtctccataaaaaatttaaaaattagtcaggcttttggtgcatgcctgtagtcctagctactcaggaggctgacatgggaaaatcacttgagcccagatgtttgaggctgcagttagctatggtcacaccaccacaccccatcctgagtgaaagagcaagaccctgtcacacacacaaaaagaaaattataaacaggggatggtaagggaggtaggatttct

SEQ ID NO: 57141 - DNA, 569 bp, Homo sapiens
ccgggccccccctcggaagtcttctagaattaattaacgcgggtcattcgagaagggcagcacaagctgaggagtacaggccgcctccagggccaggaaacggattctcccgcagagcctggaaaggcactgaccctgctcccaccttgactcagtgggactgactttagaattctggccttcagaaatgtaaaggaatacctctatgctgttttaagccactaagtgtgtggtaatttattgcggcagcaacggggaactagtattgtagtgaagcctcaatacccacctgaaggggccaggcgcagtggctcacgcctgtaatcccagcactttgggaagccgaggtgggcagattacttcaagtcaggagttccagaccagcctggccaacaccgtgaaaccccatctcacctaaaaacacaaaattagtggggcgtggtggtgggcacctgtaatcccacctgctcagtaggccgaggcagagaattgcttgaacctggcagacggaggctgcggtgagctgagatcacaccactgcactccagcctcggcgacagagtgagact

SEQ ID NO: 57142 - DNA, 616 bp, Homo sapiens
acttctagcattaattaacgcgggattcttatacattgtgactttcttgaaatgtttatatgcagcatgacgaagttgccccttttgcacttccctgactccagcggacgtctagccctgcatcattgttcttgtttttatgtcccagttgaccttggcattttgttttatcactttcctggttgaagccaaaaaacaaagggtactactttcttctttctttccatatgtaccatactttaggggagagaggggccggtgtttggacactgttgatttaaaaaatcttattttcaggatcataattacggagcccctcctcctccgacacctcctgcttctccccctgtccagacgatcatccctcgttctgacctgaatggcctgccgtcgcctgtagaggaacgctgtggagacagcccgaactctgaaggagaaactgtacctacctggtgtccttgtggtctttctcaggatggcttccttctcaactgtgacaagtgcagatgattccttagtgctccttggctcgaattctctgcactaggggaatgagcagggggaaggttattagacttcatcggcggaagcaggacaacatatcaggtggggatag

SEQ ID NO: 57143 - DNA, 506 bp, Homo sapiens
cgggccccccctcggagtacttctagaattaattaaccgggggcacagtttataggattgggggaagggagaacgaacccagggagcatattgctgtaaacgcttcaatgtgtgtagctttaggatgtgtttgcaaagttttgtttttttaatgttgtgttattttgctccagattttcatctataaacaaaggagcatttgttttgattttactctttttggtataaaaaattttgctagcttagtaaaacgaattggaaaacttgactatgatctggaacagataatgcaagaaggaacacataagtaagttgctttggtgccaagaaaataaaaaagctattatcaggtctcctaactaccccagtttgtaaggaaaaataaaagtttttataaaattaaaaaaaataattgcctatatccttattatgttaacctattttatttttctatatttcgtacatatataagtattattcatgggtccaagcaatgagtgtaatgt

SEQ ID NO: 57144 - DNA, 327 bp, Homo sapiens
  misc_feature 13: n = A,T,C or G
ccgggcccccccntcggggtacttctagaattaattaacgcggggctgaccttgtgatccggcccgcgctcgacgcgcccaaattgttgggattacaggtgtgagccactgagcctggcctataaattactaatattaaataaactatatgttgaccaacaccatgatatattctatggatgtcattattttgaattaagaattagtgtttaacatatcctaagtctgtgatgagtgcttgcacttatcatatgtaaaaaaaagtatatttttaatattgatttacattttaaacgaagcttatttttcataaaaaaaaaaaaaagg

SEQ ID NO: 57145 - DNA, 550 bp, Homo sapiens
  misc_feature 29: n = A,T,C or G
ccgggcccccccctcggggtacttctagnaattaattaacgcgggactagacattgtagaaaaatagataagtgaacctgagggcatagaaatagaaacaatgcaaataaaagggataaaaaaatttaaaaataacaaaacatcagtgaactgcaggataattggaaccagtcactataacattgttttcccaaaaaatgagtagagaatggaaagaagagatatttaagatataatagccaacatttctcaaatttgataactacaaactcacattttcaagtagctcaccaataccccagaatcctccattcaaaaaaaaatggataaaatgacactatgtcatatcatgatcatgctttcaacaaaccatgaaaacagaaaatttaaaaatcaaaaagagaaaatgacacattatatatttagaaagcagatttctcatcagaaataacgcaagttttaacacaatggagcaacatcttaaaacactgaaacaaaagtacctaacccagaaaaatatttttcaaacataaagttaaaacatattttt

SEQ ID NO: 57146 - DNA, 539 bp, Homo sapiens
  misc_feature 22: n = A,T,C or G
cccccctcggaagtcttctagnaattaattaacgcgggtatctgcattttaccaataatttttaaggctgtttttatatctcaaagattaaagtcatgtgaactgaaaggtaccacaacttttgtcttccttttaaaatatatttgatccaagtgcttatctcccattaggccaaattaattagagctctttttacagacatcatacacataacacatatatacatacacagacgggaaaacccagtccctatgtggaggccgttaagagacagggctaggaaaacatgcagatattaaatgagaaaggactcattccctaaggcagaattgctaaacaaagccttgccacggggtcacaggccacaccactgagaggtaaaacaagacggatgcctgcaatgaagtctgctacaaaccatacagatatgcaaagcacataagattggctacagcttaagaccagccctgtaaatgctttttcacaattaaaaatttacagagaatataaacagtgatccttatcattcctagcctagt

SEQ ID NO: 57147 - DNA, 613 bp, Homo sapiens
  misc_feature 83: n = A,T,C or G
ccgggccccccctcggaagtcttctagaattaattaacgcgggggggagaatcgcattccttgaggaaagagcagcatgtggngaaaacataaatgcacgcaataacctggctcacatgttaagagaactttctgactataatgagggatgtgttgctgccccaagcttcattatctaaggagtttgttgaacactctctagaggcttttaataataggattgtttagctggtctgtctggactggttagatataacactatttaaatgacccaatctcattacattgtgaagatttccattttttaggttacgtaagaaattttggacctaaaaatcttgcattttaagacagtctttgtcagaattactttttggctctaaatgaattctgtaacatttgtattctaaattgacctttagtaaaagcaggaatggccatattcaaactggtaacctcgcaaatcctgcccaccctttcactttctgtctcaatacattgatgtcctctaacccatttcctgtcttatgtggctttagtgccacttatcaaaattgtgtgcaaatttccttggctaacagtaacagtttttgtctgggcttgtctagcagtg

SEQ ID NO: 57148 - DNA, 262 bp, Homo sapiens
  misc_feature 38, 54, 145: n = A,T,C or G
ctgggataccgggtccccccctcggaggtacttctagnattaattaacgcgggnggaaaaaaaaaaaaaaaaaaaaaaaaaaaaaaaaaaaaaaaaaaaaaaaaaaaaaaaaaaaaaaaaaaaaaaaaaaaaaaaaaaatttaanaaaaaaattaataaaaaaaaaaaaaagggggccccccccgggggggaaccccaatttcccctttttggggttttttttcccccccctcattgcccgttttttaaaaactttttaatt

SEQ ID NO: 57149 - DNA, 561 bp, Homo sapiens
  misc_feature 28: n = A,T,C or G
cgggcccccccctcggagtacttctagnattaattaacgcgggcaaagtttttcaatatccccaacataaactatccattaaatagtaattcctaatagttccctattcctactccttggtaacctaaattctttctctccctttgaatttgcctgttttattttagataatataagtagtatcatataatatttatctgtttatatctggcttattaacataaagtggagccaattttagcacatttttgtcacttcaaaatgaaaccttcttgcttgataatttaccatgttaaaaaaaaaaaaaaggccaccgcgcccagctgtggtgtataatttatttttttttctttttttggagggagtcagtaccctttttgtttttgtaaagtatgcatgattttatttaatttttttttttggagacggagtctcgctctgtcgcccaggctggagtgcagtggcgtgatctcggctcactgcaacctccgcctcccgggttcaggcgattctcctgcctcagcctcctgagtagctgggactacaggcgcatgccaccat

SEQ ID NO: 57150 - DNA, 552 bp, Homo sapiens
ccgggccccccctcggaagtcttctagaattaattaacgcggggttctagtaggtctcacagggagacaatgcaggaaggggctgagaattgcaagtgagaggttattggtaggacggacaatgcaggagctggatggactgcacagactgagcgatcgccaccgagagatatttggggtaccctgccccagtagcagtagacacatcaagcacctagaaagtggtctctaatacatgaaaaccatgaattcatagtgatggtttcaaagccaaaaccaaccaaccaaacacatgtaattggtcactcttggaggtacctagggcactaactcctaacactgggaatggacacttgaaggaagatcagtgattatcctgtcttttctctacaaattgcaattcatggaaaccttgttgattagggaaagttctttacataagaattcctgcaagtaagtgagtaaagaatgacagtttaagaattgtcccagcctggccaacatagtgaaaccccatctctaaaatacaaaaaatagccaggcatgatgatg

SEQ ID NO: 57151 - DNA, 340 bp, Homo sapiens
gccccccctcggggtacttctagaatttaattaacgcgggcacgatgcaaaagggaacatagcgtcaagcacgcagcactggcggctcaaatacgctttagcctaaccacactcccacggggaagacagcactgattaacctttaccaataaactaaggtttagactaagctatactaaccccagggttggtgcaatttcgtgccagcctccgaggtcacacgattaacccaagtgaatagaagccggcgtaaagagtgttttagatcaccccctacccaataaagctaaaactcacctgagttgtaaaaaactccagttgacacaaaaaaataaaaaaa

SEQ ID NO: 57152 - DNA, 591 bp, Homo sapiens
cgggccccccctcggagtacttctagaattaattaacgcgggggggggcagagctatgggggcagactacctggttcataccccagcatttccacttattaactgtgtgacctttggcaagttgcttatcctctctgtgcaccagttttctcagttataaaatgggaatatgaactgtatcaatcacacagatgtaaagctgttgtaaaggggacaaactaaggtaagtactcattaaatattagctattattatctgataaaaaaatttgtacatgtgtgtatgtgtatctttgggaaaagaagaagacatcttgtttactatttttttggagagaggctgggacatggataatcacataatttgctattattactttaatctgacttgaagaaccgtttaaaaataaaatttagcatgtcatatattccttatagtaggcttatttcaccttttttctgtccagagagagtatcagtgagaaagattttaagggtgaaaacatgaattggtgggacttagtaaagagctgaaaaactactacaatgtgggctacggtgatgataaaatgatagagatggaaactagagt

SEQ ID NO: 57153 - DNA, 595 bp, Homo sapiens
ccgggccccccctcggaagtcttctagaattaattaacgcgggggatgcagttagatttcaacaaatgttttattcgcatttgcagaaaggaaggtccttcttgtgcaatcaatttattgactagaaaaaatgaaaaataaaacagtttgacaacataccacataacatgtcagacttgctaagatgaaagtttgagatctttttatttgatttttagttaataaaaatttagtttatataaatgagaagtttactctggtctcaatattcatctaatagagatgagaggaaaattaagaaatagtgaaatgaactataagcataaatgcaagaaatgaagcaagtaacctatgtaatattaacaactatcaactgaatgcttacgagacatcaagttttaagctgcatatttttatatacctctcatttattcttcacaccaccaccaaggcaagtattattatccccagtctaaggttaggaaaattaatattcacagaagttaggtaacttgccaaggattccaaagccagtggtgctctttcctctaaaccaggcatttctcaaagtgtgttccaccgaccaaaagacctg

SEQ ID NO: 57154 - DNA, 460 bp, Homo sapiens
  misc_feature 16, 18: n = A,T,C or G
ccgggccccccctcgngnagtcttctagaattaattaacgcgggtatatatgtcttatgttacataatttaagttataatttatatacagacagttttcaacttaagagtcttttgactttatgatgattttattgcgatgtaatgtcattgtaagtagaggaacatctgtacttacaatgaaaatgaaattgaatatattttaatgatccattttatataattgcaatgtatgcattatataatacatatatgcatgtatatttactttattattcagtttaatcaaaagtatatgtaatctctttatatttattgactcctgattgtctttttcaactgcttataattaaatgaaatgtctgtgtaagccacatagaaaagtgcttggcaaagagtaggcattcattaaatgtcaactattatcattagtgtagggtttaaatgatgcatagggatac

SEQ ID NO: 57155 - DNA, 294 bp, Homo sapiens
ctgggtaccggggccccccctcggaagtcttctagaattaattaacgcgggtagaaaaatgagacctactcttcattcagcgagtatgaattaacacacgtacatggcattcttatccctccctaatggatattatctattctatactacagtactcgagacatagagattgccatccaatactaggatctacaaaaattaggccaagtgtgtgtatctgtccatcactagcaaaaagagttcacaatatgcacactagcatacagaatatagctcatcctcccttgagtttag

SEQ ID NO: 57156 - DNA, 269 bp, Homo sapiens
  misc_feature 12, 44: n = A,T,C or G
ccccccctcggnagtcttctagaattaattaacgcggggttttncatgatggagaaagtaatgttgtcccactggtctcagcctctttttgagccttccttggtgagacccaagatagacgtttgaatttgccttctgtggaattcagctttctcagctgtagttggcttttcttggaaattgttgcatttctctctctctctctctgtgtgtgtgtgtgtgtgtgtgtgtgtgtgtgtgtgtgagtatgcttatgacttaaaatctag

SEQ ID NO: 57157 - DNA, 587 bp, Homo sapiens
cccccctcggaagtcttctagaattaattaacgcgggggtataggggccacagagaatggaagattattagaattacttttaattctctttccttcggaccctcaaggtcctcacatttatcactcaaaatatatgtaaacatcaaattagcatgtttccaagagcactttatctaagctctgttttaagtgaaataattttaaaaatcacttctatatgatactgtaactaaatgccactccaagttaaacacagttctacctaacatctgagtaactaaatgccactccaagttaaacacagttctacctaacatctgaggtagaaatactgacattaatagtaagaaagcattacagtgaaacaattttaaacaaaaggactcctcaacctgtggggaagagttgtatgagttgtgtgatatagcttgggataattaaagataatactaggtaaatttgctcagcaagacctaaatcatcagtgaaaagctttaaataaaaactataaaagtttgatgacaatccatatctcaataggactcaaaaaataaactctcaataatataatttttaataataatagt

SEQ ID NO: 57158 - DNA, 151 bp, Homo sapiens
  misc_feature 23, 39: n = A,T,C or G
gactgggtaccgcggcccccccngaaggatacttctagnattaattaacgcggggccatgaatattttatagtgccttctgagggcaggcccaaggcaaaagaataacgtcattatgctgttgggcccagcggtatgttacaatctttgct

SEQ ID NO: 57159 - DNA, 407 bp, Homo sapiens
  misc_feature 19, 32: n = A,T,C or G
taccgggcccccccctcgngaatacttctagnattaattaacgcgggggcatcatacacatcagtaaaagccatgtgcatgtcatggacccaggcattgatggcgtgtgcctgcccatctagctactcgggagagccgaagccagaggaccacttgagcccaggagccaaagatacagctgagctatgattggaccgctgcactctcgctggtgacacacactgaaaccctgactgttaagacaaagaaaaaaaaggaagaggacagatgctccttggaacgacatgggagcttatgaagccccaatttgtcctctctctaaggaattcaatataaaaccagggagggggctgaactcgctagtcttacaaccatcttattttattctgctggagagggaaaatgtc

SEQ ID NO: 57160 - DNA, 288 bp, Homo sapiens
cgggccccccctcggaagtcttctagaattaattaacgcgggaggagaaggctaactgctgctgagtgtggccaggcaggtcttcagctactgacatcagggctgtgtccacccctcagagcagcactgagcttgaaagtgaagccctggccgagcgcggtcgctcacgcctgtaatcccagcactttgggaggccgaggagggcagatcacctgaggtgaggagttcaagactggcctgaccaacatggagaaaccccgtctctacttaaaaaaaaaaaaaaaaaaa

SEQ ID NO: 57161 - DNA, 433 bp, Homo sapiens
cgggcccccccctcgaaagtcttctagaattaattaacgcgggcctttcgtacctgccttgtggttttcccttaagtccacttctctaatgcccgcaaactaatattttttcccctctacgtgctgtcactaatcttggattaccactgacccctttctccattactgtatttcccattgttgctgggaaaaaaaaatctgttataaagttacctgtactgagcctctgtcgggggcatgctgctccaacagtttcccttgttagcagtcattctaaacttttccacaaccttccttcttccagggtcattttattcctctgtagagatgattttgctttctgctttcctaagataatctagtgtggcttcattccattattttcttctctcttccctttacaacattactatctcaggatttttttgagcta

SEQ ID NO: 57162 - DNA, 166 bp, Homo sapiens
ccgggccccccctcggaaatacttctaggattaattaacgcgggggacgcaatagatatagtaccgcaagggtaagtatgaaaaattataaccaagcataatatagcaaggactaacccctataccttctgcataatgaattaactagaaataactttgcaaggta

SEQ ID NO: 57163 - DNA, 627 bp, Homo sapiens
cgggccccccctcggaagtcttctagaattaattaacgcgggaggcttaggttgcagtgagctgagatcacgccattgcactccagcctgggcgacagagtgagatgctgtctcaaaaaacaacaacaacaacaaaaaacaaaagatgtaatttcagagaaaaattgtaattttgacatatactattccagaaaaaaagtgctgcaaaaaaagtcaaagaggctggcatggtggctcacgcctgtaattccagcactttgggaggccaaggcaagtggatcacctgaggtcagaagttcaagaccagcctggccaacatggtgaaatcccatttctactaaaatacaaaaattagctgggtgtgatggtgtgtgcctgtagtcccagctactcggggggctgaggcaggataatcactttaactttagaggtggaggttgtagtgagccaagatcgtgccactgcactccagcctgggcaacagagcaagactccgaagttcgtttttttttcttttttttgagatggagtgtcactcttgttgcctaggattacaggcattaagccaccgtgcccggccaagctaccacttttctatgtcacccgacctttcctaaagtacttgcc

SEQ ID NO: 57164 - DNA, 476 bp, Homo sapiens
  misc_feature 40: n = A,T,C or G
cccccctcgggggtacttctagaattaattaacgcggggngaaactacagtgcccacgatgcaccgcgccagccccggccgacggacgagactgacccggacttaggcgttccgcctggcccggcggcgaggaaaaaaggcagttttgaagcatttagtggcaaaaggggtaggagacggctgctgaagtgtctactacattcaggggacctggaaggcttccagatatccgcaatgaacaatgaaaagaaattgtgaaagaaggcgcttccctcaagccggaactaatgaactcctgggtcacgtggtgcgcacgcgccaaaggcacacgataaaggaaaacgcgggcttatcgtggcctttaaaatccggcttggtgagcttgggtcgcctctgaaggagaaccattttccatctctttcatagttttttcccccattcagcgtggtagcggtattctccgcggcagtgacagt

SEQ ID NO: 57165 - DNA, 144 bp, Homo sapiens
ctgggtaccggggccccccctcggaagtcttctagaattaattaacgcgggtctaaaaatgagacctactcttcattgaacaagttggaattaacacacgacttggcatttttttcctccctgatggagataatctatactata

SEQ ID NO: 57166 - DNA, 629 bp, Homo sapiens
ccgggccccccctcggaagtcttctagaattaattaacgcggggcccagtgcagtcacagtggtgatggccacaagggtgcctctgtcactccacccccagctttaggtggctcagaacagagagaaagagatagagagagagagactgactctgtatgcttggaagaaactaacagaagagaacaagggtctctgtctggtaatccagaaaattctcccagatctgatccaagaccatcaaggtggtatctctatgactctgcaagaaccacagcattaccgttcttgcagtactgttgccccctaaagcaaatatagcttagatcataacacccaagtcctttcaaatatctaaaaagctgacccaagaaggatggtacaaacaagcccgcacagtgaagactacaataatgacttctctttaacacccagacactgaagaaaatctactagcatcaatgccatttagaaaaacatgatctcaccaattaagctaaataaatcactaggaaccaatcctggagaaacagagatatgttcaaaatggctatgttgaggaaactcaaagtaattcaaaataacacggagaaggaatttagaattctctcagataaatttaacagagaga

SEQ ID NO: 57167 - DNA, 570 bp, Homo sapiens
  misc_feature 22: n = A,T,C or G
cccccctcggagtacttctagnaattaattaacgcggggggggtctatgtgtgtgtgtatgtgtggtctgtgtgtgtgtgtgcgtatctgtgtgtgtgtcatctccattgatatgaaaaacatgtaagttatgctaaaatcattattatctgtcccattccctttaataagtgacagataaactaattaactgaacaaatgggctccagtgagtgtgagcaactaaacatacattcacttcctatttgaaaaatgtgtaacattatgaagacaattacagtcttaagtcaaattggcagaaacttaagtatatctggcaagatgaccttgccattagtgaggtatttctgagcagaggaatgacactcccaaacacctaatataaaatgttatgagcaggcatttaattggaacacatgcaaaagcctgacttgattaagaaggaaaaataaaattatatttatcgttatacaatagtgttataagtgtgactttgatcttcaaagtaacttctctttacttctcattaaaagtcgctgtgttagggtttgcaccatcttctctccaact

SEQ ID NO: 57168 - DNA, 588 bp, Homo sapiens
  misc_feature 24, 37: n = A,T,C or G
tgggttaccgggcccccccctcgngaatacttctagnattaattaacgcgggttcctctttttaagagaataaaattggaaacattggttatattgtcaaggttttgactaaagtaaaatatttgagaatgaactttaaatgcttggcctcatagggttttcatccttacagtaaataaataataattgtcacttcctggcaggcctaggaaccttaagaatggaagtaaaatgtaaagcctaccttggtttggcttcctagcctcaataaggtttcaacttggagatttttatgtcatcaatacagaaagaaaacattatgattctaaaaaaaaaagctataataaacattagattatagtcatatgcattgctttcaagttcttgttatccacctgttaactagattagatcctgaatgtatagagaaaaattgtttctaaagaaaattataatacacttgttattagattgtggttctgtgcattacttttaagttcttattacgtatctatagacaggattagaacctgaattctcctccaatatttggctacaattaacaacaaaacctgattttttcctaaa

SEQ ID NO: 57169 - DNA, 603 bp, Homo sapiens
cccccctcggaagtcttctagaattaattaacgcgggggattcatttaaaagaggaacccaaaatgcatacaccaagtattcagtttgccttccttgtactaataaaatgtattcattcattcattcaattactcatccccacagagttgaaaataacctaatagatcatctcctctagtctcatattcaatatagccattatgttgtgactgactaacttacaaagataaggaacaaactgcttaaagttaaaatgcttagccagaattatacagtctcatttgaaaacatagaaaatgtcacctgcaaataaaagcctatctcaccaggttcttttgaggataaatgaagtaatacagaaactccacaagtttaaagcagtattacattgttaacaagtagaattaaaccaacttatgaatttcaactacataaaaagcactgggctgtggacactgtaggtatgtatataaagatgtaaaaagcactattctaactctcgaggagcatactttactaaggcaagacacatacattggcagaataagccaatacatggccgggcgcagttggctcatgcctgtatcccagcactttgagag

SEQ ID NO: 57170 - DNA, 254 bp, Homo sapiens
ccgggccccccctcggaagtcttctagaattaattaacgcgggggggcgggtatggcccgttacaccgtgtgtcctatcaactttcgatggtagggggcgagcctaccttggacaccacaggtgacggggaatcagggcccagaatccggcaaagcggacccttggataccgctaccacgatcctggattgcagcaagcgcgcaaattacccactacccgactccgggtgtgtgaagggaccaatcaataaaaa

SEQ ID NO: 57171 - DNA, 576 bp, Homo sapiens
aattaacgcgggcccacctgggaggtccccccccagctgattccctaccctccatcacaccatgaaggcaggtgtttaacttcggccctgggcccaccaaggtgctgagctcagtgttgttagagatagaacaataattattagaccacaaaggaataggctttagtgttcttgttatgaacaacaggtcatccgatttcactaaaattattaataccacagagaatctggtgtgggaattgttagccattccaaacaactactgtacaaggtcatttttgtgcaagaaggtaggtctggccagttcagtgctgtccccttaaacccaaagtgcctgaaagcaggaaggtgtgccaactatgtggtgacaggagcttggtcagctaaagctgcagaagcatccaagaagtttgagatcgtgaatatcagctaccctaaacttgggagttatatgaaaattccagattcaacacctggaacctcacccttacagcttcgatgtgtaatgctgcacaaatgactggcacagagtggagtctgactttatatctgatctcaggaagcactactggtttg

SEQ ID NO: 57172 - DNA, 538 bp, Homo sapiens
  misc_feature 16: n = A,T,C or G
cggggccccccctcgngggtacttctagaattaattaacgcgggtgtgtatgtctatttatatgtacacatataaatacacaaattaatatggtatatacccctacttcatagacctgagggtaaagaaacaaaattatgaaattattgaaataaaatattagagattttttcatgcctatgagacaggtaaaactttcctaagaagaaacaaatataattgcaaggggtccaaaatactcaaaacatatttaaaaaaatgaacaaagcttccagttgcgatgccaaatttcaaaacttactacaaagctacaataatcaaaacagtgtggtactaacataaggaaatgcctaccaccaatgaaacagaatagtgcacataaataactcatacatctaagacaactgatttttcaacaaggataccaaaacaatgaaatgtggaaaagacagtttcttcagcaaattattctgtaacaactagatagccacatgtcaaataatacagttgaactcctacaacacacaatttataaaaa

SEQ ID NO: 57173 - DNA, 620 bp, Homo sapiens
cccccctcggaagtcttctagaattaattaacgcgggagttgacagatttcttgatctttgtttcagtttcagggtacctgcagaatacagacattttgagttaagaaaaccacacgtctatcttcaaaattgagattaccctctatatttcatttttcataattgcacagaaaacacctattttcctgtattacagtcttagcttttctgttcctattagcttcatggcctaagtaacattcctatgattattttgcaacaaagtggggaggctaaaaagtaaagtgattacttgttaaacaaatatagtgcaacttatgcagacaaacaagtgttacctccttcagaacagacccctcagaatccaatatcttaattctaacaagcctgcgtcagaggctagggccttgactatgagaggagttaaaagtaacttggaaccaaacctgataaataaggggtgagcaacttacatggggaagggaactggcatttcttgagcttccataataggaattgtgtttatgggaatggccctgtaagaaggagactactgtctctgtgttatagctgggcagtttcagagaagtaaatggcctgcacaagttcacataactag

SEQ ID NO: 57174 - DNA, 142 bp, Homo sapiens
  misc_feature 25: n = A,T,C or G
ggccccccctcaaaatacttctagnaattaattaacgcggggagggggtggaaactcacgcgtagagcgggggcaaaaaaaagtaaggactctcgaatacatattccatgggactatccttccctctcctgcttcctattta

SEQ ID NO: 57175 - DNA, 375 bp, Homo sapiens
accgggaccccccctcgggatacttctaggattaattaacgcgggggtccagaaggcagactgctatgggttgaactgtggtccccaagaaatgtatgtgaagtccttaacacccagtatcttacacagtaaccttatttggaaaaaggatcattgcaaatgtaattaggatgaggtcacatgatggagtagggcaggaccctaatccaatatgactggtctcccaataagaagatagccatatggagacagagacaaaggaagaatggaatgtgaagatagcagcagagattagggtgatgaaaaaaaaaaaacaggggaacaatgactggtaaccactgacatgcatgactagaagctaggaagcatggaaca

SEQ ID NO: 57176 - DNA, 614 bp, Homo sapiens
cgggccccccctcggggtacttctagaattaattaacgcgggtgcaaacttcatagcctagaaatatcaaaaaattaagattaattaggtattcctgaatgcataaaatatatgtatgtactagtcttctttaataataatttattaccataagatatatacaaatctattctaaaaagctaaaatttatcaaaaacttatacacactaagagtgtacatggcaccattctcagtggagagaaatgtaaataaaagtaaagatgcagtattaaatcctaactgcataaaattaactatagtaaataccataccactgtcattgtaatttcatagttactacctgttgctattgcagtgagctcaagtgttgcaagttaacatgcgtaaaatgctgtgtgttgctcatcgtctccacatcagcagtttgtctctccagtaaattgtgtttaccctaaaaagtgatcatgaggttctcatatatttttcatcatgtttactgcaatactgtaaacttttgagtaacaacatgggactcataggaagtcctgttggtgatactagtaagtgttcctaagaaaagagaaagtcatacaaatgtaagatgaagttgaat

SEQ ID NO: 57177 - DNA, 586 bp, Homo sapiens
gggcccccccttcggaatacttctagaattaattaacgcgggtgggaggctgaggcaggagaatcatttgaacctgggaggtggcagttccagtgagccaagattgcgccactgtactccagcctcacagacagagtgagactcagtctaaaaacataaaaataaagatacaaaaattagctgggtatggtggcacatgcctataatcccagctatgtgggaggctaaggtgggagaatcgcttgaacctgggggcagagatcaggccaccacactccagcctgggtgacagagtaagaccctgtctcaaaacaaacaaacaaaaaaccacaatgatataagacttcacacctgtaaaccaaaaacaaaattctaagccttcccaaccatctgaatggacccctcctttcaaccaagggcattttaaagttaacctgaaaaactagttcaggtcagacatgcctcattacaccctcctcctttttggaatttaggaaaaactgatctgcattaacatcaacacagaccttaaatctgataagaaacatttacaatctattctctctgaagcctgctacttggaggc

SEQ ID NO: 57178 - DNA, 585 bp, Homo sapiens
  misc_feature 90, 560: n = A,T,C or G
ccccccctcggggtacttctagaattaattaacgcgggatacaaaatcaacacacaaaaatcagcagcatttctgtaaactaacaactantctgaaaaataaaccaagagaacaatcccatttacaatagctacaaaaaaaaaatacttagaaacatatttaaccatggaggtaaaagacctgtacactgaaaactataaaatgctgataaaagaaattgaagacacaaataaatgaaaatatatcttatgttcatggtttggaagatttatttttattttatttttttttttgagagagggtcttgctctgtgatccaggccggactgcagtggcgcaatctcggctcactgcactccagcctgggcaacaagagcaaaactccgtctcaaaaagaaaaaaagatttatattagaaggaggggccttctctaaaagtaatgaatccttttttttccctccccaagcaaaaaatccttctctaaaattaatcatctttctaagcctggtttaatgtttttttggaagactgcttatttcttttcctttcgaagttatgcnagctcattaaaaaaaaaaaaaaaaa

SEQ ID NO: 57179 - DNA, 469 bp, Homo sapiens
cccccctcgagagtcttctagaattaattaacgcgggtatgccaggattgcactctgaggagcaacatcacgagacttcccactgtgagggaaatacacttgattagaatagtccaaacaagccactaaacaagcacacaaacaacaacctgccccatgagtgttatggggtggaaggaatcagcatcgagagttgctacgttatctaaatcgtccagttttcaacaataataacaaaaaaaaaactatgaggcatataaggaaacagaagactgagaccaataaacagaaaaactcgcaacagtggccaggcgctgtggctcatgcctgtaatcctaacactctgggaggccgatgcaggtggatcacctgaggtcaggagttcaagaccagcctgaccaatatggtgaaaccccatctctactaaaaatacaaaaattagccgggtgtggcggtgtgcgcctgtagt

SEQ ID NO: 57180 - DNA, 503 bp, Homo sapiens
cgggccccccctcggaagtcttctagaattaattaacgcgggtaaccttcttgtacttggacattgatttctgttatccctttgaataagctttataccccatctctttctctacctcctctttaaggccaataactcttagatttgccttttgtggctattttctatattttgtacgtatgtttcatttttaataattctttcttttggtagggcatggtggctcatgcctgtaatcccagcactataggaggcccaggtgggtggatcacctgaggtcaggagttcgagaccagcctcgccaacatggcaaaaccccatccctactaaaaatacaaaaattaggcatggtggcacacacttgtagtcctagctactcagaaggctgaagcaggagaatcacttgaaccccggaggtgaaggttgcagtgagccgagattacgccactgcactctagcctgggtgacggagcgagactctcgtctctcaaaaaaaaaaaaaa

SEQ ID NO: 57181 - DNA, 585 bp, Homo sapiens
  misc_feature 63: n = A,T,C or G
ccccccctcggggtacttctagaattaattaacgcgggtgttaagctgaggatacaaccaggnaaatgcaacggtgtcagattgtgttcaaaatgtctagaaaggcttgataacattcctgttacttttctagcagattttaacaaataatcaaggacattttatatgtaactctttagattataatttatttgtattcctgtctttgtcctttttcttgcactataaaattataaggtcataaatgttttggtacttgtagatgtttatgtgctttttgtatcctaacttttagaatctaaataaaatcagaggtaatgtattttggcagcttgtttaggtgagaatcttaatgatcataaaaggaaataaatctagatgcagaaagtactggctaaaatattgctaatacaaatgtgatttcctgaggtctctgtgtgagtgtgtatgtgttttaagtgacttccttaagaggtgtttcctgaacctaattctcataattaaagtaatgtatatgcaggatcaaaatgaaacaaatataccttatcctaaagagctcataacaaataagttacctccactcta

SEQ ID NO: 57182 - DNA, 335 bp, Homo sapiens
cgggccccccctcgaaagtcttctagaattaattaacgcggggggcccacaatgtcaatggtacgctcataataatactaagatgctatttgcctttttactctcattctgttacaggtgtacagtagagttttccagaggctacatgacatgcagtatcacaacggaagcaaatataagaacccacctgtctcctgttaaaatgcaaaatgtaaaacaattaccactttgctaactgtttttgtttggggaaatatagttcataaaaatatttatgttaacatgtaatttaggttaaaataaattaataaatatttgtaaaaaaaaaaaaaaaa

SEQ ID NO: 57183 - DNA, 466 bp, Homo sapiens
  misc_feature 28: n = A,T,C or G
cgggcccccccctcggaagtcttctagnattaattaacgtggggggggtgagtgattaaagcaggaatggaagtgagacttttaatatacctttttatacaatttggatttttgaactacatacgttttgcatattgaaagattacactaaatttaaaaggtagttcttaaatgtgaaagttttagagactgatggttccagataagattgattacagatacttcttcctgttcctccctttaagtacagctaaaaccactagacattatatacaaaacacataagaagactttgaacagtgagagaaggacacagacaagctagggacattggaacccaagaaatgacacctctttctcagttttatttttgcctaatgtatcagcctgaaacaccaattggtacagacaaaaaaaaaaaaaaaaaaaaaaaagtcccaagtaaagcctgcttcctctagacaaa

SEQ ID NO: 57184 - DNA, 608 bp, Homo sapiens
ccgggccccccctcgaaagtcttctagaattaattaacgccggggaaaaaaaaagcaactaataaaatggtgtgtttaaatacaacaatctcaataacttcagtaagtgcaaatggtctaatcaccctaactaaagggcaaagtttgtcaaattaaattttaaagaacaagacccaattatatgctttctaaaagaaaccaatttaaagataggttaaaagtaagcacagggaaaaaaatatcccatgcaaacaccagtcaaaataaaactggagtagctatattaatatcaaacaaaacagatttcagaacaaggaataaagggaaatatccaatagaagtggtcaagtcaacaaagacacaacactaactgtatacatatataacaacaaagtttcaaaatgcataaaacaaaaactaataaaactgtaagaagtagaagtaggaaaatccaaacttatagttggaaactttaacactggacaaaacaagtaatcataacagatacagggcctgaaagaagaaatcaagagggaaatcagaacatattttgagttgaatgaaagtaaaaacccatacagcgtgtatcccagaggtaaaaaaaaaaa

SEQ ID NO: 57185 - DNA, 579 bp, Homo sapiens
  misc_feature 169, 170, 180: n = A,T,C or G
aacgcggggtgcctgtgggagactctgccctccctgcagctattgccacctagctggtgctataactgtttcttcaaaaggccatcccatcatcctattaggccagcttctttagcatgataaggaacatagaccagtgaattccaggagcaatgtctcatactgatannttttagctgngacgtgagttccttgatcagaagcaatgttgtatggaatatcatgacaatgggtaaagcattccatgagaccatggatgacaattttggcagaattttgtatgaggaaggcaaatctgtatcgagggtctgttctagtaagaacaaaatgctaccccttccatgatggaagtagttcaatgtaatcaactacaaagctgactgagcacccagaggaatagtgccatacttggagtcagtgttgttgtctgctgctgactggttgggcactcagcagtggcatccaggttggccttggatagtggaaatccatattgctgagcctatgtatgacctccattcttgccactgtggccactttgttcatgagccatgaacaaagaggataccagttagccta

SEQ ID NO: 57186 - DNA, 214 bp, Homo sapiens
  misc_feature 24: n = A,T,C or G
gccccccctcggagtacttctagnaattaattaacgcgggctgggattataggcacgagccactgcacccagcccagagcatacttaaaactgttgaactatcctaacatatgatgaacgaagggactactgctagagcactatgcaaatacttttcttgtgtgtgtgtgtgtgtgtgtgtgtgtgtgttttagatggtgtcacccaggctgga

SEQ ID NO: 57187 - DNA, 423 bp, Homo sapiens
acttctaggattaattaacgcgggaggtgtgcaacgccacacccagctaattttttgtatttttggtagagacagggtttcaccacgttggccaggctggtctcaaattcctgacctcaagtgatctgcttgcctcagcctcccaaagtgctggaattacagacgagccaccgtgccagccctctgctcctaccttgtttggattttgtgagattccatcttgagcctggagaacggtacatgtatgtgcttcctgcactgagtaaaagagaaccattcaaaggaggggaaattgaagaggaaaactagtagacagtattggggttacaaacgtgagccaccccgtccctggccgtgtgttctaaacattggaattaggtgccaacatttataaatcaaaggcatatgcaggaggatcacttg

SEQ ID NO: 57188 - DNA, 616 bp, Homo sapiens
  misc_feature 550: n = A,T,C or G
ccgggccccccctcggaagtcttctagaattaattaacgcggggatctcggctcatgcaacctccgcctcccaggctcaagcgattctcctgcctcagcctcccaagtagctgggattataggcatggaccactaccacctagctagtttttgtattttttgtagagacggggtttcaccatgttggccaggctggtcataaactcttgacctcaaatgatccacccgccttggactgccaaagtgctgggattacgggcaacactgcgcccagcctgtcttgacattttttaagccaaacctctttctaaaatcagcaaaccatcatttgttgtcattaaatactccagctttagatccttcaccttctttttgctttaagttgccatataatgactttgctttttctcaaatcatattagagtcaataggtatgcctttttatagtacccatgtaaaagctacatattatgcacataaaaaggcatttggcaaaaagtgcaaggtttttgcacctgttggcatagctacagtgacaacttcatgaatnttcttttttttttctttttctgtttttttttttttttacgcaattggtccttacgctggatttatc

SEQ ID NO: 57189 - DNA, 583 bp, Homo sapiens
  misc_feature 10: n = A,T,C or G
cccccctcgnaaatacttctagaattaattaacgcgggggaggcagaggttgcagtgagccgagatggtgccattgcactccagcccaagcaacaagagcaaaactcctatctcaaaaaaaaaaaagaaaaaaaaagaatgtaaactacaagatggttcaaaagaaattacacggaattcagcatgggagaaacaaaaaacaagagtgggaaaagacatcaaacatgtttttactaatcgaagttctaaaaggagagacgagaatacagcacagataatatatgaagagaatggctggaaatctttcagaactgttgaaggatatctatccacagattcaaaaacccaataaaatctcaagcagtattaaaaaaaaaagaagaaatctacttctagtcacataagagtaaaactgcccctaaaaaagacagagagaaatctcaaaagcagccagagaaagaagacacattgcctcacaatagacttctcaacagcattggtgtaatactatctcatgtactaaaagaaataactgccaaccttttatattttccaagatctcttctggaaaacaaaaacttta

SEQ ID NO: 57190 - DNA, 422 bp, Homo sapiens
  misc_feature 41: n = A,T,C or G
attaattaattataacaacatattttgaagtatatgataangaaatatacattatactaataatagtataaaccactggcatgacctaaagtgctgaaggaaaaaaatgatctaagaacagtgtatctggtgaaaatattcctcaaacatgaaggagaaataaacgctttctcagatcaaataaaagctaagggattttattaataccagacctgtgtaacaagaaatgctaaagggagtccttcaatctgaaagaaaaggacattaatgagcaataagaaatcatctaaaggtaaaaaactcattggtacagtgtactgtaaatgtggcatataaactacccatatcttaattagaaaaactaaaagatgaaattataaaaaataatagttacaataacttttcaagatatagacagtgca

SEQ ID NO: 57191 - DNA, 221 bp, Homo sapiens
tgggtaccgggccccccctcggagtacttctataataattaacgcggggggggggaggggcctatttttaaataaataactgttcaaagttgggggttttttaaaaacattaataaaaaggaaagctattctgtattgcaccttttcacaatttaatacattctcttacattttcctgtgatctttcgaaactaaaccatccctgtgtcctgtacctgtcc

SEQ ID NO: 57192 - DNA, 606 bp, Homo sapiens
  misc_feature 28: n = A,T,C or G
cgggcccccccctcggaagtcttctagnaattaattaacgcgggtcctgagggtgtgtgatggacacgtgtcctcaaccttggcaaaacaaactttctaaattaactgagacctatctcagatattcggggttcacacttcctattccattccaatactggtggactagctgtagatcaatgtttctggtgaaataaccaaaaatgccaggtaacacagttaagcaagcaaacaaaaagcacttctaaaggcttcaaatggctgtgaagacagtaaagaattactaggcaaaaactaaagagaaaaacaggggttccccaaaagacaaatgagcacagagccccttttgccctgagggcatctgttgatcccagaaaacacaaacttttgtgctgatggcctcacaggggaggagagtgaccccccaccacagtatgccctcttcatagtaagctccaggggtccacagacatctctctgcagaagcaatccatggcgcctcaaaggaagaattcctaccaccacccataaataaaggctgacatgttttattttaattttttaaaaagtgttagagacagggtcttgtgttgctcaggctggtct

SEQ ID NO: 57193 - DNA, 352 bp, Homo sapiens
attaattaacgacgggcctttaccttaggtttctatgtactcatgttccctactatgggactacaataacaattaacttcctatctctctaccctcgtgctagtgaactaactgcatactttaatgtacttgtctcttgtgaatgtgtggaaattacaaggactttatttgtcagactttagtgatattctttgactccacctatcacaaaagatactgccctttgtcttctatctcctttgactactgatttttgatagtcgtttcatttctacatgaactgatcatgtaataaatcatacgcatactgcttcattcttgaccttctctttgagtcttacttattacattt

SEQ ID NO: 57194 - DNA, 150 bp, Homo sapiens
aaaaaaaaaaaaaaaaaaaaaaaacgagcccccccccctggatcttcttttttaattaacgcggggggagtcacggctcgcgactggcctaactcgccggacaactgccacgtggggatgaaatatacttggctggttgcgggggctgct

SEQ ID NO: 57195 - DNA, 123 bp, Homo sapiens
acctgggattgtacgtcttcttgacaactaatatatttaaaggtataaagaactttcgaagtaattgaagatattctagtctcactgcctcatcaaaacattcattgccgtggtgaccaaata

SEQ ID NO: 57196 - DNA, 601 bp, Homo sapiens
  misc_feature 28, 575: n = A,T,C or G
cgggcccccccctcgaggtacttctagnattaattaacgcgggccttgtgtgaagtccacctctgacaactgtgcaggacttgatgacacatcctttgatatcatccttacccctggcttcaccttactgtcttatttgtattttcggtttgcaccaatggcctccttaatgtttgagggagctgtgctacatagaactctaaaagctgctagcaataatttttcaagcaaggcaaagcataatgaaaaaaattaatatgcttttcaaattctattatctctaattcccacctcactatgctcttcacttgaaaacgtggaaagtaaaaagataatttatcttcctcctgcggcatgttggcaagcattcacccagcccctcttcactactcccaaataaggacttgctgatatttttagcaaaacaatttatgggtccatttttcaaaaatcaagctagttcactcctgtgcgtgctcatgcgcgcacacacacactcacactcacatactgcttgagtgatcagaaaacccagccacacaatttattcatttatttttaaaagtagaggcggngtcttactacattgcccaagctggtc

SEQ ID NO: 57197 - DNA, 611 bp, Homo sapiens
  misc_feature 593: n = A,T,C or G
cccccctcggaagtcttctagaattaattaacgcgggcactcaacaacataagaatacacattattttcaagtgcccataaagcatataccaagatagaacacatactggattataaaacaagcctcaacagatttaaaagtattgaaatcatagagagtgtgttctgtgacccagtggaatcaaactagaaactagtcatagacagataacaggaaacactcaaaatatctggaaactaaacgacccaaaatatcctgtggtcaaaaaaaaaatagtctccacagaaattgaaaaaataatacattgaactgaataaaactaaaaacataatttgtcaaaattgctgcaatacaaccatggcagtctgaggggaaaatttatcacactacatttataaattaaaaacagaggaaaatgctgaaaacatctgagtatccaactcaagtgcctaggaaataagagtataataaacccaaaccaacagatggaagaaataatgaatataaaatcataaattaatgagattgaaagccaaaaaaaaatagaaaagataaataaaacaaaaagctagttacttgaaaagatcaatanaattaacaatcttctagc

SEQ ID NO: 57198 - DNA, 625 bp, Homo sapiens
  misc_feature 32: n = A,T,C or G
gtaccggggccctccctcggaagtcttctagnaattaattaacgcgggatacatatatcacagagttgttatgaggaataaataatctataatctataaatacacttgcatagtatttgacatattttacacattcagtaatgctataaataaaaccaaaatactttatcaaagtactttgcaactgtttttttttttttaacttccttttttgagaagacagaagacacacaggtgggttggtctgtcatggagaagctcattctatgctgtggctacaccgttggtcgcctgaagctggtccctaaatttgctgggaggggtgtgaagcgtggaaattctcatgctccatcagaactagggagttgggcaaggaacttcctcatggcagcccccacaatatggggagccttgtgcaggacatggaaactgataactgcgtgtcaggcctagatacagctgtgcccaacataaatttttgagggtatttgtttttctttcagtacttatgacatagatgttgccttcagttcatgttgatcaaattgtatctctgaaatacatctgcataacacacaacaatagaaaacattttaggaaaaaaaaaaaaaaagcggccgccacc

SEQ ID NO: 57199 - DNA, 497 bp, Homo sapiens
gggccccccctcggaagtcttctagaattaattaacgcgggatatcttttctcaatttttcacctatatcaaatattgttttaatatatagcatattaatagaaaagctaaggtatagtaaggtaaacagatcggaagacaattgccattgaaaagatactcagaatttccaagagaagggagcatgtcacgccaggggagactacagggaagaactcaggtccatcaggaaacagagagagggaggaattcacgagcaagaccctagactgtggtgtttgcaggaagaaaccaagcagggtaaacaagcttaggaccggctcgtttgaataatttcagtgggctctggggcataagagctgtccctggttctctggtttttggccctagcgtgattaggacagaagcacagtggcctggagtgtgacagccctatagagtatttgtttgggaattggttagtttgtatttgtaaagcccatcttcatgcggagttc

SEQ ID NO: 57200 - DNA, 626 bp, Homo sapiens
  misc_feature 31, 36: n = A,T,C or G
accgggcccccccctcggaggatacttctgnattanattaacgcgggggtgtctaagctcatataatggagtagcctccatccatctgtatccaatcactgtcccacataagcccactgtccaacactgtgagatgacagcttttgacatgaagtattagagtgggcgacataggatccaaaccatatcactgtattaggtcatttttgcatagctataagagaaataactgagactgggtaatttatatagaaaagaagtttaatgtttctcaccggtatgcagcttctgcttttggggaggcctcaggaagcttccaatcatggtggaaggaaaagcacgatcaggcacttcacatggcaaaaacagggatacgaggggcggaggggcgacacatttttaaacaaccagagcacatgataagtcactatctcacggacagcaccaagaagatggtgctaaactgctcatgagagttcacccctgtgactcaaactcctcccacaaggctctacctccaacattgaggactacaattcaacatggcatttgggcgaggacaaatatactaactatatcacaaacctactttgcttgtgaaaaaatatgagctcagaaaaataaag

SEQ ID NO: 57201 - DNA, 395 bp, Homo sapiens
  misc_feature 27: n = A,T,C or G
cgggccccccctcggaagtcttctagnattaattaacgcgggcagtgaatcagacatttcactcaactaatattttttgagcacctactaagtagtataggatcataggcccacagggcttagaacagtctaggccagcgctaccaatagaacattggctgtggtggaatgttctgtatctcagttgtctaatgtgtcagtcattagctacatgtagttattggacccttaaaatgtgatgtgaaagaaaatatattaactcttggaggccaggatcgtggcggctcacacctgtaatctcacactttgggaggctgaggtaggtggatcacctgggcagttctaggccagcctgggcaacatggtgaaaccctgtctctaccaaaaaaaaaaaa

SEQ ID NO: 57202 - DNA, 538 bp, Homo sapiens
  misc_feature 25: n = A,T,C or G
ggccccccctcggggatcttctagnattaattaacgcgggggaggcggcggcccagccacgatgatacatttcatattgctcttcagtcgacaagggaaattacggctacagaaatggtacatcactctccctgataaagagaggaagaagatcacccgggaaattgttcagattattctctcccgtggtcacaggacaagcagttttgttgactggaaggagctaaaacttgtttataaaaggtatgctagtttatatttttgctgtgcaatagaaaatcaggacaatgagctcttgacgctagagattgtgcatcgttacgtggagctgctggacaaatattttggaaatgtctgtgagctggatattatctttaattttgaaaaggcttatttcatcctggacgagtttataataggtggggaaattcaggaaacatccaagaaaattgctgtcaaagccattgaagactctgatatgttacaggagacaatggaagaatacatgaaccagcctacatttttactggaaatctac

SEQ ID NO: 57203 - DNA, 402 bp, Homo sapiens
gggccccccctcggaagtcttctagaattaattaacgcggggacagtgtgagaacagactaatacactcatcacaagtttttgtgtgaatataatttttaatttctttagaataaatccctaacagtagtattctggtcataaagtcagtgtatattaactttttaaagaaacttgcaaacagtttttcagagagtggccctgtcatttttttattcccaggagggaattgtagctatgcatgtcaggagagaatctgacactaatgatgatattccacatgcagagattcagagattaaggtgactcttccagtgaagacagatgaaagccatttggcattgtacctttgttgatctaaactaacaaaggacatagggctgtgtgtgtgtgtgggtgttct

SEQ ID NO: 57204 - DNA, 373 bp, Homo sapiens
  misc_feature 12: n = A,T,C or G
ccccccctcggnagtcttctagaattaattaacgcgggctgcctccctcctgcttccctcctgcttccacagctcccctggtgacacggccaggttctaggggctggccagcccttgtctttaaccctctcaggacacagattccggaacaaacaaagcacttctcacctgtaacttgagcatctcaaaacccaagggctggctggacatggtggttcacacctgtgaccccaacactttgggaggccaagggaggaggatcgtttgaaagctggaggtcaaggctgcagtaagtcaagatggcgccactgcactccaacctgggtatattagtccgttttcatgctgcatattaagacatactgaatactgg

SEQ ID NO: 57205 - DNA, 516 bp, Homo sapiens
ccgggccccccctcggaagtcttctagaattaattaacgcgggtcccactcagaggtgacagacctctgaagagataaactgagacacgtaagagggtggaaacgactcagtggtgacacacagtggagtcctgcccacaagcagcacatatcagtccaccacacaaaaccttaggcacaggtcagttttcttttgtttattttattttttattttttgagtcaatatctcactctgtcacccagcctggagtgcagtggtatgaccttggcccactgcaacctctgccttctgggttcaggtgatactcctcagcctcccaagtagctgagattacaggcattgccaccattccccgttaattttggtatttttagtagagacggggttttgccatgttgacaaggctggtctggaactcctgatctcaagtgatctgcccgtctcagcctcccaaagtgctgggattgaaggcatgagccactgggcctggccaagttccaaaaaaaaaaaaaa

SEQ ID NO: 57206 - DNA, 620 bp, Homo sapiens
cgggccccccctcggaagtcttctagaattaattaatcattgttgacaaattattgggtggcactttaaacaaattgtttgctgtttgaaaatatttccaatgagaagaaaacaaaaaataatcccctgacactgtattgtaaaaaaagtctgtgcctattttccttttatcttccctaggcgcagagatcttatcagaatgtttttgggtcaaggtttccctttggaaactttacagggtgttgtgtcctcagccaccttttggttttctcctggtcctgggtttcagtactgtctggggataaatcaagatatcaactgtggctgtgtatgctagaatctctagtaaatttcagctcctggcctggaatggaactctgggtatctgggaatgggagacagaggacaatctgaggttggagtgtagcctctcaagggagcaggtggatgccctggggctgagaggaatctcctggtatacccttcctttggaaagctaaccctttgaggcattaagattgtgttcactcaacccgacttccatttctcagaggtacattgctggtcagccaatcagatgctggtattgagaggaaaactcagaaataatttctgccccc

SEQ ID NO: 57207 - DNA, 482 bp, Homo sapiens
ccgggccccccctcggaagtcttctagaattaattaacgcgggggggggggggctgctatttgggatgaagactcttcctataatcctgagcctgagaggagagagtagggaaacggctggactttcttggagtcactgtgcttcccaccaactttgatgtggagacccccaagcctttccaaggtaatatatctctgggaaatagggctcccttttacaaatgctggctttatccctctactaaagagctgtgatgggctgctttgggggcctgaagagttgggggagagagggcaaagtgagcttccagtgagacgaaattcattgttgatgtggtgctgcttggaagatgtgaggttttcttaagcaactccttattttgtagcccacccaaaacttttgtaacagaagagagctaaagttaaactgcacccaaagagtccattgttggtgtgttgaaatagttaaaaaaaaaaaaaaa

SEQ ID NO: 57208 - DNA, 512 bp, Homo sapiens
taattaagtccaatattttttggcattgcttttgaggtcttactcatgttttttgtgtagaccaatgtccaggactgttttctttatgttttctcctaatatttttatagttttgggtctttaatccactttgggttgatttttgggtatggtgagagataatattctagttttattgttatgcatgtgactatccaactttcccagcaccacttatttaagagggtgtcctttccccagtgtaaattcttattatccttgctggagatcattttagctttatttgttggttctctattctgttccatttgtctgtgtgtctgttttatactaatactattctgttttgaataatgtagcctggaaatgtattttgaagtcagacaatgtgatgcctccagttttttttttttcttagaattgctttggtttaagatagccataattaatattcaaagggctctaatggaaaaagaagaaaatatgcaagactgtctgagtaatgtaagtag

SEQ ID NO: 57209 - DNA, 329 bp, Homo sapiens
  misc_feature 24, 35: n = A,T,C or G
tgggtaccgggcccccccctcggnagtacttctanaattaattaacgcggggcagttttgagtttcagtgcagactggctggaactttgctagctgttgctgttagtggaatgctgcagatgtgagacctgccttgccaagtgcagggaagctaggtgggtcttactgctgctggctacacccccctcatttgcactcttctgtgcaacataggcagctgtgctcctccttggaacactaccccaccagccagcaaactgtccttcaatcccactagggctgctgcttgcatttgcctgtggagagccagtgcttggacttgcctgacc

SEQ ID NO: 57210 - DNA, 561 bp, Homo sapiens
  misc_feature 20, 31: n = A,T,C or G
taccgggcccccccctcggnagtcttctagnaattaattaacgcggggtgcaaatcaaaaaaaaaaaaaaaatagaaaaaaatcccgggtgtggtcgtgggcatgggcgcctgtagtcccagctactcaggaggctgagacagaagaatcacttgagcccaggaggcagaggttgcagtgagcagagattgcgccattgcactccagcctgggcgacaaagcgagactccatctcaaaaaaaacaaaaaaattagcatttacggaattctgaagttttgggctattaaatttctacatcatctaagtgccctcttggcaatctttcacatcctctcatggcatctgatccagaaggctcaaacctgatctgagtactagtgtgttcctcctactcacttctgttgctattaactaataggtgtagtaatgaaagccagtattagggacaaattttacatgactttcttctcaaacctggacctttattgaacctctgcctccctttttcattagtatgaaagtatgtatcttaaagggttgctctacgaattaaatggatc

SEQ ID NO: 57211 - DNA, 606 bp, Homo sapiens
  misc_feature 558, 579: n = A,T,C or G
cctcggaatacttctagaattaattaacgcgggatgtcacaggataaaagatcgacacattaaaattaatcctatttctttatagtaatagtgaacatgaggaaagcaaattaaaaacagtaccattcacaattactgcaaagaaaacaagctacttagtgctatggactgaattgtgtcctctccccaccaaatttatctgttgaggccttaacccccaatgtaaatatatttagagatgaggactttaggggataattaaggttaactgagtcataatgatgggtttctaatttgataggattagtggatttataggaataggaaggaatctctctctctttctctttctctcactctctttccctgcttttctctgagaaaggtcatctgagcacagaaagagagccctcaccagaacctgaccatgctgacaccatgatctctgatttccagtctctagaactgtgagaaaacaaatttatattgtttaagccacccaggctatgggattttgttatggcagcccaagtagacgaagaaacataggtatgaatntaacaaaacatgaacagtatntgtgtgctgaacactattacaatatag

SEQ ID NO: 57212 - DNA, 565 bp, Homo sapiens
  misc_feature 519: n = A,T,C or G
ccgggccccccctcggagtacttctagaattaattaacgcggggcccactctacagggcagggaaaatgaaaacaaaaaatggaaaacaaaaactaaaatggccaacttaaggcctaacattacctataattacatgtaagaaaacagtctaaaaactctaattaaaagaatgatattggtatagaagaaaaatcatatgctacatgcagtctacaagaaattcacttgaaatataatgacataggtagggtgaaaacaaaagaataaaaaatatgtcatgcaaacataaatcaaaaacaagtagaatgggtatagtgtcaaataaagtagacttcatggcaaagaaaaccaacagggacagagggacattacataatgataaaagggtcaatccaccagaaagacacagaaatcctaaaagtgtatgtaccaaataacagaactgaaaaatatgtgtaataaaaactgacagaactgaaaggagacatagacaattccacaattatagttggaaattnaacaccactctttacagttgacagaacaacttgacagaaaatcagc

SEQ ID NO: 57213 - DNA, 621 bp, Homo sapiens
  misc_feature 573: n = A,T,C or G
cgggccccccctcgaaagtcttctagaattaattaacgcggggggggaaaagctatgtggggactgaagaatggactcattcataactaatgaaagggacagcctggcccctagatgtctgtgaggcctgtcatatggtgataaatgcacttttgtcatatggtgatacatgtaggccccagaggtgatccgaatgtaggataacaacccattcagtttccagtcggatgtctactcctatggcatcgtattgtatgaactgatgacgggggagcttccttattctcacatcaacaaccgagatcaggtaagtctgtgctggtgcgaaaggacccaactcgtgggagcccctgggcctccgccagcctaagcagctagagggttaggacttgttattatctgttgttcattcaccccccattagctcagctgttttctttcccttagatcatcttcatggtgggccgaggatatgcctccccagatcttagtaagctatataagaactgccccaaagcaatgaagaggctggtagctgactgtgtgaagaaagtaaaggaagagaggcctctntttccccaggtaaagctcagggctgctagaatgtgattaaagcatggg

SEQ ID NO: 57214 - DNA, 604 bp, Homo sapiens
ccgggccccccctcgggagtcttctagaattaattaaccgggcggatcacgaggtcaggagatcgagaccatcctggctaacacggtgaaaccagtctctactaaaaatacaaaaaaaattagccgggcgtggtggcgggtgcctgtcctagttactctggaggctgaggcaggagaatggcgtgaactcgggaggcggagcttacagtgagctgagatcttgccactgcactccagcctgggtgacagagcgagactccgtctcaaaatcaatcaatcaatcaatcaatcaatcaatcaatcccaggctactaatgaaacaagcaggatctgtcctagagccctccgcaggctgcccccagccagagtccagagacctgttctcgccaaggcacgcaggcagaataacagtgggtgagcaaacagagtatggattcagattgtcctggttcttcacttttttttttcctagcggtgactcagaggtataatactttttgaacaaggtattacaagaattggaggcccttataaaagctgtttttttgtgagtacacagtgcatacattagctgtgtgacctttgatagtactcaacttggctg

SEQ ID NO: 57215 - DNA, 597 bp, Homo sapiens
  misc_feature 30, 58: n = A,T,C or G
ccgggcccccccctcgggggtacttctagnattaattaacgcgggactcacttcaaanataatcatataggaaagttaaaagtaaaaaggtagaacagaatctgtcatgcaaacatgaatgaaaagaaagctgaaatggctatattaatatcagcaaagtatactccagagatataaaaattactagaaataaagagagatattaggtaatgatcaaaagatccatcactaagtagatataatgatcctaagtgtatatgtatgagacaacacagcttcagaatacatgaaacaaaaactattagaactgaaagaagaaaaagacaaatccacaattacagttgaaattttaacactaatctctcgggaatatctcgggaatatacagtagacagcaaaacataaaggatataggtgaactaaagaacatcatcaatcacctggatctaaatttatagattattctacccaccaataacagaatgtatattgttacaagttcacatgaaacatttatcaagataaactgtatttttgctcataaaacaagtcttaccaaatacaaaataaattaaaatataaaatatgttctcagac

SEQ ID NO: 57216 - DNA, 576 bp, Homo sapiens
  misc_feature 13, 24: n = A,T,C or G
gccccccctcggnagtcttctagnaattaattaacgcgggccatcagagacattattttcctgtaattagtcatcaatataaaagccaggagtttccaattaccattttgcagttaagagaacaagggatctctggagaaatggacaattcctagtcggtgcaagaaattttaaaagctaatctggaacatcttgccatatgagataaaagaaattatcatactacttagggtgtgtcaaatgactcagggaatgaacctaagaggctatgacagatcaaagtgagatgagttagtcatcaacaagaataaatgcaatggattgaaaaatatcaagtgtatttaaatctgtgaattcataatcataataaagaaacagttaattgataaccatggaagatgattaagaactatttcattattttgaaaatttataaggggaagaatcaagcattcatccgtcctttcctaaagaaagcgtactgctaggtaatcaaataatagataaggggaaagtttctctttataaaagtattctagtgaataaatggtttgtggccgggtactgtggctcatg

SEQ ID NO: 57217 - DNA, 220 bp, Homo sapiens
  misc_feature 16, 29: n = A,T,C or G
cgggcccccccctcgnaggtacttctagnattaattaacgcgggtaggtcatggagagagatcgggggacagctttcttgggcaaggtgtgtctctgactcaaccattggcggtcgcatacaggcgctggtgtgggtgcccggcataattggcactataggtcactcccgctggtgaccttggcattatggtgttgacagactgggaatatcatcacctt

SEQ ID NO: 57218 - DNA, 331 bp, Homo sapiens
cgggccccccctcgaaagtcttctagaattaattaacgcgggattgaatgctaatttcttacttataataacataaaatgagttttaagtttccaaaaaaaaaaaaaaacagtgggtataatgtggatagtgtgtacccttgatgggaggtgaggagaatggcaccttataatattcctccccaaaggtcataaccccaatttaaccatgagaaaaaaataagataaatcccaactgagggatattctgcagcatacctggccccaaaactgtcaggggcatcaaaaacagggaaagtctgagaaatttcatagccaaaaaaaaaaaaaaa

SEQ ID NO: 57219 - DNA, 370 bp, Homo sapiens
ccgggccccccctcggaagtcttctagaattaattaacgcgggggtggggattggttcatggtcaacactttcaaaagacatgaaatgtcaatgtagacttttaatatgtaatataaagattgcaggttaaaatgtcagaccttccctgtaagagtgtttgttgccgtggctccccctttgtcccttcccctcctgacaatagcatcttgttcaaagataagaaagttacagttttggctgggcttggtggctcacgcctgtagtcccagcactttgggaggccgtggcaggcagatcacctgaggtcaggagttcgagaccagcctggccaacatggtgaaacgctgtctctaccaaaaaaaaaaaaaa

SEQ ID NO: 57220 - DNA, 593 bp, Homo sapiens
  misc_feature 27: n = A,T,C or G
cgggcccccccctcaaaatacttctanaattaattaacgcgggctaacactctctaatgctgcatgtgagaaagctaaaaccaatagcgtatgtaatttgtcttaaatgtatatggaaatcagagatacacatagatatttacaatccataccaacacatgcttatctgcaaggtggcttattggaatcaaatgtaagtagaataatttattagaccagtgggctaaagaaatagattaaagactttaaaagcagtgaaatatggttttgaccatcacagcccagtagaaattaaatgcaagccaagtatgtaattttaaactttctagtagccacattaaaaaaataactaaagacaaacaaggaattaattttaacaatatattttatttaacctcatatataaaaatgctatcatttgaagatgtaaattaaatgtattcattagataaaaatgtaaagattattagtgagatattttacattctcttttgtacttggtctttgaaatccagtatgtagtttacactgatagcatatcacacttgaatttgagacgttttaagtgctcagtagccacatgtggcttgtgg

SEQ ID NO: 57221 - DNA, 542 bp, Homo sapiens
  misc_feature 44: n = A,T,C or G
ccgggccccccctcgaaagtcttctagaattaattaacgcgggnaatccaatcaagttgacgcttaatattaaccatcacggtgatcttctagattggctcacaaatgctctttcagaaactgcaggatgttcattctggaactgtacagaggcaattgtacagatggttgttttctctggaaacaacagtctacttgagtgataacatatataaaactttaagaactaaagattccattttgctgtaggccaggcatggtggcttacacctgtaatcccagcactttgggaggccaaggcaggcagatcacctgaggtcgggagttcgagaccagccagaccaacatggagaaactccgtcactactaaaaatacaaaattagccaggcgcggtggcgcatgcctgtaatcccagctactcgggaggctgaggcagtagaatcgcttgaacctgggaggcagaggttgcagtgagccaagatcacaccattgcactccagcctgggcaacaagagtgaaactccgtctcaaaaaaaaaaaa

SEQ ID NO: 57222 - DNA, 435 bp, Homo sapiens
ccgggccccccctcgaggtacttctagaattaattaacgcgggtacatatagtatttacagccatcagaggagatgaccttttcaaaggagtgggtacacgatggaaaagagattcaggaagagagacactccagtttgtaagggttatttaaacaaagagggtggaggtatgtgaaagattatgagacaagagcagtaaaaaaagattgagaataaaaaactggtgagaaaaaaagtcaactgtgggagcacaattttctataagtgaaataaagaaaagtgtttcataaagaatggagtgggctaggcacagtgacttgcacctgtaatcccagcactttgggaggccgaagtggctggattgcttgagcccaggagttcaagacccacctgggcaaaatggtaaagcactgtctctccaaaaaaaaaaaaaa

SEQ ID NO: 57223 - DNA, 580 bp, Homo sapiens
  misc_feature 28: n = A,T,C or G
cgggcccccccctcggaatacttctagnaattaattaacgcgggcaagtgacacaccagcctctgtgttccatgatttcacaaaatcaaaagtggttttccttctgcatcttatctaaatggcttctgaaaattggaggcacatccaatcctactccatgacgttcataattgtagcctttgttctcaatctcagccttgattatgcccccaccagaattcagcagagcacatactgctcgcaggatgatttcattctgtttctcccgcaggcgagggtccatctcctgcctctgctgagtcccaagggtgacttttcctgcatctacaacacactcaggaaagtttgtatccacatcaatcctaagactcatcttctcagcacttggcctattcctatcctgaaatgttctcctgaaaaacagaaagatagaaccattagaacaggacaagaataggagaggcaggaaaaccaacagattaaggccatcctactgaggttgggtcccttcatttattcctgatatgaattgactgtgtccccacccaaatctcatcttgaaatggtagctcccataatt

SEQ ID NO: 57224 - DNA, 587 bp, Homo sapiens
cgggccccccctcgaaagtcttctagaattaattaacgcggggtggtggtggagaaatgggaaatttggggttactagcttgaaaacctgctgcaatgctgctgttttcatggctcgatgctccagggctgccactgctgctgtcatcaaattgcttcctatgacgggaaatgttgcagcctctgccctgggcaccagtcatgctgggaagtgagcgtgattgtttttctcaggtagtatcagtcaaaagaaaggaaaagaaatggtgggaggtctaagagaagctcaggagacagcatctgtcatatcatattccccagaccatttgtacccctgaccctctagggttcatccagtcagagagcacaaatactcagtgcaacaggctcagatatccccatctcctgccaaggtggacagagtattcatgggcataggttgtagtagggccataggaaaactgcacagttgtggagtgtcatgcatttaacaactctccccttactgtagttttgctgggtattttatttccccatcctaagaatcgctcacctgcttcaacatcctctaccaacaaaattgcaatt

SEQ ID NO: 57225 - DNA, 596 bp, Homo sapiens
cccccctcgagagtcttctagaattaattaacgcggggtggtggtggtgatttacttactatatggtgcttctggggataatatagtttcttgatagtctcagttcacatatggaatactgaaatgctgacctcattcttttgagattatacaaaatgaagaaaatttatcactagtcacctctgacgcggagattaaaaacaaaaatgtataaagctgaagtggacgaatgatgttctgatgcaacagagaagcaaagatttacctcctttaattcttgttcagtttgagggagttttccttctatatctctgattgcagctttcctttctttgagagtctcagaagctgcaattagagcttccttagccttagttaattgagacactgcagtattatgacgactgagatagatatcaagttctgactgggctacatccatctttgaacgtgcttcatttaccgatttgctgaaacccataagttctttctctcgactctgttaaaatatgagttcattaaatctggacagatatttactttcaaacctacactgaaatgaaaccatacattttatattcgatttaagaaaggag

SEQ ID NO: 57226 - DNA, 394 bp, Homo sapiens
  misc_feature 27, 64, 71, 72, 98: n = A,T,C or G
cgggcccccccctcggaatacttctanaattaattaacgcgggggtgtgagccactgcacccgngcctatnnttttccagttttaaatgggtcagggnaaatacaaccaaaagaatattttgcaacttgtgggaataatataaaattcaaataaattaataagtatctataaataaagccggtttttaaaaaatttggagtgcagtggtgtgatcatggctcactgcagcctcaacctccggggcccaagtgatccccctacctcagccccgcaaagtgctgggattacaggtgtgagccactgcacctggcctcccagctcttaaataaagttttattgaaatgctaaaaaaaaaaaaaaaaaaaaaaaaaaaaaaaaaaaaaaaaaaaaaaa

SEQ ID NO: 57227 - DNA, 520 bp, Homo sapiens
  misc_feature 483: n = A,T,C or G
ccgggccccccctcggaagtcttctagaattaattaacgcgggggaatagaaataaggagtttaatttcattttggatgtgaattttgagattcctattagacatccaaataaagatgtcaagtagtcagcgggatgtaccagtctggatttcaggggagaggtctggactggagatataattggaatcatctgcaaagggacatggttgaaagtcttgagactgggccgggcgcggtggctcacgcctgtaatcccagcactttgggaggccaaggcgggcggatcacgaggtcaggagattgagaccatcctggctaacatggtgaaaccccatctgtactaaaaatacaaaaaattagccgggcatggtggcgggcgcctgtagtcccagcaactcgggaggctgaggcaggagaatggcgtgaacccgggaggcggagcttgcagtgagcccagatggcgccattgcactccagcctgngcgacagagcaagactccgtctcaaaaaaaaaaaaaa

SEQ ID NO: 57228 - DNA, 564 bp, Homo sapiens
  misc_feature 466: n = A,T,C or G
ccgggccccccctcgaaatacttctagaattaattaacgcgggggagagagagagagaggagagcggctgattggtagaactctcagaacacggtcagcatttgtctattaagtttgccatctcacatggtcatggtccatggtgtcccaaataattacaatagtaacatcaaagatcactgattacagatcacaataacagatataataataatgaagaaactgaaaatattgtgagaattaccaaaatgtgaaacagagttatgaaatgagcacatgctattggaaaaaaaatggcactgatagaattgcttgatgcgaggtttctacaaaacttcaatttctaaaaaacacaatgtgttttgcaaaatgcaaaaagtgaagttcaataaaatgaggtatgcttgtatatctagacaatattttgctgaaaatatgtgctcaataaagttacttaatagaaatntacaactaaatcacttaaatacaaatttttttgttattttttattttacgtggcctttatatgattatgtaatcttttgcaaattctacttctaaaag

SEQ ID NO: 57229 - DNA, 575 bp, Homo sapiens
  misc_feature 23: n = A,T,C or G
ccccccctcggggtacttctagnattaattaacgcgggggagagagagagagagaaagagagggagagagagagagactgtttgtttgggagaaagtaagagaagagaacaagagtctctgcctgttaatccaggtaatttacccagatcttatccaagaccaccaacatagtacctctacaaatctgcaagaactacagcattactgggcctggaatgccccctcatgtagatatggccacagtgaccaaaaacttagatcacaatacccaagctccctaaaatacccagaaagccttccaaagaaggatgggtacaaacaagccctgactgcaaagactacaataaatatctaactcctcaatgcccagacactaacaaacattcacaagcatcaagaccatccaggaaaacatgacctcaccaaacaaactaaataagtcaccaggggccaatcctggagaggcaaggttatgtaacctttcagacagagaattcaaatagctgtttcgaggaaactcaaataaatgcaagataacccagagaaggaattcagaatactatcaaataaattt

SEQ ID NO: 57230 - DNA, 457 bp, Homo sapiens
cgggccccccctcgaaagtcttctagaattaattaacgcgggggggggttaaactcactagaacatctaggcaaatacaaataaaaacattatggataccatctgatgctcgctggcctgaccggcctgcaaacttggtgccacgtctcagacacatatagactattacctagtgctggattgaacgcggtagatactaaaattttatacatggactagatcgcggaccatatctagattaaaccatgggaagaacaattcggtttttcttaccataaagcaaaacttatatacaccttataatccaccctttctaatttcaggtcaacaccttaggagtaactatcaagcattcgtgataaggactcacagtaagaaattcatttaatgtcatatcttagtattacatacatacacatacaattgaagtgaatgcccaggaaacaacactgaccct

SEQ ID NO: 57231 - DNA, 323 bp, Homo sapiens
ccgggccccccctcggaagtcttctagaattaattaacgctcatgttgcatgaaactgtggctttcccggaactgaccataatcataacaaggctttgctgactgatacatttctataagaaaagggagaacaggagttgcatggacaaagtaaagacacgtctcactcaatggaccggtataccttaggttctactgctgacaaccacatttgtgctaagggcaacacctacgtgctgctaatgccacagccccatccagtcagcattatcaaagaagaaaactcttcctttcgtgggtgctgaatctgctactaattcctt

SEQ ID NO: 57232 - DNA, 542 bp, Homo sapiens
  misc_feature 28, 485, 524, 528: n = A,T,C or G
cgggcccccccctcgaaatacttctagnattaattaacgcgggggggtggggtacagagattactttttactgtgagagttgctgaccttgtacctaatggctagcagtcacgggcaacagctatattgttagaggtggccgacagcagttgttaaagcaagtggttactactataagggctactcatttcttggcatgtttggataagaattgtgtggtttaggccctaaaacttccatgctttcttggccctgttccttaaagccagtaatataagaatatactgacaccttgaagccagtaatgtaagaaacaagctaagttgaagagaagacatttttcctggcaatcttgtttccagataatgctgtttaggtctaagttctgtgccttagagatgtagatcttctccaccttgtttcatctgagtcatgtctttgggtgggttgtgtaaaggtgggagagaagctatttgagaactggncaatgaagaatcttataagtctataagagctgcttctgnttgngtgtatgtctatat

SEQ ID NO: 57233 - DNA, 597 bp, Homo sapiens
  misc_feature 23: n = A,T,C or G
ccccccctcggaagtcttctagnattaattaacgcgggggggatctgattaacatttaaaccagtagactttgaataaaatagatcacccttggacctcattcaatcagttgaggccttaacagaaaagactgaggtcctccaaagaaggaattctgcttccagactgcctttggactcacaactacagcattaatgcctgctggaatttttagactgttggcctcatctgcaaattttagacttgccagacagcacaatggtgtgggtcaatatttaaaatcaatctctctctctctctctttccatatataaatatataagctattagttctggttctctggttctctggaaaactgtgactaatacaaaatgggaattccaaaaatggcctgatagaattttcaaaaaaagaaaatagataaaatggggaagaaaaaatattcaaaatgataaagaacaagaaggtcttaagattcaaatagaaaaagtctatttgcgaaataaacaaaagcaaatttccacaaagccaccttgtagataaactaaagatcaccaaagaaaagcgataatattaaaatcaatcaaacaaaatta

SEQ ID NO: 57234 - DNA, 538 bp, Homo sapiens
gccccccctcggaagtcttctagaattaattaacgcgggctccctgagataaaatactgtgtcagtggctgtgtgttactaacgcactggatgcttgagttcatgaagcatgtgtttcccaggttgcttagacctgtggctcccttttctgtgggaactggaacaaacaatatgagaaccaaagcttagctgtagtaatatgccatggcacaaacagttacttatattcaatgaaaagattttttataactctcataatcagctaaatggtgctaataattctctagcaggtctttgaaatgctagagaaggcttttcatggtatgtctggcaacagtgatgatccatgctcatttgtaacccagaagcagcaattattctttttaattgctatgatttttcaaataattcaaacaattcttcttctagcatgtcttttaaaacatataaattattaaattgcagagttagaaagaaatttagaaaataatttgatggtgggtttgccaacatcaaatgctgcttcagaaaaaaaaaa

SEQ ID NO: 57235 - DNA, 307 bp, Homo sapiens
ccgggccccccctcgggggtacttctagaattaattaacgcgggatgtaactaacctgcacaatgtgcacatgtaccctaaaacttaaagtataataataataaaaaaaaaaaagaaaaaaaaaaaaagaaaacagatccagacaagttaaatgacttcttccaaggggccagccatcagatggaaaagccaagattatttgagtttctgatttagaatgctcagatgctaggtgtcttaaagctttcagtgagacactgctttaacatatcaaacatatcacagcaaatagaaaaaaaaaaaaaaa

SEQ ID NO: 57236 - DNA, 494 bp, Homo sapiens
cccccctcggaagtcttctagaattaattaacgcgggagatgagcaaagtaagtcttcaaaatagaggttattcaataactaaaagtgtgctgaaatgttcaagtctgttagtaatcggagaaatgtaaataaagcctgagaccatcacacagcaaccagaagactaaatgaaaatgacagaaaataccatgtgttgggctgggcgcggtggctcacgcctgtaatcccagcactttgggaggtcgaggtgggcagatcatgaggtcaggaaatcgagaccatcctggccaacatggtgaaaccccatctctactaaaaatacaaaaaattagccgggcgtggtggcgggcgcctgtagtcccagctactcgggaggctgaggcaggagaatggcgtgaactcgggaggtggagcttgcagggagccgagatcgcgccactgcactccagcctgggtgacagagtgagactccgtcccaaaaaaaaaaaaaaaa

SEQ ID NO: 57237 - DNA, 390 bp, Homo sapiens
gggtaccgggcccccccctcggggtacttctagaattaattaacgcgggggggggggtagaaaaggaaaactttggcgttcgaggatatagaataatataagggcgattgatacagataacgcagactgctgaatcaaaagaatcacaacccataccaaccaaaatttaaatgatcagaattggcagcactataagaaaacgccctctcgtgacttgaattgaggcagtctgaacgcccccacaaaaattgtgctctagagttataggaaatatatatatctactataccagtaaacacatacacaccggacagcacacttgaggtaactattttggattgcaaacaggataaattaaatgtcgcaacaatctgataaaataaccatttg

SEQ ID NO: 57238 - DNA, 591 bp, Homo sapiens
  misc_feature 577: n = A,T,C or G
cgggccccccctcggaagtcttctagaattaattaacgcggggatatgttctgagaaatatgtcatcacgtgatttgattgttatgtaaacatcataaagcatccttacacaaacctagatagtatagcctactgtacacctaggctatttagtatagcctattgctcctaggctacaagcctatatatacagcacaatactgtactgaatactgtaggcagttgtaataccatggtaagtattgtgtatctaaacatagaaaaggtattacattgcagtatgttacgacagctatgacatcactagatgataggaaggaattcttcagctccattataatcttacgggatcaccgttgtatatgcagtccaatgttgactgaaacatgttgcacatgactgtagttaaggctggggtttcaaagctagtcagtaagctattgattgagcaagcaaaaccaaataagtctagatgcgaggaaagacctggtggtgggcagagaatacaaaagacggtctggaaaattaaaaaaaaaatagggaaaataggaacatattgctttgttttctggttagnctatttttctttct

SEQ ID NO: 57239 - DNA, 511 bp, Homo sapiens
gccccccctcgaggtacttctagaattaattaacgcgggcaatgcagaactatgagtaaattaaacctcttttctttataaattacccagtctcaggcaattctttatagcagtgtgaaaatggactaatacagtaggtatgttaaatttgaccaattttatagcatttccagtgtgcctactatccccaagcttctgattttataaaataaataagtggaactataaaaacctagttggtggccaggcacggtggctcacgcctgtaatcccaacacttagggaggtcgaggcaggtggattgcctgaggtcaggaatttgagaccagcctggccaacatggtgaaaccccatctctacttaaaaaaaaaaatacaaaaattacccgggtatggtggtgggcacctgtaatcccaactactcaggaggctgagtcagagaatttcttgaacctgtgaggcagaggttgcagtgaccctagatcgtgacattgcactacagcctgggtgac

SEQ ID NO: 57240 - DNA, 632 bp, Homo sapiens
  misc_feature 47: n = A,T,C or G
cgggcccccccctcggaagtcttctagaattaattaacgcggggggngaatcaataaatcaatcagtttctcaaaattattcaacttgaatagttatatgagaaataaaagccaaaaataaaaaaatagcacagttcctgcttatcaaacttaatttccagaaagtttctcagcattaatgttggcataattatctttaaaaatgtggcttaataccaattgttggataactctctccaccaaggtagtaaagctggtatcttgactttcccgattgtcatacatatacttaacgagcttggcaattgtctctgtgtctgtttcagattcgaagtcatagcctttgctttccaaaaactttttcaagtctttgtagttggtgatgattccattgtgaataacgataaattcattatttttatcagagcgctgggggtggctattgacaggactgggttctccatgtgttgcccaacgggtatgagctattccaaggtgtacatcaaattctatatccaaatccatatcttgttgctctgaagaatatgaaaagaaaaatttcaatattaaatcatgctgcagagataatgctataagctatatttaaatacaattattacaatgctgctctc

SEQ ID NO: 57241 - DNA, 466 bp, Homo sapiens
  misc_feature 21, 34: n = A,T,C or G
ggtaaccgggcccccccctcnaagatacttctanattaattaacgcgggcttaaaattttagtaaaaacgtcggttacatgataaaggagtaaaaaaaaattcagtaaagcattgctgtaaacaattgtcattctcactttgttcaatttctagggcacaggtacggtaggtttagcataatttttaaggggcttaagatttttggaatggtaaatgagtactggcttcagcttaaagtcacaagctgcattagccctaacaagaaagtcaacttgtcctttgaagccaggcactgaatgctcttctctagctgtgaaagtcttaagatggcatcttcagccgatggaagaaggctgttttgtctccattgaaaatttacttagcatagccattttcatcaatgatcttagcttctacataagcacttgctgtttcaatgtgcctttttttttttacccgccccca

SEQ ID NO: 57242 - DNA, 617 bp, Homo sapiens
  misc_feature 23, 36: n = A,T,C or G
tgggtaccgggcccccccctcgngggtacttctagnattaattaacgcggggtgggggtgactgcccagacattcccgctagataggctctgatttccggggcagcctttcagatgcggcagacatacaacacctgtactttagagttttaagggtaaaaaaaatcacaagtgctggttagatagtaaaaacttaagataacttagaaaggctagttttagcttcctttgtggctccctggtgcaaaacaattagcagttatgcaatggacctgattctagtttattctaattaagaagtgaggccgagtttgacttcgttcctgaatacaatcttgagtaactgggaaagtctgagtgaaaggatggcctcattctctttctaatcttgctggtttcaagattagaaaatggcattatttgatctgaaatgtttgagaagacacgaataaagttacttgggccgaggaaattactcactgaagacaagtacccctaaatttacctctggcatgtcatgaaacctgcatctgcttaaggcctaaacggataaacgtgctagttaaatttctcatctcagagttcctctgaaattaaagtccagtcggctcaactgag

SEQ ID NO: 57243 - DNA, 402 bp, Homo sapiens
  misc_feature 16, 33: n = A,T,C or G
gtacccgggccccccnctcggggtacttctagnattaattaacgcgggctggcatacagcacctaaaatccttggcatttgctgagtgataggagcacgttctgttatttgtaaggagtcccatttgatcttaccaaagtttatgctaatgtgacttaggatggggcccctaaatagcctcaggatggggtcagtcaccagaaagacccagtgattatggggtagaactttcagtctcacccactgacctctaaggaaacgtagggatggagggagctgaagattaaactctctaaaaacgctttaaaaatgagatttgggccaggtgcagtggctatttcttgtaatcccaacactctgggaggccaaggagataagatcacttgaggttaagagttcaag

SEQ ID NO: 57244 - DNA, 505 bp, Homo sapiens
  misc_feature 23: n = A,T,C or G
ccccccctcggagtacttctagnaattaattaacgcggggtgggggagtattagtacgttgcatgaaatagcttactttataatgatggaattgctttttcttttgtcttgtgattttttttttgaagtgaaatttaactttttgtgcaagtagtactattatacccatcttcagtgtcttacttgtactgtatcacattccataccctcatttaattcttaataaaactgttcacttgttaaaaaaaaaaaaaaaaaaaaaaaaaaaaaaaaaaaaaaaaaaaaaaaaaaaaaaaaaaaaaaaaaaaaacccaaaaaaaaaaaaaaaaaaaaaaaaaaaaaaaaaaaaaaaaaaaaagggggccccccccgggggggaaccccaattcccccttaaagggggtgttttacccccccctccgggcccggtttttaaaacgttgggaaggggaaaacccgggggttccccaatttaattcgcttggaaaaaatcccctttttgcca

SEQ ID NO: 57245 - DNA, 609 bp, Homo sapiens
cgggccccccctcggaagtcttctagaattaattaacgcggggggatggcttgagcttgggaggtcgagggtgcagtgagctgtgattgtgccactgcactccggcctaggtgacagagcaagaccctgtctcaaaaaaaaaaatctcttcactccttagcagtggttattttgtagctagagttgtctcactagctctttgttatttgtctgttaggtcaggaacgatgtttctgtttattccagaactatattatcgaactatattatcagtctttcaaatgtctttttaggagtccttcaataatgttaaacagtggctgcaggaaatagatcgttatgccagtgaaaatgtcaacaaattgttggtagggaacaaatgtgatctgaccacaaagaaagtagtagactacacaacagcgaaggtatgtttaaagtttaattttcatactgaatttgaaggtgttgaattatgtatgggttctgcagtaacagtaaggccacagccttttaaaaatatgtgcactagaatactgtgacagtgacaatttgtgtagcatctgtttggatccaatgaacttagttcctcacgcttcattatggatggta

SEQ ID NO: 57246 - DNA, 607 bp, Homo sapiens
  misc_feature 525, 579: n = A,T,C or G
ccgggccccccctcggaagtcttctagaattaattaacgcgggccggttctgagggctgcctgattcatgaatcattctttgctcaattaaactctgttaaatttaacttgcctaaggtttttcctttaaaagaaaaaagaaaaagccaaatacctttttttatttaaaaaaaagatttctgtgaaatcatttctctaatacatcacaaaaaaagggaaaaaaaattagcaaaaaaaaataagttgaaatcaaattaaagaaaatattacattccaacaccataaactgatagcgcagaaaagaaatggaattccaaaatataactaacataatgtggcaaggctttccacttaatttttcctcacctctcaaaagctagattgtgagtcataaagatcatggaaattctcattcagatccacaaatttggagagtatctaactgagctggcatcttttcccacttttaacaggggcatgatggaaatggctgctacagagaaataagtgaaatgaaagaagctntttagaaagaggtgaacttttggatgaagtgatagggctccagagctgcaagtngaattggagaacagatccaaagcctatg

SEQ ID NO: 57247 - DNA, 374 bp, Homo sapiens
ccgggccccccctcggaagtcttctagaattaattaacgcgggggcctagtggggagcgagtactcccaccctcaccttgtagtaacaaggagccactcctaggttgtcaacagaggccaaatgaggaacctggacatctgcccccatctggcagtaacaaggtagtgctcctctttccttgctggtgttagaggaggccagctaaaacagaagtttaagtaagatccagctgggtgcagtggccgggtggggtgagtcacacctgtaatcgcagcactttgggaggctgaggcgctgcagatcacctgaggtcaggagttcaagaccagcctggccaacatggtgaaaccccatctctacaaaaaaaaaaaaa

SEQ ID NO: 57248 - DNA, 588 bp, Homo sapiens
cggggccccccctcgaaagtcttctagaattaattaacgcgggggggaccgtcttacttattaatgactacctacaaaaaatacccacaactaacatgacactaaatggtgaaaactatatactttctccataatatcaggtacaaggtaaggttgtctgccttcatcgcttttattcaacattgtactggaagttctagctagtgtaataaatcaagaaaaataaaaggcatatggattggaatgaaataattgaaacagtctctggttacagatgacatgatcatctgattataaaatcccaaggattctacaaaaaaaaaaaaactcctaaagctagcaagttcaaaaaggttgcaagatacaagataaacatagaaaagtcaattgtctttctttgtagagcataaataccaaaattatgtacaccaaaattaaaaatacaataccatttaaaattacaaaaaaaaaaaaccacttaagtgtaaattcacccaaatatgtacaagacttttgtgctggaaactgcatgatgctgatgagagaaatcaaggaagatctaaatgcatggagaggcataccatgttc

SEQ ID NO: 57249 - DNA, 597 bp, Homo sapiens
  misc_feature 580: n = A,T,C or G
acttctagaattaattaacgcgggtgcccggctcaaaataggaatcttaacctaactctgccccacaactgaccgatagcagcttcagtcctccaatctgtccagtatgccgaaggtgggggccctggcaaaggtcaaccaatgtgccacacctaggagaaagaagaggccagttagtgattttcagaatcttcagcttctagctttctccctctcatggtctttagctgacagaagaggtgaagagaaaggaactgtcctactgagagagggcaatggcagataaaaatcaattccctggcagggcgcggtggctcatgtctataatcccagaactttgggaggccaaggtgggtggatcacgtggtcaggagttcgagaccagcctggacaatatggtgaaaccccgtctctactaaaaatataaaaattagccaggtatggtggtgcatgcctgtagttccagctactcgggaggctgaggcagaagaattgtttgaacccgggaggcagagatgcagtgagccgagatcgcgccactgcattccagcctgggtgacagaacaagacttcatcacanaaaaaaaaaaaagcggc

SEQ ID NO: 57250 - DNA, 556 bp, Homo sapiens
  misc_feature 43: n = A,T,C or G
aaagactggggtaccggggccccccctcggaggtacttctagnattaattaacgcgggggcccatttatcgcatgacccgaaggctgacagttttgagtggggtccagaacaggataagtctctgcaacaggtccaggctgctgtgcaagctgctatgccacttgggccatatgacctagcatatccaatggtgcttgagatatcagtggcagataggaatgctgtttggagcctctggcatgcccccataggtgaatcacagcaaaatttactgtattcgtttgttctcacactgctgataaagacaatttgcccaagactgggcaatttacaaaagaaaaaggtttaatggacttacagttccatgtggctggggaagcctcacaatcatggaggaaggcaaggagaagcaagtcacgtcttgcatggatggcagcaggcaaggaaagagcttgtgcagggaaactcccgtttttaaaaccaccagatctcatgagactcattcactatcatgaagacagcacaggaaagacctgcccccatgactcaatcacc

SEQ ID NO: 57251 - DNA, 533 bp, Homo sapiens
cgggctcccccctcggaagtcttctagaattaattaacgcggggatcaaagatatatgcttcttttaaaaaaattattaatgtaacctcaacttcatcacaattataaaacaataattccttgatgtcacatgtgcagggttcacatttctaaatcttttagtaagttattttaagaaaaattaggaaccaaataacagccacatgttgtgattcattaatatattatcttcctattgctgctaacaaattatgacacacttactagcttatacacttatacatttattcttttacagttctagaggtcaaaaatctaaaatgggtttcattgggataaaatcaaggtgtcagcaggattatattccttctagagacttcaggggagaattttccagcttctaggggatgcctgctttgcttggttcttggtgtctttctccatcttcaaagccagcagtataacgtcgtcacatctcttcatctgacctgttctgtcatcaaatctcctgtgactgtggcttttggcctcct

SEQ ID NO: 57252 - DNA, 602 bp, Homo sapiens
cgggcccccccctcggggtacttctagaattaattaacgcgggtatatttacatataatataaaatatacttaaatatagtattaactgtctattgtttaatgtattgcaatacttaggctatgagaccaacagacaataccagttaaattaaaaactaagtatagccaggtgcggtggctcacacctcctatcccagatactcaagaggctgaaacaggaggatcacttaagcccaggaggttgaggctacagtgagctatgatcacgtcactgcactctagcctgggtgacagagtgggaccatgtctcaaaaaaataaaatataaaaataaggccggtcacagtggctcacgcctgtaatcctagcactctgggaggctgaggctggaggactgtttgagcccagggcttcaagagtggcttgggcaacatagcaagaccctgtctctacacaacaaaaacaaaaactagccaggcatggtggcatgagcctatagtctcagctactcgggaggctgaggtgggagggatggcttgagccaaggaggttgaggctgcagtgaattttattgtatcactgcactccagctggggtgacag

SEQ ID NO: 57253 - DNA, 559 bp, Homo sapiens
  misc_feature 39: n = A,T,C or G
actgggataccgggcccccccctcggaaatacttctagnattaattaacgcgggggagtaatccatttccttgcctcttctagttcctcaaggcccctgcattacttggctcatggaaccttttctccatctttaaagtcagcaaggcggaatctctctgaccgtcttcatttttgacaacttctttgactaccactaagaatggggtggagtggaaatattttgaagggataatggtgatgagattgtgtccatctggagaatcccagatcaactcccactttaagacttataactcaatctcatctgccaaggcaacatatgtatcaagggatctaagggttatgatacggccacccttaggaggccattattctgcctgccatgataacctggcatcatgcaatgaggcaacacagtacaaaatatcaagaaacactggtatggggctggacaggggaatgctcacttctaatgcattctgaactactgtggctcagacctgtgtacaatggctcttgacttaacgcccgaaaagggcaagttcatgggtctaaat

SEQ ID NO: 57254 - DNA, 406 bp, Homo sapiens
  misc_feature 28: n = A,T,C or G
cgggcccccccctcggagtacttctagnaattaattaacgcggggagggaaatccaactagtcacacgttagcagtcggactggggttttgaaaattgcacgttgggtaatcagagactggatattcaggttgggctcggtggctcatgcctgtaatcccaacactttggtaggccgatgcgtgtggatcactggacgtcacgagttagagaccttcctgtccaatatggcgaaaccctgtttgtactaaaaatacatcaacaccaaaaaaatgtagctgggtgtggcggcgcatgcctgttgtgccagctactctagaggctgctgttgcagtgattccagatcaagtcatagcactgcagcctcgaacacacattaacaagctatttcaaaaaaaaaaaaaaag

SEQ ID NO: 57255 - DNA, 107 bp, Homo sapiens
  misc_feature 28: n = A,T,C or G
cgggcccccccctcggagtacttctagnaattaattaacgcggggctgaaaagtataaagtaaataataaagcaagaagaaaaaaaagctaaaaaaataaaaacata

SEQ ID NO: 57256 - DNA, 461 bp, Homo sapiens
  misc_feature 28, 438, 442, 446: n = A,T,C or G
cgggcccccccctcggggatcttctagnattaattaacgcggggtggggtgaagtagggccagtgtaagagattaggatggtgagggtgtcctctaagccttggaaggatgtttagatgtttttatcttgactttttttaagaaatatgattttgggcccggcgcggtggctcatgtctgtaatcccagcactttgggaggcagaggcgggcagatcacgaggtcaggagatcgagaccattctggctaacatggtgaaaccctgtctctactaaaaatacaaaaaattagccgggcatggtggcgggcgcctgcggtccctgctactcgggagcctgaggcaggagaatggcgtgaacccgggaggcggagcttgcagtgagcccagatcgcgccactgcactccagcctgggcgacagagcgagactccatctcanaaanaaanaaaaaaaaaaaaaaa

SEQ ID NO: 57257 - DNA, 572 bp, Homo sapiens
  misc_feature 24, 522, 544: n = A,T,C or G
gccccccctcggggtacttctagnaattaattaacgcgggtattttaattcataatatcaggagccatctttattagatttttatcccaaagcagtaatgcatacaattgctgcaatgtgttgttttatgttatttggattagcaatataagtaaaggaaatcaaaagagcaaaggaatcatttgtattatgtaaatgaaaatatgtcaaattccaatattcttctttttgcaggaccagaaaatctttctcttccagtcagtgtcattcatttatgaccagcggttgaatccagtcataaaatctgaagctcctgggtacctctacatcactgggcctatgatacactgtttcagaacgtacttacacatggggtgggacgattttcttaactaatacttgtgactactccacagcaaacctggaaacaaaagtattgggtgagctatcttccaaaatctggagatggtttcggagagagtttcattgccataaatttaaagggggattggatttactcangaaaaattgcaagcgagcgtangagataaactagtaaatgtcatatttgg

SEQ ID NO: 57258 - DNA, 573 bp, Homo sapiens
  misc_feature 28, 105: n = A,T,C or G
cgggcccccccctcggaagtcttctagnattaattaacgcgggtccagagtaaaaaggaagaagtaaactgtatctatttttagataacataattgtttacatangaaaaatccaatagaatcaaccaaaccaccactagaactaattcatgaatttagcagtttggtagaatctatccttctaccaaaggatagaaggtaaacatgcgaaaatcaaatttatttaaaaaataaatttaaaaaataattccacttataatactatcaaaaaacttaagatacatagggacaaatttaacaaaatatgttcaagactagtactctgaaaattacaaaacattttggaagaaattatagaaggtataaataagtggagagatataccataataatgggccagaagactaacatgtcaattctctccaaattgatctatagattcaatgtgatcccaattttaacctgcacctgttttgtgggaattaatacgtttattccaaaaatctatatggaaatgcaatgaacctgcagctgcaccatacattatggtgggccaatactacatgtggctac

SEQ ID NO: 57259 - DNA, 612 bp, Homo sapiens
cgggccccccctcggaagtcttctagaattaattaacgcgggttccttaaagtactttaaaaaatgtgtgaaaatacaaatgggtctgctgaattacaatggatattttagaatgagaaacatgtcttttcttccttcagagtgccacgtgggaaatgacgtcttgtaaccctgagccactttgtctaaaatccaatataaaaggactgttaaggaatgaaaagttcacacaactccttggataagttaaagttcgctacatgcaacacagcgtacaaaacacttaagacttggtagctttctgaaatttgagtcccaatctcatatttaatggaaattaacatttataggttgcattcacatacactgtaatacaggaatgatattcctttgccagaagatgaaattgtacatttccttgctatttctgggttctgacttgataatttcttaagattgtaaattatatagtactcagctaaaaacatttcataaatagctataaaatctaccaaaacacaaaggggggaaaaagacatttgaacattacacagcacaaaaaacaatgcttagagacatgagacatgttattgtctccagaagaaaatggtc

SEQ ID NO: 57260 - DNA, 432 bp, Homo sapiens
  misc_feature 15, 32: n = A,T,C or G
taccgggcccccccnctcggaatacttctagnattaattaacgcggggtaattctatctgaatgtcaattattattaatattattactgagtcagtcatgtagatttacacatggtaattaacacttttcacatattatatggatagatgcatggccgatgacatggaaaggctgtagctttcacaaatcttcctagtggcgatggacataccagcataggctgtccctatgtgccaacttcaaaaacccagcttggtctcttgggaaaactggaatctaattggatactttaagtgtttttgcatggagctgtcagcatatacatcttgttgcagctgtgaaccatcaaacatgtgtacaactagacttaaaaaaatgactgctacacatttgtgtaaagttggtagatgcatttacatgaaaatcaactg

SEQ ID NO: 57261 - DNA, 582 bp, Homo sapiens
  misc_feature 17: n = A,T,C or G
ccgggccccccctcggnagtcttctagaattaattaacgcgggctgtcttgctgaatctataccataggagcatgcactttcttaggataagcacatcacataggtaggaaattggaatgacttagagtgaagccttctctaggccacatttcctttatttggagatttagttgactctggtcaatgactgaaaagcttcttatggtttcctaagttgtatccctgtctcacctttagatagtttctctctgttaagagtctagatctagagaaaatacaaacattccatttctcaagttctttgaaggttcttgttttagttgaaaagtggaagccttaagtacatttataatgaggggaaaagctatgtaactatttatcttacagtattttcctccgtcctcccaacttctgatatgcccaaatctcttgatttcattattttctttggttagatatttttaaatgttgctctgtttttgtggctttgttttttgagacaaaggcatgaatttaaataattctgcagaaatatttctacatatattaagatttatattgaagttttattggtaaaaaac

SEQ ID NO: 57262 - DNA, 549 bp, Homo sapiens
ccgggccccccctcggaagtcttctagaattaattaacgcggggtactccatcattctgttttatggtttttgtcttaacaggatacaaactggcatttaattacttaaaagcaaaaagatatgtggattcaattgacatatgtcaccaggtaaacacttaaatttagatttcttaaaatttttcagatgcacaatttcctacttttttaaatctccagatgtatgtgaatagaaatagaggatacattattttagttaaatgatttatcagtatgtttagggagattatcagtgttcgaaatttagaaaatgatgttcacctaaataaaaaacatgtttttactttgagatcaaataataaaatgtttatgtcaatttaaagacaaagaccactgaagagtacatattaaacaataaaccataaaatatttacatgtatggaaaggagtaggattaaagaggtggagtaaaagagacttttactttaaaaaaaaaaagacaaagaccagtgggagaaacatgttaaataaaatgtagtctttaagtta

SEQ ID NO: 57263 - DNA, 522 bp, Homo sapiens
  misc_feature 24: n = A,T,C or G
gccccccctcggggtacttctagnattaattaacgcgggatgtagagcttgcagtgagagctcctggcactgaacttcagcctgggagacagagcgagactctgtctcaaaaaaaaaaaaaaaagaacgaatggcggaagaaaaagatcagtgaatggagttgaagaatatgttaacagaaaaaaaaaattaaagtaacaggcttgagactgcggttcttaaaaagggttgcttgaaaggatgggtcttggctagctaagcagctagaaactggaatgagttcccagcagtgacataaaaccttccctaatgataaataagagtggctcacaattcctaaactctgtacaagcaagggacaaacacatgtttattcggagcacctgctttcctttcgggagtctgggaatttcggtacatgctacccagagggtgcctatgtgaccagcccaataaaacccttgggcaccaagcctctgatgagctttttttttaaacaactatttttcatgtcacaattag

SEQ ID NO: 57264 - DNA, 495 bp, Homo sapiens
  misc_feature 32: n = A,T,C or G
taccgggcccccccctcggagatacttctagnattaattaacgcgggggccaaaaaggggtagtgatattacagtatcacgcaagagctggggagacttataacttatagcaaatccattaattcttctgaaattcccgtggaatcatgtgaactgtcaatttctgtaacctttagaggatcttccctaaaaagtgctctgtagtaagtaattaaatgagagttttatggtaacccctattatggtttctatgcaaaacaaacagtgctattataaatatctctcagttgcacttaacatgcaccacgattcacattgggacccagcaattaaatctcatatcacctgtgtccttatcgcgcgctttatgtgctgctggcaaggaaaatgcacatgttgagggagagcgggactatggcacccatgctgctctgagcacgagttcgccagctggcttctgaatacgaccctttgcttgactgtccccactcatac

SEQ ID NO: 57265 - DNA, 616 bp, Homo sapiens
  misc_feature 26: n = A,T,C or G
ggccccccctcgggggtacttctagnattaattaacgcgggtacatttagattaactgcagataaaagcagagatttgaatggaaattttaaaaagtgtgatcaagctcctgatgcgtgtattcaagtaattatgatggaacctgaaacgtggctttacaagtacaattctgaagacacagcacaatcaaagcaatagctagcaagaggtgaaaattgcccagtcaaaagagcaaaggtcatggcaacagttttttggggatgctgaaggcattttgcttattgactttctgaagcgccaaagaatgaaaacatctgcttattatgagagtgttttgagaaagttagccaaggctttagcagaaaaacacccaagataacttcatcaaaaagtttttgtccaccataacaatgcttctgctcattctccttatcataaaagggcaattttgcaagattttctgtagaaaatcattaggcatccaccttacagttttgatttggctccttccgacttctttttgtttcttaaaacatctgtagaggtcactcatttttcttcatttgacaatatcaaaaagactgctttgatatggttaaattcccagaaactttgg

SEQ ID NO: 57266 - DNA, 357 bp, Homo sapiens
cgggcccccccctcggggtacttctagaattaattaacgcgggtgttatgataacatcaaaataacttgatattctaggttactaataattgttgtgcatgagtgttactacttttggaattgaagactttaaagaattttaaaggcagttgttgactaaacttctttctcttgattcacagccgaaggagtaaaggtgctgcaatgatgttagctgtggccactgtggatttttcgcaagaacattaataaactaaaaacttcgtaaagcagataaagatactacaaaagctcccactatgtaagcacatatctaaactaggtggaatgtccaaagttgaaaaaagaatcctggcc

SEQ ID NO: 57267 - DNA, 581 bp, Homo sapiens
ccgggccccccctcggaagtcttctagaattaattaacgcggggcatgcatagaggttttaggaggtgagtgggtgactcccactggacagaaatggttaagatcgtgtgtaagtggaacgaggctatgggaactggccttgtagatcatagtaacttgatctgtgagaagattcccatgaagggacaaaggataggcaggtcattgagacaaggaccattagttcggtattcccgtaagaggtgggaaggtatggtgattaataggcgaggagaggcggtggagggaatatagctcttcttctgatgtgatacaaaaatgacaggaattagagaagagttccaaaaatgaatgctaatataagatgattgtgcttagaagaacagtatcccatttgtttctcattcagcagccaaacataaaatctctgatgtgctgggcacaatggggggtatagagataaatgagaggtggtctttgccgataaaagatcacaatctagtaggagaaagaaataccgacaaaactatagatattttgagaagcatgtaatactagaggcacgaagtcagataatgcta

SEQ ID NO: 57268 - DNA, 581 bp, Homo sapiens
gccccccctcggaagtcttctagaattaattaacgcggggctttgtcaaagtataatcttgaaaaaaaaattttctttttcaattttaatatagtctatcccactggaatgtactatcactggcaataaactggctctggttctttttaaagaaattactgttacgctgtagcatttgtctgtataattttagttattgaattaaaatcttttgggaccccaacaggatgagatcattggccagctggcttcctcccacctgcacctggactgaaattccccgtggcattagaggtgtttcgtaaggtgctccctgctgtctgtcctacagattgcagtggctctgctggaaaagaacggaattctatgcaagttgcgtgtgtcatgaaggtctctgcacagtgggtgtgtttctttgtcgtcttttctccactctgctcttctgtgaaatgtgccagcagtggacagaacaggggcagaggtgatcagtgaccattgcacagaatatcagtaagtgttgtaaggtatatagtcttggccaacaaattgtaagcaaaataccaggaacttcctaatctagt

SEQ ID NO: 57269 - DNA, 518 bp, Homo sapiens
ccgggccccccctcggaagtcttctagaattaattaacgcggggctcccactggcttcatggagtgtgcagcaccaactgagcctcccttctgcagccagtgtcatgtcttctgccatcaatgtcttctatctcagagattctttcctcagctgtctgctaatgagaccatcaaaagcattctttcttttacagtgtttatttctaacattttttaaattctttctcagaattttatcacttcttatattttccatctgttcttgcatgttgcctactctttttaataaggccattagcatagtaatcatagtttaaaaagattcctggtctggtaattccaacattcctgtcatatctcactctgaatccgttgcttgttcagttttttttttttttttaacctgcagttttgttgttgttgtttttgcctgctagtagctttgtaattttttgttgaaaggtagatattgagatactgggtaaaagaaactgcaggttaaaaaaaaaaaaaaagcg

SEQ ID NO: 57270 - DNA, 594 bp, Homo sapiens
  misc_feature 13, 24, 525: n = A,T,C or G
gccccccctcggnagtcttctagnattaattaacgcggggttaaatttgtttttcgcctgtagaaataagaacttaactttcacctatgaagcactcatcttatttcactagagcttttgtctcctggatgactatttctagcttttcacttgaataaactctaaaattggattttgaggctttattgattattcagattatttcagattaacagtccttcatagcatctttcttctgcctttacttcctgactaaaccctctttcatgtgaacaaattgtacccaatgccactcgtcgggtgcctgattaaaatgcctactggaaatcagatgtccatgagttcaaggtcatggccttagacttggctgttgtaagggcaaatacaaattagaaataccagacttaaattatgaaacttgaagataaaaaaagacattttactctccttttaaaaaataatttaagaaaacttttatatgtaaatttattttgcgtctctattaaatgtatgtacatcatttanataggtaaataggactttgtcagcctttttaacttaaaaatgtctttctctaggacctggaaaccattg

SEQ ID NO: 57271 - DNA, 601 bp, Homo sapiens
cgggccccccctcggaagtcttctagaattaattaacgcggggctgtatcaaaatataaacaaattaatatattagaaatttaaattgtttcctttttctattctaaataatgatgcaatgaatatctatatacatatatatgtaccttttccctcttgtttatattagtgccgtaaaatacattcttagcaggagtatttctgagacaaaggacctgtgcatatttaaggctttagatattgccaacagtcttccatacaggtcatgattatattcacttccccatgtagtatacaagaatgcccaaacgcccatccactcactaaccctctgtattagtccattctcacgctgctaataaagacatactcgagactaggtaatttataaaggaaagaggtttaattgactcagttccacagggtaggggacgcttcaggaaacttacaatcatggcggaagaggaagcaaacatgtccttcttcacatagcagcaggaagaagaagtgctgggcaaaagggggaaaagctccttataaaatcatcagatcttggctgggtgcagtggctaacacctgtaatcccagcactttgggaggc

SEQ ID NO: 57272 - DNA, 145 bp, Homo sapiens
  misc_feature 33: n = A,T,C or G
ggtaccggggccccccctcggaagtcttctagnattaattaacgcgggggagagggtgtaaatctcgcgccgggccgtacccatatccgcagcaggtctccaaggtgaacagcctctggcatgttgcaacaaaaaaaaaaaaaaa

SEQ ID NO: 57273 - DNA, 454 bp, Homo sapiens
  misc_feature 13: n = A,T,C or G
cgggcccccctcnaagtctttgaattaataacgcgggtcacccacccacttagagctatgattattttacagataattttacatatgcggaaactaaatttcagacagagtgaataacttgcccaagatcacacagcttataagaaatggagctagaggggccggatgcggtggttcacacctgtcatcccagcactttgggaggccaaagcgggcggatcacgaggacaagagatcgagaccatcctggctaacacggtgaaaccctgtctctactaaaaatacaaaaaattagccaggcatggtggtgggcacctgtagtcccagctactcgggaggctgaggcaggagaatgacgtgaacccaggaggcggagcttgcagtgaccggagatcgcgccactgcactccagcctgggcgatgagcaagactccgtctcaaaaaaaaaaaaaaa

SEQ ID NO: 57274 - DNA, 611 bp, Homo sapiens
  misc_feature 27: n = A,T,C or G
cgggccccccctcggaagtcttctagnattaattaacgcggggaggaagaaatgtcagatgcgtgcccagctcttcaccccccaatctcttggtggggaggggtgtacctaaatatttatcatatccttgcccttgagtgcttgttagagagaaagagaactactaaggaaaataatattatttaaactcgcaaaaaaaaaaaaaaaaaaaaaaaaaaaaaaaaaaaaaaaaaaaaaaaaaaaaaaaaaaaaaaaaaaaaaaaaaggaaaaaaaaaaaaaaaaaaaagggggccccccccgggggggacctccaattccccctatagggagtcgtttaaccccccctcatgggccgtggtttaaaaacgtcgggacgggaaaaacccgggcgtacccaaattaaatcgcttggaagaaaatccccttttccccagtgggggtaaaaccaaaaaggcccgaaccaatcgcctttccaaaaatttgcccaccctaaagggcaaagggaaatggaaagcttaaatttttggtaaaaattcgggtaaaattttggtaaaataacctattttttaaaccaatgggccaaaatgggaaaaatcctttataaataaaa

SEQ ID NO: 57275 - DNA, 534 bp, Homo sapiens
  misc_feature 8, 25: n = A,T,C or G
gccccccnctcggggtacttctagnattaattaacgcgggtacgttggaagtgttcgtccgcttgtcactgaattggtaaatgttctttgaaatgaaagttgccttcaaagttaactgattttttttttcaggctgagaattttttctcgtggatctttgttttgctcttctaaaggtttgcacacactaacattttactctaaaacaactaagttgcattggaatctgatggaatatattgaaacatatccgtgacctttgaattgtaagtaataagttgtggaaagtatacttaacttgacagcattaaaaacaaattaattttggtcttatcttaagatttgactgcctatataaggtagtgactgacctatgaaagctcttttatgttgaaagcaagtgaaaaaaaactaaagccttattggtttgaggttagaacggttatttgaaaagtggatttgaaaagaactgaagctgaattattctaaaaacaaggaatgaagctttatgacagggcacgtgaaatgtttata

SEQ ID NO: 57276 - DNA, 553 bp, Homo sapiens
aattaacgcggggggaaaagatctgcacattcctgacctcactcagtcatggctgtcttaggcagtcacactactacctagtaaactccaaactaaaaccaaaccagaaacaacatctagttgactacaagatgctttatagaggaaaaggcacaggctaacctctccccttctccagtatctcagattcagctgggcagctggcagtcacagaggtagcaacaaggcctctggtccaggacttactgaaccatgatgtaagtagagtttgggtggacttagcttggggtagccagacatgcttcagaagcagaccctgtgcaaaatcttccttctggtcttgagcaaccatacctatctctggctgctttaggactgctacatcctggaccaaagtggaaccaaaatctacgtgtggaaaggaaaaggagccacaaaggctgaaaaacaggcagccatgtctaaagcgctggtaggagctacagatgtgcaatactgttcaaataatactgctaagagcacttcaggtgtgtcactccacagagccatgcta

SEQ ID NO: 57277 - DNA, 502 bp, Homo sapiens
  misc_feature 40: n = A,T,C or G
gccccccctcggaagtcttctagaattaattaacgcgggngagaaataaagactttctcagacaaatagaagctgagagatttcattaataccagatctgttgtacaagaaatgctaaagggagttcttcagtctgaaagaaaataatgttaatgagcaataaggaatcatctgaaggttctcactggtagtaataaatatgcagaaaaacacagaatattataatgttgtaattgtggtgtgtaaagtactcatatcttaagtagaaagatgaaaagatgaaacaatcaaaaataataactacaacaatttcagacatggatagtataataaaatagaaacaatgataagttaaaaagtgggaatacgaagttaaagtgcagagtttatattagttttctttttgcttattagtttgtctatgcaatcactgttgtcatcagtttaaaataatgggttatactatattatttgcaagcctcatggtaatctcaaataaaaa

SEQ ID NO: 57278 - DNA, 567 bp, Homo sapiens
  misc_feature 33: n = A,T,C or G
gtaccgggcccccccctcggagatacttctagnattaattaacgcgggtgctctgttaccaaagctggagtgcagtggtgcaatcatagctcactgcagcctgaattattgggctcaagtgattctcccacctcagcatcctgagtagccaggactgcaggtgcatgcccccatgtctgcccatttttgttgttgttgttgttgttgtaaagacaaggtcttgttatgttgcccaggctggtcttgaaatcttggcctcacatctcagcctcccagagtgttgggattatagccatgagctaccatacctggcctgaacccaggatatcaagataccttgctgaaccagaaagcaagtgaacacttaaagaacaagggagcatgtcagaaggacatagaagccagcttcaagggactccctgtttgccaaatctgagacaatttgagcatcaaataaatcatgagagtaatggattagaacctattgacttaaataagaaaccacaagtctacagtgaaaaaaatgaataaactgaatgtctgatgagaaatggaatattcagtctc

SEQ ID NO: 57279 - DNA, 593 bp, Homo sapiens
ccgggccccccctcggaagtcttctagaattaattaacgcgggggttaggaaatagtttcctgtaaggcatgtttagctttcattcatggattgatggcaatataaatcgctcttttgatgtgagaaaaatataatgatggcattacatcaattataaatttcatgagggtagggactgtgttcggtttaccttgtgtccttagctcccattttaatgtctgacccatggaaggcatttcattaaatatttgttgtcatctgtctatgttttcttctttgtctttctttagcttccaaaaagagttgtttttatattcataatttcttatttcatcagtaatgtgactcccctagaagtattggttaaaatacagatctttcttggaaggagactgttttgtttgaagcaaatgacttgggagatgacttaagaacattcaggctttaggtgtttttgtagaaagactaatatttggtcctaaaaaacaaaaaaaacttatcttcatctgtcagaaaattcctaaatgttagcacttaagttgctttgtggtctgatgtatatattataatggaaaaatctgcagcctaaaag

SEQ ID NO: 57280 - DNA, 611 bp, Homo sapiens
cgggccccccctcggaagtcttctagaattaattaacgcgggtacctatttaacaaacctgcatattctgcacatgtatcccaggacttaaataagtaaaattaaaaataaaattaaaaaaactatctagtgtttacaagaatttgggaaagtatgcttttgtgaacaaacataaaaacatttactttttctcccaacttaatcccttcaaaatttggaaactatcaatgagtatccttatatttatgacaatatagtttttgaataagtttgataagagtctgctttttttttaataagataaaattgaaaacattcctgtatcacttagattttgatgggaatgccgtatttaaattgctcataggccctgctggcaaaatttaaagcctgccttggtttggctttgctgcctcaagaggtttttaaacctgagactcctacgtagtcaaatcactattctttctgcacttgtataaatgatcaggcaaaatttgataacacttagcttattttacaagcaaatttgccttactgttaactttgggagaaattgggatgactgtgtagagaaagttatgttactaaagaaacactatggtacacctgct

SEQ ID NO: 57281 - DNA, 211 bp, Homo sapiens
taccgggcccccccctcggaaatacttctagaattaattaacgcgggggaggggtgacgattctcctcaggctttggccctgcaagcaaacccacatatctgctctgtatgtaataaatgtcttaacgtcgaaaaaaaaaaaaaaaaaaaaaaaaaaaaaaaaaaaaaaaaaaaaaaaaaaaaaaaaaaaaaaaaaaaaaaaaaaaaaaaa

SEQ ID NO: 57282 - DNA, 611 bp, Homo sapiens
  misc_feature 28: n = A,T,C or G
cgggcccccccctcggagtacttctagnattaattaacgcgggcccattgtcttggtgattaacattgggccgctcatgactaatgaagatttctgcagtgggtttgaatttcttcccagtaaatgagtttttcttttctattgtatcatcaggctgcaaattttccaaagttttatgctctgtttccccgtgaacactttgctgcttagaaatttttccaccagataccctaaatcatctatctcaagttcgaagttctgcagatctctagagcatggacgaaatgccaccaattatttacatagcaagagtaacctttattctagttcccaagaagttccttatctccacctgagaccacctcagcctggaccttattgtccatatcaatatcagcatttcggacaaagccattcaaaaagtctcaaggaagttccaaactttcccatatctttctgtcttctgaggcctccaagtctctaggacattccaaattgtcccacatttttatgtcttctgagccctccaaagtgttccaacttctgcttgttatccagtttcaaagttgcttccacatttttggctatctttatagcagcacccactacct

SEQ ID NO: 57283 - DNA, 178 bp, Homo sapiens
  misc_feature 50: n = A,T,C or G
cgggcccccccctcggggtacttctagaattaatttaacgcgggctaggnaaaaaaccttgtagagagagtaaaaaatttaacacccatagtaggcctaaaagcagccaccaattaagaaagcgttcaagctcaacacccacctaggaaaaaaccttgtagagaaaaaaaaaaaaaaa

SEQ ID NO: 57284 - DNA, 308 bp, Homo sapiens
  misc_feature 28: n = A,T,C or G
cgggcccccccctcgaaagtcttctagnattaattaacgcgggggctttcggggggagaagagttcatatatatatatatttaatatgtatatattaatgttattttttaaatctaaacctcaaatttacaaattatattttttgatataaaaggttttctttactactttggctttttccctaagaatctgattgagaattatatatccattgccggcataagttatttatctacaacattcagaaaacaagcaagaaaaccattgtataaaattaagcagccattggctttaaaaaaaaaaaaaaa

SEQ ID NO: 57285 - DNA, 580 bp, Homo sapiens
ccgggccccccctcgaggtacttctagaattaattaacgcgggggtgggtaggaacagaatgaaaagataagagaaagggaaagggttaaaagggataggagaaagtaacatttctcagagcatactctgaatcatagtagagtttcacacactcagaaaaatgaaaaattaaaatcaacaaaggatgagggcaaactcagaatataagcagaaacaaatgaaactaattgtattacaaatgaaaactatctacactaaagggtttggcaggaagagagaaaataattaagtaactttggaacacagtacactttatataccctaaggctaaagtcagaccaactgttcacaaatattacactctattcaaatggatttctcacagtggctttggatagcaattccaaaactactttatgtgtattatagtaaatattatggataatgaaaaccaagtgtctccctatcagagagaggagttacaaatagaaaatgagaaaaaattcaataaatcctatggcagggcattagaattggaagtatcagtacgaactccgtgattttgaaaaaaaatgtatg

SEQ ID NO: 57286 - DNA, 555 bp, Homo sapiens
ggtaccgggccctccctcgaaatacttctagaattaattaacgcgggtgggaatatctaattatcctttttaggcaatatatctaaaaataaagacattgtggccaaaaatgttagctcattttttattttatacattttaaaattgtttatttttaagtgaaaattgtatttatggcatacaatataatgtttttaaaaaataattttaaattttcctttttaaaaaaatatatttttatatattaaaggggtataagtgcagctttcttatatgcatatattgtgtagtggtgaagtctgaatattctcaattagtaactttttcctttataagcaggtattgttatttttttaagttgtatcttgaactgtaacttttaaaaagcaaattgtgatttttgccaatttatattttgatttagcgcatagttgatttttcacataatgaattttttcatgaaatactgatttttggagtttaattttgttataattagagtttgataactctcagtttgatagcaaattaaaattagtaaaaaaaaaaaaaagc

SEQ ID NO: 57287 - DNA, 583 bp, Homo sapiens
  misc_feature 33, 486: n = A,T,C or G
ggtaccgggcccccccctcggaatacttctagnattaattaacgcgggaggttgtggttgcatatctcgctgcgattgtgccattgcactccagcctaagtaacgagcaaaattccatctcaaaaaaaataaaaaataaaaaatactcttagaaactaggaataatattttcttgacatgattcttaaaaatttgtctcaattgaatagccaacaccatatccagtattgtcatatttgccactcttatttaacattgttttaaaaattgtggctgttggccgggcgcaatggctcgcgcctgtaatcgcagcattttgggaggccgagacgggcgaatcacctgaggtcaggaatacaagaccagcctgaccaacatggagaaaccctgtcactattaaaaatacaaaattagccaagcatggtggtgcattcctgtagtcccagctattcgggaggctgagtcaggagaattgcttgaacctgngaggcggaggttgctgtgagcccggatcatgccattgcactccagcctgggcaataaaagcgaaactctatctcaaaaagaaaaaaaaaaaaaaaag

SEQ ID NO: 57288 - DNA, 612 bp, Homo sapiens
  misc_feature 28: n = A,T,C or G
ccgggccccccctcggaagtcttctagnaattaattaacgcggggatgataaaaaaaaaaagaagttgttattagtctattcaaagtattaaagcaaaatatgacaatgactcaataaataggaaatgttagtagagaaatagaaagctataaaacaaagcaaatgtatattttagagttgaaatgtcagtaacaaaaattagaaatttactagatgttctcaatagcaaatttgagatggctgaagaaagaattagtgtatttgaacattgttcaatataaattatctaatcttaagggagaaaaaggattgaaagaaatgaaaacagcttcagagccatataggacagtatcaagtatggtaacatacatgaaacaggagtagtagaaaaagaagtgaaagagtaaggggatggatcaaatatttgaagaaaaaatggccaaaaacttcacatatttgattatttaaaaactttcttaaaattaatctacacatccaagaactttaacaaaacctgaataggacaaacacaaagagacacccataatcaaacttctgaaagccaaaagacacatcataatcaaacttctcgaagccaaaaagaaagacta

SEQ ID NO: 57289 - DNA, 565 bp, Homo sapiens
  misc_feature 509, 510: n = A,T,C or G
ccccccctcggggtacttctagaattaattaacgcgggggctcactgcaatttccacctcccaggctcaagcaatgctcccacttcagcctcccaagtagctaagaccaaaggcgtgtgccaccacacctggctaattttctgtattttttgtagagacagggttttgctatgttgcccaggctggtcttgaactcctgagctcaaggtgtctgctcgccttggcctcccaaagtgctgggattacagacatgaaccaccacacccggccctgaattttcttctgccactgttaatcataatattaaaatgctgcatgtacatactgaaatatttatagataaaattatatgatgcttgaaatttgcatcaaaaataatttagtagaaatgagtagatgtatagatgaaataagattggccatgagatgatgactgctgaagctgggtgggaacatttaggttcattatgctaccctgtcattttatatatatttgaaattttccatanntaaaatcacatacacacacacacacacacacacacaaaaaaaaaaaaaaaagcgg

SEQ ID NO: 57290 - DNA, 580 bp, Homo sapiens
ccgggccccccctcggaagtcttctagaattaattaacgcgggcaagggttcttttgtgatctaataagatattctatggaaatatccagcagtatgcctgctatgtactagagatccataagtgctgattgattattttttctaacattcttctttagttgacagtgatgttaatggaatgtaagaagtaactaggataaaattttcattggatggattggcacaacatgttaactgactggatgttgatatatttggaaacaagattcatggattatactaagatttgtaagctctatttttagttttgaagaagggaatgggaccagatgcgatggctcatgcctgtaattccagcactttgggaggccgaggctggtaaatcacttgaggtcaggagtttgagaccagcctggccaacctgctgaaaccccatccctactaaaaatacaaaaattagctgtgcgtggtgacaagcgcctgtaatcccagctacttgggaggctgaagcacgagaatcacttgatcacttgaacctagtaggtggaggttacagtgagcggaggtcatgccactgca

SEQ ID NO: 57291 - DNA, 567 bp, Homo sapiens
  misc_feature 21, 468, 535: n = A,T,C or G
attaattaacgcccggggggnacaaaaatagggaaaccacagttttcagacattggaaaataggcagcacagggcagatctgagggaaggaaaacaaatgataagagctctatgattgccccatcttaggttctggagagtttccaggccactgtgcagagataaaaaacctaaattgagctacatgatctttgagctgaggagttggagttcagaatttgagaggccaaggaaactagaatttgaaaagcagagtattgcagagctccagagttctgcagagggtaactttgcagtattgattagcgcatgtgtggaggaaactatacaaggccagagaaagaaaattatttaggtgggacagtctctagagttcacatgggactgggaaaatttatttttccgttagacagagtggaaagatactcttaatgcatagtactttgagtagaaatctcagaaggattntgcctcagtagcagggccaaattagccatagactaaaggctattctggttctggttaacaagaatanaagtaagatttgaaaagatcagactgtttcta

SEQ ID NO: 57292 - DNA, 570 bp, Homo sapiens
ccccccttcggagtacttctagaattaattaacgcggggtggggactgggaataaccgagggcctcgtggcaggctgggtggcactgccctctcaacgctgacctgtcagctggttcaggaaggcctttctgaggccagcacagactctatcacaccatggaccttcaagggatagctctcttggcaaaacacccttttgccagacctaattgccagaagctgcagtggaaatgagaacccaggatatgggacgagacagacctatgtgtggatctcagctctgccatttgctagctgtgtggccctgacagtcacctgccttgtgagctctgagttccttaagtgtaaaaatgccatggtatggtagagaggaaagagactcatatttgaatatgacacagaataggcccttagtgccagcctcaggggctcacacctgtaatcccagcactttgggaggccaaggcaggcaggttgctgaagcccaggagttcgagaccaccctggtcagtgtgatgaaactccgtctctaaaaaaaaaaaaaaaaaaaaaaaattagaaaaaaaaaa

SEQ ID NO: 57293 - DNA, 591 bp, Homo sapiens
cccccctcgagagtcttctagaattaattaacgcgggccacaacaactattaggtttgcgaatttgctagaatgactcacagaatggcgaaacgtgcttattttccattaccattttattataaaggatatagatgaaaagcaagatggagaggttgtaggcagggtcaaggagggtcccaagcacaggaacttctgtctccacagagttggggtgccttgccctcctggtatatccatgagttcaccaatcaggaagctctctgagcctggtgttcagtttttatccatgctccatgacacaggcaagcttggttaaatcactgcccatgtgattaaatttggtgtctagccccgtcccctccctggagatggattgaaggtgaaagtttcaaccctccagtcatgagcttggtttttctggccaccagctccatcctgaagctacataggggccaccaagcatcacctcatcaacacaacaaagacaagacattcctgaggctgggcgcagtggctcacgcctgtaatcccagcactttgggaggctgaggtgggcggatcacgaggtcaggagttcgagaccagtctg

SEQ ID NO: 57294 - DNA, 381 bp, Homo sapiens
cccccctcggaagtcttctagaattaattaacgcgggggtctgtcctgcagaccctgacccaacgaagaatgaataacatacattgacacagatattatgcttgtcagtccagctgagggtccgggccacttacagactccaaggagagtctgtaaagagttgcagccacggcctcgactcgctggccctgcccgcatttattcagcacacattaaatgacaaaggtctcaagtaaacaccactagaaggtaattactgataacaacccactgagtagagagcaatcaggctactgacccactgagtagagggcaatcatgcactcccggatggtcaaaggttagtcaggaccacccaagtgaacaaactatggagatgga

SEQ ID NO: 57295 - DNA, 588 bp, Homo sapiens
  misc_feature 35: n = A,T,C or G
tgggtaccgggcccccccctcggagatcttctagnattaattaacgcggggggggtggggaagtaaaaaaataaaactgtgatggtagtcacacaaacctaaatgtgttgaattgaaattcacagaactgctgggctcagtggctcatacctgtacgataatcccagctactcaggaggttgaggtggaagcttttctctctatttggtcaaaacatctaagccagaaatttcactctgtggccagttagctcctggaacagcagaaaataaacgttgacgatgaacgaatgaatttagatgtactgcccagaggtgtgggcagccctggacacaccctccctacgggagctagaaagccctgacaaggatgcctgagtcacctggggcgggaggcccaccttggcatcgtgcacgaccttgcgggtgtgcttggtgagcagggcagcgtactcctcggccgtgtgcctgcaagtgctcagcccgatgttctggccgacgtatttttctggcatcttcaaaaggctgagcaccacaggacccaggtcagacacggacatgccatccatgggaacgtcacctgtgggca

SEQ ID NO: 57296 - DNA, 150 bp, Homo sapiens
tgggtaccggggcccccctgcgagagtacttctataataattaacgcagagtgatgcctgttgggggccctctcagccctcctaatgacctccggcctagccatgtgattgcacttccactccataacgctcctgatactaggcctacta

SEQ ID NO: 57297 - DNA, 607 bp, Homo sapiens
  misc_feature 27: n = A,T,C or G
cgggccccccctcggaagtcttctagnattaattaacgcggggggagaagaggaggatccagtaaagagtctgagaaaagccagcaaggtggagaaaggccaggaaattgtggtattatagaaacctactgacaaaagactgggcgtgatggcacatgcctgtcatcgcagctacttgggtggctgaggcatgaaaattacttgaacccaggaggcggaggttgtagtgagctgcgatcatgccactatactccagcctgggcaacagagcaagactgtctcacaacaaacaaataaacaaacaaacagaagcctactgacacaaaagcatttcaaagaaaagagaatgaccaactgtcaagttctgctgttatgacaagaaaaatgaagactggaaaatgactggcagacttagcgatgccatggtcaatggttaatttgacaaaagcagttctggcagaaaagtcagggggaaaacctgcttaggtttggctcaaaaaaagaggaaaatttaaaaataaacaatgggcagggcatgttggcttatacctataatctcagcactttggaaggctgaggctggggcattgtttgaggccaggcattc

SEQ ID NO: 57298 - DNA, 449 bp, Homo sapiens
gggccccccctcgaaatacttctagaattaattaacgcgggggaagggagcagaatgagatatctctgtgagatagatctttgttgaatcacagaaatgcattacttacttcaatagtaatcaaattcattttttaaaaagtagtgccttggccaggcacggtggctcaagcctgtaatcccagtactttgggaggctgatgcgggtggatcacgaggtcaggagatcaagatcatcctggctaacatggtgaaacctcgtctctactaaaaatacaaaaaattagccgggcgtggtggctgacacctgtagtcccagctactcgggaggctgaggcagaagaatggcgtgaacccaggaggcggagcttgcagtgagccgagattgcgccactgcactccagcctaggggacagagtgagactccgtctcaaaaaaaaaaaaaaaaaa

SEQ ID NO: 57299 - DNA, 545 bp, Homo sapiens
cgggccccccctcggaagtcttctagaattaattaacgcgggtatactgttggttgactgtgttgttcagatctatgtccttgacagtttttagtctagcagttctaccagttgctgagagaagtctttaagttctcaactacaattgtagatttttctattttttctttcagctccatcagatgttacacacatttatgattattatgtctgcctgatgaccaatcctttttatctgttttatcattatataatgtcccttttcatttctagtaattttcttttctctgaagaaaaaatattaccagatattgtcagatattaattcagccatttgtttatttttaatgattcatgtctctttggcatattttctttcatctttttacactcaacccacctatgtctttgttttcaagtgtatttcccataaatagcatatagttagtttatgctcttgacactctgtcagtatttgtcttttgattgctgtatttagaacatttgtatttaaggtaattatttatatatttaagaataagtct

SEQ ID NO: 57300 - DNA, 600 bp, Homo sapiens
  misc_feature 577, 592: n = A,T,C or G
ccgggccccccctcggaagtcttctagaattaattaacgcgggtcagatgtaattgttactgtagtaaacaactattgtgtaaaacaatgataagtgagtgtgaaagtaaaaaaacaaatcagaaaataaagcagaatgtaaataattgataaagacaagttctgaaaaaatgtcaaattggatttaagagtcagacacctgtaagaggtttatttgaggggctaagcgtgctggtatttacacacacattacttcttgtgtctcttcaatttattggttcatttcaaaaaaccaaagctaaaaatcataaaatattcattatgtaaaaagaaacaatgttcaatgaatccatacatacatactgaagacctttgtcggatagttgacaagtatatttgcatatatgttttccaaggtaaaagaaaatttgtggctgggcacggcaactcactcctgcaatcccagcatttcgggaggccaaggcaggtggatcagctgaagtcaggcatccaagaccagtctggccaacacggtgaaaccccatctctactaaaaatacaaaaaaaatagctgggncgtggtggctggcancctgtatc

SEQ ID NO: 57301 - DNA, 517 bp, Homo sapiens
  misc_feature 23: n = A,T,C or G
ccccccctcggggtacttctagnattaattaacgcgggcagacaatgatcccacattgaaatttggaccttcaaaaggattgaagaagatgggtacgtgggtacatataaaagcctattttttcttttctatatgcctttgaaagacactcaattatgtaaagcaaaatatatatttggggatttataatatccagttgattctcattatttacagtagttatgttctataaagttgccaggaatactcgattagtaaatgctaaaccattgctcctggggaaatgcagacttaagactcctgtgagcctctggtcacaatgtttttgtcaactgagtaacatacaaccttgtgttactgtttaaagacactttatttcatatattttattgattcattaacattgaattcacactaacagcactatcactcatgcatgaacaagtcttatctaacacacttattttctccagaagtacattatagccttcttgtgcttaggaataccacatggctc

SEQ ID NO: 57302 - DNA, 512 bp, Homo sapiens
cgggcccccccctcgaaatacttctagaattaattaacgcgggtgttatcataggacacggcagctccatgtgtgttaatacccctgaagacctttcagtgggacaagatgtggaggtggaaaacagtaaatgtgtgtttgtgtcttagtttttaacaaaatatttttaaaagacaaaaaaaaaaaaaagaaaagctaaagcttatagaataaaaagaaagaaaatatgtttgtacaaccataccatgtgtttgtggtttaagataagtgttattacaaaagagtaaaaaagtttaaaaaaagtaaaaatttttaaactaatatcaagtttatagagtaagctaaagttaatttattagtgaagatagacaattttaaaaataaacttaatgttgcccaaatgtgtagtgtctataaagtctgcagtagtttccagtaatgtgccaggccttcacattcactcaccactcatttactcactggctcgcccagagcagctcctagtcctctta

SEQ ID NO: 57303 - DNA, 407 bp, Homo sapiens
cccccctcggaagtcttctagaattaattaacacggcgggggtgattgaatcatgggggccagtctttcctgtgctaattctcatgatcgtgattaagtctcatgaaatctgatgggtttatcaggggtttccacttttgcttcttccttgttttatcttgctgccgccatgaaagaagtgcctttcacccccgccagttttataagattctgagacctccccagactgtaagtcaaattaaacttccttttcttcccagaaaaaaaaaaaaaaaaaaaaaaaaaaaaaaaaaaaaaaaaaaaaaaaaaaaaaaaaaaaaaaaaaaaaaaaaaaaaaaaaaaaaaaaaaagagggaaaaaaaaaaaaaaggggggccccccccgggggggacccccattcccccctt

SEQ ID NO: 57304 - DNA, 577 bp, Homo sapiens
  misc_feature 553, 560: n = A,T,C or G
ccccctcggggtacttctagaattaattaacgcgggagttgggatgaagaaacctatgtttctttgacatattttggaatggccctgcaaagccatctcttgtgggggaaatttatatcctgcagactcccttccctttctaggccttttcctgatctaggagagatttaactaagagtctgacactttttagggtctgataagagaccatctgtcatctcccatgtgatgatagaccagtcaggttggagttggtatcttaattgctgagagtctgttctgtcagtcttaggattctgttttaatgttaatgctggtcagttgtgtctaagctccaaaagggagaggctaggatgaggcatggcccacgccccacttcctgtcatggcctacgccccacttcctgtcatggcctgaactcagtttttaggttttttcaaaatccctttggccaagagggggttcattcaggcagttgggaagcttagaaatttatttttggtttacagcactcactcaggaattgggtttttctagggctggggttggcttnctcctgngggctggtggtggagtc

SEQ ID NO: 57305 - DNA, 212 bp, Homo sapiens
ctgggataccgggcctccccctcggaaatacttctagaaataattaacgcgggaacccatttatttctatattcattttgtaaaaaaatttaaaagtgctattttgtttgtatttgaaaatctctgtgaataaattctctctttgatcaataaaaaaaaaaaaaaaaaaaaaaaaaaaaaaaaaaaaaaaaaaaaagaaaaaaaaaaaaaaa

SEQ ID NO: 57306 - DNA, 434 bp, Homo sapiens
  misc_feature 10: n = A,T,C or G
cccccctcgngggtacttctagaattaattaatgcggggtggggggagtagggagcagctgaggaatgggaaaatattagtcagagggtacaaagttttagttaggaggaataagttctggagaactattgcacagcatgatgactataataataacaatgtatgtttcaaaattgctgagagagtaaattttgaatgttctcaccacaaaagatcagtatgtaaagtgaagaatatattaatttgcttgatttaaagatttaccatatttgtaattagtattaatatgttggaagtttgagttttgttttgtttctgctgttaggtgagcaaggaagcctagctcttgaaatttgtatttttgttcaactttgtaagaagcatatttattatttaaataaatatttattgatcagaagaaaaaaaaaaaaaaa

SEQ ID NO: 57307 - DNA, 575 bp, Homo sapiens
ccgggccccccctcggggtacttctagaattaattaacgcggggattggttgaaagagttattaaatagaaaggatgtctgggatacaataaggggttgtggagaccaaggttttatcagacagatgaagcctccagaggacatgcttcagagagaatagattgtaaatgtttcttatcagacttaaagagtctgttctatctgtaattccaaaaggggggaaggtataatgaagcatatctgtttccctcttcccatcatggcctggattagtttttcaggttaacttgtaacgcccttgccaagaggagggacctgttcagatagtgggagactcagaattttatttttggtttacaaagccaatctcttctgctcagcccatcagagcacctgtctatttttacagagatgttgtctaattcatgaattgctaattaagccaattagatctttaaactaaatttgttgtaatttcgtcttttgacaatgttatcgtttctattttagggaagcagaaactggagttcagattggggaagtggcagctagctagaggatcccagagctgtcac

SEQ ID NO: 57308 - DNA, 537 bp, Homo sapiens
ccgggccccccctcggggtacttctagaattaattaacgcggggccgtgggaagggaaagcagcacaggcaagctgagtgcacattggtgatgagatacagagatccatgattgaacttctagtgtatcttagcccactggggctgccatgacaaaacaccatagagtgtggctcatcaacagcaggagtctgttgctcacagctctggaggctggaggtccagggtcaaggcactggcagattgcatgtctggtggggccccgcttcctggtccatagccagcaccttctcactgcatccttatgtggtggaagaggcaggggagctctctggggtctcttttgtaaccccattcttgaggcttgtccactctcatgacctaatcacctcccagaggccctgcctcctaacaccattaccgtagagtgagagcttcagcctatgaattttggggggacatgaacattcaagactaatattctttcagtattccagttactgaatggtgtgtagtattcagtggagaaggtagctga

SEQ ID NO: 57309 - DNA, 495 bp, Homo sapiens
ggccccccctcggaagtcttctagaattaattaacgcggggatttccctaatgattagttacattgaacatttttgcatgtgcttattgactatctgtatattgtctttggataaattcctattaagttcttttgtcgatatttaattgggttgttttttcttgttgttgagttataggagttactgagttgtttttgttgaattgtaaggatttactgtgaggttacgtcccattaaacccattgaaagttgaaaatattttaagtcaaaatgtgtttaatacacgtaccctactgaacatcataacttagcgtagcctaccttaaatattttcagaacttttacattatttatcagttgggtgaaatcacctggaaatgccatacactatagagtattggttgtttacccttgtgattgcatggctaatggagatgtaccttgctgccccaaattacacaacaagagagtcttataccactttctactgaatg

SEQ ID NO: 57310 - DNA, 579 bp, Homo sapiens
cgggccccccctcggaagtcttctagaattaattaacgcgggatatatatatatatatacacacacgtatatatacataaagtagtaaagaaggattttaaaaatttgaatatatttaaacatgtatgtatgtaaaatatgtatctattcactgtatggaaaaataatattgtcttatgtgatttaaaatatatatagactgaaaatatatgacaatataaaaaaaggcaggagagacagtaaatggagataaagtatactaaggttctaacatcaggaaaggaaataaagcagtaacttatatttgaccatagtcaaggatgcatgctataatctctcgagcaactattaaaagagcagtaaatggccaggtgtggtgtcttaggcctataatcccagcactttgggaggctgaggcaggtggatcacatgaggtcaggagttcagaccacattgggcaacatggcgaaaccctgtctctactaaaaatacaaaaattacccaggcgtggtggcaggcacctgtaatcccagctactcaggaggttgaggcaggagaatcgcttgaaacctgcgggcg

SEQ ID NO: 57311 - DNA, 510 bp, Homo sapiens
acttctagaattaattaacgcggggggggggagaagaagaattggccatcttaaaaagcgggtaaaaaacctgggttagggtgtgtgttcaccttcaaaatgttctatttaacaactgggtcatgtgcatctggtgtaggaagtttttttctaccataagtgacaccaataaatgtttgttatttaaaaaaaaaaaaaaaaaaaaaaaaaaaaaaaaaaaaaaaaaaaaaaaaaaaaaaaaaaaaaaaaaaaaaaaaaaatttccccgccccccccccgggggaaccccaaattccccctataaaaagttttttaccccccccccacgggcccgtttttaaaaaaggggaacggggaaaaacccggggttaccccaattaaatccctttgaaaaaaaaccccttttccccagtggggaaaaaaccaaaaagccccccccctaacccctttccaaaaagtggcccccccaaaagggaaaaggaaaatttaaccccttaatttttgttaaaa

SEQ ID NO: 57312 - DNA, 456 bp, Homo sapiens
  misc_feature 385, 409, 443: n = A,T,C or G
cgggccccccctcggaagtcttctagaattaattaacgcgggggagtcaagatggaggagtacgcgcgagagccttggtgagcttcaccgctgtctttgcatttctcttgcccccctgcccactgccctccttctcccttgtccacgctcccaaggtgcaagccagactcaaccgcagcctcgtcgacttgggcctggtaactgggcaatgcggtctttcgcggccagtcggcttcttagccctgtacttagtacctccccggccgcgtgagcctccctctcccaacccagcacccgtgtgaccttgtgatggatggtaaggaggtccagacttgagtttgatagaacctcggaacctcctcccaacgcatggcgtaatcgactntatgcggagccagttataatcccncctgttcgtcgaggtgaccttgggcgcgtccctncgtctcgccttgc

SEQ ID NO: 57313 - DNA, 539 bp, Homo sapiens
  misc_feature 445, 461: n = A,T,C or G
gggccccccctcgagggtacttctagaattaattaacgcgggactgtgtggcttataatcaacagaaatgcatttcttattgttctggaggctgggaagtccaagatcaaggtattggcagattctgtttctggtgaaggcttactttctggttcatagatggcaccgtcttggtgtgtcctcacatggtggaaggggaaaatgagctcccttgggcctcttttataggggcactaataccctcatgaggtctctgccctaagaatctaatcatctcccaaaggcccccgctttccagcactattacccttggggttagaatttcgacttacgaatttgggaggacataagcatttatataccatagcagaggggtaaacctatctaccccaaactacttgcaactaggctttctgtgtgttttcatgcactgctctttctgctntctctgttcacatggngttggtcactccaccctctcttctggaaagccttagagttaccacgaaagattcttccaaatgttcccctcctcataa

SEQ ID NO: 57314 - DNA, 455 bp, Homo sapiens
  misc_feature 28, 94: n = A,T,C or G
cgggcccccccctcggggtacttctagnattaattaacgcgggggttttctcgtctagtaggcttgtcagctgattcctatatttacacacagnaaaacattatacataaaagctgcatttgacaaatgaattatcaatatctattttcactagcccttatcaaggaagtcttattttcacactcagtcttactgtgatgatctatttctccatgtctcatcaagtgaattctttattcaaggctgtagtatctgttgaataatcagcgttccaacaggagagacgcagccagagggttaccaaacttgcaaatgtaaaagaggagattacctgcattcctggtttattcatctgggaagctaaattcattggctccctttccagagcttgtaacatccggaacatgtcaacagttagttcactgaacttaacctgcaagaaaaaaaaaaaaaaa

SEQ ID NO: 57315 - DNA, 612 bp, Homo sapiens
cccccctcggaagtcttctagaattaattaacgcgggtgcctgtagttccagctactcagaggctgaggcaggagaatggcgtgaacccaggaggcggagcttgcagtgcgccgagattgcaccactgcactccagcctgggcgacagagggagactccgtcccaaaaaaaaaagaaaaaaagaaaaagaaagcagccataacctacacataaattaatcaatgtggctgtatttcaataaaactttacacatgaaaatttgaatttcatgtaatttttaacttgtcacaaaataatatcattcttttttgatcttctttattcaattattttaaattatggaaaacatttttaacttgtggatcacaaaaaaacaggctggccacatttggcctgcagactgcagtttgccaacccctgctctaaagctttaaaaccaaaactcaaatgcacaggctgattttgttgactgtttaattataacttcaagtggtaccaggcaagcttaacgaacaggaacctagtggttatcaaactggtttgtctgcaggaaccttggaaagtccctaaaaccgtaacataaagacattccactataatcctatgtgatct

SEQ ID NO: 57316 - DNA, 414 bp, Homo sapiens
  misc_feature 17: n = A,T,C or G
ccgggccccccctcggnagtcttctagaattaattaacgcgggcaaggtataaaaaaaaacatctagccccttcttcggggctgagagaattttttagttctagctgtctctcggtcgccggcaataaaggactcctgaattagtctcagagtgtggcgtttctctgtaactcactcggttccaacaatctgtgattacagggcccttatatgttgaagagggaagcaggagcgagagcgtcagagacagaaaagcagatgtgataagggaagcaaagtttggagtgaattgggccaatgtttttaagccttagagattgaatgcttttgaatatagatgatggaccccaagctaaggggtaaaggcagtctctttcagaagctggaaagagcaaaaagcaaaaaaaaaaaaaa

SEQ ID NO: 57317 - DNA, 277 bp, Homo sapiens
  misc_feature 16, 18, 31: n = A,T,C or G
cggggccccccctcgngnagtaccttctagnaattaattaacgcggggcggagacatggaacaaacatacaaaaaaaaaaaaaaataaaaaaaaaaaaaaagaaaaaaaataaagagacacaaaaataaaaaaaatggaagaaaaaaaattgaaatcagccagcacgccaagtacacttgctctttctgcggcccccccaagatgaagacaccagctgtggggatctggcactgtggttcccgcatcaagacagcggctggcggtacctggacgtac

SEQ ID NO: 57318 - DNA, 521 bp, Homo sapiens
cgggcccccccctcgaaatacttctagaattaattaacgcggggaagatttccaaaactagatatccatatgcaaaagaataatacaggactcttatggtactagatacacaataatcaactcaaaatgattaaagattatacacaaaacttgcaaccataaagctcctataaagacaacctcaggtgtgcgtatatttagggcaacttggatgtatgcttagggttcgcaaaaagtaaacaaaaatacaagggaaaaaaattattgacaatgaactgctttggtagtgatttgtgattttgttttttcttgattagtaaccaacagcacagccaccaagaaattatgcacatgtgggaccacgtcaagctgaagcgtttgtgcccaacaaaggaaacaataaagaaaataaaaaggcacactaaaattacaagtttgggataagggattatttttgaaaaggtacaagcgagtcatactaccagctggcaaaaaaaacaaaacaacacaacaaaaaaaac

SEQ ID NO: 57319 - DNA, 460 bp, Homo sapiens
ccccccttcggggtacttctagaattaattaacgcggggaagactggatatccacatgcagaagagtgatactggacccttacctcacaccatatgcagaagttagcctaagacaggtccaggacctaaatgtaagacctaaacatataaaattctgagaagaaaacataggacaaaggctccacaaccttggatttggcagtgatttcttggacatgacaccaaaagtgtaggtaacaaaaaaaaaggagacacactgggtttgatgagacttggtgtcttttgatgcacaaagctttctatctccttgtttccctgtttccctgcttcttactgctgcacttggctagtcgtaaagaaaagacactgttaacggaataaaaaggcacctgtggagtaggagaaaatatctgcaaatcctctgtctgatgaggaattactacccaaaaaaaaaaaaaaa

SEQ ID NO: 57320 - DNA, 581 bp, Homo sapiens
ccgggccccccctcggggtacttctagaattaattaacgcggggcggtagcgggggcagtggtgctgttgcccttttaaactgcggcttgacgggagccgcgcctcctgtcggtggagtcggttataaagggagcagccccgcaggccgccacatagctcccgccaagtcctcggtgccccttgccattttccagccgcgctcccacgagggtcacggcggcggggagaggtggagccgcgagagctcggccgggggccccgcctggtggtcgcggccatgacagcggctcgggacaggctccttttccgcgcccctcccgccggaggtgaggggaagatgtccatgtccgggttcaaggccaaaccgaagttactggcttctatcttccaggagaaccaggagccacagccgcggctcacgccccaccgcaacattaaggtgagtcgccgggtggcggcctggcggggcagggcgagggcggaaagcgggtgcccagagtcccaggagaaaggggaagctgccccagagaggccgcggttccccgcccctttctcccgcaactggcccgcccggcaaggc

SEQ ID NO: 57321 - DNA, 425 bp, Homo sapiens
  misc_feature 10, 12, 23: n = A,T,C or G
cccccctcgngnagtacttctanaattaattaacgcgggtcggctgcttatgagtgatgcctttgacggctgattagattataaaacagttttgtttttttaaacatagggtctcacattgggtcttgtgcattctatgtaatctcaaatggcagttcagtttgactttcttttaaaactaagtggaaatggcctatttggtgaaactaatgaaagaatcttttgctgggaaattccatacaccacccccagcagcatcctgactcagtctggcgtatacttcaacctcctactgagtgtccctgtaaattatttctaatatatagcatgagagtgaactgaggtaagtcattgcatgttcccagagatgatgaatgaacaaaagcaaataggatctgctaaacatttctattcccacagaggtg

SEQ ID NO: 57322 - DNA, 605 bp, Homo sapiens
  misc_feature 44: n = A,T,C or G
ccgggccccccctcggaagtcttctagaattaattaacgcgggnaaaatacaaaaattagcttagtgtggtggcacacgcctgtagtcttagctacttggaagactgaggcaggagagtcacttgaacccgtgaggcagagattgcagtgagccaagattataccactgcactccagcctgggagacagagcaagactccgtctaaaaaaaagaacaagagaaaactacagacatcattgcaataatttttaaccatattttagcaaatcaaatccagccatatataaaaagaataataaaccatcttggtagaaaacaacaagaaagtcatattatattttaatagattcagggccaagagctaataaataccggcagcctctggaagctggaaaaggaaacaaatggcctctagagcctccagaagaaacacagacctattggtgattttggacttttgacctacataactgtgaaatgataaatgagtgttgttttaagccactaattttctggttattttgttacatagcagttaaaaagatgagtatagattttggtacctggaattacgtgctgacacaacaaatgtctaaaaatgtgg

SEQ ID NO: 57323 - DNA, 537 bp, Homo sapiens
  misc_feature 16: n = A,T,C or G
cgggccccccctcggnagtcttctagaattaattaacgcgggtctccatgtggagggctagagttgactggagctgcatttttcccattccccagttaggtttggttctaagagaaataatttctcctgagggcaggccttgttaagaacagaataccttggtgtatttcaaaatgtttcacttctcccttctccagctgacagcgtaagaggatttttctcaaatatttactgtgaggacctggtagagctccaggaagtaaatctcacaaaactacgggggcttccttaggactggctctccctggagcttttaggtctcagacttgtccacactgagcctccagcaactcctcaattacagctcagattttcctacccgggtactggttccctcaggggtttctgatcctcggtttctgcttcagtagttgtgattctctgtatccagctgtctgtctctccagttttggaggatgtggtttgccctgtgacttcacttatctgaggaatctaagaagtgttgtctattcttca

SEQ ID NO: 57324 - DNA, 230 bp, Homo sapiens
cggggccccccctcggggtacttctagaattaattaacgcgggatatgttgctataataaagaagtgttctgcattaaaaaaaaaaaaaaaaaaaaaaaaaaaaaaaaaaaaaaaaaaaaaaaaaaaaaaaaaaaaaaaaaaaaaaaaaaaaaaaaaaaaaaaaaaaaagggggccccccccgggggggacccccatttccccctttagggagtcgttttcccccccctc

SEQ ID NO: 57325 - DNA, 511 bp, Homo sapiens
  misc_feature 475: n = A,T,C or G
cgggccccccctcggggtacttctagaattaattaacgcgggctccccagaagccgagcagatgccagtgccttgactgtacagtttgcagaatcatgagcagattaaacctcttttttttaaaaataaattatccagtctcaggtatttctttatagtaatgcaagaacagcctagaacatgtactgtattttaaagtcatttgaaatagctcttggccaggctcagtggctcatacctgtaatcccagcactttgggaggctgaggcgggtgcatcacttgaggtcaggagttctagactagcctggccaacatggtgaaaccccgtttctacaaaaaaaacaaaaattagccaggtgtggtggcacatgcctgtggttctagctactctggaggctgaggcaggagaatcgcttgaacacaggaggcagaggttgcagtgagtcgagatcgcaccactgcacttcagcctgngcagcaaagtgagattcatctcaaaaaaaaaaaaaa

SEQ ID NO: 57326 - DNA, 599 bp, Homo sapiens
ggccccccctcggaagtcttctagaattaattaacgcggggaataatggatagaattcaagcagttcatgaacttaaatgagcaaaaaacaattacaatgtattcactaacctctaagtgacgcttagcatttctttcaattataaatacaggcaacaaatcacagtggtattagcaatactggtgatttttgtcatcaatagagatcacattacagttgctacgggtatatttaaacatcatttatggtcatcactgcttcaaaactactgaagtcattaaacacacaataataacattttatttaatgttaataaagaaccataaattactcttactttcaaatattttgataactgaatttcaatataattggatttctttgtaattcttttatgtttacacctgagaagggccctacaagcttcacaaaatgggcaaaggggtctacagtaccaagaaattaagaaccctgcactctttcgtagagcactttacactatgcacagcactttctagtacatgttatgtcacttgaggcccacaaagttcttttgaggtaggattcatctgactgtatcacaatctcagagaacctg

SEQ ID NO: 57327 - DNA, 492 bp, Homo sapiens
  misc_feature 24, 450, 473, 490: n = A,T,C or G
gccccccctcgaaagtcttctagnattaattaacgcgggtttatagctattttaaatcaatcaatcaatcaatatttttaaattatcaggtttaattcctaacattgtaagtattgatatagatataacccacagagacaaaaactctttgggatccttaatttttaagagtgtaaaggagctggaagtggtggctcacccctgtaatcccagcactctgggaggccagggcaggtggatcacttgaggtcaggaatttgagaccagcttgggcaacaaagagagacccctgcctctacacaaaatacaaaaattagctgggtggggtggcacacacctatagtcccagctactcaagagaccaaggtgggaggattgcttgagcctgggaggtgaaggttgcagttagcaaggtggaggttgagatcgtgccactgcactgcaacctgngtgacagagccagaccctatctncaaaaaaaaaaaaaaanaa

SEQ ID NO: 57328 - DNA, 504 bp, Homo sapiens
  misc_feature 480, 486: n = A,T,C or G
ctgggtaccgggcccccccctcgaaagtcttctagaattaattaacgcgggggacagggtaagtcagtctttgttctattaagtccatcaactgattagatgagatccacccacattatggagtgcaatgtgcttggctcaaaatccaccaatttcaatgttaatctgatccaagaaacacccctacagaaatgtgcatatggccaggctcagtggcccacgcctataatcccagcactttgggaggccgaggcgtgtggatcacaaggtcaggggatcgagaccatgctggctaacatggtgaaacctcctctgtactaaaaatacacaaaaaaattagaaaaaattagccaggtgtggtggcaggcgcctgtagtcccagtactggggaggctgaggcaggagaatggcgtgaacccagaagcagagcttgcagtgagccgagatcgcgccactgcactcagcctgggctacagagcnagactncatctcaaaaaaaaaaaa

SEQ ID NO: 57329 - DNA, 557 bp, Homo sapiens
  misc_feature 28, 53: n = A,T,C or G
ccgggccccccctcggtagtcttctagnaattaattaacgcgggcccacccanaccgataatctggttcagccagttctgtgatcccacccaggaacagaagacagcaagaaaacctcacttcgaccccctgtgattccatctccaacctgaccagtcaacactctccactttgccagccaccaaattatctttaaaaactttgacccctgaatgcttggggagactgatttgagtaataataacactccagtctcctatgcagctggctctgtgtatattactctttctccattgcagttcccctgtcttgatagatcggctctgtctaggcagtgggcaaggttaacctgtttggtggttccagtgcacctctgaagagtatggagattgaccaaaatgtgacacagaggaactttctgggtgatggaagtgtcctgtatcttgttttgggtagtcttcatgtgaatatttacaactgtcaaaacccattgaactatacacattagatatgtgcgttttattttactccttgttttttaaaaaaagaaaaatatg

SEQ ID NO: 57330 - DNA, 366 bp, Homo sapiens
  misc_feature 25, 38: n = A,T,C or G
ctggggtaccgggcccccccctcgnaggtacttctagnattaattaacgcgggcagaagaaaaccgaagttaaaaaaagctaatagcaacagcagagcaggtctaaaattatcagttcacactccttcttgaacccaactccgatgggtggacaaatattctctgcaaatgtccagatagcattgtcagccataagacctctgttgaatcttctcaattttgccatcgtagcatgaaagcagccatgggcactagggaggtaaatgggcacaaatgcatttgttgtactgtaggctcgatgtggttcatgggcgttagtttgcgaaacacctagctgtttaatgtcaccccaaaaaaaaaaaaaaa

SEQ ID NO: 57331 - DNA, 546 bp, Homo sapiens
ccccccctcggggtacttctagaattaattaacgcggggctaagatgtatttcacaatcccatctgtgagcatggagcaaggagagacacatcgactgcctctctgccagggatatgtcacaatcttccctgaaagcatgaacccagctggagagtcccatcacccaggtgcttggccaaagatatgttacgacccccttctgagagcagggaactggcagcagaagagtcaaacccctggatactgggcccagcaatatattccaatgctccctgtgggcaaggccaaatgagaagagacacatcacctggttgctgggccctgcgatatattgcaatcttccatttgggcagcatgcatgaaaaagagggaaatcacatccccaaggtgatggatgcagacatatgtcacaagggctactgtagacagggcccaggaaaagtctctcatcccttgggtgttcagctcagcaatatgtcacaatacccaaaatatgcaggctccaggcaaaaaaaaaaaaaaaaaaaaaaaaagcggccgccacc

SEQ ID NO: 57332 - DNA, 526 bp, Homo sapiens
  misc_feature 504, 513: n = A,T,C or G
cccctcgagagtcttctagaattaattaacgcgggggagagagagagaagaaaagatactaatatcagaaatcaaagaggagacattactaacataaaatgacactaaaaggataacaagaaatcttatgaaaaactctatgtccacaggtttgataatcaatataaaatagaacaattctttgaaaatataatttttcaaaactttcacaagaataaaacaatttgcaataggtctatctctattaaagctatttagtcaatagctaataactttctgtaacagaaaactacatctacatgagttcagtaatgaattgcaaacatttaaggaataaatcacattggttacctacaatttcttccagaagacagaagcagaaggaataatttctaattcattctatgaggccggtattatcttaatatgaataaaaacagaaaaaagacattgcaaggaaagtaaactaagaaacaatatccctgctcaagagcatagattcanactcctcanaaaaaaaaaaaaa

SEQ ID NO: 57333 - DNA, 567 bp, Homo sapiens
  misc_feature 531: n = A,T,C or G
cccccctgcgggagtcttctagaattaattaacgcgggtagataccagggacctagaacatggctactgccactgcactactccaggtggaagaagggagaccaggtgttcccatgcacctctgggaggatccctactgctctgctatgaactgctgtgagattgaggctagagcaaaccacattcttcacatcttcttgtctatgctgctcacttgagaatggccctgccctctctggtgacaagcccacagatggcaccattttgaacatttaatgctgggctatgccctgtgttctggccaagtttcaggtgacacagctgcagctgccagtccacctagggaggaacagcacacttaggacaatacccactgccctgctatgggtagctctgggactgaggaccagcacacccaactcttcacagcaatactgacgtggactgcttgggtcccagtggattgctccaccaccactactgccatcatcatgcaacactagctgcccaaaggcctgagaatgcaccctnacaccacactcaccttctaagcaagccaaatccctg

SEQ ID NO: 57334 - DNA, 559 bp, Homo sapiens
ccgggccccccctcgaaagtcttctagaattaattaacgcgggatgcttgtagtcctagcttctcaggaggctgaggcaggaggatagcttaagcccggatggcgccactgcattccagcctgggcgacagagcaaggccctgtctcaaaaaaaaaaaaaaggtatatccctgccccataaaatgcatacaacaaatgctcactacacagctttatggattaagagtcaggaagtcttttctttttactgaaattaacttttaaaagtgtcaataggccgggtgaggtggctcactcctgtaagcccagcactttgggaggccaaggcgggcggatcacagggtcaggagtttgagaccagcctgtccaatatgttgaaaccccgtctctactaaaaatacaaaaattagccgggcatggtggcaggcacctgtagtcccagctagaagcaggagaattgcttgaacccgtgaggcagaggttgcagtgagccaagattgtgccactgcactccagcctgggagacaaagcaagactccatctcaaaaaaaaaaaaaaa

SEQ ID NO: 57335 - DNA, 523 bp, Homo sapiens
cgggccccccctcggggtacttctagaattaattaagcggggtgttagccaggatgggtctcgatatcctgacctcgtgatccgcccgcctcggcctcccaaagtgctgggattacaggcgtgagccactgcacccggcctacaactagcccttaattccctctccagccacctctctctagtctctggccaaatcccttactttagccaaatcagtccattcatttttcccaaacatctggccctctgccttcacctcctttctcacttgtttaaaaatcccactccaagatctagctcaagtttcaccttcttcacaaagctgcctgtgccctctgcaactacacggacttttatagtagttccccacctcggtggctcatttaggtctgcaagcacaactcatttaacacctcccactcattcccttgtattgctatatatcttgtttattcgtgtaatatttaatattaaaaattatttttataacctgagaagtaacatctgagcaggaaaaaaatat

SEQ ID NO: 57336 - DNA, 490 bp, Homo sapiens
  misc_feature 460: n = A,T,C or G
acttctagaattaattaaaaaataaataaataaaataaaaatgtatgccaataccatgcattctgtagcttaattgaatgtcagactgcagttactctgtattttgtgtgtctgtgtatatatacacatatacacaacatacatgagtatgcatacaaatacaaacatttttaaaggacatcgttgttaaaagttaaagtagctagctggatccttatctcccttttcctgctctccattaatttttagttttttcttaagatcattttatttgaaaaatatcagaaaagcatacacaaaaaaagtatcactcataattatcactttttttggaagtatacctaataagaagtaaaagttccttactctaacccctctaaacccaattctagatgaaattgccactaaaatcaatgcgtttttcctatgtataaaaatatatacacattttaattatttntattctttaaaagggcagggtcttgctctg

SEQ ID NO: 57337 - DNA, 216 bp, Homo sapiens
tgggtaccgggcccccccctcgggggtacttctagaattaattaacgcgggggagggccgcgagggggggggtctttaagtctattgtttaactgtaccatccagagcccaccagaagctattgatcattaaaattatgagaatttcaaaaaaaaaaaaaaaaaaaaaaaaaaaaaaaaaaaaaaaaaaaaaaaaaaaaaaaaaaaaaaaaaaaaa

SEQ ID NO: 57338 - DNA, 560 bp, Homo sapiens
  misc_feature 31: n = A,T,C or G
taccggggccccccctcggggtacttctagnattaattaacgcgggtatcccataaatatgtacaattacgtgtccactaaaacggaaaagaggaaatgcagacattaagcaaagaaaaaatcccatttacaatagaatcaaaagaaaaaaaacacttaggaataaatctaaccaaagagatgaaagatctgaacacagaaaacaataaaataatgacaaaagaaattgaggggctgggcacagtggctcgcacctgtaatcccagcactttgggaggccgagggaggtggttcacttgaggtcaggaatttgagaccagcaaggccaacatggtgaaaccctgtctctactaaaaatacaaaaattagccaggcatggtagcaggcacctgtaatcccagctacttgggaggctaaggcaggagaatctcttgaacccgaaaggcagaagttgcagtgagctgaaaggtggaggttgcagtgagccaaaatataccactgtactccagcctgggcaacagagtgaggtagactctgtcctcaaaaaaaaaaaaaaagcg

SEQ ID NO: 57339 - DNA, 357 bp, Homo sapiens
cccccctcgagaagtcttctagaattaattaacgcggggtccttaagagtccagtggttagaaatgagatgcctgcagttagacctcttaacatcatcacggatatatttgtgtttaatcccagcactttgggaggccgaggcgggtggatcacctgaggtcaggaagggaaggagggaggggcaaatgaagaggaaaaagaaaatataaacatatatattacccctgggctgtacacttaaaaatggtaaagatggtaaattatatatgtgtattttacttcaataacaaatgatttttaaaaatcatgttgtataccttaaaaaaataaataaataaaaacaaaaaaaaaaaaaa

SEQ ID NO: 57340 - DNA, 554 bp, Homo sapiens
cgggtagtaagagaagagccatggagagcatcatttgtgtgccaacttgggaccattcagtcatccctcagcatccatggcggattggttcctggacctgcagtggatcccagaatctgagatgctcaagtgtctcacataaaatgctgtagtatttggatctaacctatgcacgtcctcccctgcactttaaatcatctctagtttacttataataccaaatgcaatgtaaatagttgttgtactgtactatttagggaataatgaccaggaaaaaaaaatgtctgtacatattcagcagatatgcagctatcctttttttctgaatattttcaatccgtggtttgttgaatgaggatgcggaactcatggatgcagaagaccagctgtgcttagaaaacatgcctcatggccgggtgcagtggcttacacctgtaatcccagcactttgggaggccgaggtgggcggatcacaagatcaggagatcaagaccatcctggccatctggtgaaaccccgtctctactcaaaaaaaaaaaaaaaagcggccgcca

SEQ ID NO: 57341 - DNA, 599 bp, Homo sapiens
  misc_feature 28, 71: n = A,T,C or G
ccgggccccccctcggggtacttctagnattaattaacgcggggcatctgactgtacatggacatccgggngtttgaggggctggggaaagacaagctggatgaaagattagagagggtaggggcagaagttgaggaacacaggttctgtaactggggtgaggtgccaagataaagggtcatgggaagagagagacgtaagttggagcctaaggacaagctctaagaaaggacctgaaggaatgggaggctggaagaggcaggggctgagattgggggcaggtggtaccttaaggcatagtattaatatatgattagggtatgagacccaatgacatatagtgaagactcttccaagggatgtgcaagcatggacatccttttaacaaattttgtattgaaatacaacatgcataggtaaaagtacacaaatcataagtatacaaaaagaaaatttttccccaggtcgaacactcagggcctggaccaagaaacattaccagcttcactacatggtgctcccatcgtcgatacgtgtgccacacattagaagacactcagaagaattagattgggtgggcataatcctcttagtaggga

SEQ ID NO: 57342 - DNA, 588 bp, Homo sapiens
  misc_feature 28, 554, 564: n = A,T,C or G
cgggcccccccctcggggtacttctagnattaattaacgcggggcccacctcttgcatcagcatgacctaatgtgagacatggagttaacctatttatgcctgaggttgcaattttttgaatttttgcatgagtgaaaaatctgaccttggcaatgaccttgagcagtaggatataaacaactcccacatgcttagcattccaataatggaacactaggcttaagtggatctaggcaggagatcattttggagctttaagatttaatgattgccctactggattttggacttgcatggggcctatagctcctttgttttggccaatttctcccatttggaaggggtgtattttcccaatgcctgtaccccctttatatctaggaagtaactagcttgtttttgattttataggctcataggtggaaaagacttgctttgtctcagatgagactttggacttggacttttgggctattactggaatggcctaagacttcaggggactgttcaaaatgcatgattgtgttttgaaatgtgaggacatgaggtttgngaggggtcangagtgggatgatatgggtttggct

SEQ ID NO: 57343 - DNA, 196 bp, Homo sapiens
ccgggcccccccctcggaaatacttctagaaataattaaagcggagggcgggtgaggatttccccatataccagtgtgtgttcatctacccatgaggaataaaaccatgcagcagcatgcaaaaaaaaaaaaaaaaaaaaaaaaaaaaaaaaaaaaaaaaaaaaaaaaaaaaaaaaaaagggaaaaaaaaaaaaaa

SEQ ID NO: 57344 - DNA, 599 bp, Homo sapiens
ccgggccccccctcggaagtcttctagaattaattaacgcggggggattacctagagtcagatgtattatccaaaggcctgcttctgaagcccctcttgcctcctctctctgcagccttcttgaaacacatcctaagcgtctgagtgctgcagtgtgacttcaccgaagaccagaccgcagagttcaaggaggccttccagctgtttgaccgaacaggtgatggcaagatcctgtacagccagtgtggggatgtgatgagggccctgggccagaaccctaccaacgccgaggtgctcaaggtcctggggaaccccaagagtgatgagatgaatgtgaaggtgctggactttgagcactttctgcccatgctgcagacagtggccaagaacaaggaccagggcacctatgaggattatgtcgaaggacttcgggtgtttgacaaggaaggaaatggcaccgtcatgggtgctgaaatccggcatgttcttgtcacactgggtgagaagatgacagaggaagaagtagagatgctggtggcagggcatgaggacagcaatggttgtatcaactatgaagcgtttgtgaggcatatcctgtc

SEQ ID NO: 57345 - DNA, 573 bp, Homo sapiens
  misc_feature 28, 46: n = A,T,C or G
cgggcccccccctcggggatcttctagnaattaattaacgcggggnaacacaaacattcagacctcagaaggcatttatcccaaaaaactaaaagtcatgttcaagcaaagccagaactatcaaatgtccttcaacaggttacactgattcatgtatatgatgaaatcctgctcagcaatataagaaataagctattgatacacaaaacaaatggatctcaaagaaattaggctgagaaaacagccaatctcaaaaacttatatcctgtgagatttcatttacatgacactattgaaataatttagagatggagaacagatgggtggttactaggagttagggatagcaggaagaaaggggagtggctataatgggctagcacaagagagccttttggtgctagaaccactccatattttaattatggtagtgattattacaaatctgaatgagttccgtggactgtactcatgtctattcctgatttttatattaaaatatagttatgcaagatgttaccatgaggcaaaactaagtgaaagatacatgggaacttccctgcacattttttg

SEQ ID NO: 57346 - DNA, 444 bp, Homo sapiens
  misc_feature 53: n = A,T,C or G
cccccctcggagtacttctaggattaattaacgcggggggggttgagcctggnaaaaaaaaaaaaaaaaaaaaaaaaaaaaaaaaaaaaaaaaaaaaaaaaaaaaaaaaaaaaaaacggccgccaaccgaggaggaaactccaataaaccctataatgagggggcctccccccgcggggagtgccccatttcccccaatgggggggattttaaacccccctccttggcccatctttttacaccttgcagaactggaaaatcccggcggttgcccaattaattaagatggccggaactcccctttcttccatcgggtgtataacctaaaaggcccacgcaaatcgccttcccaaatattgggccaacctgaaggggaaatggaatttaaacccgttaattttttaacaaattggccgaaaacggctggttccctcatcaattttt

SEQ ID NO: 57347 - DNA, 595 bp, Homo sapiens
cccccctcggaagtcttctagaattaattaacgcggggccagaagagggaaggcgcgagtgaggaaaggaggtactgtaggtaggttggttggctccttacagggcgaaggagaccaatatcattattcattttctcgccagtaggaacgtttcttttcacctcgttgcattacccaccttcttcattttctcctttataaactgtcttccgcccaggggccgctgagccctctgttcctgttctgcgaaccgtcctttggaggaaaggaacaggctgctggggaggggaagactcagaatttctagttcccagcaaagcctccaggcaggcagtatcgatgcgctctctccgaaattgataaaatagcgagcaggcctcataccctcagctgggcacttatgaatatccccagcgtttcgagctgtcgagctctgcgtggaaagaattggtttctaagaatatagtcgaaaatttggggccgggcgcggtggctgacgcctgtaatcccagcactttgggaggctgatgtgggcggatcacctgaggtcagaagttcgagaccatcctggccaacatggcgaaaacccatctat

SEQ ID NO: 57348 - DNA, 419 bp, Homo sapiens
cgggccccccctcggaagtcttctagaattaattaacgcggggtttttgtctccctcatcctggttcaatgcaccgccacctggacacttgcgactgccacctgaaggcggatctcttccctaaatccacacggctgtagagcggaaaataaggtcgtgggaacactatcacattcaccctgtgcttgaccaacatggggcgtctgcagcctatacagctgttcgcttatgaaaagagtcctatgctactgacgaaagtagaagggaaagagacggcttcttcacacactaaataccagacatccaatacctgaagcacagacccccaagcgcgtgtcccaggatgcttcttatcaccaactgtgatctcataaaactaacatactccccaaagcttatgttgctttagctgagaaaaa

SEQ ID NO: 57349 - DNA, 171 bp, Homo sapiens
cggggccccccctcgaaatacttctagaattaattaacgcgggcagcagctacaataccaagttctggcagttgcagtactagatattgtgcctgcaagtcataaaaaaaaaaaaaaaaaaaaaaaaaaaaaaaaaaaaaaaaaaaaaaaaaattaaaaaaaaaaaaaaaa

SEQ ID NO: 57350 - DNA, 478 bp, Homo sapiens
cccccctcgagagtcttctagaattaattaacgcggggagttgacaccagtggatggaattcatctacaaagaagcaggcaactacacaacttttttttggtaccacgtcaacctctgcttcagtattggcaggacagaataatcccataactgctctggttcaacaagggagaaactaaagggggaaccaaagagatggaaaatttcaaaccaccatcccagaatctcttggaactcaaggtaattctgaaaaaaaaaaaaaaaaaaatctacccatttatgagttaataagtgtaccaaataattttgagcacttgctatgcgcctgccattaatctagagactagagacagaggagtaaacagaatagaaaagattctgcattcctgtagtttacattcttgtggggggagataaacaataaaccaggaaataaatactttcagataattatatgtactaaaaaaaaaaaaaaaa

SEQ ID NO: 57351 - DNA, 618 bp, Homo sapiens
  misc_feature 12, 28: n = A,T,C or G
cgggccctcccntcggggtacttctagnattaattaacgcgggctactggggaggctgaggaaggagaatggcatgaacccaggaggcagagcttgcagtgagccgagatcgcgccactgcactccatcctgggtgactgagcaagactccgtctcaaaataaataaataaataaaataaaacaaaaaatatattattttaagaaattttatgtactttccaagataccagaaaaaagtatctctatagatacgccaaaaaataagaagtaaaggtgtatcagtacgaaaatcaaaaagacactaaggaagacagaaaaagaaaataaggggcaaaaatgaaataatccagcaaaaaaatcaataaaacgtgtaagtctatttcagcaaattattcaaatatttatgaagtttccattcgaaatacatgcaccaaatgaagggattgattgcaaaaattaacatgatccagcttgcttttctacaggagtcacttgagatgtaataattaaaaaagactgaaaaaggaaagaagacatttgatgcaaataaccaaattatataacacaaagtacatcttaagtcaaaactatcctatttcataaaatatactttaact

SEQ ID NO: 57352 - DNA, 453 bp, Homo sapiens
ccccctgcggggtacttctagaattaattaacgcggggtgaaggagaggggcactggaatgaggtgtctggctatctgaacgaaaggcctagctactgaacccacatttacatgcctggcattagttcacatgctacagaactgctcaaattgaggacagcaattaagacacacgttatttcttacgcataacagatttaaaagttgtatccagcatctactttattcttcttactactgacatgaatcacacttaaaatactctctcgggttgcgtatatctatgtgataattagtaacacagtcaatctagattattttttctttttcctctgaattcaagttaaacttggctcagcaagccaggtcttgaccaacatgacacctacaacgtaagatggttaatttagctctctaaggtaaccagttatatcatgaaagcccaaacttact

SEQ ID NO: 57353 - DNA, 605 bp, Homo sapiens
  misc_feature 577: n = A,T,C or G
cccccctcggggtacttctagaattaattaacgcgggggggggattgggtactggcccagatgcagagattggcaaaagtgagagcatataagaatttgtaagttgttggggctcggaaaccgataccccaaaatatggtgctttgacatactgaagcgaagaacactcaaggtttctctgaccttctccctcaccccatctttcccaaagaagttacagtttctttatctgcctgagatccagacacactaagtaaggcacatcaaggacgactcttttttcttccctttcctgtaaaaccaacagtgtagccacacttgaacagaccttttcacaagataatgtacacgttaatatctgttccctaatccatccattctccctaaaaatcccctcaacagaactcctcttcccccactcccataatctgttttgccaggacgacatatacacttaggcaccaccttgcggggagagcaattactcagtggttgcactgagtaatacacagcaaatttgtaaataccctgtgtatataccctgtgaatatacagcaaataaacttgtatgcctttntacccactaatctgccttttgcaagttg

SEQ ID NO: 57354 - DNA, 422 bp, Homo sapiens
  misc_feature 50: n = A,T,C or G
cggggccccccctcgaaagtacttctagaattaattaacgcggggggggngagagcatcaggaaaaattgctaatgtgtgttgggcttaatacctaggtgatggattgataggtacagcaaaccaccatggcacacatttacctacataacaaacctgcaggtcccgcacatgtatcccagaacttaaaataaaaataaaaattaaaaaaattaaaaaaaaaagaaaatttggcattttaggtgtcatatggtagcaactagatattgatttcccttctctctctgaggcttttttgttgttgttgtcatttgcttgtttagtgacttgattaaactattttactgaaatctaaaaataaaaataaaagcatcaagtacttagtaataaatcctaatagtggagtataaaaaaaaaaaaaaa

SEQ ID NO: 57355 - DNA, 469 bp, Homo sapiens
ccccccctcgaaagtcttctagaattaattaacgcggggggttctgggcatggtaagaggcccacgacaaacatccatctgagcaaagcaactagattgcctatgtcaccagacctggcaatagaatgtccagggacacctcccctggcacctctgaccggatgcatgccatggactcagatgcgttccgttctttttactcagtttcactcgaccagaggaggagtttcctggtacattgtgaagtatggttgaacatgggactgagctgcagtggccagtggagataaaggcttcaatgggagtggctgaccccagcactttggtggggtctgaatgaggccaatagaggaatatttagttcacaaagaatcaatatgctaaatggtctactagtggccttagaaaatccatgcgctcattccacgtgcctacttcagcctcataaattaatgtgcgcctatgggac

SEQ ID NO: 57356 - DNA, 622 bp, Homo sapiens
  misc_feature 22, 35: n = A,T,C or G
gggtaccgggcccccccctcgngggtacttctagnattaattaacgcggggatccagtagagaggggtttcctttcacagaaaaccatggcagttaggaagcaactcaggcactgtttatctccgcgagggtcctcagtgaattgagtcgttccaaagatgaataaagattccttgtttccagaaaatggaaggaaatctcacagtgctggagggaataggggaagcagagataatccattctcatctttcatatttgactatgaaaaagaattggtattttaaacaaacttagaacttcaccagatgtgggtttttagatttgagacacaacactttctagctgcttccagccatagtaaaatcataaaaacaaagctacccagaacagagtttgcttgcttcttggatatgcagacttaatgtcatgaagatgccaatttcccaccagatcactagaaaaattaatgcaatcctatgaaaaatatttactttttagacaaagtgattttaaagttcatttgaaagaataagtaataatgctagaaaaattcagaaaaaaaaaatgagccaccaccagatattaaagccacaataattaaaactgtgtggtacttatgcct

SEQ ID NO: 57357 - DNA, 589 bp, Homo sapiens
cgggcccccccctcgaaatacttctagaattaattaacgcgggtattacattaaagcatgtctttccaatgctgattttgctcagagttttaatcacaaagggatgctggattttgtcaaatgctttttctgtgtctattgagatggtcatgtaattattttttttaaatctgtttatatggtgtatcacgtttattaacttggatatgttgatccatcccagcatctctggtatgaaacccactggatcatggtcaattatctttttgatatactgttggatttggttagctagtattttgttgaggatttttgcatctactttcatcagagatattgttctatagttttctttttttttttgttatgtcctttactggttttggtattaggttgatacctgcttcagagaatgatttagggaagattctctttctctatcttgtagaatagcatcattgactcttccagtgactcttctccctgtaatatctacaggtgtccttatttatgagctcttgattcttagaaaataaaagaccttttgttcctttcatttcaggagctaatggttctacctaaatagcta

SEQ ID NO: 57358 - DNA, 597 bp, Homo sapiens
cgggccccccctcggaagtcttctagaattaattaacgcgggatccccattttataggttaagtaactagctcaagtcacacagtgggtggcagagccaggataggatcccaaggagcctagctccagagcctactcccttaaccacaaagctacactctttctctaggcttctaactcagttctgccatgaaccagcttgcgaacttgactgctatggcctcttccagcacaggcgggtagtctaaagttctctcattataggtaagggctagatgagctagtactgtgattactctgagaatttgctaagaatactcttaagtggttgaagagtagaaacttcaaagacaaatgagtagctatgggctcagaaagcatgattagaggagacagatccgtaaactcaaatagtaatcaaatggctgcagatcacggaaagaaacttttaactataagctaaacattgaatctaactataatccttccctaaatcataaaagtgctgacttcctaaactagaatattaactttccaaacataagacaaactagtcaacaatttatatatgggcctggcgcagtggcttatgcctgta

SEQ ID NO: 57359 - DNA, 421 bp, Homo sapiens
ccccccctcggaagtcttctagaattaattaacgcgggtcccttcatcctcgctttgttctgtgattttccgctcccttcacaggtctcactcagaatgggtctttcccaggccgggcgcggtggttcacgcctgtaatcccagcactttgggaagccgaggcgggcggatcacgaggtcaggagatcgagaccatcctggccaacatagtgaaacgccgtctctactaaaacacacaaaattaaccaggcgtggtggtggcacctgtagtcccagctgctcaagaggctgagcacgggaatcgcttgaacccgggaggccgaggttgcagtgagccgagatcgtgccactgcactccagcctgggccactgcactccagcctgggcaacagagtgagactccgtctcaaaaaaaaaaaaa

SEQ ID NO: 57360 - DNA, 573 bp, Homo sapiens
ccctcggaagtcttctagaattaattaatgcgttgaataacaagatctagtggtgttacaggaaaggagtcctgattgagacccccagagagggttcttggatctcccacaagaaagaattcagggtgagtccatagagtaaaatgaaagtaagtttattaagaaagtaaaggaatagaagaatggctattccatagacagggcagcccagagggctactggttacacatttttatgcttatttcttgattatatgctaaacaaggggtggattattcatgcatcccccttttagatcatatagggtaactacctgaccttgccatgggatctgtaaactgtcatggcggtgggcggagtgtagcagtgaggacgactgtaggtcactctcattgccatattggttttggtgggttttagccagcttctttgctgcaacctgttttatcaggaaggtctttacgacccgtatcttgtgccaacctcctatctcatcctgtgacttagaatgctttaaccgtctgggaatgcagcccagtaggtctcagcctcattttacctagctcctgttta

SEQ ID NO: 57361 - DNA, 346 bp, Homo sapiens
cccccctcgaaagtacttctagaattaattaacgcgggaacaaatgatctctcagcaaggtgagctttacttcctgcagaagggtgctactcaatagctgtccagccacgagaccccgccaaactaaggagacagagttattaaaccattcaaatctcaaaaaaaaaaaaaaaaaaaaaaaaaaaaaaaaaaaaaaaaaaaaaaaaaaaaaaaaaaaaaaaaaaaaaaaaaaaaaaaaaaaagaggagggacacccccaaaaaaaaaaaaaaaaaaaaaaaaggaaaataaaaaaagccccgccccccccccgggggggaaaaaaaaaaaccctattaaaaaaaaa

SEQ ID NO: 57362 - DNA, 560 bp, Homo sapiens
  misc_feature 503: n = A,T,C or G
ggccccccctcgaaagtcttctagaattaattaacgcgggtccccttctcacgggctgctgacagtgatgagaaggatgttaaagccaatacttaaaatggcagcactgccatcaaccagggtcctgaattactgaatggggcagagtgatccagggcaggtcaggtttgcaacataataaaacataataaaaattgttgcaaatttgacctgggagagaaaaatctttttgcttcacaaccttctaagacgttaacattcctgataaaatgcttaagcaattttctgtgaactttaataggattaaggtttgctctggaaaaccaattacctacatgcccaattacccacacactcagtggccaactgtcaatcaagagcctagtgacctttaaccagactttcttttctttctgtgtctagtctaacaatgattatctaaccatcctcttttcctataaaatgtccctgccaaaagtgaattgcggaggtggacttctcangtccatttcccttctcacatgatcataataaaactttagtacatgctcacaccaaat

SEQ ID NO: 57363 - DNA, 446 bp, Homo sapiens
ccgggccccccctcggaagtcttctagaattaattaacgcggggcacatactatttgggttcctgattaaacaagatgattgaacaatgctttttactcttttctttcctgataccccacagtaaagaataagaaaagtataaaaccggccagcgcagtggctaacacttgtaatcccagcactttgggaggccaaggtgggtggatcacctgaggtcaggagttcgagaccagtctgggcaacatgctgaaaccccatctctactaaaaatacaaaaattagccagatgtggtggtacatgcctgtaatcgcagctacttgtgaggctgaggcaggagaatcacttgaacctaggaggcggaggttacagtgagctgagattgtgccactgcactccagcctggttgttgacagagcaaggctctgtctcaaaaaaaaaaaaaaa

SEQ ID NO: 57364 - DNA, 254 bp, Homo sapiens
  misc_feature 42: n = A,T,C or G
aagactgggttaccgggcccccccctcgggggtacttctagnattaattaacgcgggagagtgagcgtgaggccaggaggcgatagagaaaagggaaattagaagaaaaaacatacttttagaagaaaaaagataaatttaaacctgaaaagtaggaagcagaagaaaaaagacaagctaggaaacaaaaagctaagggcaaaatgtacaaacttagaagaaaattggaagatagaaacaaaaaaaaaaaaaaa

SEQ ID NO: 57365 - DNA, 600 bp, Homo sapiens
  misc_feature 24, 139: n = A,T,C or G
gccccccctcggaagtcttctagnaattaattaacgcgggacactgcacattctttaggatctcttaaaggtaatcatctatctgacagactttcagagatgaagcaacacctgccaggacagactatttcacacttgngaaaaatacaatgatgtacaaatttctttcatgtttgaataaaacctattcccatacattttcacctatggagacaaagtataactttaaattttaaaaaatcactcaaaaataaaagttactaaatatgtatcaataacatagtaactggagatcatgaccattttgtcttatctacagaacatgcacatcctacttaggcaagtaaaatacttagcctatagataatcaacttagaataaagcctcagttttatacaaaatactaacatatcataaaatttagtacatgggttgttaagaataatatccttaatgtatggcattattaataaattctgataagcctcatttaaattattgcataatatgtacatgaaacacacatgagtatctatatgctatattagcagatatgtatacacacatacccctacacatatatggatatattaatagatg

SEQ ID NO: 57366 - DNA, 624 bp, Homo sapiens
  misc_feature 575, 597: n = A,T,C or G
cgggccccccctcggaagtcttctagaattaattaacgcgggggtacagatgaggttgaatccatgtctcagagtccatctgtggccatggcaagcctgaaaaagtgcccagtagtgctattgaggggcactgtggattccccataaaagtaaagaaaaatcaagacttgtctgagagaacaagctaacttattcaacttgttctggagtccaagccatgttccatgattcttgtcagagtaacagaaagcctcctgcaaagtgcaaacaatctcagcacctgcaaggagacaatgacccacgacttgaaaaccagccagcctatccaaactccctttcattctctgaagtccctgacagataaatagtctagggtgataggcattcccatccagcaacagctcaataaaaaatcccctccacattgagacggtagtgcagattaaatgaaacagaggttagatcagcaggcaaaggccaggcatggctgcctgcttctcattctacaggaatcatgctgccctttgatagaaatgggagacaaagtttccttgtttgtgactgtaatgggaatntatggttttaaaattattgaangtgcccagtcattaaaacatgacagtg

SEQ ID NO: 57367 - DNA, 592 bp, Homo sapiens
  misc_feature 573: n = A,T,C or G
ccgggccccccctcgaaagtcttctagaattaattaacgcggggacacaattcacagaacaatatgataggatacaatgtaagagcttctcctgcactctcccagtcttgttcttgagttttcaccctcccaggcttacccactatttctgctcttctccctcaaattttcatcttacagtctttactgtttcacaatgcaaaccctagtaaatcataaaatcactcacaggccaaataaaaacagtagctatttttgattaagcattggacaaagtatgatctgctttagaagtcctgcttctggctgcctcccaatcttttgtttgtatgtttcaatcaagacatctgctgtctagtgttatttcagataataatcttaatattaagaaatgattcagaatatccagccataccaaagcaaaaaggcagcatacaatctcttaagagaagacataattaagttaaggaaaacagagagttgccattttttaagagtgaatatgcatgtccaaattacttcaattagcataaccacatctttccagaacagttggctaatatcatggccctnctcattaggattcaacttc

SEQ ID NO: 57368 - DNA, 497 bp, Homo sapiens
  misc_feature 28, 485: n = A,T,C or G
cgggcccccccctcggggtacttctagnattaattaacgcggggcatactcagaaaattcctgagaggactaagctttcaccttgagctagtttataagtgcaatgcaagtctggctaagtgctgaaggagtacccacacacacaaccaatcaggaaagatgagtagaggtggtttttgtttgtttatttgtttgtttttagctccttgtatttcagaaactctgtgtcaaaattctcactgaacacaatttaaggaacagagacttcagtgaccatacaggacaagatatagtctttgcagaagtagcttggaaaagtaagtaaaccaaaatactactaagaattttaacaataagaaaaaattgctgggcacagtggctcacgcctgtaatcccagcactttgggaggccaaggcaggtggatcacgaggtcaggaaattgagaccatcctggccaacacagatgaaacccatctctactaanaaaaaaaaaaag

SEQ ID NO: 57369 - DNA, 382 bp, Homo sapiens
ccgggccccccctcggaagtcttctagaattaattaacgcgggggagggcttctcataacaaaaactatcacaaaagactctgcaaaccccacaatgttgcacaaagatcatcataacctttcaaaaaaaaaaaaacacttctgctaggacagctgccagcaactgcctgtcgaaacttggactgatgccaccctgttattgatccttacagccaaggagaattatcgcaaaacaattatgtaatcctcctcattcttcctgtgtcaactttcatcttcctttacctccccaaatacaaacataatttactatgacacccgtattcccattgcaatgccctatccccaaataaatgtcattttcctttaaaaaaaaaaaaaa

SEQ ID NO: 57370 - DNA, 596 bp, Homo sapiens
  misc_feature 569: n = A,T,C or G
cccccctcgggggtacttctagaattaattaacgaggggcacacagagaaaataggaaacctgccctacttgaagaaacaaatctccagaaactgacccttaaaaaagggagatttttgcatttttttgacaaagaatttaaagtaatcatcttaaacatgttcaatgaccaaaagtagaacacatatagataactctacaaaatcaggttgggcatggtgacaagagcattatggtttacataaagtaaaatactctccttgttgttcatttaaaaataaatcctggctatgtacagaagctcacacctggaattccagcattttggaaggctgaggtgggagaactgcttgagaccgagttcaagaccagcttgagtaacacggtgagactgtctctacaatttttttttttaaattagccaggcatggtggtatatgcttatagtcccagctacttagaaggctgaggtggaaggatcacttgagctgaggagtttgaagctacagtgagctatgatcataccgctacacaccaccagcctggatgagagagtgaaaccctgtttntaaaaaaaaaaaaccaaaaaaaaaaaa

SEQ ID NO: 57371 - DNA, 568 bp, Homo sapiens
cgggccccccctcgaaagtcttctagaattaattaacgcgggcacctaaggtactagagaaacaaaaactaacaagaagtaaataaataaacaaaatgagatcagatttaaatgaaattgagaccccccaaaaaatcatgcaaagaactaacaaaacaaaagttggtttgagaggataaacaaggtggatagactgttagttagatttacaaagaaaaaaaagaagatacaaataagcacaatctgaaattggaacagtatagagaagagactcagtcttggcagatgagggatatgataaccaagaccccacgaatctcacatgtccaggaagattccctcccttactttcttgcctcccttaacaagctgacccatgtaatgcaggagaaagctaccctgtcctaacctaactgactaggctaatttcctaaccataaaggaagagcataaccatttatctcctcaagtgatgcctcccaaggttggcagagcaggactctagcattcctgataagaactgattatctttccaatttactgaagtgagactctggcatttctcata

SEQ ID NO: 57372 - DNA, 542 bp, Homo sapiens
  misc_feature 472: n = A,T,C or G
cccccctcggaagtcttctagaattaattaacgcggggtggattattcaggccttccctttgtagaccatacagagtaaacttcctgacatcgccatggcatttgtaaactgtcatggcactgatgggagtcagcagtgaggacaaccagtggtcagtctcatcgccatcttggttttggtgggttttagccagcttctttactgcaacccgttttatcagcaaggtttttatgacctgtatcttgtgctgacctcctatctcatcctgtgacttagaatgcctaacctcagggaatacagcccagtaggcctcagccttattttactcagctcctatttgagatggactcacctatttgaggtgttttggttaaaacacctctgacagccattttctagaaccattttctagaacttacagtgttactacaaggaaatcattgtccacttgttctctctgctaaagctcanacaaaagaacatgagcataagttacattggaaagaagagttgctcagacaagttgatcatgatccccctg

SEQ ID NO: 57373 - DNA, 587 bp, Homo sapiens
cccccctcggaagtcttctagaattaattaacgcggggattaagagattgacacttctgttgcctaggacctcccaactcaaccatttctaggtgaaggcagaaaaatccacattagttactcctcttcagacatttcagctgagataacaaatcttttggaattttttcacccatagaaagagtggtagatatttgaatttagcaggtggagtttcatagtaaaaacagcttttgactcagctttgatttatcctcatttgatttggccagaaagtaggtaatatgcattgattggcttctgattccaattcagtatagcaaggtgctaggttttttcctttccccacctgtctcttagcctggggaattaaatgagaagccttagaatgggtggcccttgtgacctgaaacacttcccacataagctacttaacaagattgtcatggagctgcagattccattgcccaccaaagactagaacacacacatatccatacaccaaaggaaagacaattctgaaatgctgtttctctggtggttccctctctggctgctgcctcacagtatgggaacctgtactctgc

SEQ ID NO: 57374 - DNA, 568 bp, Homo sapiens
cccccctcgagagtcttctagaattaattaacgcgggttctacctttgcttttaaaagcaaagactgaaagtttcatagtattcttattattaaataacggaagtgtctctgtgtgtgtgtgtgggtgtgggtgtaatctattaatctgtttgtatctttatatgtaaagtgagtatcttatacgtaatataaagttgtgtattgttttccatccattctgctagtcattgtctcttaattggcaattttagactattcacatttcaagtgatcattgtatagttggattaatatctattatctttgtaagcactctctatacttcttctttgtttcttcttttctaattttcccttttccgcctttcgtggttttaaataagtatcttatatgattcgatttttctagtatatacatagtatttggcacattatggagtagaaaggagactttctgtgctttaaaaaaaatgaagtaagagaaattagtgtaaactatgtggcttgaacaggctaattcgccagaaaaactgtagttgtactacagacaactgctctggatgattct

SEQ ID NO: 57375 - DNA, 623 bp, Homo sapiens
  misc_feature 28, 613: n = A,T,C or G
cgggcccccccctcggggtacttctagnattaattaacgccgggcctcccacctcagctttccgagtagctgcgactacgtggcacacatcaccatattcacctaatgcttacataaatgttgaaagtgcagtataaagctgttttatttcctgatctatttgagattaagttgccaacaagatatgctatcagccctgaatattttagtgtgtatttcataaaaacaaagacattctcatgcacaaccactgtacagccatcaaaatcaggaaattatcattgatacactactaccatctaatccccagacctgatgtaagtttcttcagttttccaatactcttcatcagagcaaagtgattcaggtcaggattatgtgctgtattatttgtctttttagctgctttcagagtggaacagtttctcagtcttgccttggctttcatgatcttaacacttttaaagattacaggatcaatccacaatttggatcttctaattttcttcatgattaggtgaaaattatgcatctttggcaagtaatcagaaatgtgttgcattcttattgcagcctatgagatgcacatgatttttatttgttctatataatnattatgagac

SEQ ID NO: 57376 - DNA, 608 bp, Homo sapiens
  misc_feature 16, 29, 68, 535, 553: n = A,T,C or G
cggggccccccctcgngaatacttctagnattaattaacgcgggtggtgagaactgacaaaaactggnaaaaatgagagtgaaggatgatgaagagggtatgcagtcagggaatatctgactaggagtcaggaaataaggcaaaatgagccaacaagaagcattgtcagagggtgggtgatacagcaatccctgcccccttcacccttagccaacattctagcctcagttttcctcccccggcatgtcatccttctcctttgggaatgctcatcacctttactatctgctacccccaccagaccatcggctgcatgagagcatggactgtatctctgttctggtcactgcagatcctgtgcaactagcaacacagactctcaataatatggctggatgtgcaaaacatgtattccccctttgatccagaaaaatgagggaggaccgggcatggtggctcacacctgtaactcccagcacttgtggaggccaaggctggaggatcgcttaagcccagaagttcaagaccagcctgngcaacagagccagacccnctctctacaaaaaatacacaaattagctgggtgtggtggtgaacactcgtagtcc

SEQ ID NO: 57377 - DNA, 575 bp, Homo sapiens
  misc_feature 34: n = A,T,C or G
gggtaccggggccccccctcggggtacttctagnattaattaacgcggggagggcctccgtttccatgatgttagagaggcggaactaactctgcctcaaatccagggaggcagcagcccctgtcccaaccgctctctggcttcgacacagcgcccaagcaaaggtgagagcactcttgtcttcctcaccaggtggatgcggagggcagcgctggatttcccgggggagcattccaggtttagtccctacctggccggagtctaattcctggccttaatcctgtctgtcatgttccctagctgactacctgtcttcaagcgacctcttgggattgacataggcggaaacagtgccttcaactcagagaaagcccctttgtggactgaccattcccactcttactgcgcttgaatccttgggaagtgagtttggcagaagatacgatctaaaagagaagtctcccccttttctttttgaagtcattggaaactgtgtggagacagtatagtatggtggtgagggcactggcttgagagcccgagcacatggttctgtctcagctttgccaactcta

SEQ ID NO: 57378 - DNA, 602 bp, Homo sapiens
  misc_feature 32: n = A,T,C or G
gtaccgggcccccccctcggggtacttctagnattaattaacgcgggggggggaaggagaaagaatgaattaagtaagcatcacacacactaaaaagcctgagctaactctgagaaacggttagtaagatttcagactcttcacattttatgaagcctataatagagatggttgctggcctgccgggtatcagtgactgattttttatttttttaaatttttaaaaattttttaatactttaattttttaaagtagtggtctactctgttttggttcatatggaaaactaaggcttcagccagatgtgctggctcacgctcgtattcccagcactttggggggctgaggcgggtggatggcttgagtaacatttcaacaaaatgattttacacatgcttggagctctagtacaactgtcccttgatgtctgtgggggactgattccaagattcccgagaataccaaaatccacggcgctcaagcctcttccgtaaaacagggtagatctgcatataacctatacacatcctctcgtatactctaaatcatctcgaggttgcttagaatacctaacacaatgtcaatgccatgtaaatagttg

SEQ ID NO: 57379 - DNA, 598 bp, Homo sapiens
gggccccccctcggaagtcttctagaattaattaacgcggggggactttaaacaccccacattcatcagtgtacatatcgtccggaaaaaatatatacacaaagaaatatagatgataaacagcatcctagaacaaacggacctgatagatatttatagaacatttaatttcattctacagctgcagaatgaacatttttttcccaacagcacattctccaaaatagactatgttacacttaacaaatttgaaaataccaaaattataccaagtatcttttctgaccacaatagaatcaaacaacaaattaataataacataactttggaaactatacagacacatagaaattaaacaaagtgccactgaataatgagtgggtcaatgaagtaattaaaaagggaacaaaaacatttttttgagaccaacgaaaatggaaacacaatttaaaaaattagaggattatagcaaaatcagttgtaagaggagagtttgtggcaataaattcctacatctaaaaaggagaaagactgcaaataagcaatttaatgttatacttcaaggaactaaataggaaagttgagaaaaaaaactaca

SEQ ID NO: 57380 - DNA, 556 bp, Homo sapiens
  misc_feature 33: n = A,T,C or G
ggtaccgggcccccccctcggggtacttctagnattaattaacgcgggctctagcataatgtgacacattgtttacaaaatttgctctcaaccttttgcagtgtgactttgtgtttcttctgattaagtaatgtagtctctttctccatcccttgaatctgggtttagtttaacctaaggaacattacagaatgtgatgtgagcaaaggcttcaaaagcactcttacaatggggctcatcctctctctctctcatggctctttggagcactgagactatcaagtgaaggagcctgagctagcctgctggaggatgaggcaccatatggagccaagaggagcaaatccagctgagaccttcttagaacagccagactgccagccaccagcaatgtgagcaatgttgcctagatcacgcagcatagctgagatgccagctgaccctagaaatcaactgagccagtccagcccaggaaacctgcctagctgacccacagaatgtaagaaataataaatgtttgctggtttaagctactaaggtttggagttgtttttaa

SEQ ID NO: 57381 - DNA, 593 bp, Homo sapiens
  misc_feature 28, 575: n = A,T,C or G
cgggcccccccctcggggtacttctagnattaattaacgcggggagggatggtttcgggatgaaactgttccacctcagatcatcaggcgttaattaggttctaataaggtgcctgcaacctagatccctggcatgcgcagttcacaatagggttctcgctcctgtgagaatctaattccccctccgatctgggaggcagagttcagatggtcatgctccctggcccactgctcacctctggccatgtggctggcttcctaactccatggcccaggggttggcgacccctgctctagattgcaagcgctatctgcagcatgatttgtgtggctacaagaaaggaggtggtaaactctggattaagattgtaatttttttctaattctctgagataatttttacatatttctaatttcttttagtagttttacacaattaaaatattagcacatgggcttctaacctagtaattcattttaatgtgagaatatttataaccttttgattaaaaattctgagtccaaaacttgttcagcaattgactacttacaataccttcagtgagcattaattnttaaaaaatctttatata

SEQ ID NO: 57382 - DNA, 329 bp, Homo sapiens
ccgggccccccctcgaaagtcttctagaattaattaacgcgggcatacaaagaagtaaatgttgtaaatttgaataatttcctttatatgatgattttctggttcacattatgctttttcttctccaaaccgtattacaggtgagacatacaaattacccaccagctctggctataaatgacgcctggttatttatataaaaaaaaaaaaaccataaaacaaaacacacaaaagataaggccgcaccaatactgtagatattaaaacaaatagaatatatacatttagagaaaactcaatttgagagtattgctcagaaaaaaaaaaaa

SEQ ID NO: 57383 - DNA, 620 bp, Homo sapiens
cgggcccccccctcggggtacttctagaattaattaacgcgggttgggtctctgctcagatgtcatgtcagagaggcagacctctggggcggtctatctgagggaatgcacccatctcccttcctctgaccagttagttaccttgcttattctttcaaagctcttaccaccacctgaagtcatctatctggtttggttattttattgtttagtagcagtctttattttattattattattattttttgatggagtctcactccagcctggacagaaatgcatttcataatgcattttaattgcattagcagtgatttaatttttttagatgctaaaacttatgggtgaaagtggattaaatgtagccaaatgcaacatcaaaatcttcaggcacaaaaacccattaactttttcatactctcagaaggtgaacctaatttcaaatgaaagctgcctccagaatatgttgttaagcgtattctagatataattcattttggcaaacatactgtagaaattcacataacattttactgtactaaaagtaaattgcccatgtaacaaaaaatatcttttcagagcttgaaatgaattttaaaggatgactgatggtccttgga

SEQ ID NO: 57384 - DNA, 277 bp, Homo sapiens
  misc_feature 33: n = A,T,C or G
ggtaccgggcccccccctcggggtacttctagnaattaattaacgcgggggtggggtgctctgctggtcttcaattaccaagaattctccaaaacaattttctgcaggatgattgtacagaatcattgcttatgacatgatcgctttctacactgtattacataaataaattaaataaaataaaaaaaaaaaaaaaaaaaaaaaaaaaaaaaaaaaaaaaaaaaaaaaaaaaaaaaaaaaaaaaaaaaaaaaaaaaaaaacccaaaaaaaaaaaaaa

SEQ ID NO: 57385 - DNA, 568 bp, Homo sapiens
  misc_feature 23, 526: n = A,T,C or G
ccccccctcggaagtcttctagnattaattaacgcggggatattatgattattttagtcattatttttaatactttaaattagctaacatgtgccagccatttaagatatcagtcttcatttaatagtgattgattttccaacacatcaagattatattctctagcaaagtcctagagaacagatactctgtgtacttgtttaaatgtaaatgtttaagtttgggcagtcagttgaacaagctggaaagctaaagttgtattgtaaaggtggaggctcttcattaatattctagcttaaaaggtaattctgtgtactcttatcttattctcaaaaaaaaattcctcactcacattaaaagaaagtgatagtgccagtagcagggggaagagagtagcagaataaggaggacaagggataaatgactagtagtacaatagtgattattactgatactagcatgatctcggctcactgaaacctccaccccccaggttcaagcgatctgagtctcctgcctcagcctnccgagtagctgggattacagggcacctgcccacacatctgac

SEQ ID NO: 57386 - DNA, 524 bp, Homo sapiens
  misc_feature 24, 509: n = A,T,C or G
gccccccctcggggtacttctagnaattaattaacgcgggctcatattattattaaacaataactccccattcctctctcctccaccctgctaaccaccattctacgttctgtctccatgaatttgaccattgtcagtatctcacatacgtggagtatttgtccttttgcatatggcctgtttcactcagcgtaatgtctgcaaactccatcatgttatagcatctatctacgtttcattcctttttaaggttaaataatatttcattgtatgtatataccatattttgtttattcattcatatcaattgacatttgggttgtttagatgcatgttttaaagacagggtcacagtattccccgagagtttttaaattttacaatatgcaatagaaagtctttttgatgatgggggctaatttctcccagcgccagcaagtcagctggcccctctttcctgaatagcctcggaggttttctgtgatcacaaaagaatgctgtcagggaanaaaaaaaaaaaaagc

SEQ ID NO: 57387 - DNA, 260 bp, Homo sapiens
ccccccctcggagtacttctagtaattaattaacgcgggggtgcagcagcaggtttgtgggactgctgggactaaggaatggccgctgggttagaaaccaacaggtgtagtggtgggaagcccaccttgagaatacgggcctccagcgagatgaacgatgcatgttaagagcacccgccagccccgaatactgcttcttgctggtgccctcccccaatgagctcacggtctggcactaatctacgcaggctcaggccaca

SEQ ID NO: 57388 - DNA, 544 bp, Homo sapiens
  misc_feature 17, 406: n = A,T,C or G
ccgggccccccctcggnagtcttctagaattaattaacgcggggtcagtcgtgggtgccagggtgtagtaggaagttggtgaaggacacggccaccattaaggtaagagtgatcctctgatggctcagaggtaaaaacaaactttccagggcaggggccctgcactgtcctttgccttcttcctcccttccccctttccttccctcccaggcacagtgcctggaggtagctggctgaggtctgagaacagctcctaccaggaagtgggtaaaggagctcctgatggctaatcactaaaagggggctctggctgattgttgttaacagtcctcagggattccatatgggaaaaggtgaaacttgtgtgttgtccctgaatttagggcagattttggatcacttatgngaaaacattctaataatcagaggcatcctgaaacagaatagacagccctgacagcagtagcagacagtaagcaaagagggcaaaagtcacaacttacttatctgttcattcaacagaattacaaaacagctcatgtat

SEQ ID NO: 57389 - DNA, 602 bp, Homo sapiens
  misc_feature 47: n = A,T,C or G
gcccccccttcggggtacttctagaattaattaacgcgggacccaanatgaagtagagaatcttagtagtccattaatgactaaagaaattgaatttgtaattagaagttcccaaaaaagaaatctctgggcccagataatttcgctggagaattctatggtacatttaaagaagaattattactagctgtatgcagtctcctctagaaaatagaagaggagggaaccattcccaactaattttacgaaaccagtattacactgataccaggaagaaagacagtgtactaaaggaaatcatggaacaaaatctctcaagaacaatggcacaaaaattctgaacaaaatatgggcaaatcaaagccagcaatatcttaaaggaattatatgccatgaccaagtgtgatttattccaggtgtgcaaggctgtttgaagagttgaaaatcaaccagtgtatccacagtattgacaggctaaagaaaaaattgtaggcaaaaaaaaaaaaaaagcatttgaaaatacaatacccattcatgattaaaattgtaaataaaaaaataaattatcaagacttttacagaaaaaaaaaaaaaagcggccg

SEQ ID NO: 57390 - DNA, 537 bp, Homo sapiens
acttctagaattaattaacgcgggccaggtgtattagtccattttcacactgctgataaggacaaactcgagactggatgatttacaaaagaaagaaatttaatggacttgcagttccatatagctggggaggcctccaatcatggtggaaggcaagggaggagcaagtcacatcctacgtggatggtagtaggcaaagagagaggttgtgcaggcaaactccctcttataaaactctcagatcttgtgaggcttgttcatgatcatgagaacagcaagggaaagaccttcccctatgattcaattacctcccactgggtgtctcctataacatgtgggaattcaagatgagatttgggtggagacacagccaaaccatatcaccagggaaagctaaaacagcagtgccagtcaaaataccagtttaaagaccccagctattgccccaattgaaaacaatacccatttaagctggaagcaagaaaaggcctggcatccatagttgagatattgcttacccatgagctcttaaaacct

SEQ ID NO: 57391 - DNA, 514 bp, Homo sapiens
  misc_feature 28: n = A,T,C or G
cgggcccccccctcgaaatacttctagnattaattaacgcggggggggagggatagcattaggatatatacctaatggtggatgatgagttgatgggtgcagcacaccagcatggacatatgtaactaacctgcacattgtgcacatgtaccctaaaacttaaagtataataataataaaataaaataaaataaactgtgctgaagctaatgtttcctttttctctgggtttaaatttgagaaggctatagcttatctcttaacttttcacttgggtcttagtctactcaggtttccataacaaagtaacatcgactgagtggtctaaacaacagaaatattattttctcacaattctggaggctgaaagtccaacatcaaaccaatttggtttctggagaggggtcatttcttggcttgcagttggcttccttctcacttatctttcctcagttcttacctcagtgtgaaaccacctcacctcaggattttataaaatcaaaaaaaaaaaaaa

SEQ ID NO: 57392 - DNA, 309 bp, Homo sapiens
cgggcccccccctcgaaagtcttctagaattaattaacgcggggtgtgtgtgtgcatggaagatgcctgggctgtctttgctatatgtaaatagagccattggatctttatttttgattaatttgttctgattttttggtttgttttttaaggaactgtaatgaacaaatgtcaggatatccaatgccaaataaagatgttgtatttatttaaaaaaaaaaaaaaaaaaaaaaaaaaaaaaaaaaaaaaaaaaaaaaaaaaaaaaaaaaaaaagagaaaaaaaaaaaaaaaggcggccgcccccggggg

SEQ ID NO: 57393 - DNA, 258 bp, Homo sapiens
ccgggccccccctcggaagtcttctagaattaattaacgcgggctaaataagcgaggcataagttaggtgcagccagactaaaaatctggactaataaataggatttgggatttaatgctatgtatttttaaaggaaagaaataagagttgctagttttaaaaatgcatgtcttttagccaattcagaatctgcccccaaacttttttaaaaagtcaagacagataaagctttggggagacggaaaaaaaaaaaaaaa

SEQ ID NO: 57394 - DNA, 396 bp, Homo sapiens
  misc_feature 12: n = A,T,C or G
gccccccctcgngggtacttctagaattaattaacgcggggctgtgacagttttgttgtatctgcagtgtatgacagacaaagctcaataagtggtgagtgaatacataaatattgacacagagaggtgatatgactcatagagcaagtaaatggcaaaagccaggtcttgaacccagatctttagaaatatagggaaggactgtttctgctattccacactacctcttaaagctttaaaggaaaaacggaggagtgtatactactacctttcatgccagtgcatgtttttctttttccttttaccactatctacccactaaatgcacatactcaaaactccttgtccagcagacttctcttaacagtgaggagaagcacaaaaaaaaaaaaaaaa

SEQ ID NO: 57395 - DNA, 563 bp, Homo sapiens
  misc_feature 53, 54, 63: n = A,T,C or G
ctgggtaccgggcccccccctcgggggtacttctagaattaattaacgcgggnnatctgaaanaaataaaagcattttactctaaaatatatttctttacatattttgaattggccctgcaaagatgtctcttaaggggaaaatctatattctgtagagaaccctcttccctgtccaggtctttttcctgatccactagaaaattaactaggagtctgggacctttttaagtctgataagaaacatctacaatccattctctccgaagcctgccacctggaggcttcatctgcctaataagaaccttgatctccacaacccctttatctcaacccagacacactcccttgtattgattccaggtcttaagataaactctttcaacgaactgccaattggaaaacctcctataacttggaaccgtccccagcccgctttgggttgtcctgcctttccagatcaaaccaatgcacatcgtacatgtattgattgatgtcttctgtctccctaaaatgtataaaccaagctgtagcctgacacctcgggcacatgtcatcaggact

SEQ ID NO: 57396 - DNA, 588 bp, Homo sapiens
ccgggccccccctcggggtacttctagaattaattaacgcgggtactctactcatcaacagcagaacacacattatttttaagcacccacaaaacacatgccaacatgaatgatatcctagtcataaaacaaacctgaacaaatttaaaagaattttagtcatacagcgtacattctttaattacaatggagtcaaactataatcaattacagaaacataagaagaaattctctcagacttggaaactaaaccacataagtctagataatctatgagtcaaaaaagaaacctcacaggaaataaaatgtacattgaactgaatgaaaagaaaaatacaatatatcaaagtttgcaggacgctggtaaaacagtgctaacagagaaatttacagcaccaaatgtttatattagaaaagaggaaaaatagcttggcagtttctttaagaaccgtgcatgtaaataccatgtaaaccagcagtcctggtcacttattccagagaaatgaaaacttgtgttcacacaaaaacctgttacaaatgttcatagcagctttaattgctatagtaaaaactagaaggatccatgct

SEQ ID NO: 57397 - DNA, 295 bp, Homo sapiens
  misc_feature 28, 266: n = A,T,C or G
cgggcccccccctcggaagtcttctagnattaattaattatacttagtatacttcttatccttagagttcactactttgtaaggtgaaataaatatatcaatacttgcggataggtatttcaccattgattcttgttttacatttaagacactctagaacaatccccccaagtctagaaaactcaccaaaaccttgcatttattttcacattttgagaggaagtctgaatcaataattcctgataattccaccagaaccaactgcntctggtgaaagaaagaggggtaacatgct

SEQ ID NO: 57398 - DNA, 526 bp, Homo sapiens
  misc_feature 25, 38, 53, 185: n = A,T,C or G
ctggggtaccgggcccccccctcgngaatacttctagnattaattaaccgggnaaaatataattttattacatgaaagaaaactcttggcagcaagaggggccccaaaagtggatagtctgtgaggctgagtctgggttttttatggggttgggatgaggaagtgtgggctgtaggtagtcttgngaaaaagcaacatttgattgattaaaaagcattattcagaaaaaaacaatagggaaagagtaggcaaacagttatggaagttctcactccagtgcatggactccattcagagctagtagtttggttttcaggcttcatactgtccttggcttgaaggtcaagtttaaccagggatctgtctctgtctgcctgggaatttgtctgtctcctgtcactatcaacttcacactgaattctgcaaaattttcaaataagaattaataccaattttttcttacattattccaaaaatagacctggaaagaatacttcctaacacattgcacgtggccaacatcacc

SEQ ID NO: 57399 - DNA, 429 bp, Homo sapiens
cccccctcggaagtcttctagaattaattaacgcggggccgtatgtaacagctgaccaacgtgaagatactggtacttgatagcctcttaaggaaaatttgcttccaaattttaagctggaaagtcactggaataactttaaaaaagaattacaatacatggctttttagaatttcgttacgtatgttaagatttgtgtacaaattgaaatgtctgtactgatcctcaaccaataaaatctcagtttatgaaaaaaaaaaaaaaaaaaaaaaaaaaaaaaaaaaaaaaaaaaaaaaaaaaaaaaaaaaaaaaaaaaaaaaaaaaaaaaaaaaaaaaaaaaaaaaaaaaaacccccaaaaaaaaaaaaaagggggccccccccgggggggggccccaattccccctttagggggggttttaacccccccc

SEQ ID NO: 57400 - DNA, 589 bp, Homo sapiens
  misc_feature 22, 43: n = A,T,C or G
cccccctcggggtacttctagnattaattaaccgggggggggngagagaaccacatcaagggaataccccatgggacaaaagaatctgaacaccagcacctgagccccagagccccagatctttcctctcacacggtctacccaaatgggaagaaactagaagaacaattcttgtaatatgacaaaacaaggttctttaacagccccaaaggatcaaaactagttcaccagcaatagatccaaatcaagaagaaatctctgaatttccagaaaaacaattcagaaggttgattattaagctaatcaaggaggcaccagagaaaggtgaagtccaacttaatgaaataaaaaataataataatacaagatggctgggtgcatggttcacgcctgtaatcccagcactttgagaggccaaggtgggcagatcttgaggtcaggcgatcgagaccatcctggccaacatggtgaaactccatctctactaaaactacaaaaattagctgggcatgatggtgcacgactgcaatcccagctactcaggaggctgagccaggagaaccctggagggcagagttgcagtgagtga

SEQ ID NO: 57401 - DNA, 376 bp, Homo sapiens
cgggccccccctcggaagtcttctagaattaattaacgcgggtactctctgtatactctcagtcatctggtatactctgtcatctggtatactctctgtgaggtatactcttaagtcatctggtatcctctctttgagtatgccagattattaaatggaaattactgcaccactaaacaccagtactgcaaacccttatttaaaaaatcgacacctaggacataaaaaaaaatgatcctaggctgggcgtggcggctcacgcctgtaatcctagcactttgggaggccaaggtaggcagactgcctaagctcaagagtttgagaccagcttgggcaacatggtgaaaccccatctctactaaaaaaaaaaaaaaaa

SEQ ID NO: 57402 - DNA, 411 bp, Homo sapiens
gggccccccctcggaagtcttctagaattaattaacgcgggccagctatacaaagctgcctcaacatttaaaaatcaacactgtatccgatttttaagctaaaagagaaaaagtcatatgatcataccattaggtccatgaaaagcattagacaaatactaaaatcgccgataataaaaactctcagcaaactataactggaaagaactttttaaaattgataaggacagcctacagtatgataggaaggatagagaaaaagagaacatactccatatactgcatctaaaatactgatctacataatctgtacatttatcatcatattgatggtgagaatctggatgctttcccactaagtttgggaagaggagagtatgtcctgtctcaccacagctatttgacatcatg

SEQ ID NO: 57403 - DNA, 604 bp, Homo sapiens
cccccctcgagggtacttctagaattaattaacgcggaggtgagacaagatcacgccactgcactccagcctgggtgacagggtgagattctgtctcaaaaaaaaaaaaaaaaattattcaaagggatcatagacctaaaagtaaaatgcaaactagaaatgtcctggaatatatcataggagaaaatgtaggttaccttaggtacgatgatagcttataaatttttttcactcatttaattgttaatatctgtgggtacataataggtatttatggggcacatgagatgttttgatacagacatgcaatgtctgtatttttagtagagacagggtttctatgcttttttacaaacaatccaattatactcttttagtaatttttaatgtacaatttattgactatagtcaccctgttgtactgtcaaatcaaagggcatatttcatctttctaactgtatttttgtacccattaaccatccttgcctcctccccaaacctccacttacccttcccagcctctggtaacgatccttctactctgtatctccatgaatttgattgttttaattttccacaaagaagtgagaacatgtgaagtttc

SEQ ID NO: 57404 - DNA, 605 bp, Homo sapiens
  misc_feature 30: n = A,T,C or G
accggggccccccctcggggatcttctagnattaattaacgcggggggacttccagattgtgcagtggctcattgctgtagtcccagcactttgcaaggccaaggtgggcagatcacttgaggtaaggagttcaagaccagcctagccaacatggtgaaactctgtctctactaaaaatacaaaaattagctgggtgtggtggtgtgtgcctgtagtcccagctactggggaggctgaggcaggagaattgcttgaccctgggaggtggaagttgtagtgagctgcgattatgccactgcattccagcctgggcaacagagcgaggctctgtctcaaaacaaacaaaaaacaagcaaacaaaaacttttctgagaatcccagatccattcttcacctaagtgtcacttaagacattgggcctcacacttgactgcccataggaatcacctgggagctttcaaaagtcctgatgcccaggtcacacctcaaaccaattccatcagaatgagtgaggtgggacccagtcttagtaccttttctaaggctccccaggtaatttcaatgtgtacacaatgtgcaggcaatgttgagctgaatactactt

SEQ ID NO: 57405 - DNA, 481 bp, Homo sapiens
  misc_feature 8, 9: n = A,T,C or G
gtgaatgnngaatggaaaaaagatgactcagttaaggcaccagcaaaaaaaaaaaaaaaaaaaaaaaaaaaaaaaaaaaaaaaaaaaaaaaaaaaaaaaaaaaaaaaaaaaaaaaaaaaaaaaaaaaaaaaaaaaaaaaaaaaaaaaaaaaaaagggggcccccccccgggggggacccccatttccccttttagggagtggttttcccccccccccttgcccgtctttttacaacttcgggactggaaaacccctgggtttccccaatttattccctttgcaccaaatccccttttccccggttgggttataaccaaaaaggccccccccgttcccctttcccaaaatttccccaccctgatgggcaatgggaatttgaaccctttattttttggtaaaaatccccgtaaatttttggtaaaaccacctttttttttacccaatgggccaaattcgccaaattccttttttattcaaaaa

SEQ ID NO: 57406 - DNA, 601 bp, Homo sapiens
  misc_feature 27: n = A,T,C or G
cgggccccccctcggaagtcttctagnattaattaacgcgggcagttgctatgaagaacagtatggttgtttctcaaataaatctctgaacatataattaccatataatcctgcaattctattttagggcataaaaccaaaagatttcaaagccatgtattaaagagttatttttacaactatgttcatagcagcataattcactatagctaaaatatggaatcaactcacacatgtattaatgaatgaatggataagcaaagtgtggtatatacatgcaatgaaatattatttaaccttaaaaaaggatttcttatggtcttcaatatggatgagacttggagacatcaggctaagttaaataagtcagtcacagaaaggtaaatactgggtggagatggggataggaagtggcttgatgaatatagagttaccatttcataagataaaaagagatctgatggttgattgcaacagtattaatgtacttagcacgactaaattgtacatgttaagtgattaatgttaaatttcctgttacgtgtaatttttccaccattaaaaataaagaagtaggcctggctcagtggctcacacctgt

SEQ ID NO: 57407 - DNA, 539 bp, Homo sapiens
  misc_feature 23: n = A,T,C or G
ccccccctcgaaatacttctagnattaattaacgcggggtggctatgaggtgggggcattctcccttctcctcccatcactgttcccttttttgctctttggggttcaagtctctagggcctttacaattttcatttaataataagatacaacagtggccttgtattagtctgttttcacactgctataaagaactacctgagactgggtaatttatgaagaaaagaggtttaattgactcacacttccacaagctgtacaggaagcacggctgggagacctcacgaaacacaatcatggcagaaggtgatgaggaagcaagcatgtcttcacatggtggtaggagagagaaagcagaggggaaagtgccacccactttgaaaccatcagatctcatgagaactcactcactatcatgagaatagcaagggggaaatccactcccatgatctagtcactttccaccaagtgcctcccccaacattgggaattgcaattcaacatgagatttgggtggggacagagagccaaaccatatc

SEQ ID NO: 57408 - DNA, 469 bp, Homo sapiens
  misc_feature 318, 319, 325, 326, 328, 332, 336, 337, 339, 340, 342, 344,345, 351, 354, 355, 357, 364, 373, 375: n = A,T,C or G
cggggccccccctcggggtacttctagaattaattaacgcgggggtttttttaagaattcttaactttttttttcctgttgcccaggctggaggaaaatacagattaagagacacatcacccatcacatagtattgtttgaattctgactcaaaaaaacttttgaaaacttttacgagacaactggggaaattcaaatactgactaaatatggtattaagaaatcactgttaatttagagggtataataacggtagtgttacgggggtttttttaagaattcttaacttttttttttcctgttcgcccaggctggagnncaatgnntntatntaanntnntntnnaacctntgnntntgggttnaagcaactntnatgcctaaatccttccgagcagccgggaccaaaggcacatgctcccatgctcagctatgttttttttattttatttcgtagagatgagtctcac

SEQ ID NO: 57409 - DNA, 524 bp, Homo sapiens
  misc_feature 36: n = A,T,C or G
tgggtaccgggcccccccctcggaaatacttctagnattaattaacgcgggtaggaccataggcacacaccaccatgcctggctaattttttaaatttttggagagatgaggtctcactatgttgctcaggttggtctcaaactcctggcctcaagcaatcattccaccttagaatctttaattttaaaggctttcttgataatttgctgctacagattagatttaaaactagatttaaagagtctctggagtagtcacatgattaattagcaaaattccagctccagaaagaaaacacatacctgcttaagggcaaagaagaggactagaaacattaattacaaaaacgaggaccagaaacagtaatgacctgtggatcgcacaattacgggtaatttagagagttttctctaagagctcctcagggactaatttgttttttttttttttttttggccagcaggcctgcattaatcccattataatataagaaatttactgagatagtcccaaaaaaaaaaaa

SEQ ID NO: 57410 - DNA, 603 bp, Homo sapiens
  misc_feature 96: n = A,T,C or G
ccgggccccccctcgaaagtcttctagaattaattaacgcggggggggaaaatttggttaagggcacaatattctaaaactttgtcagtgacacantctgaaaaaaggaactgaataaaaatgatatagttttataaatgttaaatggttaagaaatacataactactatggtaaatttggcattttatttgaaaaagtcttcaaattaccttgtggaaatgggtttggagagttaggcttttgagcagttgagaagcagtgggaggaaggttatctggaattggatggaaagttgtaacatcaaatgtgtttggtgtgactcagtgcacttgttgagctgagctgtgtgcattttttgtgtattaccacgaagctcaattcagcttggtgcagttttctacctggtgtttctcagtagacagaaatgcacatcctattatgcctaattgttccgtaacatatccatcctgttggagcaattttgtgttttcaaagtaagtatagaataaatagctcagaagccttggacttgcagagcttcaggaaggctgaccaagccttgctcctgttagctgtctgagggagagagctggccccactga

SEQ ID NO: 57411 - DNA, 561 bp, Homo sapiens
gggccccccctgcggggtacttctagaattaattaacgcggggctgtgttcgtaaactaccatgttctctataacacgctctgagagccgatcttgatagtctgcaaaatgtaccagctaactagtggatcaccgtaccattataagctcaaagatgcacgtgcacggaccgttaaatctacacctgtgttagattacatgaatctcactctaaagtatctattttgcatacatgttctgtatgacatcttaaacacaaattaccctacgtagccacaccacaaccgtaacaagatatgctgctgctggtactctcttctagcgattctggggggacagtctagaaacccggacaactatatccaccctactgaaacatgctttaaatcgtgtctaaaatctgatttgagcaagtcactgccgagcttctgagtctgcattgacactgctactgactcacctctccttccctggaataaggcttcaacttccctatgctgtgaagacaccatttgtaagcactttgaacataagcactgtgtgacagcgctggaatcatgc

SEQ ID NO: 57412 - DNA, 424 bp, Homo sapiens
  misc_feature 29: n = A,T,C or G
cgggtccccccctcgagagtacttgtcgnaattaattaacgcggggtaaatgaaaaaaaaaaaaaaaaaaaaaaaaaaaaaaaaaaaaaaaaaaaaaaaaaaaaaaaaaaaaaaaaaaaaaaaaaaaaaaaaaaaggcggccccccccgggggggtcctctctgccccctcctgggtgttttttttctcccccccctttcgtgccttttttttccttccccctcgtctgggagtccccgggccttcccccttcttgttcttcttgcgcctcttccctcctttcgccgggtggctttttctcgggggggccggggcctttcctgccttcccagtttttcccccttttctgggtggcttttgttttttggcgccgtttttttttttaaactctcctccttttttttttttttttccgccttttttt

SEQ ID NO: 57413 - DNA, 596 bp, Homo sapiens
  misc_feature 28: n = A,T,C or G
cgggcccccccctcggggtacttctagnattaattaacgcgggaagctcactctaagcaaagaattatggggaaagaggcaagcttattaagtcctaggatcaaggttaaaggctcttttttttttctgttatcttttgtcctttttttctctcttggaccttcaggcgtctgcttgggtctctttcaagcgaattttcctttccctcctgttctaaagcctttttaaataaacttccactcctgctctagaacttgcctctctttttctgctttatgccctcagtcaagttctttcttctgaggaggcaaggactgaagttgggagggacacatacggatacactgttggtaacttgggataactcagatctctggtaacagtttcaaggcattggtagaatactttacattcagaaatccaaataatttttgttttaggtcatcaaatttgtggcccagcataataaaagatactgttgtttcctccctttcagtttgagaattcctacaggaaacatttgtgttaaagaaatatgattatcaatgttaatgattacataattattagttattgttttttcattgtggaaaatg

SEQ ID NO: 57414 - DNA, 156 bp, Homo sapiens
  misc_feature 28: n = A,T,C or G
ccgggccccccctcggaagtcttctagnattaattaacgcgggggcaaaaacacatgagtggcaaaaacgagactaacagaaaaaagaaataataaaaggaccaataaataaaaaaaaaaaagatacgcggcccccaccgggggggacctccattt

SEQ ID NO: 57415 - DNA, 549 bp, Homo sapiens
cccccctcggaagtcttctagaattaattaacgcgggagaggaaacagagtttcaataaagggcccaagtcagacttgcttgggacgatgaagaatcatgtaagtttctgaatgtttgactgagtagtggacactggccaggacccaaagcctcttctcttctggggagcccccacccctgttacggatccaaaagccagacgttctgtcttcgctcctgacaggcaggctgtgaacacaaacaaggcatggcctgccaaagccgctaactctaggaagaagcaaaggacgatgtgcatggtggtggggggtgctgcagccagcctctctgccggcggcccatgcctggaactgcttcttcagcatgcctgcgaatgcaccacccacctgacgtttctgcagttggctgcttagctgcacgagctgctccggcacctgtcctcctgctgagatacggctgagcacgagtggtcacactgacactcagcagaatcacgcttccaccgtccacaccagaccaccacacacgaggctgctgccaaatgggtc

SEQ ID NO: 57416 - DNA, 401 bp, Homo sapiens
  misc_feature 22: n = A,T,C or G
ccccccctcggggtacttctanaattaattaacgcgggggacggggagctgtggcctgcctcaccagccagcgactctgggcctgcgggtgagtccttcagcccctgcacagcccaatccatctgccacccacttggtgaccccaaattgtagtaagacaacacttccagttactcaacagcttctgaaatttaaatctctggaacaatttacagtaataagaccctaggtgcacctgtctactatccttgtcctccctaatgaaatgggctaggcgtggtggctcatgcctgtaatctcccattttgggaggccaaggcaggagaactgcttgagcccaggtgttgggagaccagcctgggtaacatggcgagacctcacatctaataaaaaaaaaaaaa

SEQ ID NO: 57417 - DNA, 608 bp, Homo sapiens
acttctagaattaattaacgcgggtgtccagttacactgctccatcgaaagcaaagaagagattgaaatcttcatctaactgactctgaagcctcatcttttgctttaaaaaacgagattagaggattcatttactccaggctcagaggtactgtctacatctaaagatactgaaaaagatgaaatgatacatcagagagttctgtgacaactcatagaggggagaaatctaatccaaagctactggaagaaactgtaaagaagaaataaaaatatgagaacgctatctttccccaggctttataaatgttaataatttaccttattgtatcttatgcaatagaacattttttagttttatggtgtcaattaacattgtaacactatcttgagaccaataatccagagtttcaaaaaaggaattgagggctgggctgggtgcagtggctcacgcctgtaatcccagcaatttgggaggccatggcaggaagtattgcttgagcccagaagttcaagaccagtctgggcaatataatgaaaccccgtctctactaaaaatacaaaaattagccgggtgcagtggcaggcgcctgtagtcccagctactc

SEQ ID NO: 57418 - DNA, 361 bp, Homo sapiens
  misc_feature 17: n = A,T,C or G
ccgggccccccctcganagtcttctagaattaattaacgcgggggtagggggtacagtagggaaaagagaatcttacaaatctttcatctcaatataataaagcaaactggaagtcagggttgacatatttgggggagaaaataatatgaattcaatcggtgctatggaaatatatagatgaaaactgagctgtacgtcaaaagattggccaattaatgtccaatttgatgtttctgtgtacaagttattttattttatttatttatttttatttttgaggatggagtcctgttcctctaacatagttacataaaggtaaaattactagatctaaaagcatgcacatctcaacctccatcg

SEQ ID NO: 57419 - DNA, 523 bp, Homo sapiens
  misc_feature 28: n = A,T,C or G
cgggcccccccctcggaagtcttctagnattaattaacgcgggccataaatgtttgttgagttagcttgctacagacccaatgctggtgcttctccaaaattcatatgttgaaacttaagccccaaagtgatgacggtatttggaagtggggtctttggaggtgattaggtcatgaagatggagccttcatgaatgagattagtgcccttataaaagaaactccaggctgggtatggtggcttacgcctgtaaccctagcactttgggaggccgaggtgggcagatcacttgaggtcaagagttcaaaaccagccaggccaacatggtgaaaccccgtttctactaaaaatacaaaaaaattagcaagtgtggtggcatgtgcctgtaatcccagctatttgggaggctgaggcagcagaattgcttcaacctgggaggcggaggttgcagtgaactgagatcgagccactgcactccagcctgggtgacagagcaagactccatctcaaaaaaaaaaaaaaa

SEQ ID NO: 57420 - DNA, 604 bp, Homo sapiens
  misc_feature 17: n = A,T,C or G
ccgggcccttcctcggnagtcttctagaattaattaacgcggggcctttaaaagtgattgaattgtgagggctctgcccttataaatgcattaatctattcatggactaatagattaatcgggtaatgaattaacaggttatcatgggagtgagactagtggctttataagaagaggaaaagagacgagagccagcacactcagcctcttgccctgtgacgccctgtgccatctcgggactctacagagtccccaccagaaaggaggccctcctcaccagatgtagcccctcagcactggcctactcagcctacataactataagaaataaattccttttttaaaatacattacccggttttaagtgttctgttataagcaacagaaaacagactaagacacagagcttttcctttaagcatctaggagaaacatgtataagggggctaggatgtgccttgagtcaacaagacctcagtcaacaagaccttcactttgatatatccagttcttgagcagagtgagtcatatatggtaagcagggactgatattggttcctttctcttccctttccgaaagtctttaattttttgtcatttaccc

SEQ ID NO: 57421 - DNA, 534 bp, Homo sapiens
ccgggccccccctcggaagtcttctagaattaattaacgcgggcagtccccatcctaagtcactctgtagcacctcaaatcaaccttccgtactgttgccagtattatccatctagaaagcaagcctgtttggatcaggagaaaagtacagactaatcactaattattatctactatttcccgggcactgttctagatgttggggatacagcaataaataaaacagctaatggtttctgttccaatgaagcttacattctagcaggggaagaaaaataattaatcaaaccaaatttcagatccgaaatgtgatgagtaaaacaaaatggaataaagttaatgaaatgatgataaaatagagactgccttggtttgttagggcaggaagaatgataccttttctactgggtggtcagggaaggcctgaatgacttggggcatcagtataaaacttgggggagaaaactttccaagaagaagaaatagccagtgcaaaggccccagggaggaaaagacactggtatgttcctggac

SEQ ID NO: 57422 - DNA, 369 bp, Homo sapiens
gggtacacgggccccccctcggagtacttctagtattaattaacgcgggatgctattaaaaaaagaaaaaagaagagaacaaaaaagtcctccagtaaatttaaaatatggtagtcaaagccgggcacggtggctcacacctgtaatcccagcactttgggaggccgaggcgggtggattacaggcatgtgccaccacgcccggcctaattttctaatttttttttttaactgaagaaggaccccaggaagtcaaaagtgcccataacccatgaaagtctaaatgaggacaacggaggctgggcatggtggctcactcctgcaatcccagcactttgggaggccaaggcgggaggattgcttgaggcca

SEQ ID NO: 57423 - DNA, 561 bp, Homo sapiens
  misc_feature 27: n = A,T,C or G
cgggccccccctcggaagtcttctagnattaattaacgcgggaggtgggtagaaagttgattcaccaggatagtaacagagaacttcctaagcctagataaatatatcaatatttaattacacgaaggctaaagaaaaccaagtagatttaattcaaagaagactaccacaatgcatttcataatcaaactcccaaagatctaggataaagaaaggattttaattgtagtaggataaaaaaataaacaaacaaataacatacaatggagctccaatatggctggcagtagactttccattggaaaccttacaggccaggagagagtggtatgacatatttaacatgaagaagaaggagaagaaaaaaaaaacccttttaccctagcatagtatatccggtaaaaatattctttaatatgaaggagaaataaagactttctcagaccaacaaaaccagagggtttttattaacaccagacccattctacaagaaatgctaaagggagttcttcaatctgaaagaaagggacattgatgaacaataagaaatcatctgaaggt

SEQ ID NO: 57424 - DNA, 609 bp, Homo sapiens
cggggccccccctcgaaagtcttctagaattaattaaagcggggatgtcaagttcatttatgtgactctttggctcaacttacataatctttgttttgatatcacagttgtctaattattttactttgtagcttaaggcaggctgaattgttgataaaatggaaaaagtagtatattgttatataagcttctgaggtgtgttttgttgtataagccctggaggttaaaaagtcatcccttatgtatagtagttaaaggcataaaactgtgacttttagatattccacagaaccagacttatttgatgtggataataaccaatgatttagcattttgtttgcttttgttttattttatccgggttcattttttactcttcccatgtacatgaaacaggtggtggcgtgtagagatcagctgatccttgttttatggttaattgaactactttgtatccagggtttctgcaaatccaaaagtgatttttcatctaggatctattcctaacagtctactccaatcccactttagttttccacaattttaaatcttaatagtgagaattcaaatgaaagtcatttcatttgactattctgatgacatgattga

SEQ ID NO: 57425 - DNA, 469 bp, Homo sapiens
  misc_feature 40: n = A,T,C or G
aaaactgggtaccgggcccccccctcggggtacttctagnattaattaacgcgggggtatgttcatttccttgggttgccgaagtcccacaaactgggtggcttgcaacaacagaaattgttctgttctggaggctggaagtctgagctccatgcccacctctttatagcttctggcagcaatccttggagctccttggcttgtagatgcagctctccagtctctgcgtccattgtcacatgatgttctccctcaagtggcggtgtctctgtgtctcttcatataaggacaccagtggtattcaattaagggtctgtcctactccagtatgacctcctattaggttaacttattatttccacaatgaccctgtttccaaataaggtcacattctgtggtactgggcattagatctttaacatattttttaaaggaagagggggacatgattcaaaccataacactgcac

SEQ ID NO: 57426 - DNA, 549 bp, Homo sapiens
taattaacgcggggatctggttatcctttctgtttaaataaaatgtttacagtgtttacatttagtgtgattattaatatggttaggcccaacttattgtcttgctgattttcttttttttccaatacagtttttgtttcctttgtcctctttcgctgccttcttttggattacttgaatattttccattactccactttatctccttttctgactgttttttattgtagccattttagaggtttctctaaggcctatagtatcaatcattatcatattctacctttgatattacatcacttcacttctgagacacacatatcactttctgtaaaagacatttacaatagcatacttctatttctcttttcctggcctttgcactattgttgtcacacattttacctttacatatcttataaaccctgtaatagtttattattatttttaaacagtgaattatcttttaaagagatggaaataataagaaaaaaatctcacatatttatctatgcatcttaagctccatctcctcatttctggtgctct

SEQ ID NO: 57427 - DNA, 581 bp, Homo sapiens
  misc_feature 24, 535: n = A,T,C or G
gccccccctcggaagtcttctagnaattaattaacgcggggggtttcttatagacaatgtatagctgggtcttgttttttgatccactctgacaatctttgacatttaattggtgcatttagaccattgatgttgaaagtgattactgatgtatttatactaatatctaccatatttatcaccattttctgtttgttgcccttgatcttcattcctatttttatctcccattctttggttgtctttgaggttttaattgagcattttatgttatcccagttttttctcctttcttagcaaatcagttacactttgttactttaagtggttactctacagtttgcaatatacactcacaattaacccaagtccacttttaaacagcacttgtaccacttcatgggtaatgtggtgccttagaataacaaaataatcctaaattattttgtaattatacctttcataccttgtatcattgctgtcattcatttcacttatacacacagacataagatacatacataagcatatatantcaaatacagtgttgctattattttaaatatctgtatctgttagat

SEQ ID NO: 57428 - DNA, 234 bp, Homo sapiens
ggtaccgggcccccccctcgggagtacttctagaattaattaacgcgggcttctggagcttgtcaccattggacagtctccctgatggaccctcagtcttctcatgaataaattccttcaacgccaaaaaaaaaaaaaaaaaaaaaaaaaaaaaaaaaaaaaaaaaaaaaaaaaaaaaaaaaaaaaaaaaaaaaaaaaaaaaaaaaaaaaaaaaaaaaaaaaaaaaaaaagggg

SEQ ID NO: 57429 - DNA, 217 bp, Homo sapiens
  misc_feature 28: n = A,T,C or G
ccgggccccccctcgaggtacttctagnaattaattaacgcggggggggagaaagcaggaagaaacggggggtgcatgagaaacgttttcatttgctccaagggggaaaaatgtttctgcatcttctgatggaaagaaatctttacaagacaaaaaaaaaaaaaaaaaaaaaaaaaaaaaaaaaaaaaaaaaaaaaaaaaccaaaaaaaaaaaaaaa

SEQ ID NO: 57430 - DNA, 581 bp, Homo sapiens
acttctagaattaattaacgcgggttccatacaatgtctggaatctatagataacccgttaggtcaggggtcgatctttaaccaggcccagggcgtggcgccgggctgtctgcctgtggatttcatttctgccttttactttttactttttctttctttggaggcagaaattgggcataagacaatatgaggagtggtctcctctcttaataactcaagttttatacagtgcacaaagcacatatttgataaaaaagataagggaaattcggttctgatcttgagttttgtttttttgttctatcattgttgttaacttttgttttagaattggaagaaatcatattgaggtaaagggatttcatttaaaaaaaaagccttacttagattttgaagtagaattacccagaatagtttttcctgtgtgcttagagtacctctaacatgttcaactaagaggaaaaagtcctggaagggaatggaaatgcttataacactaggagggatcccttttaatgaggaagctggtgattacctgaacatcactataagattctgttactactttaggtgtttccatg

SEQ ID NO: 57431 - DNA, 172 bp, Homo sapiens
  misc_feature 21: n = A,T,C or G
ctgggtaccgggccccccccncggaaatacttctagaattaattaacgcggggggggctgggggcgagaggagggaactggctagtgagcactgaaaataaattctgaatcctctcctaaaaaaaaaaaaaaaaaaaaaaaaaaaaaaaaaaaaaaccaaaaaaaaaaaaaa

SEQ ID NO: 57432 - DNA, 206 bp, Homo sapiens
  misc_feature 16: n = A,T,C or G
cggggccccccctcgngaatacttctagaattaattaacgcgggggaggaggggtgaaagcaccatgagtgctcactaaaacaactttttccatttttaataaaacgccaaaaatatcacaacccaccaaaaaaaaaaaaaaaaaaaaaaaaaaaaaaaaaaaaaaaaaaaaaaaaaaaaaaaaaaaaaaaaaaaaaaaaaaaaaa

SEQ ID NO: 57433 - DNA, 425 bp, Homo sapiens
cccccctcgagagtcttctagaattaattaacgcggggtcttgagcagtggaggaggagctcaggcccctccagtcaaagacagtccaggctgagtctagacaacccgaccattctcatccccacccagcccggccagcctttcacagacaggcaccgggatctgtgatggccagcggcaacaacaggcgtgatttctcctaggacacatcacttttcaccaagaagcccatcttgaatagctgggggtgtgtttacagatccaggaaagctcagagcaaaaatacttagttaaaaagcaagttaaaaaatgcatcttcagggcaacccgcttgggtccctttccatgctgtggaagctttgttctttcactcttcacaataaatcttgctgctgctcgcttaaaaaaaaaaaaaaaaaaaaaaa

SEQ ID NO: 57434 - DNA, 603 bp, Homo sapiens
  misc_feature 570: n = A,T,C or G
cggggccccccctcggaagtcttctagaattaattaacgcggggggggatgtgtgtgcatgtccatgtgtgtggtatgtaaccagtgagataactgtgccttcaaacaaatctattggcaccgtgaaaggatgtaggaattcaaagaactaaaggctactgtaatggttcaaataaaagataaaaacctggactaggccaggcatggtggctcacacatgtaatcccagcactttgggaggccaaggaggtgggctgatcgcttgagcccaggagctcgagactagtctgggcaacatggcaagaccccatctctacaaaaaatataaaaattagctgggtgtgccatcagatggccaaatcattatttactggaccagaccttttcaaaactatcaagcagatagtcaaggcctgtaaagtgtgccaaagaaataatcccctgcactgcaggccatacatttcaatccctctatctttaacctccttgttaagtttgtctcttccagaattgaagctgtaaaactacaaatcgttcttcaaatggagccccagacagtccatgactaanatctaccacagacccctggaccggcctgctagc

SEQ ID NO: 57435 - DNA, 477 bp, Homo sapiens
cgggcccccccctcggggtacttctagaattaattaacgcggggctacggcgggcacatgcagacggtgggcgctgaggccgggtgcggcggcggctggtgcctgtgctagagccggagccgcagcctcagcattagccgggagaactgcagcgcccggaggctggcctggggtctgacatcaacgacacaggcggggagtggatggccattccagaccatgctcgacagctgaccaaggccatgatgcgaaaggccacggccagccgcctggtcacgcagcgcgatgcggacgtgcagaacttcgtcagtttcatctccaaagactccatccagaagtccctgcagatgtacttagagaggctcaaagaagaaaaaggctaacgattgggctgccacaggcttgcggccacacgtgcccgtgtgggtcccagggaggtcttaaacaaggtatttttcaacctaaaaaaaaaaaaaa

SEQ ID NO: 57436 - DNA, 597 bp, Homo sapiens
cccccctcgaaagtcttctagaattaattaacgcgggcaggtgaatcacctgaggtcaggaattcaagaccagcctcgccaacatggcaaaaccccgtctctataaaaataaaaaataaaaaaaattataaatacaaaaatacaaaaattagctggacgtgatggtgcacacctgtaatcccagctacttgggaggctgaggcaggagagtcactttaacttgggaggtagaggttgcagtgagccaaaattgcgccactacactccagcctgggtgacagattgagactctgtctcaaacaaaaccaaaatcaggcagtgggctgtatttgcctatgggctatagtctgctaccacctttttaaaacacaaattagataccaccccctcttaaaattctcagggactccctattgctcttaaagtaaaacccagacttcttactctggccttcaaggtcctacatgacatacattctgccaacctctgacttccactcagtccacctttttttctagctcactacattttagccatactggcctctcttcctcaaactcatcaagcttagtagcacatttaggaccttttcacttg

SEQ ID NO: 57437 - DNA, 607 bp, Homo sapiens
cgggcccccccctcgaaatacttctagaattaattaacgcggggattacaggcgtgagccaccgccccctgccggatttatcttacccatgtgtctctgacaggatatattgtcaaattcccaaactgtatttttaggggggttgcaaattttgcttccaaatgatcttctaagagcaggatattctctgcctggagtgatgagggtaccatttctaaaagaggtacattgtagttcaaactcctgcaggtaaggagccgtgacttactaactttcaactttgacacattcgcaggtaagagcagagctacgcactacagcaaaatccaggctgtccgtcagcagctgatgtgcccggtaccttttgtcttggccatcctgttgttcattaatctgatgtatactcactgtgtttgcgtttattttcctaacatttttagcctcatcctattcctataagtgacaggcactgtaactattgaaagtactgattaaaagtagtgtttgattattctgtaagcaaagtaatactttggattaaaacaaagtgactgtcatctgaatcttaatttctgttattttccaaatttctttattcattctcctg

SEQ ID NO: 57438 - DNA, 479 bp, Homo sapiens
  misc_feature 17, 28: n = A,T,C or G
ccgggccccccctcggnagtcttctagnaattaattaacgcgggtaaccataaaaagtaaagtgtaaattataataatagtaaattgaatagtaaataatcaaaaagcaaatgggcagatagccatcttcagttgtctttagctattttaattttaatgttaggcactatgacatttatttttttcttcagaaatttttaatgtcttatattccaatatttttaatcattttaggctgcagttcatggagctcgtttcaaagggcaagatctaaaactggcatggaataaaccagtaactaatatttcagctgttgaaacagaagaagttgagcctgatgaagaagaatttcaggaagagtctttggtggatgactcattacttcaagatgatgatgaagaagaagaggacaatgaatctcgttcttggagaagatgatttgactgatcattgatctgcatatgctaaaactctacctg

SEQ ID NO: 57439 - DNA, 444 bp, Homo sapiens
gggccccccctcggagtacttctagaattaattaacccggcatacatcaccatgctgtgagggacaggctccaggaccaccctgccaactcagacagccaaatccatgagagcccaaattcctcatataaaatggcatcacatttgcatagatctgagcacatgccccctgtatactttaactaatccgaagagagttactcgtacctattacattgcaaatgcagtgtaagtagtagtttactgttcaaggaataatgacaagataaaagtctgtacatgttcagaacggaagcagtcatgcctttatttttcaaatattcttgatctacagttggttgaatccacagatgtggaacccacacatagagatggctggctccatgcatgtgtgtgcctgagtgtgtgtgtgtagtcgtgtgcaagtgcatgtgtatggagagag

SEQ ID NO: 57440 - DNA, 606 bp, Homo sapiens
  misc_feature 43, 50: n = A,T,C or G
cgggccccccctcggggtacttctagaattaattaacgcgggnggacatngaaaattttattggccaaaaaaaattcaaggcaattacagatccaaggactcaaataaaaggaaaaggaagtaagaattagaaaattatctcagtaaaaacaaaacataattattattttaaattaatggcaatgacctaataatctttttttttttaaactcaggtaaatttagtgctgtatttatatgtaaaatttctgatatattgttcttacttgtcattgtaataaatatgtttataatatatgtcatcttttaaatacctacatctacatatgaacatttacattagcacacataatttttaagaaataaacaacgatctctcaataacattgttacctacttccatataaagatgtgatattagaaagtttatatctgcatacaattgtcatgacaaatcaggaaagttttattgtgttttattgaaataacctctgattattttttgagactttacacacatatttttacacacacgtgcatacatatccatatgtgatatcaaaagaaataagtaactattaaatatatcttcatatataaacatat

SEQ ID NO: 57441 - DNA, 553 bp, Homo sapiens
  misc_feature 514, 539: n = A,T,C or G
gggccccccctcgagaatacttctagaattaattaacgcgggccctgctcagtctattaccatgaggtcatgcccctttgtccaatcacatctccacatggctgttcattcctcattgaacctaaacacaaaacacagttttctctaggcttttgggtctttatttctgaaggctcctatgtcatgtaaaactttgattcaataaatttgttgtgcttttttcttgttaatctgtcttttattataagaataaccttgcttggtatggtggctcacgcctctaatcccagcactttgggaggctgaggcgggtgaatcacctgaggtcaggggttcaagactagcctgaccaacatggagaaaccctgtctctactaaaaatacaaaattagccaggtgtggtggtgcatgcctgtaatcccagctacttgggaggctgaggcaggagaatcgcttgagcctgggggacggagtttgcggtgagccgagatcgtaccattgcactccagcctgngtgacagagtgagactccgtctcanaaaaaaaaaaaaaa

SEQ ID NO: 57442 - DNA, 482 bp, Homo sapiens
ccgggccccccctcgaaagtcttctagaattaattaaaaatgaatagaactgtttaaaacaaaaatttataacattgtattttggagtccataatgtttacagatgtaatatatatgacaactattatataaatgattgaggagagggtaaatagacctgtacaattacaaggtatattttatgcaacaggttacaatagtaactctcactagactgaaaattgaagattgtacagtgaaatccctagggcaaccactacaaagataacataaagaggtgtagctaaaaggcaatagataaattaaaatggaattctaaaaaatattcaattaatccaaaaagaaggcagggaaagaggaacagaggagtacaaccagaaggaacaagcaggagaaaactaaaattatagacttaaagcaaccatattaataatgagccaaaacataccatttagaaggctgaaattatcataataattttt

SEQ ID NO: 57443 - DNA, 597 bp, Homo sapiens
  misc_feature 542: n = A,T,C or G
gggccccccctcggaagtcttctagaattaattaacgcgggggggcatggtgatgttcaggtggcagagaatgtgctgggtgtcctcgtacttcatcgccttgcgcagaaacgacagggaccctcccggctctcgactgctgtccctcacctaaactcaatcacacaaaggagaattcaggggcccttttctaggccacccggctgtctggtttagggaattctgcctccccaactttctagacccagaggagaactcagccagagggtgccggcacctttacaggcatggccagacggttctcccgaaatgactggaagtggaagctccgctgctgggcagctttcttcacaggcaccaggttcccagagagttctgcaaacagggacattccttccaacacctgcaggaggggaaaagcagatacagcttgtcagggagagaagggcccagatgtccctccttccaccttcggtccttccctctccaagacacaccctgcctcagcaagaggcatgcgggtgtgtgctgagaaatcactngttgttttgggaaagggcttattttcaaattgtgatcaatgaggcatgcttcccg

SEQ ID NO: 57444 - DNA, 393 bp, Homo sapiens
  misc_feature 38, 295, 325: n = A,T,C or G
ctggggtaccgggcccccccctcgggggtacttctagnattaattaacgcggggagcaaagactgcctcctaagattgtttagaccccagggaggtcttcacttttgcctaaactcagatttgccatggaaattccagagcagacatttggatttgtcctcctttgggcgtctacgtgaatgttgtgtggcagtgtgagtgggtgcacgtatatacaatgtgcttatgggtgaatgtttggtcaggcctagtggttaggtgtgttgtccatcacttttattttgtccagattttntaatcttctgttttctagagctactcatgntttccccttcctctttgtcactgtagtatttgacagttatcttttcccaccaaaaatatgctgaactg

SEQ ID NO: 57445 - DNA, 598 bp, Homo sapiens
  misc_feature 16: n = A,T,C or G
cgggccccccctcggnagtcttctagaattaattaacgcggggggggtgtgggtgtggaataagtcagtgcagacccaggtccttgccgtcgctggagatctctgagctttgccgcctccctctttgctgaggtccctcaggtggcctcattgtttctattaccttggtagaaagcctgtgtgaagtccctgcctgcctggcagtctcgttgccatggaaacttccattccgcacacctgattcacacatcacgcttggctaagtccagacagaggtcacagactggcatttgccctttgtttccccttcttgtgttttccaggtacttaaaaatggatatagaaagatgagagggtgggcagtgttgtgtgtaagaatgctttgttgtcaactgtagaagtgtgtgaggaaaaaaaaaaccaaaaaaaaaaaaaaaaaccaaaaaaaaaccttgtaaatggaagagcagagcaaatggcaaagtgtgcatatagttctaaccttctcgtaagaaagcaaagtttgaatcctgtaatgtgtctgaaaagtgactttttttctggatttctaggtgagattggaaatgggtataataga

SEQ ID NO: 57446 - DNA, 546 bp, Homo sapiens
ttctagaattaattaacgcggggtctgatatatatttaagtaatatattgcagagtggaaaagtctgtccacactgatataaatatatacgcatggacagatagaggaatcagattatgcaaattgttttagccccatttggagatcagtataacagagcaacattctcaacctcattttacttataatgataactgttttactgaggatcaactatatacaggctcagtgtgaggtacttcatactcgttatctctaacaaccatgtaaagtagcaattatttttctgattttatagaggaggaaactgaggcttatgaagtgatcaaggacacagatatgaactgttgaaacaatatctgaattcaagtttgtcaggcttcacaggcctatgctgtctcaatggtgtgaatgtgtatattggctaggattcggttatcaaagcaaatgaatactaaagaaatgttgtggacacgaactactgaaattaaaactaatgcactggtcaggaagccctacttacatcaccaaatgtttaggaagtag

SEQ ID NO: 57447 - DNA, 357 bp, Homo sapiens
ccgggccccccctcggaagtcttctagaattaattaacgcgggctatgtctacataataaaatgatacaagaaaaatgctccaggtaatacgaaataggaaaaaaaatctgcccacaagagattttaagtcagttgtaaacaatattaagtctgattctatttatgcacaaaaataaaagccacagtggcatcaccaaaatgggagaatagaaagctctggattctccttcctgcaacaggcagtgctgcaataaacatccctgtacactccccatgtgtatatacacaaatatttctctaagatagttacataaaggtagaattactagatctaaaagcatgcacatttgaacctc

SEQ ID NO: 57448 - DNA, 598 bp, Homo sapiens
  misc_feature 13, 494: n = A,T,C or G
ccgggcccccccntcgaaatacttctagaattaattaacgcggggaagggaaccagggtataaccttataagggggataatgaaacttacgcgatgcccgggaagattgtaaccccatagtactcaaccagtgaggaactgggggagggacttgcatgctaggagataaattacctgctgtagcttccctgggtgtgcctgtctatcagacaccagatcttgcaatactgccattaaaagtcttgcttccgctgttcttcatggctctgagtccattctttggatttggacgggtgagcgtgtttctcacactaccaaaattagacaaacacattacaagaaaaaaaaaactacaaacagaaatttctcatgaatgtagaagcaaaatcctctacaaaatcttagcaaattgaatcaataatgtataaaaataattatacaccaccaccaccaagtgggattcacatcaggtatccaagggtggttcaacattncaatatcaattaatgtaattcatcacatcagtaggctaaagaagaaaattagacagttatatcactagatgcagaaaagcatttgacagattcaacactcattc

SEQ ID NO: 57449 - DNA, 595 bp, Homo sapiens
cgggccccccctcggaagtcttctagaattaattaacgcgggcccagtgtccagaaggtcactaccaaggcagtcttactttttttgaatactaagtgctggggctcagaaaatgatatcccaaaataaaggcctcagaacccaaagtttttcctctaacttcctaccctcctgtctttgcctttttattctcccctaaggctagtcatagaaactggaatcttcttctccaaagtgggctatagaaaccagaaccctttttccccatagccagccataaaacctgaacatgttgctctaactttcctcccacctttctatgtaaaaatctgccataaagaaactatctagcctagttgttcaatcataggttataagaccccacccccaattccagagaatgtcttgccccacacccagaaggaaggaatgcatgcacagagaggccaagaagaatctagacaggccgggcacagtagctcacgcctgtaatcccaacactttggaaggccaaggcaggcagatcacctgaggtcaggagttcgaggccagcctagccaacatggtgagaccctgtctctactaaaaaaaaaaa

SEQ ID NO: 57450 - DNA, 518 bp, Homo sapiens
  misc_feature 17: n = A,T,C or G
ccgggccccccctcggnagtcttctagaattaattaacgcggggtagacaagagatcagagaggctgggcacgggggctcatgcctgtaatcccagcactttgggaggccaaggcaggtggatcaccggaggtcaggagttcgagaccagcctggtcaacatggtgaaaccctgtctctactaaaatacaaaaatcagccaggcgtggtggtaggtgcctgtaatcccagctacttgggaggctgaggcaggagagtcacttgagcttgggaggcagaggttgcagtgaaccgagactgcaccactgcactccagcctggtcgacagagtgagactccatctcaaaaaaaaaaaagaaaaaaagaaaaaagcagaacacaaagttggatagagcagtaattgataagggaggattctcttgggttagaggatctgacagtgcaacaacgaccccaggagacgatgcagacatgctgctagatggctctcagatacagtcaataagcattgcccacact

SEQ ID NO: 57451 - DNA, 529 bp, Homo sapiens
  misc_feature 365, 398: n = A,T,C or G
gccccccctcggggtacttctagaattaattaacgcgggtagtagcagcataacatgtatgaatacaaaaggaaatgtcttaaaaatagctaaaaggtttgacagtatattcctctgaggaaggacttgggtgcagagaatattagggcaagggattacactttattattcttcagttttaaattactcccatatgtcactttaactaaatgagattaagttaatatttaaaagagaaagccctaatggttctcaaaatttatatagcatttcttatttttaaaaagcttttaaatataatcttagctatttccttttccttaaatactactgcacagcattatacctgttcaccttgattaaancaaaacttttttctagattttaaattaaatatnttgggagtgtgttccttatgctatattattgataaaaatgtgtatctaatatttgaatcgtattagtccattttcatacttctatgaggaaataccagaaactgggtaatttataaagaaaaagaatttaa

SEQ ID NO: 57452 - DNA, 185 bp, Homo sapiens
  misc_feature 23, 34: n = A,T,C or G
ggtaccgggcccccccctcggangtacttctagnaattaattaacgcgggtctattcatgtatccagtaaaagaatatgtctaactctctgtactagctgctcgattttgctgtgaaactaaaactacttttaaatataaagtctattcttttagtgggagggaggtgtactagaattgtcccat

SEQ ID NO: 57453 - DNA, 616 bp, Homo sapiens
cgggcccccccctcgaaagtcttctagaattaattaacgcgggggagggagaagctggtagaatcatacctgacaaatgtaggcctttgaatctgatgccccaatactggaagtatatggtatacataatctgagggagaaaacattatatgcacaataaatgcttggaatatatatctatgaaaactgagcatctcttcagaattaatgctctcagatgaatgatcagattctagaggcctgtggccacactccataaatacatgtgcggatgcttataagagcgatgggactggtcacttatttctctaaaattatctcattgcctggcaatcagtcttctcttgtatacttgtcctagcacattatgtacatgggaaatgtaaacaaatgtgaaggaggaccagaaaaattagttaatatttaaaaaaatgtattgtgcattttggcttcacatgtttaactttttttaagaaaaaagttgcatgaatggaaaaaaaaatctgtatacagtatctgtaaaaactatcttatctgtttcaattccttgctcatatcccatataatctagaactaaatatggtgtgtggccatatttaaacacctgagagtcaag

SEQ ID NO: 57454 - DNA, 493 bp, Homo sapiens
  misc_feature 43: n = A,T,C or G
cgggccccccctcggaagtcttctagaattaattaacgcgggnaatccaaaaaacatttcaatacatgaatgagaaatttaccaaagagataaatattataaaaaagaaccaaacagatatccaggaactaattaattcattgactgaaatttaaaaatacaatagtaagcttcggcagtagactagatgagacagcagaaggaatttcagaatttaaagttgaataaagactatgtgatatatgagtcaccataaaggaatgagtatttgaatttttgatgtcccagaaggtgaaaagaaaaccaaagggatacaaacctgatttaacaaaataatggctgaaacccaagtctagcaagagatttagacatccagatatgggaggctcagagatccacaaataaatagatactattcagaaaggtcttctccatggcacattgtagtcaaattatcaaaagttgaagacagaattccaaaaaaaaaaaaaaa

SEQ ID NO: 57455 - DNA, 453 bp, Homo sapiens
  misc_feature 404: n = A,T,C or G
cgggcccccccctcgggggtacttctagaattaattaacgcgggtatatatttataaataatacttcaaagttacatatatttaaataatacttcaaagttttatatatttacaaagttgtatatatttacctaaatagttacactattctagtaactttcattcctttgtgtagattcagatttacgtatggtatcactttccttctgtctgaagagcttcttctttcaatatgtcttgtagtatgggtgtctctttcagcattggtatttctgaaattcccttattttcattgtcatttatgaatgacactttcccagaatatagaattttaggttataagcttttttccttttgatactgataaaagaaaaaacttcagctgaattaaatttaaaggaatntagttgagcaatgaacgatttgtgaatcgggcagtccccatatcacagc

SEQ ID NO: 57456 - DNA, 628 bp, Homo sapiens
  misc_feature 614: n = A,T,C or G
cgggccccccctcggaagtcttctagaattaattaacgcggggggggggtaggaaagcaagcggttttatcttgttcttacctttttgcaggaaaagtggctttaaaaaaatttatataataaaactattttggaaattcattcttttagaaagagaccttgagataaatattttttgactctggatatttctatagttctgaacacagattttaaacccactatcaaaatgaaaacaatataaagctatattagtgagtctccatgtagcagtttgtttttatagttactgtttcatgcttaaaacttcattcttactttcattaatgttacccttcactggtatagccactcactaaataagtatatttaaaacatcaaaattttgaactaaagtttgtgattctcttattcagcaatccttatcttatgctggctgcatgagttaattcaacatccagattaaatatcctgaagtaggttctatatatttcctcatacaacagacatggaatggaaatgccactagaaactgccctgctacttttaagtctgacctttgcaggaggtacactttgctgttctatgattgtattcacctacctaaaatacanatgaagacagaaca

SEQ ID NO: 57457 - DNA, 161 bp, Homo sapiens
cggggccccccctcgaaatacttctagaaattaattaacgcgggggatctaacactaactgtattgttttgttaccatcaaataaacatcttctgggtggaccaggaaaaaaaaaaaaaaaaaaaaaaaaaaaaaaaaaaaaaaaaaaaaaaaaaaaaaaa

SEQ ID NO: 57458 - DNA, 516 bp, Homo sapiens
  misc_feature 469: n = A,T,C or G
cgggccccccctcggagtacttctagaattaattaacgcgggataaacagcaaggataaaccaggccacaccttcagcactttgcttggaaatctcaactacatatcatcacttagaattctgctttccacccaacaattcagccaagctttctgccactttacaacaaggatcacctatcagtatctaatatcatgttcttgatttccttctaagacctcaccagaagcaccttttaacattcatatttgtaccaataatctgtttcatggccatacatgtcttctctaagatggtagatgctttctctcacacattgcacttccttgtggatcctcaccagaactacatttgacatccatatttctaccaacagtctcttcaaggcaatgtaagtgtttccctatcatgtgtctcagaactcttccagcttctaccattgcccagttccaaagccacttctacattnttaggtgtttgttacagccacattccatttcatggtatcaaaatctt

SEQ ID NO: 57459 - DNA, 532 bp, Homo sapiens
  misc_feature 45, 503: n = A,T,C or G
ccgggcccccccttcggggtacttctagaattaattaacgcgggnagatcccacctttcttattaattcactttatttttttacaacacctttggattaatgaagaaattaagcagatagcacagagacttcccatatgcctctcccgctcccatatagaatttcttttactgttagcatcttatgtaactgtggtttatttgtcacaaattaatgataaattatgatttatcacaatattgataaattatgatttatcacaatattgataaattatgtaacacaagtccatactatatccaggtttcttgggcttttacctactgccccttttctgttccaggatcctgtctacaagggtacactaggtacactctacctttagtgagcatgtcttcttgggctgcttttgattgactatttctcaaactcccttctctctagtgacatttacaggtttgagaaataatggacagttgttttggcagatgccgtctgatgtntttctcatgattagactgacgttatgggt

SEQ ID NO: 57460 - DNA, 520 bp, Homo sapiens
  misc_feature 453: n = A,T,C or G
cccccctcggaagtcttctagaattaattaacgcggggggggtggagaaaatagtatcaactatgagaggaaaataggagtgtgatgtggatttctcccagcccagcccagtcatgagtcatttgacctctagtttcccctcacactctgtctctgaatctcctttcttcctgaatgaaacgggtagcaatacttccttttaggtactcataacatgctcagaaattaaaacgaaaagtaactgcatggtaatataaaatacagtatactgtgttataattttaagtgcgtgtaatcctactgattcattattttaagcattcattcccttgaatgattacaaaatagtttagtacaatgatagttgtatcatcttccttaacgtggcctcatcagttattagtcactgaaaaattaacagtgtattccttgttcttagggtaaatcaaattntatatttagggtatatgaagaaacatctatgatagagtcattaaaacttctgggtccccatcctggc

SEQ ID NO: 57461 - DNA, 584 bp, Homo sapiens
gccccccctcgggagtcttctagaattaattaacgcgggccctgcggaactgtgagtcaattaaatctcttttctttctaaattacccagtcgggtatgtctttatagcagcgtgaaaacagattaatacattgtctaaagacttagaatcaataggaatgtctgggttaagataagcagttgtgaagaccaaggttttatcatgcagatgaagcctccagatagcaacttcagagagaatagacagtaaatgtttcttatcagaattaaagagactgcactatcagtcctaaggttcatgttgatgttgacgctggtaagcttttcctgaattccaaaaaagaggagggtataatgaagcatgtcttacctctccttctcatcatggtctgaactcatttttcaggttaatttgggaatgacgttggcctagaggaggggtccattcagatagtcaagagggcttagaattttatttttagtttacactagaaagagatgatctacacaaactaactcaagaagaaaaaggaaatctgaataaacctatttattaacaagtaaagatacagaatttgcaattt

SEQ ID NO: 57462 - DNA, 566 bp, Homo sapiens
  misc_feature 402, 518: n = A,T,C or G
cccccctcgagagtcttctagaattaattaagcggccgcttttttttttttttttgtgactcaaattaggtagaagatacttagccatcattctccacttggaaggcagcacagcatgttagttcagagtatggtgtgggcaacaaaagaaggtcaaattctagtcatctgggtcacttggtctgtcacccaggttttgctgtggaaacaaacaactgcttgtgatcattaatttttaaatatggactaggctaagggataccgagatagctggtaaaacattatttctggatgtgtctgtgaagatgtttctggaagaaattagcagactgagtatagaagatccacccttaccaatgtgggagggcatcatccaatccattgagggcccagagaggacanaaaggcagaagaaaagcgaatttgctctctcttctggtgctgaaacatccaccttctggctggcctttgaacttcaggacttatcctaccctagcacacacaccctcccaattccnccacccatttctcaggccttcaggcttgggctgaatataccactggct

SEQ ID NO: 57463 - DNA, 390 bp, Homo sapiens
cccccctcggaagtcttctagaattaattaacgcggggtgctgctctgtacagtgtatgacgtctagctgcatccctggcctctactcactagacgtcagtagccctctcccagttatgacaaccaaaaatgtctccagatatttcctaatgtcccctgagcatcaaaatcaccatctccagcctgggcaacatggcgaaactccatctctacaaaaaatacaaaaatgagccaggcatggtggtgtgcagctgtagtcccagctatttggaagcctgaggtgggaggaccatttgagcccaggagagtgaggctgcagtgagctgtgatcacgccactgcatttcagcctgggcaacacagtgagaccctgtctcaaaaaaaaaaaaaa

SEQ ID NO: 57464 - DNA, 344 bp, Homo sapiens
  misc_feature 28, 41: n = A,T,C or G
aaactgggttaccgggcccccccctcgngaatacttctagnattaattaacgcgggcaccttttcaaggtaaagtgaagagcatgaaattttggacagcgtttattgatggacatttaaagtttgtgatctgcggtaacaaggagaagggtttttaagtttataaaaattatttatcaattagccgggtgtggtggtacgtgcctatagtcagagctactcgggaggctgaggcaggagaattgcttgaacccgggaggtagaggttgcagtgagctgagatcacgccactgcactctagcctgggcgacagagcgagactccatctcaaaaaaaaaaaaaaaa

SEQ ID NO: 57465 - DNA, 377 bp, Homo sapiens
ccgggccccccctcggaagtcttctagaattaattaacgcgggactgtattacacactttatatctcaataaagctgttatatataaaaagaaaacaaatgaaaaatacattagcctgagaaatgatcctaaggctttatcagatacattaaaaaaatattaagaaccctggcctgggcaacatggcaaaaccccatttctacaaaaaagacaaaaattagcaggggtggtggcacacgcctgttgtcccagctacttgggaggctgaggtgggaggatcacctgaaccctggaaggttgaagctacagtgagctgtgatggcaccactgcattccagcttgggtgacagaaatcctgtctcaaaaaaaaaaaaaaa

SEQ ID NO: 57466 - DNA, 344 bp, Homo sapiens
  misc_feature 17: n = A,T,C or G
ccgggcctcccctcggnagtcttctagaattaattaacgcgggtagcttttatagtttttacctggtgatattctttttttcctgctaggcctcaaagtactcccaaattgcccctcacagattctccaaaaaacagtgttttcaacttggtggatcaaagaaaagttttaactccctgagatgaatccacacatcacaaagaagtttcatagatggctcatttctagtttgtatctgagaatattcagttttctcccatagggctaactgggcttccaaaagtttctttgtagattttccaaaaagatgtggtcccaacctgctgaaccaaaaaaaaaaaaaa

SEQ ID NO: 57467 - DNA, 547 bp, Homo sapiens
  misc_feature 69, 495, 523: n = A,T,C or G
ggtccgggcccccctggagtctttgattattaacgcgggacactgctgaaaagactaaccgagactggngaagaaaaagaggtttcattggacttacagttccacatggctggggaggcctcagaatcatggcaggaggcaaaaggcacttcttgaacgtggtggcaggaagagaaaatgaggaagaggcaaaagcagaaacccctgataaacccatcagatctcatgagatgtattcactatcacgagaatagcatgggaaagaccaggccccatgattcaattacctccccctgggtccctcccacaacatgtgggaattctgggagataaactcaagttgagatttgggtggggacacagccaaaccgttatcagaaggaaaataatataggtcagaaacttgggtctatataaaaaaaaagaaaagatggaagaagaaataagtaaagggaaataactcttccttttctttccttaattgatctaacagantacagtttgttcagaataatagtagcanaaatgtattcaattacgtatgctt

SEQ ID NO: 57468 - DNA, 363 bp, Homo sapiens
  misc_feature 11: n = A,T,C or G
gggcccccccntcggaatacttctagaattaattaacgcggggaggaagtggccacacgctgcactgcgctgctcttgtttactctgttctttcagagcctttgtactttgccatcactgctagtaatttcttggtccttttcaatactccattttaatcttgatttttttctataaataataaatctgtgaaaaatctgtaaaaagatttgtgactattaaatgtgcaactaaaaacactggaaaaaaaaaaaaaaaaaaaaaaaaaaaaaaaaaaaaaaaaaaaaaaaaaaaaaaaaaaaaaaaaaaaaaaaaaaaaaggggccgcccccgggggggaccccaaatcccccctaaaaaaaa

SEQ ID NO: 57469 - DNA, 491 bp, Homo sapiens
  misc_feature 28: n = A,T,C or G
cgggcccccccctcggggtacttctagnaattaattaacgcggggctctctatatatgtttttaatcattttgatcaatttttgttgatttcaaggtacaaacgtctcacctttttacgtttattcctaagtatttcttattttaagttctccagcaaatggaagtgtgttaaaattttcttttaaaattgtttattattaaaatatggaaattcaactaatttttggtgctgatactgtattgtgcaaatccactgaatatgtttgttagttccagtactattttggttgagtctgtgattttctacacagaaggtcatgccgtctacaaacaaatgtaattttacttctttctttctgatttggatgagtttgatttcttttgctatttaattgctctggctaggacaggcagtattgattgaatagaaggggtgagagcattcttgcatcatgtgagatcgtacaggaaagcattccattttccctgc

SEQ ID NO: 57470 - DNA, 508 bp, Homo sapiens
ccgggccccccctcgggagtcttctagaattaattaacgcggggtggtagttgctgacagctaatgacagataaacggtgtggggtttctttttggagtaatgaatatgtcctaagttgtagtgatgcacaattctgcaaatatactaaaagccatttaattatagactggcatgggaattatacctaaataaagctgttttgaaaaatgataaatgactactctttctctaggtactggatttatatgctcaatttatctttcatcattcagaaaaacaaaaggaaatgaaggacaatatttttattttatatatttatttttgagaccaagtctcgctctgtcacccaggctggagtgcagtggcacgataacagcttactacagtcttgaactcctaggcgtaagcgatcctccctccctggcctcccaaagtgcttgaattataggcgtgagccagcacactgcctggcttttcaaataggattctgtactattaattcaccct

SEQ ID NO: 57471 - DNA, 615 bp, Homo sapiens
  misc_feature 25: n = A,T,C or G
ggccccccctcggagtacttctagnattaattaacgcggggaccacatccaaacctgttttataagaaatactaaaggaagttactcaatctgatggcaaaggattctaatgtttaacaacgaaacatcagaaattttttataaaaatctctgctaatagaaacaatacaaattcagaatactctaatactgtaactgtggtatataaaggactcatatatttagtttgaagacagacaaaactattaaaaaataataactagaaaaatttattatgcattaggcagtacaaaaatatagaaattgagatatctaaaagtcaaaatgtgaggagtaaagtataaagttttttttagttttgtttctcttttctttgtgaccaatgttaacttgtcatcaggttaaaataattagttacataagatgttttctgtaagcctcacggtaaccacaaagtgaaaacctataatagatatactaaaaacaaaaagcaatgaattaaaacataccatcagagaaaaacaaccacaaaagaagacagaaagtaagatagagaagatttacaaaacaacagtaaaattagcaacaaaatatcaatagtaagaccttaattat

SEQ ID NO: 57472 - DNA, 588 bp, Homo sapiens
  misc_feature 28: n = A,T,C or G
cgggcccccccctcggggtacttctagnattaattaacgcgggtaacccatgccaacgtgggtgtggtggtgcgtgtgcaggtgccgctggccgaaggggagtggcgatccctttccctttctgcctcccgttcccgctcagctgtagccttttccacaggagcaggagacttgctgcggtattggttagcatgctgctggagcaaatccagtgctttagattcagtggttgttttcgtgttgacgctagggctggtattgactttctctgtctcttctctccctgacatcttcccataaacaggataatgaaatcctggagagagatatgccccaggataactgtgcattaggacgggagaaacagcccggtatgcaggatggctggggtcgtacatctgtgggtaaggataagcatgcaagtactgtatgtatgactgatgctgactcatgggtgaggagacagccactcttgttccccgagagtccttccagttcacaggagtctttcgatcatcatttttcagcttgctctcctccattgattgagaatcaggatgcttggcctctttgggctcctctttaatg

SEQ ID NO: 57473 - DNA, 505 bp, Homo sapiens
  misc_feature 24, 87, 475: n = A,T,C or G
gccccccctcggggtacttctagnaattaattaacgcggggggtgggggatgtaaagtcgatttacctgcctctggctagtaacagngaaaaaggaataatcagaacataaaaacctgtttggccatatttcatctccttatagcatattgaaatgttttggcgccaactcatctcattctaatacctcgaaggctggtataaaacacctttaaggcacattgttttctgagcaattatttagagtcaatgtctaagaaatgcttaagcatcacctggtaatacaaattttaaagttatatttaaaacacccaaggaggtttttactgaacaaaaattagattgcctatatgccaaagctcctcatcaactgaaagctggaagctaaatttggccgtaagaaactggcttggaacttcagaagttctggggccaaattcagccctgtattacttgtatgccttgtgacataaaanaaaaaaaaaaaaaaaaaaaaaaaaaaaaaa

SEQ ID NO: 57474 - DNA, 577 bp, Homo sapiens
  misc_feature 28: n = A,T,C or G
ccgggccccccctcggaagtcttctagnattaattaacgcgggggtccaaagaggtgacattttatggatagccatggcagggactcatcagatatgggcactcctgctggactctggcaaactgccaaagaaaaatgagttaacaaaaggaacctgccttaggtttgctggaagtggaaatgaagagaatcgaaacaatgcctatcctcacaaggcaggttttgcccaaccttcaggcctttccttggcctctgaagatccctggagctgcttgtttgtagcagatagtgagagcagtacagtgagaaccgtctcactgaaagatggagcagtgaagcacctcgtaggaggagaaagagaccccatggtaatgacagtcactcttgcacagtgcgctcggacactgagcaagctgtcaattttgtgaattatggaaagttaataagatttaagagagaccatccttggcctatctgcgaatcaaaatgaaagtcagaccaaaggaaatgtgaatgtaaagcaacgtgaggaacacaccatctaagaaaagtgaactgactctactttattatgtat

SEQ ID NO: 57475 - DNA, 209 bp, Homo sapiens
  misc_feature 44: n = A,T,C or G
ccgggccccccctcggaagtcttctagaattaattaacgcgggngaaaaaaaaaaaaaaaaaaaaaaaaaaaaaaaaaaaaaaaaaaaaaaaaaaaaaaaaaaaaaaaaaaaaaaaaaaaaaaaaaaaaattaaaaaaaaaaaaaaagggggccccccccgggggggaccccaatttccccttatagggggttttttaaccccccctaa

SEQ ID NO: 57476 - DNA, 225 bp, Homo sapiens
  misc_feature 140: n = A,T,C or G
ccgggccccccctcgaaatacttctagaattaattaacgcggggctggcagggtggcgcctgcggtttctatgtatttatagcaagttctgatgtacatatgtaaaggacttttttaaatatatgtgccttttgcctaanaaaaaaaaaaaaaaaaaaaaaaaaaaaaaaaaaaaaaaaaaaaaaaaaaaaaaaaaaaaaaaaaaaaaaaaaaaaaaaaaaaaaa

SEQ ID NO: 57477 - DNA, 241 bp, Homo sapiens
cccccctcgaaatacttctagaattaattaacgcgggggtggacgagctcatcatcaccgactgagctggagtcatcttcctgcccttgccccatgcccaattttcattctcactttatatgtgtaaataataaaatattcaactttcaagaaaaaaaaaaaaaaaaaaaaaaaaaaaaaaaaaaaaaaaaaaaaaaaaaaaaaaaaaaaaaaaaaaaaaaaaaggaaaaaaaaaaaaaaa

SEQ ID NO: 57478 - DNA, 425 bp, Homo sapiens
  misc_feature 284: n = A,T,C or G
gggtaccggggccccccctcggggtacttctagaattaattaacgcgggtcagaggtggaggtggagtcagacagcttcatgaatgctgtgctctggctacgcacacacttgggcagctgaagccctgccattctgcatgagctgatcagcctgtgccacacttcgctcttgaggagctcaacggtctggcagggcagcaggaggctttctgggctctggactccacggatgcgtgggcagaggaatgtgggctatgtagtcataataaattaggacacagaanaaaaaaaaaaaaaaaaaaaaaaaaaaaaaaaaaaaaaaaaaaaaaaaaaaaaaaaaaaaaaaaaaaaatttaaaaaaaaaaaaaagggggccgcccccgggggggacccccaattccccctatagggagtggtttaacccc

SEQ ID NO: 57479 - DNA, 331 bp, Homo sapiens
aattaacgcggggggcctttcatctctttggaatccttctaaaaaatataccaccttttattgcaccatgggtccaagaacaaataagaagggcccccactgttgacacaccattataatatcgtgatcaaaatgaaaaacaaactaggcataaaagaaatgtatgaaattgctggcagctcggcccatgccaacttgtaacaggtttttattctatgatagttgtaatggatacaatgtctcaacactgacgagcaacatgtcactgaatcttccagcagcctgtggggtagcttgttttaccctcttttgcagatagaacaaaaaagaa

SEQ ID NO: 57480 - DNA, 459 bp, Homo sapiens
  misc_feature 29: n = A,T,C or G
ccgggccccccctcggaagtacttctagnaattaattaacgcgggtggctccgggtcttgggaggactgtttctttgcacctctttagagatgaatcatacattcttggttaagtcataaaaggcttattgatttgcattcagaatcacctgatagatgcctttagttttttaaaaaattaaaaacccagaatatgtgctgtttgtccccattgaaatctaataataagaaattgtaaaggattgtttcaaaaagaaaggtctgtggttagaaatggttagaaatcagcttcattaaaagctgacattcagactgcactttttttaagcttctccgttctcttttggatattgttctcccataagaactttttagtcagctagattcccttttctcaaacccctggtaactaaaactttacaggcctttgggaaaactgtattcctgcacgctgaacta

SEQ ID NO: 57481 - DNA, 484 bp, Homo sapiens
cgggccccccccttcgaaatacttctagaattaattaacgcgggcagagttacttcagcaaaaaaacaattcatgtattgggcagcactcagaatcagaagaggctcagagagctccgcatagcagcataagcagtaagcttttacatgctgactagcagaataaaaatagagaaatcaacagattgtctactgacaggcatttattttatttaggcatgatgtcatgaggcatttgtttactcggacatggttttatcagttggctgcttgtgattggctgaagctcagatgtttgtgattggttgaaatccaggtatttgttacaaaaaaatacattactaggtttccgtttgtttatggactaagttaggttgcagtttgttatgtaggagctcaaagttcagagacatcctgaggctaatttaacagcttatttgatgtaacagatgaaatgtgcctgggggaaaaagtgactgtcaagt

SEQ ID NO: 57482 - DNA, 253 bp, Homo sapiens
  misc_feature 213, 247: n = A,T,C or G
gggcccccccctcgaaatacttctagaattaattaacgcgggggttgcctctgatccttttgttatttggggcatggaaagtttgggttttccttttgattcagttccaggaaggcagcattaatcacccttaggtttcttgcctccataccctgttctcatacctcatttccccccgaaagacatgatcctcataaatctttatgggaggtnaaaaaaaaaaaaaaaaaaaaaaaaaaaaaaaaanattaaa

SEQ ID NO: 57483 - DNA, 434 bp, Homo sapiens
  misc_feature 32: n = A,T,C or G
gtaccggggccccccctcggaagtcttctagnattaattaacgcgggaccactgtcatccagggtgagtgtgggcatacccaaagctccacttccctgagaagcaacatcagacccttaacatgatgtagtagaaagggaaaaatagacttcactgaaataatcaagaaagtcactaaccaaataaacaagcaaataacaataacaaaccctgtgttgggggttaggaggtgggaaatacctgtagtatttaaaatgggaagtttcccacaacaacaacaacaaaaccctaatatatgcaaaggaacaggaaagtatggcccgtatactggaaataaataggcaacagaaactgtatgagtgagcagatgttaggtttaacagaataagatgtcaaagtagccattataaatatgttggaaaaaaaaaaaaaaa

SEQ ID NO: 57484 - DNA, 230 bp, Homo sapiens
gggtaccggggccccccctcggggtacttctagaattaattaacgcgggggggtggggggaactcttggaagggaagaagtatcacttctttctcaagtggagtgtttacaccttgctgtaacatttgaactttcacaagagatgtaataattttgataataaaattcttaaccataataaaaaaaaaaaaaaaaaaaaaaaaaaaaaaaaaaaaaaaaaaaaaaaaaaa

SEQ ID NO: 57485 - DNA, 482 bp, Homo sapiens
cccccctcgagggtacttctagaattaattaacgcggggccaccgcactccagcctgggcgacagagccaagactccatctcgaaaaaatataaataaaagaaaaataaaaaataaatcaaaactattttttttgagcacaaagtaatttattatccagttaaagtgtaaaaaaaaaagaaaaaaaaagatcatcaacccttctattggaacctacctgataaggtgtatttcgtagtttagactgtcttacagcagctgctgccccaccgtatgttgtttttccaggataaaaaggagaatctccaagctgactggttttaaggattgaagaattcccaagtgactgcacagaaacagaatgataaattataagccatatgaacccaggaggtggaggttgcagtgagttaagatcatgctgctacacactcaagcctgggcaacagcaaaagactcttgtctcagaaaaaaaaaaaaaaa

SEQ ID NO: 57486 - DNA, 603 bp, Homo sapiens
  misc_feature 28: n = A,T,C or G
cgggcccccccctcggggtacttctagnattaattaacgcgggtatgttcatcacaaagcttaaaaataatatgatgatattttctgcctaggagctaaaagtcagtattttggctcttgccacccaaatcctgactggatgtgatgaagtgttggaaatgctacagcaggtcacaactgccctcataaatagtgacatagcagaccgtgagcagaggtgaggaatggattgtgggctgtgaccagctgccctgtgggaagaaaagtttgtttattgaaattaaatctttttagaatatagaaggatcaattttatatagagagatttttgtgagaataggctaaaagggcaagtgtttgaaagccaagtgcagtcacactctttcatgtgctttcaggtgagattgggagaggcttatgtatttggtctgggatgctgcctggacattgagattttcaaaagctctgcaggtgatttggatgtgcagcaaagcttgagagcctctatgccaaagctcatgatgatatgtggattttacttatgttgtcagtggccctaatgtgttctctttttctcattctccccccagtgcccacctagcc

SEQ ID NO: 57487 - DNA, 574 bp, Homo sapiens
  misc_feature 28, 513: n = A,T,C or G
cgggcccccccctcggaatacttctagnattaattaacgcggggggatgtgacaagatgcacgggtacagacatctgggaagagtgataaaactcacagaagtcagaggggagggagaaaagtggcaggggtgtctaatccataaaaggaaagaaagcttagccattgggaaatcgaaacttcaagtagggaagaggacaagatgtaacctaataaggggataatggaacttaggtgatgtccaggaagactgcaaccccatattactcagcctgtgaggaactggggagggacctgtgctctaggggataaattgttgaaactgcactgggtgtgcctgcccatcacacatccgatcttgcaaaaccattattaaaaagtcttacttttgtccgggtgcggtggctcatgcctataatcccagcattttggggggctgaggctggtggatcacctgaggtcaggagttcaagaccagcctggccaacatggtgaaaccccatctctactaanaatacaaaaattagccgggtgtggtggcgcatgcctgtaatcctagctactcgggaggctg

SEQ ID NO: 57488 - DNA, 511 bp, Homo sapiens
  misc_feature 488: n = A,T,C or G
cggggccccccctcggaagtcttctagaattaattaacgcgggatgcctgtcatgataagtgatggatgttacttttagattttgtcagtgattggtcactgtgcatctgtcagttcatgcacatacagcaaagcttgttgttgtgttgcttccttggctcccagcagtaaacctatatgagattttacaaacctggataattgaaagagggacttggccaacatagataaaagtgcaacaaagaaatgaaaaatgataatgctagaaatgaaacccaaattcagtgtaaatggagtactgaagaaattgctgactgtggaaatgctgacattgctgccatttcagagaatctggatatgcactgcaggtgcttaaagaaggagaactcattgatacaaatgagagaagtagttgtgatgaaaaggatgaaaatgtcccagaggaagcaagactggcaaaatatttcacattaaagaaattcttgganatatttcacaactttgaaagtgt

SEQ ID NO: 57489 - DNA, 619 bp, Homo sapiens
cgggccccccctcggaagtcttctagaattaattaacgcggggactgaaataaaccagaatggaatattcaggagctgtgggataactataaagggtgtaatgtatgtgtaacaggaataccaagaggaaaagagagagagaaaagaacaaaagtagtatttgaacgaataatcactcaggatttccccatgttaatgtcaggccccaaaccacagtcaggaggctcccagaacaccaagtaggataaatgccagaaaaactatagataagcatgtaagtttcaaaccacagaaaatcaaatatttaacaaaatccagaaagaagacagaggaaaaaaagccttacctatagaaaaggaaagaatgatttcaacttctacccagaaagcatgcaagcaaggagacggcagggtgaaatatttaagcactgaaagaaaaaatcaccacctagaatctgcaccctatgaaaatgtccttcaacactgagggagaaatactttttcagacaactggaatctgggggaatttgttgccagtagatcttccttgaaagaaatgttaaaagaagttcttcagagaaaaggaaaatgatacaggtcagaaactcagatctaagaaa

SEQ ID NO: 57490 - DNA, 590 bp, Homo sapiens
cccccctcgagagtcttctagaattaattaacgcggggagggtagtaatagcttctcaccattgctagtctctaggtgtcctaccataccttgtttgttaccttatccagtccagaaactctgtgaatagtcccttcattaaagccttttcattttaaccatctgggatgacacaagaaacactgtgaaaggtaaaaattgcttttgtttgtttgtttgtttcagaactcctttgctgtggataagaagattgactaggtgacttgctccaggttcaaagcctgtttgcataaaacaacaacgacttgtctttgttctgtttggttattttgagacagggtcttgctctgtcattcaggttggagggcagtggtgcaatcatggctcactgtagccttgacctcctggggtcagatgattctcccccctcagccgcctgagtagctgggaccacaggtgcatgctatcacgcccagctagtatttttaaatgatttttgtagagatgggatctccctatgctgcccaggctgggtcttgaactcctgagcccaagcaatcctcctgcctttggccttccaaagtgctgag

SEQ ID NO: 57491 - DNA, 256 bp, Homo sapiens
  misc_feature 15, 28: n = A,T,C or G
cgggcccccccctcnaaatacttctagnattaattaacgcgggatcctcaaaaaaaaaaaaaaaaaaaaaaaaaaaaaaaaaaaaaaaaaaaaaaaaaaaaaaaaaaaaaaaaaaaaaaaaaaaaaaaaaaaaaaaaaaaaaaaaactttaaaaaaaaaaaaaaggggcccccccccgggggggacccccatttccccttttgggggtttttttaaccccccccccttgcccttttttttaaaccttgggaattga

SEQ ID NO: 57492 - DNA, 557 bp, Homo sapiens
  misc_feature 19, 32: n = A,T,C or G
taccggggccccccctcgnaggtacttctagnattaattaatttaagcaagaaaatgaaatatatagggctctaacaggcaaagagacatatctaattatgatgtatattattccagaagagtaaaaactttaatctagaaagcatgtgggctaaggattggaatgcgttaggaaatatgatcaccctctttaatgtctatagtgagatgtataatggccccctactgatgttggtgcctcaagctctgaaacctgtgaatatgttatgttaaatggcaaaagagactttcacagaagtaattaagtttaaggacttttaaataaattattctggactatctgggaggctccaatgtaattgcataagtcattgaaaactgagttcttagctggtggcagaagagacaagacagaagaggagccagagagatttaaagtgtgagatgactccacacatgattgctgatttggagatggaagggccaatgtaatgagggatgtagaaggccttaaagagctgtgagggaatctctcagctgacagccaggaaaaaaaa

SEQ ID NO: 57493 - DNA, 601 bp, Homo sapiens
  misc_feature 11, 24: n = A,T,C or G
gccccccctcnaaatacttctagnattaattaacacctttcttagccttagtttgtctgtcagtttgtgatgattatgattaaaatgagggtgacatccttagcataagccacatctcttaaaatgttttaacatctgcataacctcttcataccacaaaggggcagtatttttggaatttaagatatacaggaatataagatgcatcctaattatgtgtgagtgttatttttaattatgcagttttcaaacatacacaaaactagaaagaatagtttattgaatcacactctacatttcacccagattcaataattaccaatattttgccatatttgcttcatatacgttaaatgcattacatttgactggaagtaagctctggaggctttaatagatatgtgttcaacttttttggtaagaatacttcaaaggtagaactggctgcttcatgctgtatcacagcaggaagcatacaacatctggccccacttttatgatgctaagattgatcagtgtgttcaggtggtgacaacctgatgcctctgttgtaaaattcctcatgaatactttcatctaatggtgtcatctactgacactg

SEQ ID NO: 57494 - DNA, 397 bp, Homo sapiens
acattgcaatcaggaaacagaaatatgaaaagaatggactcaaaaccaagacaaaaatacagaaaataaaatagaactataggagaaccaaatattatccaatcaccagacatggattttaaaattaactgtgactacaactttcaagttataaaatgacaagatggaaaatttcagcagagaactagaaactctaaaagttaataaattctaggactgaaaaatataataattaaaattttaaaatcagtggatgtttaccagaaagttaaactaacacactaaagaaaaacaccgtcaaattataattcttagaaaataaccattaaagcccagcgcagtggctcatgcctataatcccagcactttgagaggtcaagggggaggactgcttgag

SEQ ID NO: 57495 - DNA, 598 bp, Homo sapiens
ccgggccccccctcggaagtcttctagaattaattaacgcggggtctattttaaacaacatgtccaaaactgagagaattcctggtttctacatccaaacccaaacctactatacacttatccttttcattcatttggaaactctatccttccagtccctcacacaaacaactttggaatcagctttgccttctctattgctctaacatataatatccagttcactaggagatcatcatctctttaccttcaaaatatatccagaatctatcagtgttctgtaacattttcatttttgttctaaaaacgcatattgtaaaccatagaatgaccactaagataattaaagaagtatagttaataaaccaatagtggtattaaatgaagcacttataataaaaacaaaaaacaattcaaatttccttctaaaagaaggaaaggaaaatagaaaaaaaatacagaaataatatatggaaaaaataaattacagatatattttaactaaatcttgtcaaattttcattaaatgtaagtggtctaaaaacaccaatcagaaggctaatcttggcagactaaacctttaaaagtgagatccagc

SEQ ID NO: 57496 - DNA, 492 bp, Homo sapiens
accgggccccccctcggggtacttctagaattaattaacgcgggtactatcttcttctggcacactatataactgacttgtttattatatttattgactgttttcccccactagactataaaccacatgggcagggctttttgttggtttaattcactgccgaacccccagcacttaagacagtacctgataagccgggtgcagtggctaacacttgtaatcccaacactttgggaggccgaggcggttggatcacctgaggtcgggagttcaagaccagcctgaccaacatggagaaaccccatctctactaaaaatacaaaattagccaggcatggtggcacattgcctgcaatcccagctacttgggaggctgaggcaggagaatcacttgtacccgggaggcggaggttgtggtgagctgagatcgcgccactgcaccccagcctgggaaacaagagcgaaactccgtctcaaaaaaaaaaaaaaaaa

SEQ ID NO: 57497 - DNA, 422 bp, Homo sapiens
cgggccccccctcggaagtcttctagaattaattaacgcgggggttagaacttcagcacatctttttaggagatacagttccacctataacaatctttaatatataagtagatttaacaaatgagtaagaaatgttggccgggtgcggtggctcatgcctgcaatcctagcactttgggaggccgaggtgggtggatcacttgaggtcaggagtttgagaccagcctgaccaacatggcaaaaccctgtctctactaaaaatataaaattagctgggcatggtggcacatgcctgtaatcccagctgcttgggagtctgaggcaggagaatcacttgagccaggtaggtggaggttgcagtgagctgagattgcgccattgcactccagcctgggcatcgcatcagatcaagactccatctc

SEQ ID NO: 57498 - DNA, 553 bp, Homo sapiens
  misc_feature 476, 505, 519: n = A,T,C or G
ccgggccccccctcggaagtcttctagaattaattaacgcggggggaaactttttttaatgatgtggtaaaattcttattatcaaataatatccaaaacaaaaaacaaaactgttatgtgtagtgtatacagtataaccctaatgaacatatattggggtattgaataaagaaacagaccaaattctaactgtgagagagagacagagagagagagagagagagagagagagacagacagacagaaaggggaaaggggggaggagagagaaggagaaaaagatctgccagcatgatttttgttgaattttcacctagataagttgattctaatgttcgtttggaaatagtctggcaagaatacctagaaaaaaactgacagaaaaaaaaaatagagtaatcagagcaaactagcccttccagacatttttacattttatgaagctacaataacttaaactaggtttagctgctggncatgaacatacagataaagagaaaagaanagaaatgtagaatntagtacatgacaacagtggtatttcaaatcaata

SEQ ID NO: 57499 - DNA, 507 bp, Homo sapiens
ccgggccccccctcggaagtcttctagaattaattaacgcgggggtgggggaatgcatgggacagggttgggttgggagctaaacatggctcctgaactctgggtggccagctcttgccatcttcttcctctctgatccagttgcttagaaatgcaacagaaatcaccaggcatgaacctgtttactggagcctgtttactggagcctggtgcatcatataggtatactgtggtctcatgatgtaataggaggtctccctgttccctagacccagatcagaagggcttcatgcacataggcattcatcatctatagccaagtagccctagagaaggtgcccagcaagccttgctataaagagggagggctgggtgtagtggctcaggcctgtaatcccagcactttgggaggccaaggcaggaggatcacttggggccaagagttcaggggccagcctggacaacatagcaagactctgtctctacaaaaaacaaaaaaaaaaaaaa

SEQ ID NO: 57500 - DNA, 388 bp, Homo sapiens
  misc_feature 37: n = A,T,C or G
ctggggtaccgggcccccccctcggggtacttctagnattaattaacgcgggaggagagtccattgaggatccttagaaaaagctttcagtattttccctcctgtgagtttttgtcttacatcagctctgtggtcatggatgatttcacagtcaccagtgtcaccattcttcatcagcacagttagaaacagactttggagtatggcttaataagaacctggcatttgctctattttcagcattgtcgatgctcttcggagcctcagccagatatttatgtgcatcattgtagaagcacggaaaagtggtaggaagagctcttcattcttactacatttttagaattttcaggattaaagtttttctttctgggaaaaaaaaaaaaaa

SEQ ID NO: 57501 - DNA, 533 bp, Homo sapiens
  misc_feature 17, 46: n = A,T,C or G
ccgggccccccctcggngtacttctagaattaattaacgcgggggngaaaaaaaaaaaaaaaaaaaaaaaaaaaaaaaaaaaaaaaaaaaaaaaaaaaaaaaaaaaaaaaaaaaaaaaaaaaaaaaaaaaaaaaaaaaaaaaaaaaaaaggaccaaaaaataaggaaaaaaataaattttttttggccccccctggggggggccttttttttcccttttttttttttttttttcgcccttttttttccttttttttttcaacttttttttttttaaaccccttttttttcccctttttttcctttttagaaaattcccctttttcggttttgtttttttatggaaagggcccccccctggccctttttaaatttttggccccctttttttttgaatttgaattttttcctttttttttttttttaaatttccgccaatttttttttaaaatcccttttttttttccccaaaggggccattttgggatttttttttttttttttacaatttttccccaaatggggttttttttt

SEQ ID NO: 57502 - DNA, 531 bp, Homo sapiens
ccgggccccccctcggggtacttctagaattaattaacgcggggtcttagaggccttgttccccataatttagagctcctcttcagatttgatcaagtagggacatgtgtcaaacccaaaatgtgctgctttcagacctagcttttcagggccgttaccccctgaaccggttcagtccacctgtgtcgaagctacttggcacaaatgtgtcaggggctcaaggtgcagtagggtttggctcgttatatgcccctgctagatgagattggattctaaatatgttcttctgaaaggggaaacctatttagaacatctgcacgttttagggagcatttctcctagacaccctcacatgattcccagtcatctgagaatgccccaaaaggctgaggggagcaaggtgctgtatttcttcagagtggaagattacaaactcatgagctagagggttcaaagttggtcaaatctgataagggaaaggaccaaaacacacacatacacaacacacacacgcaccaaaaaaacaaaaaa

SEQ ID NO: 57503 - DNA, 606 bp, Homo sapiens
  misc_feature 585: n = A,T,C or G
ccccccctgaagtctttgaattaattaaaagggagaaataatgactctccagtggagaaacttggcacacgccaccttaactaaggatcaaggtgaacatcagcagtcacacgacgcagtgacattgtgcagcatttaggatgcactgacatggggacaaccgcacttctgtggtactcttgccaaaactgtatggcttctaattctgaatgaaaaggcatcagacaaagccagatttagaggcatcctacaaaacatctgaccgatattcttcaaaagtatcaaagtcatgaaaaacaaagagggacaggtgtgagaaactgtcacgagctgcagaaactgaggtgacaccaacacgaaacactatgtagggtcctagccaggggcagtggctcatgcctgtaatcccagcactttgggaggccgaagtgggcagaatacctgaggtcaggaattcgagaccagcctgaccaacacggtgaaaccccgtctctgctaaacacaaaaagttagctgggcatggtggcgcatgcctgtaatcccagctacttgggaggctgaggcaggagaatcacttgaacctgngaggcagaggttgcagtgagc

SEQ ID NO: 57504 - DNA, 584 bp, Homo sapiens
  misc_feature 27: n = A,T,C or G
cgggccccccctcggggtacttctagnattaattaacgcgggggtatgcctactgaccttacagaaattaaaatggtcataagggaatattgtgaacaattgtttaccaataaacaagataacttagcataaaatggatgaaattcataggaaagatacagactgccaacactttctcaagagaaagtaggaaatccgaatagacttatcataagtaaagagatggaactaatcgttgcaaaacttcttagaaagaactcaggaccagatgacttcattggttaaaaaagttaaaggaaaattacttaatactaatcctcgcaaactcttccaaaatcccaatttacaagaccaatatcatcatgattccaaaaccagataaagtcattgcaagacaaaaactaaaggctgatatccttcttaagtattaatgcaaaaattcccaaccaaatagtggcaaactgaatccaagaatatatacagtgatatacatcataaccaaatgaggtttctcctacggatacaaagttggtttaacatacaaaagtcaatcgatgtgatacatcatattaatagaataagag

SEQ ID NO: 57505 - DNA, 518 bp, Homo sapiens
  misc_feature 32, 411: n = A,T,C or G
gtaccggggccccccctcggaagtcttctagnattaattaacgcgggggaatctcagtagaaaaatgtgtactattttaaaaagaggaattttagaaattctagaattgataatgaaataaccaaaatgaaaaatgccgaagataggctcaacagcagattgaagatgacagaaaaagaatcaataagcttgaagatcaagtaatagatatttattctaaagaataaagagaaaaatgaataaagcctcagagactggttggtaatattgagcataacagcattcatttaatgaaattattaaaagcataggagaaaaagaaaacggctgagagccctgccagtttattaaagaaattgacaagtttatcctaagaattacatggcgatccaaaggacctacactaaccanatcaatttctaaaaataatgaagttggaagacttacactaactgattttaaaactttccataaagctacaataatcaagatagtgtggtattggtctatgaatagat

SEQ ID NO: 57506 - DNA, 469 bp, Homo sapiens
  misc_feature 13: n = A,T,C or G
cgggtcccccccntcggggtacttctagaattaattaacgcgggggggaatctgggcgagctggttgagtccatgcgtttgtgcttcctctcagtccactttcgcttacgatggggcgactcttgtccatcgtcacctcaccgggaaacttttcctgccgggccagttaatggtcccctgtaccatccccatcctgagtgactactaagcagccgcagcgactcggggttgctccgtgaccacgttactcagttaaccttcttgttccctggagaggcggagctgaatggcccggacggggtttctccatgtttcccaggctggtctcaaactcctggactcaagcaatctgcccaccttgcctcccaaaatgctcctccaaaaaaggagtgtgccgccacacccagcctgagcaacttgtgtttttaaggtgaaggacatgtttgctgccctaacaccatgattgcaa

SEQ ID NO: 57507 - DNA, 461 bp, Homo sapiens
  misc_feature 401, 424: n = A,T,C or G
cgggccccccctcgaaagtcttctagaattaattaacgcgggtgtaatctcttgtaggatattagtagaatcccttccttctacccacttctacccctgccttctagacacctgtagcagccctccagctgtgacaaccaaaaatgtctccctacattgccaaatgttcctggggtatggccaaacctctaccagttaataatcaatgaattaaagccgggctcagtggctcatgcctgtaatcccaacactttggaaggccgagaccagcagattgcctgagctcaagagtttgagaccagcctgggaaacacagcaaaaacccacctctaccaaaaaaacaaaaaattaactgggagtggtggtgagcacctgtagtcccagctgctcgggaggctgangcaagggaattgcttgaacctgngatgtggaggttgcagtgagccgagattgtgccattg

SEQ ID NO: 57508 - DNA, 288 bp, Homo sapiens
ccgggccccccctcggaagtcttctagaattaattaacgcggggcaaggctctgtcaaaaaaaaaaacagaaaaagaaaaagaaaaaagaattagagacatctggatcaaatcagctgccagtctcgcaaagtgtcgggtaacatcctattaagcttgctgcttacacatcatctataaaatactgaaaatatcattttaagaaatcttttttttattttgagacagagttttgctcattgcccaggctggaccctgtctcaaaaaaaaaaaaaaaaaaaaaaaaaaa

SEQ ID NO: 57509 - DNA, 330 bp, Homo sapiens
  misc_feature 28: n = A,T,C or G
cgggcccccccctcgaaagtcttctagnattaattaacgcgggcactagacacttatgtgaattcatattaaaaaaaaaactagtaaaggtaactacgtaggtaaatataaggccaatattattggattctttgtttttaacttctcttttagttttctatatgtaaagatataatgtatgaccacaaaaatacaaagagggagtgtatggagttgtacagaagcagtgtttactgctactgaaaataagttagtatcaatgcagactagattgctgtaaatttagaatattaactgtaattccaagagtaaccaaaaaaaaaaaaaaaa

SEQ ID NO: 57510 - DNA, 508 bp, Homo sapiens
cgggccccccctcggaagtcttctagaattaattaacgcgggcatatttaaatgactataataaaaactaaacaaaacaggaagtaacaattgttgaccagaatgtggaataattggatcacacacattgctgatgggaacgtaaaagactgcaggaaccaacttgttcagtttgaaagtttttcaataagttaaacataaaatgaccacataatccagctcttacacttgtagatataaaccccaaataattaaaagcaagaactcaaacacattcttgtacactgagcagcattattcaagatagaaggtgaagacaatcaaaatgttcaacaacagatgaatggataaacaacaaaatgtggtctatacatgcagtaagatataattcaaccttaaaaaatgaaattctgatacatatttcaaagtgtgtcaacctagaaaaaattttgctaagagaaagtacccagacacaaaatattgtatgattctatgtatgtaacatatg

SEQ ID NO: 57511 - DNA, 586 bp, Homo sapiens
  misc_feature 28: n = A,T,C or G
cggggccccccctcggaagtcttctagnattaattaacgcgggggacaccgctaaggcagagcagcgttctcttcagcacagacctttggggcactgcctcgctttgggacaactcgggaccgcatagacgggatcatggcacaagttgcagtttccaccctgcccatggaagatgaggagtccatggaagatgaggagtccattgaagatgaggagtctgttgaagatgattccgtggagagcaggatggtggtgacatttctcatatcagctctcgagtccacggacacttgcttcccttcttcctgccctcggacatgagactccaggttcttatgcctttggactctcggacttgcaccagcggctttcccgaggctctcaggccctcggcctcatactgaagactgcactgcgggctttcctggttttgaggcttttggacttggactgagccactactagcttctctctttccctacctggcagacagcctattgtgggactgccttctaaccgtgtgaaccaattctccctcgtaaactcccttatacatatacgtgtatcttgttggttctgtacctc

SEQ ID NO: 57512 - DNA, 265 bp, Homo sapiens
  misc_feature 28, 45, 52: n = A,T,C or G
ccgggccccccctcgaaagtcttctagnaattaattaacgcgggnacggggnagaaccaaatgtccaagttgctgaactgatgatcactggagaaagagaaactatccaccaggacagctgccacctctaaaccaagtagaattctctgtgaaatgggagcgccgtagaattttaagtaatttaattgcaaaaaaaaaaaaaaaaaaaaaaaaaaaaaaaaaaaaaaaaaaaaaaaaaaaaaaaaaaaaaaaggggacccccccg

SEQ ID NO: 57513 - DNA, 606 bp, Homo sapiens
ccccccctcgaaagtcttctagaattaattaacgcggggacattactttagatcttatacatttaaaaaaatgaaatgtatgttattaacaattttatagatgtaaatctgacaatttaatgaaatggccaaatcccttgaaagatgcaaattaccaaaattaacaaatacgttgtagaaaatctaaatagacctatatctcttaaagaaattgaatttgtaatccaaaacataaatatccaagtagtattttggatacttttatgggaattatatcagtcttttacagtagcttttacaagaaagaggaagaagaaaaaattacttcattttgtgagtacttggtaaccctgattacaaattagacaaggaaattggaagtaaagtttatagacaaattttttttataaacattgatgcaaaaacacttgagaaaatattggcaaactgaatccatcaaataataatactataataacatatcttgcacaagtatacttgatgtgagaatggcaaggttagtttaacatttgaaaaatcaattaatttaattcactacattaattataaaaagcagaaaaataatgtaacttttgcatctgatgt

SEQ ID NO: 57514 - DNA, 444 bp, Homo sapiens
ccgggccccccctcggaagtcttctagaattaattaacgccgggcaggggccccacgtaggcaaaggctatgtcattaattctcaaatgagatttgtccaagcgggaaatgcacatctagtgcagtagttttaggccagcctttttcagagcctcaggctctgcctgtcaccttgaagacatccatgtgggtcccctcagggcttctctttgccataaaaataaaatgattgctcccaccaatgtttgcgtccatgggagaggaggtaggagcagcagtacttgtcctgtgtgtgggagacacttgaagggctcagtgggaattgtcagcagcagggaacagaacaggtggtgagaagagtcattccactgagtttctgggcctttgactccctgaaacttccttctcctctatccaacctccctctccagaaaaaaaaaaaaa

SEQ ID NO: 57515 - DNA, 448 bp, Homo sapiens
acttctagaattaattaaagaaataaaggcattttcaacttaacataattttcaacttacaatggtttgtcaggacagaacccaatcatataagtcagagagcatctgtatttactttgccaggttgttttaagaacattagacagtgagtgactgtaaaatacctaaaccaaaggcagtcaataaatagtagctactgttgttgtcaggaattttcacttgaaaaacaagatgacttgatcagttttatttgagcatgaaataaaagcatacttcggttactcagttgttctgattataaaattatggtaattcttggccaggcatggtggctcacacctgtaattccagcactgtgggagatcaaggtgggaggattgcttgaggccaagagtgataccagcctgggcaatgtgacaaaaccccatctctaccaaaaaaaaaaaaa

SEQ ID NO: 57516 - DNA, 514 bp, Homo sapiens
  misc_feature 27, 189: n = A,T,C or G
cgggccccccctcggaagtcttctagnattaattaatttgattgtggtaatcattacaatatatgtacatcaaaggatcacgttatacatcttgaatatggtcaaatctttatttgacaaatatgttaaaataagaacaaaactcaacagcaaaaaaaacacaatctaataagaaaagaggaaaatcancacgaaaagacatttcaacaaagaggaatatagataataaataagcacaaaatattcaacctcaccaggcatcaagaaagtccaaattacaactgtgatgagatatcaacacacacctatttgaatagctaaaataaataatgataataacaaatgcctacaataatgcagagaaactgaatccttgatacatcaatggtaagaatacacatggtacagtcactgtggaaaatagtctggcaatttcctacaaaactaaaatgtgcttaccataggactcagcaaacagccttctgtgaatttgtctctaaaaaaaaaaaaaaaa

SEQ ID NO: 57517 - DNA, 364 bp, Homo sapiens
  misc_feature 17, 27: n = A,T,C or G
cgggcccccccctcggnagtcttctanaattaattaacgcggggtggggaatctgttctaggcctcttccagcttatggtggttgttggcactccttgtcttttgcctgcatcactccagtcttcaagatcagcatctctaaatctctctgctccatcttcacatgaccttccctaaatcaagcctccttctaactctcttttttataaggatacatgtgatggcatgtagggtctaccaggataatctccccatctcagtatcctttacttaatcacatcttcaaagaaacattttccagatgaggtaacatttacaaatttcagagattaaggcatgatattgggccaaaaaaaaaaaaaaa

SEQ ID NO: 57518 - DNA, 456 bp, Homo sapiens
ccgggccccccctcggaagtcttctagaattaattaacgcgggtccctcttggggcttttattattctggcctctttttagaggaaaaaaaatgattttttgagctgcagacactatgtccaattaggtttgtatactcattttaacatcaaaatttaggccaggctctgtggcttacacctgtaatcccagctctttgggaggctgaggtgggtggatcacgaggttaggagatcaagaccatcctggctaacacagtgtaactctgtctctactaaaaatacaaaaaaccattagctaggcatggtggcacgtgcctgtagtcccagctagtcaggaggctaaagctgaagaattggttgaacctgggaggcagaggttgcagtgagctgagatcccgccactgcactcgagcctaggtgacagagtgagactccatctcaaaaaaaaaaaaaa

SEQ ID NO: 57519 - DNA, 602 bp, Homo sapiens
cgggcccccccctcggggtacttctagaattaattaacgcgggttctacattcccatatggtatcttaaagatttaacatttcaaagatcaagaaagtttactttctttcagattaaataatgagaaaggcagcatctcactgttttaaaatgacttgtagtggccaggctcgggtggttcatgcctgtaatcccagcactttgggaggctgaggcaggcggattgcttgagcctgggaggtggaggttgaagtgagccaagatcatgccattgcactccagcctggtgacagagtgaaaccccgtctcaaaaaattaaattaaattaaattcaaaaagcactatgggctactgaaataactctgctataagaatgtgaagtgtcggccgggcgcggtggctcacgcctgtaatcccagcactttgggaggccgaggcgggtggatcacgaggtcaggagatcgagaccatcctggctaacaaggtgaaaccccgtctctactaaaaatacaaaaaattagccgggcgcggtggcaggtgcctgtagtcccagctactcgggaggctgaggcaggagaatggcgtgaacccgggaagcggac

SEQ ID NO: 57520 - DNA, 493 bp, Homo sapiens
  misc_feature 30, 424, 430: n = A,T,C or G
accggggccccccctcggggtacttctagnaattaattaacgcgggatgtattcagttttgactttctacttccatttttttggtaatttatctagctatctacatttaaatctatattaaactctatatttatacccatatatctattctactttatatttatatatataatagaatttagagataacctacatatattgaagaaatctagaatatttacatgttgctgaatatacctatatatttacatatattgttaaatatatattgcaaatatatgtaggttgcttatgtctaaatgtacattatggattcatagatttaaatttttgtacttcatatttcctctgtttagaatgtcctttacctattttcatctatcaaactgtaaccagagtttgagttttatattcagaaaacccncatccncccccaccccacacacacacacacacacacgaaacctttccaggtcactctagtgtaaaagag

SEQ ID NO: 57521 - DNA, 574 bp, Homo sapiens
  misc_feature 23: n = A,T,C or G
ccccccctcggggtacttctagnattaattaacgcggggactggagtatcttcaagtacaaatcccttcagaccccagaaagtctgttcctttttgtagtaaaatgaatctttcaaaggtttcccaaaccactccttatgatccagtgaatattcaagagagctacatttgaagcctgtacaaaagcttatccctgtaacacatgtgccataatatacaaacttctactttcgtcagtccttaacatctacctctctgaattttcatgaatttctatttcacaagggtaattgttttatatacactggcagcagcatacaataaaacttagtatgaaacttttaaaaaaaaaaaaaaaaaaaaaaaaaaaaaaaaaaaaaaaaaaaaaaaaaaaaaaaaaaaaaaaaaaaaaaaaaaaaaaaaaaaaaaaaaaaaaaaaaaaaaaaaaaaaaaagaaaaaaaaaaaaaaaggggccccccccggggggggcccccatttcccccttaggggggggtttttcccccccccccggggccggtttttaaaaagggggggggggggaaaacccggggg

SEQ ID NO: 57522 - DNA, 597 bp, Homo sapiens
  misc_feature 25: n = A,T,C or G
ggccccccctcggaagtcttctagnattaattaacgcgggccatagctgatcttgcagtctcccagctccactccggaggaggcctgtgggcagacagggataggaaggcccaaaccacccagcccccaattctgcccccgcctgcagccccaacacagcctcaatttaccctcttacacctcaaggcaggtgggcctggcagggcctggaactgtctttggtaggaagtcccatcttgtctcgtgtagtcccacttgagggtgttggggcccccttaggataggcaagggggatggggggagagagagagagagagagagattgagattccctgccatctcaagccctctggaaggaattctatttcttgcctgggaaggggagctgggccattctgaacagtgtagattgagagctgtctggcaaacaccaaaagataaaaataaaaataaaataaattatactaaaagccaggtgcaatggcccatgcctgtaatcccagctattcaggtggctgaagtgcaaagatgggcttgagcccatcttgagctggagaccagcttgggcaacatagtaagaccctcatctctaaaaaa

SEQ ID NO: 57523 - DNA, 403 bp, Homo sapiens
cccccctcgagagtcttctagaattaattaatggccggggggctcaataaaggttcagccactgggtgtcagcagcccagagcaggaagcaagatcaagtggtggatgcggaacagaacatgcaagctagggccgggcgcggtgggtcatgcctggaatcccaacacttcgggagagaggctgaggtgggcagattgcttgagatcaggagtttgagaccagcctggccaacatggagaaaccccatctctactaaaaatataaaaattagctgggcttggtggcacatgcctataatctgaggctgaggcaggagaatctcttgagcccagtaggcgcaggttgcagtgagccaaggtgccactgcactccagcctgggtgggagagcaagactgtctcaaa

SEQ ID NO: 57524 - DNA, 522 bp, Homo sapiens
cgggcccccccctcggggtacttctagaattaattaacgcgggcatgtgttcactggcttttgtatatggtgttagtccacttttgttgctataaaggaatacctgaggctaagtaactcataaagaaaagaggttcgggcgcagtggctcacacgtataaccccagcactttgggaggccaaggtgggtagatcacttgaggtcaggagttcaagaccaacctggccaacatggtgaaacctcgtctctactaaaaatacaaaaattagctgggtatggtggtgcgtgcctgtagtcccagcaactccggaggctgaggcagtcaagacagtgcactacagcctgggtgacagagcgagactccctctcagaaagaaagaaaagaaaagagggctgggcgcagtggctcatgcctgtaatcccagcacttcgggaggctaaggtgggaagattacttgagcttaggaattcgagaccagcctgggcaacatagcgagaccttgtctgtattataaataaaa

SEQ ID NO: 57525 - DNA, 610 bp, Homo sapiens
  misc_feature 535: n = A,T,C or G
cgggccccccccttcgaggtacttctagaattaattaacgcggggggtgggctgccatctttgctgttcactacttagccattccagcctcaagctttggagagcccagccctacaggggacagaaacaatacctcagcacagcttggctgctctatgaaagtggggctaaactgcttctttaagtgggtccctgattccattcctcctggcagggtgagacttcccaaccagggtctccagccacctcctaaggtttgttcaggctgccaacaggcctgtaccaccctgggatgctcccagtggaaggggcaggccgccatccttgctatttcacagtcttcacatacctccaggtactggaaaatccgaggtgactagggactagagcagatgcccggcaaaccacaacatgtctacagaaaagtggctagactgttgaaaaacaaaacaaaacaaaaactccatccaaaggtcagcaacctcaaagattgaaggccaacaaagatgataaataatcagtacaagaacacagnaaagtcaaaaagccagaagtccctctcttctccaaatgaacatcacctcttcagcaagggtttggaatagggctg

SEQ ID NO: 57526 - DNA, 585 bp, Homo sapiens
acttctagaattaattaacgcggggatactatcaactacattaatttaattgtgatttatagaacacgacattcaaaatggcagtttacacactttttttttttcaggtgcatatgaaatgttcaccaagacagacaaatgtagatggatttcaaactttttgggacagagcaaaagcagtgtttggaagagaatggacaattttgtatggttatattagaatcaaagaaataagtgatataaacattaaaagctaatctccaagtaattagaaggaaaatataataaatataagaagataaattattaaaaaatagaaacaagcaatacagaaagttggcaaagacaaaacttgtttctctttactagtcaataaatgaaggggtaagacaaaatttaccaatatgggtaataaaatgaggatatcactatagattttataatgttactacaaatgtaaccaattagaagtacagaagttctaatgaaataatattctcaagatgaaataaaaagtctcaatagctctgtatctattaaagcaattgatcttacaataaaaaattttccacataggaatctcct

SEQ ID NO: 57527 - DNA, 488 bp, Homo sapiens
  misc_feature 29: n = A,T,C or G
cgggcccccccctcgggggtacttctagnaattaattaacgtgggtcttatgatccagcagatccaacgatactgaaagtatcatggcctatagggatattgtgtggaggctcttttagcaccagtagaatcatagggaagcaaacctatgtcttctgaagattactactctgcttttaagaaagtctgtcttactactgtgccttggtagagacaatacctaaccatgggatggcaggggatcatgtggcctgagcttcccatcataatgtggatgttgttagctagcctagtcatgaacttggacatgcaaagcagcaatctatcatcagacagaaatggtacacaatagacttagcttgctttagcaggtctgaaaacagaagtagcgtagcttgcttgaacaggtggctgagactctttcaacaccaactccgctttcattgccttctctccctcaacccatacctatggtatcctgggggttg

SEQ ID NO: 57528 - DNA, 546 bp, Homo sapiens
ccgggccccccctcggaagtcttctagaattaattaacgccgggctatacacacaacaggactcattagtaaatgtgactctctaaagcagttctattcacaaaaatgcatcaatgctaccattcactttataaaactacagcagtcctcccgtagccacagttttgctttctgcattttgtaacccgaggtcaacagcattctgaaaatatgaaatggaaaaatccataaataagcataagttttaaattgcatgctgtgcctgctccactgtccgggatgtgaatcatccctttgtctagcgtgtgcacgttgcagatgctccccgcctgttagtcatctattcgctgtccaggttatacaggattgaagattgcagtactgcagtgcttgtggttcaagtcacccttctttgacttaataatagccccaaagcatgagagtagtgatgctggcaattttacagtctaagagaagctgtcaaatactttaactgacaaggtgaaagttctcaactaataaggagaaaaccaatcttatgctgag

SEQ ID NO: 57529 - DNA, 223 bp, Homo sapiens
  misc_feature 36: n = A,T,C or G
ctgggttaccgggcccccccctcggaatacttctanattaattaacgcgggtctgtaaaaaaaaaaaaaaaaaaaaaaaaaaaaaaaaaaaaaaaaaaaaaaaaaaaaaaaaaaaaaaaaaaaaaaaaaaaaaaaaaaaattaaaaaaaaaaaaaaaaaagggggccccccccgggggggacccccatttccccttttagggagtttttttaccccccctcct

SEQ ID NO: 57530 - DNA, 579 bp, Homo sapiens
  misc_feature 23: n = A,T,C or G
ccccccctcgaaatacttctagnattaattaacgcggggatgctcctggtttgtccatctactgctttgattccttggatcccacccattctttcactttaagaaaaaacaaataattgttgcagaggtctctgtattttgcagctgcccttttgtaagaagcacttttcccaaataaaacaattaaaaaaaaaaaaaaaaaaaaaaaaaaaaaaaaaaaaaaaaaaaaaaaaaaaaaaaaaaaaaaaaaaaaaaaaaaaaaaaaaaaaaaaaaaaaaaaaaaaaaaaaaaaaaaaaagggggccccccccggggggaaccccaattcccccttaaagggagtgatttaaccccccctaatgggccgttttttaaaaacgttggaatgggaaaaacctggggttacccaaattaaatgccttggaaaaaaatccccttttcccagggggggaaaaaaaaaaaaaggccccccccattcccctttccaaaaattggcccaccctaatgggaaaaggaaatttgaacccttaaatttttggtaaaaatccccgtaaatttttggaaaaaaaaccctttttt

SEQ ID NO: 57531 - DNA, 439 bp, Homo sapiens
  misc_feature 398: n = A,T,C or G
cgggccccccccttcggggtacttctagaattaattaacgcgggggcttgggatatggctgctggcaacacattttgttgtgggctccttaatttaatgataaaatttaagctaaacacaagccaaaaatgaataggtttttttaatttttatttttcactaaacaggcaattgaaatacatggtacaaaaataagtggtaagataattgtaaaatgaaatggacagaatattcaattttccatctatgaaaatttcacaataaaaatcatagtttactttgtaaaaaaaaaaaaaaaaaaaaaaaaaaaaaaaaaaaaaaaaaaaaaaaaaaaaaaaaaaaaaaaaaaaaaaaaaaaaaaaaaaaaaaaaaaaaaaaaaaaaaaaaaaaaaaaaaanaaaaaaaaaaaaaaaaaaaaagggccccccccttttttttt

SEQ ID NO: 57532 - DNA, 351 bp, Homo sapiens
taaaagccatgaatttattttggcacaaatattttatcatatgcagtcacttctttgtaaatgattttttgtaaagtcattggatataaaagagtgattttcctcacctggactacatgcaaaagcaaaatgctgcaaatcaatgtataaatcaaatcatctgtcctagcactgttaatctcagaagaaagtggttgcatagtagaatagtaagaatgtagaccaccttattgaagttggaaaagaaaaaaaaaaggagcttcataggtaggctttgcctcttaaaaaaattaaaaacataagtcactgtgttgtgcttgggagttaagcaccaaaaaaaaaaaataagcg

SEQ ID NO: 57533 - DNA, 595 bp, Homo sapiens
gccccccctcggaagtcttctagaattaattaacgcgggccctctaacaccttccagagatgtaaaattctaaatccaaccaccctcctccctataagtacttccaattctgaatcccccactcttgcctagacctcttagcctccctctcctcccctttccaacacatttcagaagcccctttgcggaaggaacccacatggttcattgatggaagctcttttaaggaaccatatctggcagctggctatgccatcattgccgaaaacaaactcctataatccaatgctctctcatcacatatcacctcacaacaagcggaactatttgccctaaccaagaccctcactctagcaaagggaaggagggtcaacatttacaccaattccaaatatgcataccatgtcctacagtctcacactgtaatctggcaggaaaggggtttttctaactacaaaaagaaccgccataataaatggcaaactcatacacaagccgctggaggcagctaaactaccactagaggccgtcattatccattgcaagggacaccaaaaggctacagatgccataaccaagggaaacttcttagcag

SEQ ID NO: 57534 - DNA, 497 bp, Homo sapiens
aaggacatgcttgtattatagaatgtacagtataatcttgtttatgtattgcatagtaaaacttttcaaagtctggaaaaatataccctaaactgttaatggtatgcatctctgagaggagggatcatagtgagattttactttctcaccaatattttcattttttataattattctgtcttagtctgtttggctgctgtaacaaaaatatcacaaactgggtggcttataaacagcaaacattccatgtctcacagttctagaggctgagaagtccaatatcactgccaaattcagtgcctagtgaggtcccattcctcactgagagcaacttttagctgaggttttggccttcatgacctaatcacctactgaaggccccactattaataccatcacactgggtttaggttccaacttatgaatttggggagacaccactaatcataccatagcagattctatattgagttgacatgtggctaatatgcagtatg

SEQ ID NO: 57535 - DNA, 448 bp, Homo sapiens
cgggccccccctcggaagtcttctagaattaattaacgcggggtcaagagttggtcaaatccaaaggaagaatgacaaaaatcaaaaacacaacaagtgattgcacaaattacgtactgttgaacactctaagcataaagagaggttagagccggccgggcgcagtggctcacacctgtaatcccagcactttgggaggccgaggctggcggatcacgaggtcaggagatcgagaccattctggctaacacggtgaaactccgcctctactaaaaacacaaaaaattagccaggcgtggtggtgggagcctgtagtcccagctacccgggaggctgaggcaggagaatggcgtgagcccgggaggcagaggttgcagtgagccgagatcgcgccactgcactccaacctgggccacagagtgagactccatctcaaaaaaaaaaaaaa

SEQ ID NO: 57536 - DNA, 248 bp, Homo sapiens
  misc_feature 28, 103: n = A,T,C or G
cgggcccccccctcgaaatacttctagnattaattaacgcggggggagtccaggaggaggtggtccttcaacaacaggaggctgtgctgggaaaggcagcatnaccaggaagattcacatcttctacaactactggatcacttccatgatcaaaaggacacatgtctcctctcatacaaaaacccttttctatgaggaaggaatagttagaaacaaatgtcaaaagcactggaaatatatattttctc

SEQ ID NO: 57537 - DNA, 546 bp, Homo sapiens
  misc_feature 24, 518: n = A,T,C or G
gccccccctcggggtacttctagnattaattaacgcgggtggctgtgaattcatgattatgtccctaggagactacatgctacatctctgtaccacacccccatgatgagcatagagtcctacaccaaagaacttcaccacgttatgtgtgcaataaattttaaagcgctagaatttgtaaggctttttttttttcaaactaaagatgactcagatatgggagacttattggcagacccaggtctgtttttgattagcagtgtaatcatggttaattgacttaatgttcctaaatctcaattttctcatctgtgaagggaaaggcttgaactgtataccctctggggttttggtctctgaattctgactaataaaggtaaatcttgttggattcctatcaattccaagtgacagctcaagttttgctaccttaaaattttgttaaatcaaatattatttgagggctaggtgcggtggctcacacctgtaatcgtaatagtttgggaggctgaggcggntggatcacttgagttcagcagttcaaga

SEQ ID NO: 57538 - DNA, 310 bp, Homo sapiens
  misc_feature 38: n = A,T,C or G
ctgggttacccgggccccccctcggaaatacttctagnattaattaacgcgggttttacttacaaagaaactgaggtcccaaaaattaaatgattgacttaattagcagcagaatcagacatgaaatgcattctcctgattcttcataatccagtcataaataacaacacatattctcggccgggtgcggtggctcaagcctgtaatcccaacactttgataggccaaggcgggcagatcacaaggtcaggaaattgaggccatcttggccaacacggtgaaaccgcatctctactaaaaaaaaaaaaaa

SEQ ID NO: 57539 - DNA, 504 bp, Homo sapiens
  misc_feature 100: n = A,T,C or G
ccgggccccccctcgagaatacttctagaattaattaacgcgggatagttttttccataaaacagatgtttattttgtattaaaaaataccactgtactntgttttacaccatttgtatacatgtggtgatattaatgctaaactgtaaaattcaggaattaaaatgtgaccctgtaattccataaaaaaaaaaaaaaaaaaaaaaaaaaaaaaaaaaaaaaaaaaaaaaaaaaaaaaaaaaaaaaaaaaaaaaaaaaaaaaaaaaaaaaaaaaaaaaaaaaaaaccaaaaaaaaaaaaaagggccccccccccggggggggcccccaatcccccctaaggggaagcattttccccccccccccgggcccgtttttaaaaacctcgggcggggaaaaacccgggggtacccaaaaaaaaacccccgaaaaaaactccccttttgccgggggggcgaaaagacaaaagggccccccccgatcccctttccaaaaaattggccccc

SEQ ID NO: 57540 - DNA, 219 bp, Homo sapiens
  misc_feature 12, 25: n = A,T,C or G
ggccccccctcnaggtacttctagnattaattaacgcgggactgacatcagaactgagatttttgtctggctgtttgtttcactgctgtatctccagcacctagaatagtgcctgtcacttagtaggtactcgttagatatttgttgagtgactgagtgttcactgtagattgattgattgattaagtagaggcagggttttggggtttgccatgttgt

SEQ ID NO: 57541 - DNA, 398 bp, Homo sapiens
ccccctcggggtacttctagaattaattaacgcggggtggggaaaggctgccgaaaacaagccggaagatgatcgtgggaacagcaatagtagccatgtaaaaatctttttaccgaaaaagctgcttgaatgtctgccgaaatgttgcaagtgtaccaaaagagaggcgccgctggaacactaatgaggctctcaccacacacttgttcatgggctcagcatagaagagggatccacacagctggagccatgagggctgacacattggaatgaaagctggcagaattcgcagggagagctttcccatcctgccagcgccatgtctggctttaagacggctctattagtgaattaactgttctcaaaaccccaaataaatttgaaccgaatgttactaa

SEQ ID NO: 57542 - DNA, 390 bp, Homo sapiens
cccccctcggaagtcttctagaattaattaacgcgggggctatgacattttaaaagccatgaatttattttggcacaaatattttatcatatgcagtcacttctttgtaaatgattttttgtaaagtcattggatataaaagagtgattttcctcacctgagtacatgaaaagaaaatgctgaaatcaatgtataaatcaaatcatctgtactagcactgttaatctagaagaaagtggttgcatagagaagagtaagaatgtagaccagcttattgaagtaggaaaagaaaaaaaaaaggagcttcagaggtaggctttgcctcttaaaaaaattaaaaacataagtcactgtgttgtgcttgggagttagcagcaaaaaaaaaaaaaa

SEQ ID NO: 57543 - DNA, 370 bp, Homo sapiens
  misc_feature 28, 100: n = A,T,C or G
cggggccccccctcggaatacttctagnaataattaacgcgggggggggggtgacttcaataatatcacgaacatatttaaaatgaaattctgagcatgngagaaaaatttcaaattctggtataaacaaataatctaaaaatatagataaggaaaaaatgttttcatttttttggtcatattgatttgggtcatatatgattgaccaaaaaaaaaagatatttctaaaatcctggtgctttttcatttaaaaatagacaaccaaagaggaaaatgaacaatgatggaaattcgtggaagaggaaactaaaatggcaaaatagcatattaaatggcactgagccttggtgtgatcaaaaaaaaaaaaaaa

SEQ ID NO: 57544 - DNA, 448 bp, Homo sapiens
ccgggccccccctcgaaagtcttctagaattaattaacgcgggacttgcttttccaaattttgtaagcaatctataaagtttattcttgagtataaaatataacttccataaaccttttataacctttataaactttattaaggagttggaggccgggcacagtagctcatgcctgtaatcccagcactttgtgaggccgaggtgggtggactgcttgaggtccggagttcgagaccagcttgaccaacatggtgaaaccctatctctactaaaaatacaaaaattagccaagcgtggtggtgtgcacttgtaatcccagctattcgggagtctgaggcaggagaactgcttgaacccaagaggaggagcttgcagtgagccgagattgcgcaactgcactctagcctgggcaacagaacaagaccctgtcataaaaaaaaaaaaaaa

SEQ ID NO: 57545 - DNA, 480 bp, Homo sapiens
  misc_feature 32: n = A,T,C or G
ggtaccgggctttccctcggagtacttctagnattaattaacgcgggcatctgcaatgttgtaaatcttaatgcccattactgtgactgtgtgcagcttagattcaaattgttaattggcaaataaccaggaccagtttattaacaggtcttgggaattgataatgctcaaccaatccacacagatagaaaaataaaaggattagaaaggtgcacacttgctgcattggttactttttaaattttttgtttttttctcaattgtggtcactgaacagaaattctaacataatgaaaaggtgcattatatgtgaaagacgttcttctgtgtggtttgatttttgtaaagtggctgtttataagttgtcactttttgtaacaatttaaggttatcactgtcaatttgtgtaactagaaattttgacatttcaaatgtaggtgaaagtaacatgtctgtgcaagatagaatgtctggaaactg

SEQ ID NO: 57546 - DNA, 604 bp, Homo sapiens
  misc_feature 37, 554: n = A,T,C or G
ctggggtaccggggccccccctcggggatcttctagnaattaattaacaaaaatcttttttttccttgttacaaaagcagcaaatattcattacttaaaatcttgagactataaaacaaactaaaacataaaaaaacttcttatgtgcagccactatgcagtaggcaactatttatacatacgtctaaattttcaagcctttttctgtgaatttaaattaggaaatacatttaaactcgcacattttaaatacaccaattcattaatatctgaatgtcaactgtcctagggaggatccaaatctttattcccagcatccaagtggcacaaaatagctactgaaatgtctgctgaactgaatatctgggatctgacaaggcaaagtctggacttgcagactgtggagctgtactatggaagtatttttgaagcaactgaagtgatagagtaaggtttaaaactcactcaaagtactaagtaacagactgatatggtttggctgtgtctccccagatctcatcttgaattgtaggtcccataatccccacatgttngtgggaggcacctgatgggggtaattgaatcatggtccgtcctgtgacac

SEQ ID NO: 57547 - DNA, 586 bp, Homo sapiens
  misc_feature 560: n = A,T,C or G
cccccctcgagagtacttctagaattaattaacgcgggatcctaaaaaattatattatcacttttgtagtttagaagaggaaggtgtgaaaatttgaaatgttatctattctcatttaatttcctactttccgtggagagtattccatacccagattaaatgtcatttccaattgttgctcacacttaccaaagggaaggtctctgctcagttttgagcagaggctccctgtgtaggagtatgacagtcctcagtaaagttttgtcacctatgtttggcaaaacatcctgggcagatgagcgattcatgtggcaagagcactgccaattgaaaaggtgcattagtatgaatattagcacctctaagtgtttgtgaaatagcaaaggtagaaggactagaatattgacaaagcattttcaaaaaattatactacttctaatagcttaacatgttgatagaaaagacgattcagtgtagaagtctgtgatgattcaattctaagttgtatgtaatagagctaaagtctgtaatatattttagaggagtatttaaacatatanacatgatctctgagtcataaatgtca

SEQ ID NO: 57548 - DNA, 579 bp, Homo sapiens
  misc_feature 33, 537: n = A,T,C or G
gtaccgcggccccccctcggaaatacttctagnattaattaacgcgggcttctaatgaaattgaaacagtaatttaaaatcacccagaaagaaaattctagactgtttttactgttacattctaccaaacatttagggaagaaataattttcactaatcttacacaaactctttcagatagctatgcaccatgatgcatgcctgtagtcccagtaactcaggaggctgatgcagaaggatctcttgagcccaggagttcaaggctgcagtgagccatgattgtgccactgcactccagccaaggcaacagagcaaaaccctgtctcttaaaaagtaaaaaaagactgggtacggtggctcaaacctgtaatcccagcactttgggaggccgaggcgggcagatcacgaggtcaggagatcgagaccagcccagccaacatggtgaaaccctgtctctactaaaaatacaaaaaaaaaaaattagttgggcatggtggcgcgcgcctgtagtcccagctgctcgggaggctgaggcangagaatcgcttgagcccaggaggcggaggttacagttagctg

SEQ ID NO: 57549 - DNA, 493 bp, Homo sapiens
  misc_feature 483: n = A,T,C or G
cgggcccccccctcggaagtcttctagaattaattaacgcggggataatagtaagatgttatttgcccttttcactctcattcacttatgagtgtacagtggagttttccagaggttacatggcttgtgagatgtcattgctgtgactgatggaatatatactgtgtgtcccttgttttaaaagttgctcagttttggccagccgtgatgactcacacctataatcccagcactttgggaggccgaggtgggcagatcacttgaggtcagaagttcgagatcagcctggccaacatggcaaaaccccatgtctactaaaaataaaaaattagctgggcatggtggcacgcaccttaatcccagctacgtgggaggctgaggcaagagaatcgcttgaacccaggaggtggaggttgcagtgagctgagattgtgccactgcactctagcctgggagacagagcaagactccatctcaaaaaanaaaaaaaaga

SEQ ID NO: 57550 - DNA, 550 bp, Homo sapiens
cgggcccccccctcggggtacttctagaattaattaacgcaggggttgcagtgagcggagatcgcatcattgcactctagcctgggccacagggcgagactccgtctcaaaaaaaaaaaaatgcacatagctatcgagtgtgctttagcttgaaaaggtgaccttgcaacttcatgtcaacttctggctcctcaaacagtaggttggcagtaaggcagggtcccatttctcactgagaagattgtgaatatttccatatggattttctattgttactctggttctttgttttaaaataaaaattctgaatgtaaaaaaaaaaaaaaaaaaaaaaaaattgtaaaaaaaaaaaaaaaaaaaaaaaaaaaaaaaaaaaaaaaaaaaaaaaatttaaaaaaaaaaaaaaagggggccccccccgggggggacccccatttccccctatagggagtcgttttaccccccctcatggcccgtgttttaacaacgtggggacgggaaaacccctggcgtacccaaattaaatcgcttggaaaaaaatccccttttc

SEQ ID NO: 57551 - DNA, 457 bp, Homo sapiens
  misc_feature 378: n = A,T,C or G
ccgggccccccctcgaaagtcttctagaattaattaagccttcctgcctggtttggactccattttatttccactattggtgtgtcagcaattgtaatttgttattattgtaattattatttattattattgtaattatggcggttattatagttgtgctgtggttgctctagaatttacaatatatttctttaatcataatctgtcttcttataaagcatttcacatataatataagatcattgaattcagtgatgtggagggcatgtgtgcatcatctggaaaaaaaggtgcatgtctcttagcaactccaaattagtgatatccttttgtagcatcagctatcttcccagcctctagaactatgacaagtcattntctgttgtttgcaagccactcagtctaaagcattgtgttatggcaacctgaatggactgagacaactattaaaatgctt

SEQ ID NO: 57552 - DNA, 614 bp, Homo sapiens
  misc_feature 65: n = A,T,C or G
ccgggccccccctcgggagtcttctagaattaattaacgcgggggatatacgtgaaggtaggggngagaaaaacaaataaaagacaaatggctcatataaaatagtagattatttcttaataaccagacagtttaaggcaggtctatttcttcttagctcgtggctccctaccacgtgataattcaggaaaaatggtgccttccactttgcggctccacaatcttctaaatctttctggttatttgcatttagccagcagaaaggggaaggagggcatgaagaatacatgcctgcttctcaaaagccttggcccaaaaatggcacagattatttcaactaacttttcacttactagaacccagacaaatggtttcacctaactgcaaaggaagatacaaaatgtattctgcttatgtgactgaaagaagaaaaacacatcgatttggtaagcagctagcagtctttgccaaaaaaggcaatgaatcttctatcaagcaagacatcaaagttctgcactgtaacttgcaagatgtaactgagatagcacaaaatagtgcctggagaatggtaaaatggagatctaaagagaaacaacaagtgtactttcttttgt

SEQ ID NO: 57553 - DNA, 611 bp, Homo sapiens
ccgggccccccctcggaagtcttctagaattaattaacgcggggatgccctcaggatgtaatacaagatggaggcttgatttcacaaccaaaactttccagagaatatagtgatagatgttggaggtccctagtctagcacaacatcttctaaaagaaaatgaaacttttaaaagttaactaccgacagggtagagagaaaagaaaagaaacagtttaaaaatacctgaggaagagcctctcattcctatgcaactgattcgtccaccatggagattagttcaattattgtccaatggagtagaaccccttggctggggtaggggaaggagaagaccgcaagctggctctgcgaagacccttgagccacgcgtcccagccccagcatgaagcagtgatggaaggaaaatgtctgggaagccccggtggaatgcaacaggtaaacagggagggctttctatgaaatgtgatttaggggttttatcattatataatttgaaagggtaattagtaacctgggtaatgaagagatgatttagtttaacgttatagtctcctacagaggcagatgggtcctactcaaagggctgcttggatgtctagactgataat

SEQ ID NO: 57554 - DNA, 591 bp, Homo sapiens
cgggcccccccctcggaagtcttctagaattaattaacgcggggacattaatggcttacagtaacactaggcagtagaaatacgcaagcttcatgagtaattttaattttttttcactttaaatacagtagcgctcccttatcctcaatttttctttcttgaatctgttttcttatgagtgagaattgctttccttttatatctctgaccatttattggcaagggaagtgggattgacattaatggcttacagtaacactaggcagtagaaatatgcaagcttcatgagtaattttaatttttttcactttaaatacagtagcgctcccttatcctcaattttagtctcaatcacagtccaaaactaggtgagtgcagtacaataagattattgagagagacaccacattcacataacttttattacagtatattgttataattatccttttatatattatatatttttaattgttaatctctttgcctaatttataaattaaactttatcataggtatatatatatatatatatgaaaaaacacggtatgtatagggttcaatactatctcaggtttcatgtatgcactg

SEQ ID NO: 57555 - DNA, 122 bp, Homo sapiens
  misc_feature 28: n = A,T,C or G
cgggcccccccctcggggtacttctagnattaattaacgcggggagagggtacacaatgggtatctaataaatacttaagaggtggtaaaaaacactaaaaagaaaaaaaaaaaaacaaaaa

SEQ ID NO: 57556 - DNA, 389 bp, Homo sapiens
  misc_feature 35: n = A,T,C or G
tgggtaccggggccccccctcgggagtcttctagnaattaattaacgcgggccaagaataaaaaaaaataagaaaaaataataatcctttgcctaggaaattccttccttcttcaagggaaggcactccgaacacctccatgagctacacttccacacagctcaggggaggcggcaaggtcctcccagtacaggtgttaccagcagagggcacactcctctccccagtcctccaccaggctccacaggaaacgccagggcagggtttaaaggaaggtttatcaccccgactttacataaccaggtaaacagagtcacagccagaattggaagcagctttcccagggaatgcacaatcaggaaaagagtgtgggggaaaaaaaaaaaaaa

SEQ ID NO: 57557 - DNA, 181 bp, Homo sapiens
ctcaagatgagtggggttaaaccctggaggccaagcaagcttccttggccctggagaagaacctgaaccaggccctcttggatctgcacgccctgggctctgcccgcacagaccctcatctctgtgattttttggaaagccacttcctgcattaggaggtgaagctcatcaagaagatggg

SEQ ID NO: 57558 - DNA, 488 bp, Homo sapiens
  misc_feature 236, 248, 252, 253, 265, 266: n = A,T,C or G
ccgggccccccctcggaagtcttctagaattaattaacgcgggaggatcacgaggtcaggagttcgagaccagcctggccaacatggtgaaaccccatctctgctaaaaatacaaaaatgagctgggcgcggtggtgtgcacctgtaatctcagctacttgggaggctgagaccacaggagagcgccagcacacctgggtaattaagattttttttgtagagacagacgctatgtntgcccaggctgntctnnaactcctggctnnaagtgatacacccttggcctcctaaagtgctgggatcacaggcatgagccactgcacccagcctaatatagttaatatccccgtcaaggctgctcagagggcctgagaggaacaaagggctcatctctggagagctccacccccagcgccgatctctctaaatggcctctttcctctgtatatttcaccacaaggcttggagtccaccttcctgtgacctta

SEQ ID NO: 57559 - DNA, 534 bp, Homo sapiens
  misc_feature 522: n = A,T,C or G
ggccccccctcggaagtcttctagaattaattaacgcgggagtatatcctttttcatctcttttatttttagcctatgtttttataattaaaattgactaactatagatagcatataattgaaacttgccttttaatccaatacaactttttaaatccataacctcaaccatttatcctttctttgtcttacatacaatccaattatactcttaggttattttaaaatgtaaaataggctgggtgcagtggctgatgactgtaatcctagcattttgagaggccgtggtgggtggatcacctgaggtcaggagtttctgagcagcctcaccaacatggtgaaaccccatctctactaaaaatacaaaaattagccaggcatggtaggcgggcacctgtaatcccagctacttgggacactgaggcagaagaatcacttgaacccgggaggcagaggttgcagcgggccacaatcacgccactgcactccagcctaggtgacaagagtgaaacttcatctcanaaaaaaaaaaaa

SEQ ID NO: 57560 - DNA, 609 bp, Homo sapiens
cgggccccccctcgaaagtcttctagaattaattaacgcgggtcttctcaacttcctaattgcaggattattccaggacagagctgattccttccctgtacctgcagatgttctcttggagtatcactaaggcaggttcttcatacagcatgttaaatctgctaatgcttgtcctttatctataatggcctataggacttttgggaggccaaggcaggaggatcagttaaggttaggaattacgggcaacatagcaagaccccattctttaagaaaggatatgaaaattagcaaggcatggtggtatacgcccatggtctcagctactcaggaggttatatggctaatgtttgtccttctttttgtctagtcgatagtcatgggacaccaggatatcctgccttcccagccttggctccataggaaagcagtggagagagggaagatgttgctatgccattctgccattctttctccagtggcacaaggatggatcagaaactttgggcctcagaataacctatggtgatatgaggaaatgagaatccagtatctgcatcttatagagatctccaaacataaaatgggaaaggtgaaaacaacaacagt

SEQ ID NO: 57561 - DNA, 471 bp, Homo sapiens
  misc_feature 27: n = A,T,C or G
cgggccccccctcggaagtcttctagnattaattaacgcgggggagacagaacgtgctgtgtggatgcggcgaaacgctgaggcgcggccttcgctgtgtggtggggactcacaagaccgacgtcaagatgatgctttcaagggccaaacctgctgtaggcagaggcgtacagcacactgacaaaagaaagaagaaaggtaggaagattccaaaactagaggagctactttcaaaaagagatttcactggagctattaccctgttggaggtaatgcccaaagaacgttgcttcttagtgtatgaataccagactgtagatgaatgcttgggtgaatgctgtttgctatgctcttgaaataggtgggtgcattctggggcttcctgtacaaatcccctgtaaatctagtcaggcacagattccagattccaagttagctataaacctgataaaaaacgaaaaaaaaaaaaaa

SEQ ID NO: 57562 - DNA, 518 bp, Homo sapiens
  misc_feature 32, 54: n = A,T,C or G
gtaccggggccccccctcggaatacttctagnattaattaacgcgggcacaggnaaaaacaaaacaaaacaaaaagagtccactttaagtgcaaagatacaggtcaatcatccttaatccaaagatccaaaatccaaaatcctcccaaatctgaaactttttcagcactgacgtgacaccaaaagtggaaaaacccaacacctgacttcatgtaacaacttgcagttaaaacgcaagcatacgacacaccatttattccatgtcctcaaggggaaaaagactgtccggccctgttcagctgcagtgtatcttttccatgcacaccctgactcccctatgcaagcacgcccatgaagggtaataaaatggcatgtgtacaggccagatgcatcaaaggcaggttccccaatgctctgcatgggaccaagacctacaagtaatactcactgtggttttccacttattctcttctccatgatgtaaagatatttttcaaaatgtccaaaaaaaaaaaaaaa

SEQ ID NO: 57563 - DNA, 609 bp, Homo sapiens
  misc_feature 34: n = A,T,C or G
gggtaccgggcccccccctcgaaatacttctagnattaattaacgcgggcatgagatacatctgaaggcactgccacgttgtaaggccccatggctctatataaacatctgctgtgccgcaccagcaccccttgaggccatattgtattttctgaccaaatgtgctgtggagcattgctgtaggacccatgttccaacttctgccacttgcccaggtgagcagctgatttatgtagcaaatcacagtatttggatggcaacagttgcgtggtgagcatgacaaaagcattgatccacaccataatgaggtgctcacatgaccagcgcatgtcatagtactgggtactctggaagagatcagaagagagggaaatgatccatgcactggtaaaaagaggcagggatgggttggtgtacatatgccctgcagacaaatgccacactgagtcacacatgcactggtggtcctgctgtccgtgcagaaaggttcaagagcagagtcctccacaatccttcaacctgactttctggctgtacgagttagggatgggagggagaggcaattatattttaagtgtctcctttctagaagaactgagtgttctctga

SEQ ID NO: 57564 - DNA, 594 bp, Homo sapiens
  misc_feature 28, 493: n = A,T,C or G
cgggcccccccctcgaaagtcttctagnattaattaacgcgggatttggtgcaggagtgtctgtagtagagtgtagccaggggaaagccatccatctaggttcgacttgctcccataaaatactttagccatacagaaattgttggtcctggctagagcaatcgggcaggggaaagaaataaagggcatccaaataggaatagaggaagtaaaactatccctgtttgcagatggcataatcctgtatctagaaaaccccatagtaagggcctcaaagcttcttaatttgacaaacaacttcagtaaaatctcaggatacaaaattaatgtgcaaaagtcactagcattcctatacaacaacaacagtcaagctgagccaaatcaggaataaactcccattcacaattgccacagaaaaaataaaatacctaggaatacagctaattagggaggtgaataatctctacaatgagaactacaaactactgctcanagaaataggagatgacacaaacgaataggacaatatttgctgttcatggataagaaaaatcaatgtcaattaaatagccatactgccaaaagcaattgata

SEQ ID NO: 57565 - DNA, 597 bp, Homo sapiens
cgggccccccctcggaatacttctagaattaattaacgcgggggagcacagagaagctcccagctttgaaggtcttgcggtggtgaaaaattagacgatttcaagaattggagctgaatctgatgttaagtaatggcaacaggtgacttaaaaagaagcttacggaacctagaacaggtgctccgcttgctaaattatcctgaagaggtggactgtgtaggtttgataaagggagacccagcagcatctttgcccatcatcagctattcttttacctcatactcaccttatgtaacagaacttataatggaatccaatgtagagctcatagcaaaaaatgacttgcgctttatagatgctgtctataagcttcttcgtgatcaatttaattataaaccaattttgacaaaaaagcagtttatccaatgtgggtttgcagaatggaaaatccaaattgtttgtgatattttgaattgtgtgatgaaaaagcacaaggaattaagcagtcttcagaagattccatcacaacaaagaaagaaaatcagttctggtaagtcagaacctcctttgagcaatgagaaaatatctgcagaggct

SEQ ID NO: 57566 - DNA, 600 bp, Homo sapiens
  misc_feature 28: n = A,T,C or G
cggggccccccctcggaagtcttctagnattaattaacgcgggggggccatttcagaggttgcttaccacagcagcatgcatttggaaatgtacctataccacaaagtctgttttctctacagagtccctggcctatctcacagctgctacccatggcttagatgaagaagctgaggcatgagaatcgcttgaacctaggaggtggaggttgcattcaactgagatcataccacttcattccagcctgggtgacagagcaagactctgtctcaaaaaaaaaaaaaaggaaaactctgtgatggacatttgtttagtaaatcccttcagtatttatccctcctttccccacagcagctttctttcctgtcaactagaaaggagcaggatgtaataaatacattttggtgtgactaggccacaccaactcttaatcatctcccattttccttagacatttaaatttcaaggcaggtaccctctgtgtactcagaaatttgaagaagttatttggttttccaaaatgcacactgcgggttattgatttgttctttacaactattgttctcatatttctcacactaaataaatctctatgagag

SEQ ID NO: 57567 - DNA, 365 bp, Homo sapiens
  misc_feature 18: n = A,T,C or G
cctcggagtacttctagnattaattaacgcgggaactctcttgtaaattactttttaaaacaaactttggtaagttttattaaagaaaaattttgcatggtttacttttcacccatctgttctggcatgcttctaaggatatcagccacctagatcagtgacagccagtgtacatactctgcagtattttctgcacactgaccaaattcaatattcttagtgatggatgccaattttggccaacatgctgtagtactctatttgggaattcctcaaagctgggcaggaagaatgttggcaaggaagagcaatttcacttggtcttgcatgatcgaattcagagttttcttgtacccaagcacata

SEQ ID NO: 57568 - DNA, 591 bp, Homo sapiens
  misc_feature 538, 562: n = A,T,C or G
cgggccccccctcggaagtcttctagaattaattaacgcggggaagggtgcttttcatgcttctccattccctttgccctgcccttattggctggctcttactcttaactgccacctaatggactgcagtttcaattcaataaaaggcttaacgattttaaataaatacgcatccaacattggagaatccagatttactaaaaaaattacttctaaacttaaaaaagactctggtagccacacaataataattactaaacaaaattacatcactgccacaagtgaccacggagaaagccactacatgaacttgtccacaaccaaggaacccatacatacagagccttggtaccctgaaagcatccagaaacaaacccaatagaccatacacaagatataccacagtcatacccccaaaggaaaaaagaattaaaaaaattaaaaagccccatacaaacattagcatttttttaaaaggaagaatcagctctctcaaatgagatttcttctcatttgcacaagaactctggaaatacanaaagctagagtattttgtcacctncaaaggatctcactagctcccaaagcagc

SEQ ID NO: 57569 - DNA, 587 bp, Homo sapiens
  misc_feature 533: n = A,T,C or G
ccgggccccccctcgaaagtcttctagaattaattaacgcggggattcattaatattgaacactatggctcattcctgaataaatcttatctaatacacatattttgtccataaagcacatcacagcctcttatacttctgggcagcacttcagctctatgattgggccatttaaaaaatatacaataattgtgaaaagcataacactagatagatgaaaaaaggacaattgtttacagtataggatctgaaataagaattcagagcatgggccgggcatggtggttcacgctcttcatcccagcactttgggaggccaaggcgggcagatcacctgaggccaggagtttgagaacagcatggccaacatggcgaaaccccatctctactaaaaatacaaaaaattagctgggcgtggtggtggtgggcacctgtactctcagctactcggcaggctgagtcaggacagtcacttgaacccaggaggcagaggttgcagtgagctgagattgtgcctttgcactccagcctgngcgacaagactgaaacttcgcctcaaaaaaaaaaaaaaaagcggccgccaccgc

SEQ ID NO: 57570 - DNA, 531 bp, Homo sapiens
  misc_feature 487: n = A,T,C or G
gggccccccctcggaagtcttctagaattaattaaaaaattaaaataaaaattaaaatatctgttgagacaaatgaaaatgagagcacaatatacaaaaaccgacagaatactgcaaaattggttttaagaggcaagtttatagcaataaatgtctacatcaaaaaaaaagatctcaaataaataacctaatacacctcaatgaacaagaaaagaagaaaaaactaagcccaaagttaataaaaggacggaaatagaaagattagagtagaaatatataaaatagagtctagagaaacactggaaatgagcagtaaaactaagttgtttttttgaaaaaaatatataaaattgacaaacttttagctagactaagtataataaaaacacagaagactcagataaagtcaaacatgaaaaagaagatattataactgatataaatacaaaggatcataggagactattatgaactattatatatggancaattggataacctagaaagaatggataaattcttacctacata

SEQ ID NO: 57571 - DNA, 586 bp, Homo sapiens
  misc_feature 32, 541: n = A,T,C or G
gtaccgcggccccccctcggggtacttctagnattaattaacgcgggggatggtttcagtgtcaaactttgggagtaaaatctttcatgtttttctgaagaactttggcattagaattgttggttctggaaagtcaagaacacagttgttattgagagattttagttatttctgaaaccagatattgctccaaagctgtttgttaaatacttccctactcttcctaaacccctgcccctccccaaaagaaaaataaatcatattcagaccatcgtgcgatggttatatctctggcctccctggtcacccagcctctagctctctgctagcaccactccaaattgctgcttcaaaagaggtcagtcagcccctttcccttactcctcaaccatgacctggtctgtctggaaagaggatgagatacatggaccaatacatcctatttaaaagggagcttgctttctcactagggactttagactgcctgacacacaggaaatgactagaaaatctgaccagtggagcataactcattgctaanatggcaggtttggacggctgcaggatgggagagcaggcttcctga

SEQ ID NO: 57572 - DNA, 269 bp, Homo sapiens
tgggttaccgggtccccccctcggagtacttctatattaattaacgcggggcaagcagttatccaaaatatccctattccagaattcacagattctgaaaaaaaaataacctactttattcttccttgagtgttaatgtatattaacactatacatgatagcgttgccccaagtcacttaaatggaatttttatcggtcaccctattcagggaatagaacgaatgtaacactgattattgtgatacacacgttctgataaatactggct

SEQ ID NO: 57573 - DNA, 438 bp, Homo sapiens
ccgggtccccccctcgggagtcttctagaattaattaatattaacaaactatggacactcaccaatatgtatgaatcttgcaaatattaaggaagccaaaaccaaagcaaaagaaatatatatactacatgattccatttatgtgaagttccaaaaactggcaaaacccaatggtgttagaagtcaggatactggtgaccttcggtgagtgggagggaatgatgttttaattgcaatttgattacagtgttacccatgttcattttttttattggggtgggcgatacattaatattggccttgtaacagttcactgagctgtaaattaaaatttcgtatggttttctctatgtaaagtatgcttcatgattagaaaaaagctaataaaaaacttatacacgtctatgtgtttagtgtgcccataaatggtctctccaa

SEQ ID NO: 57574 - DNA, 204 bp, Homo sapiens
cgggccccccctcgaaatacttctagaattaattaacgcggggtgggaggtgtattgaagtcctccagacaaccctcagatttgatgatttcctagtagaactcacagaaataaagagctgttatactgtggttaaaaaaaaaaaaaaaaaaaaaaaaaaaaaaaaaaaaaaaaaaaaaaaaaaaaaaaaaaaaaaaaaaaaaa

SEQ ID NO: 57575 - DNA, 459 bp, Homo sapiens
  misc_feature 28: n = A,T,C or G
ccgggccccccctcggaagtcttctagnattaattaacgcggggaggctagggagtctctctcttcacatttttctgcctgcttatattctagctgcactggcagctgattagatggtgcccacccaggttaagggtgggtctgcctttcccagcccattgactcaaatgtgaatctccttctgcaacaccctcacagacacacccaggatcaatattttatatccttcaatccaatcaaattgacattcagtattaaccatcacagtacctaccccataaagtggctatgaagattaaataaattaatgtatgtacgacatccagaatggtacctgcacatagtaggttccatgtcaatgtttgctctattattttcttcatctctccaagccacaactcaaagcagacctcctccatgagtattctgcaggtcaccctaacaaaaaaaaaaaaaaaa

SEQ ID NO: 57576 - DNA, 596 bp, Homo sapiens
cgggccccccctcggaagtcttctagaattaattaacgcggggaggataagttaccgaggtgatatgactgaggggaaacattttagaactcaacaattccaaaggcagcagctcaaattcctttagagtacggtttcttgctcacctgtcctgttccagatacacacttagctgacagtgatctctgaagaggtgactttgaatttgctcttacaatatctaaacgagatgaataatctggtgcatacagagaatttcggaaaacctattgtaatgataaaatagcattataaagtagatgctaaacaaaatcaagacagtcaaattaagttccttagttaagattttttttttaaaaaaacaactccccccaaatggacaaaattccaattattgtaaatgtaaaagaaaagacaacaaaaataagctagaaagatgaaagctaaaaattctatttgaactatgtaagatgatgacagatattaaacagtaattagtcatgaaacaatcatttaaatgcttttgccaggagaactgcagaagttgagaccctcaaagagcatgcaagctagtagggaggctgcgactcatacct

SEQ ID NO: 57577 - DNA, 549 bp, Homo sapiens
  misc_feature 29, 47, 52, 465: n = A,T,C or G
ccgggccccccctcgagaatacttctagnaattaattaacgcggggnacagnaaaaccaaacacccacatgtttgatcaatgagaacacatggacacatggtggggaacaacacacactgggaacctgtgaggggctggtggggaggaagagcatcagcaaaaatagctaatggatgttgggcttaatacctgggtaatgggatgatctgtgcagtaaaccaccatggcacacatttacctgtgtaacaaacctgcacatcctgcacatgtgcccctgaaattaaaagttgaaaaaattaaaaataaataaactaaaattatgtcaagcaatgctctaaggcagggtttatgaaccatgagttgattttgccctccagggacatttggccatatctagtcacaattttgattgtcacaaattggaagatactactgacatctaacaggtaccctcttctacaacnaaaaaatcacttggcacaaaatatcaaaaatgccaaggctgagagaccctgccctaaatcccctattctctgagatttctgaca

SEQ ID NO: 57578 - DNA, 575 bp, Homo sapiens
  misc_feature 25, 38: n = A,T,C or G
ctgggataccgggcccccccctcgngggtacttctagnattaattaacgcgggggagctggaggtggtggcctactcttccccagccactcagacctgaccgtgataactcgtccctgacagggacactcctacacaaagattgttgcgggtctgaaatggcctgtgagacccccaatgctggaacaagagaggaccccactgacaccccagccacagatagtagcagggctgttcatggccacagtggcctcaaaaggcaacgaattgaattggaagatacagattcagagaattcctcctcagagaagaaattaaaaacatgataaatacatagggaaaaaaaaaaaaaaagcggccgctttttttttttttttcttttaaatacattttttactccatgaaaaagcttcatctcaacctccgtcatgttttagaaaccttttatcttttccttcctcatgctactcttgtaagtcttcatattgtctcttaaaatcttaagctattaaagttacgctaaaaacttaacgctaagcaatatcttagtaacctatagactatattttttaagta

SEQ ID NO: 57579 - DNA, 566 bp, Homo sapiens
cgggccccccctcggaagtcttctagaattaattaacgcgggcggatcatgagatcaagagattgagaccatccttgccaacatggtgaaaccccatctctactaaaatacaaaaaattagctgggcgtggtggcacgcctgtagtcccagctactcgggaggctgaagcaggagaatcacttgaacctgggaggcggaggttgcagtgagcgagatcgcgccactgcactccagcctggtgacagagtgggatcaaaaaaaaaaaaaaagtgatcaaaatcaggccaccgtcagctataaaaatctctattttacttcctccataaaatcagggatgtggcctctgcctgaagcgtcagccaagattgccagcactggccgggtgtggtggctcacacctgtaatcccaacagtttgggaggccgaggcggggggatcacgaggtcaggagatggagaccatcctggctaacacggtgaaaccccatctctactaaaaatataaaaaaaattagctgggcatggcgacaggcgcccataatcccagctactcgggaggctgagtc

SEQ ID NO: 57580 - DNA, 632 bp, Homo sapiens
  misc_feature 24, 37, 529: n = A,T,C or G
ctgggttaccgggcccccccctcnaaatacttctagnattaattaacgcgggtggatcacctgaggtcaggagtttgagactagcctgggaaacatggcagaaccctgtgtctaccaaaaatacaaaaaaaaaaaaaaaaaaaatctgggtgtggtgatgtgcacctgtggtcccagctgctcgggaggctgaggttggaggctcacttgagcctgggaggtggagattgcagtgagccaagatcatgccattacactccagcctgggtgacagagtgagaccccatctcaagtaaaaaattaagatgaaaagtaaaaatttgtgggaacaaattggaaatagagacgcaatataataaaacctgtgagacaccacaaaaatagtactaagacagcagtttatagcactaaatgcctgcatcaaaaaagtagaaagcttacatattaaggacctaacatcacacttcaagaaactagaaaattaataacaaaccaaattccaagttagaagaagaaaaaaataacaaanacaagaacagaatcaaatgaaataaagaccaaaaacaatacaaatgatcaacagaataaagagttaattcctcaaaaagaacaaaatgataaattgctagcta

SEQ ID NO: 57581 - DNA, 478 bp, Homo sapiens
ccgggccccccctcggaagtcttctagaattaattaacgcggggggggctagcagaggagagccagtgactgggcagttcctaggaaaccagtcttattaaaaagaaggaggaaaaagaacatagaacaagaagaaactgagtggaaacatcatggttgcacatcacagtgaaaatagatttcatgtgtttaacccagcctgttactaaacaaaagtgaacaagcagacaaggcaacaccaccaactttaagggggaaaatatcagaatccagagttgctacaatatactgtctaaaatgttcacttttcaacagattataagacatgcaaaatatagagatgtttgactcatattcaggaaaacaaaagtctatagaaactgtctataagtgttcccagataatggatttagcagagacaaacttcaaagcaattaatataaatatgtccaaagactaaaggaaaaaaaaaaaaaaa

SEQ ID NO: 57582 - DNA, 613 bp, Homo sapiens
  misc_feature 28: n = A,T,C or G
cgggcccccccctcggggatcttctagnaattaattaacgcggggggtttttcaaggatagtttggtgggcaggggatagagaatgggtgctgctgattggttggcaatgcaatcataggggtgtggaaaatggtcaccatctgtgcactgagtccacctcttggtgggagaggagggcacagaaatagttgagttatgagtcatgagtctgggtggcatcagtctgaaaaacatctcaaaagaccaatcttaagttctacaatagtgatattatctatatgagcaattagggaagtcataaatcttgtgacctctggccacacgattcctgagaagtaagggatcataaaaactataccgacattttagcagaattcaggcccctcccataatcctaatcttatggcctttcattagtcttatgaaagtagtttcagcccgccccctggccccaacaaggagaggattcgtttcagggagaaactattatcatccttgcttccaagttaaactataaattttaatttggttaaaagtaagaatatgttagcttgtcctatgcccaggaatgagtgaagacagccaaccggtgaggctagaagcaagatggag

SEQ ID NO: 57583 - DNA, 383 bp, Homo sapiens
ccgggccccccctcgaaagtcttctagaattaattaacgcggggggagggatagcatcggcagatatacctaatgctagatgatgagttagtgggtgcagcgcaccagcatggcacatgtatacatatgtaactaacgtgcacaatgtgcacatgtaccctaaaacttaaagtataatagaaaaaaaaaaaaaaaaaaaaaaaaaaaaaaaaaaaaaaaaaaaaaaaaaaaaaaaaaaaaaaaaaaaaaaaaaaaaaaaaaagggaaaaaaaaaaaaaaaaaaaggggggcccccaccggggggaacctcaaattccccttaaaggaagtcgaataaccccccctaattggccgtgttttaaaaacgtcggaacgggaaaaac

SEQ ID NO: 57584 - DNA, 409 bp, Homo sapiens
ccgggccccccctcggaagtcttctagaattaattaacgcggggtagcatgccatcatgctctggagtacagttccatggttccctggcccgtgctggaacatgtgataggtgcaaactccttagtaggctccttcccgataacaaaaatataaaaacgggtcagtcttagcagttgttgccatacatgccggagctttgccaacattaagccatcctgacgtactaaaattgtccctatttccaacttttatttctctggtgatcctgcctttctatctttagtatgctacttgattctaccagctcactgcttttgaaaatctaagtacatgttctgtcttagtccagtcagcctacgataagaaaattaccataaactgagtgaaatatacaatggacctgtattt

SEQ ID NO: 57585 - DNA, 389 bp, Homo sapiens
ccccccctcggaagtcttctagaattaattaacgcgggaggattcaaattcaggtctgtatccaaagtctataatctttcttaatctacaccatgctaccgctctaaattggttggaaagtggattctgttgcatataatttaaacctcaaataatagtagcctagcaatatttatttctctcttatgtaaaatacatttagaggaaggcagctccatgattgtcaggctccttcttcctccctgtctattatcctagcttgtgcattccatgtccaggtgatacggtttggatctgtgtccctgccccaatgtcatgtcaaattgtaatcctaatgttggaaggtgggccctgtgggaagtgagtgggtcattggggtcaatttcccc

SEQ ID NO: 57586 - DNA, 548 bp, Homo sapiens
accggggccccccctcggaagtcttctagaattaattaacgcgggactccccagctctcttccttgctcccaactttctgaactttttcgttgtgccagtcacctcagtattctgtgtgagttaagaaagaggcggacctctcaagtagcactcttcatgactggataagccaggtacttgcttgctatgcattcactttcccctatgggagaaattgcaggctgaaggagtctgtcttggcactgaacggtgctgtcttaggggaaaggtgacacagttatagtgaaattgttcttcttaccctcttcaatgcatctattctcagactttttgctccacagtgtactagaacttctctgctgaactctcagactcccacaaaggtactgtcatgtggaggtagttgtcaaaatcaatgcttctgtgtcaagatgatggcagaaaacacctatcctggcatgttgaatgaattcaatcctttcaaagcttgcctttaggctttgttagttggatccagagcaatctttagcctagaagctagtctggc

SEQ ID NO: 57587 - DNA, 615 bp, Homo sapiens
gggccccccctcggaagtcttctagaattaattaacgcgggtgattgcttatagtttatttgaatgatcagggacttgaatagaagaagattgtaagattggtgacaaagaatttgaaggaagaggatgtgacagacctctcacattgggcacagacctcaataatcaaatgaatacaattatatgctctgcggatgtcattcagcctccttcccagccaccccaaggcttactcaatggggccatgaacaaagtggccatgatggcaaggatggagactaaatgtgggcttagtaacatggacttccccttatcaaggctgaactgtctgttgctactgctgagtatctaatctaccaacatggagatagacactgagcccctgacagtcccccattcccaggaggtgatggtggcgggtgggcggcgggggggcatccatgctgaatggaatagacacgtatcctagataagaatttgttctccagccgggcgcggtggctcacgactgtaatcccagcactttgggaggccaaggcgggcggatcacgaggtcaggagatcgagaccatactggctaacacggtgaaaccccgtctctactaaaaatacaac

SEQ ID NO: 57588 - DNA, 589 bp, Homo sapiens
  misc_feature 580: n = A,T,C or G
cgggccccccctcgaaaatacttctagaattaattaacgcgggctagcactttgggaggcccaggctggtgggttgcctgagctcaggcgtttgagaccagcctgggcaacatggtgaaacccatctactaaaatacaaaaaaaaaaaaaaaaaattagccgggcatggtggcatgcgcctgtggtcccagctactcgggaggctgaggcgggagaattgcttgaacccaggaggcagaggttgcagtgagccaagatcataccactgcactccagcctcaccacacatgtgagtaatgtgtttcacaacggcattgtgctatgatgttacaacagctatgacatcacaaagcagtaggaatttttcagctccagtataatatgggaccacagctgcacacggtccgttgttgactaaaatgttatatggtgcatgactatgtttaaatattcctatatttttatattgtttattttaaagttctatggccaggtgcagtgactcacacttgtaatcctagaactttgggaggttgaggcagaaagatcccttgaggccaggagttgaagaccaacctgngcaacatga

SEQ ID NO: 57589 - DNA, 602 bp, Homo sapiens
cgggcccccccctcggaagtcttctagaattaattaacgcgggccctctctagccatgaaagtcctagatgttatctttttccagcagaaggctgtttcatttacattgaaaatctactggttggtgtagccaccttcatcaatgatcttggctagatcctctggataacttgctgcagcttctccatagcacttgctgctgcacactgtacttttatgttatggagacagctgttttccttaagcctaatgaaccaacctctgctagcttccaacttttcttctgcagcttcctcacttctcttggccttcttagaatgaagagagagagggcattgctctggattaggctttggctcaagagaatgttgtggctgatttgatcttctatccagactactcaaactttctccatatcagcaataaggttgttttgcttgcttacctttgatgtattcactggaacagcacttttaatttccttcaagaatgtgtcctttgcattttaaaatttagctaactgtttggtgcaagaggcctagcttttggcctatcttggctttcaaccatgccttccgaactaagcttaatcatttttatgt

SEQ ID NO: 57590 - DNA, 593 bp, Homo sapiens
  misc_feature 23, 51: n = A,T,C or G
ccccccctcggggtacttctagnattaattaacgcggggacatcaatatangattcaatagaacatttgaaagaataagggaatactgtgaacaattttaagcaacttagatgaaatggacaaatttcttaaaagataaactaccaaagcttctcagaaacaggtaacacgtatctctattagaacctgaagttgtaatcataaatcttctaacatacaaaaaagaaaatctctacccaagatagcttcactggtgaattctaccaaacatttatcaacataaataaataaataaataaccacgattctacacgaagtgttccaaaaaagtttgaaacaccttatctcattctatgaggccagcatcatcctgagagcaaaaccaaagatgtaacaaaactatagatcagtagccctcaggcagatccaaaaatatataacaaaatattgccaagtcaacaacatattaaaacaataagatatcatgacaagtatggcttattattctagaaacataagttgattcaacatttgaaaagaaaaatcaatgaaactcaccatatgaagagattgaaaaaagcccatatcatctc

SEQ ID NO: 57591 - DNA, 597 bp, Homo sapiens
  misc_feature 25: n = A,T,C or G
ggccccccctcggaagtcttctagnattaattaacgcggggtgtaaattatctatatgaagacttggtgccaataatctttcccttttttttcttttaactgataaggaactatgctctgaatatcatctcaaatatatttttgttgttgaattgttctgttgtaggttacaaaaggtgtgaagaggaaagcagatacaacaactcctgcaacttcagcagttaaagcaagtagtgaattttctccaacattcacagaaaaatcagtggcactgccacctataaaagaaaatatgccaaagaatgttttgccagattctcagcaacaatataatgttgtgaagactgttaaagtaactgaacaattaaggcactgtagtgagattcttaaagaaatgcttgcaaagaaacatttttcatatgcatggcccttttataatcctgttgacgttaatgctttgggactccataactactatgacgttgtcaaaaatccgatggatcttggaactattaaggtaaatgttgccttaaaaggaagaacttctttttcttgattataaaagtaattcatcattgcaaagaaatcttaaaatct

SEQ ID NO: 57592 - DNA, 528 bp, Homo sapiens
cgggccccccctcgaaagtcttctagaattaattaacgcgggggagcggaggttgcagtggactccagcctgtttgaaagagtgagactttgtctcagaaaaaaaaaaagtccctacatcgtaagcggctgtttaaaaaaaaaaaaaaaaaacaacaaaaaacagctaaggcatccctgcctcacatctataatataataaaataaattccagagaaataaaatgtttcaatataaaaagaaaccacagaagacatgaaagaaaacaggagtgactatttttttttattttagagtggggaagacctttctaagaagaaactcagaaaagcctaatacatttaactacatgaaatttgtaacattctggacaacaaaagctctatatacaaagtcaaagcacaaagaacaagctggggaaaatacttgcaacagataaaacaaagggtttgtatctccaagctacaaagagcttttccacatcaaccagaaaaagataaacaacccaccccaaaaaaaaaaaaaaaag

SEQ ID NO: 57593 - DNA, 578 bp, Homo sapiens
ccgggccccccctcggaagtcttctagaattaattaacgcggggtgacaaacctatctaaatattgataatatttcttttccttttagattctgaaaaagagttccacgtcctcccttatcgagtctttgttccccttcctggatccactgtaatgttgtgtgattataaatttgacgatgagtcagctgaagaaatcagggaccattttatggagatgttggatcacacaattcaaatagaagatttggaaattgcagaggaaacaaacacagtctagtatagagatggattaacagtaggaagagtttaatattacaagaacaaaggaagcaaaacagcaatttggaaagtttagcttgtatgagttcttctatgaatagtcaagcttcattggacaacacagatgatgaacaaccaaaacaaccaattaaaactacaatgttattgaaaattcagcaaaacataggtgtgattgcagcatttacagttgcagtccttgctgcgggtatctcctttcattacttcagtgattagggtgaggcacaaagagtttcttgatcatccagagaacattga

SEQ ID NO: 57594 - DNA, 589 bp, Homo sapiens
gccccccctcggaagtcttctagaattaattaacgcgggcgttccttcctggattactttgctgactcatctctcctcagcctcctaatgctgggagtgcctaagcttctttcttctctagcagcactcattcccttgagtgagtgatcataggtctcacagctataaataccaactacacactcacgtgtcacaaatatacatccctggcccagaactcttgaattccaaatttgtatatccaatcttgcacttccatttggatgtttaataggcatttcaaacttaacctgtcaaaaactaagctcataatctttctccctatcctgcttcaccctcgagtttttcaccttggttaatgacaactacagcctactagtttgctcaggccctaaactctaactcctttttcacaccacatattcaatctatcagcaaatcttcttagctctatttttaaccagaacctgaccttttcttactacttacactgccaccacccaggttgaagtcactggtatctctcacctggattactgcattagcctcctaactggtccccctgctcccaattccttagccccacagc

SEQ ID NO: 57595 - DNA, 202 bp, Homo sapiens
cggggccccccctcgaaatacttctagaattaattaacgcggggggaggcactcggattcctatatcccatcttctatcaccagggatccgactgctatcatgggggaacatctgactctccatcaccagtactgacgctatcagcaccctttactctcctaaaatgctactactaaacggatgaccctccgtgaccggcct

SEQ ID NO: 57596 - DNA, 602 bp, Homo sapiens
  misc_feature 16: n = A,T,C or G
ccgggccccccctcgngggtacttctagaattaattaacgcggggggttcctgccaggaacccagaagtggggaagctggttgaccacctcagtttcactttttctattgtagaaactgagtttgggagagatttttcacatacttggtacagggcagaatcggggtgagggtcattacagatgtagaaatccacttctcctattgtctgctcagaggttttccatttctctaaggccctgaaaactgtctcatcctcagatctgagctctggattgttgctggtgaaaatctcagtgctgtatatatactttttggtattctacggggggagagtgaaaccagcttacctctacactgtcattttgaaaccagaagtctcccggctgtgaaatttttgaaaatgtgattgttgtattactcatttgatattaactaacatttaacatgtagtggggtaatcaataagtgtttgttgatctgctttgtgacagtaggaagaaatgatattggctctcgttccactgagctactaggacattaagataaatagtctttatggggcctttgagaaattgggtttattttaggtaattattagga

SEQ ID NO: 57597 - DNA, 487 bp, Homo sapiens
cgggcccccccctcgaaatacttctagaattaattaacgcggggctgccctggagcctccaggatcgaagaagagccgcaggtgtgtgctgctatgaacatctctccagagccctttctgcatagctggtgttgacatcatactaaaagcagtgtttaaatcaaactaaagattaaaaattaaaattcaggctgggggcagtgactcaagcctgtaatcccagcattttgggaagccaaggcaggcggatcacctgaggtcaggagttcgagaccaggctggccaatatggcaaaaccctgtctctactaaaaatacgaaaattagtcaggtgtggtggtacgtacctgtaatcccatatattcaggaggctgaggcaggagaatcgcttgaacccaggaggtggaggctgcagtaagccgaaattgtgccattgcactccagtctgggcaacaagagcgaaactccatctcaaaaaaaaaaaaaaa

SEQ ID NO: 57598 - DNA, 602 bp, Homo sapiens
cggggccccccctcggaagtcttctagaattaattaacgcgggggagggggaacgttcattaatctctgaggaaaacaaaacctgttttctacttgagtctaacatatggtcccaatttattaatacttctgttaaatttgatgtcaggtcaacatttttcagaaatgtatttattctcagaaacagaaccagagagaagttaaacaaaaggttatgtaactgttcctttaatgttgtaattgaaaacttggtttagcgtcttttttttctttctctttttttttcttaaaatgccaactaaaataattagaaagtagcttatttattgcatgcttatacattgatattggaattggaattggttgttaatttctgttactggctttgctagaattcatatgtgcataaataacactaatatttatcatcttgggggctgttctgtgatctattacatgatttttgctctctttttatttttctagtatcaaatgtgttctggctgagtgaatttggatagatataatatgcaagctaattggactttttcatttttctcattaaaaaaaggaagaagtagtccacttttttgctagcatac

SEQ ID NO: 57599 - DNA, 567 bp, Homo sapiens
  misc_feature 30: n = A,T,C or G
accgggcccccccctcggggatcttctagnattaattaacgcggggccctaacttcaccatggggagaatgggctggggcccagtttagaatcatggaaggggattttctcagctagctctggagagttccaccaatcctctctatcttggctcctacaaaatgcctccattcactacagctctctatttcttaggttaggcatactcttctcaggagggttgaaagatgggttgaggcacttgagaaactcttggaagctgagtttccaatcagcattttcatcagacagttcaatgagagcatcaacacagagtcccctgaaacaaaacacaggagaaatgtgttagcaagacctcagcttcgctcagaagaaaggaagtaagcatcaggaccacatacacccagggcctccagaggaggccaagaagatgactgctaactaaaacagcctctctctacactgacccaacacaactattatccatcctgaccaatgcaggcatctaacctttagtttgttatatgaatgtcagatcacccaggctgtccaaatgttcccccctta

SEQ ID NO: 57600 - DNA, 557 bp, Homo sapiens
  misc_feature 28, 546: n = A,T,C or G
ccgggccccccctcggaagtcttctagnattaattaacgcgggcgggaggcgaagcttgcagtgagccgagatcgcaccactgtactctagcctgggcgacagagcaagactccgtctcaaaaaaaaataaaaaataaaaaaaataaataaattaagttcagcttaaagccgtctcctgaatatatttcaaattcagcataacagttttctcgacacgtagtgaatggtaatctaactggatgtgtaaatagactgcaacctactctcgtaccaatcaccaagttgtagctaatcaaaggtggccaactgtttaagccatgttcaaagcatgttcataaggtaaatgctgagttgtaacaaatacagctgtttctgtatctcacttccattttgtgtacatcacttttctttgtctgttcataaattctctctgaccatacaacaatgtcagtgtctctctggcgggaggcgaagcttgcagtgagccgagatcgcaccactgtactctagcctgggcgacagagcaagactccgtctcaaaaaanaaaaaaaaagc

SEQ ID NO: 57601 - DNA, 559 bp, Homo sapiens
ccgggccccccctcggaagtcttctagaattaattaacgcgggccacatttcattctttgcagctttgctaatccagttgctcaagttctttacctcaacctgaaggaatgaagcattattacattttgtgaatggtgttcagcctataagacgaagtctcacaagacctataggaaagtttaccatctgccttaaatattaaaatatccatctgttattcacattaatacacagaatgaaaatagaggtctaggaattatcaaaggtactgcaaaaatactgtatagaacttatttgtaaatagcacatacattgatagatggggtgtgggaccaacaaaccaaattaaaagaaattgtttttctttcagttcgagagagaggtgtttactggtttcacaaaacatgcctctatacaccaaatactaatgagagtttacttcctatgattaccaaccaagaagcctgccagaacacctcaaaattgacctctaaaatcacaggctgttctatacagtgaataagctgattgctagcttacaatgggttgtctaattat

SEQ ID NO: 57602 - DNA, 598 bp, Homo sapiens
tgggtaccggggccccccctcggggtacttctagaattaattaacgcgggcacctctaggtacttgatggctgctcactggattctccctcagcacttgtgcttgtccctggagcctgtaggcagactcgcctggtccagctccatccatcatgtcccccactcaccaggggctaaacaggaagctcagaccactgtgcactccatggatcagcccatttacctgaagcaacagggagcttctcccagtaaacaaaggtcaagtatatccccaaattggctgcaaccagctcatacctataagtgccatctacaggcttagagtttgaagcgcacagcccagtataaaagttgccatcagaagtgcatacagctatagaagcaaagccgaacaactctactcaacattctctatagttatacctgctggggagatggaaaaaaggaaagagaaagaaaaaataataataatatagagaaagaaataaaaagaaaatttctacctgctagaaaataaatacaaaattataagtgtcagcatctcagatgagaaggaaccagggcaagaattctggtaccatgaaaaatatgaatgtagt

SEQ ID NO: 57603 - DNA, 542 bp, Homo sapiens
ccccccctcggggtacttctagaattaattaacgcgggtagaaaaaatattttaaattctaaaagaggacatactgttaactctgaattctgtaaccagtgtaaataactttccaaaatgaaggggaaataaagatatatccaggcagaaaaaaaactgtaagaatgtatcaccagcagacctgctgcacaggaaataaaataggaactcctcaggcagaagaaagatgatatcagatggaaatattgatctgtaataaaggatgaagagctctggaaagtaactgtgtaggaagatgtataagacccctccattaaaaaatcttgaaataataattgaatttcatacagaaataacaacagtgttttgtgtagtttgtaatttatgtgtaagtgaaatgcaggacaacaatagcgaaaggccaggaaaggaaaaatgaaagcatgttactggaagattcttacaccacacatgaagtaagataacatgtgaaagtaggctgcagtaacttagagttgtaaagcaaccactgaaataacaaa

SEQ ID NO: 57604 - DNA, 523 bp, Homo sapiens
  misc_feature 16: n = A,T,C or G
cgggcccccccctcgnaaatacttctaaaattaattaacgcgggacccggctaattttttgtgttttttttagagaacggttttgccatgttggccatggctggtcttgaactcctaggctcaagcaatccacctgcctcagcctctcaaagtgctgggattactcacaaataaccaagactttatacactatatgatgactaatctcatgaatataaagtcatgagcaggaaaaaacaatctgtggaaatagaagttcaaataatggttacttccatggaatggcatgggtatgactgaaaagaggcaaaaggaaactttcaatatcccgatccaggtagccattttataagtatatacacatataaaaataaattgtttaattgaacccttaaaatgaatgaattttatggcattcaaattatacttcaataaactgttactgaaactccagctctacatttaagatatgtgcacgtcaggaagtttctgattatatgcattagcttaaaaaaaaaaaaaa

SEQ ID NO: 57605 - DNA, 568 bp, Homo sapiens
ccgggccccccctcgaaagtcttctagaattaattaacgcgggggcacaatctggcgccatcgtccttcttgtgaggccaagcctgaaaatgcgaagcagagaggcaggaccaaaattgaggcgaatccaggaacctgccaatgggtctccgggtgcggtctctgaaactggaggatatcgggaggaaaggctctccgatgcggagataatggggaagctcttggcatggttggctgtaggtatgtgataccggaggagcaggagtcaaataggatacgccgacttttaattcaaggaacccttttctgaaacactttgccacaatgaaggaaataaggatctagtttgaagcactaagaagaataagacatcagtttgaaaagaggctctatcagaacaacacgaattctgctaaaattgaagcaagaacaaacatcaaatatatgttgacacttgggtggaagaatggtgaactaattgatgctttatgaaaagttgatagggacagtgctccaaagaaatcagtttacaaatggataactcgttttaagaaggcataaggtaatg

SEQ ID NO: 57606 - DNA, 606 bp, Homo sapiens
  misc_feature 9: n = A,T,C or G
cccccctcnggaagtcttctagaattaattaacgcgggcccatttaggaaaggcagcactctgatcatttgccagaattgaggcaaacctgggcttaagaaagcatctagtgccaaaaaggaggcagtaacccagcaggggggcggggaaagaaagaaaatcaacagataaattacaaagaatttcttagaacacatatccaataaaaactaaaacaagccagatagagatgatttgactaaataatcctttaatgcaaagagacatacatacatacacacacaaaaaaacagcaaactgggaaccatagccttgccaaatccaaaaggcaagaaacaagtgactaactctaacaagacagcaatatatggtctctctgaccaagaattcaaaatagcacctttaaagaaactcagtaatctccaggataacacaaaaaaagcaattcagaaacttattagagaaatttaccaaagatatttagttttttttttttggaaaatcaaactgaaatcttggaactgagaaatatgtttgctaagctgaaaaatttattagaggctctcaacagcagaatagatcaagcagaggaaaaaatgagtgagc

SEQ ID NO: 57607 - DNA, 537 bp, Homo sapiens
  misc_feature 28, 429: n = A,T,C or G
cggggccccccctcggaagtcttctagnattaattaacgcggggagggttacagttcataaagctggcactccagagttgttcgtccctcccggtggtctcccttcgtggtctcgctgtcttcaggagtgaagtgcagaccttcgcagtgagtgttacagctcataaagattagcgcagccccaaaaagtgagcaacagcaagagtcactgagaagagcgaaagaacaaacctcccacagactggaactggaccccagcaggttgctggtgctgacgcgggtggcctgcttttatttggccccacccacatcctgctgattggtccattttacagagagctgattggtccattttacagagtgctgattggtccgttttacagagtgctgattggtccgttttgacagagtgttgattggtgcatttancaaaccttagctagacacagagtgctgattggtgcatttacaatcctttagctatacacagaagttctccaagtaccctacccgattagctagacacagagtgctgat

SEQ ID NO: 57608 - DNA, 589 bp, Homo sapiens
cgggccccccctcgaaagtcttctagaattaattaacgcgggggtgatttgggcaggtaaatagtggtcctgtgcctgagaagccaataaaggaggtgatggaggatatggactctggagtggttggtttgcatatgaaagacactttcataatccagttgtttactgtctctagaaattggctaatcctgggaggagcaatccttccaaggtcagcactgcctcaagatgtcaaagcatcagaatatagaaaattaaagacatggttaatacaattgaatacaattggccctgtgatactttgatatcatattaaaaacatattgggatgatgatagagactatacattaggacatatgttttcccaaatggcctagaaaacattttataatgggaatcaaaagaaaggaatgcaagtagaagtattaaatataagagtctttataggctggaccatgattaagtttctcatttatatggcattaaccaaaaaaagtagatctgaaatttctgagatctctaacaatatcttgttggagttgtaaagtgtgttaaagtttatatatatgtatgatatatatatattta

SEQ ID NO: 57609 - DNA, 545 bp, Homo sapiens
  misc_feature 23, 36: n = A,T,C or G
tgggtaccgggcccccccctcgngggtacttctagnattaattaacgcgggggaggggacacctgagagcttggacttggtttctcctggagttcacttcatttgtcttttctcttagctgacttctatctgtactgtttttactgtaatatactgtaacaatgagtactacagcttctgattcccttagagacttccaataaattaccaggtctcaagtggtcttgggaacccctggcatattactgaacttaaagttttcagaatatctgtatttggtatattccatggcaagcactatatccatcacactttttcatttattgacataactccaaatatttccacatatctaaaattcaggaaagtaaccctatccttacctctgaggataaagcttgttaagcataggtaaaccatgataatttaaattcacctgtttgtgactgactttttttaatgactgtttttagtcaagaaaatgtgaaggtaggtctgccaagagctactgaaaagagttacattttctaaaaaaaaaaaaaaaa

SEQ ID NO: 57610 - DNA, 545 bp, Homo sapiens
taattaacgcgggtgggaggctgaggcgggtggatcgcctgaggtcaggagttcgagacaagtctgaccaacatggtgaaaccctgtctctgctaaaaatacacaaaaaattagtcaggcctgggagcaggcgcctgtagtcccaacaacttgggaggctgagacaggagaatagcttgaacctgggagacggaggttgcagtgagcttagattgtgccactgcactccagcctgggcaatagagtgaggctctgtctcaaaaaaagaaaaaaagaaagaaaattaaagataattctatgttaactccttaaatgtaattcctagttcttctatcacctttagccgactcttctaccttcagagtggacactgctgttatcaagcagagagtgccgatcttactcaagtacctagactcagatacagagaaggaactgcaagcactttatgcactacaagcatcgatagtaaaacttgatcaaccggccagtaagtttatctcatgttacagttaatctaaccaatgagtgagatttatccaagc

SEQ ID NO: 57611 - DNA, 337 bp, Homo sapiens
gccccccctcgaaagtcttctagaattaattaacgcgggcatgcctcatctacttcagcggagtgaccatctctctaccttactatctctggtcctgaaaaaaaatatctgtgtaacttggctgctcacccatcctgttccgtgtgaattactgccacctatcgtctaacaccatatcacataaaagctttactggacactctcggccaagcgtggcggctcatgcctgcattcccatcatcttgtaggacagctgaagcggatcacctgatgtcacgagttctagaccaactatgccaccatggagaaagctagcctctcctcttaaacataacaa

SEQ ID NO: 57612 - DNA, 594 bp, Homo sapiens
ccgggccccccctcggaagtcttctagaattaattaacgcggggactgtttggtgtctgcagcagtagtggttttttgtttgtttgtttccccaatccagaaaggtcctaaatttctcctgctcacatttagttttgcttgcaaaatggtcaattttcatctaagcatatctctttcttttactaccctgctaaacaccacaattaataatcaactaaaattgctaacacacctttccaaatattttcccctagagcagaggttcttaactttttttccccatgaacccctttggtagtctacagaatcctatcaacttgttctcagaatttaagaaaatatataaagtaaaacacagaagataaaatagaaaaataaatgatatagaaatatgactataagcatatttaaaaatgcataatataatatacttgctactttattactacatctaataaaacaaaatactttttaaaaaggcaagttaaagtaaatttcttttcaatatattcatgtaagtttttcttacttggcttagataagagcattaaacagcaggttggcttctgtttcatctcttttcacatataggaa

SEQ ID NO: 57613 - DNA, 521 bp, Homo sapiens
  misc_feature 36: n = A,T,C or G
tgggtaccgggcccccccctcggaaatacttctagnattaattaacgcgggtaacatctcttaaaaataaaatggaatcggccaggtgcggtggctgatgcctgtaatcccagcacttcgggaggccgaggcggatggatcacccgaggtcaggagtttgagaccagcctgaccaacatggagaaaccctgtctctactaaaaatacaaaattagctgggcattgtggtgcatgcctgtaatcccagctacttgagaggctgaggcagaagaatcgcttgaacccaggaggtggaggttgtggtgagctgagaccgggccatagcactccagcctgggcagtaagagtgaaactccgtctcaaaaaaaaaaacaaaaaaaaaactaaagctaaaactaaataaaatggaatagagcagaatagaaaatctgaaaaggtttaagtattggtgtgtgtgtgtgtgtacttctccgaggtttattaatgtggattgcaactttaaaaatgaaaagtttgaaagc

SEQ ID NO: 57614 - DNA, 506 bp, Homo sapiens
  misc_feature 28, 471, 489: n = A,T,C or G
ccgggccccccctcggaagtcttctagnattaattaacgcgggtgatttcataaggtcaaagtattaaatgttttaattcagattgtggatagtttgtagtcctttgattttgcaaatgaaattaaaatgcctttgtttagatgttaggattaagtatagtagtactctctccattgtgtcttaatttttttttaactcacttgtggcaggtctttattgaataaaggaggaataaacctagacagggagttagaaatgaaagacatttcaagacagttcaagggttatgttggtgacacttcttgtcttccagacagttttgaaagcacagatcttgcctcttgtgcttgttaaaaaatctgtgatacttctctgaagattttataattaaataagtgaaccattaccatgaccttttataaaagtgctgccctatttgaagtattgggtttttttctcatgatgagctntgttagacttggtactgnaaaaatcagtagttttt

SEQ ID NO: 57615 - DNA, 396 bp, Homo sapiens
cgggccccccctcggggtacttctagaattaattaacgcccgggtcactaaaaagtacatggaacttaagagacaaaaaaaaaaaaaaaaaaaaaaaaaccaaaaaaaaaaaaaaaaaaaaaaaaaaaaaaaaaaaaaaaaaaaaaaaaaaaaaaaaaaaaaaaaaaaaaaaaaaaaaaaaaaaaaaaaaaaaaaaaaaaaaaaaaaaaaaaaaaaaaaaaaaaaaaaaaaaaaaaaaaaatgggcgcccccccccgggggggggcccccttcccccctttggggggggttttttcccccccccttgggggggtttttttcaccgcggggggggggaaaacccgggggttccccaaatttttggccgggggaaccctccccttttttgcggggggg

SEQ ID NO: 57616 - DNA, 535 bp, Homo sapiens
  misc_feature 512: n = A,T,C or G
cgggccccccctcggaagtcttctagaattaattaacgcgggggtcccgggtagttgaacgctgcagtgagttatcattataccagcgcactcctgcttgggcaacagaagagtaccccatctcaaaacagaaaaaaaatgcagaatctcaggccccatcacagacctactgaatttgaatctacatttaacaagattcccgggtgattcacatgcacagcaaagtttgggaaacataattaaagtccctcacaggggagcaggagaaaatagtaggaaacaagtgtcattagactttccctcttgccaatccataaaagttggttgctatctgaagaagcctcacgatgaatggaggaggtagtgagttaccatcagctatttttgtgttctagggttttaaaaaaaaaagccagaaaatttaacattgaatttttctgcagtggttcactgtcagctgtgaatagccattatctttcatctcttgaagttctgtaaaattggagattctntacctaaacattattctgaatga

SEQ ID NO: 57617 - DNA, 156 bp, Homo sapiens
ccgggtccccccctcggagtacttctagaattaattaacgcggggaggggcagaggagttccccggtaacccgtgcagattaaagtaactgtgaagttttcaaaaaaaaaaaaaaaaaaaaaaaaaaaaaaaaaaaaaaaaaaaaaaaaaaaaaaa

SEQ ID NO: 57618 - DNA, 579 bp, Homo sapiens
  misc_feature 28: n = A,T,C or G
cgggcccccccctcggaagtcttctagnattaattaacgcggggggcgggaatctagacagcaaaaatcaccataatcaggccaggcatggtggctcatgcctgtaatctcagcactttgggaggccgaggcaggcagatcacaagttcaggagatcaagaccagccccgccaacacggcgaaacccagtctccaccaaaaatacaaaaaatcagccgggcgtggtggcacacgcctgtagtcccagccactagggaagctgaggcaggagaatcacttgaacccgggaggcggaggctgcagtgagccgagatcgcgccactgcacaccagcctgggtgacagaacaagaattcgtctcaaaaaacaaaaacaaaaacaaaaacaaaaaaaaacaccataatcagagtcagtaatagatatggcaaaacttttttcttagatatttcaatagaacttttaaatgtatttcacacttgtctcccaatttaaccctcccatggaaatcattatcaattatttcacagtgttttggtgttctaaaaactagttttgctatgtataatactcacaagtgtta

SEQ ID NO: 57619 - DNA, 275 bp, Homo sapiens
cggggccccccctcggggtacttctagaattaattaacgcgggggagataggaagcctacgaaagggttttgagcagaggagtgacatgatctgaatcaggctttgaaaggatcaccctgcaactgaattgagaagactggaagagatatgagggttgaagcaaggaaccagttagaagcatgttgcattttgcaagctatgcatctgacaaaggtctaatgtcagcatctgtaaggaacttaagcaaatctatgagataaaaaaaaaaaaaaaa

SEQ ID NO: 57620 - DNA, 531 bp, Homo sapiens
ccgggccccccctcgaggtacttctagaattaattaacgcggggttgttagcattggttccttctgagagccgtgagagaagaatctgttccaagcctttctctggcttgtagatggctgtcttcatgctgtgtcttcacatcagcctttctccatgcatgtccctatgtccaaatttcctcttttttttttgatacccatgacagacaaccattcctcttcttaaataaggacatgagtaatattggattagagtccatattaatcacctcatttaaaattggttacctctgctaagaccttatctccaaataaagtcacaatctaagtcaaaggcactgggggttggtaattcaacatacaaattttggggggacacaattcaaccttaacagaatgtgtctccctttcagctaaggacagttctccagggaaggggctgactgtaagcttcagcagctgggggaagcagacaccaacctgtgaaggggactttgtcaagccccccaaaaatacacatacacactctgt

SEQ ID NO: 57621 - DNA, 181 bp, Homo sapiens
  misc_feature 27, 67: n = A,T,C or G
aacgcgggggtgagttggttgagtggnaactggttgagaacttttactacaaaccatttacagtagnaccacaattttatagtcctgtttggcactttttcatatcactgggagcctgaagaatagaagtgggttggatctctttcagcctcagaaaagcctgccattcccccatctaaaa

SEQ ID NO: 57622 - DNA, 596 bp, Homo sapiens
cgggcccccccctcggaatacttctagaattaattaacgcggggccccaggctttgtccaatgatcagaaagcaatcctgacttcttcccctgtccgttttgctgtagactcagcctattttctcataccctttgcttccaggtagggccgggatggcagctgaggtgacagaacagtgcttcttggtaggggcagatcctcctcatctgatgagctttctattgtcaagtcaataacttcgaccttcttcttattctctgatggatctcccccctggactgggctgtactggaggcctgtgggtattaagaagactacgtctcagagaagaggccatccaagatttagcttagctggggaacagggggtcactcaccatccagcccataccctggcggggggcaaacctcagatgcctccttcttgggtttcattgggcaccaggatccatcttccatgaattggatctcatcacaatctgaacaggaactaagaatctccataaataaactgggggaagagagagatgaaaattcacggggctgggagatgagcagaacagtagccagagttctgtaactcaccttcctgtatc

SEQ ID NO: 57623 - DNA, 534 bp, Homo sapiens
cgggaccccccctcgaaatacttctagaattaattaacgcgggaggtggtgaacataagggaaaagtgcaagggcttttggttttgaccctgcacccaggctctgctttaccgatctagcttctgtatttctactagttacactttctaaaaatcaaaattaatcctgtcacttccggttatgattaacatccactggcttttgccatttgctggacaatccggagcaaagtctggggccaatctgtttagtgtcacttatttttcaggtttggtttcttcatcacctgtaaaggagagtggcacaggactataatcccttgtccgaaatccttgaggccacccgtatttcagaattcacagccttttggatcctagaaaggtgatacagtgcacatgtggtatattacataataccaccagcagggtctgtgccccaccctggaaccaaacacaccaagtgaaacaaataaagactaagcaaccttacttgaggtcaggtcattttctactaatggagttaccaagatacttt

SEQ ID NO: 57624 - DNA, 344 bp, Homo sapiens
  misc_feature 51: n = A,T,C or G
ggtaccggggccccccctcgagggtacttctagaattaattaacgcggggngagagagaacgaaactctgtctcaaaaaaaaaaaaaaataaaaaacaaataaatagtttgaaaatattttccccagacccatgactttttccctaatggtgccttttaaagaaaaaaaagttttaaattttgatgaagcctaagttgttgatttcttttatggtttgtgtttttaatcttatatctaataagtacttgctgaaccttatacaagtcttgtggacatgttttgttatgtttttgagatggagtctcactctgtcacccaggctggaggagagaaccaaactctg

SEQ ID NO: 57625 - DNA, 298 bp, Homo sapiens
  misc_feature 33: n = A,T,C or G
ggtacccgggccccccctcggggtacttctagnaattaattaacgcggggcaggggatggggtggggttccggatttccggatcgtcccatacccaagggagtcacgcttcctgattcctcggcgcaaaggagacgtttatgctttcaaattcctgccttccccctcacttcatgcgcacacaccaagtttaatatgaacctggcctcacggtctgctttctttctcactaatgacttgagggaagcattgctaaactggatcccctttgagaccaacaacctgaaacctgactgggg

SEQ ID NO: 57626 - DNA, 516 bp, Homo sapiens
  misc_feature 507: n = A,T,C or G
gtacccgggccccccctcgagaatacttctagaattaattaaaattaaataaaattaaaatgttagttgctgagtccactaacctcatttcaagggctcaatagtcccaggtagctactggctataccatagtagacagctcagatggagaacattttcatcagagaaagttcttttggacagcacaagtaaggctttaaaaagtaaggctttactgggatgaaattggggaaggaaatacagtatgtgctttcaaattcaaactttgactcagttctgcctttcacttgagtgaatgttaagtttaaattccctaagtctctgttttcttcatcagtataatggggacaataacggtaaatcttcataaagtaattatagtaattacgaagactaagtgaaataagtaaagcatcaagcatattatccatactcaataaatgttatttattactgaatttcatcaagtctaagatgcagaacttttcacattttaacatatctcanattcgcatg

SEQ ID NO: 57627 - DNA, 459 bp, Homo sapiens
  misc_feature 28, 426, 429, 431: n = A,T,C or G
cgggcccccccttcgaaatacttctagnattaattaacgcgggcttcaaaagagtcgtgaaagtcaccaagcaacgaaggaactcttgcaggttagtggaaactgaaggaacatgatgattgagtacaaggcatcattctagattggatccttttgcaataaagaatatttatttgggcaagtggcaaaactttaatggggtctgaggattagatcacagtgataaataaatattagtgttctgatttggatggttagaatgtggttatgtaagagaatgccttgtttgtgagaaatacacactaaaatatttggcaatgaggaaacatcattctggcaacttactttcaagtgatttcaggaataaaaatgttctttgtagtgtactgaaaattttttgtaagtttgaagtgttccccaccaccnctnanaaaaaaaaaaaaaaaaaaaaaaaaaaaa

SEQ ID NO: 57628 - DNA, 590 bp, Homo sapiens
  misc_feature 584: n = A,T,C or G
cgggccccccctcgaaagtcttctagaattaattaacgcggggtggggacacagccagaacatatcagttagaataggcaaaattcatgagctgtatttagaataaaagcagcactcagaaagtagagtgcacatgcgtgcgtgtgtgtgtgtgtgatgaatgaatacaaagtacagtctcttgttcttttcctctcagttgtgctgtgatgtagctcctggacttttgtcagaatgggagcagccatatttatggcatgtggaaacagttccctaattatgcaaaatttatgaattccacatccccagtagtattaaaagctccatctcccccatcaaggactttctaaacgtaactctaaaaccaaaacatattaagaaaaagattgataaaattgatcaaaagattgatagaatttacataaaaataaacttctgtattgtaaaaatatcataagcaaagttcaaaaaaagaaaaaaaaaaccctggatgttaacctactaaatgttagcatctttagtatagaaagagttctttcaaaattaggacataatggaaggataaataaataaaagcacagaanaaaaaa

SEQ ID NO: 57629 - DNA, 427 bp, Homo sapiens
  misc_feature 28: n = A,T,C or G
cgggtccccccctcgggggtacttctanaattaattaacgcggggaccccttaagttctcttttccccaaaaccctgtctgtaaaaaaagacttctacaagcagtcagcaaacaggttatttcccacacatatctcacatttttatttacattatgagccagttaggttaattacacttttcagtgactcaaatgcaagtaaaagattctgaactcagcactaataatgtcaaaccctacataaaaggcactaattggccaggcgcggtggctcacgcctgtaatcctagcactttgggaggctgaagcgggtggatcacctgaggtcaggagtttgagaccagcctggccaacttggtgaaaccccatctgtgcaaaaaaatataaaaattatccaggcatgatggtggatgcctataatcccagc

SEQ ID NO: 57630 - DNA, 473 bp, Homo sapiens
ccccccttcggggtacttctagaattaattaacgcggggagcacttagcgcagaatcaggtcccccggctgttgctcaataaaagtggcagaataaagtgcaaaaaaaaaaaaaaaaaaaaaaaaaaaaaaaaaaaacggacaaaaacaaaaaaggaaactacaataagacctatagggggccgcctcccgcgcgctccttggccgccccctttcagcgttgggtttgggcacgctccctgcgttgccctttttcatctccttgcctggcatacccctttcgccccctgccttaatcgccttgcggcccttacccctttcccttctggcggtttcgcaaactggccggcccctgtcgcctgtccgcgcttttgttcagccggaatgccggttggattttggttccatcatttctttttttaaccactcggccgattttggctaattcccttatttttctaaccaataggccga

SEQ ID NO: 57631 - DNA, 300 bp, Homo sapiens
aattaattaacgcggggggggggggagaggcacttaatgctgtctctgcaccgaatgggatcactggattggagacataggtcgcttgctagtacacaaatttccttgaccagaacgctccactacggactctaaactcctacctttctcacacacccacttttagcggacacgcaaacccttctgggactagtatctattgaccgagacactctcaccctacatgtgggactctaaaagctggaatggtgaatctttcaattcactcattcatcccctcttcaacattctagtgggagg

SEQ ID NO: 57632 - DNA, 607 bp, Homo sapiens
  misc_feature 16: n = A,T,C or G
cgggccccccctcggnagtcttctagaattaattaacgcgggtgggtataaattgaactttaatttgcatcttcctaatgactattgaagtggaaactttttcatacatgtattggcttttggatatcctttcttttgttaactatttgttcaagtttgtggcttatttttctgtgaggtctttttcttactgatttgcaaaggttctttacatattctggatgagtcttctatcatcacacacattgcaaatatcttctcccagtctgtggcttcccttttcatttcttttattgtgtctttagatgaacgaacagaagtttttactgttaatgtagtctatttatcatgctttattttttatcctaaggggcactgccatccttaaaactcgtaacaagttacaaaaactttgtaaggataataagtacacgtaaaactgggataaaaatctcacaacagtatgaatatcaaatgtaaaaatacatattgaagagactgccatgttaataacatatatagtaaacaataaatgttaattactttcctaactcaagtgcttctcaaagtgtggtccaaggaccacctggatcagaatcatcaggga

SEQ ID NO: 57633 - DNA, 589 bp, Homo sapiens
  misc_feature 576: n = A,T,C or G
ccgggccccccctcggaagtcttctagaattaattaacgcggggttctaacaaaaccccctgccacctccacgttgatctttgttgtcattctcatcgcagtgctttggtatgggaggtgttagaaaacttagagactagaattgtggaggttgggaccttgtaactccaataagcactgaagaaggtgtctctacagtcccttcttccatggagctggaacccccgcacccaccccaagtgtaaaccctctcctcctgcaggttcaagctcctcagtcccagggaactaaaactgaataatgtggggaagcagtgatgtttctgctcaaactgtgatctggatccagaaactagccctaaacagctcatggcttctcaggaagctttataaaaggactgtctcactcacattctgcctactttcccatcttccctcctgggaaaatgaagtccagttaatggaatcagcacctttccttcattcctggtagattaacccttggcattaagcagatagatatttctaagattattctaccagattcatgaaggctaaagggaattccttttgattntgtccttgttact

SEQ ID NO: 57634 - DNA, 582 bp, Homo sapiens
acttctagaattaattaacgcgggtctgtaaaaacttctttaatctacaactgtttacaaaaacaacattcaaacaaatagtacagatgtcagtgacagaacaaaatgacttttcttggagacattccagattgccatatgactttattttaaacagcgctatgactttaaatccaaggctgctcggaagatttttttaggtctctcataagcctattcttccctgatcacatgagtgggagaggtagccaaattttgaattccctttctgtgttcccacaagagctgctgagaaggcctggcgcagtggctcacgcctgtaatcctagcagtttgggaggctgaggcaggtggatcacaaggtcaagagattgagactatcctgaccaacatggtgaaaccccgtctctaccaaaaatacaaaaattagctgggtgtggtggcacgcacctgtagtcccagctactcgggagactgaggcaggagaatcacttgaacccgggaggcagaggttgcagtgggtggagatcacgccactgcactccaacctgggcgacacagtgagagtctgtctcaaaaaaa

SEQ ID NO: 57635 - DNA, 562 bp, Homo sapiens
  misc_feature 32: n = A,T,C or G
gtaccgggcccccccctcggggtacttctagnattaattaacgcgggcagggccacccgtaactgtgaatgtgcaggaaccctgacttgagaagggcctggccacgggggtcttaggccccctggggaatgagagtttggttcccggtacccagggaaaccaccagcatcggcagaggtgatagctgaggaggagcggggatttggacgagagacacaggatgagtaccggggggcagccccgtgatcaacaactgctgcaagaggggccgtttgttcgactcgctagtcttctgcggctctatgcggtactaaagagcagaagacagaagatacaaaaaccacaaaaagtagccgggcgtggtgctgcccgtcaataatcccagctactcgggaggctgagacaggagaatcgcttgaacccgggaggcggaggttgcagagagcctagatcgcgccattggactccaggctgggtaacaagagcggaacctccgtctgaaaaaaaaaaaaaaacggccgccaccgcggtgagctcaattcgcccttagtgagtcgtatta

SEQ ID NO: 57636 - DNA, 587 bp, Homo sapiens
  misc_feature 27: n = A,T,C or G
cgggccccccctcgaaagtcttctagnattaattaacgcggggaagccaattatgaaactttttaaatgagctagagcttgggagaataggtacatagaaataagcaaaaagactgtagatacacatgcaataattagaatataaaataagggaaaagatccctttcaaaattggccgcaaaaccttagcacaactcataataaccccatctagaatgacttataaaggaacacgttataaagtgttactgatatattaaattgtacaaataaacatgaaagcctggttcaaatcatttaaagaaagcttactggcaaatggaaaagagtaagttgtatagcacgatacataaaaggttaatatccttaatgaataaacaacacaggactaaggaaaacacaatacattcatggaaaaacagacgaaagacaaggaggggacaattctttggagaatcacagagaaccaataaaggaaaaatgacgtcacactcagtaatataaagatccgcagataacgtagtcgagtgatagcatattctcaatctcttgtgttaaagatctagactaacaaacgtataaagaaa

SEQ ID NO: 57637 - DNA, 422 bp, Homo sapiens
  misc_feature 399: n = A,T,C or G
taattaacgcgggggtacagtacaataagacattttgagagagagagaggctacattcatctaagttttattacaatacattttataattgttctattttattatgtttgttaatctcttactgtgcctaatttgtgcattaaactttaccatatagttgtttgtataggaaaaatatatagtatgtacaggattcagtactatacatgattttaggcatacactgggggtcttagaatgtatcctccacagataagaaggagctattgtattcctaaacattttttacttttatttttcatgattaaaaccatataaacatcacattacattcaacttactttttcatttaatatagtatctgtaagtaatactctgattcattgattttcacaggtntatagtatttaattttatggctg

SEQ ID NO: 57638 - DNA, 558 bp, Homo sapiens
ccgggccccccctcggaagtcttctagaattaattaacgcggggaaaaaaggaaggcaagaaagaaaagataatttaattttttttaaatgtgtacatgtaagcttttgcgtttctatatctaggaaaagaaatctgtgaatgttcagatttccattcgacatcagccagtttctttccaaacactttctcaaagtgtcgtacttcatctttcaaaaagcctcatcctacagtcacacaccttgtagttttccggctgagggactcacagaagggaaccgtggtttcctggttctctgccagatgtccagtggtcccacgaaggccagagattcaactgcctgccactcttgtgaagatgttgcatacaggacgattcccagaggaactgggacctggtgaggccaacacacagatattttcttgtaaggtaggataaggcagagtgacacagcccgcatctgaccacaagtcatgggaggtgtaacccaaggtggcttatcacctgagctctgaagggataatctgggaggaacagttggtttgtgcagcttttcag

SEQ ID NO: 57639 - DNA, 553 bp, Homo sapiens
ccccccctgggtctttagaattaattaacgcggggaaatgggcctttccacctgagaaaggcgagtgtgtctgcgtttgataatcctttgatatttgcgtatctgttattttcaagaatcacatttcacatagaaagccatgtgacagtttttaaattaaaaaaaaaaaaggtagaaattccagagatcttgtcttaggtatttactgccagctacaaacaaaccccttttgaatttacttaacaaggaatttaataaaagtagctctggcattcagccgcagccctgcccacattcctgttagctgaggtcacctgactctgcttgtcgtttttgcacaggcagacgtgtgcattctggagagcagggagtgagtgtaaagtttaggctgcgtcaggatgctgactcctcagaagtgtaacttcggcactatccagcctgtgggtggaatggcaatagcggagaatgggaacttcctactggagctgtttacggtgacagcccaggatttgtgccacacttgcttccttcatatgctggcttcaggtttctg

SEQ ID NO: 57640 - DNA, 603 bp, Homo sapiens
  misc_feature 14: n = A,T,C or G
gggccccccctcgngggtacttctagaattaattaacgcggggcaaggtgctgtctggaataagggtcttatgatctatagtcaaacaaaataggccaggtaatttgtttatggtcagtttttatgcagaaaggtggaaggaatgtcagagtaatatttttaggtttcttcactggctttggggaaaaagagttctggtttctatgacctgcctcagagaggagggattctcatgtctatggctacccttaagggaaaatgagactgagaaacaggaggacatgagaaggttagagaaaaacttttgcttctgaggctgtttctgacaccttcactttgggatgttgttttctgagtcccaatatcttcatgaaaaaggaagcatgactaagaaggcagaactaagaactcaaaaaacagagctaagagttatggagaattattcccataatttgagccttaatctaattctaatatttcccaactggatttcaaaattgctatgaaccagtgactcctgtgtgcttcttgttttattcttttctgaacagaagtatcaatatcagttatcctatgcctgcctcaccatgtgtgttgggtgtg

SEQ ID NO: 57641 - DNA, 403 bp, Homo sapiens
  misc_feature 28: n = A,T,C or G
ccgggccccccctcgaaagtcttctagnattaattaacgcgggaagtaaaagaggggtgatgtcaagagagaaggagccattggaagtataatttcttacaattggtacacaatattattaataactatagcagacacagatttatagcagaaattctgaagtcttgtttacagtaatagagatatatggacagtctgataatcactcttcaatatatttttagtgattagggttaaataaagactacagagtagtattaaaagtgtagattccttaaccaaactgcctagattaaaaccctacctcttatactatctgtatgaccttgggcaagttacttaacattcttgtgcctcagtttgttattctataaggtgtgttaataatagtacctccctccga

SEQ ID NO: 57642 - DNA, 488 bp, Homo sapiens
cccccctcgagagtcttctagaattaattaaaagtgaaacgtaattgtacaagcagttaatcacccaccatagggcatgattaacaaagcaacctttcccttcccccgagtgattttgcgaaacccccttttcccttcagcttgcttagatgttccaaatttagaaagcttaaggcggcctacagaaaaaggaaaaaaggccacaaaagttccctctcactttcagtaaaaataaataaaacagcagcagcaaacaaataaaatgaaataaaagaaacaaatgaaataaatattgtgttgtgcagcattaaaaaaaatcaaaataaaaattaaatgtgagcaaaaaaaaaaaaaaaaaaaaaaaaaaaaaaaaaaaaaaaaaaaaaaaaaaaaaaaaaaaaaaaaaaaaaaattttaaaaaaaaaaaaggggcccccccccgggggggacccccattcccccctaaagggggggttttaacccccccc

SEQ ID NO: 57643 - DNA, 187 bp, Homo sapiens
  misc_feature 28, 30, 41: n = A,T,C or G
agactggggtaccgcggccccccctcgngngtacttctagnattaattaacgcggggcgtacgttgaagatttattagtttaattctatttttacagtaaccttgaattcttctgagttttgcatgtattaaattcaattaatgctgaacatgaagagtaaagtatttatctgaaagaagtttctgg

SEQ ID NO: 57644 - DNA, 480 bp, Homo sapiens
  misc_feature 448: n = A,T,C or G
cgggccccccctcggggtacttctagaattaattaacgccgggatacaccaattacagagactttcaagagttgtttaaaaaataagacttaactatatgctgttcacaagaaacttatgttatatatatgaatatctctaaagtaaataaagatataccatgctaacactaatcaaaagaatgctggagtagatttatactattagacaaagcagatgtattagtttgggttctccagagaaacagaaccaataggacatacatagatgataaatggatagacagatacataaggagataggtttattataacaaattggccaacatgattatggggtctgacggtttccaagaactgcagttggcaagctggaaaatagaagagctaatgctgtagttcagtctgagtcccaaggcctaagaagcaggagagtcaaaggtgtactntcagtccaattgctggcaggggttgaaaccta

SEQ ID NO: 57645 - DNA, 620 bp, Homo sapiens
  misc_feature 28, 41: n = A,T,C or G
agactgggttaccgggcccccccctcgngggtacttctagnattaattaacgcgggctcatactgaggaacaaaagcagtcagtataaatagtttctgaattttcccagatgttaaaacatagatgttgttatcaaaacagtcattataaatgtgttttaaaaataaaaattgttcaaagaattaaagggatccatgaaaataactcactgaagagataatttcaaaaaagatataacaattactttaaattaaacaactgggaattatggaaatgaaaaagtacaataacggaaaaatataaaaattcactagagtggctcaacagcaggtctgcggtgtcagaaaaaaagaatataatgtttgaaagtttctcaaacttgatgtaatacattaatctacagcactctaaaatcaaccaaccacaaataagataaatatcaagtgatctgcaccaggatacgctgagtcaaactgtggaaagacaaagagaaagtgaaaatggctagccagttattccagcaccattttttgaatagtgagttgtttctctattgcttgtttttgtcaatttttgtaaaggtcaaatggttgtaggtgtgcagccttacttctgggctc

SEQ ID NO: 57646 - DNA, 613 bp, Homo sapiens
  misc_feature 35, 559, 599: n = A,T,C or G
tgggtaccgggcccccccctcggggtacttctagnattaattaagcggggcgtggtggcgggcacctataatcctagctacttgggaggctgaggcaagagaatcgtttgaacccgagaggcggagcttgcagtgagccgagatcctgccactgcactccagcctgggcgacagagcgagactccgtctaaaaaaaaagaaaaagaaaaagtgtcctatattaaataaattcctcatattttatactaatattaattccaattcaatactttacatcagctttgatttttcaaatggccctgagtgatacaagtaactgtgtagtattttaatatacaagtgtcagaaagtattgacagagcctctcgaccaaactttactctcttcaacgatttctcaactattagacttttttacttatctctacattgtccaaatttagcaagaagcttgctaagtcaatttagtcattctccttgtctgctcaccctggatatctgatcgggttcctcatcctccaccatcctccagatgatgtgtgattgccctggcctgcctncagccagcatcctggcaggtcagtttggccacagaatctnccttactactaatg

SEQ ID NO: 57647 - DNA, 557 bp, Homo sapiens
  misc_feature 36: n = A,T,C or G
tgggataccgggcccccccctcggagtacttctagnattaattaacgcgggtcttgcttatacatgacttctgacgctggtactaataagcctctgtgccgagaattaaaaatgttccagtccattgtaattcaatccactaggaagattcacatggctccacagaaatgtctttaagtttgctggtggagggtaaaagaagacaaaaataaaaagaagctctttttgccctcaatgaagtcacagtctattaggcgatgctagtccttattttctttgcatgtatgactctattcttcatttcctcactacagtttatggaagttggaccaggaaagtaatggaaagcaagtcttacccaaagaattattgacataactatttagaactcagtttctttgctatttggcaaaataccaagcaagttttcctgaccagcatagggatagaacctatggcctctatctcattagtactgtttgttagtattaagtaggcgaagccagtctggtacctaattaaagtataatgatctgcattgatctgaggtatggctc

SEQ ID NO: 57648 - DNA, 360 bp, Homo sapiens
ccccccctcggggtacttctagaattaattaacgcgggcaatatatttaaaaagtacaagctaccaaaactcaaccaatataaagtaaataatttaaattcccttgtagcaattaaatcagttgaatttgtacttcaaaatttcttcccaaaatatatctccagttactaatggttgtgccagagaattcttttaaagcttagagaaaaattaacactgattttatccattcttctagaaaatgaatgacgaaagaacaatttacaactcattttatgaatccagtattacccacatattattatcgtccttatgcttcttttcccatgttttcttcttacctttctttttttttttttc

SEQ ID NO: 57649 - DNA, 260 bp, Homo sapiens
ccgggccccccctcgaaagtcttctagaattaattaactcgggggggggggctgatttttatttctttgggggctttttttcttggcaaatactaaaaatctcgtcaatgtaatttctgtggtttctattcagcttgggtttcatgttttaaaataaattttaaaaagcaaaaaaaaaaaaaaaaaaaaaaaaaaaaaaaaaaaaaaaaaaaaaaaaaaaaaaaaaaaaaaaaaaaaaaaaaattaaaaaaaaaaaaaaa

SEQ ID NO: 57650 - DNA, 516 bp, Homo sapiens
ctggtgtaccgcggccccccctcggggtacttctaggattaattaacgcggggtggtgatcgtacctgcgcaagtagcaggagttgagtgactatttgtggttgaatgactgaaattgagttctcttctgtcagaactcttaccaggctttgtgagatattccttacgagttcttaatctatagctgtaattatttaatgcatatttatctatcacacaagcttgtatgctctcagaggacaagaattatgttatattcatttgggagtacataggcggtatttaaataatggtgctatcttaaacaccaaatatcaactgcagttcactttttccgtgtggggactaatatcaagatttcatatgaattatagtataatccagaagtatgaaaaaatacatcatatttaacttataaagcattcatctgcatgttatattacagtaaatacaattaggtacttaccattttatctttactttaaaaacaatgccttttccaaaaaaaaaaaaaaa

SEQ ID NO: 57651 - DNA, 622 bp, Homo sapiens
cgggcccccccctcgagggtacttctagaattaattaacgcgggaattcagttttgtttagatgttagaattggtatttgttcttgctttttggttgcgatggagttatatactaagttacttatactaaggcattagtagtctcatatctgaggagcaattgtatttttagttcagctaaattaatgcctctttttaaatactaacttgtactacttttgtggctgtgaatggtatcttttattgaactgaggcagcttttaaaagacttgcctgatcatttagagcactcccattgaggttaaattagacttgaatctgtaatgattctcgtaactgttcctggtgtgtgtccagcacaatgttgctgggcagagcagaggggcagaggctcaggtatgtacttcattgacaagtgggcaaggccatcctgggtaccacattggcttaatgatctcttcattgtgaagtccggctacctcgtttgcataagaactacagtaatcaggcaaggcattgtcagaattgggaggaataaaatcagtgagtctggaaggagtgctctgtatacaattgcaaagaacaaaatggtcatctttaaggtacctgattgcatgcactt

SEQ ID NO: 57652 - DNA, 534 bp, Homo sapiens
  misc_feature 28: n = A,T,C or G
cgggcccccccttcggggtacttctagnaattaattaacgcggggagttaaaaaaaaaaaaaaaaaaaaaaaaaaaaaaaaaaaaaaaaaaaaaaaaaaaaaaaaaaaaaaaaaaaaaaaaaaaaaaaaaaaaaaggggccgcaacaccagagggggaaaataaaattttccttaaaaaaaatttgttttcccccccctggggggccccctttttccaccttggggaggggaaaacccccccccttcccccccttttttccctggcggcaaatcgggaaaaacccccgctggcccaaaacctaaaaagcccggaaccaatccccttttgaaaaggtggggtaaaaaaaagggggaccgaaaattgtcccctttaattttttgtcaaactcctgtttgaatttgggaaaaacccccccttttttaacccaaaaaacccgaaaaagaaattattccttaataagtttattttttaacccgggttggggaaggggggtttttcctttttaaaaaaaaaatccccccttaaggggggg

SEQ ID NO: 57653 - DNA, 467 bp, Homo sapiens
  misc_feature 19: n = A,T,C or G
taccggggccccccctcgnaaatacttctagaattaattaacgcgggggggacctgggcgctgttcctgttgtgtgtcccatgtctgccgttgctgtgcatgtgaggctgctgcccctgttgtcctcccgccctctctggggtggggtcggggctcctcctcctcctcctccaccagtgtcgctggctgggagctcaaatggtgtcagcttctcaggtgtcaccttggtgtcctcgtggccaactggctgcctgtggtttggcacacagtgcctgcgctggctcaacactgaagcccgagcttcctggggcggctctgtccccacgcctgcgccacagtgaggttgaacttgactgtcttttggtccccagagctagagccggtgcaggccacgcagaacaagacagggaagtatgtgccgccgagcctgcgcgacggggccagccgccgcggggagtccatgcagc

SEQ ID NO: 57654 - DNA, 589 bp, Homo sapiens
  misc_feature 17, 28: n = A,T,C or G
cgggcccccccctcggnagtcttctagnaattaattaatgaactgtttacatgcaaaatcttctgagaggagacctgttttcttccattggcttaacacccactgtgcaatccatacagattcccaacgtctcttccctgtgaaatgattttccatgtaaggataacaaaccagtactgaaccatgtctctctgggaagctctactttgaaagtaatcctccctgcagtcttttctcttctgctgagagtagctcttctttccatcacctcattaaccccatgtagagactgacaaagattttctcctttagcaaattacagacaggctcttttaagtctggttagaccccatgtttgggcatattccttacagacccaatttaacaagaatcctgctaagtcagtttggcaagactgactcaatatctgaccactctttataaatattccttaccctccgccattccccaggcaatatctgatcatcttggcctgtcttcagcaagaatcctgttaggtcagtttagccagaatcctccttgtccccagtatttcctcctagtaatcttccattcactgagccctaca

SEQ ID NO: 57655 - DNA, 586 bp, Homo sapiens
  misc_feature 49, 540, 546: n = A,T,C or G
cggggccccccctcggaagtcttctagaattaattaacgcggggggggncctaaaaactcttatgctagtattcatgctattatttttaccacttatagggtataatgtgattaggaaatttcagttattctacttataaggaatttgcctgaaagaaaagtcaataagaactagcccaaaactgtgataaaagaggaaaaaagtcaacaaggagataaaaagcacctgagaaagaatgaatattgcccctaagactaaacacagtgaaatcagggttaaataatattcaggaccattttgatgggaatataatcattttttaaacaaaacacatatagtaatctaaataacatttattacccaccaccacacatttgggaggctgaggtgggatgttttcttttttgctttttgttttttgagataggggtctcaaaaaaataaagaaaataaagaaaataaactataatatcataggcactataggaaaaacattatttagaaatacatttttagctagacatagtggctcatgcctntaattncagcagttcgggaggctgaggtggacggaacactttgagt

SEQ ID NO: 57656 - DNA, 409 bp, Homo sapiens
  misc_feature 400: n = A,T,C or G
cgggccccccctcgaaagtcttctagaattaattaacgcgggaggattgcttggatctgggaggtcgaggctgcagtgaactgtgattgtgccagtgcactccagcctgggcaacagagcaagaccctgtctcaaaaaacaaaacaaaacaaaacaaaaactgatgcttctgaaggctgtgccagagaagtatgtttgtgtgtttatctgaattaaaaccaagacatgttctgacggaagttaagtctgatttggctaattaaattaagaacagactttgccagtttatatgacaggactttttctataaatttaatcagctaaatctatagtcccagggctttcataaaaatatctttgagccaagcatagtggctcaaggctgtaagcccaacacttntggaggctg

SEQ ID NO: 57657 - DNA, 579 bp, Homo sapiens
  misc_feature 28: n = A,T,C or G
cgggcccccccctcggaagtcttctagnaattaattaacgcgggggtccaagatggcggcagaagcagctggtgggaaatacagaagcacagtcagcaaaagcaaagacccctcggggctgctcatctctgtgatcaggactctgtctactagtgacgatgtcgaagacagggaaaatgaaaagggtcgccttgaagaagcctacgagaaatgtgaccgtgacctggatgaattgattgtacagcactacacagaattgacgacagccattcgcacataccagagcatcacagagcgcatcactaactcccgaaataaaataaagcaggtaaaagagaacctgctttcatgcaagatgctgctgcactgcaaacgggatgagcttcggaaactgtggattgaaggaattgagcataagcatgtcctgaacttgttggatgaaattgagaatatcaagcaagtgcctcaaaagctggaacagtgcatggccagcaagcactatctcagtgccactgacatgttggtgtcagcagttgagtctttggagggccccctgctccaggtggaaggactgagtga

SEQ ID NO: 57658 - DNA, 555 bp, Homo sapiens
cccccctcggaagtcttctagaattaattaacgcgggctcacctgagagttgattttgcccccaggattcttcccagggaggcttattcatcttttaggtatcaaaaattaacaacaaccaagattgtagttcttaggctgtggagtgcacatagcacataatccatggcactgagttcaacacacatgcattcttcagtctaggagcatggagtaagaaacaaaacactggctaggcgccgtgacccacacctgtcatcccagtgctcggggaggccaaggcgggaggactgcttgaggccaggaattcaagaacagcctgggcaacatagtgagaccctgtctctaccaaaatttgaaaaattaaccaggtgtggtggtgtgcatctgtagtcctagctactcaggaggctaaggcaggaagatcacttgagcccaggaggtcaaagcaatcctcccacctcagcctcccgagtagctgggactacaggtatgcacaaccatgcctggctaatttttttactttttctttgtagagatgagggtcttcctatg

SEQ ID NO: 57659 - DNA, 605 bp, Homo sapiens
ccgggccccccctcggaagtcttctagaattaattaacgcggggtgagaacatagagctacttttccttcggtattttcagaattagtctgtcctaagagaaaaaaaaatacatggtgaacatcactcacttgaggacttcccataagcaagaagtcgctccccactgaatgtgtgatttctcgattttagattttttaaaatcatttatttatttttgagacggagtctcaaaaaaaaaaaaaaattccaacttcctcttttaggcgtcttcttaaggaaggaagtgtccgcgtgaacacgagaggcctcagatccagaagcacaagccgtgcatgaaaacaccaaaagactcactgcagggagcaaaggcagccaggccctgccaaaccagagggggccctggcaccggcgaccacagagcgctgggggaggcatcgcacccaagggcacacacgcaggaaaaccggggtgagaacatagagctacttttccttcggtattttcagaattagtctgtcctaagagaaaaaaaaatacatggtgaacatcactcacttgaggacttcccataagcaagaagtcgctccccactgaatgtgtgat

SEQ ID NO: 57660 - DNA, 583 bp, Homo sapiens
  misc_feature 27: n = A,T,C or G
cgggccccccctcgaaagtcttctagnattaattaacgcggggaggaaatctgacaaatctaggagagacattctacaggacaattggcctggttgctttaaatgttgatgtcatttttaaattttcttttttttttttttgagatggggtcccactctgtcgcccaggctctgtcttgaaaaaaaaaaaaaaaagaaaaacacacctccatgacagggactctggcagccaccacctcagccaagaagctcatctggcgtcatgacagaagggcgacctgatgtcataccttcctgcaacaggaaggacacagggctgtaaggaactcttgcccaaaaggcttcatctgaatctaattaagccttcggtgctaatgttcggtttacaggaaatacccctaggtccaagaacaagagaaaagacatcaagaacaggtgcggtggctcatgcccaaaatcccagtgctttgggaggctgaggcgggagaagtgctggaccccaggagttagagaccagcctgggtaatgaagcaagacccctgtctctacaagataaaaaaaaaaaaaaaattagccaagtgtg

SEQ ID NO: 57661 - DNA, 253 bp, Homo sapiens
accgggaccccccctcgaaagtacttctagaattaattaacgcgggggatcacctgagccggggaggttaagactacagtgagctgagattgggtgccactgtgctccagcctgagcaacagagtgagaccctgtctcaaaaaaaaaaaaaataaaataacaaatgcaatttaatagtacactaaaagaataatagtgttcatgaacacatatagtgtctctcaggaatccaacttaggaagtatattaatat

SEQ ID NO: 57662 - DNA, 597 bp, Homo sapiens
ccgggccccccctcggggtacttctagaattaattaacgcgggggggtaagatggcatcccatccaggttggtttctgccttgggacctgagctgcctggatgggctccagccaccaataacccttaactgaaataagcaggttggaaaatgaatgaatgtatacaaatgatcataaaataaaatttcacaaagtctattataatcatccaaatgcatgacaataaatgatgcctgacaaaagccgccatgttggtaattgtttttggcctgcaaggtggtgggaggtgccccagacaatgtttgctttacaaacatttattctttcaactcaccaccagacaaccaccaccattcacaaattcacccaaaattgggtaaacaattatcttacctgtttttattaatctgtcctaaatgtgtgtatagttcacatttattccagtgcttaagactaattaggggtgttttaggtctttatttagaagtttggtcatgtttttgggaccagaaatgtacctaggaatttaactcctgttcgtatcaattagcctatggtaaaattggttttattatacttggtttcacttaaagttgc

SEQ ID NO: 57663 - DNA, 464 bp, Homo sapiens
cgggcccccccctcggaagtcttctagaattaattaacgcgggtggtgcccattaagtaatctctcactgtccatgccttccatcccctcaccctgctgaagtctcccttatcattacactgtctacgtaaatatctacacatattttagcaacccgcttatgagtgataaaatacgatgtttactgtgtgtctggcttgcttcacttacaacattggcctgcagttccttccatatgtgctgcaagaagcttatgatgctatcgttgttttatgcctgaatagtgtttaatagcgtatattctctacgttgtctttctccagtcatttgtcgatggacattacgttgatcttatatctgtgctactgtgaatagtgttgcaacatatgcacgagtacagttctctttctgataaattgatttgttttcctttgcataaatactcactggtgggagtgctgaat

SEQ ID NO: 57664 - DNA, 479 bp, Homo sapiens
ccgggccccccctcggaagtcttctagaattaattaacgcgggctggacacgcctcattatcaccttctcactcttggaattactgagagaacagactctttaagtctgataagaaacacttacagtctattctctgtgaagcctgctacccggagctttcatctgcatgataaaaccttggcattggccggacgcagtggctcacatctgtaatcctagcactttgggaggccgaggtgggtggatcacctaagatcaggagttcaagaccagcctggccaacatggtaaaaccgtctcactaaaatacaaaaattagccaggcatgatggtgggtgcctataatcccagctactcgggaggctgagatgtgagaaccacttgaacccaggagaaagtggctgcagtgagccaagatcacgccactgcactccagcctgggcagctgagcaagactctgtcccaaaaaaaaaaaaaaa

SEQ ID NO: 57665 - DNA, 533 bp, Homo sapiens
ccgggccccccctcggaagtcttctagaattaattaacgcgggttcttttatgttctctgttttacctcttttactcttttactccttaataaaaaaagattttctatcaattaattatagcgagagatataggctaactccctcagaataaggatttttatattcagacctgaattgatatgctttgtattcctgatgatgttaaaatacagtataaataattgtactaggtgtctactccttcactgggacttgtgcctaacatcaatgatgtatttggcattagagcccaattagtgtactgggtgttggtaatgttttagtacacaactgctaagaatttttatgcatcaataacaacatcaaaaacatttatgagccacgcatagtagctcatgcctgtaatcccagtgctttgagaggctgaaacaggagaattgcttgaggccaggagtttgaggccagcctgagcaacatagtgagattgtctctctacagaaaattagctgagtgtggtggtgtgtacctactc

SEQ ID NO: 57666 - DNA, 556 bp, Homo sapiens
  misc_feature 29: n = A,T,C or G
ccgggcccccccttcgaaatacttctagnaattaattaacgcggggccgtctttgctactggcaggtaggtgccactcacctttgcccttttttttttgggaaaatgtggatcagcattcacgaggctttaacctccaaagagccaaccataattaagcataattagtgataacaatagccacgatttctggggagaaacaaacttacctgtccaaacccaaataagggactcaaagacctggagaacagtgaaagtgagacttttagtgacagtcttgcaagatcggatgtctgatgggcaggcacacccagcacagtttcaactgcaatttatcccctagtgcacaggtccctccctcagttcctcataggctgagtacttggggtcacaatcttcccagacgtcgcctatttgttgttgggcaggggctttaagtgttttctttagggtgggcttgctgcattttgttgcagcccacaatgcattgcaatcctagtgagctcaggggctcttcaagtatctgactaatgacctaagtagctgaacaggctgat

SEQ ID NO: 57667 - DNA, 455 bp, Homo sapiens
ccgggccccccctcggaagtacttctagaattaattaacgcgggggagggtaaagggaccgtaaagaaaggtaaggtctctagggtctgcttaaatggtaaaatgttaacatttttagactgtgataagttacatgtgtttatccatgtacagcataatatctagagcaaatagctaaaaaatctatataaagagatacactcaaaaatactacagctaaaacaaaatgaaattctaaaaaatgctcaaacaacccataggaaggcaagaaaaagaaagcaaaaataacaaacagaacactagacatacaatagcaggtttaaatctcaacatatcagtaattatataacatgtaaatcttctaaatatactaattagaagacagatataggcaaagtggataattttatttttcttttttgagacagagtcttgctctgaggcccaggctggac

SEQ ID NO: 57668 - DNA, 433 bp, Homo sapiens
  misc_feature 28: n = A,T,C or G
cgggcccccccctcggggtacttctagnaattaattaacgcgggctctctcttacaaggacccctgggagggcatttaggttctccccacgtaatccaggattacatcatcatctccagattcttaatcacatctgcaaaggccctttttccaaatagggtagcattcatatgctgaagctttaacccccaacatggctgtatctgagatggggtccttaggaggtaaagtcaaatgaggtcattagagaggggctataattcagtgggattttaagaagagaaagagcagctgggaatggtggctcacgcctgtaatcccagcagtgtgggaggcccaggtgggtggattacctgaggtcaggagttcaagaccagcctgaccaacatggtaaaacctcgtctctactaaaaatacaaaaaaaaaaaaaaaa

SEQ ID NO: 57669 - DNA, 325 bp, Homo sapiens
attaattaacgcggggggagttgtcagggagctgctacacggagaaccctggactattcgatcaagcagcaaggctatatgttcacttatgcagaaatggaccattgcagatgctaatctttgttgtgcaagcgaaggctcacttggaaggaaatactcagcccctctctgggcaacatttgagttccttatggatgccgagtcgcgaaacaagttattttttttaatgtatccttctgtatgaggagaatgctacccaaaaatggattaaaggaatatgaagggatccagagactgtctggctaccaataactgtgctttggaa

SEQ ID NO: 57670 - DNA, 609 bp, Homo sapiens
  misc_feature 564: n = A,T,C or G
cgggccccccctcgggagtcttctagaattaattaacgcggggatgctattaaaaaaagaaaaaagaagagaacaaaaaagtcctccagtaaatttaaaatatggtagtcaaggccgggcacggtggctcacacctgtaatcccagcactttgggaggctgaggtgggtggatcacccgaggtcaggagttcgagatcagcccggccaacatggcaaaaccctgtctctacgaaaaaaatacataaatcagccaggtgtggtggtgtgcacccgtaatcccagctacttgggaggctgagacatgagaattgcttgagcctaggaggcagaggttgcagtgagctgagattgcaccactgcaccccagcctgggcaataagagtgaaactccatctcaaaaaaaaaaaaaaaaggtgcatgaaacatatgaagcaaaaagtgaaagtccccattcttttcctttttccagaggtgatttttgtggccaatctggtttcattccctcccagacacttttctaggcatctatgcgcctctattcacatataaacaaaataggagtnttcctgtgcttcccttaaatggcatatgtatctttcactcttttt

SEQ ID NO: 57671 - DNA, 591 bp, Homo sapiens
  misc_feature 49, 550, 576: n = A,T,C or G
cccccctcgagagtcttctagaattaattaacgcgggatgagcaccaanaacaccatactgaaagcctacgatgggcgtttcaaggacatcttccaggagatctttgacaagtaaagcctcatccatgtactctgtggcctttcttcccttccccccatgctgttcccatcctaccctgggaaggtcgctattagagtgcatttggctcagctccgaggctcagggagggatccccaacctgtcagccttctgccctctccccataacagacctttttactcccaggcactataagaccgacttcgacaagaataagatctggtatgagcaccggctcattgatgacatggtggctcaggtcctcaagtcttcgggtggctttgtgtgggcctgcaagaactatgacggagatgtgcagtcagacatcctggcccagggtacgctgggaggacgctgctccctgtgggggtggactgttggtcttctctggctggagggattttcagacccttttggtagaaaactctagtggagcaggactcattgcanggtcctctgtggacagcagggggcangagctccctggcatc

SEQ ID NO: 57672 - DNA, 593 bp, Homo sapiens
cgggccccccctcggaagtcttctagaattaattaacgcggggtggggaagtaaattaataaaattcctttggagagtaatttgacaatatctaattgtaaagttgaagatgcccatatcctgtcagaaattccacctctaaatgcattcactagagaaacacacatataagcaaagaattatttaaaagatgttcattgcagcatgctagtagtgaaaaattttaaacaacctaagagtccaaaaggagaataatgatgaataaattatatgtagtcatcaatgtatagtgggttgaatagtatcccaaacaaatccatgtccacttagaacttcagaatatgatattatttgggaatagggtcttagttaagattaggtcatgctagattagaatgggccctaaatgcaacaactggtatctttctaaaaagagaagtcacacagaagcatccacaaggaaaaaggccatatgatgacgcagcagaggttggagtaatgcagctgcaagccgcagaacaccaaggattgctgacgaggagagagttgtggaacagattctccctcagagcctccaaaaggaactaaccctg

SEQ ID NO: 57673 - DNA, 606 bp, Homo sapiens
cgggcccccccctcggggtacttctagaattaattaacgcgggggttaaggagaagctggtcaatactagattaggacactgtagagtggcttcaaatatcaaagggctaattgaacaatatgacttaaagggttcctttcacacctgaaataagagtctcaaggattccatccaacaataagatttcataattctaatatcatttctatttcagtcaactaactcaagggctagcaaactgtggtctgggggctaaccacctgtttttgtaaataaagttttatcagtacacaactgtcccatttatttgcatattgtctgtggctgctttcaaactacaaccacagagttgcaagtggggccacatggcccagagcctgaaacaattactctggttctataagaaaaagtctgctgatacctgagctaggataacatacacagacaaatgtgacatttaaaatataaataagcaccaaattgttctccaactataaacaaccagaaaattggacagaatatataaaattactgttttcagacactagacaacagggagtacagagctagactccctgagagaaggcatacaaatgaggtgggcc

SEQ ID NO: 57674 - DNA, 570 bp, Homo sapiens
  misc_feature 27, 45, 46: n = A,T,C or G
cgggccccccctcgaaagtcttctagnaattaattaacgcggggnnaggaaagcaaggtatctcccttctacccaatgttgaggttttcaactttgactaatcctctttttagataaaaggtagtctgccccaggaatggagagaattagggggctccattatggtgacatgtgtggtaccatggtcatcttcttttatggagatggggctgtcatggggccagtcctggcaccacatcgcaaagtccaggacaaagctaacatgtttgtgctggcttgacgtgctgttgactacccagcacgcggtcctactctgaggttccactgaggtcggcttccctacaaactccctgtttggtggatcgtcgtcctctggcatttgctcacagaatgctagacttctgacttgtcaccatgttggggcaccaacatttctcttttctgcactgatttctccaaactttgaaaaaaacagaccaggctatgttagcacaggagcaggtacccacaggttccattcagtgcttagccactgattacctgctgtgtggcccatcctctactgagcgt

SEQ ID NO: 57675 - DNA, 554 bp, Homo sapiens
taattaacgcgggggtaattattaaaaaatatatataaaaaaaaaaaaaaataaaaaaaaaaataaaaaaatataaaaaaaaaaaataaaattaaaaaaaataaaaaaaaaaaaaaaaataaaaataaaaattaaatggggggctttatttatattggggcgtcccccccggggggggttttttttttccctttttggggtttttttttgccccctttcttggcccttttttttaacttttttttttggtaaaccttgggtttttccccattttttttttttggtgctttttttttttttggggttgggtttttttgttgttgggccccccccttttccttttttatttgtttttcctcttttttgggtttttgggttttttagttttttttttttttttaattttcgtttttttttttttttattttggttttttttttttttttttggcgttattttgttttttttttttttttttatttttttcctcttttttggtgtttttttttttttttttttttacttgttttttttttttttgaggtttttttttt

SEQ ID NO: 57676 - DNA, 617 bp, Homo sapiens
cccccctcggaagtcttctagaattaattaacgcgggacgtattattaatatctagtttcactgtgttactgtcggtgaacatattctatatgattttaattttttaagtatgttaaaatttgttttatgacccaggatttggtctgtcttcctcaatattccatggacacttgaagagaatgtgtttttttttatttaaggataaagtattgtataatgtcaattagctcctattgtctggaaatattcacttctatgtccctatcgactttctatctaatactgctctccatcgcttagagtgggctgttgaagtcctcaacaattaatgtggtattatcttacattaagtatatcagtttttgtttcatgtatattgtagttctgttatttgatgcatacatattgggtattgctatatattcttggtatattgatctttttattatcatataatgtccctcttgatcgttagtaattttggcacaacatcttttttatctgacattaatatagctgctcttgttctttttaaattgcatttgcattgcataacatttccatcctttgatttccaagcagcatatgttgctatgtttgaagtaaatttcttgtt

SEQ ID NO: 57677 - DNA, 157 bp, Homo sapiens
  misc_feature 25: n = A,T,C or G
ctgggataccggggccccccctcgnaggatacttctataattaattaacgcgggtctctttgtagccatcctgttaaatttgtaaacaatctaattaaatggcatcagcactttaaccaaaaaaaaaaaaaaaaaaaaaaaagaaaaaaaaaaaaaa

SEQ ID NO: 57678 - DNA, 338 bp, Homo sapiens
  misc_feature 318: n = A,T,C or G
cgggccccccctcggaagtcttctagaattaattaacgcggggccttattccattataaatctctgcccttgggtttgtctccttgttttcttccacttcacttaatataatcttatattttaatccaccttaaaaccttttggaaacaaagcataatataaataatctttaatatgtgtttaaaaaaaatctggaacccattcccaaatacgttctaggctaccccattcccaaatgagaaaggggaaaaagcccatttaggaagaaaagcacaggaacgatatgacatatgacctgatctttagtaagtgacctangcgaggatggccttaatcca

SEQ ID NO: 57679 - DNA, 608 bp, Homo sapiens
  misc_feature 34: n = A,T,C or G
gggtaccgggcccccccctcggggtacttctagnattaattaacgcgggctgggttagtttcattgtttctcctcttgatgatggctcacatatttttttctttgattgtttcatttttttattaaatatagacattttgtggaaagaactggaaagaactgagtaattttaagtctaggaaaggacatgctcctattttgttgttgttgttcagactttcaccatgggacagagattactaagtcaatgtatatttgtgtctggccaggtctttgtttaatctactccatagttgaactggcctagtttctgttattcctttaattagattcaattcaacaaaagatctcaaatattttaagggtagaatcacaactttccctttagtaaggcttaggatctgagtgtctgctggttttatctctttactcttaatctaccttcagctttcagttgaccgtatgtgtccttacctgagggtggtctctttaaactcctctgcctcttctcaaccacatgattgttctccgtgtaaaggagaaagcgctggctgggcgcggtggctcgcgcctgtaatcccagcactttgggaggccgaggagggcgg

SEQ ID NO: 57680 - DNA, 602 bp, Homo sapiens
  misc_feature 23: n = A,T,C or G
ccccccctcggggtacttctagnaattaattaacgcgggcagagtctggtgtgtcctcacccccttggggaagctctgccactgacctgctcaggtggccaacaccaggctcttggctcatggttttctgcgaagcctgaggcccgcatctgggcagggtggggtccttgctgcaccaggtgagaaaaggctcttcctgatagagaaggagccacgtttggtcttttcctggtgggctgacagcagggtgagcttggcattggtctggcccttggttgtgggccgagtagggaggacaggactgcctcctctttccctaggcctcatgacaagggccaggcagctggacacgctggactctgaggcccccaggtttccctctaattctctaacatgtttgctttccacatcctggcctcgcttcacattccagctcattaggcaggacagggccccatttctccaggactctgccaatttggaaaccccaagggccccgggactggggttcctcctgctccgacatgacccgagcttcctgataggtgggaaccgccaccactgtgaggatttcactttctggctcctggcctgctgggaac

SEQ ID NO: 57681 - DNA, 359 bp, Homo sapiens
ccgggccccccctcggaagtcttctagaattaattaacgcgggtatttgctttttttcttactattttttatttctcctattttttttctattccattcccagattcagtaacattattttgaattttaatctggttttcaagtaaccaactgccttatcccacttggtattgacgggatagtttatgggactggtctctattcagatatctgggtcagggaagaattaagatcccttccttatgctcagagacaaaggagagtgtcagggcagcaggtaaagatgcagagaaagtttcgaaactgtcaggggaaaccctctgctcatggttaaaaaataaaataaaaaaaaaaaaaaa

SEQ ID NO: 57682 - DNA, 233 bp, Homo sapiens
  misc_feature 25, 43, 61, 62, 75, 76, 85, 88, 89, 95: n = A,T,C or G
gggccccccctcgaaatacttctanattaattaacgcgggggnagtaagaaggaaaaaatnncaactattacttnnaccaatatnagnncttctnagtaagggcaacagtatcctgactttcaaatttcttgttgttagtgaaccagtgaatcagctgcataactagtggctcatacagttgccttgtcacctgaagaaacaataccattaaagttaaattccctttcatgta

SEQ ID NO: 57683 - DNA, 402 bp, Homo sapiens
  misc_feature 24: n = A,T,C or G
gccccccctcgaaagtcttctagnattaattaattttttaatctcagtttttttaaacaaatcaaaacttaataacaatgacataggaattattctgataaatggttaggccagttaccaaaaggcaaaagaaaagacatgcagtgattgctgttctccatggggagtccatttagttaacctgcaaatcaaaaccaaggaaaagggtatttgagttagttaaacataggaggaatgtttcctgggtcataagtgaaaattttcagattcatagaacaatttcaagccaagagcacagaatgttatgttggaagaaaacatttcctttagacctttaagataaaacatttttagcatcagaccacaacagcagttagaacctaagggaaaaaaaaaaaaaaa

SEQ ID NO: 57684 - DNA, 587 bp, Homo sapiens
cgggccccccctcggaagtcttctagaattaattaacgcgggtcatattcataccaaaacctgtagatgaaagtaactttatctgtagtcacctaaaactagaatcagcccacatgatcttcaataagtacattgataaacaaggtgttctataagaatgccatggaatcctacttggaaatacggaacaaactattgatacatgcaacaccttggatgaatctccagggaattatgctttgtgaagaaaggccagtcccaaaaggttacatactgtatttttcaataatataacattcttttaaatgaaaacatttagaaatgaagaaaagattgtggttgccagggagttgggggaaggaagtgggtgtatttataagagggcaacaacaaaaggggtctttgtggtgtgggaactgtttggtgtatgtactcttgcagtggatacacaaaccaacacaggtgagaaatttgtgtgcagcctaatacacacacacacacacacacacatgcacacacaaatgagtatcagtgaaactggggaaatctgaataagattgatggatgacatgaatgggaatatcctg

SEQ ID NO: 57685 - DNA, 439 bp, Homo sapiens
ccgggtccccccctcggggtacttctaggattaattaacgcggggagagggtacacaatgggtgtctaataaatacttacgaggtggaaagacataaaaaaaaaagatttattgaaaaattatctaacaaaaaaaaaatttaactaatataaaacatagataaaaaaagagaactgggtaacctaacagttgcaaaacatgtctacaccattctttattatgaaaagcatcattgataattggagcatcacaatattgtatttaaaattcatgtgatgccaaatccaatctgtatctggaacctaatgccattctatgggatttctgaatttcattctcctatttattgcattgttatgagaaacttgtggtaatgagtctgtaccacttgatttgacatgtactaaatctggataaaagccatgcacagtttatttac

SEQ ID NO: 57686 - DNA, 241 bp, Homo sapiens
aattaacgcggggaaaaaaaaaaaaaaaaaaaaaaaaaaaaaaaaaaaaaaaaaaaaaaaaaaaaaaaaaaaaaaaaaaaaaaaaaaaaaaaaaaaaaaaaaaaaaaaaaaaaaaaaaggaaaaagaaaaaaaaaaaaaaaggggggccccccccgggggggaccccaatttccccttttgggggttgttttacccccccttatttgccctttttttaaaaacttgttatttggaaaaccc

SEQ ID NO: 57687 - DNA, 600 bp, Homo sapiens
cggggccccccctcggggtacttctagaattaattaacgcgggcctgcgctatgggctgtatgtcagtggcaggtggtacgaaacagaagaggacactggccaccagaagaggggaagcaagagtgcgctagcacagtcttcagggagtagagagccactgatttaaaatgcaagtagccaaaaagacagcacccttctcagtcacttttgtagaagagtgaaagtctaccttaagcagttacctggcttcaagttgcaaactaccttctgtcatgaagatgtgaaaagcttattttgtcattgaatataaccagttagcatacatggatggcctccccaatgaccaggtgaatttaggatgaactatggcatggtgctgtaaattcttctacttgtgaactaattatggtaactgtctttctgtcttttcagtctcttaagtagactgactgtaatacatgtgatattcagatttaagtgtgtaatgaaacaattttctgtctgttacattattgtggtttctctggggctgaagagaatttttaaaaaattatattttccaaacagtgtctagaattaccagacataatataaacaca

SEQ ID NO: 57688 - DNA, 603 bp, Homo sapiens
  misc_feature 31, 592: n = A,T,C or G
taccgggcccccccctcggggtacttctagnattaattaacgcggggcggaggttgcagtgagccaagaactcgccactgcactccagcctgggcaacagagtgatactccatctcaaaaaaaaagaagaagaagaaaacaagaatcgttcataatctcactccctgaaagagaactcctgttgacattttggtgtgtctccttccagcagtgtttctatgcacagatttcattactttaagtcaagctggcatcaattcctactgttttgtgactgactggccaatcaccaggcatggatctccctcgtcattttaggacggagtcactttctttgtgccatcctgtacagatggacatttcagttgaaaacccatactgggaggaacgggctgacattggtagcgttgccagtgtgccaagtactatagttcttggggagaaaggaagcggaatcgctggcccaggagttttgcacacacgtgtttcaggcttttggaccatgactccaggctggcccacagaaggccctcgtcagaagagcagtcacaggccggatgcgggtggctcacacctagaatcccagccactntgggaggccga

SEQ ID NO: 57689 - DNA, 594 bp, Homo sapiens
cggggccccccctcggggtacttctagaattaattaacgcggggagtatatgtatacttatgtatatgtgtatacacacattatacatgcatgggttgttttggggttttttttgtcatctctgccaagatcagccaagaggaagaacggtaattcgtttaaaagttaggaactgggcatacctttaaaatttcaacagcatatttcctttatattgtattacagtaactgctctataaaactgttggctgaagcctaggtaagaataaagtctatttcgagaacagcatttatcactgcccaaaaacagtaaggaaaatgttgcagattacaaaagatatttagcttggactacagctgataactttgaaaaatgtttctcaaatatttaaagaggtagtaagtttttcttcaactgttaaattattggacttttttgcaaaaagaatgttatttaaattttctaaaatgagaactttgagtttacgttaaacatctctaaaatatttaatagttttaaaaatatactgcagtgagatgcatttgtaaaatacaattatccagagttagacaaaagtaaacatgaaacttaaa

SEQ ID NO: 57690 - DNA, 601 bp, Homo sapiens
  misc_feature 554, 578: n = A,T,C or G
gggccccccctcggaagtcttctagaattaattaacgcgggaccatgcccagataatttttgtatttttagtagagacggggtttcaccatgttggccagactggtctcaaactcctggcctcaagtgatccgctcgtctcagcctcccaaagtgccaggactacaggtatgagccaccgtactcagccttccttcattttttatttaaataaatcctgaacctacaccagcattggaaaaccatcaatcagttcaattttcttttttgttctattcagacattttaaaaactttaactctaatttacttaatgatattacaggtctaacaatgatctcaaacttaagaaaaattaggaattctttttagtcacatactgtataaaaattaaaaactgattcaaagagcaggcatatcataactaacaggaaagtccaaaaatttgatcacaggcataacttccaagttttacatgtccagctaagtcatttctctaattggaacactggacaaagaaatattcaaaagtatcttcttgagcctggcacagtgngcttacacctgtatcccagcactntgggaggccaaggcacgtggatc

SEQ ID NO: 57691 - DNA, 294 bp, Homo sapiens
  misc_feature 36: n = A,T,C or G
tgggtaccgggcccccccctcggaaatacttctagnattaattaacgcgggccatcctgtccacaaaagagagaagaacaggttccgtcagtccgggaaaggctcagacaccctcccatcctctctgtcccatcttcccctgccagaacacaactgggggccaggcatgatggctcacatctgtaatcccagcacttcaggaggctgaggcaggcagatcactgaggtcaggagttcaagaacagcctggccaacatggcaaaaccccatttctactaaaaaaaaaaaaaaaaa

SEQ ID NO: 57692 - DNA, 484 bp, Homo sapiens
cgggcccccccctcggggtacttctagaattaattaacgcgggccaagagctttgaaaggacccatgcagttccaatgtttctacatttcccacaaattattaaaatgttaactttaagtaatctgtagaaaggatgagtactgtaatccctagagtgaccattaaaaaataagggctgggcgcggtggcttatgcctgtaatcccagcactttgggaggccgaggcgggtggatcacgaggtcaggagatcgagaccatcctggctaacacggtgaaaccccatctctactaaaaatacaaaaaattagccgggcgtggtggcggtgcctgtagtcccagctattcgggaggctgaggcaggagaatggcgtgaacctgggaggcggaacttgcagtgagctgagatcgcgccattgcactccagcctgggagacacagcgagactccatctcaaaaaaaaaaaaaaaagcggccgccaccgc

SEQ ID NO: 57693 - DNA, 462 bp, Homo sapiens
  misc_feature 20, 33, 434: n = A,T,C or G
gtacccgggccccccctcgngaatacttctagnattaattaacgcgggtcctcagcaacaatttatgtcttatttggcacctgtaaaaccctcttcactgattatgcctgtttaaaggtttggtatttactccaagtcacctgcctttagccatggagtattcaagtttctttcagaatgagaatttggagggtgctcatagaaatataaaacaaggctgggcatggcggcttacaccttgtaatcccagcactttaggaggctgaggcaggtggatcacgaggtcgggagttcgagaccagcctggccaacacagtgaaacctcatctctactaaaaatacaaaaattagccaggcatggtggtgcatgcctgtgattccagctgctcggaaggctgaggcaggagaatcgcttgaacgcgggaggtggagtntgcagtgagccaggatcacaccactgca

SEQ ID NO: 57694 - DNA, 570 bp, Homo sapiens
cgggccccccctcggaagtcttctagaattaattaacgcgggcaggatatccttcttttttgatagctgcacattatgccagaaaaaaacatgatttaacatatttaagacactgaagcaaagaaaataaaaactatataaaggccatagataaactgttatcgacatgcaggaactgaggcagtatcattcccattgaatcttcctttggaatttactagagaaggagcttcagacagctaaaagacttgagagacattgatacagcaactggggtcaacactgttattcacagaactaagatttaaggagaaaggcacgacagtttataatgactttataatatgacgatatatatattgttcatttttttaaggataagggaagaataaagagaacatataaaaacaaatttaattgctttcagtaaccataatcgcgatcttagttttgttattcagaggctgtcatattggtaacgtagaataaagaaagtcagactgggcatgatggctcatgcctgtaatccagcactttgggaggacagggtgggaggatcatgaggtcaag

SEQ ID NO: 57695 - DNA, 175 bp, Homo sapiens
ccgggccccccctcggaagtcttctagaattaattaacgcgggcggcacatcgtatagcataacatcgaggaactccctgccctgttctggacctgtctgacgcaccgatgcatgctagaccctctgtgacgtacgcacctgaattgcttaaataatctcgaccctttcatgtga

SEQ ID NO: 57696 - DNA, 591 bp, Homo sapiens
cgggccccccctcgaaagtcttctagaattaattaacgcggggaccaaatttcaagatgggtttggaggggcaaacatccaatctgtagttttatactaccttcaattttcttaccctgaaaaaattttaaatgtaactctaattgtaatatacttgacaatttttctcctgtttcttgtctcttatcactacatcatatacagtagtcttaacttatttgcagtttcattttccacagtttcagttaccttggtcaaccatggtccgaaaatagatgagtaagatattttgatgagtaagatattggataagtaacatattttgagagagagaaagagatcacattcacaaagttttattagtctattgttataatttttctatgttattagttattgttgctaatctcttactattcctaatttataaattaaactttatcataggtatatatgtttaggaaaaatatctggtatgtatagggttcgatactatctgcagtttcaggtatctactgggaggtcttgaaccatatcccctatggataaggggggactagtgtacattttttatattattggatagacttc

SEQ ID NO: 57697 - DNA, 599 bp, Homo sapiens
cgggccccccctcggggtacttctagaattaattaacgcgggggggaggattcgaaatcagagagagctcagattggggtcctacaggatggcacagttagttccactggtcactaactagtccccactcctccagggagggtgagggatcagctagtctcaaaattaccctccacccctgcaccaggaagactcactctctgtaaagcttcccagtcaatgcccttgtgtcacgagtggttactgtctggggccagtggcacgggcagtaaaaagaatttgccaagacagtcataggtacagaaatgcagatttattagcaaaagcatggaaatatgttgcaagaaagcaataggccagttagcaagagaggagctgactggaggagacaaaggcttcctggggattttataggatggagcttgttctgtgtgctggggagggctaagtgcagtattgataatgtcaaggtggctgtgaactaacttgcatttttctatcaaccgagggtctggtgatatctgggtgcaggaagatcgtgagtcatttgcgcagatgggctatgtgtcctagactatgaagaaacgcagatttatagc

SEQ ID NO: 57698 - DNA, 476 bp, Homo sapiens
cgggccccccctcggaagtacttctagaattaattaacgcgggacattatcaagctggaggagctttaagaagacattgcagtagaaaagccagcccttattgacataaatgagatagtccaataggctgtatactccaagtagctgttttttgtggtgataatttaacaacaacaaaaagtattcctgctttgcagacctggagcagctgtcaaattatccctgaggttgcctgtgtacctcacaacaaagtataaaaataaggaccttagattaaaatatataaaaatatttttattaaggaaaaaagttaaaattcacaagatacatcatttgcacacatcaagttcagttggcctgctggagaaagtaagaaccaaggtacagttgttcaaaggagcaaattatagtgccaggtgcagtggctcacacctgtaatcccagcactttgggaggctgaggctggcaaattgctt

SEQ ID NO: 57699 - DNA, 606 bp, Homo sapiens
cccccctcgagagtcttctagaattaattaacgcgggctccccagccattccaagcacttgagtcctgaatctctgttctgttgtggctgcttgtaagccatgccaaactcaaccccaagagagattcccacagctaaaactctgcactgtgaggaagacaagaacagaaggaccctagagcccttacttaataacttaaacagccaccatcagagctccaaactcctgaagcctagaccactgaggcacccacagtcattgctgatgactaaaactgaagaagctacatagacaccacaccactgctcacatgaaaccagagccagcacagcttgctcaactggcaccttcaggcccatctacagttaaaagccttctcctatgaatgccactctaaaatttgaaagatgtaactgcatcatcagaaacacagacatcaacacagggacacaaaaaatatgaaaaagcaaggaaacgtaatatcaccaaaagaatacaataattattcagtaaatgatccctaataaaccaaaaattataaattgcctgaaaaagaattcaaattaataatcttaagaaagcaagataaaagaaaatacaaatag

SEQ ID NO: 57700 - DNA, 452 bp, Homo sapiens
ccgggccccccctcggaagtcttctagaattaattaacgcgggcttttacgcaattttttatatgtgaacagagattccttgaaacaaaacaaaaaactggccgggcacagtggctcacgcctgtaatcccagcactttgggaggtcaaggcaggcggatcacgaggtcaagagttcaagtccagcctgaccaataaggtgaaaccccgtctccactaaaaatacaaaaattagccaggtgtggtggcacacgcctataatcccagctactcagcaggctgaggcaggagaattgcttgaacgcaggaggcagagtttgcggtgagtcgagattgcgccattgcactccagcctgggcaacagagcaaaactccgtttcaaaaaaaaaaacctagtattactactgagtcagagaaggaaatgctattggctgtaacacaactatatacctt

SEQ ID NO: 57701 - DNA, 312 bp, Homo sapiens
  misc_feature 34, 54: n = A,T,C or G
tgggtaccgggccccccctcggagtacttctagnattaattaacgcgggggggngaaaaaaaaaaaaaaaaaaaaaaaaaaaaaaaaaaaaaaaaaaaaaaaaaaaaaaaaaaaaaaaaaaaaaaaaacaaacagagggggaacatccaagcccccctgtggggggcccgttttgcgcccgctctttgtccgtccgggcccccccccggggggggcccccccttcccctttcttggctttttgttccccccccccttcccccttttttcccctggttgtgggggggggagccccccccgttccccccttttt

SEQ ID NO: 57702 - DNA, 229 bp, Homo sapiens
  misc_feature 24: n = A,T,C or G
gccccccctcgaaatacttctagnattaattaacgcgggtttgaaaaaaaaaaaaaaaaaaaaaataaaaaaaaaaaaaataaaaaaaaaaaaaaaaaaaaaaaaaaaaaaaaaaaaaaaaaaaaaaaaaagaaaaaaaaaaaaaaagggggccgcacccgggggggacctccaattccccttatagggagatttttaacccccccacgttgcccctgttttaaaaaaa

SEQ ID NO: 57703 - DNA, 143 bp, Homo sapiens
ggtaccggggccccccctcgtgggtacttctagaattaattaacgcggggggtctcctggtatagctttgggatgggaactggtcagcagaaagaccaagccatgattagaagcttggaacattcagtcccatgccttattct

SEQ ID NO: 57704 - DNA, 355 bp, Homo sapiens
cccccctcgggagtcttctagaattaattaaaataattattttctatttactgtaatagtcaacaggtaagaaatgcagtcttgcatggatgtcccactaaaaaatatatgccatcttttagtccgttgatacttagcatattgccctcatcttcatggacaaaaattggcaatttttctgtaaaatctctctttcatattactgatgacaaaattctgcactttatctgaggaagaaaatgacaagactgacatgtgggactcacttctcactgtataataccatccttggctcctgccccaggataattttgatatttttaattatcaaaccaaaaccaaaaaaaaaaaaaaa

SEQ ID NO: 57705 - DNA, 426 bp, Homo sapiens
  misc_feature 17: n = A,T,C or G
ccgggccccccctcggnagtcttctagaattaattaacgcggggggatgcgactgaacatgtgtagattaagggcgtgtgggtgggctatgagcgcaccttcgatccttcagcctgggcggacactatgtagaccctgcctctgaaagtgaactgctttagttactatatcctgttagagtgctgtggaatgagtcgcctgattgcgtaatataaagagattttgtactcctaatcagctcatggctgttataattcgaaacgtcacctgttgcgcaatcgtaaggtaaacatttagcacttttcctttatatttacccaaacgtgaaaaccagttcttgcttacttactcaaaaaaatgaataagaatactttatttgtactaggtgtggaggctcattcacggaatttctactcccccgcgacc

SEQ ID NO: 57706 - DNA, 602 bp, Homo sapiens
  misc_feature 28: n = A,T,C or G
cgggcccccccctcggggtacttctagnattaattaacgcgggggggagggaataactcacctagaagtttgacagaccatagtatactttgaatcaagagaacacatattttccaagtgttcagcgtcaccaattatcagggaagtgcacatcaaatccacagtgagatgccatcttgccccgcatagaatggctgttattaaaaatacagaaaataacagatgcttgcagggatgcagagagaaggtaactcttacacactaataatgggaatgtaaattagtgcagccactgttgaaagcaatgtggagatttctcggggaactaaaatagaactaccatttgatccagcaatctcactactaggtgtttatccacaggaaaataaatctctatgtcaaagggatcctgcacttggatgtttatcattagcactatttacaatagcaaaaatatggaatcaacccaagtgtccacctacagacaaatggatttttaaaatgtggtatataggccaggcacggtggctcatgcctttactcccagcactttgggaggccgaggaaggaggatcacctgaggtcaggggttgaccagcctg

SEQ ID NO: 57707 - DNA, 615 bp, Homo sapiens
  misc_feature 41: n = A,T,C or G
aagactggggtaccgggcccccccctcggaatacttctagnattaattaacgcggggaggccgaggcgggtggatcacctcatcaggagttcgagaccagcctgaccacatggtgaaaccacgtctctactaaaaatacaaaaattagctgggcgtggtggcaggcgcctgtaatcccagctactcaggaggctgaggcaggagaattgcttgaacctgggaggcggaggttgcagtgatcggagatcacaccattgcactccagcctgggcaacagagagagactctgcctcaaaaaaaaaaaaaaaagtgcttagcatattcatattcatagagataggaagtagaatgatgattgctagggattggggataggagtaaatatggaaaaatcaactaaacacagaagtaggaatgggaagaaattagagacaaaaaaagttataaaacacacagaaaacaacaaaaggcaatagtacgtccttctctattagtaattgctttaaatataagtagattaaagtccctagtctttaatttacacccacttctaaaaagagatagattggcagaatttacaaaaaataaagaggatccaaatatatcctgattaca

SEQ ID NO: 57708 - DNA, 539 bp, Homo sapiens
cgggccccccctcggaagtcttctagaattaattaacgcgggtctattgagaggataatgcaaattttagtttttagtctgttaatattctgaaaggaaaataaatcttaggacacccaacacactacaccaaagggaaaagtcaagctgggaactgggtcaggcaaagctgtctcccattttgttcctaaataagatagctacaaagattttaaaagctacatactggcagggcgcggtggctcacgcctgtaatcccagcactttcagaggtcaggagtttgagaccagcctggccaacatggtgaaaccccatctctactaaaaatacaaacattggccgggcatggtggtgggcgcctgtaatccctgctacaaaggaggctgaggcaggagaatatcttgaacccgggaggtggatgttgcagtgagcagagattgtgccactgcattccagcctgggcaacagagcaagactctgtctcaaaaaaaaaaaaaaaaaaaaaaaaggccgggtgcgtggctcacgcctgtaatcc

SEQ ID NO: 57709 - DNA, 553 bp, Homo sapiens
  misc_feature 25, 38: n = A,T,C or G
ctggggtaccgggcccccccctcgnaaatacttctagnattaattaacgcgggaggcggaggttgcagtgagccaagatcgtgccattgcactccagcctgggtgacagagcgagactccgtgccaaaaaataaataaataaaataaagttttattggcacatagccatgcccacttatttacatattttctatggctgctatagtgctacaatgacagagttgagtagtcgctatagaaagcagctggctggccgggcgcggtggctcacgcctgtaatcccagcactttgggaggccgaggtgggcggatcacgaggtcaggagatcgagaccatcctggccaacacggtgaaaacccgtctctacttaaaatacaaaaagttagccgggcgcggtggcgggtgcccgtagtcccagctacttgggaagctgaggcaggagaatggcgtgaacccgggaggcggcgcttgcagtgagccaagattgcgccactacactccagcctgggcgacagagcgagactctgtctcaaaaaaaaaaaaaaaaaaaaa

SEQ ID NO: 57710 - DNA, 470 bp, Homo sapiens
ccgggtccccccctcgggagtcttctagaattaattaacgcggggtggtggcatgcctgtggtcccagctaatggggagacttaggcaggaggatcacttgagctcaggaggtgcaagttgccgtgaagtaagatcgtacaaccacactccagcctgggtgacagaggagaccctgtctcaaaaaaataaataaataacaaaaaaacccattagttttaggcaaataaataaccagttatttttaaaagtggttacttaaaatcaaagaagcaagcagacctaatatatgcttctttctttttagatttcatgtgttctttgtatacaagcgacgtcccagattataattctctgctgagatttgagttggatttgaggatttggagaatccctgcagctttgtaacttcagaggtgtaatgagctgaaaacatcatcgttttgaagagtactgcgttttgccagtcacc

SEQ ID NO: 57711 - DNA, 436 bp, Homo sapiens
cgggccccccctcggaagtcttctagaattaattaacgcggggcggtcagttgtgttgtgtcatagttaagaactgtggcaaagaatctcaggtggaggatgttattgaagagtacttcaaatgcagaaatgaacaaacaagctgggggtggtggctcatgcctgtaatcccagcactttgggaggccgaggcgggtggatcacgaagtcaggagatcgagaccatcctggctaacacggtgaaaccccgtctctactaaaaaatacaaaaaattagtcgggcgtggtgggggcgcctgtagtcccagctactcggtaggctgaggcaggagaatggcgtgaacccgggaggcggagccggcagtgagccgagatcacgccactgcactctagcctgggcgacagagtgagactgcatctcaaaaaaaaaaaaaaa

SEQ ID NO: 57712 - DNA, 616 bp, Homo sapiens
  misc_feature 50: n = A,T,C or G
ccgggccccccctcggaagtcttctagaattaattaattcaatttgcttnaccattgaacaaataacaaaattgaaattcagaaaaatgaaatgacttgctcagggtcacttaactaatcttgacagatctgaaattaactcaaccaagtccggtgtttgctttacaattacagaagaacaagactttctttattgtttcacacacatgaaaatgaaatggactgtcttgtctagcttacaggatggaaattaacaactttaagggttaccaaaagagcttcattacagttaccaggttttcttataaggcagttttaagaagcagttgtctcagttgttatgagttagcacccctttatctatgatttccaatactcttcaagaaacaaggtatatttattaaaatgatctaagccctgttctctgctttttattttcttttgttttccattttttatgaccataaacaaataagaaaaatgcttctttatattagtagcacttattacatatgtagaacatatccacatcaagctacatgattattgtagggcattctaatgattacataaaataaataatcataattttctcaatttttttttaaataaagtc

SEQ ID NO: 57713 - DNA, 226 bp, Homo sapiens
cggggccccccctcggggtacttctagaattaattaacgcgggttctggaatttttttaaaaaaaagatgtctattggatataacactattgtattctggaaacaaaaaaccctttgtccatttggcagattaaaaaaaaataaagaaaagctatgtattcattcacagcagaactaaagaaagagtcctaaatcttacaagttaaagcctaaaaaaaaaaaaaaa

SEQ ID NO: 57714 - DNA, 336 bp, Homo sapiens
ccctcgagagtcttctagaattaattaacgcgggtccaccgacatcagaactggtgaggtgacagggatttagagcgacttgtcaaagggatgggaaatgcatttgctcaaatgataatgacattcacaatagtcaagattcgttgagctaggatgcatgctaagaactttacaagcatttctattaaaatctcaacactgctcaatgaaatatgtattatcgtctccatttttagataagagaattaatgtttagaaaggcaagttgatcaggcatatctgtgcagcaaatggtaagactcgacttgaactaaccttaggcaaaaaaaaaaaaaa

SEQ ID NO: 57715 - DNA, 617 bp, Homo sapiens
  misc_feature 37, 553: n = A,T,C or G
ctgggttaccggggccccccctcggggatcttctagnattaattaacgcggggaagtcagactgcctgggttcaagtcctggctctgtcatttactagctgtgtttccttgggtaaactactttgttccctcagtttccctcgtgtgtacaattgggttatagtttgctatagtttgtttgaggcttccaaagctcatgttgaaatttgaccttcagtgttggaggtgggggttaatgggagatgtttgggtcatgggggtagatctctcatgaatagattaatgccctgcctgggaggggaatgagtgagttctcattctattagctcccatgagaactggttgttaaaaggagcctggcacatctccactctcttgcttcctttcttcccttgtgatcctctgtacttgctggctcccctttgtcttctgctatgagtgggagcagcctgaggccctaaccagaagcagattctagtgccaagcttcttgtacagcctgcagaatcatgagccaaataaacctcttttcttcataaattgcccagcatcangtatgcctttataacaatgtaaacagactaagatgaagaccatttgagataacgtacctaaagt

SEQ ID NO: 57716 - DNA, 602 bp, Homo sapiens
  misc_feature 591: n = A,T,C or G
ccgggccccccctcgaaagtcttctagaattaattaacgcggggaggatgaagagaaccgagagcaccgtgtccgcaggatccatgtccggcgccatatcacccacgacgagcgtcctcatggccaacaaattgtcttcaaggactgacctctgaccctccccctgccttcctcttgccttgggacccagtccctctctctttccctccccttcccagacttttgccccggctctgctggccaagtcgtgggtcctcctctgtcccttcattgcatggcacagctcactttggcccttctccacccatcccaaccccattgctaacaacatggtacattccggccccaccactcagagccttccgaagccaacacttgtccccaccctggccctgcgtccttccctctccagctggttaagagggatttagaattccttttctctttttttagtgcatcgtccatgccaaagtgtgtggcccttcctgacatcaccacagtctgagcagcctcccgcgtcctgcagggtagtccgccccctcctccccaccatcctccctacctacttaactttgtactagactggcctgngcctgcccagc

SEQ ID NO: 57717 - DNA, 600 bp, Homo sapiens
cccccctcgaaagtcttctagaattaattaacgcgggggaggcttttggcactggtgataaacatccctccaagagaaccgtctggggttctcttctatttgtggttggtggtttttattcttttaaaaacagctttcattgttgtttactttttgtgtaatacaaacaaaatgtaggaatcatagtttattgatttcaaatggctgacaaagaatgagtaaaaccattctttatggttttacgattcagactcatttggaaaagcgaatgtaatttttacctcctctttccaccccaagttttgtttctgcttttggagagggttgtatttcccctacttttaatccctagggaatattattgcacagatttagtcttaaaacctaaaacacgaatacaaagtggtaaccctgttcaaaagaaaattaaaatgtgaatcattcttgagctgggcgtggttgctcatggaggcctgtaatcccggcactttgggaggctgaagcagggaggattgcttgagtccaggagttcaaaaccagcctgagcaacatagagagaccctgtctctacaaaaaaaatttttaaatttgctcggtatg

SEQ ID NO: 57718 - DNA, 281 bp, Homo sapiens
  misc_feature 24: n = A,T,C or G
gccccccctcggggtacttctagnaattaattaacgcggggtcctgattttcagtcctagtctgtcactcctgaacgtatggcattgggcaagatacttcctttctatgcctaatttttcttctgtaaaatggttgtaattatattacacactttacaggactattatgaggattaaagtaggtaatgcttataaagcctctagcacattatctggtgcagaataagcatttaataaatgttgatttttgtttattaattatcatttgtattagattggtg

SEQ ID NO: 57719 - DNA, 582 bp, Homo sapiens
ttctagaattaattaacgcggggtttgttccagaaacagcattaatcacagtgcccggcacatagaagggtccagaacttggagcaagtaactgaactcaggcagttcccacgcaggccacagagttggacaaaaacagcttgaccctggggcttgcactcaaaatgagccttacccctttaagagagggcaggtcttttccctctccggctcaccccacccctcctacacagtaactgaaacctgatctaatccctttgcacgcgggtaatttattggtctgttgagcttttcttggtggcaaattgcattgtctttattcctgggttcaggctctgcagcggctcactgcattcctaggactcctttctaagggtcgatccttcacacctcctcgtgcactgcaaagtaagtcttattgggcttctttgttatgcaaacagggcggtaataatcaggctattattctgaaagattgggcttgattaacagttcaaaggaggtctctgaaagcagctagtgcctcattggtgcataaatattttcatcctgccagcgttggtgcagctggtgctccaagcg

SEQ ID NO: 57720 - DNA, 179 bp, Homo sapiens
  misc_feature 30: n = A,T,C or G
ccgggcccccccctcggaaatacttctagnattaattaactcgggggcctgtgtcctggtggcttgaagccacatggagggagtttcattaaatgctaactactttaaaaaaaaaaaaaaaaaaaaaaaaaaaaaaaaaaaaaaaaaaaaaaaaaaaaaaaggaaaaaaaaaaaaaaaa

SEQ ID NO: 57721 - DNA, 565 bp, Homo sapiens
  misc_feature 16, 24: n = A,T,C or G
attaattaacgcgggnggaccagnaaaaagaacaattatagggaattcttttaatttgccctgaaataattttattttccttaacatttcaacaggagtcattaagagattacgtcctaattttaacgttgcatgtgaatatcaaatatacactcactctttgtaggtgcgctctagattacagggcataataaaacaagctatgtagcccattaataaggtatttaggagtgacagcaactcctgctacataaaaggatgacaagggatgaaaacattatatatatatacatacacacacacatatatatatatttgagttttattgggagcaaaggttgaaacaaagtagcactgatgagaaattagctagcaaaagaccatcacagaaaacggaaatcagatggctcaaagtataattaataatacccaaaagctagactagaggtctagaagagatcattcgttaataattactaacgaattttatttataccagagttgtaatgacaagcagtgtgaaaattaaacatatacatttgttatcttgtgcatgtttttaaaa

SEQ ID NO: 57722 - DNA, 597 bp, Homo sapiens
  misc_feature 36: n = A,T,C or G
tgggttaccgggcccccccctcggaagtcttctagnattaattaacgcgggaacaaacaaaaaaggtagttaagcaaaaatatgggaaatacaataggcttcctttgtcttgagttgtctaaattatgtttgacacctgaagcaaggatatagctgtctgacatgattctaaatgtgtgtacaggaaacactgtaagatgattatattacaaatggggtaaagagccataaaggaggtaagacttctacacttcactcaaactggttaaatgatgacaacagtagactgtaataaattatgtatatacaattaatagctagagcaaccaccaaaaaagatacacaaagagatacactcaaaaacgaaacacatgaatcaaaatagaattctaacatcgcttgctgggtatggtggctcatgcctgtaatccagcattttgggaggttaaggcaggagtattgcttccgtccaggagtttgagaccagcctgggcaacacagcatgttggcaacatagcaagaccctgtctctacaaaatatttttaaaaattagccagatgagctgggcacgttggctcacgcctgtaatcccagca

SEQ ID NO: 57723 - DNA, 608 bp, Homo sapiens
cccccctcgagagtcttctagaattaattaacgcgggtccccgctctctcttgcttcctcttttcccctgtaatgtctgtacactggctccatttcccctcccaccatgagtggaagcagcctgaggccttgccagatgcacatgctggtgccacgcatcctgtacaatctgcagaatcgtgagccaaataaacctcttttataaattatccagcctcaatttttttttgttttgtttttttgagatggagtcttgctctgttgcccaggctggagtgcagtggcacaatcacggctcactacaacctccacctcccaggttcaagggattctcctgcctcagcttcctgagtagctgggattacaggcatgcaacaccacgcccagctaatttttgtatttttagtagagacagggtttcaccatgttggtcaggttggtctcaaactcctgacctcatgatccaactgccttggcctcccaaagtgctgggattacaggagggagccaccacgccctgccaaatattttttaaaagcagtccaaaacagactaagacaggactaatatctaatgtacaaaaagaactcccacaactcaacaacaaa

SEQ ID NO: 57724 - DNA, 601 bp, Homo sapiens
  misc_feature 28, 543: n = A,T,C or G
cgggcccccccctcggggtacttctagnattaattaacgcgggatctgcaagaatgggggttagtttaccaggcaatcaaaagacagaggttagttaagggcattccaaagaatagtcaggtatgagagcaaggaaatgtataacagcatggtgcagttgagataatggaagcagttctgcagagttggaaaggaatgcaagtaggcaatggaagaaaaggcaaggaccattagctgtgcattaccttactcataccatatactcacattttaaatgatattatttttctgctatgtttccccatcctagatatctatatttattttctctttgcctaaaatcttttgctgcaggaacacgtgtcatttatcttctggcttctagaacattcttgcctgccctgatgcccaaatctgggaggcatgaaatggggttacagtccaattcactcgataattcacagactaccaacatctataggttcctcttcatcgttcattcttcattcatttcacatttcttgagcatttgctatatactgngctacgtgataaaagctaaagtcacaaggataaataagacagggtgctttcttaacct

SEQ ID NO: 57725 - DNA, 497 bp, Homo sapiens
  misc_feature 9: n = A,T,C or G
acttctagnattaattaacgcgggcctcctgcatctatcaattactgctcatgtttgccttttttgaagccattcgaacagttgtctacatttgattgtccaaaactcagtaattgtcacgtgtaggctatggtgtgtttacacctctacttgttgtatttcacgatgtacagagatacctttaggtcaaacttaaaatatgtaaggaggcagctttagactaaacttgatttaatgttatgcagcacccaggtgtatttttgtggaagggtcgtgtagataatcgaccattctactggggaaggaagttttttactttatttctaacaatacagtattacttaactcaccaaaactcattagtgaccaggcatagtggctcacacctgtaattccagttctttgggaggctcaggtgggcaaatggcttgagcttaggaattcaagatcagcttgggcaacatggtgaaaccctgtctgtacaaaaaaaaaaaaaa

SEQ ID NO: 57726 - DNA, 420 bp, Homo sapiens
  misc_feature 17: n = A,T,C or G
cgggtccccccctcggnagtacttctagaattaattaacgcgggtgaatgggcaagatccttgaaaaaaaatcagtgtgaaaagggttcagttatataattagggagaaagaatttaaattataataataatatctgagttttctattatgtcctaagaagtgtacaacatcattataatccacatcattaatcatcagggaactgcaaattaaaaccacaatgcgatacctcaatgcatccactagaatagctaatatggaacctaggaatcattgttaaatttattgaagaagttaacggggcataattgctgggaccaaaactagagggaatggctggatatattttggaaagatgtgggaaagctgacggcgtgggcattggtgacttttactttttttttaggtttagaggcttc

SEQ ID NO: 57727 - DNA, 627 bp, Homo sapiens
  misc_feature 35: n = A,T,C or G
gggtaccgggcccccccctcggaaatacttctagnaattaattaacgcgggaatgcacaggtttgctgggcagagagttgggaaaatccctgcctgatgacttatactctttcccaatttccattatatttgacttgtggcttctttcggcacttactatattatcttatgggtttctggttaatttgttttgtctcaagcagaatatagatcagtgctgtccaacaaaattttaatgtaattcacacatgtgagccctatatgtaattttaaattttctagagtcacattaagaaaaacttaaaaagagaaaattaatttaaataacgtattttatttaaccaacatatccaagatattataattttaacacattcttattcatgtgccccctgacaatgttttggtcaatgacagaccgcatatataacagtggtcccataagattacaatggagttgaaaatgtctgtggcctggtgatgctgaagccatcatgatgtggcggcacagcacactactcacatgtctgtggtgatgctggtataaacaaacctactgtctgcctgtctcaaaaaagtatagcacatacaattctgtttagtacataataatagataatgataata

SEQ ID NO: 57728 - DNA, 568 bp, Homo sapiens
  misc_feature 28: n = A,T,C or G
ccgggccccccctcggaagtcttctagnattaattaacgcgggggtgcttgggccaggccaggatactcggtgttaatcctgctctctctgcattgccccgactcggcttgcaagcaggacctgctggcctacctgcaacgcatcgccctctactgccaccagctgaacatctgcaacaaggtcaaggccgaggagcagaatctcggcggggagcttgttgtctctggggtaagcattagctgaacaaaaagagggccagtgggaacgtgctgacccttgtcagaaatgaaagtcacctcctatccgcataaacacctgccctgggaaagtgtgctgtgcagaaactccaagtcctgtcccagtctctggagaccaaggtctgcccatcatctgttccctgtagaactgtgacacctgcggggcactgcaagggctgaaaggctggcctcctcccctttgctggccactcactgggtaggaatttataaaaatcttccttgggaccggacgtggtggcaggtacctgtaagtcccagctacttgggaggctgagacacaataattact

SEQ ID NO: 57729 - DNA, 601 bp, Homo sapiens
cgggccccccctcgggagtcttctagaattaattaacgcggggacagaggtttggatctggagaaaggaaatgggatacaccatggaatgctctttgaacccattctctcctaaggggtttcttcctttgagccctttgcctaaaggccaagatcacatttcttcataaagtaaaagtccaaagattaggctgggacaagatgttggccacaatttccccctttccaaattaccccacagccattgccccacccccaccagactcttccttgtctctcctgaccttggtgacctcatggatcagatggaccgtgagggaatcaggaccaagctgtagagagtccagcaaggctcggtatggagagaggcctggccgtatgcttctctgtcgcctgccaagtgaagggttgggaagtaaggtaaaggccacctgcaatgtccctaagtcagtctatcacctgcagtgtccttaggcactccatctgccacagatatctcccacattaccctacaaccctacattccatccctctcccccagaaatatcatacttgcagaaagaactctcttcacaggtcttaaagttgcttctatccacagc

SEQ ID NO: 57730 - DNA, 586 bp, Homo sapiens
  misc_feature 24: n = A,T,C or G
gccccccctcggaagtcttctagnattaattaaaacacatgataaggagaaaatctgaaaagcagccaggaaaaaagaacattactgtacagaagaacaaagataattactgccaatttcttcttggaaacattgtaagccagaagacagtggagcaatatgtttgaaataccaaaaggaaaagaaaaccctttcaacttagaattttacaccccttaaaactttcgaaaatgaaggtgaaattgacttttttcagacattcaaaagcagaaagaatttatcaccagcagacctatttattcttcaggcagaagaaaaatgagaaaaatgacagaaatcaggttctacacaagggaatgaaaagcactggaaatggtaactacatggatcaatacaaaataatttttatttgtgtatctttaaaagataattgataatgcatataaaaataatatcatgcctgtaagccactcttcaccaaagcattaagaattgcattggtaacaaaagaaattcaagaccagacaccgtggcttacacctgtaatcccagcattttgggaggctaaggcaggaggatcacttga

SEQ ID NO: 57731 - DNA, 595 bp, Homo sapiens
  misc_feature 28: n = A,T,C or G
cgggcccccccctcggggtacttctagnattaattaacgcgggggatgaagttaaggcatagagtgtttattagttttttgtttgtttgtttatgtaaacagtgttaagttgttatcagcttaaaataatgggttataagatagtatttgcaaacctcttggtaacctcaaaccaaaaaaacatacaactaatacacaaaacataaaaggcaagacccaagaaaatcaccttcactgaagggaagacaggaaggaaagaagaccacaaaataaccagaaaacaaataacaaaatggcaggagtaagtccttacttaccaataaagaaactgaatgtaagtggactaacctctccaatcaaaagacattgagttgctgaatggatacaaaaaaaagacaagaccctgtgatctgttgcctatgagaaatacacttcacctataaatacaaacatagagtgaaagtaatgggatggaaaaaaaaatattccatgccaatggaaaccaaaagagcaggagtggccatacttttatcagacaaaatagatttatagtcaaaaactataagagagacaaaaaaagtcactatgttatgat

SEQ ID NO: 57732 - DNA, 585 bp, Homo sapiens
cccccctcggaagtcttctagaattaattaacgcggggggatcatgcaggactgggcagagggagaaattgagctaagatgtcatctcaatggagaccttagctgaccttaagataatacggaagcttggatgatctccagagttgtctgaagttgagagttgggggatgaactttttttttttaccatcgtctaaattagatactgaatgtacccattgtgccaggactggggtggcttatgacagatattgactgatgccaaatgactgagcattttaatctctcaagttgtgtagtgctttctttgatgcatgctattagtgaacagaaacatctttaccctttctgcttacttccacgtgtccatccacatgtccccacactggtctctgatatatcaatcattgtccatctaggctgagtcattctctactgcccaggagcctatgtatattctaattgcagctctcttcttttccacacacaatagataaccagctgtgctatgtagacgtttaaatatttttagagggtaaaagtatttgtctttaaccttttctgtacagcttctggatttcatgcc

SEQ ID NO: 57733 - DNA, 279 bp, Homo sapiens
ccgggccccccctcgagggtacttctagaattaattaacgcggggggggcgccacgacccatatctaacgtctgccctatcaacttacgatggaaatgaccgtgcctaccatggcaaccaccatgccactgcgaatcaagcttcgcctccggagcatggagcctgagaccaggttgcccccttctaagcatgcagcaggcgctcccattaccctctttcaatccgtggagcggctcccaattatgaaataaaaaaggatccatgctcgctgtggacctg

SEQ ID NO: 57734 - DNA, 604 bp, Homo sapiens
  misc_feature 27, 68: n = A,T,C or G
cgggccccccctcggggtacttctagnattaattaacgcggggacaccaaagcaagtatcaccatggngaaaattattttgtttgtttctttattgactatctcccctcacaaggtgtagacagaataatggggtcctatctgtgattgctaccactgcacccttaaagcctggaacagagcatggcacatagtaggcaatcaataaatatttgttgaatgatggattctataattagtgaagagaggtctaaagtgtaggttcttaaattctaaaaagaatgtactcttactcagttaggacaaatgactgatagcagatactttcagctttaatgggaggaggccatgaagagaacagaaaaggcttgacgttctgaagtgaaaacggtgttagtcgttggatgacagcaaatgggatagagtatctgtggcaggagaaggtagcctggaatagaagataagttgcacttttattaatttaagtttagaacttcctttccagaggattcactaattgaaaacaacaacacaaagcagggtttctcaaccttaggactggagacatttggggctggataattctttcttgtgcgggctgttct

SEQ ID NO: 57735 - DNA, 512 bp, Homo sapiens
cctcgaaatacttctagaattaattaacgcggggccgggaggtggaggctgcggtgagccgtgatcacaccactgcacttcagcctgggggacaaggtgagatcctatctcaaaaaaataaataaataatgaaaaatacaaatttttaaaaatacagtgtaacaactgtttacatagcatttacattgcattagatataagtaatctagagatgatttaaagcatgtgggaggatgtgtgtaggttacatgcaaatatgacaacattctacattacgaattgagcatccttggattttggaattcaacggaatcccggaattaatcccccatggagaccgagggactacagttttgagtatttttgttttattgtttaatctgtccctttgacacatttttgtgctcagagttaaagacctcaataccctgcttgatgggaggagaagagaaaagggtaacaaagtataggatagtacttttcattttctttaattcgaaaaaaaaaaaaaa

SEQ ID NO: 57736 - DNA, 521 bp, Homo sapiens
ccgggtccccccctcgtgggtacttctagaattaattaacgcggggaaggagcagacaaggattactatcacttttcattcaacatatcctgtagtttgaatttttaaaagcaatcccatttatttatagagatattaaaattgtaataaaaatattagcacgacaaatgtaataatgcatttttgtaaatacaccttgactaagtagggtttattctgtgaatgcaagaatgacttgacatgaggaaatctacagtgaatctacaattcactacgttaagacattaggaggggaaagaaaaagacattaggaaccatatacaatctcaagaccatatgccagtcatcaataccatctcaaatgtcaaaactcaacatctactcaatgtgttgagcatgacgacattcttagaaagctagaaatagaaaaaaactttccttcatctcattatgcatccaccaccacgattcatctccgaaactctttcaccttgtaaaactgaagatctatacccattaaa

SEQ ID NO: 57737 - DNA, 432 bp, Homo sapiens
ccgggccccccctcggaagtcttctagaattaattaacgcgggcccagcacctggacccatttagattaagtaaatttactgaggcttcagaggaagatcttcaggactcagatcttagttctagattaaaagaagttgggctgggcgcggtggctcacgcctctaatcccagcactttgggaggccgaggtgggtggatcacgaggtcaagagttcgaaaccagcctggccaacatggtaaaactccgtctctcctaagaatacaaaaattagctggtgtggtggcgtgcgcctgtaatcccaactactcaggaggctgaggcaggagaatcacttgaacccgggaggcggaggttgcagtgagctgagattgcaccactgcactccagcctgggtaacagagcaagactccgtctcaaaaaaaaaaaaaa

SEQ ID NO: 57738 - DNA, 314 bp, Homo sapiens
ccgggccccccctcggaagtcttctagaattaattaacgcggggagtaataatctactctaaagcaaaggtcttaagtaggtgactataaactattggaaattttatgcacaattacacatttttgtagaaagaagaaggtccataatatcagcagattctcaaacaggacagtgttccataaaagcttgagaaccgcttctctgcgacttctgacatctttttaaattaaccccagtgcagcttccttaacacaggaagaacatcttttctcgaactttaggtgccttgatatgcatctcaaaaaaaaaaaaa

SEQ ID NO: 57739 - DNA, 502 bp, Homo sapiens
ccgggccccccctcgaaagtcttctagaattaattaacgcggggcaggtgaggtcgcggcgtctgcggggcgggttctttctgaggctgtgacggacggactgtcccaggccttgccctggttctgctggttcctggcagtcctgggtgcccctcggcgggtggcatcactactccaatctctgcctccatctccatgtgcgttctcctgtgcatgcctgtgtctaaagctccacgtaagacaaggacaccaggcttggatagggcccaccaactcctccatgaccccatccgtaatgacatctgcaacagtctttttcccaaacaaggtcccaatctgaggtactaggggttaggacttcaacagatgaattttggggcgggcaacacagttcaatgtgtggcatatgtgtagagttacacagtgcacacggtccagcctgggcaacagagcaagaccctgtctgaaaaaaaccgagaaacaaacaaaaaaaaaaaaaaaa

SEQ ID NO: 57740 - DNA, 464 bp, Homo sapiens
  misc_feature 41: n = A,T,C or G
aagactggggtaccgggcccccccctcggggtacttctagnattaattaacgcgggctagcatcacaacaaaaacaggtggcaagctttaaagataaactcaagacagcgagtgaaacttcagcaaatacgtgttaatatgaccatgagtaaaaggcccttcctggccaggcgcggtggctcacgcgtgtaatatcagcactttcggaggtcaaggcaggaggatcacccgagatcaggagttcgagaccagcctggccaacatggtgaaaccctgtctccactaaaaatacaaaaattagttgggcgtggtggtgggcgcctgtaatcccacctacttgggaggctgaggcaggagaatcacctgaacccaggaggtggaggttgcggtgagcctagattgtgcctttgcactccagccagggtgttaagagtgaaactccacctcaaaaaaaaaaaaaaagc

SEQ ID NO: 57741 - DNA, 403 bp, Homo sapiens
cgggcccccccctcggaagtcttctagaattaattaacgcggggtgtaaaaacctggtggtgggccaaacttttcaagaacctagcagagagctggtttgagtgtcatgggttatcagaacttattaacgttagtgtcactaaagttggtatacaacccccagctgctaaatttggcttaaaaaaaaaaaaaaaaacggagagggttaatttgaaaggcaggacagagagtatctagcaaaagcacagcacttaaaagatgaagtcagactttttttgaatgaaaactaaatattgtttggcttatgaatttatgaggactggttttacatgttgtaggctccatgccttaactgacattgttttgacacatatttaaaatacacataaaaaaaaaaaaaaaa

SEQ ID NO: 57742 - DNA, 514 bp, Homo sapiens
cccccctcgaaagtcttctagaattaattaacgcggggggggtggggcagagagtgttttctagtctctttcccttcacataagaacaacaatttggtcatggagactccaccatcatgactgcatctaaacctaattacctcccaaagattctaccttctaatactgtcccattggaggttaaagtttcaacatatgaatttgggagtggggtggggcgggcacaaacatgcagtccataagtgtcaaagcaaaaattccaccaaagttaaacagacaaggaagactttattcaaggctattgcaacaggtaagagatgccagggctgagttttaactcaaattcattgaaacaaaaggtggaaatgtttttaagtactgctgtgagctaacagaaaactactggaggacattagggaagaggttgatagatgcagtgtgtggggcacattgagttattcctgagagtgcaagtgtttctctctgtaataagaccccaaaaaaaaaaaaaaaa

SEQ ID NO: 57743 - DNA, 617 bp, Homo sapiens
cgggccccccctcgggagtcttctagaattaattaacgcggggtgggggtgaggggtaaaagacaacaaatatggtgcggtgtatactgctcaggcaatgggtgcaccaggttctcacagatctccactaaagaatttactcgtaaccagataccacctgtaccccaataacttatcaaaacatagaattaagaaaaatagctgtattgaggaagctcaaagaaattcaagataacacagagaaggaattaagcaaccagataaatttaacaacaaattgaaataatcaaaaagaagcagaaattctggagatgaaaaatgcagttgatctactgaagaatgcatgagtctcttaatagcagaattaatcaagcagaagaaagaattggtgagcttgaagacaggctatttgaaaatacacagagaagattaaaaaagaataaaaaaaaatgaagcatgcctacaagatctagaaaatagcctcaaaagggtgaatctaagagttattggccttaaaaaagaagttaaaaaagagctggggtagaaagtttattcaaaggaataataacagagaacttcccaaacctagggaaagatatcaatattcaagtacaaga

SEQ ID NO: 57744 - DNA, 414 bp, Homo sapiens
ccgggcccccccttcggaatacttctagaattaattaacgcggggataaatgtggagagggtcctgaagtcaaggagaagattttaccaaaactagagcacttcaatggagaagtaggcggagtgtggtggctcatgcctgtaatcctagcactttgggaggtcgaggctggtggattacttgaggtcaggagttcaagaccagcctggccaacatggtaaaaccccatctctactaaaaatacaaaaattagctgggcgtggtggtgtgcacctgtaatcccagctacctgggaggttgaggcaggagaatcgcttgaactggggatgtggaagttgcagtgagccgagattgtgccactgcactccagcctgggcaacagagcgagactctgtctcaaaaaaaaaaaaaaaa

SEQ ID NO: 57745 - DNA, 599 bp, Homo sapiens
  misc_feature 22: n = A,T,C or G
cccccctcggaagtcttctagnattaattaacgcgggattctcttttcctttctaatccttccacaaagtacctgatttacagtatgccttgggtaactgaaaactgcaacattcaagactagacactcttactgaggcaacaaaggtcccccagcatttataaatgctttttatttttatcctatatccttacttttatcctatatcctcatttagagagtatctggtatgattacaaagtcatcatttcattactttggttttttcaacaaataaaagtcatatatccaaatgggtgctgtcatttggactgtttaaacattattttatgtcatttttttagagatggggtctccctgtgttgcccaggctggacttgggctcaagcaatcctcctgcccccggccttccaaaaacattttttaaaactacttccagaacaataaagcagcaactcattctgactcttctatatcatggtcaatttccttcctagataatccactttagtcaccacttggcaccacataacattgcttactcctaaaatccaattccccttaaaagaaggcttgctatcacggaggatacttgatct

SEQ ID NO: 57746 - DNA, 583 bp, Homo sapiens
cgggccccccctcgaaagtcttctagaattaattaacgcgggggaagggcttgaattgaagctttactttagaatttagccctggtttgaaattttccattacatgatcttggtttatcatcgatgggaagggtagaaaacttcaaggaaaataagtgaaattttaaaagtcagcattttcttagacctcttcagctgattgtttatttttctatgaattcctacacatggttattcccccctacttgagataatctaaatataaaccagctacttgatgtaactgagaatttgtgtggatatttatttaaacaaatgtgtaattttgagtacagaattcaacagttacctccaaaaaaaaaaacattgttaatataatttaacagaagttgtgaaactaaaattttctaagattaactggtagttcattgtaaatgaacataatgaacagaatttatgactccactgtggaaaatgctatcaaataactaaggaatatatatggaataagtgtacgtatgtaaaatattgttactagagttagatatgtgccaaagtccatttatcccaaatcctgtctgaa

SEQ ID NO: 57747 - DNA, 604 bp, Homo sapiens
  misc_feature 27: n = A,T,C or G
cgggccccccctcgaaagtcttctagnattaattaacgcggggacccagtctttcatgcacgtaaagttgcaagggtttatgaggatttggcagcctcagagatggggtagatgtcatcttaagctttaattgtttaaacgcattctggtgttacagctctcatttaaaggggttgtggttggccccttttatcacttcatatagcagctttaccttcagccataattggaaatccagattctgcagaaccctgcccttcccaggaagccccttagctgctttctggttgtgggtgtcatgatagaggcaactgcattttgcctctccaccgtcagggctctggtttctctgtaacagaaatcttaggtatcccatagtttgtttgcatatctgtacccctgtgcccttttgcttaagaccttgtacccacaggctgccaaatggtttagtttttacagtgttatcctgacattcttgcttcaaggagctggagattagcaaatcatccgcataccgtagcagtaccccattttccaattgtaagtctcttaagttctgagccagtgcttccccaaatacagttggggaaattttaaacccttc

SEQ ID NO: 57748 - DNA, 469 bp, Homo sapiens
  misc_feature 42: n = A,T,C or G
gggccccccctcgaaagtcttctagaattaattaacgcgggnaggagaaaaaaaaaattctttcagtcaggaagaacataactactgcctcctttcagttcccactgaagtccatgtagatttctactagagtacctataataactcactagcatgaaaggaaacaagctttgagggcaacctgcccaaaggagaagttagtaaatgacagatcaagacttgaacccagatccacctgaatcaaagccaatattttgttaaatcataatacagcagaatgctgagtaaatgcgtgctgagtatttgtactgctgttttatttttccaaaagtactcacataatgaccgacatcaacagtctattcaccaccactgggtctcttaatatgaagagttttccctagaaccctcggcatcagccttagaatttttttttttttttgagatggagtctcaaaaaaaaaaaaaa

SEQ ID NO: 57749 - DNA, 618 bp, Homo sapiens
ccgggccccccctcggaagtcttctagaattaattaaatgggctctctggagtcagacttctaggttcaaaatccagcttcatgacttattatttatttatttttaataaaaactatttttaataaacatcatatttacaacatgacgttttgatatacatatacatagtgaaatgattattccagttaaacaaattaatatatccatctcctcatacagttaccgctatttttgtgtatgtggtgagagcacttgaaatctcttctcttagaaaatttccagtattcggctgggcgcggtggctcacgcctgtaatcccagcactttgggaggctgaggcgggtggatcacctgaggtcaggagttcgagaccagcctggccaacgtggtgaaacccggtctctacaaaaaatacaaaaattgtccgggcatggttagtggcacacgcctgtaatcccagctactcgggaggctgaggcagaattgcttgagccagggagacggaggttgcagtgagccgagactgtgccactgtactccagcctggccaacagagaaagactcagtctccaaaaaaaaaaaaaaaagaaaatttccggtatcgaatacaatattat

SEQ ID NO: 57750 - DNA, 210 bp, Homo sapiens
cccccctcggagtacttctgtattaattaacgcggggagacaaaaaaaaaaaaaaaaaaaaaaaaaaaaaaaaaaaaaaaaaaaaaaaaaaaaaaaaaaaaaaaaaaaaaaaaaaaaaaaaaaaaaaaaaaaaaaaaaaaggggccgccccccgggggggggcccctcccgcccgccctttattgtgtccctcccccccccctgattgcc

SEQ ID NO: 57751 - DNA, 497 bp, Homo sapiens
  misc_feature 28, 474: n = A,T,C or G
ccgggcccccccgtcggggtacttctanaattaattaacgcgggtggacagggatgtaaaggagtagagtttttaacgcaacagaaaggaagttgttattagtttgaagtagattgttataactttaagatgttttatgtaattgtaatggtaatcacaagtaaaatatctatagaatacatacaatgggaaatgataagggaatcaaaatatgtcactacaaaaaaaatcaataaaacacaaaagcagcaacaagagaagaaatgagagacaaaaagctacaaggcatacagaaaaactattaacaaaataatagtaaatccttcccaatcagtaattactttaatgtaaatggattaaagtccaattaaaagacatagattggttgaatggatagaaaaccagaatccaactatatgctgtctacaatagatccactgtagatcttaagacacaaataggctgaaagtgcanaaaaaaaaaaaaaaaaaaaaaaa

SEQ ID NO: 57752 - DNA, 558 bp, Homo sapiens
  misc_feature 11: n = A,T,C or G
cccccctcggnagtcttctagaattaattaacgcggggaggggacactaacttattcataagaaatcttccccaatgttacaaacacttcccactagaccctacttctaacattgcagatcacatttcaatgtgagatttgaaggggacaaacatccaaactatatcacatgttcatctggcattgagttaaggtaataatttaaaagcttgaaattagcaagacctgtatgcaaaagtttaaatcagctttactcataattgtccacacgtggaaataaaccaagtgtcaatcaagtgctacacggaaacagtgctgtagtataacgatccaatgacaagctatttagtaataaaaaatgagtaactaggcccacgcggtggctcatacctgttttcccagcactttgggaggctgaggcgggcggatcacgaggtcaggagatggagaccatcctggctaacatggtgaaaccctgtctctactaaaaatacaaaaaattagccagaagtggtggcgggtgcctgtagtcccagttactcgggaggctgaggcagg

SEQ ID NO: 57753 - DNA, 498 bp, Homo sapiens
cgggccccccctcggaagtcttctagaattaattaacgcgagctgcccatggaccaatcagcatgtacttcctccccactgaggctgataaaagcccagggctcagccagagcagagcagatgatgggaagagcagctgcagagaggagctacgttttctgctgggagctgaacacttgttgggactacctgcctgaagagaggttctatcctctctgctaggagctgaacactcatctggacaccctggctgcagaaaggagctgccccctgcaggtctcccctgagctgttctattgcccaataacgctcctcttcgtcttgctcacccttcacttgtctgcatatctcattcttcctggtcacatgacaagaagtcgggacccactgaatggtgaggctaaaagagcagtaacacgaacaggcctgaaacatgtcccttgcttgccaggttgcgggagaagaaaaggagagaagagttgtggcccttttgggatc

SEQ ID NO: 57754 - DNA, 507 bp, Homo sapiens
  misc_feature 462: n = A,T,C or G
ccgggccccccctcggaagtcttctagaattaattaacgcgggcagctacatgggagactgaggaaggaggattgtgtaagcccaggaagttgagactgcagtgagctctgctcatgccactgcccttcagcccgagtgacagagtgagaccctgtctcaaaaacaacctccccacccccgcccaaaaaaaaggagttttgggagaatcccaaagggaataaacaagacaaaagcaaaaacaacgatactataggaatgtgaagactctggcacctacaactacaccaaacattaaacacaacctaattcctacccatataacataaaaagtcacattagaggtttctttaactcagtttctattacttgatacattgtctagaaaacacgataaatatgaagaaaaaacagtctgaagagacaaggcaaccatcagaaccaaatttagatatgacagactntgaaaaagacagggaatttaaaatagctataatatgttaagaact

SEQ ID NO: 57755 - DNA, 441 bp, Homo sapiens
  misc_feature 343: n = A,T,C or G
gccccccctcggaatacttctagaattaattaacgcgggggaggtacaggagtaaaaaaggcagagatggctttcccatttgcctttatagaactactttcattactttaaaggcacaaaaaccaaggagaaaaattcaatacttcttgaaaattatctaagttgacagttctcttgagttttagacagaaagggatacaaataaaggtttcttttgtacaattaaaaagtgatggtgtgtacttcaaagataaaaaaagcttatttagcttcagatgttaacatacaatttcacacaatcctcaaaactctgggacaaaaggaaatgtcacccactcaattntatagatgaggagacggaaataaagaggttaccaccccttatgactccaagcagagtattttgcaaataccatataaaccttccttgctgcactgatc

SEQ ID NO: 57756 - DNA, 591 bp, Homo sapiens
  misc_feature 28: n = A,T,C or G
cgggcccccccctcggaagtcttctagnattaattaacgcgggtgtgtaaggaaacctagaatgttaatctgcatttcaaattagccttgtaaaacctcagtaatatgtcttctggatatatcaggatcttttggaccattttaccttgattattgaaccaattgattaatccaaattcagtaaacttaaaatgacctcaaattgggttacccagaactaggaatatttctgtattccatcctacttacatctgatttacatgcctggtctgctaacttctttcttttcatgactcctaagttatggaggtaagtgaagatttactatcaattatagtcatgtgacactcattttgaacttacattctcttagtttttttaattttaagcatgctggtagcattacattgttcttagcaaattaagtatatcccaattttaactggactattctctgcttaaacatataattctgcgtaatctgcaacaagtgtatatccccatatacatctatattttcatctcctttccatatggcattacccaaataaactacttttttttctttaatggaggctcacttctttgccc

SEQ ID NO: 57757 - DNA, 580 bp, Homo sapiens
gggtaccgggcccccccctcgaaatacttctagaattaattaacgcgggggtggaggttgcagtgagccgagacggtgccagtgcactccagcctcggtgacagcgcaaggctccgtctcaataattaaaaaaaaaaaaaaaaaaaaaggccgggcgcagtggctcgagcctgtgatcccagcactttgggaggctggggcgggcggatcacctgaggtcaggagttttgggatcagccttggcaacacggtgaaaccccatctctgctagaaatacaaaattagccaggcatgctggcacatgcctgtaatcccagctactcgggaggctgaggtacgagaatcgcttgaacctgggaggcggaggatgcagtgggccgggatcgcgccattgcactccagcctgggggacaagagtgaatctgtgtctcaccaaaaaaaaaaagaaaaagaaagatgcttaacaaaggttaccataagccacaaattcatgaccacttatccttccagtttcaagtagaatatattcataacctcaataaagttctccctgctcacaaaaaaaaaaaaaaagcggccg

SEQ ID NO: 57758 - DNA, 399 bp, Homo sapiens
cggggccccccctcgaggtacttctagaattaattaacgcgggggttgcagggaactgagatcatgccactgcactccagcctgcgcgacagagcaagactctgtctccaaaaaaaaaagaaaaaaaaaaaaagcaagcaagagataaaactgccatgtggaagatgccctccctataccaggaggaaagaaccattcttatcaccagagatggagagtcaaggtcgagataattctatacaaacaggccttgtttaaataactcttatcctcctctggtttcctgtacattttagttccttttccataattgcctctttttgtttaactcagtatataaccagttaggttttgccactttgggtctccattttttctatgggggctccaagtgcatgt

SEQ ID NO: 57759 - DNA, 430 bp, Homo sapiens
gtacacgggccccccctcgaaatacttctataataattaacgcgggcccgttgcctttggcagctcctggagagctgtggacatgcagtccccctcagttcgtgctgcaataaaggccatcttctcttaaaaaaaaaaaaaaaaaaaaaaaaaaaaaaaaaaaaaaaaaaaaaaaaaaaaaaaaaaaaaaaaaaaaaaaaaaaaacggccgccaaccgaggagaaaaccccaaaaaaaaaaaaaggggggcgtacaacggggggaacctgaaaaccgtttaaaaaggggggaaatgggaaacccccgggggcccctatttaaaaagggtggaaggaaaaaaaccttgggccaccaaacttaatagcaaaaaggacaatccccttttcccatcggaaattttaaacaaaaaaacgggaaaaagaaacccgt

SEQ ID NO: 57760 - DNA, 585 bp, Homo sapiens
  misc_feature 487: n = A,T,C or G
cccccctcgggagtcttctagaattaattaacgcgggcaccctgctgctaacccccagcaagcaatcatcctaggttgggcttaatccccagtaaaattgccatattgcccatgtcttaatgaagtttgaatgttaaataaattgtaaattcactttaaaaaaaactacaaaacactgatgaaggacattgaagaggaaacaaaaaaatggaaagctatctcatgctcatggatgggaagattaatattgtcaaatgcccatactgcccaaaatgatttatagattcagcaaaattcccatcaaaatactaatgacattcttcacagaaagagaaaaaaatctaaaatgtatatggagctgataaagaccctgaagagccaaagtaatcctgagcaaaaagaacaatgttggagccatcacattacctgacttcacaatataccataaaactataatactcaaaacaggatgagagagattgacatnaaaacaaacacatagaccaatggagcagaaacgaaaatccagaaataatctatgcatttacatccaactcatttttacaaagatgccaagatcctaca

SEQ ID NO: 57761 - DNA, 440 bp, Homo sapiens
  misc_feature 28: n = A,T,C or G
ccgggccccccctcggaagtcttctagnattaattaacgcgggtatcctgttacgggcatcagccaccggcagttgccttgcgagcacgatgacaaacctctgccggctctattgggtctcatccctgtatctatacgttagcatcccaacataaagaccggaatgttcctgtagctgacccagtgctcatcacccttgtccaaactcacataaatcttgcctgtcctcggaagaactccccctgcttactttctctaaaggctgtcttcaggccgggcacagcgggaggatcgcttgagcccagaacgccgtaatgaggtagaaatcgcgccattgcactgcaccccccggcggcagagccggagccccgtctcgaaacaaacaaacaaaaaccaaccaaccaaccaacttacaaacagcagacaataaaaaaaaaaaa

SEQ ID NO: 57762 - DNA, 546 bp, Homo sapiens
  misc_feature 31: n = A,T,C or G
taccgggcccccccctcggagtacttctagnattaattaacgcggggggggggcggatgctagatgacttgcaatcctgggaatgtcatacacaacaaagaattaatctgtgtcctgaactttctcatgttcccctggacattcatgattttaaaaaaatatatatataattatgtgagtctagacagttttactacggatttacaacatttgtttggatttccaagattcaactattgcataaattaaaggaagatggtactttatgatgtttagaacttgactaagaatttttggccatgtggaaaaccacatcagcagccatgatattagagctgacacccattaccctaaattggactgcatttgtagcaggtgcattcacagtgattccatgttatatacaaatatacgtattgagctcttactgtacatgtcaaatgtaaaacagtatccacaatatccagctgactactgccttacttcatttaattgcaaagtgattcattataagtgggtgtaaaaatctggcctctttattgagcc

SEQ ID NO: 57763 - DNA, 348 bp, Homo sapiens
  misc_feature 28: n = A,T,C or G
cgggcccccccctcggggtacttctagnattaattaacgcgggaagaggaaggtggcttaactaagactggagttaccaaagaggtaagagaaaaaccaacagatcttgatttaccaaagtccagtaaagactgttatgagaaagagtggtcagctgtgttcagtgctactgagttgtcaaataagatgaagaatgaagagcccactgaatttagcaacactggcatctttagcaggttcagtggagtgctggggcagaccaaagttaaaagaatgaagtacaaggtgaagaaataaagtgaatgtgatcactctttgaagaaatttggatatgaaaaaaaaaaaaaa

SEQ ID NO: 57764 - DNA, 581 bp, Homo sapiens
cccccctcggaagtcttctagaattaattaacgcggggagtgtttaggtctttcagcaatagtgagtctaaatgtagagagaatgtgtaggtgtgtctgtcttgtgtgtgcgcctatccctcaaagagtgcctatccctctctgtctggggaatgatgataaagtaatttgactgattctgtaaggaaaacttccaatggattgtggtcagaatcactgacattggaaggcactgttaactctaacatgcagctgtcattggaaatgttatcagatatgttttacttggtactttcatagttggagaatatccttttgaacaacagcagagatgacaaatcttgctctttcgaggatgattttgatttgaggggtggaggaaccaccagaaattggtcagagccatgactggtgatgtgagtgaccatttaggcttagaaacataaagtgctgggattacagtcttgagccaccgcgtccggcctacaaccacttctttaagctgtgcgtacttttacgcaggaagagactctagggcatttgtttttggagaagagccgaaaggagaggggccacggggc

SEQ ID NO: 57765 - DNA, 625 bp, Homo sapiens
gggccccccctcgagagtcttctagaattaattaacgcgggacattgggaagtgaaaaaaaattacaaagagaatgcaccaagtcttgtaaacagcggttatctcagaatagtagaattaaaagcaaattatattttccttcttttttttctgctataaagtgaatgacttgtggtgcaatcttacaaagtctcaatctgtgtattctgcaataaaggcattatattatcactattgcatttgtgatacattctaccttaccctttatgtgacaattctatactgttttaactgtcaaattgtaagtaaaagtgtgaattcgtgaccaaaaattttccacaccagcaacttaagaactacagcaatatgtttagaaaactgcgatcccaaacaaaaaatctatactaggtgagacaggatgacattgactttaattccaatagactcactaccacatgacgtccattactagtgctcactttccagaacccaaggagctgtggaagaatggagtcctttcaatgaaaataaactagaggcaatacacaacacagttactttgaggggctttttcaatataaagaagaaatgcccgaatcctaactctcctatttcccaaaaaaaa

SEQ ID NO: 57766 - DNA, 612 bp, Homo sapiens
  misc_feature 45, 92: n = A,T,C or G
ccgggccccccctcggaatacttctagaattaattaacgcggggnattggtgagaaaaagaatgaagatgtcccagaggaagtaacacactngaaagtaccaagggtaaaattttggaagccgacctaaattttaaaagaatataacaatttgttgccaaggcattgaagagatactggctccatattgtaagttatgcaacaagaagaaaaagacaagcactattcaaactgttttaacaagaggtttacaaacacctgttaatgtttctaatgttttaaaatagtgtgctaaataaatattagtttaattatttttccatttttctataaatctataacagacatcaagagtgtttaatgttgtaagaaaaatctttaaatgtcataaaataatcaaaattgcatccactgattattaagattgttttgcatgctgtcagcctacacaccatttttgtggttctggactgccacaccaaaaaaggacggtgtgtatttgttctgagagagaccactgtgtatcttccctactctgcatctttcccctaagttctctactagtatagaaccttacttcctgggcttgaattatgaggagaagggcagagag

SEQ ID NO: 57767 - DNA, 594 bp, Homo sapiens
  misc_feature 578: n = A,T,C or G
gggccccccctcgagaagtcttctagaattaattaacgcggggtatttcccaagcaacaatgataatttcttattttgcaaatttcttatttcagaaatcaggataatttgagatttaaaaatttctattagtgatcttacatcttcttccacaacatagatacattgtttgacaactagaagccataaatgttttttgaatgctttaaggatttagtttaaacattaattgatgtggtgtattatttttactaagtagtaacttggtcatcataacttttatgtttgcttaggatttattttttattatataaaagttgaagttatttctgtcataactgtaagcaaatttaacctaagtgtgtgaaaagtattctgaggtactctgtatatttttaacgtcctgaaagtctgaaggctaatctatacaggtatgttttaggatattccataggaaaaaaatcattacttttactatcaacctttgagatttcatgaagattttattgaggagtaataatacatgctataagcattgacaaaactctgaaagtttttttctataagatataaaatantatctaaattgagtca

SEQ ID NO: 57768 - DNA, 522 bp, Homo sapiens
cccccctcggaagtcttctagaattaattaacgcgggtctctgatcaggtatgatttgcatgtttcctccactccacaggttgtcatgtcacttccttgatggcatcctttgaggcacagaagttttaagttttgatgaagagtagtttatatatagatttttgttgttgctcatacttttattgttgagcctaaggaccctcatgatcgaaggtcatgaagatttactcctatgttttcttctaagagttttggttttagctcctaacatttaggttgttggtcaatttgtggtaatttgtgttatgaggtatatggtacgagggctccggcctcattctttttgcatgtggatatccagctgtcccagcaccatttgctgagactattctttccacattgaatggtttcagcccccttgtagaagtcagttggccattgacgtgtggtttatttccagactctcaattctttttttttttttgagacggagtctcgaaaaaaaaaaaaaaaaaaaaagcg

SEQ ID NO: 57769 - DNA, 570 bp, Homo sapiens
  misc_feature 478: n = A,T,C or G
cgggccccccctcgaaagtcttctagaattaattaacgcgggagtagctatattatatccgacaaaatacatttcaagataaaaactttaagagacaaaggaggtcattatataatgatatatggtaaattcaggaaggggatataattgtaaattttaatataccaaacactggagcatccagatatataaagcaaatattattagagctagaaagatagaccccaacacaataaaaggtagagacttcaacacccgactttcagcactggagagatctgtcagaaagaaaatcaacaaagaaacatcagatttaatctgcactgtagaccaaatggacctaatagatatttacaaaacatttcattcaatggcgacagaatacaaattcttctctttagcacatggatctttctcaaggacaaatcacatgttaggtcacaaaacaagtcttaaaacattaaaaaaaaaacaacanaaaaacctgagatatatcaagcatcttctctgaccatggtggaataaactacaaatcagtaacaagaagaacatggggacatatgaaaataa

SEQ ID NO: 57770 - DNA, 584 bp, Homo sapiens
cccccctcggggtacttctagaattaattaacgcgggaccttattcaggtaaaatttattcctgggatgcaaggatagtttaacttattcaaatcaatacaagtgatactccttattaacagaatgaagggctaaacgtcacatgatcatctcaattgatgcagaaaaagcatttgacaatattcaacatcctttcatgataaaaactctcaacaaatatcgtatagaagtaatgtgcctcaacacagtaaaagccatgtagacagcttacagttaaaattatattcagtagtgaaaagctgaaagctctttaggaaaacaagtgtgcccactctcaccatttcttttcaacaaagtgatggaaatcctagccagaacaattagacaagtaaaagaaaaagcatccacattggaaaggaagaaattattttttttctgtttgtagataacatgatcttatattttaaaaagactttaccaataaactgtttgaaataataaattaattcagtaatgttgcatgaccccaaatcactatttttaaaacattccatgtacttttgaacaaagtatattatctgata

SEQ ID NO: 57771 - DNA, 550 bp, Homo sapiens
cccccctcggaagtcttctagaattaattaacgcgggtacccttgaaattttgcttcattatcccttagtgctgggagagatttatccttgttggtcagttcccaagttagacagaaacaagagaagtcaatgtcagggactcaggccacatttgagtaataaagaggctagaagaaaataccctctcagggtagatctgcctgaagtccagtgttaagttccatattattagtctcatagaaattggcaattattttgaagcattgacctaacattctcctgttgggagagttatccttgcagagatttgacagtcaaaaagaacagagcttaaatatcacaatgcaatgaataatcaacaaaaatacaataaatccagtttgtatagtagttctaaaccattaacccagttttaaggtaatcaactgaacagattgaaaagtttagatgtgttggacgtaacctgttggagccaggtgactttctctcttattttgtataattgtatttatatttccccagaggaattgattcatgtgtggcaagtag

SEQ ID NO: 57772 - DNA, 200 bp, Homo sapiens
cggggccccccctcggggtacttctagaattaattaacgcgggtgctcagatggtccttgaaaatctcctaaattaccaataaatttctctttgtagtcttaaagtttaaaaaaaaaaaaaaaaaaaaaaaaaaaaaaaaaaaaaaaaaaaaaaaaaaaaaaaaaaaaaaaaaaaaaaaaaaaggaaaaaaaaaaaaaaa

SEQ ID NO: 57773 - DNA, 496 bp, Homo sapiens
cccccctcgagagtcttctagaattaattaacgcggggggcggaggttgcagtgagtggagatcgtgcctgtgtgctccagcctgggcagcgggagcgaaactgtctcaaaaaaaagaagaaaataaataaataaaaatcagagcacaagaaaaaaaaaaaaaaaaaaaaaaaaaaaaaaaaaaaaaaaaaaaaaaaaaaaaaaaaaaaaaaaaaaaaaaaaaaaaaaaaaaaacaaaaaaaaaaaaaaagggggcccccccggggggggacccaaattccccctaaaggggggtgtaaaaaccccccccaagggggggggtttaaaaaaggggggaaggggaaaaaccggggggaaacaaaataaaaggggtgggaaaaaaatcccttttggccagggggggaaaaaaaaaaaagggcccacccaatggccctttcaaaaagggggcccacctgaaggggaaaaggaaaatggaacggtaaaattttgggaaaaa

SEQ ID NO: 57774 - DNA, 478 bp, Homo sapiens
gggccccccctacggaagtactgtctataattaattaacgcgggagtctgcctgagaaggactgagtttgcaggaggaggggcagccgccatctctgccgtctggtcaactcagctgatccagtctgctggctcaagatagtccagacagtccgaacaagaaagtgtcccccacaacgcatcacaactgcgctaacaaaaagcagccagactacttctttaagtaggtccctgatcctgtttctcctaaatggatgagatcacccagcagggtctccagccacttcccacaggtgcctacttcagtgctgccaacaggtcatgtaacctctggaatggagtttccagagggaggatcaggttgccatctttgctgtttcacagccttcactggtgatatctgcaggtaagaaaaaatctgaagcaactagggtctgaagaagactgccagcaaaccccatcatccctttggaggagta

SEQ ID NO: 57775 - DNA, 432 bp, Homo sapiens
  misc_feature 9: n = A,T,C or G
acttctagnattaattaacgcggggcaaaaaaaaaaaaaaaaaaaaaaaaaaaaaaaaaaaaaaaaaaaaaaaaaaaaaaaaaaaaaaaaaaaaaaaaaaaaagaaaacaaaaaaggggggggccccccggtgggccctatcttgtctctttttgggcgctctttttgcccgcttttttgcccggttgtttctgaaaaccctctgggttaacccctttttggccccgcctaacttcccccttttgccacccgtttttttctcgcgggggggcccgcaaagggcgccctcccaaagggtctgccccccctttggggcccctgttttgggagggggaattttttgggaaaattttctttttaaatttgggtaaaatcttttttttttaacccctttttttttaccacggggcccccttttttaaatcccctttt

SEQ ID NO: 57776 - DNA, 504 bp, Homo sapiens
  misc_feature 27: n = A,T,C or G
cgggccccccctcggaagtcttctagnattaattaacgcgggggtgtgtgtttgagagaggagggtctccctttcctacttccgcagttggggcactcacagtatttggggtgtctcctgggtcctgcaggagcagtcggcttccttcagtgggtctcgataatacatttattgaatatggagccatcaagcttgtgtgttctggagagtcttgtggacatgatcaatgagagaagcaaccagtggtgccatatgctgggagggggtgattgagtattgtcttaagaaataggtaaagcctaaagcaaatgtacttttccaccgcaacatttacattacaggtaaaattaagttaaactgaatattaaggataattttgcagaactcttacaactcaatagcaaagacccccagataacctgattaaaacatgggcaaaggatctgaatagacttttttttttttttagacagggtcttgctctgtctaaaaaaaaaaaaaaaa

SEQ ID NO: 57777 - DNA, 607 bp, Homo sapiens
  misc_feature 566: n = A,T,C or G
cggggccccccctcggggtacttctagaattaattaacgcgggatccagtgagcctcaggatatatttttttttaaattttgcttccttgaaggagtaagatacttacaaaaagatgcatctagaaaacaaaaataaactctgaaatttaaaatgtgatatcagaagtgtacaacctaatagacaggttagaagataaaactgagaaagtctcaccaaaaaacaaagtaatggtaagtcggggacaggagataaaagaattagaggacctgtccaggatgtccaatatttgaataatgggagttctaaaaagagtgaacaagggaaacaaaaggtaattattcgagaaaatatccctgcactgaagaatgggagtttctgcactgaaagggccagagatggtagctgcaaagagacacatcgagagctttaagaggtgaaagttttggcctctgtgcagaggaagtggtagggacaggtctcctcttggcttcctttaaacaagccctgaagaatattcaactcttcaaattattgcatgtataacgatttaaaaaacaaaaactntggtaaggttgaaaaataaaagacatcaatagatgttcatg

SEQ ID NO: 57778 - DNA, 594 bp, Homo sapiens
gggccccccctcgaaagtcttctagaattaattaacgcgggcccgtaacaaatacagaccagaaaagagtgcagttgcaagatttaatagagtgaaaacagagctcccatacaaagggaggggacccaaagggggtagcccttgccggctggaatgcctgggtttatatcccgatcattgtccctcccgctgtgctctcaggcaatagatgattggctatttctttacctcctgtttttgcctaattagcattttagtgaactacctttcctacctcattggtcaggtgtgtgctgagtggcaagccccatgtttaaaggtggatgcagtcaccttcccagctaggcttagggattcttagtcagcctaggaaatccagctagtcctgtctctcaccaccacagctgggaatgtgctgagtctcaccagaagtcaatatgtctcagagtctcactcaaggcccatggcatagtaactggatatcactgctggttattcagtgcttaaggtttctttagtcagcaggtaactgatcctgccaggactaggtcctttccttcaagtagcagtttcccttctggccagggcgtatct

SEQ ID NO: 57779 - DNA, 498 bp, Homo sapiens
  misc_feature 9: n = A,T,C or G
acttctagnaattaattaacgcggggcctacagaactgtgagtcaattaaaccttttctttataaattacccagtctcaggtatttctttatagcagtgtgagaatggactaatacttggctaattaaaaaaaaaaattgtagagatggggccttgctttgttgcccagactgaattcctggactcaagttattttcctgcctatgcctcccaaggttctgggattacaggtgtgagccaccatgtccagccagtattctattttaaatgtaatacaggcaactaagagaagaatcagtagggcaatcagcatgcacagggttaaaaaccagatcctatagaatgattagatatctgggtaactgtaatttggggacgaggacttacagacacaggaaagcagcccttcaatacctgaagagcatgtagtatgaatgacgtaaaatttaacaagatttaacaaattttctcctattcatttactgaaaaaaaaaaaaa

SEQ ID NO: 57780 - DNA, 608 bp, Homo sapiens
  misc_feature 25, 39: n = A,T,C or G
ctgggttaccgggcccccccctcgngggatacttctagnattaattaacgcgggggctgctttgatttggggcagaaatgtaagcaaaggattggcatttaaaagaatgaacttctgtgtttggaggttggcaaactggccttgctgccagttttaatacagaccaaagaactaggaatggtttttacatttttgaatggcaggaaaaaacatctaaagaatactaattcgcaacatgaaaattacatgaaattcaaattttggtattcataaataaagttttattagaacacagccacacttatttaactatcatctatggctgtttctttgctacaggggcagaactgagtagttgagacagagattgtatggctgcaaagcctgaggttttattatctgtctctttataaataaaagtttgccagcccctggtattgattattctgcttcttcaattttacaagataatcctaaatagtaggcaaaaatggctagcctttttgacaaatttaattgtggtaaactgtgctaataatattttcttcatttgttttttgtcacattctttaatctgattctttaatggtcacttttttgtttgtttt

SEQ ID NO: 57781 - DNA, 367 bp, Homo sapiens
cccccctcggaagtcttctagaattaattaacgcgggggggagagacagagagagagagaattgtaaccttattcacttattttgacagatgagcactctctctccccatttagagattatccgcattctcagtaaacctagtaattcaatgttaatattatcattttagggcatatattggcttttatcagagctatcatacatacaagtttctaattgatctcctgagtcaacttcattttacaaccacagtagagctaaaataacataccctgtgtttatatcatacatttaattttgcagtttaccaaactttcttattttttaatttctcagttactttgattatccaaaaaaaaaaaaaaa

SEQ ID NO: 57782 - DNA, 577 bp, Homo sapiens
cccccctcgagcagtcttctagtattaattaacgcgggcaggcaaagagagagcttgtgcagggaaactcccccttataaaactatcagctttcatgagacttattcactatcatgagaacagcatgggaaaggcctgcccccatgattcaattccctctcaccaggtccctcccacaatgtgtgggaattcaagatgagatttgggtggggacacagccaaaccatatcaaggtataccatagtttttgatacacaattttttctctctctcatcttccatttttattaaattaaaacaaatcatgataggactgatttgtttgcaaaacaggctttaatcttatgatacttggcatattatcggcataatgtgcagcaagaataattatttgctatataggcttcttttaaatttggctttgattgccaggcacggtggctcatgcctgtaatcccagcactttgggaggctgaggcaggcagatcaccttatgtcaggagttcaagaccagcctgaccaacatggagaaaccctgtctctactaaaaaaaaaaaaaagcggccgccaccgcggt

SEQ ID NO: 57783 - DNA, 603 bp, Homo sapiens
gccccccctcggggtacttctagaattaattaacgcgggtgcttgccccagtataaggccaagccctagctacagtgaacctagggtccaggcccacctgaacagacctgggtgtgaggctggccctcaaagattgaggctccaggatgacccctgcagacccaggctccagacagcctccatggactcagggtctaggcttgtccccatggactcaagctacatgtccattctggtggacccaagtgctgggactattctggtgcctctagatttaggctcaaggctcacccatgtgccaagtcagcccctatggatcaaggctttgggttggtccctagggatacaagctctaggcctgccctcataggcctaatcaacaagtctgtcccagtggattcaggttccagactcaaccccaaggacccagacaccagacctacccccacctgataacccacaatctagaccagcctgctcaagagcttcaaaaataaacctgcccacaggccacaccagacagtctatccagaatctctggatggactgactggtttttaagggctttcctagaaaaagctagtatgcaaaaactaggataac

SEQ ID NO: 57784 - DNA, 502 bp, Homo sapiens
  misc_feature 16: n = A,T,C or G
cggggccccccctcgngggtacttctagaattaattaacgcgggcttttgacccaaaaaaaaaaaaaaaaaaaaaaaaaaaaaaaaaaaaaaaaaaaaaaaaaaaaaaaaaaaaaaaaaaaaaaaaaaaaaaaaaaaaaaaaaaaaaaaaaaaaaaaaaaaaaaaaaaaaaaaaaaaaaaaaggggggccccttttttttttttttggacccccccttggaaaagggaaaccccccccgggaaaaaaaaaaaaaaccccgggggggttttaaaaaaaaattttttttttttttaaaaggggccactttaaaaattttttttaaggggcctttttcaaaaaaaaatttcaaaacccgggggggccggaaaaaaaaaaaaggccccttaaacccgggtttatttttaaaaaaatttttttgggggggaaaaaaattttttttttttttttattaaaaaaaaaaaaaaatttttttttttttttctttttaaaaaaaaaaaaatt

SEQ ID NO: 57785 - DNA, 381 bp, Homo sapiens
  misc_feature 6: n = A,T,C or G
cccccntcgaaatacttctagaattaattaacgcggggatggaaagaggaaggagggcagtttgatccctggaatttaaacacacgcctcagagctcaagactgggcccaaaacagatacacacactcaactgaaccaagcaacacacacccaagctgagggagcaacacacacccaagccgagggaacaacacacacacacccaggctgagggagcaccacacacacacccaagccgagggaacaacacacacacacccaggctgagggagcaccacacacacccaagctgagagaacaacacacactcaggctgagggaacaacacacacacacccaagctgagggaacaacacacacacacccaaaaaaaaaaaaaaa

SEQ ID NO: 57786 - DNA, 600 bp, Homo sapiens
cgggcccttcctcggaagtcttctagaattaattaacgcgggatatatatatatgagtatatatatatggaggtagaaaggagagaaggccgagccccatcacctcaggctcccttctcctcctgctccgctccacagagccaggaaaaaacgtgaaaacatattggctattgtaagttggctatcactatcagtaaacttcttaagaagcatcatgttctcatttatatccttaactacaaagtcatgtgctgcacaatgaagttttggtcaacaacagaccacatatatgagagtggtcccatgaggttatcatatcatgtctttactgtaacttttctatgtttagatacacaaattcttaccattgtgttacagtagctcacaggattcagtacagatgctgtgcaggtttgtagcctagaggaaacaggttacaccacacagcctaagtgtgcagcaggctgtagcacctaggattgtgtaagtgcactctatggcatttgcacaacaatgcaattgcctaatgatgcctttcgcagaacatatccccattatgaatcaacacatcactgtatccatctgctgtttaaatgccta

SEQ ID NO: 57787 - DNA, 569 bp, Homo sapiens
ccgggccccccctcgaaagtcttctagaattaattaacgcggggtgggagttaaagctaataactaattatgttaatgctaaaactaagatttttctggcaagggaaaatcctcccaagtcccagcactttgggaggccgaggtgggcagatgacctgaggtcaggagtttgagaccagtctggccaacatggtgaaacgccatctctactaaaattgaaaaaattagctgggcatggtggcaggtgcctgtaatcccagctattggggaggctgaagcaggagaatcgcttgaaacaggaggcagagattgcagtgagccgagattgtgccactgcactccagcctgggcaacaggaacaaaactctatctcaaaaaaataaaacaagatttttctgagaaaaggtgtaaaaccgtatactaaatttgaaatagaaatataagcgtgaactcatttgttgttcttttaccgtatacacattttctacctctgccccagtagcagtagacacatcaagcacctagaaagtggtctcttatacatgaaaaccatgaattcatagtgatgg

SEQ ID NO: 57788 - DNA, 387 bp, Homo sapiens
taattaacgcgggggggctggcgagctctgtaactttaaagattcctgcaagatatttttataaaaaaaaaaaaaaaaaaaaaaaaaaaaaaaaaaaaaaaaaaaaaaaaaaaaaaaaaaaaaacacaaaaaaaacccccaaaaaaaaaaagccggcccccccccagggggccccccccccccccccccggggggtccctttccccccccctctggggcccgtttttttacccccgtccccggtttgggggaaaccctctccccggcccccacggggaacccccggcgccccccccccttttccccgccggcctccttccccttgggccccgggcggtgtttccctaccggcccccccccggccgccttggcaaagggatccccccc

SEQ ID NO: 57789 - DNA, 149 bp, Homo sapiens
gactgggttaccggggccccccctagagaaatactgtctataattaattaacgcgggggggaaaaaagagagtctatttttgtctaataataaagaatttctataaactttaaaaaaaaaaaaaaaaaaaaaaaaaaaaaaaaaaaaaa

SEQ ID NO: 57790 - DNA, 607 bp, Homo sapiens
  misc_feature 37, 571: n = A,T,C or G
ctggggtaccgggcccccccctcggaatacttctagnattaattaacgcggggtggggaaggaaagcaaacatatgggaactctgtgcttactgctccacttttctgtaaacctaaaactacggtactcttaaaaaataaaggggccgggcggggtggctcacgcctgtaatcccagcactttgtttttaatacaattatagactcataagattttaatgcttcaagggatctaaaaatcaactagtccaaactctgaccaaaggcaggagtttgaccaatagatattctgtcaccgaccaaacacctctagtagtaggtaatgtagtgtcactcaagataccttgttctaccattatgaaattctcataccaagctgacatctccattcacatagtagctacccacaggtaccagttctgtcctctcaacaattaaagatgcctatgctttcttccagttagtgtcctccagatcattgccctccaggtgtctaaaggcaactagactccagcttcttacatccataaaaggcatctgtcttgctgaagttttcaactctgccgatgcanaaacaaagaccaaatcatgttctctgtttccttttt

SEQ ID NO: 57791 - DNA, 611 bp, Homo sapiens
cccccctcgagagtcttctagaattaattaacgcggggggagaaggattaatcttgtcagaaaactaaggtcagtagaataaaatacaagaaattaagttgacaaaatgaaacataatgagaaaaatttttttggacaaaaacaattcaaaatcagacttggctaataataccagtctgacagattctgagaactaaggagagccaattgatgttattttgcccagagctaaatatacttttcttaaaagtatgacagtatctggttcctctgaccagccattataataatctttgcaatacactgaacatacacatggaatacagaagtctctatttaaggtcaccagttaactaacttaataggcaataacgctagctaacagtaagacataaaggcaaatgtttggaggccaaatcaaaatcacttgcctagtcttctgacaagataaagcagcgcaatatagttcttttccattggaagacagcattctacctcctgttcaagttaacagtctcatcagtacaaatatagtgtgctagtcagacagtcccaaagcaaaccaattttttgttaacaattcacgcccattaagagtttgtatctggttt

SEQ ID NO: 57792 - DNA, 403 bp, Homo sapiens
  misc_feature 49: n = A,T,C or G
taccgggaccccccctcggaaatacttctaggattaattaacgcggggngaaaaaaaaaaaaaaaaaaaaaaaaaaaaaaaaaaaaaaaaaaaaaaaaaaaaaaaaaaaaaaaaaaagcggccgcacaaagaggagaaacaaacgcggcccccaccgggggggaagctccaattccccttattgggagtcgttttacaccccctaaatggccaaaattttacaactacccagattggaaaaaccgtggcgtatcccaatttaatcggctggcagtaattcccattttccccggctggagtattatcaaaaaggcccccaccgatggcctttcccaaaaatttcgcagcctaaatggcaaatgaaaattggaaccgttttttttttgaaaaaattccttttaaa

SEQ ID NO: 57793 - DNA, 592 bp, Homo sapiens
  misc_feature 28: n = A,T,C or G
cgggcccccccctcggggtacttctagnattaattaacgcgggcccaagttcaagtgactctcttgtgcctcagcctcccagtagctggaattacaggcgtgtgccaccatacccagctaatttttgtatttttagtagagacaggttttcaccatgttggtcaggctggtctcaaactcttggcttcaggtgatccacccacctcagcttcccaaagtgctgggattacaggtgtgagccactgcgcctggccaaacatagacaaaattaattttaataatatatgttattaatgtaataaatccaaaatattcattctaacatgtattcaatatttttaaattattaatgatctattttacattctttatagttgtttctaaatctttgaaatccagtatatattctcatttacatttcactttgagctagccacatttcaagagctcaattagccactaccgtgttgaacagcacaggtctagggaagaagaaccatgaggctaatagtaacaaccctacctaactaatggggaatctaaatcttgttttgtgtaagtaatatgtccaagatcatacaggagctagcat

SEQ ID NO: 57794 - DNA, 612 bp, Homo sapiens
cgggcccccccctcggaagtcttctagaattaattaacgcggggagcgtgaggtagagcaaatgactatttacaggatatttcagttctattattctctcatccttgggaaacagaattttctgtattaaagagtagaacccccatagtcttaaattttaattggaaatgtcagaatgtgaagcattttgtcttttcaaaagtttctattttttagctctgtccactaaaaaaaaccttaagaaatgacaaacccagaagcaataaacatctcttagtgcacagattgtgatcctgtgattctcattaaaagaaaccaatactttttggagaataactgatttggagaatggtcctaaaacaccttttcatagaagatagcaagaaagcaaacaaaaactgctacgatgcaggggctaacttgaagaggcttacatgggacaaataagaaacaatctgtgctccaaaaaggccaatagtaggtattgattaaacctgccaaatatatttatagtcatgagtccgttatcgtataaaaaattgttacctttggagaatgttagctactaaagtcatttatttcctggtaaataaatggatagtatccatcata

SEQ ID NO: 57795 - DNA, 613 bp, Homo sapiens
ccgggccccccctcggaagtcttctagaattaattaacgcgggggatgggtaggtcgttttattttgtagatgagtcacttgagcatagtgaggtttccaaggttgctgtttgtggcaacacgaggcagagctgacctgaataggtctctctggctttaccatgaggttccccggtgttaactgataagggggtaaaagctgactcctctcaaagcccctcatccgaaagaacaggcagaatttattaacaaataacccatagtaccatctgccgatgaggcagtggttaaatgagcttgaaaatgggctttcatttttactttatcattgtgaaatcatattaatgttttaatctagaaacttgtgccagatttcaagaagaaagctgattaaaatgttttaaatatgtattttatacctaatagaaaaagactaaatattttacatttagctgggtgtggtgacatgtgactgtagccccaacaatttggaaagctgaggcgggaggatcgcttgagctcaggagtttgaggttacagtgagccatgattgctctgctgcactccagcctgaatgacagagcaagaccctgtctgaaaaaaaaaaaaaagc

SEQ ID NO: 57796 - DNA, 297 bp, Homo sapiens
cgggtccccccctcgagagtcttctagaattaattaacgcgggcccacaacattaagtgtcaaaactggaagacaaccagtcacctttctgaagtatattttcctagctgttttcctgatttaatcttagctcaataagcatttcttaatgttggcatcatttgctttctgtatagactgagaattttcaaaacaatcaaaacctgctgtctctttgtttaacaggctgcataaggctgctctggcattgctataaagaaatatctcagctggcgcagtggctcatgcctgttatcc

SEQ ID NO: 57797 - DNA, 593 bp, Homo sapiens
ccccccctcggggtacttctagaattaattaacgcgggtactgggagatgtgattgcttcttaactccaagtaccattactctttgaaatgtaactcaaattagcgtaagacatttgcagttcagcaaaaggcttatggtattggaatccttttttttttttcaaaatgtattaattagagtcttattttcagagtcttattatgggagccatttattgactcaggcccaaataattcaatatgatgcccctaaaacttctctgcaaattatggagaatgatagtgggttaaaggaataagagactttgtgctaaaggggtaacttagagccattttaaggaggaaagccatgaaacagtcataggaaaacagaagtctaagatcaagtccaaatgttgtgtggcaaagatgatgaaagtaaaggatgtatttttgtgaattctggtggttttaactttgtttttaattttctgagtaatccaagtgtctgtattttatgaatctacaacagtataggtaacattttattgcaactgaatttatttcaaaaattattagttttggctgggcgcggtggctcacgtctgtaatc

SEQ ID NO: 57798 - DNA, 155 bp, Homo sapiens
  misc_feature 36, 82: n = A,T,C or G
ctgggtaccgggcccccccctcggagatcttctagnattaattaacgcggggacctgcagaggggctgtcgggacagcgtgngaataaacattatttcaaggaaaaaaaaaaaaaaaaaaaaaaaaaaaaaaaaaaaaaaaaaaaaaaaaaaaaa

SEQ ID NO: 57799 - DNA, 591 bp, Homo sapiens
  misc_feature 35: n = A,T,C or G
gggtaccgggcccccccctcggaaatacttctagnattaattaacgcggggaagcctcaaagaagcattgctcctgggagataatcagctatataagaaagagtggtttcccttggagataggccactgaagggaaaaaagcgtatatgaaggaaaaggtaaggttctaatggaaacaaaagagaaagaagatatatcaacccctccttacaccaatgctattcatcaatgaaactgcccagaaaaagggaactgtcagaagagggcactctcaaactaggaaccctattcgcaaaatgaacaggaatagaaaaaagcagatcacatctatataaaaactactgcaaaagaagctgaaaatgcaattcagagttaaaatgctgatacaaaattgacaaaactgtaacaccttgcttcatactggattaaatatccttagtcagcatttaggaataatgaaaaaaaaacagcttgaatcagaaatttcaaaataagaaatgggacaaaaagaaacagggaaatgagtgttaatttgatccagaaaagagaagacaaattcaaaattgtattacaaatgaaaactaaatttga

SEQ ID NO: 57800 - DNA, 494 bp, Homo sapiens
aattaattaacgcggggttggtattatgaaccatttgaaacaaaatttaagcaattccctaaatccttctgagtctccattgcctcatctgtagaatggagctagtaacagttgctcttgctacatggcagactgtgtcaagatctcaatagcacaatcaagcttcagatagcgactgattaactagaagactctgaagataccttagaggcctgaaatgactttagaggggtgtgtgtgtgtgtgtgtgtgtataaaactttgcagccaatatcttgtatttaacatgttgagccttaagataatcaatattattcccaaagggtatagctaaaacccaggaaagacaacatccccttaagaaaatggaaggggcgggcgcaatggctcacgcctgtactcccagtacttcaggaggctgatgcaagatcccttgagcccaggcatttgagaccagcctgggcaacataactagaccctgtctctaaaaaaaa

SEQ ID NO: 57801 - DNA, 543 bp, Homo sapiens
cgggccccccctcgaggtacttctagaattaattaacgcgggactgccctcatgatagtgagtgagttcccgcgagatctggccatttgcgtggcactccctcatctctctcttgctccagctctgcccatgtgacctgcctactgcctcttcaccttccaccaagatagtaagtttcctgaggcctccctggaagcagagcagatgctagcacattgtttcctgtacagcctatagaaccaagacccaattaaagctcttttctggccgggcacagtggctcactcctgtaatcccagcactttgggaggctgaggcgggcagatcacaaggtcagcagttcgagaccagcctggcgaacatggtgaaacccccgtctgtaaaatactaaaaatacaaaaattagccaggcatggtggcaggcgcctgtaactccagctactccggaggctgaggcaggagaattgcttgaacccaggttgcagtgagccaagatcacaccattgcactccagcctgagcgacagagcgagactctgtctca

SEQ ID NO: 57802 - DNA, 600 bp, Homo sapiens
  misc_feature 28: n = A,T,C or G
cgggcccccccctcggggtacttctagnaattaattaacgcgggggtctttaaatttgctttttgttttaaatttctgtgtctcttgtgttacttgacctgtggctaaaattgtagaattgaagctatgagctttctgtctgtaatttggaaaggcatttacctctcaatgtgtgtatatatattcctatttctggagggtgtaagtaaataagattacaaagtcttttaagttaaaggatatttgttctgattggttaatagaatatataaatgcctatataaaatccctaaaacataagctaattaaatttctaatactttaatgtgctataaaaatgtgctacaattggttcttcctgaagctaactcagaaaccttttaagaatctgaattcacataattaagcaaatatttggcaaatgactagtttaccaatgtgagtttaataaaaacagctttgtcttttctgacttatcactattaagcataatataagcaaacagcttattttacctgggtatgtgtttcttattattttttaactgatcaaataagctaacattactgttatgtaatgtttaagattgtaaaaaatgtc

SEQ ID NO: 57803 - DNA, 603 bp, Homo sapiens
cccccctcgagagtacttctagaattaattaattagaagaacaaattaagtaacaatattaaattataagctaaagtatgaaataattccactagtcatactattagagagaaatgattaagtaaataaatggggaagagacaaacgtgtgcagaagaaagctaaatatgcagaatcccatcctcaaggaggtggaacataattttccactcctaaactatgagctgtgtacagtgatttcattccaaagagtacaatatagaaagaggaagaaaagagtaacattataatgtagaaatctgacaaacacagcctcagccaagtgatcaacatcgacatcagtgatataatgaaatctgagaaactatcacagataagacaaatctaaggataaatgctgactaaatgtaatgtggtatcctgtataggaccctggaacagatacaggacagtagagaaaaactaaagaaatctacacaaagtatgcacttcgcttaataatattgattcgttgactgaaacaagtgtaccatgctaatatagtaataacagaagaaactaggtgtggggcacatggagactctgtattatcttcacaatcta

SEQ ID NO: 57804 - DNA, 599 bp, Homo sapiens
  misc_feature 65: n = A,T,C or G
cgggccccccctcgaaagtcttctagaattaattaacgcggggtgggagaagagtgtgatactgngagccaacctgaaaaactccaatagtcaaataaagaacaatttgagcaacaacgtaagtatataatattggattttaatccaaagtgtaaagtaatatgcatgaatccatactgtcataaataagtgattgagtaagtaaatggagaggagacaaatcttcctcatagaacaattccaaattatacacatgtagctacttctctccaagaagtgatgcttaacccctccttagtcccctttgagtgtggactggacttaggtgacttgtttcgaagaatacagtgtggaaagggaaaaatagtaactttacagaagaaaaacttagcaaacactattttaaccaaatgctcgtgactaacctgtgatgtcgtgtggatttcatgtacctctgacaagatgtgatagaagggcacttcaccttctgtggtattcatgccaaaaatccagtctagtcatgaggaaaacaagcacaagcagacatacccaatttgaggcacattctacaaaatagctgacccattctcctcaaaact

SEQ ID NO: 57805 - DNA, 589 bp, Homo sapiens
  misc_feature 44: n = A,T,C or G
cgggccccccctcgaaatacttctagaattaattaacgcggggnagaatgacaaaccaaaccaatttattaacatcattatcattagtagtatttattgatgtataaaaataggataatggggaactggactgaaggcaaagaaagtctgtttgcattgcgaatatgttgtagtttggcttcattcagtttatttccaaattatctccctcattgttttggggggtaatttttgtgctaatgcctttgcaaattagatttaaaaaatagaaaagaaaaggtcttctcttatgaagccaatgaatatttactgacaagcagtatagtaggacatgcccttgaatagcatagaatctaaagagaggagcagatgtgtaaactaaaaataccaattcagtgaagcaagctcagcaaaaatgtctgtgcagggtgctagagatttgcagaagagttacatcacactgctatgagaaactacggatggttttaaaggaaaatggtaatatcagagctaagtaaaggagcatacataggagttaactagttaaaaaaataatgaggaactgctatgaggaattatggatggcttc

SEQ ID NO: 57806 - DNA, 601 bp, Homo sapiens
  misc_feature 33: n = A,T,C or G
ggtacccgggccccccctcggaatacttctagnattaattaacgcgggtgggggtacagtgaggatgtgggatcctgagataatccaaatcactatgtttagatgtaggtgtacaaagggagtaaagagagacccaggctgatggggtatttgtaataaatcaaacataatgtaacagcaggtcaggtaataaggggactctcaagtgataaggatcaagtgataaacagtgaaaggggcagaatgaaactctacagaaattaacaaacatcaacaagacatctaggaaagcatttacagctgcattcatttaaatgaaaggtgatagttactcagtgctgtgtgccaagtacaatgatacactctcacctgagttaccctcgtaaatctgaaccacttgtcattatctgtgctttaaggagtcctattttccacactcttaactggcttgagatgtgaaaatccatctaaattataaacgcagtggggaagaaaaaatctagtcatgcccatcaagggaacatgtctagttaaaattagcatagataaaaatcagcaaaaaacaaaaaagcaaattgaaaaaatattctttgaaattaaa

SEQ ID NO: 57807 - DNA, 606 bp, Homo sapiens
ccgggccccccctcggaagtcttctagaattaattaacgcgggggtctgtcgtgagattgcagttgagatgacagccaagggtgcagttatctgaaggctcgactggggctggaggctctgaatccaagacaggcctgccaggttgttcttcctgttgacaggaggcccctgtttctcatcacatggatctctccgcagaactgcttgactgtcctcacggcatggcaggtgtcttcctccagaataagttatctgaaagagcaagacagaagcctcagtgtcttttatgacaacctagcattgaaagccacacctaagggccagctgtggtggttcacacctttagtcctagcactttgggaggcggaggctgaggcaggcagatcacctgaggtcaggagtttgaaaccagcctggtcagcatggggaaaccccatctctactaaaaatacaaaaattggccaggcgccgtgcctcacgtctgtaatcccagcactttgggaggccaaggtgggtggatcacctgaggtcaggagtcctagaccagcctggccaacacggtgaaaccccacctctactaaaaatacaaaaattagctgggcgtg

SEQ ID NO: 57808 - DNA, 338 bp, Homo sapiens
  misc_feature 43: n = A,T,C or G
cgggccccccctcggaagtcttctagaattaattaacgcgggnaaaggaagtctatcaatatggcaaactttactgttgtcatattttaagaaattgccacagccacctcaaccttcagcaacaccaccctaatcagtcagcagccatcgacatcgaggcaagagcctccaccagcaaaaagattgatgtgctgaaggctcagatgatccttagcattttttgcaataaagtgttcttaaattatgtacatggtttttagatatgctactgcacactttactagactgctacataatgtaaacataacttttatatgaattaggaaaaaaaaaaaaaa

SEQ ID NO: 57809 - DNA, 624 bp, Homo sapiens
  misc_feature 563: n = A,T,C or G
cccccctcgagagtcttctagaattaattaacgcgggttccatttgtattgcatagttgagccttgaattatttagaaatatgttttgtaaattctaggagtatcagacatttctagttatgcttttattatggatttctagcttaacagtattgttgtcagagaatacactctgatcattccagtcatttcaaatttgttgaaacttgctttgtaacccagaatggagcccattttaaacacttactgtccatgcattaaaagaatgcataatttaaacttttatggcttgatatcctataaaacgctgttcactgaagagtgctaaatgtaccgttgctttatagatttctgccagctttttctgtatttcctaagtgttttaaaatatccaaatatgttaagaatttgtctatatttccttatgttttcttagttgtggctttatatatttttatactagtatatcaatcattttaattattataccacattttaatgtttcttaaattatgaaataaattttctatctctaataatgcaatttgccttaaaattaattntgtatctcctaattctataaattttctcttaactattcttcacattttttaccttttaact

SEQ ID NO: 57810 - DNA, 603 bp, Homo sapiens
cgggccccccctcgaaagtcttctagaattaattaacgcgggttttttaacagctgcacaaaaagagaaaaaacacctttcagtaggaacagtgaggcagcaaccaaccctggccaggagcccaaatttaacatcaccagtaataaggtacaccagcatcatgtacctctgatgagaggtggtcaggagggcaccacactgtgtcttcctccccaaagcccataacccatcagaagaacatctgacaaacacaaattgaaggcctttcttcaaaatgcctgaccagtactctccaaaaccatcaaggccatagaaaagcacagaaagacggagaacatgtcacagacagcaggagacgaagaagatacgatgactacatataatgtgggctcctggatgagatcctgggacagaaaatggacatgagtggaaaaactagggaaatctgaacaaaatgtggagtctagttaatggtaatgaactgcaaggtgcagtggctcacgcctgtgatctcagcactttgggaggccaaagcaggcggatcacttgagtgcaggagttcaaggccagcctgagcaacgtggcaaaaccccatctctacaa

SEQ ID NO: 57811 - DNA, 610 bp, Homo sapiens
cgggccccccctcggaagtcttctagaattaattaacgcggggggggtctcccacacttttatgtattttacttccagcaaccacaccaggctttcatggagatgaccccagaacaacaccttcacattttagtcaaggggaggggcatgttgaaatatacccaaagcaatcttcatagtaagaaccaatgctccaaatgaaatgatgttaccaggtcttttgaccaaagaaagggcaattacccgatcccagccccttagcttccctatctcacctaagagaagaaatgtaaaaggctaagaagcactactgaaggtcaaagcccaaggactcaggcccactaaatgacttaagagttaatcacaaaattatagattcctttcccataggaccttaccaccacacctgcaaggctccagtttataccagtagatttcaactaaaaaagtgacaggccacagattctatctaagaagttcttaggaaaacctaaagataacaaggaagaaagatacaagtacacctgaggaaactgaatccactggcgcttacggtttcagcaaacattaaacacagcccagcttctggccacattaccattataacttt

SEQ ID NO: 57812 - DNA, 602 bp, Homo sapiens
cgggccccccctcggaagtcttctagaattaattaacgcggggggaacaaggaaagattgaaatactgtaacagaccagaggaaactaaggaaacttaattgatgactgaatgcagtgtgctgtgttgaactggatcctagagaaaatagacattagtggaaaaactactgaaatatgaatagtctcaagtttaatagtagtgtaccattattactttcttagttttgacaaatgtaccatggttatgcaagatgctaacaatacagaaaaataaggggtatttgggacctccctgtattatccttatgcccttacttgaaagttgtttcagcaatagaagtttatttaaaatattgtgaagggcctgagtatttttaaatcaactgcagtgactctcttttgtgtatttgtgtacagatgagtttttctgcatcgaattttatctcctttccttgcagaagaaagagaattagccctttacagagataacagttgcctaagccagctcttttctcctctttttgatgttcttctttttctctcagtttgaaaattgtaggttattttgagtttttaaaatgtctattgctacatacacatt

SEQ ID NO: 57813 - DNA, 593 bp, Homo sapiens
  misc_feature 28: n = A,T,C or G
cgggcccccccctcgaggatcttctagnattaattaacgcgggctcctcaaacatcaggtcttgaatttccattaagaccttaaacttattcataattgctgatacgtccttgcattttaaatctaataccggagctatgtccttatcagtttctgttaactgctctcttttcatataggtgatattttcctttttctttgcaagtctagcaaattttgattgtacactagtagatacatcagacattgtggatatgttgtcaagactggattctgtttttaattcctacagaatgatttttgttcttacaggcctgctagacttcagaagttaaaaaaatcttaaaatacgtcaatctgaaatacaaaaaaatgaaaaattacttactaaagaattctcttgagaaacttggtaagaatatgagcttagttaagaaaactatgctgggtgcactccataataaattaataaaaagttcactagcaaaatgggtaagattagaaaattagaattcaaaatttataaattatcatgaaaattccctttacatagtgatttgaatgcaataaattaaccaaagagcagataacta

SEQ ID NO: 57814 - DNA, 457 bp, Homo sapiens
cgggccccccctcggaagtcttctagaattaattaacgcgggtcaataaatcttatccatacggaggccagactagagcaaatctaaaaccgtaattggtaaagaagcagtagtcactcattttaactgagagatggagatgtttgatattttgcgggtagcatagtgatcctgtatgtactgtacctaggcaaaattatggatcccttgttttgtctcactttattatggtctcaagtagccttgtctaaagttggtattctgtaatattatgtctaatagggagaataacatgggctagctgtgagtgccagacaacctctggatgtcaaaagttgctctttttaccttttttcatcaacaaatctatatacccagtaaatctggtcatgtataaagacaaatgaaagactgttcagataagcataggctcatgaattacattacccacatacct

SEQ ID NO: 57815 - DNA, 512 bp, Homo sapiens
  misc_feature 441: n = A,T,C or G
ttctagaattaattaacgcggggcacaaaggactggaatctccaaagagaagaggatgtagagattttgggaaaagcataatcaaaattataattgcttgaagtcatctttagccatgatattaattccttttgaaatttcaagtaatattagcaaagagcataaaatcctctggatcaccaaaaaggggtgggcttggtagcaggttaacaaagaaattctgattaagagcaggaaaattcagagtcaagactcctgagttcaatgttcatcttcctatataaactttggctctttaagacataatattctttattttcaacatcattattaatataaagcaggagttctcaaactttggtatctatcagaattgccttgtagagtctgttaaaagtgcaggtacccaggcctgacctagacctactgaatcagaatctntagttgtggggtctacatcttctctgttaagagaagtcaactaaacatcttttgactgttagtcatcaaaa

SEQ ID NO: 57816 - DNA, 515 bp, Homo sapiens
  misc_feature 27: n = A,T,C or G
cgggccccccctcgggagtcttctagnaattaattaacgcgggggagagaaagaaagacccaggctggtaatgatgcaggaaatggaccttctcctgtgttgctgacaaaagtgggaacgactacaacctttccatagagctttggcaagaggcatccaaagctatacgcatgtgcataccttttgacccaggatttctacgtccagaaattcatcttaaggaaataatcagaaatgtgattatatgcttacctgtaagaatattcatctgggccaggtgcagtggctcacgcctgtaatcccaccacctcgggagaccgaggtgggcagattacctgaggtcaggagtttgagactagcctggccaacattaaaaaaaaaaaaaagaatattcatctgctttataactgacatttttaacaatagaaataaatcaatataatagaaaaatttgagaaaaacttagtttcatcaatagggaattgtttaaaaaaaaaaaaaaaaagtaagagctc

SEQ ID NO: 57817 - DNA, 548 bp, Homo sapiens
  misc_feature 516: n = A,T,C or G
cgggccccccctcggagtacttctagaattaattaacgcgggggagaaaggctaaatctgacttcatctgtactcactttcactaagcattgaatggccttaccactcttctgcaagatggaggaagaccgcaaaacttagtgcccatcacactgaaggaagggatgtggttttttttcctgcttctgtactgctacctaactttgtgatttgctttggattttaatatttgtttctgttttagattcaagcccgtaagttttgaggtgacttcagctccattgtgaaatagatagttctcttcatatttcataactacatttcaataattctaaactttctacattgatttttagatacttatttttcaagcttggtttctcagctgatcagatgaatttattcaacttcaatacaaagaaagacaaacctattatagtttcaagtgagtagatattatactgtacaggacagctatttgaacacacacatcactgctttagaaataaaaccgcncatgtataaatgtatatgacctacattttata

SEQ ID NO: 57818 - DNA, 534 bp, Homo sapiens
ccgggccccccctcgaaatacttctagaattaattaacgcgggggtgaggagaaaatatttgtaatatgtatctgacatggacttatatcagattatagaataaagaactctgagaactcagtaataagacaaactacccaaatttttaaaaatggaaacaggttttaataaacatttcactaataaaaatatacaaatggctaatcaacacatgaaaatatgctcaatatcatcactcgtgatggaaacgcaagttaaaactgtaagaagatataccatacattcactaggatggttaaaattaaaacatctggcaataccaagagttaaagaagttggccagaaccctcatatgttgctagtgagagtgtgaaagtggtacaaccactttggaaaatagtggcagtttcttatgacattaaatttgtacttgtcatatgacccagtaattccaggtatttataggcatctacccaagagaaataatagcatatgtctaaacagagacttgcacctgaatattcataaagctt

SEQ ID NO: 57819 - DNA, 615 bp, Homo sapiens
  misc_feature 33, 57: n = A,T,C or G
ggtaccgggcccccccctcggggtacttctagnaattaattaacgccgggtcatggngaacagaacatagcacttggattaggggtttaggtatctttttttgttttgagacaaattctccctccgttggccaggctggagtgcagtggtaccattgtagctcactgcagccttgacctccactacagcaagtgatcttcccgccttagcctcccgagtagctgggactacagatgtgtgctaccacacccagctaatttttgtattttttgtagatacagggtttcaccgtgttgctcgggctggtctcaaactcctgagctcaagcaatctgcccacctcagcctcccaaagtgctgggattacaggcgtgagccactgtgcccagcccttacggatcttgaaagctcaaatttcttgtgagaaaggatgtttgtaagacaaatgtttctagtttttgtttttgagacggatctcactctgttgccctggctggagtgtaatggcgtgatctcggttcactgcaacctccacctcctgggttctagctgttttcctgccttggcctccaagtagctgggatacaggcaagtgccaccatgccaggctaatttt

SEQ ID NO: 57820 - DNA, 616 bp, Homo sapiens
  misc_feature 558: n = A,T,C or G
cccccctcgagagtcttctagaattaattaacgccggggaaataattaaagcacatgggatattttaggacagtaaaactattctttatgatatttaatggtggatacatgacacaatgcatttgagaaaacccatagaattttagagtataaagtgtgaaccttattatatgcaaatttaacagaaatcatttaaaggttgaaggatcccagtatggaatatagactgtgaccccctgccaaaaaaaaatctaattttgttacaaagctatgaaataacctcatcaacaaggaaaaaggtactaacttaggtgattttggaaatgagtgtgtctataagacaaaaggcagaaggaactatacctaagcactgttctatagttgataaagttatttcccacagggatataagttagtaattctaaaatcagtatatgtggaatataacaattacctaagtagatgtcaggtggtaaaagccagatttctcactggtgaaatggaaggtcatagataagcaaggggagaagtctggaacaatccatggggtaacagatntagagtggagacatcaatatgaaatcatgtttagcttaatatttatatggttggtaaa

SEQ ID NO: 57821 - DNA, 611 bp, Homo sapiens
  misc_feature 38: n = A,T,C or G
ctgggataccgggcccccccctcggaaatacttctagnattaattaacgcggggggggcatgtatacctctttgttgttgaattcatggcattctgggtggccaggggcattgtccagtattaaaagaacttctgagtaccttgttcatcataaacactcattaagtgttttaatatattaaaaaaagtcctttactggcaaggtactttctgactccaggaacaaaatatcaattgaaccaattctgaaaaagagttcttgtccagaccttcttgttgtacaaccaaaagactggcagctggtgtttaccttttcccttaaggcccagaggttagcagctttatagataaaggcaatcctaatcataaacctgactatatttgtagaaaactagtagagttagcctacccctttttgccttaaatcctggtgcttgattctcttccttaatagtatcctttgtggaaatttttccacaaattggccaagaatattttggtatttttttcttacagttccgagtacttagctcatagtaaacactcattaagtgttttaatgtataaagaagatacttaagtccttcctactttatctaattcgtaatgtg

SEQ ID NO: 57822 - DNA, 584 bp, Homo sapiens
cggggccccccctcggggtacttctagaattaattaacgcgggctgactgccatgttgtgtttagaaaatggatacatttctacagcaacttcctatcatctaaatatgttttaacttaaaactaattccaaataaacaagatcacttcttcaaagctgacagagctgaacaaatacaagttgtccattgagcaatgagggggttggggcaccaattctcctgtgcagtcaaaaatctgcatataacttttgactccccaatacttaactaatagtctcctgttgaccagaaccaataacataagcagtcaattaacaaacacaaaaatggacaagtatctacatatattttatgcattcataatgcatttttcttaattttttcaacatttctaggctgcatggttcatctaggagtttcttcaaattattgcaaatctccaaaaaatttccaacgtatttcttgaaaaacatctgtgcggccaggcacggtggctcatgcctgtaatcccggcactttgggaggccaaggcgggcagatcacaaagtcaagagttcgagaccatcgtggccagcgtgttgaa

SEQ ID NO: 57823 - DNA, 433 bp, Homo sapiens
  misc_feature 36: n = A,T,C or G
tgggtaccggggccccccctcgggaagtacttctanaattaattaacgcgggggtgtagagaaaaattataacccagcatactataacaaggtactaacccccttaccttctgcataatgaataatctagaaattcctctgctaggtgagcctaagctaagaccccatacaccacacgagcttacctacacaacaggtaggcagagcgcactcatctgtctatcgctaatcacgagatgatcatataggcagaggcgcactaagctaccgtgctctggatatcgctggttgacggagatacattcctagtccaacttgaaatgcgaccacataaccctctgaatgcccttgctaatatactcgtgagcccacagatgaacgagtctggcgacgctaagagggaacattgtaaagagagtggtgggcggacacc

SEQ ID NO: 57824 - DNA, 201 bp, Homo sapiens
gtcttctagaattaattaacgcgggggaacatgtttatcctgcttggttcacaatcaactggcaacaaacatccttgcgaaatcctgtaccaagcaagtgaactgcctttgtagtgtgatgatggcgtgctactctgtttattggtattggattttattgtggttgagacagaatcttgtcctgtggcccatgttagagtg

SEQ ID NO: 57825 - DNA, 591 bp, Homo sapiens
  misc_feature 22: n = A,T,C or G
cccccctcgaaagtcttctagnaataattaaagcgggggaggaccttaaagctaagctaccagtaagacaatgaataattcagaagagaacactattcttttactgactgagtgcccaagatgccaatttccatgaagtcttgatttatatatatgtacacatgttatgcacatacatgtttgttttctaacagttattttttaagcttttgagataattttagacttacagaagagttgtaaaagtagtagagttcttgtatactctgcacccaccttgcccttatgttaacatcttacgtaacaatagaacatttgtcaaaattaagaaattaaccttgatataatactaactaaagtagaaagtttaaaaggtagagattttagtcttttcactaatgtccttttactgttccaagacccagccttgcatttagctatcatgcctacgtcctgtcttccagtctgtgacagtgtatcataacaggggatacctgatgttgtaatgtatttctggtgttgttagccttgatcactatgctaaggtggtgtctgctaggattcgctactgtaaacttactgtgttttcct

SEQ ID NO: 57826 - DNA, 605 bp, Homo sapiens
  misc_feature 6, 39: n = A,T,C or G
actggngtaccgggcccccccctcggaaatacttctagnattaattaacgcgggatgccattttacttcatgcttcttgaaacaaaacacgcaggcacattttattcatctgtaatgcaaggactcatatattttgtgaagcacctccaatttggtttaactttatgtatattccttaacctctcatttctgcagtgctgttgtgctgccaccagatgtctgtgcagagtgcaggtcagttaacacattatcacttgcaagtgaattgttagtaccaggccaccagggctgaatttctctgtgaatgctactaaagaaacatggaacgacttctgagggactcgttaagaaggccttgcaattgatttttcatatgcatgttcatattaacaataacgtctactattcctcaatatagtttttagtctttgttgcagcaaaaactatgtgaggagtgtttgcccattaccttttacagtgaacatattttaacttatgaaggcggctccattaatgcatgacatcttcaggcaacagtacagaaaaataacagcaagaacctcacaaattcagtatgttctatttctttatgttgaacttggaaa

SEQ ID NO: 57827 - DNA, 361 bp, Homo sapiens
cgggccccccctcgagatacttctagaattaattaacgcgggtaagttagaagtgcaagacactgatttatatgctgttgatagacctggagagacaggaccatttactaggctgaaaaggtgatggcgatctggtatcttcctaaaaaagtatatcagggtcctaatccttttccagaaggcaaactaaggccagagcaagacaaggtctcctaggccacacaactagtcagtgacagaggagccagttcagtcctgtccttcaggtctgtgcctacaaaccaatacttgatccgagtattccaacctgggcaaaaacatcacaaaacacccaaccctgcattttaggaaaaaaaaaaaa

SEQ ID NO: 57828 - DNA, 420 bp, Homo sapiens
ccgggccccccctcggaagtcttctagaattaattaacgcggggagagggactcagtttcaggtctgagtccagggattcatccagtatctctggactactacaatatacatgcagaccatccaagccaacactgtcttgaatacttttaaagcttttaattttggacatttatttattatttatttatttattattttgagacggagtctccctctgtctcccaggctgcagtgcggtggcgcgatcttggctcactgcaacctctgcctccagtgttcaagtgattcagcctcccgagtagctgacataggaggatcacctgagcccaagaggttgaggctgcagtgagctgtgactgcaccattgcactccaacctgggtgacagagtgagacccccatttaaaaaaaaaaaaaaaa

SEQ ID NO: 57829 - DNA, 596 bp, Homo sapiens
cccccctcgagaagtcttctagaattaattaacgcgggggagagagagagagagctgcacagagagcaaactccagagatttgcagaagattcctcttgagtattcaacatagtatgcaactaatgttcatagggcatctacctgaggttagggggaactatacccaaaaggatagaaggaatagtgccttgcactcacataggactgaagaaagtgactatttctgccagtcagactggaaaaatctcatgattcactggaaattaggtaaattatccaaagaatttgactcagtggtggggaatgaacagccccatcctgagcactgttccaatcccacctaacaaatctcaaaggccaggtctgaaaggatcaaattgtttccaatgactgtaactgcatccaagaagaaaactcatgattgttgatagaaatacaaaaaatatccaacacaaaacaaggtaaaattcacaatatttggttttaaattttaaaatatcaggcatgaaatgaacaagaaaaagatggcccataatgacgcaaagaaaatcaatcagttgatatgacctagaattaacaaaggtgtagaattagc

SEQ ID NO: 57830 - DNA, 475 bp, Homo sapiens
ccgggccccccctcggaagtcttctagaattaattaacgcggggtagctgggctacaacttggatttatacaatttagggaaacataagacatcaatcaatacacgtaaaatgtatgcagcttcggtccagaaaggcagacaaccggaagtgggggcttccaggtcataggtgaattcaagaattttctggccaggcatagtggttcacacctataatcccagcacattgggaggcagaggcaggaggatcagttgagcccaggagttcaagaccagcctggcaacatagtgggacattgtctccacaaaaaataaaaaaattagtctggcgtggtggcatgtgactgtagtcccagctacttgggaggctatggtggtaggattgcttgagtctgggaagtcgagccaagatcatgccactgcactccagcctgggcaagagagtgagaccctgtctccaaaaaaaaaaaaaaa

SEQ ID NO: 57831 - DNA, 597 bp, Homo sapiens
  misc_feature 15: n = A,T,C or G
gggccccccctcggnagtcttctagaattaattaacgcgggcagtgtgagatttcatcatgctactcagaatggtgcacaatttaaaatttacagattgtttatttccagaatttttcatttcatttttttttttttttttttgagatggagtcttgctctgtctcccaggctagagtgcagtgatgtgatctcagctcactgcaacctctctgcctcctgtgttccagtgattctcccacctcagcctcccaagtagctggggttacaggtgtgcaccaccacgcccggctaattttttttttttttgagacagtctcgctctgtcacccaggctggagtgcaatggcatccacctcccgggttcaagcaattctcctgcctcagcctcccaaacagctgggattacaggcgtgtgccaccacgcccagctaattttttatattttcagtagagacagggtttcaccatgttggccaggctgatctcgaactcctgacatcaagtgatccgcctgcctcggcctcccaaagtgtagggattacaggcatgaaccatcactcctggccctcatttaaaaattttctaaccttgattg

SEQ ID NO: 57832 - DNA, 469 bp, Homo sapiens
  misc_feature 31: n = A,T,C or G
accgggcccccccctcgaaagtacttctagnattaattaacgcgggccctctgacatagcctacccaaatgagaaggaaccagaaaagcaattctagtaatacaacaaaacaaggctctttaacacccccaaaatatcacatgagttcaccagcaatggatctaaaccaagaagaaatatctgaattgccaggaaaagaattcagaaggttgattattaagctactcaaggaggtaccagagaaaggtgcaaaccaacctaaaaaattaaaaacataatgcatgatatgcacaaaaacatttccagagaagtagatatcataaataaaaaacaatgaaaccttctggaaatgaaagacacacttagggaaatgcaaaataggattgaacaagtagaagatagaactttacagctcaaagacaaagctttagaattatcccaatccaacaaagataaagaaaaaaagaat

SEQ ID NO: 57833 - DNA, 499 bp, Homo sapiens
cccccctcggaagtcttctagaattaattaacgcggggttatagctattgatattgatcatattactaacactgagaaaatgttaaaatatgcattaattccatttaaaagtaacaattatatacccatgacatgtttatataaaaagcacatttttaagacaaaccaaaagaaatgcaggtgagaagagtttcattgttttatatttttgcaaatctttttaatatctagcttcctagaagacagctcaattttcatatctgcttcaccattcactttgttgtggtatgctttttggatgaaggataagaaatttggcttcacacagaaatgtatttgaaaagggaggagccgggtgcggtggctcacgcctgtaatcccagcactttgggaggccgaggtgggtggatcagctgatgtcgagaccagcctgaccaaaatggagaaaccccgtccctactaaaaatacaaaatttgccagacgtggttgtgggcgcct

SEQ ID NO: 57834 - DNA, 635 bp, Homo sapiens
  misc_feature 28: n = A,T,C or G
cgggcccccccctcgaaagtcttctagnattaattaacgcgggaaatacttgcaatataaataaaaagggacaattactacccttaacatatatataaagccccctacattgaattaaactttaagatttgtgcattttactgtatgtaaacattaccataaaaaataaaaaggactataaacaaatattgaattctgttattgataagaatctgaaatagtatactgatacctgcaacttattctgaaatgcataaaaagaaggtggattgataaatgaataaaaggatggataggtgaaaagctatgtgataaaagtcaaaacagcaaaatgttatttataaattcttggtggtggacacacgggtgtttactatatatgcaattctgttaatttttctgtatgcttaaaaattcatcataaagtcttagaaaagaaccccaaaaaattaataagaaaatatgtacaattcctaagaacagtaaaaaaaagcaaatgaacaggcaatttgaaatttaaaaaaaaaaaacaaatggactgagagcaagaggctcaatgtcacctggaatcagcaaaaatacgtaaagttttataatatccacaaaaatatatatgagaaaaaatatatgtgtaa

SEQ ID NO: 57835 - DNA, 584 bp, Homo sapiens
  misc_feature 35, 437: n = A,T,C or G
gggtaccgcggccccccctcggaaatacttctagnaattaattaacgcgggagaagtggaatgtttaggggcctgtgtgaacgcaccaatggttcaaataaatgacaattactatgaggatttgacagctaaggatattgaagaaattattgatgagctcaaggctggcaaaatcccaaaaccagggccaaggagtggacgcttctcttgtgagccagctggaggtcttacctctttgactgaaccacccaagggacctggatttggtgtacaagcaggcctttaatttatattgaactgtaaatatgtcactagagaaataaaatatggacttccaatctacgtaaaaaaaaaaaaaaaaaaaaaaaaaaaaaaaaaaaaaaaaaaaaaaaaaaaaaaaaaaaaaaaaaaaaaaaaaaaagggaaaaaaaaaaaanggcggccccccccgggggggacccccaattccccctatagggagtggtttaacccccccccatgggccgtgttttaaaaacgtgggaatgggaaaaaccctggggtacccaaattaaatcgcttggaagaaaatccccttttcccca

SEQ ID NO: 57836 - DNA, 402 bp, Homo sapiens
  misc_feature 395: n = A,T,C or G
ctagaattaattaacgcgggggagttgtagctgtctccatggaataagttttccaacaggaagtcaacagtgtttgtcttagcttgggctgcaataacaaaatatcatagactgagtggcttaaacaagagacaattattttctcatagttcttgatgctggacatccaagaacctggcaaggactctcttcctggtgtgcaaaaagctggctaactttttgctgtgttcttcacacgacagagagagagagcgagagagagagcgagaaagatagagagagcgagctacagtcctatcagattcaagctctactcttatgacttcatttaatccttttttaaaaaaaatttccatagattattggggtagaggtggtattttgatatgtaagtnctttatt

SEQ ID NO: 57837 - DNA, 633 bp, Homo sapiens
  misc_feature 37: n = A,T,C or G
ctggggtaccgggcccccccctcggggtacttctagnattaattaacacgaggagggtgataacacagtatattatcaagttttcatccttaccagtagtctgaacagacttttagttcaaatcccatctatactacatatactagctctgtgaccttaggaaggtcatttaattattttgagccttagtttacttatctgtaaaatggagctaatgataacttgcagggttgttactattctaagacatgattccacacttcaaggagcatttattccagtaaggtgagacagacatattgacaagtaattgaaaaaataaaaagaaaaaaagaaaaatgagatggtgtggtaaagatggaagagtgatcagtggtgatataaaggagtgatctactctggctaaagagggactcaggaagactttacagaggagtattcaaaacgggccttgaagggtgaatagacaaggtacatggcacatatgaaacagcttgatgcatttgggaaaccacaatttgtttagaataattacaccagaaatatgggcaaatgacagaagaaactagagagggccaccgtgcccggcctagctttgtttttatatgaagcagttttattgttccctgaata

SEQ ID NO: 57838 - DNA, 588 bp, Homo sapiens
cccccctcggaagtcttctagaattaattaacgcggggtgcatgcatacaacatgtacatgtacacaatgtgtatacatgtatacaatgtgttaataatcaaatcagggtaattgggatttcacctcaaacatttatcatttgtgataagaacattccagatcttctcttcaagctatttggaaacatacaacaaattattgataactatagtcaccatactgtgctactgaacactagaacttattccttcttaactgtatttttgtacccgttaaccaacctgtcttcatcctaccttccccgctacctttcccagcctttagtaaccaccattctttctactctatacctctatgagatcaacttttgatatatgggatcatatatgggatgatatatgggatcatagctcccacatatgaatgagaacatgcagtttttgtcttcctgtgcctggcttatttaacttaatgtaatgtcctcctggctcatccatgttgttgcaaatgacaagatttcattattttttatggctgaatagtattccactgtatatataccaccaaatttttaccagtcatctgct

SEQ ID NO: 57839 - DNA, 436 bp, Homo sapiens
ccgggccccccctcggggtacttctagaattaattaacgcgggcaacaccaaagtgacagggatatagaattttgtcacaaagattttaaagtatccattataaaaacattttcaatgagcaatgacaactgtatgtgaaagaaatgaaaaaatagaatctctcagcagagaaacagaagatacaaagaagaacaaagtggaaattttaaaacagaagaatgcaataactgaaataaaaaaatgtatggactcagcagcagatggacgaaacagagaaatcggtaaacttgaagacagaataacagaaattacctaatctgaaaaacagagaatagactaaaacaaaacaaaacagaaaaccacaccagagtctcagggacctgtcagactacaacaaaagatctaatctcactggaatcccaaaaaaaaaaaaaa

SEQ ID NO: 57840 - DNA, 390 bp, Homo sapiens
ggccccccctcgagaagtcttctagaattaattaacgcggggtggggggaggtctgtaatgtgaaacaacttcttgtcttttttctcccactgatgtaaataacttttaatggccaaaccccagatttgtacttttttttttttttctaactgctaaaaccattctcttccacctggttttactgtaacatttggaaaaggaataaatgtcgtcccttttaaaagaaaaaaaaaaaaaaaaaaaaaaaaaaaaaaaaaaaaaaaaaaaaaaaaaaaaaaaaaaaaaaaaaaaaaaaaattttaaaaaaaaaaaaaaggcgccccccccccgggggggcccccaattcccccttaaaggaattattttaccccccccccttggcccttttt

SEQ ID NO: 57841 - DNA, 636 bp, Homo sapiens
  misc_feature 21, 32: n = A,T,C or G
gtaccgggcccccccctcggngatcttctagnattaattaacgcgggggttgcagctgcacaactaattcttattaaaatgtaagtctttgaaatgcaggtctacggaaagggatataaaggatttcattatcttttctcaaaactcacaatgaggattaaactcccacccttcccaagccataccactacttgtgcccttctctaccaagtcacacaccaaatataatgaagacagcagctcacccttaattatccaaataaaaacagccatgaaggagagagctgcacagtaatgaaccttcaggtctggcaaaagttattaaaaaatgacttctaatactcataatgtagtcacaggctacagctggatattcatacagtgatgtgattttagaaataatacttctaaagaataaatacttggaagaaaaaataggtactctgcaataacaatttcagaataatttcagaaacttcaagtcagaaaaacaagaacttcaagtaatttactcaaaatgtaaaatactttataagctattaattttgttgtagaacactcacacccctaaaattttcttgaaaaagcaggaaaaaatttaaagacaatttacattcctttccattttttactaga

SEQ ID NO: 57842 - DNA, 608 bp, Homo sapiens
  misc_feature 535: n = A,T,C or G
ccccccctcggggtacttctagaattaattaacgcgggtctgaccctgagataacccagatgttggcattagggaaaaaaggattttaaaacagctgttataactgttacaactatgctcaaggacataaagaaaaatgttcgccaagtaaataaaaacagaaaatctcagcagagaaatagactgtttaaaaaagaaccaaatgaaattgtagaattgaaaactaaaattacctgaaatgaaatattcactggatggagataacataatgtgctgtgtagaaaattccatagaccctaccagaaaaaaaaacctactagaactaatatattccaggatacaagctcaatattttaaaaatcaattctattttatttcctagcaataagtactcaggacttaaaattttaaaaaagacataatttacaatagcaacccaaactatgaaacacttagagataagtctaataaaacatgtgacatgtgtaactgaaaaccataaaacatggctgagagaaactgaagagcacctcanaaaatgaaggaggttcatgggtttctgtttcatgggtagaaagactcaatattgctaagatgtcaattctctc

SEQ ID NO: 57843 - DNA, 612 bp, Homo sapiens
  misc_feature 37: n = A,T,C or G
ctgggttaccgggcccccccctcggggatcttctagnattaattaacgcggggggaacaaggaaagattgaaatactgtaacagaccagaggaaactaaggaaacttaattgatgactgaatgcagtgtgctgtgttgaactggatcctagagaaaatagacattagtggaaaaactactgaaatatgaatagtctcaagtttaatagtagtgtaccattattactttcttagttttgacaaatgtaccatggttatgcaagatgctaacaatacagaaaaataaggggtatttgggacctccctgtattatccttatgcccttacttgaaagttgtttcagcaatagaagtttatttaaaatattgtgaagggcctgagtatttttaaatcaactgcagtgactctcttttgtgtatttgtgtacagatgagtttttctgcatcgaattttatctcctttccttgcagaagaaagagaattagccctttacagagataacagttgcctaagccagctcttttctcctctttttgatgttcttctttttctctcagtttgaaaattgtaggttatttgagtttttaaaatgtctattgctacatacacattc

SEQ ID NO: 57844 - DNA, 615 bp, Homo sapiens
ccccccctcggaagtcttctagaattaattaacgcgggtaggtataaaaacaaataagaattcatgtatatcaataattataatattcttattaaaaatccacagtagaaaagtacatttgtaatttaaaaaatgagtcccatgaggcttagccatggcaattatatcctttaaagatttctttcaaaaaaccagtctgctttcacaaaatatttaaaagctattcagcactttaactgaatctctctaatggcatcaaagaggatccagcacaagggcccacaagcaacacttattgaaacctgttcccattacttaatctcttataccacatcatccaactccatatgctgaatttccaactacaattctccaacactctaccaactttggctttttttttttctaattccctttctttctgtcactattctatattaatctgccttcttaataaatatcaacatttccagattggaatacaattttaaaaacttctttagtactgcctgtctttactgtttttcctctattctgtgtcaaacaagtccagaaaccaagttagaacagaaagaattatccttagagaaagctaaaggacaagcagtttcaact

SEQ ID NO: 57845 - DNA, 500 bp, Homo sapiens
gggccccccctcgggggtacttctagaattaattaacgcggggaagggcagagggtcacagttaacatttgttgagcacctgctatgttccaagtgctttgaatatatcatttcatttaattcttacaacagtcctacaaactaagaagtggtatccttgtttcacaaaactgagtcgtagaaaagtaatttgcccaaggtcacacaactaataaataagctggtagtccgagttgtttaaaaccccatgtatagtgccttctacatagtagatacttgagtatttattaaatgaattgaacttgaattacacactgatttttattttttagccagagaactgttgagctactgcagtaggcaaagcccaagaggcaggtttgaacctaaatccagatttcagtaattccatgtttagagaaccagggaattttctttgattgaacccccgggttcaagcaattctcctgcctcagaaaaaaaaaaaaaaaaaaagaaaa

SEQ ID NO: 57846 - DNA, 544 bp, Homo sapiens
ccgggccccccctcggggtacttctagaattaattaacgcgggaattattatttataaagtaaaaaaaaaaaaaaaaagaagtatttcatttgtggccacttgtagtgggccttccataatgaaaagagtcatcttttactgaatctagtagttactgaatatacttcaatagataatcagaaattcaataaaaatccagttactactttttttctttttttttttttggtaaagagacagagtcttggccaagtgtagtgcctcatgcctgtaatcccagcactttagaaggccgaggcaggggggaatcacctaaggtcatgactttgagactagcctgaccaacatggtgaaacactgtctctactcaaaatataaaattagccaggcgtggtggcacatgcctgtaatcccagctacttgggagactgaagcagaagaatcgcttgaacctgggaggcagaggttgcagtgagccgagattgtgccattgcaatccagcctgggcaacaaaagtgaaactgcatctcaaaaaaaaaaaaa

SEQ ID NO: 57847 - DNA, 388 bp, Homo sapiens
  misc_feature 22, 39, 361, 363, 364, 366: n = A,T,C or G
ccccccctcggggtacttctanaattaattaacacgggnaatacaaacagaagaaaaaaaaaagcaatgaaaggacacaaaatgtcactggagaagaaagtgttaagaaaaagcaatagaactaattatgaagcccctcctttatgccagtcaatgtgctctaccccttctatctcacatctcacaataaccctgtaaagttcccctattttttagatggggaaactgaggcttagaagttaaattatttgcctaaggccatacagctaagaagcagcagagttagtatgtaaacaccaatcagcacaactactccaaagcccaagttctcctttaaacttacagtggaagagggaagcanannanaaaaaaaaaaaaaaaaaaaaaa

SEQ ID NO: 57848 - DNA, 613 bp, Homo sapiens
ccgggccccccctcggaagtcttctagaattaattaacgcgggatatagtgaaacataaatttacagattcaaaacatctcagtgaacccccatcattgtaaatccaaagaaaacaatgcctaggcatatcatagttgtattggacagtgaccttctaaaactgatgtcctttctggaacttcagaatgtgacattatttggaaatatggttgctgcagatgtaatcaagttaagatgacatcatattggattagagtgaaccttaatccattatgactagtgtcttcataataagaagggaagatgagacagagacatgagacacaatgtcatgtgatgatagaggtagagattggactgatgcagctgaaagccaggaacaccaaaatatgatcatcactaccaaaagatggaagaggtaaggaaggattctattcagagtctcagagggaagacaccttgattttggacttctagtttttggaactgtgaaaaaataaatctctgttgtttaaagcggcccagttttgagtattctgtcacagcataactagaaaattaatgcactcatctaaacacttaaaccaaagataaaatcttgaaagcagctga

SEQ ID NO: 57849 - DNA, 206 bp, Homo sapiens
ccccctcgaaaatacttctagaattaattaacgcggggaaagctgagcacgtgaagctcgctggttctgtgcgaaggtattcctggagctgaataaagggtgttgctgtcaaggctgaaaaaaaaaaaaaaaaaaaaaaaaaaaaaaaaaaaaaaaaagaaaaaaaaaaaaaaaaaaaaaaaaaaaaaaaaaaaaaaaaaaaaaaa

SEQ ID NO: 57850 - DNA, 608 bp, Homo sapiens
ctggggtaccgggcccccccctcggaagtcttctagaattaattaacgcggggatggaagccacatttggtcaaaaatctgaaagagcttggaaatacattcttccccataacctccatatgacagcccagcccaaaatcaaaacattggttttggccttgtaagaccctaaaagaagaaaactcaccctgacttccaagttatagaactatgagataataaataggtgttgtccctaaattagtggtaaacttgttacacagtagtagaaaatgaatacagtgataaagggctagaaataagcatggcttggacttctcagtaacgaagctgtagtttagaagaaaatgtaagttgcttttgaaattccgaggaaaagcaatttcaaatccaaaactatctatccagtcaaactatcaaacaaatgtgaggatataccaagatattctgaagacacagtattgtcattatgaagcctttctgaggaggttactagaagatgtgctcctctacaaagaaagtaactaaaaaagaagaaatcatgcagttcaagaaacaacagatcctacttatagaagaagtgaaaagagttcccatgatgatggctg

SEQ ID NO: 57851 - DNA, 460 bp, Homo sapiens
cccctcgggggtacttctagaattaattaacgcgggcatgttgacctctttagaatgtcagaataatttttatgcatattaagaatttggggtttccaactttatttcctttttggctaaatgatagtttaatatttttttccttaattatatttcactggaaattaaatagctattaaagtagatcatctgcaaacattttatcaatggctattcagaacttgagaaataatactttataacacattaatttggtcacacaatgtatcctagctttggaaaatctgtgaaacaatttttagaaaaagtaacagacaggtagcctttctcctttgtacacagtatctttctatccagttttgtatcatggtgaaggcattttaagctataattagagatctaaatttaagttaaaataccatttgtgtatgttgttaacaatacaaataactcagctggg

SEQ ID NO: 57852 - DNA, 279 bp, Homo sapiens
ccgggccccccctcggaagtcttctagaattaattaacgcggggatgctattaaaaaaagaaaaaagaagagaacaaaaaagtcctccagtaaatttaaaatatggtagtcaaggctgggcacggtggctcatacgtgtaatcccaggcctttgggaggccaaggtgggaggatcacttgagctgaggagttccagaccattccaaagcaaaaacaaaaggattttgagatcagtgtggacaacttagcaaaacaccatctctagaaaaaaaaaaaaaa

SEQ ID NO: 57853 - DNA, 624 bp, Homo sapiens
  misc_feature 14, 27: n = A,T,C or G
gggccccccctcgngaatacttctagnattaattaacgcggggggtacatccttaaccttggcaaaataaactttctaaattaactaagacctgtctcagatattttgcattcagaattggtaacaacaaagggattctgagtggaggtatctctgagctttgacaaagttcctatgggtgtgtggtaccagcttgagcttctttatggctcaaaccaataggaaaatttgctgaggcctggaagctctccctctggagaatccctgatctcccaaaatttggttgagatctaaagtttaactccttttattttttggagttttactttcttccaacagggaaggcaagtttttctgcttccatgatgatttcaaacaggtaattcctttctggactttgagctcactttcaacaaggaagagagtttgagttttttctgcacctcagatggtagagagcagtcttcagcctgagatccatccctagataagtagctgaattggaattttgtcttggctaaagttaagattaacaacaagctggtcttaatttctccttaccattagagagctcagtaatcatataaactgtgcaataatctgcttgttttgcttaaccatttc

SEQ ID NO: 57854 - DNA, 602 bp, Homo sapiens
cgggcccccccctcgaaagtcttctagaattaattaagtaaatgtaaatgggataagtgtttataaactaatcttatatgccatttgaaatcttaaagttatattatgttaaattaattggtaaattttaaatgtctaggttatttctaaataagatttaaaaacaatgaaaacaaattgctgaacatatacataattttgttcttggcttcttaaattttatagaaagattaaatatacttgggtttactaatatacataaaaatgttatagggaaacatgtttctaaatgtcataaaatggttgtcatctataaaatactgatatatgacagacaattcaagacttcttccttctaagttttcactaaaatttagggttactaagagttatatgtgtttatacataaaatgtgccaaaagaataagatgtgtgttttaatgagaaaggcataaatatgttcttgattaagaaaaaataattttgttgaatttggaggttatttagaggttgtttcaaaatatcaaacaaaacaaaaaggaaccagtaagtaggagaaggagatgtgagaaaagttatagatatgaagatgtatttctgac

SEQ ID NO: 57855 - DNA, 335 bp, Homo sapiens
  misc_feature 40: n = A,T,C or G
cccccctcggagtacttctataattaattaacgcgggggnagaaaaaaaaaaaaaaaaaaaaaaaaaaaaaaaaaaaaaaaaaaaaaaaaaaaaaaaaaaaaataaaataaaaaaaaaataaaaaaatgagcatcataccaaatgggggatgtcaaatccccctggtataaaaaattttttgcgcgccccccccggggggtttccccctttcccccttttggggattttttttcccccccctctttgccctttttttaaacccctttttgtggaaaaacccttgtgcttccaatttttttcctttttgcccttttccccttttgccaagtggggt

SEQ ID NO: 57856 - DNA, 486 bp, Homo sapiens
  misc_feature 11, 16: n = A,T,C or G
ttaacgcgggnacagnaaaaagtggggggaaaaagaacaaggggaagaggcagggtaggggagaaggcagaataatcctcaaggagtataaaagaatactactaaattaaatcgagtagaaaatgtaaaaataatatgtcataaataagatttatgctagtaatttcaagatggttcaatattttaaaaatctattaatgtattaatacacatgagaaggtcaaaggagatgacacataaaaccatttcccaatagtcactgaagaacaatgttaatcaggttgagaagcagaaatttcctagcacagttgttggagaattaagttggttaagtccacaatccttcatctgaagttctaaacactgttttttgttttgtgtttgtttttgttttttggtaattcattcgaagacaaagctgtgctgacttaaactaataaataaatggtagaatgaagaaaaaaaaaaaaaaaagcggccgccacc

SEQ ID NO: 57857 - DNA, 216 bp, Homo sapiens
ggtacacgggccccccctcgaaatacttctagaattaattaacgcgggggagagacacagatttttacactaatatatggacctagcttgaggcaatttcaatcccctgcactaagcaagtaataataaaagttgagttttccacaaaaaaaaaaaaaaaaaaaaaaaaaaaaaaaaaaaaaaaaaaaaaaaaaaaaattaaaaaaaaaaaaaaaa

SEQ ID NO: 57858 - DNA, 507 bp, Homo sapiens
  misc_feature 13: n = A,T,C or G
ggccccccctcgnaaatacttctagaaataattaacgcggggtgaatattttatactgtaagtgagcaatcagagtataatgtttatggtgacaaaattaaaggctttcttatatgtttaaaaaaaaaaaaaaaaaaaaaaaaaaaaaaaaaaaaaaaaaaaaaaaaaaaaaaaaaaaaaaaaaaaaaaaaaaaaaaaaaaaaaaattaaaaacccaaaaaaaacccccccccccccggggggaacccccaatcccccctaaaggaagcctattaccccccccccacggcccgccttttacaaacctcgaaccggaaaaaccccggccttccccaaattaaatcccttggaaaaaaacccccttttccccagtgggctaaaaacaaaaaagcccccccccaacccccttcccaaaattttcccccccctatatgggcaaaggaaatttgaacccttaatttttttttaaaaacccccgtaaaatttttgaaaaaacacccatttttt

SEQ ID NO: 57859 - DNA, 612 bp, Homo sapiens
  misc_feature 24: n = A,T,C or G
gccccccctcggggtacttctagnaattaattaacgcgggaaatataaagaaaacagcagaaataaataaaattgaaaacaagaaatagagaaaattgatgaaactgaaacttgttttttgaaagtttttttgtaaatgacaaatatctagtgagaatgtcaaaaggagagagaaaagacacaaattagcactcaggaagaaaataggtaccactacaaaccctgaagatatcaaaagaataaaagaatactgtgaacaattacacacacataaattcgacatagataaaacagaccattttctcaaaacacacaatctaccacaactcatgcaaagtgaaatcaataatgtgaataggctcatgacagttaaataaattgaattaagaaattttaaactcttcaaaaaggcattcccaggcccaaatggtttcacaggagaatacgaccaaatgtttaaattaaaataacaccaattctacacaatttcttctggaaaacagatgagagggcaacatggcccaatcaattcattttgtgaagccagtgtcacccttattccaagacagtacagaaaatgaaaactgcagaccaatattcttcgtaaatata

SEQ ID NO: 57860 - DNA, 501 bp, Homo sapiens
  misc_feature 16, 29: n = A,T,C or G
ccgggccccccctcgnaggtacttctagnattaattaacgcgggggatattataataaagaaccaaacagaaatcgtagagctgaataattcatttaatgaaattaaaaatacaattgagaacttcgatagaccagatcaagcaaaagaaataatttctggacttgaagacaggccttttaaaataattcagtcagatcaaaaaaaaggaagaataaatttaaaagaataaagaaagcctaagggacttacgggacaccattaagtgaatgaatatactcattatcggaattctagaaggaaaagagatgagaaaaggaatagaaaacctatttaacaaataacagctaaaaactttccaagtgttggaagatatatacacatccagaaccaggaagctcaaaatccccaaataaattcaatccaaaaaggtattctctgaggcacgttatagtcaaactgtcaaaagtcaaagacagataattccaaaaaaaaaaaaaaa

SEQ ID NO: 57861 - DNA, 442 bp, Homo sapiens
ccgggccccccctcggaagtcttctagaattaattaacgcggggaagtagatcttagacaaggaatattactggggaaaaagggacattttgtaataataaagatatcactttattaagaggacattccagtcctaaacgtttctgcacctaatgacagagcctcacatcataagaagcaaaacttgatagagctacaaagaaaaagagacaagtccacaactacagttagatatttcaacactctgctcccagtaactgatagaacaagtagagaaaattggaaagagtatagaagacttgaacaaactatcatctaacatgatttgcttgaatatttctctcatcaacagaaaatacacaccaagaacataacccagaagagaccagatgctgagccataagacaaatcctaatgaaataaagaggattgaaatcatgtg

SEQ ID NO: 57862 - DNA, 566 bp, Homo sapiens
cgggccccccctcggaagtcttctagaattaattaacgcgggtgcccctttggtttactggtctccctcagtgatgctcacactttcctaaatagtcctcagttaccccatttaagtgtgctttcagtttcttgtatgaactctaactaatatactatcctagagaaatactcagaatttagaaaaacatacaaagatgttcagtattgcaatatttagaatagaaaaagctctgaaactaagtgcctagtatattaccatgaatccatgatagaaaaaaatacacaaatatgtaaatgttcactgccttttctgtctcctaccaccaataaccccacctctatcccaggaaaattctggtgaagtctctcccttgactttcctgtcctcgaatatgccccctcaggatgtgttactgagttcaaaaagggggagagggggaggggtttgtatttaaagaagtaaaataaataggttgatttacatagaaggcaggcaagtgtgcctggaaaaagagaaaacattattccatgagaggaatatgagaaccaaaaaaaaaaaaaaaa

SEQ ID NO: 57863 - DNA, 454 bp, Homo sapiens
ccgggccccccctcgaaagtcttctagaattaattaacgcgggtacactatagaatatatatttggtgtactttcatattttatgtacagaataaaatatatatttgatgtaatttcatgttttatgtacagtatataatacatgctttgggtactttgatattttttgtacagtatagaatatataccttgggtacattgatattttatgtacagtatatagtttgagtactttgatattttatgtacagtttgttaaaaatgtttgggtgctttcatattttatgtacagtatataatacatactttggtcactttgatatcttatgtacagtatataatacatactttggatactctgatattttatgtacagggtataatacataatttgtgtactttgatattttatgtacagtatataatacatacgttgggggaaaaaaaaaaaaaa

SEQ ID NO: 57864 - DNA, 268 bp, Homo sapiens
gggccccccctcgaaatacttctagaattaattaacgcgggggaaaacagtggtctgctgtgaaaggccagctctcggcagcccctgtggtttcagcgctgccgctctgtgtcattcaagttgtgcacattgtttttcttctgacttccagaaataaaagtgtttccatgggaaaaaaaaaaaaaaaaaaaaaaaaaaaaaaaaaaaaaaaaaaaaaaaaaaaaaaaaaaaaaaaaaaaaaaaaaaagaacaaaaaaaaaaaagaatt

SEQ ID NO: 57865 - DNA, 634 bp, Homo sapiens
  misc_feature 552, 554: n = A,T,C or G
gggccccccctcgagagtacttctagaattaattaacgcgggtggagtgcttgaaaggggatcattctccttgttttctcctcattcttagattattattttctcattttttttcttaaaataactgagctgtggcctagcgtttttgtgtggtgatgtgtgctgcttgcactcaagactccacagtgtgttaccattgagtcattttcaccctcttaagtgtttcagtttctctctccagaggtctacgacctgtgagaggactcaaaacgccaggtgaccagcccttatatgcatttcctggatgagcctttttaaaaaataatttttgttgggtgtttccctgtagggctgctgcacaggggttcaacccccctaaccccttgcccagatacacccacaaggcctctggtcactcagctgagtcaagtatgtactacagttaattttgtgtagtttaatactgcctttacatttgtttatatttttctgaacttcaaattgcaccatgtatggtgtgtgtttgcttgtgtcagttttgataaataactntntatattttgttatatgttatacgctcatgacataactttttcttatttttttgttatctctaggctaagtgggtcatctg

SEQ ID NO: 57866 - DNA, 136 bp, Homo sapiens
aacgcggggtctacttcctaagcttatttgatcctgaccccctacctgcaagtggcttgtcatcgtaactcttcttgtaatgtgacttgctttgtggaacttatttcattctttattgctttgtaaatagtttttt

SEQ ID NO: 57867 - DNA, 631 bp, Homo sapiens
cgggccccccctcggggtacttctagaattaattaacgcgggaggtggggaagagaaagaaagggtggggggaagagaaagaaagggtggagtgaagaaatatctagaattgcaattctaattcactagacatggttgttttgatgatgattgtcaataacattatttcctaaactctcagaaggaaggatgagtttatacttcttacgtatgagagaagtgaataggaaaaccaccaccctgcctaaatgacaaaattacatacaacacttcagtgtgcccttgaactacagtaagtactcaagaacatgtttcttccatggaacttagctctaagagtggctacaaagatgtatgtaaatacctgtaaaacaaagttggaaattctcttgatctgcattatctattactgtatatggctgttaagcactgaaatgtagctagttcaaattcagatgtgctattaaagtgtaaaatacattttgaaggcacagtacaaattttaaaaaggatataaaatgtctcattattagtttttatattgattatgttgaaataatactatttggggtatgctgggttaaataaattatactattaacatttcatggttcctttttttgtatggctt

SEQ ID NO: 57868 - DNA, 348 bp, Homo sapiens
cggggccccccctcggaatacttctagaattaattaacgcggggtggggggagggatagcattaggagatatacctaatgctacgtgacgagttaatgggtgcagcacaccaacatggcgcaggtacacatatgtaacaaacctgcacgttgtgcacatgtaccctaaaacttaaagtaaaataacaataaaatgaaaaaaaaagaaaaaaaagagaaatatttatgaatgtaaatgtttattgtccatttttaactaataagcaagcttactaaaaactgcacttcacacttagcttaatgtttgagggaattaacttcataaataaaaactaaaaaaaaaaaaaaa

SEQ ID NO: 57869 - DNA, 559 bp, Homo sapiens
ccccccttcgaaagtcttctagaattaattaacgcggggattgataaaactgtgctgaaatggggaataaagtttactagctaaatgttgtggtccctcaggttttctcttgaaatcagccctcaaactggcagccagtttatacacttcatggaggaaagtggaagatggaaaaaggaagaaaggcagaaaggcagacacagcaaagcttcctcagtgaacggccagcctagagtaaatggaggccgagtcagcacaccagccacgtgcccagagcttcaaatggttttagtgcctcgctcttaagtatgaataagaattaacacttttaaggaaatattctaaaaataaagacaggaaaccccaaaaatgaagaaaaaaaaaacttggaaacacaaaagatgatgcttgaagaagaaacttaaaaaaaaaattctttcactaataatagctcttaagttaaaaagatggtagcgaaaatgaaaaccaaaacttaacagaagggtggaaacctgaggtgaggtttcctcccagaagataaaacaaaaaaaaaaaaaaa

SEQ ID NO: 57870 - DNA, 534 bp, Homo sapiens
ccgggccccccctcggggtacttctagaattaattaacgcgggttttcagtgcaggaggcaagtaggaaggaacagagttgagaaaggtaaaaatatacatatgccatacaacttgagattaaggaaagagaaaacatataaaagggaaggtaattttctgagatggaataaactgagttagatttattttaatttatttaattagacagcaagcatcctgcctcgccaacagagggcgcctacggcccagtacagctactgccctgataatcacagtttaggggcctcattcaatatgaaggggcctcattcaatatgaaacctaactgtgttcgatgtataacttggaagggctctgtgtttagtaaaactaagtagtcaataacatttcaaagcagtgcgttaccaaaggcgaagggatagattaaaaaaaaaaaaaaaaaagtaatacctacctttgttgtttgggtttgatccgattcccctcaaggacaatatttatcagccaataactaatacactcaagttgaatc

SEQ ID NO: 57871 - DNA, 388 bp, Homo sapiens
  misc_feature 17, 45: n = A,T,C or G
cgggcccccccctcggngtacttctagaattaattaacgcggggngaaaaaaaaaaaaaaaaaaaaaaaaaaaaaaaaaaaaaaaaaaaaaaaaaaaaaaaaaaaaaaaaaaaaaaaaaaaaaaaaaaaaaaaaaaaaaaaaaaaaagggggggcgccccccgggggggggcccccttttgtcctttttttggtccctttttttcccccccccccccccccccttttggcccccccttgccggggcatacccctgtgttttttcccccccccttccccgggggggtttttccccctttcggggggggggcccccccggtcccccccccccctttaggggcggaccaaaatgggttttggggggggggggattgccaataaaccccccc

SEQ ID NO: 57872 - DNA, 577 bp, Homo sapiens
  misc_feature 10: n = A,T,C or G
cccccctcgngggtacttctagaattaattaacgcgggccagcatagctgttcttcagggattatctcaagctatgaaaatgaaagggttgttttaaaatttatatgaagatgttgagtgaaccctgatatatagtttagattctagattttgctgcaacgaacagaaaacctgactcattcacaatgtcttaaacaagtaaacggttattttccttttataccaagaagtccagaggtgggcattctagggttggtcagtggctcagagatgctatcagagacccatggtgctgctgcctttccattcagccatccttagtgatcttgtccctttgaagcctcacgatggctgctctccagtcagcattgcatctgctttccaggcaggaaggaggagaagggcagatggcaaaaggcacgtaccagctgtgcctgttctctttcaaagagcttcctggaagctcagttcagtgacttccgcttacatgtcattaaccaaaactgtgtcacattgccacccgtagctggagacaaggctgggaaatgtagttttggccgggcacgttgtcaccctg

SEQ ID NO: 57873 - DNA, 447 bp, Homo sapiens
ccgggccccccctcgaaagtcttctagaattaattaacgcgggacacacacacacacacacacacaccctaaattttgtggcaatgtagaattgatgctctttttgatgcttttctttcccactgtgtaatattgttaatacacattttgaaatgatcttgaaagaaggtaataactgccattaaatcactcacattgatggatatataaaagtggataaaatagcctgttaaagaaaaaatggaaatctttgcctcttttcagcacccccatgtggccatcagagaaaaaggtaagcgttgttgctaattacagataaattatgggtcccctatatcagtaccatgctgtgtttatttgatacgttagcaaatgccatattaacaaactaagagaaagttttttattttgcttacattttaatagagtatccaaaaaaaaaaaaaa

SEQ ID NO: 57874 - DNA, 448 bp, Homo sapiens
ctgggtaccgccccccccccggggcgtacttctagaattaattaacgcgggcattctgcttgttgctgcacttgctcccccaataacttaaggtttattaaattttttaaaagattgaaccctgcttacgaaatctaaaaattaccctcaaaacccaaatctaaaaaattttgcccttatgggggagatagtgaaagatataggggcaaaaattttttttgaagatataataacagaaaccttcccaaccctacaaaaaaatttcatttttcaagttcaaaagggttataaaacacaaagcaggtttatgccaaaaaaaactacctcagggcttttataatcacccttccaaaagtcaaagatattgaagggatctgaaacgcggcaggagaaaagaaagaccatttttttttttgtgggggtccattctgtcttcaccaaacttttc

SEQ ID NO: 57875 - DNA, 635 bp, Homo sapiens
cgggccccccctcggaagtcttctagaattaattaacgcgggatctccattcttaggttgagataaaaacagaactttaaaaaaatatatatatacctctcaaatacatttactacaaaatgatattttataaacatataaatgcattattaatatattttatttatattcaccctttataaaatttatatctttttagcttagagacactaactttataaattgtaaatatttattaggacagcatttgtgggaaataaagagtacaaatatttcgataaactattttttagaataagatgttaattcatacacataggacatatacatgtagaagaaaaaattgcacattaaaaatacattcttttaaaattaatagtccatattcttaatggcagacatatttttcacattaaatcttttatttatcttgctcagttttttatttttatttttctcattattttcatgtacctattactttttttggtatagtagaaagtatattttgcaggattggcgttgaagcatatcttcaccatttgctatatgtgtaattctggacaatttacttggtctatttgtgtcccacattaaggacagagataatggaactctttatatagttactcttt

SEQ ID NO: 57876 - DNA, 547 bp, Homo sapiens
  misc_feature 28: n = A,T,C or G
cgggcccccccctcggagtacttctagnattaattaacgccgggggaaaaaaaaaaaaaaaaaaaaaaaaaaaaaaaaaaaaaaaaaaaaaaaaaaaaaaaaaaaaaaaaaaaaaaaaaaaaaaaaaaaaaaaaaaaaaaaaaaaaaaaaaaaaaaaaaaaaaaaaaaaaacataattttttaaaaaataattaacccccccccccccccgggggggccccccttccccccctttgggggggtttttccccccccccttgggcccttttttttcccctcgggggggggggaacccccggcctcccccccttttttccccctggggcccttcccctttttcccggggggggtttttagaaaggggccccccccctttcccctttccaaattttgccccccccggggggggggggggatttttccccccttttttttttttaaaccccccccttttttttttggaaacaccctttttttttacccccggggcgcggtcggggaactcccctttttaacccaaaaattcccccccggggggggggggggg

SEQ ID NO: 57877 - DNA, 477 bp, Homo sapiens
  misc_feature 34, 341, 401, 402, 403, 404, 412, 413, 414, 415, 416: n = A,T,C or G
gggtaccgggcccccccctcgaaatacttctagnaattaattaacgcgggggggaagctcctggaagcctgaagcaggcagggccggtggacttcgtcggatgaagagtgatcctccttccttccctggcccttggctgtgacacaagatcctcctgcagggctaggcggattgttctggatttccttttgtttttccttttagttttccatcttttccctccctggtgctcattggaatctgagtagagtctgggggagggtccccaccttcctgtacctcctccccacagcttgcttttgttgtaccgtctttcaataaaaagaagctgtttggtccanaaaaaaaaaaaaaaaaaaaaaaaaaaaaaaaaaaaaaaaaaaaaaaaaaaaaaaaaaaannnnaaaaaaannnnnaccccggccccccccccgggggaccccaatttccccctttagggaggcctttaaccccccc

SEQ ID NO: 57878 - DNA, 526 bp, Homo sapiens
cccccctcgagagtcttctagaattaattaacgcggggaatcagaattcattttccataatgaactggccatcatgttaagcataagaaaatcactatcaaagagaattcctacagaaaccaatttggtcaacagattttcccttgttagaccagaaaattaatactgaccttactatgcatatggcatttactattaaaaaaaaaaaagtagtaaccaaggccaagataaacaacctgatacattaaatacatgtgtaataaggagaagattaaatgatttttaatctttaatttttaaagaaaaccctaaaattttagcaataccaccacagctcttacttaaaaagtgctctttacaaaaaataactaagcatatcacacgagaatgaaactcaagtttttccatgtttagttgttttgctagtgactaataaacttctgatcaagacatttaaacccctaatcatttaatcttctataaactcaagattttaaaagtatctaaaactccccaaaaaaaaaaa

SEQ ID NO: 57879 - DNA, 418 bp, Homo sapiens
  misc_feature 16, 400: n = A,T,C or G
ccgggccccccctcgngggtacttctagaattaattaacgcggggtgggggtggtcagacacttttgttagaaccatgtgaatggcattgttttttctgtattgcaaattagtatttctaccactctccccaggcctacacgcccagacacacacatacccaaccaaaaaaatctcccaagctcctctcttaggtatgtttccttattattcagtttttctgggaacagctgattgcataagaatatagaaccacctggaaggtgttaaatagaatctctaagaaattaggaataatttggatttgattagaatgaaagttttaaaaatcaagaatgccagtgagcgtttgtcatataaaactatctatagatactattggtactgatcctgggttgatntaataaatctagaaatga

SEQ ID NO: 57880 - DNA, 335 bp, Homo sapiens
gccccccctcggagtacttctagaattaattaacgcggggaatgggccctcggccacaggagggattaacaaatctggcaaaagtaacctggtcctcgcgcctgaggaagatggagaccctttatgacatctgtattgaaacctttctattccctgacacaacctcttttgccactggtaactggaatccaatgtagactcgcagctgatatacatccattaacagacttgtgcaattttatggtaataaatttaaatgttggtaaaatgaatcaattcctagaagacatcaaacatcaacttaccaaaactgactctggaagagacagaaaatc

SEQ ID NO: 57881 - DNA, 523 bp, Homo sapiens
  misc_feature 29: n = A,T,C or G
ccgggcccccccctcgaaagtcttctagnaattaattaacgcgggctgtttatgtggattatatctgtcaatatttgctgtattagaatttttttaagaagaaaataaatcatactgtatattaattcatttgatatcaatatatttattacgtgctatcatgaataacatgtttttttatgagtgataactgtattttttcaaaataagataattgtggccaggcagggtggctcacacctgtaatcccagcactttgggaggccgaggcgggtggatcactgaggtcaggagttcgagaccatcctgccaacatggtaaaacctcatctctagtaaaaaaaaaaaataataaaaaaaatagctttgcatagtggcacgtgcctaatagttccagctactcgtgaggttgaagcaggtgaatcgcttgaactcaggaggtggaggttgcagtgagcctagatcatgccactgtactccagcctgagtgatagaatgagactccatctcaaaaaaaaaaaaaa

SEQ ID NO: 57882 - DNA, 355 bp, Homo sapiens
tgggtaccgccccccccccggtacgtacttctagaattaattaacgcgggggagggggttagccccttaaaagccttatgggaaaaatcctcaacaggttctttttaaaaatggggcagggacccaccttgattttttccacccggctcaccctttcatgaggcttctgcgctaaggtttaaaatacaggacactgatcctgcaagtataaaaatatctccttaaataaccgtatggggaagggaacactgaatttttactgaaatgggattgcctgaaaccctgatggattttatcttcaaagagggaggggaccaaactggaaacaccagggttccccgcccctatcatattt

SEQ ID NO: 57883 - DNA, 310 bp, Homo sapiens
cgggccccccctcggaagtcttctagaattaattaacgcggggccccccaaaacattcacttccatctgatcctcaggatgtgacctaatttggaaatagggtctttgcagatgtagttagggtgaggatcaagcagagattatcctcttgataatctctttgaagggtgttttggggggccagccgtggtggctgacgcctgtaataccaacactttgagaggctgaggtgggcagatacctgaggccaggagttcaagaccagccaggccaacatggccaaaccccatctctactaaaaaaaaaaaaa

SEQ ID NO: 57884 - DNA, 225 bp, Homo sapiens
cggggccccccctcgaaatacttctagaattaattaacgctggggaggtaccggaggggaagctttgagatacttctgtgcctgtgctctgttcctctttagtctcatcaccttgcactatgaccttaggcaagacaggtcataagaaaaaaaaaaaaaaaaaaaaaaaaaaaaaaaaaaaaaaaaaaaaaaaaaaaaaaaaaaaaaaaaaaaaaaaaagcgaaa

SEQ ID NO: 57885 - DNA, 432 bp, Homo sapiens
acttctagaattaattaacgcggggtgggcaaataaacctacagtggtaacatttgtataataaaaaattgtgtgtatgtgtgtgtgttagcaagagagtgcatgtgcattaattaggttgtgacagagctcttttccaacccttaaaatactcatttctttttcatttctcaaaagttttcatgctgagaagaataaaatctgacagcgtaactgagggaataacagggagtatacttctcatttaaatcattaaaaagcattaatatcagagaatagaaaaaaaattaacaaccttgaagataaattttaagaacaatagtcaactgggaaatagaaataaatttttaaccctgaaatcatttattaaatgtcagaaacactaaaaaattagaccttccactataaaagctgaagaaaaaaaaaaaaaaa

SEQ ID NO: 57886 - DNA, 540 bp, Homo sapiens
  misc_feature 449: n = A,T,C or G
acttctagaattaattaacgcggggtgggaacaagcattgcaagaaagagcctcaaaggcacaggttgttcataaactacataatcagtccctgaacaattgagagttgattgtaatgaactatttaatgaaactaaaatgtgtatcatgctcacagcacacatcacctgatgtcaaaagaaaaaaaagtagggttttttttttaagaaatccaaccaacacaagacttaaagtgcatcacattcctgcatgccatgcttctaccaaaccttaccaaaggaagatatcaccagataatttattaaccaaattaaatccagaagcttgcatcctgtggaattgaatttgtatttcaaaattcactggaaaaattagattcacgataaagacattcctaagacaagaaatatccaaaacacatttaaaatgtaatcaaagtttcaactganaaaactctctcagaataattatacttttatattgcttcgaattcatgttaaattttttaatcttaactattgatcccctgatgcaatactt

SEQ ID NO: 57887 - DNA, 477 bp, Homo sapiens
ccccccctcgtgcgtacttctagaattaatctaccgcggggaaggacatgatattttaagtcaaaaaggaaaaaatcctgactaaggcccaaatgctcaactccaacctttctttcccctaaaaaaatgcaatcaaatctcctcattaaaaaaagttcttttttttttccctttccccccagtttgggaggaaaactggaggggagtaaaaaaacctgtccacagcacaaacttccactctggctggaaaggactacccatttgctaaatgtttcatcacgggggggctcgatctttttatataaaacactgcaccctccttttcattacatccttcatattttagggacccatcttcctttttaaacaatttaaatgaaaccggctaaaaaaagtaaacaaaattttttgagggacaggcccttgagagaccaaaaccccagggagcatttttaatttaattggactaaaataaaa

SEQ ID NO: 57888 - DNA, 600 bp, Homo sapiens
  misc_feature 36: n = A,T,C or G
cgggccccccctcgagagtacttctagaattaattnaacgcgggaagaaatgttgaaccaaaacgaaaagaaaaaaaacaaaagtttaaaaaaattctatggctttgttgttccctcttgtcctctatgagatataaaatataaagacgagagcaaaatacataaaagccttctattttaggcccgctttattatcttccagagccctaatgtgaatgactgtgatgcatttgaatttcttagataaaaggcgattttcaaaacatttcagtcaactagaatttctataaaatcttaaacataatatatttacacatatcttataaatgacaacatgatactaaactgctggataaaatttgaaagaaacaataaatgaatcagatattctgttagcatgatagtgatatctttggaaagaattatttgagtatatcttattttagagaaaatatttgtcattgaaataaatatctgactcatagacaaaaaagtatagaaacatgaaaaagactaaaagtatggagcatatacactatgacatatcacataccagtcaaatttgccttataatacctaaaaaaaaaaaaaaaaagcggc

SEQ ID NO: 57889 - DNA, 604 bp, Homo sapiens
  misc_feature 16: n = A,T,C or G
cgggccccccctcggnggtacttctagaattaattaacgcgggagtcattgaattattcaccatcaagcactcacacacaaaaaaaattaagtcactttcacttaagactgtccttaatgaaactgtaaaaaaatattagttttattaaatcttatcgattgaggacatgtccttttaatagttcatgtgacaaagtgggaagttgcatagattacatttgcaacataccaaagtatgaaggttgtttcaaggacaagcactgtgcagttgtttagattaagagagaactaggctttttcttttctttttttaaatgagcatttcttttatcttaatggaactactgtgattattcaaacctgggtatttgacaactatttgctcaaaaataaacaaggaaagcctgtcacttcaaggagaatagctgacaataattgtcactaataataaaattcaaactttcaagtgaaaatcaggattttaaaaaacatgtgtccagcactgtgagcttgacagcttcttaataccgaaagacttttctgatgaggtgcatggaaatattaccaaatatgattttttggtattgtataatgaaacgtgtca

SEQ ID NO: 57890 - DNA, 392 bp, Homo sapiens
ccgggccccccctcgaaagtcttctagaattaattaacgcgggaggctgaggcaggagaacggtgtgaacccgggaggcggagcttgcaagtgagctgagatcacgccattgcactccagcctgggtgacagagtgagactccatctcaaaaaaaaaaaaaaaaaagataaatcattgtaacttctaatgtaataattcattcaagcaaggatcggtagtgggtgctaaaagcattgataaaatcttttggggaaacaggatattcaaatgttctcaaagtatcccaccaaagattactattagttgcaaaggggaaaatctacctgaaaagacccggcagtcatcattctaccaagtggtcattatcaggatggggcaaaaaaaaaaaaaa

SEQ ID NO: 57891 - DNA, 340 bp, Homo sapiens
ccgggccccccctcggaagtcttctagaattaattaacgcggggcttcagaaatagtttagcattagcagggaagctgaacaggtgcagacctcaacatccagcaactccactcttacgaatatgtggatgcttgctactcagactgtggtccacagacagacagcatcagcatcagcaggaacttgtagaaatgcagaatctggccaggcacggtggctcaacgcctgtaatcccagcactttgggagactgcagtgggcggatcgcttgagcccaggagttagagaccagccttggcaacgtagtgacccggtctcaaattggaaaaaaaaaaaaaaa

SEQ ID NO: 57892 - DNA, 546 bp, Homo sapiens
ccgggccccccctcggggtacttctagaattaattaaaaagcggatgtttaacttcacccattatttcctcctgcttttcccctttttcaatacatgggatggggtttttttttattcttcaataaggaagggctttttctatcagctgtcaggggtgttccgttggtagtatttgctcctcagtgtgagctctagctttgcctttgactgtttttgttaagcctgtggttgctattacacatgtggaatattttagaaaagtatccagtatcacccttgagactacaaaaagacacataagctagatggtgtagactaaaaatgcatctttaataactcaatctaggtgtctacatttagttaagtcttagtctgagttttagtgcagtgttataatacttttctttgtctatatatttgttaaaataaattttccagataaacagaagatcgttcagcatgtaaaagaaattatttatttatttatttattttttgccaacaccttaaggtaggtttctttaaaaaaaaaaaaacaaaaaaaaa

SEQ ID NO: 57893 - DNA, 606 bp, Homo sapiens
  misc_feature 32: n = A,T,C or G
taccgggcccccccctcggaaatacttctagnattaattaacgcgggctcccttcccctctcctctcctcttcttttttccctccctctctctctccttccctacattcctcccttcctccctccttctttcttcctgtattttttgagttatgtatgatgccattccatatatataccccctttgtaaggacaagtaagaaactagacccaattatctcttcctttcatccacaagaatactaaaagtcatagagaaacacttacaggaaactaactgatttgagtggtgtcttttttttttttttttaatatctgatgaagttgtttttagggaacactggattgcttttaaagtactttcatcagtatccagagaaagtgtcctggagtagcaacttatatcctcttttctagtttgtcagtttctaactcccattctactatttcaactatattttaaagttttttctcccttttttccagagaacctattaatattgcatcatgtggaatgtatttttcaaaatgaccattaaaagtgaaggcagaggctgggcatggtggctcacacctataatcccagcactttgggaggctgaggcct

SEQ ID NO: 57894 - DNA, 637 bp, Homo sapiens
  misc_feature 522, 598: n = A,T,C or G
cgggccccccctcgaaagtcttctagaattaattaacgcgggcatgaaaaaaacaaggtctaaaagctccttgagacaatttaaactctaataccaaatatacctctataaaataccaaactgagctaaatacggtatatgtgtacttatacatatgtacataacctaaatatacgtgtgcacacattatctatacaaagagccatactcagtgaaagataaattacctcctaaagtcccctctgaggtacaacagaaattaaaataattgctcctcttctcaactctatgtagcacgtattttccatgatgggataaatgttttcatttcaagtgccaatgtgtgaactgtaataaacattactgctttcattttttgtaggtatggaggttacattaactgttatagttgcggagctgagtttttatgtcaggtaattttgtttagtccaaactggttttgaactataaacaattatggatatgtattttttggtttctttgaccccaaagggaaattgnggtttatgtcaaattgatgttttatcaaaataaatctgtttctcaaagcaaaagtctctgtaggattgagataatncattatttacatatagggtaaacagacatttactgccta

SEQ ID NO: 57895 - DNA, 355 bp, Homo sapiens
  misc_feature 24, 37: n = A,T,C or G
ctgggttacccgggccccccctcnaaatacttctagnaattaattaagcgggtgaaaaactttggtaattaatattttcttaaaattaaatgttatatgtttcttgatctatgtggtagttacatggatgtatttactttgtgaaaaatcaccataatatacatttatgttctgggggactttctgtatatataaatatgtcaataagaagttttcttaaatatattcattttctatctctatccattgaaaaaacttagaaataatttaaaaaattatttgagaaaggaaatacagctacagtaccttaggtgactcacatataaataatatttggggaaaaaaaaaaaaaaaa

SEQ ID NO: 57896 - DNA, 284 bp, Homo sapiens
  misc_feature 10, 39: n = A,T,C or G
cccccctcgngggtacttctagaattaattaacgcgggnatctaaatggaattcttttcttaattgggaaaaaaaaaaaaaaaaaaaaaaaaaaaaaaaaaaaaaaaaaaaaaaaaaaaagaagccaaccgaggaggagactccaattcaacctataaaaaaaaaaaattgcgccccctccctggcgggcccctaacaaccccttgactgggaaaaccatgccgggggcggggggaatttttttacaccacatccccgggaaaacctctggcttaacaaaaaaa

SEQ ID NO: 57897 - DNA, 593 bp, Homo sapiens
cgggccccccctcgaaatacttctagaattaattaaacctcttttctttagaaattacctaatctcaggccattctttaaagcagtgtgagaatggactaatacagtagccatctttgtgaataaagaggatgggttttaaacaagcaaaattattgtgaacacttgaacaaatgcttttctagtatttgaaagttttcttaagtaggcactaccctcttgagaccttgctcctactgtgaattcgcttaaacctgctcttcacaaatggtgtcatagcaccccttacttccccaatcacagcttcatcatggtgggatttgaatcgatgtggtttgctctttgcagttataatggcatcctgctgatctacatgcaatctgcctctgtgactcctatgattcaggctcatctttaaattaactttatctgccaagtaatgagcacttcagtttttttaatattaaagaagtttcatctaggagacttttcttttttgattactagaattatctctctctgttccttcctcccacgacataatgaaacaaaacctaccattgtattatacaattcaggatttcatcatatctt

SEQ ID NO: 57898 - DNA, 558 bp, Homo sapiens
ccgggccccccctcggaagtcttctagaattaattaacgcgggagtaaccaagatagcatggtattggcataaggacagacaaaaagttcagaaggagagaatataaaatacagaacagattcacaatagaccttcgattttgtaactgctgttttcttttaacagcataatgacagaactggcctctttttttttttttttttttactatagtgatgagggagtgcccacctagtgtattgaactgctgtgcagtatttcattgtagggatgtattaccatttattgaaccggctctcagaggttgggcatttgcattgtttatgtatttttactagtcagatcatgcggcagtaaacatcatttgattcatttgtaattgtttctgtaggacagttactagagttggaattcctcgtgtcaaaggatttgaatatccttaattataatagatatttccaatataatagatatttccaatatccttaattataatagatatttccaaatataacagatatttccttaattataatagatatttcttaattataatag

SEQ ID NO: 57899 - DNA, 608 bp, Homo sapiens
ccccccttcgaagtacttctagaattaattaacgcgggaaggttcataaatgggtagaaattaaataacacactcttgaaaaactatgggtcaaagaaaaaataagaaaaattagaaaatatctttagacaaatgaaatcaaaagtacaagataccaaaacttacgagatatggcaaaaagctgtactaagagagaagtttacagagataaatgcttacatttaaaaacaacaaaaaaaagaataaagatctcaaatcagcaacctaactttacaacttaaggaactaaaaaaaaagagcaaattaaatccaaaactagcaggcagaaaaaataaagattagaacagatatagatgaaatgagaaaagaaatataatagagaaaaacaactaaatcataagttagttcctcaaaaagatcaacaaaatcggcaaacctttaggtggatggactaagaaaaaagaaagaaacaagagtcaaattactaacatcagaaatgaaagtggggacataactactgattctatggatataaaaaggattataagagagtacaatacactatatgccaacaaattggttaccctggatgaaatagaaaattccta

SEQ ID NO: 57900 - DNA, 525 bp, Homo sapiens
ccccccctcgtgcgtacttctagaattaattaccgcggggagactccttctaaaaaaaaaaaaaaagaaaaattattaccctgttattaggcccttttgtaagtgataaataaattttgtaagaacgggtttgtgtaaaatttatttgtaaaactcaaagactagagtgttctgggccaatcttataatcaactgtttgttttccctcactttaaaaataatatttcccctgttttcaaatcaaaatgattacctttaagtttatcttacatgttttccctgattagcccttaccattccttgattaaataatgggtaacttaatataataaaaactgatttccccaccctttgaacaattcactaaaaaatgatattttattttcataaataaatgtgttgaaaatgtttataaattatattttatgatatgttatctgagacttgggtaaaatacttttaaacacattttctgggaaaaaaaaaaaaaaaagcggccgccaccgggggggacctccaattccc

SEQ ID NO: 57901 - DNA, 479 bp, Homo sapiens
ccgggccccccctcggggtacttctagaattaattaacgcgggggtatgggcaatctgacacgatccaaaaggcttactgccttgcacccctccccgcaaaaaggaagtagagaccaagatcttgggctttaattttatttttaattgtaaaaagatttcaaataagccaccatttgaactgggaagggaaactagggatggtcttgggggaaaatgtcattctctctaagaaagggaccccggggatgtgggtcgttttgagggtcctagaagttgaccccaattctcacctctcctgctgcactgcaggattgcccagggtaggtctagtcccctaggttcttcagaccactccaggtcaggtttggttgggtggctgccagtggtcttccactactgttcctgtctagggtggagtaggagctttcaggggtacggcatagaggggatgttgttctcttactaaaaaaaaaaaaaa

SEQ ID NO: 57902 - DNA, 331 bp, Homo sapiens
  misc_feature 10: n = A,T,C or G
ccccctcggnagtcttctagaattaattaacgcgggctttttatttcacaattgatgcttaaaagtgcttttaaaggcaatattgcaactacatttatttatttatttatttgctgcagaaatgaagttatttattaaaacacacccatggtagcaagttctgatgggtctgaagaggaggcaggagcaaggcttcctgctcctcatcgtcgacccccctctaaactaccctacaaggtgccggcctggcgtcttcctgccattcccgctacgtggggggctattgcacgcacactttcttcatcccctgacgccgtcgttgctgtgaacc

SEQ ID NO: 57903 - DNA, 369 bp, Homo sapiens
  misc_feature 9, 33: n = A,T,C or G
ggtaccggngccccccctcgaaagtcttctagnattaattaaccggggactcttaacgagcatgctgccttcaagtaaaatatttttaaatgccagtatcattcatcccttcacccattccacaaatgttcttaaatgaaaactctaggccaggtcctgtgttgcatgttacacatgtgaaggcaaaccaaaataaatcttacattctataaaaaagagagactgcaaacaaataaatgaaataatcttctttttatagttgaacattaaggttattcccagtttatccctattatcaacaatgtgataagtaaaggtaagtttaaagtcttcctcttagaattttttggcagccaaaaaaaaaaaaaa

SEQ ID NO: 57904 - DNA, 466 bp, Homo sapiens
  misc_feature 40: n = A,T,C or G
agactggggtaccggggccccccctcggggtacttctagnattaattaacgcggggtacttaaaaaaaaaaaaaaaaaaaaaaaaaaaaaaaaaaaaaaaaaaaaaaaaaaaaaaaaaaaaaaaaccaaaaaaaaaaaaaaaaaaaaaaaaaaaaaaaaaaaaaaaaaaagaaaaaaaaaaaaaaaaaaaatataaaaagggaaataaaaaaaaaaaaaatatagggggggcccccccggggggggtttccattttccccttttgggggttttttttgggcgggttttgggggggtttttttcggggggggggggggggaaaaccggggggttccccatttttttccgtttggggaaattgcctttttggggggggggggttttatgaaaaggggccccccttggttctttttccaaattttgggcccccctgggggggttggggaatttggcgggcttttttttt

SEQ ID NO: 57905 - DNA, 594 bp, Homo sapiens
cccccctcggaagtcttctagaattaattaacgcgggcctccacttcaccccctaaagttgccccaagagcaccgtgtgactgctaaggtatttccggagtctaaagacgattattcaggtctcatttgcatacccataatacactgcaaacagtatttttttcggaaaaacatttatatattgcttgacatttttaagtatgagaattttgcatgcagaatttttttgtataaactttctcaggtagtaacccttgggattagtagacaccatcagtgtactaggaattgcagttacctgaaaattgagttacagaagtaactggtatactctggtttctcttcagatcgcataaatctttcgccttttactaaagatttccgtggagaggaacaactctgagtcttaacccaattttttgaggccttgctttggcaaggctatatgtggtaatccaacaatagaaattatttttaagtttgtgtgttcctttttctgttcaatggtgcttttgatattgttgtaaagcagtgactagcagattctgtgtggtaaaagcactgaatcctgtttagttcttttctccctacctt

SEQ ID NO: 57906 - DNA, 421 bp, Homo sapiens
  misc_feature 301, 302, 303: n = A,T,C or G
aaaactatctctgtggctcacaaaaaaaaaaaaaaaaaaaaaaaaaaaaaaaaaaaaaaaaaaaaaaaaaaaaaaaaaaaaaaaaaaaaaaaaaaaaaaaaaaaaaaaaaaaaaaaaaaaaaaaaaaaaaaaaaaaccccacaaaaaaaaaaaaaggggccccccccccccgggggggcccccaacccccccaaaggggggaaaaataccccccccccccgggcccttttttaaaaaaggtgaaaaaaaaaaaacccgggggaacccaaaaaaaaacccctgaaaaaaaaccccctttttnnngggggggaaaaaaaaaaaaaagccccccccagcccccctttcaaaaaaagccccccccaaagggggaaaagaaaaaacccccccttaattttttgaaaaaaaccccgaaaaattttta

SEQ ID NO: 57907 - DNA, 546 bp, Homo sapiens
cccccctcgagagtcttctagaattaattaacgcggggaggcctgagaattttaatttctaacaagatctctggtaaaactgctgctgctggcccagagacccattttgagaaatatttaggcgccagtggactgttgtaccctgtttacactgttgtactctctgctgctccaggtcccctccccacatttttgctctgttctgaaggcacaatctacctataccaccatgtgtgaagagagatcccttgttataatcaggcccgtctcttgggggccttttagccagcaggttgacccagtgaggcaagaaaagctctgaagtgggactaatccaccttggcttctagatgcagctctacctgacttgacataaccccaggcaagttcctgcttatgcctcttctctacacaaagagagtgagacggcttcaatccctaaggaccccaggtctcagactttctgtttcttctcaaatgtatattcaagcaactcactcatccctgccctggccatgtagcagaccactattaaaaaaaaaaaaa

SEQ ID NO: 57908 - DNA, 393 bp, Homo sapiens
cgggccccccctcggaagtcttctagaattaattaacgcgggcagaaaactgaattgtgagtaagttattaggtaacactaaacgtacataaaaattccatcattattgggggtcagtttctcaccttttgtttgacattccttagactttaacaccatgtctaatgatttctacttttccttgggtttgctggtatgattgtctttactaagatttttattatactgattttaaaatgaatttccatgactttgttgaattttattgtacagctatttaatcagtctatcctgagtcatatgtagaaggcactgtgtgtgctgtggcactgtgttgaggcagctgtgactcctcctagagaagtgtggtcttgtctaaaaaaaaaaaaaaaa

SEQ ID NO: 57909 - DNA, 467 bp, Homo sapiens
cgggcccccccctcgaaagtcttctagaattaattaacgcggggctataagtatataatagatttttctatttttgctttgaacatttgaacattcagttcagttttgacataattaaacataaaaataaatcatttttatactttcacttattcagttttgattgctctttatttccttgtttaaatccaagttttctgctggtgtatttgtttttcctgaagactcttaaaatatcttgaagagtagatctgctggcagtaagtttctacaattttttttggcaaggaagttttttgtttgtcctttattttaaaaaatatttttactaagtatagaattctgtgttgatagctcttgtctttctgcactttgtcatctagcttctttaattttgtaaaagtctgccataattcttatctttggtcctctgtatataatgccccatctctacaaaaaaaaaaaaa

SEQ ID NO: 57910 - DNA, 234 bp, Homo sapiens
  misc_feature 17, 27: n = A,T,C or G
cgggcccccccctcggngtacttctanaattaattaacgcgggggtgaatattttatactgtaagtgagcaatcagagtataatgtttatggtgacaaaattaaaggctttcttatatgttaaaaaaaaaaaaaaaaaaaaaaaaaaaaaaaaaaaaaaaaaaaaaaaaaacagccaacaccaaaagaggaaccccaaaccggccctagagggggtcccaattccgcccccccc

SEQ ID NO: 57911 - DNA, 529 bp, Homo sapiens
ggggttgttcttcaaaaaaaaaaaaaaaaaaaaaaaaaaaaaaaaaaaaaaaaaaaaaaaaaaaaaaaaaaaaaaaaaaaaaaaaaaaaaaaaaaaaaaaaaagggggccccccccggaaggggaaattaaatttgccccctcccccggggggggttccccccctttcctccttttttgggtttttttttccgcccccttttggggaacctttttttttacccttttttttgggaaaaccttggtttccccttttttaatggggttgaaaaaaaaaccttttttcccggtttggtttttaaaaaaagggcccccccctattggcttttgaaaattttggcccctttttttggggaaaggaaattttaaacttttttttttttaaaaaattttctttaaaattttgggaaaaaccgttttttttttttccaattggaaaaaatttccccaatttctttttttttttaaaaaaaaccccgaaaaaggttttttttttttaacatttggaaaaaacatttcttttttaaaaa

SEQ ID NO: 57912 - DNA, 488 bp, Homo sapiens
  misc_feature 42, 473: n = A,T,C or G
gggccccccctcggaagtcttctagaattaattaacgcgggnataacctatggagcaaagaagaaatcaaagagcaaattagtatttttcactgaagaaaagtgaaaaacttatagcaaaatttgtgagatgacacaaaagcaatgcttagagaaaaatttatagtactaaaggactatgtagaaaataagaaaggcataaaattaataaattctacctgagaaactagaaaaagaaaaaaattcgatgtcaaataagtaaatagaaaatattaaaaaataaaagttggaaatcaatgaaatagaaaagaaaaaaatagaaaaattagtgaaaaaaatactattggagaagataagcagaattaatgaacctctaccaagattgatcatgaataaataatataaaaattaccaatctcaataaagaaagatgactttaatacagattctttgaatattgacatgatagtagancatgttatgaacaaa

SEQ ID NO: 57913 - DNA, 588 bp, Homo sapiens
  misc_feature 523: n = A,T,C or G
ccgggccccccctcgaaagtcttctagaattaattaacgcgggtcctgaagtgtacttaaacaaacttagatgggctagcttactactacacacctaggctatatgatgtagcctattgctcctaggtttcaaacctgtacagcatactactgtactaaatactgtaggcaattgtttgtgtagtatacatctaaacacagaaaaggtgtggtaaagatacaacattataatcttatgggaccaccattgctcgtggtcagttgttgactgaaaaatcgttacatggcacatgactgtattattataaacaaatgcaagaaataaattaacatcgtttgccactttcagaaattgtagcctaaatctagattgtatatatcagtcattaacaagggaaacagattcctttgataagattattgatattttgaatttatggtaatgtttacaaacaccaaaactgtttgaaaaggaaataataaatatgtgttctactctattggatacaagaaaatgaaagtntaacaataatttttttattaatatataatgataagagccaggattcagtcaagtagagtctgggt

SEQ ID NO: 57914 - DNA, 423 bp, Homo sapiens
  misc_feature 15, 28, 44: n = A,T,C or G
cgggccccccctcgngggtacttctagnattaattaacgcgggnggtaaaaaaaaaaaaaaaaaaaaaaaagaaaaaaaaaaaaaaaaaaaaaaaaaaaaaaaaaaaaaaaaaaaaaaaaaaaaaaaaaaaggggcggccaccactgggggggacctcccttccttcctgtcccgttttttgccccccccccttggtggccgtttttttccttcctcggggttgggcccctcctgtcttccccctccttattctttttccacttgctccctttttcgcctggtgcctttttcccttggcgctccccgccggtcgctctttgtaggggggcgccttcctggggggggggtggttttgggcgcctttgttatttggatattgtcctttttttttttttttaaccgtcactcttttttttcccggg

SEQ ID NO: 57915 - DNA, 154 bp, Homo sapiens
ccgggccccccctcggaagtcttctagaattaattaacgcgggggaaaaaaaaaaaaaaaaaaaacagaacaaaaacgaagaggaaaaaaaaaaaaaaaaaaaaaaaaagtaaaataacaacaacgctcagtggccgtcggggggcgacctccg

SEQ ID NO: 57916 - DNA, 573 bp, Homo sapiens
cgggccccccctcggaagtcttctagaattaattaacgcggggtggcgtgctgggcgtgcgcggctgcggtacggcgtgttggtcccagcggttcagctgaggtagggacgtgctgtaggccggaatgttaccggctgttggatctgtggatgaggaagaggatcctgcggaggaggattgtcctgaattggttcccattgagacgacgcaaagcgaggaggaggaaaagtctggcctcggcgccaagatcccagtcacaattatcaccgggtatttagttattcagaggctgctctgctgagaagatgaacaaatttcttgtccaaaacaatgtatttcaaacgtgccgatcgggcctttcccgtattgctcactggtgctgggaagacaacacttctgaactatattttgacagagcaacatattaaaagagtagcggtcattttaaatgaatttggggaaggaagtgcgctggagaaatccttagctgtcagccaaggtggagagctctatgaagagtggctggaacttagaaacggttgcctctgctgttcagtgaagtgaggaatgtg

SEQ ID NO: 57917 - DNA, 433 bp, Homo sapiens
  misc_feature 53: n = A,T,C or G
ctgggtaccgggcccccccctcgtgggtacttctaggattaattaacgcgggnaaaaaaaaaaaaaaaaaaaaaaaaaaaaaaaaaaaaaaaaaaaaaaaaataaaaaaaaaaaaaaaaaaaaaaaaaaaaaaaaaaaaatgaaaaaaaaaagggggcgaccctcgggtgggccccccccccccccttggggggccccttttccccccccctttttgccgttcctttcccccccctggcccgggggttccccggggcgtcccggggaaaacccgcttggtctcaacccccttttttctgcgcgggcggcccttgagggggccccgtccttacgcctggccccccctgtctcgccccgtttatggaatgggcattctcttcgggtaaattttgcttaaaaccccggtttattttttttaaaccgccccgttttt

SEQ ID NO: 57918 - DNA, 565 bp, Homo sapiens
cccccctcggggtacttctagaattaatttaacgcggggggaaaaaaaaaaaaaaaaaaaaaaaaaaaaaaaaaaaaaaaaaaaaaaaaaaaaaaaaaaaaaaaaaaaaaaaaaaaaaaaaaaaaaaaaaaaaaaaaaaaaaaaaaaaaaaaaaaaaaaaaaaaaaaaaaaaaaaaagcccgcccccccccgggggggactcccttttccccttttgggggtttttttaccccccccccttggccctttttttaaaaccttggggatgggaaaaccctggggtttcccaatttttttccctttgaacaatttccctttttccccgttggggttataagaaaaaggccccccccctttcccttttccaaaattttgccccccttaatgggaaatggaaattttaaccttttttttttttttaaaattccctttaaattttttttaaaacacctttttttttaacccaagggcccaaattgggaaatttcttttttaattaaaaaaattaccccggtttgggtttggtttttttcccgtttggaaccaaaattccttttttaaaaac

SEQ ID NO: 57919 - DNA, 527 bp, Homo sapiens
ccgggccccccctcgaaagtcttctagaattaattaacgcgggcccataatcaaacagatagtaactaactccaagtgactttaaacaaaattgatttgactattcatccctataaaatatccttaatgtataaggaaaactacccccaaaaatcataaactcttttctataatcttattattggtgtagtgttggtattgttactctgaaacattgtgtgtgcgtgtgtgtgtgtgtgtgtgcgcgcacatgcacactgtagaatacagcaaatgagtagttgtatgatcttctaattctaccaccccagtgtcatgagaactgggattctcacatgaaagaaagagaataggccgggtgcagtggctcacgcctgaaatcccagcactttgggagaccgatgcgggcagatcacctggggtcgggagttcgagaccagcctagctaacatggtgaaacccaatctctacaaaaaatacaaaattagctgggcatggtggtgtgcacctgtaatctcagctacctg

SEQ ID NO: 57920 - DNA, 463 bp, Homo sapiens
  misc_feature 59, 365, 376: n = A,T,C or G
cgggcccccccctcggggtacttctagaattaattaacgcgggacactcacagcagggnataggagctgaaaacataacccactctgtcctggaggcactgggaagcctagagaaggctgtgagccaaggagggagggtcttcctttggcatgggatggggatgaagtaaggagagggactggaccccctggaagctgattcactatggggggaggtgtattgaagtcctccagacaaccctcagatttgatgatttcctagtagaactcacagaaataaagagctgttatactgtgaaaaaaaaaaaaaaaaaaaaaaaaaaaaaaaaaaaaaaaaaaaaaaaaaaaaaaaaaaaaaaaaaaanaaaaaaaaaanaaaaaaaaaaaaaaaaaaaaaaaaaaaaaaccgcccccccccgggggggacccccattcccccctttagggagtttatttccccccc

SEQ ID NO: 57921 - DNA, 593 bp, Homo sapiens
  misc_feature 531: n = A,T,C or G
ccgggccccccctcgaggtacttctagaattaattaacgcgggtttatagtttcattaagttttgacatttccagccattatttcttcatatatttctccatctctcctttactctcttcttcagggactccaattactcatacggtaggctacctgatgctatccacagcttactcaagttcttttcattttttttctggtttcttttttctctctgcatttcattttggatagttttactgctatgccttcaagttcacccaacttttcttctggaaatctaatcttctgttaacctggtatattttcatttcaggcaatataggttttctccctagaatctcaattttttttaatactttctattgctgtacttaccttcttagcaatacgaaatacagttataactaatgttttactatcctcctctgctaataataatatctatgttaagtttggatgagtttcaaatcattattaccgtcctcactatgggccatgttttcatctctttgcatgcttggtgaatntgattggatgccagatactgtgaatgttattgtattggatgctggatatttttatagtacta

SEQ ID NO: 57922 - DNA, 340 bp, Homo sapiens
ccgggccccccctcgagagtcttctagaattaattaacgcgggaacactgtagaaaatactgttttttccaaaataaattgtcttgaaactgtcatcaaaaaaataactgactataaatgtatttcagtattctcatttctatttaatatatttatatttattattatgcaagtactgcactgccttgattactggagctttcttgttgtaagttctgaaattgaaaagtgagaatcttttaatgtattttttcaaaaagttatcttacctaatatgggttttttggtttaacatatatatttttagatcagcttgtcaatttcttccaaaaaaaaaaaa

SEQ ID NO: 57923 - DNA, 376 bp, Homo sapiens
  misc_feature 36: n = A,T,C or G
tgggtaccgggcccccccctcgagggtacttctagnattaattaacgcgggggaccactttggttttcttttttgcgtgtggcagttttaagttattagtttttaaaatcagtactttttaatggaaacaacttgaccaaaaatttgtcacagaattttgagacccattaaaaaagttaaatgagaaaaaaaaaaaaaaaaaaaaaaaaaaaaaaaaaaaaaaaaaaaaaaaaaaaaaaaaaaaaaaaaaaaaaaaaaaaaaaaaaaaaaaaaaaaaaaaaaaaaaaaaaaaaaataaagggggccccccccgggggggggccccaattcccccttttggggagtcttttacccccccccactggcccctttttta

SEQ ID NO: 57924 - DNA, 634 bp, Homo sapiens
  misc_feature 26: n = A,T,C or G
gggccccccctcggggtacttctagnaattaattaacgcgggtcagttatttttttcagccactttatgcaaaatcattgatgattctttttgtaaatttaaaaaccaattttataatttatttggaaaattaaagggccaataacagccaagacactctagaaaagcatattaagtggatttactttatcagaaaagaagtgatattttaatcaaagctacagtaatgaaaagaaagtgtggtattggcctaagaatagaataacatatcaaaaaacagaatagagtccagaaacatccatctataaacatctgaatgacaaccaaaatggcacgacagattagtgtagaaaggacaggctttatcaaaaatgagtcacgttgatatagtattttttgacgtatcatgaatgtaaattatcagtcatgtataaaatacaaaagtcagttctggggggattgaggaactatatgtgacaggcaaaaccacaaagattttaaaaggtgaaagaagaatatcattatggtatatgtttagaaaattcttaagtatgtcaccaaaagaaaaagaaaagctaacagagaagaaaagagctgatatttagatctgcactaaaataaagacatttgttca

SEQ ID NO: 57925 - DNA, 224 bp, Homo sapiens
  misc_feature 29, 47: n = A,T,C or G
ccgggcccccccctgcggggtacttctanaattaattaacgcggggnaaaaaaaaaaaaaaaaaaaaaaaaaaaaaaaaaaaaaaaaaaaaaaaaaaaaaaaaaaaaaaaaaaaaaaaaaaaaaaaaaaaaaaaaagaaaaaaaagggggggggcccggggggggggccccccccggggggggttccctccttccccctttccggggttttttttccccccccc

SEQ ID NO: 57926 - DNA, 487 bp, Homo sapiens
  misc_feature 44, 432: n = A,T,C or G
cgggccccccctcggaagtcttctagaattaattaacgcggggnaatcaatttcaggatgatttttaggggaaaaaggaaattctaatttgtagcagaaccaactttggcatacctgggggaaatggtggtatagtaataatttgaaacatttttgagcattggtcactgtataattaaaaacaaaccgctgttgctgaaactattttgtctgttagtaaagtgactgattttagatagcatttcattagttctaagtgttcttttaaaaaagcctgcttctatttctggtaacatggaggattagaagtgcctactgataatagttcagctaaacgtgctacatgatacgttacacacacacttgtgtatactgtatcttaaattatatatacacatcttgaaacacatttaagtgtttttagtaaatagnttagctggtgggagagtaaagggatttttctgaggcctgcgtcagttagtgctgt

SEQ ID NO: 57927 - DNA, 351 bp, Homo sapiens
ccgggcccccccctcgaaatacttctagaaataattaacgcggggcagcacctaggatggggcagagacttgttgcatctttgtccccagcaaaggctacatgttacctccttcaattgataataaacctttctgagatgcagagggtccaggtcaaaaaaaaaaaaaaaaaaaaaaaaaaaaaaacaaaaaaaaaaaaaaaaaaaaaaaaaaaaaaaaaaaaaaaaaaaaaaaaaaaaaaaaaaaaaaaaaaaaaaaaaaaaaaaaaaaaaaaaaaaaaaaaaaaacgcccccccccggggggaaccccaaatccccccaaaagaaagtttaataaccccccccaatggc

SEQ ID NO: 57928 - DNA, 563 bp, Homo sapiens
gggccccccctcgaaagtcttctagaattaattaacgcgggggacagcttcaaagttaaggactattgcttggtattttcttttacaccagagactgtcttggcaactatgagattagatgttcaatctcaaaaaaaaaaaaaaaaaaaaaaaaaggtttttgttcacctctgaatattttatttctccctttgagctgacttacttcaaataaatttcaatgacttactgaaggagacatagcctaagaattcaattttctcttagaaaaaatgagaaactaatccatatcaacaatttccaaatttcagtatcattttatttactcctcttaatagagaaatggttaaagtctaaaagttgcaaaggaaaaatattaagtgcactttgccagcttttatagccacccccacaaaaaagaaaataaaaataaacaaattacctattggactggttttcctgcacaaatgggtaacaagtaatcaggtagctgggaattggagttggttccacaccagaaaacacttcattatcatttgggagagccatagggatcataaatg

SEQ ID NO: 57929 - DNA, 265 bp, Homo sapiens
  misc_feature 24: n = A,T,C or G
gccccccctcggggtacttctagnattaattaacgcggggggaaaaaaaaaaaaaaaaaaaaaaaaaaagggaaaaaaaaaaaaaaaaaaaaaaaaaaaaaaaaaaaaacaaaaaaaaaaaaaaaggggccgcccccgggggggagctccgttcccccctttggggggtcgttttcccccccctccctggccgtgtttttcccccttggggactgggaaacccttggcgttggggagttaaatccccttgcggttcttccccttt

SEQ ID NO: 57930 - DNA, 593 bp, Homo sapiens
  misc_feature 510, 517: n = A,T,C or G
cgggccccccctcggaagtcttctagaattaattaacgcggggagtgcctaggatttatctaaagtcacttccacagaagaagggccaccctaggtttgaaaagactggaaaggatttatgggattgtgggaaatgcagtttggagactgttcttttctcattcctataatgactgcttctaggaagcaggtgtcaagtagaacctcttaacctcataaccagagttccaggaagggagtatttcacatcagatagaattataccatttttttggaacctgaagtcctcaagatccagccaccataatatcccaactttatgacctgttttagcataattactgtacatcctcattttgtgtttttcagtgctgattgttgttgaagtaggggaagccagaggaaatcactcttgtttggtatgattctcagcattacaggcaattgtgcttatttgagtttatgcatgaaagaaaaatagacagatgagatgtaaaaatctcaccctanaagcctntgtactgttaaggttaaaactgagcttcagtgtctgaaagttcccaagaacaacaaatggagctaatttcacattc

SEQ ID NO: 57931 - DNA, 577 bp, Homo sapiens
cccccctcgaaagtcttctagaattaattaacgcgggtctccatagacagtcttggaattttctgccatgcgagggagaacaggagtcaactcctagttcttgttaagctcagtatgaagttcttctgtagttctgcaatgtgtagttgtaaactcctccttaggttattcaaaatgttctttctacacaaagcttgtacagtacatttttactaggttcattatttgtagaagaggaagcacataccgaatcagcaccatgtcccatttatttatgtgtccatagctggcgtcaaccaactagcctgggtaagagtcaaagctgaggtataggctgggtgcggtggctcacgcctgtaatcgcaacattttgggaggccaaggcaggtgaatctcctgagggcaggagtttgagaccagcctggccaacatggcaaaaccccgtctctatgaaaaatatgaaaagaattaaccaggcatagtggcaggcgcctgtaatcccagctactctggaggctgaggctgggagaatcacttgaacccgggaggcggaggttgcagtgagcctactaagatc

SEQ ID NO: 57932 - DNA, 551 bp, Homo sapiens
  misc_feature 482, 531: n = A,T,C or G
cgggccccccctcgaaagtcttctagaattaattaacgcgggctgtctctactaaaaatacaaaaaattagctaagtgtgctggtacatgcctgtaatcccagctactcgggaggctgaggcaggagaattgcttgaactcgggaggcagaggttgcagtgagccaagactgtgctactgcactccagcctgggtgacagagcaagactttgtctcaaaaaaaacaatttagggtaatttgacttctttatttcacacttgtatcttctttctcttaggttgaaaatattattacctaatgacattcacataattacttatttgcattattctacagtattattactaaaattaagtgcagaatacagtttaatcatcttcaacatgcaatgtgctaaattctaaaaaagcttaatttaacatacatttttactctgtcagaatttttaagtttttggttaaaataacttgaatactaaatntcttttaaaatgtagctatatttggccaggcgcggtggctcatgcctgntatccagcactttgggaggc

SEQ ID NO: 57933 - DNA, 596 bp, Homo sapiens
  misc_feature 20, 33, 520, 575: n = A,T,C or G
gtaccgggcccccccctcgngaatacttctagnattaattaaccactttagatgtagttcagttcatttatttttataattcctgttaaagtggctattattttatgtaaaagagtattatttatcaaatatatgcataaaataaagcattcaatatatattatttcatatttataagtgcatgtttggttttattattatattaatttttctgtcagaaaaatgttaaattactcataataattatgtgcagatgtacccagaggagtcctggtttattacggttttctcagttatgattcttaataatgttaccttcaaattcaaaataacaacttggactatgaattattggtcattctaataaaaacaatttatatcaatctgttattttaaatatttgtttcatatataatgatgttatgaaacaatagtaaagataaaaatatctacactttgagaactatgtacgatgtactctttcaaatactttccatatatgaaataatttaatactcanagcaaccctctgagaggttattaacctcaatacgtgaataactcaagtgagacanagaattaagtaaactgcctta

SEQ ID NO: 57934 - DNA, 574 bp, Homo sapiens
  misc_feature 37, 536: n = A,T,C or G
ctgggttaccgggcccccccctcgaaatacttctagnattaattaacgcgggtcctctcgccccagcatcccagtgttaggattataggcaggagccactgtgtctggcctggaatgttacctttcaatcctgaaattcaagtccttcaattctgggaaattttcttgtattttttttgataatgttctcctttttgctttcccttctctttttctagaacacttattagcatcatgctagaactcctgaattgatttatttcttctctctttcttggtctctgatagttggctgttggacctcctggattgattctttaattttctcatacttcataccctacttaacaacaaattttcttagctgggcaacatggtgagaccctgtctctataaaaaatacagaaaaattagccaggcatggtggcacatgcctgtgaccccaggtacttgagaggctgaagtgggaggctcactggagcccaggaggtccaggctacagtgagccatgattgcaccactacactccagcctgngtaacagagcaagaccctgtctcaaaaaaaaaaaaaaa

SEQ ID NO: 57935 - DNA, 315 bp, Homo sapiens
  misc_feature 32: n = A,T,C or G
taccgggcccccccctcggaaatacttctagnattaattaacgcgggactcggtcctggaaggcagctgaggatgctgaagaggtccaaagagcacattacatgaagaggacattctgcaagacaactgactaggcttttcaaaaaaggtcatcattggctgagtgtggtggagcatgcctgtagcactcaggaagaaaaggaggaaggatcacttgagcctaggagttagaggctgccgtgagctacgactgcaccattgtactccagcctcagtgacagagtgagactctgtctctttaaaaaaaaaaaaaaa

SEQ ID NO: 57936 - DNA, 467 bp, Homo sapiens
  misc_feature 28, 53: n = A,T,C or G
ccgggccccccctcggaagtcttctagnaattaattaacgcgggccccatggngaagcttaaagaaattagaatgtgtttatttaattttatttttcatctcttcatcttgaacattaagaatctgtcccaaagggatagagatagacagacagacagatagacagatagatagattaggctttgagggtctgtgggagaggtcagtgtgccatgattactgtcttgatctataacccataatagctatagtttctctagcccacagtaataaaaactgtgttatttaagcattaccatgtgccaggcaccatgctaaacactttctgtgcctcctctcattatttcacacaaagtggattggttgatcacattggactccaaaagaaacaaaataaaattggctcattcctttttaaaaaatacatgcaaataaagatttttattttctctaaaaaaaaaaaaaaa

SEQ ID NO: 57937 - DNA, 240 bp, Homo sapiens
cgggcccccccctcggggtacttctagaattaattaacgcggggccttggcctcctaagtactgggattacaggcgtgattcattgccaggctgcaattttttttttaatctcttgtctttctgagagtttcgtggcagagagtttggttcatttaagttcattctaaatagacatttaggacattaacttctggcctcatggactctgaggttacaagtcccctggtctgtcacaggac

SEQ ID NO: 57938 - DNA, 617 bp, Homo sapiens
  misc_feature 35: n = A,T,C or G
tgggtaccgggcccccccctcggggtacttctagnaattaattaacgcgggatagatgatatatttggattcttctcaactttgaaactgtttagcacagttccatggtgttatattcaaagccttgtccaccaagacctgctgcgtcttaaaaaactttctgttctcatggcttctcaggcagccaggagagctgttttgtagctccaggtttttattttgttttttgttttttttaaagcctgtgagcaatttctcatgggttgaaaagccactttagaggagtgtctgtcaagagacttagaacacaccctgaaaaacatttatgagatttggattcgattcatgcagtaagcacccccccccacccccccgagggatcttctgagtgggcaagcatgtgtaactcagcagaagcttggggtacgggagtataaaagattggaagtggcttttctctacctgtcagctaactcagaagcagccaatcccgtaggctgcttggtaatgaaaagcagtattaaatcccagatcagcctcctgggagccgtctaagtggtgcattgagttgattttggactagttaatcaataggggccacagcccaactcactgtc

SEQ ID NO: 57939 - DNA, 425 bp, Homo sapiens
gggttcccccctcgaggtacttctagaattaattaacgcgggacctggataaaaaaaaaaaaaaaaaaaaaaaaaaaaaaaaaaaaaaaaaaaaaaaaaaaaaaaaaaaaaaaaaaactaaaaaaaaaaaatattgagaaaaaaataaaagggggccccctccgcgggggtatccaaaatccccccttaggaaaaccctttcccccccccttatatgccccttgtttaacatcccccttacgggaaaaaccttggtttcaaaaaagtaaatcccgttggaccatattccccttttgcccagctggattgttaaaaaaaaaccccaaccgttactcttttccaaaaattggcgcaacatttttggcaaatgaaatttttatccatcatttttgccgaaaaaggcgaattaacttttggttaaaaaa

SEQ ID NO: 57940 - DNA, 403 bp, Homo sapiens
  misc_feature 16, 29: n = A,T,C or G
cgggcccccccctcgnaaatacttctagnattaattaacgcgggtctctcctactcaggggcaagttggtctttttgttctattcaggccttcaactgactgaatgaggcccacctatattatggaaggcaattttctttactccagcaattcaaatgtcactctcatgttaaaatttaccaatttaaatgtttatctcttcccgaaacaccccaacttagaacagaaacacccataataatgtctgaccaaatatgtgggcactccatggcccagctaagttgacaaataaaattaaccatcatagcaatacagtgaagtaggaaagttggcttcttgatacgattttaacactttctcctttgcatgtgagctgaacaaaggcagcgaaaaaaaaaaaaaa

SEQ ID NO: 57941 - DNA, 524 bp, Homo sapiens
  misc_feature 501, 503, 504, 506, 511, 512, 513: n = A,T,C or G
cgggccccccctcggaagtcttctagaattaattaacgcggggtggggagataaaattagggagagaagtaggacttctataaagtttaatttctttaggtaattccttttttttgagctgtactatatctaaaagagagacacaggtattcttaatttttaaaattattctttaaatgtacaaaatcattttaaaaattttctatgattatacacacacacacacacacacgtgcgcacacaaacagggtttacagggtttcctcctatatcctcttctgattttctaatttgatttactgaaagggaaacaaagaaacaagaaactggtcttagaacacaaggaaacgcaggccgggagcagtggctcacacctgtaatcccagcactttgggaggccgaggagggtggatcacttgaggccaggagttcgagactgcagtgagccgagatggtgccactgcactccagcctgagtgacagagtgagactccatctcanannanaaaannnaaaaaaaaaaa

SEQ ID NO: 57942 - DNA, 589 bp, Homo sapiens
  misc_feature 534: n = A,T,C or G
gggccccccctcgaaagtcttctagaattaattaacgcgggccccataaccctgggggtacttcaggaaccgtgagtgcacagaaggacagcgtccctggaaagggggtctggtattaagtctaaacaaatacataataacaattgcagccatggtaggtaacatttaggtaacatctatatgttactaagcactatatgttgctaagcactattcttactgttttgcatatgataattcattgaatcctcatagccactctacaagctgggtgctttcataagcttcccttcacagatgtgagagccgaggtatgcagaggttaagttctaaagacaaaacttaacgttaacttttctttctccattaattttagttatggttttggtttttcattccaccagacaaaaatgcaggcccaagacattggtaaaattccacttaaaattcctaatattctttcatgctagttcacaaatcctaagtatggttaatcacacagtattatttagtccaacaagaaactttctgcanagacattaataaaacagaaagaatcataggatgttagagccagtgggactttgga

SEQ ID NO: 57943 - DNA, 598 bp, Homo sapiens
  misc_feature 20, 33: n = A,T,C or G
gtaccgggcccccccctcgngggtacttctagnattaattaacgcggggtactcttctggtttccttcctacctctgtagctgtggcttttcagtctcatgtggtcttcttttcttccttttgcttaaatactagtgttcttcacagttggttccctcctgagaccccttctctcctcattccttcaaggtcaccatctccaacactgaacttatgttctttgtcccagtcctgtctcccaacctgtccttcatcttgtgttcagtgtttcagtacatagcagcttccatatacctcgtgacctgggcatgatgtttaacttttttcccccacctctctctgagtgtggctaactactgaccacgttttgtcagttccacttcctcactatctctggaagctgtgtactattctacactctcactgccctactctggttcatgccatcactgcttgcctgtaatccttcagtagcatcctaagtggcctcttttctttccttctggtgtcccccttcctctcaatctatcctccatccagattgagctttctacaatacaaatgagttattttctctcccctgatttcagcctctcgt

SEQ ID NO: 57944 - DNA, 498 bp, Homo sapiens
  misc_feature 28, 392, 440: n = A,T,C or G
ccgggccccccctcgaaatacttctagnattaattaacgcggggggttctaccaacactctctaccttttgctacaggcaagtaagaaaagactgaaaggaaaaggaactatgggctgtcctgtttttccctttccttctgtgtcatcattttttatgtaagtacttggccaatataagaatgtaacttaagtaagaaagggtgtaataggcttctttgggtattcagatgtcatgaaaggccactgctttctttctgcatttgaagcaaggttgtgttcaaaggaatgcactgtctctaaaagccgtcagtgtcctgtttcatcgccctcctcttactcagccccatatataaaatgcttaccttttatttactttaagtcttactgaatntccaagcctagtggtccactgaaattctgtgcatatggcgcattgcanaggcaatctgcaagtggagtgtcaaggaagcacagcgtacatgtgccctgaatgtatc

SEQ ID NO: 57945 - DNA, 157 bp, Homo sapiens
  misc_feature 10: n = A,T,C or G
cccccctcgnaaatacttctagaattaattaacgcgggattgttagccaggttgcttgaaggttgagagtggagtggtttggcatttctgttttaaataaacatttaagctcttaaaaaaaaaaaaaaaaaaaaaaaaaaaaaaaaaaaaaaaaaaa

SEQ ID NO: 57946 - DNA, 384 bp, Homo sapiens
  misc_feature 26: n = A,T,C or G
gggccccccctcgaaatacttctagnattaattaacgcgggggactctaagctctacgggtgacagatcttgtttctgaagatggtttaagttatagcttcttaaacgaaagaataaaatactgcaaaatgtttttatatttggcccttccacccatttttaattgtgagagatttgtcaccaatcatcactggttcctccttaaaaattaaaaagtaacttctgtgtaaaaaaaaaaaaaaaaaaaaaaaaaaaaaaaaaaaaaaaaaaaaaaaaaaaaaaaaaaaaaaaaaaaaaaaaaaaaaaagaaaaaaaaaaaaaaaaggggggccccccccgggggggacccccatttccccctatagggggtcgttttaccccccc

SEQ ID NO: 57947 - DNA, 568 bp, Homo sapiens
  misc_feature 23, 29, 34, 35: n = A,T,C or G
ggtaccgggcccccccctcgganatactntctannattaattaacgcgggagattttgttaatataaactgattgttaggcaattagttatatttatgcataaatcaattgcactataattcatgaattatttattacaatattttctaatgaattcatgtatctgtcttgtgttgtaaatgtactgtaattctgttcctactttgtgttgttatatatctaaatctgattgtatgaattttaattgttcagttaacgtgtttctaggttgtaatttgtagtaaagcacttcaatgcttttgcacttaaatttacaaaaaaaaaaaaaaaaaaaaaaaaaaaaaaaaaaaaaaaaaaaaaaaaaaaaaaaaaaaaaaaaaaaaaaaaaaaaaaaaaaaaaaaaaaggaaaaaaaaaaaaaaaagcccgcccccccccgggggggcccccaattcccccttaagggaggggttttaccccccccccctggcccgttttttaaaaccgtggaacgggaaaaaccctggggttacccaaattaattcccttggaaaaaaacccctttttcc

SEQ ID NO: 57948 - DNA, 265 bp, Homo sapiens
  misc_feature 20, 36, 53: n = A,T,C or G
tgggtaccgggccccccccncggaggtacttctagnattaattaacgcggggnaaaaaaaaaaaaaaaaaaaaaaaaaaaaaaaaaaaaaaaaaaaaaaaaaaaaaaaaaaaaaaaaaaaaaaaaaaaaaaaaaaaaaaaaaaaaaaaaaaaaggaaaggaaaaaaaaaaaaaaaagggggccccccccggggggggaccccaattcccccttttgggggtttttttaccccccccttttgggccctttttttaaacctttttaa

SEQ ID NO: 57949 - DNA, 394 bp, Homo sapiens
  misc_feature 9: n = A,T,C or G
cccctcganatacttctagaattaataacgcgaggggggtttggtggaaattttttgttatgatgtctgtgtggaaagcggctgtgcagacattcaattgttataaaaaaaaaaaaaaaaaaaaaaaaaaaaaaaaaaaaaaaaaaaaaaaaaaaaaaaaaaaaaaaaaaaaaaaaaaaaaaaaaaaaaaaaaaaccaacaaaacaaaaccaacaccaaaaaaacctaatattccctacctaccctcccccacccccccccaaaaaaacaacttgccccccccccccgaccgacacacaccccccccccccctgccctacccccccccccccccctcccccctcagttaaaccccgtcccaccccaaacccccccccccttccccccataaaat

SEQ ID NO: 57950 - DNA, 615 bp, Homo sapiens
  misc_feature 100, 566: n = A,T,C or G
cgggccccccctcggaagtcttctagaattaattaacgcgggccggtgttagaaaacatttattgaaaaacattataaatactgctgcctgaacactggnggaaaacaatagactaaacaaaaatcttgagagaaagtactgggaatgagatgctttggggaatatgggctttgaaaagcttcaacatatttctgagaatttgcaaactgtgtatgtcaaggctgtgtgcatgttcagtaaaaacctgggaaatttctaccttccctgcacaagcagaaaatgtaggccaaacagagttgaaaactgtctggctgagtgttgaaagcagggcccaacacatacacaaagcccctctgcaagttccaagcacatatggaaatctttgtcaaattattagctgacctctaagctaatggaaaaaatattttaatctacataggtgacaaaaaatagagaccacaaagtttattcagaaaagatactaaacaaacaaataactacaacgaggagtacaacgtggggaggagggagaatcttatttctagagtgtccactttatcatgtntgaaatatctggtattcaaaaaaagtaggagatatacaaaaaaaaaaac

SEQ ID NO: 57951 - DNA, 603 bp, Homo sapiens
ccgggccccccctcggagtacttctagaattaattaacgcgggcagtggtttcaaatgacctgtctttgagttcactgattatttcttctgcctgatcaagcttgctgttgaattcctttaatgaatttttcagttcatttgtgttttccagttccagaaatttcgtcctttttaaaatagcttctatcactttgttgatattcacattttgttaatgtgttgttttgtgattcatctattggtattctctttaagctcattgaacatctttattttttaacatgttatttatttttttgagatggagtttcattcttgttgcccaggctgaagtgcaatggtgcaatcttggctcactgcaacctctgcctcccaggttcaagccgttctcctgcctcagcctcccaagtagctgggattacaggcatgtgccactacacctggctaatttgttgtatttagtagagacagagttttaccatgttggtcaggctggtcttgaactcctgacctcaggtgatctgcccatctcggcctcccagagtgcttagattactggcatgagccaatgtgcctggcctcattgagcatctttataacag

SEQ ID NO: 57952 - DNA, 609 bp, Homo sapiens
cccccctcggaagtcttctagaattaattaacgccgggcagtagggaaaacagtaatactttgtaggtacaatagtggcatatgaagatggcaacttagagaagataataatttttatattcgtgtgattaataattgtaaatcattatgtgatttattattaccaacagtagagcagaatcctttcctgagcactttccatctacttggctaatgccttagttctgtgctgtccaatgcaaagaccacgtgtggctgctgagcactggaaatgtggcttgttcagactcattcagactgaacttttcatataatttaatttaaatctaaagacatattcaatttatttattggaaatcttttgaatacgtttgaaacaagttaggtatatgaatctaactttttcaattatacattttataaaatctaaacacaggtcaaataaattttctgatgaaaatttagtgtccaaattggggatgtgctggaggtataaaatatacatgcaattttaaaggcagcacaaagacttaggaaaaaatgtgaaaatatcttgttaataatttttatactgattacatgttgaagtgatattttagatattttggg

SEQ ID NO: 57953 - DNA, 349 bp, Homo sapiens
cgggtcccccccttcggggtacttctagaattaattaacgcggggggaaaaaaaaaaaaaaaaaaaaaaaaaaaaaaaaaaaaaaaaaaaaaaaaaaaaaaaaaaaaaaaaaaaaaaaaaaaaaaaaaaaaaaaaaaaaaaaaaaaaaaaaaaaagaaaaaacactaataaaatctttaaaaaaaaaaacccgccccccccccggggggggccccccctttcccttttttggggttttttttcccccccttctttgtcgttttttttcaaccttttggtgggggaaaacttttgtttttcaaattttaagccgtttgagaataacccttttttttatgtgggggttttt

SEQ ID NO: 57954 - DNA, 587 bp, Homo sapiens
  misc_feature 27, 487: n = A,T,C or G
cgggccccccctcggaagtcttctagnattaattaacgcgggtatacactaataatgaataatctaaaagtaaataaataaaacaattgcatttgcaatagaaatgcaagaaatgaagaaaacttcagaacaaatttaacaaaagaagtccaaaacttgtaccctgaaaactataaaacattgatctccaggtttgatacaatccctattcaaattccagtggtcttttttttttctttctccctccctccctcccttccttctttctttctttctggagaaaatgacaagctgattctaaaatgcaaatggaaatgcaagggaacagaaaatcctgaaaaaaagaatgaagttggagaacacagacttcctaatttcaaaacttattgtaaaacttggtattggcaaagaatagaaatatagattaacagaacagaactgagagtctataaataaattcatgcatctatggccaatggatttctgnacaagggtataaaaccattggatggggaaagagtagtgtcttcaataaacggggctggggacaactgatatcacatgcaaaagaatgaatttgaacccct

SEQ ID NO: 57955 - DNA, 289 bp, Homo sapiens
cgggcccccccctcgaaagtcttctagaattaattaacgcggggggaggggacataaaccgggacttatggcaaaagcctgtgagtgcctcccagtgatgaacactgggactttgaactagagaatttccacctgagggtcaattattaccttgtgattggacattaattgaagctacctcagtgactgaaggacataaaacgatcttaaatcctgaaatacccatgatatcttgggtgatgtcagagaaacactctactggggttagggggaaccaaaaaaaaaaaaa

SEQ ID NO: 57956 - DNA, 406 bp, Homo sapiens
  misc_feature 27: n = A,T,C or G
cgggcccccccctcggagtacttctanattaattaacgcgggactccgtctcaaaaaaaaaaaaaaaaaaaaaaaaaaaaaaaaaaaaaaaaaaaaaaaaaaaaaaaaaaaaaaaaaaaaaaaaaaaaaaaaaaagaaaaaaaaaaaaaaggcggccgctttttttttttttaaaaaaaaggggggtttccccgggttacccaaaaggggtctggatccccggaccccgggacccgttggcctgggccccccaagggcggggttaacgggggggacccccgggcccgggccttattttttatttcaaaaaaagtccccattagccattgctttagggcgttctggctttgctataaaaaaaacccgggggcggggtattttataaaaaaaaaaaatttaatgggcc

SEQ ID NO: 57957 - DNA, 449 bp, Homo sapiens
  misc_feature 35: n = A,T,C or G
tgggtaccgggcccccccctcggaatacttctagnattaattaacgcgggctcccctcaaaacccaaacacctcccactaggccccacctccaacattggggatcaaatttaaacatgaggtttggagggtcaaatatgcaaactataagggtggggtgtggtggctcacacctgtaatcccagtactttgggcggtcaagatgggtggatcacttgagctcaggtgttcaagacaagcctgagcaacatagtgaaaccttgtctctacaaaaaaatacaaaaatttgccaggcatggtggcacactcctgtaatcccagctacttgggaggctgaggtgggaggatcgcttgagcctgagaggtggaggttgcagtgagctgagatcgtgccagtgcactccagcctgggcaacagagtgagaccctgtctcagaaaaaaaaaaaaaa

SEQ ID NO: 57958 - DNA, 317 bp, Homo sapiens
  misc_feature 16, 18, 31: n = A,T,C or G
cgggtccccccctcgngnagtacttgctagnaattaattaacgcgggggaaaaaaaaaaaaaaaaaaaaaaaaaaaaaaaaaaaaaaaaaaaaaaaaaaaaaaaaaaaaaaaaaaaaaaaaaaaaaaaaaaaaaaaaaaaaaaaacaaaaaagaggcccccccctcggggggggccccattttttccctctttttttggggtgggccccccccgggggggcccccctttttcccctttgggggttttttttccccccccttttggccctttttttccctgggggggggggggtaccccccgggctcccccctttttt

SEQ ID NO: 57959 - DNA, 552 bp, Homo sapiens
cgggcccccccctcgaaagtcttctagaattaattaacgcgggaactctcctctcaaacctttcgaatcactttgtacatgtttctattctagcacttatgttgcacctgaaaatatttactcacatgtctggcatcctcactacctctggaaaataataacttcctgtattctcatcaattaatacattcacagataaaaaattgctgctttcatgtaactttatctaatttgttaactccacgaaatttcatggtgattttaccgagggttcttttgtagcatggtaaatgtaaaaacaataataataatggaatgatcacagatggtttgataaaggcacattatctttgctacttaacacagtgccagataaattatgtctttaaaaattatttattgagtacataaatggatcaatctcacagagataggtaacaaactactttccaagataaattatttctactttaagagttgcttttcttcataccttacttacatataaaatgaacttgtaacaaaggtatgttacgcaaaaaaaaaaaaaaa

SEQ ID NO: 57960 - DNA, 610 bp, Homo sapiens
  misc_feature 589: n = A,T,C or G
cgggccccccctcgaaagtcttctagaattaattaacgcgggaccccctaaatttgtatactgaatgcctaacccccacaaggcaatgggattaggaaaataggacttttgtgggtgattaggtcataaggggttaaccctcatgaaagggattaatgacctaataagagatccaggggagctcccttgccccttccactgtgtgaggacattctacaacctggaagaaggccccaccattacccaaccatgctggcaccctaatcttagacttccagcttccagactgagaaatttgttttttataaaccacccagtctgctgcaattggttatagcagcccaaactaagacaggaaggatatataaccatttttggttgaaatttctgaaacatttaacttccattaaaggatctaattagaatatctcacctttaaaataaataatcgttgaacgagatattttttgaagctgttttgattttgcctttccttgactaatcttgttaacacttcttaactgtaaaatgttgttattgtctcatagcctctgaatattctattgttaataaagtaagaacttttttnttccattttaaactagagtca

SEQ ID NO: 57961 - DNA, 527 bp, Homo sapiens
ccgggccccccctcggggtacttctagaattaattaacgcgggttaggaaaaatggggaaaatggaaaagaaagaggaaaaaactgaaaacattatttcggagacttgtagccagaaaagttagaatttaatccaaactgtacaaaataataaaaattgaaaaacatcaggcaggactagaatttaacaacagctatactatagtttttgaaacataatttttctccagtttctcatttttactgaaagacaaatcatggtaggactgatttgttttcttatacttggtctaattatttgtatacagtgcagcaagaataattatttttcacatagtccttttaaattggctttgatgaaactttgctccatagaaggaatctgagataagacctttttaaagccaagcccagctatgaacttgtaccatcaaatatctatgagttaggtgaattcctctcctcttgaggttctaagataacttggagttcctggcctgtcaaaaagtgacattctttacttaccac

SEQ ID NO: 57962 - DNA, 377 bp, Homo sapiens
  misc_feature 28: n = A,T,C or G
cggggccccccctcggggtacttctagnattaattaacgcgggggcaaaaaaaaaaaaaaaaaaaaaaaaaaaaaaaaaaaaaaaaaaaaaaaaaaaaaaaaaaaaaaaaaaaaaaaaaaaaaaaaaaaaaaaaagaaatacaacaagaaataaagaatataatacaatgaaatgtcaccctttttgggaaccatgtttgccccccccccccccggggggtcccccccctccccctttgtggttgttttttctccccccgtgttggggcgattttttggcgctgcgggtgtggggacccctggggtggtccccttttttttctgttgggatattccccctcttcggctttgggggatgttacccataggccccccct

SEQ ID NO: 57963 - DNA, 473 bp, Homo sapiens
  misc_feature 400: n = A,T,C or G
ccgggccccccctcgagggtacttctagaattaattaacgtggggggagatgaaagagagtcgcgttttgtttacagttaaagacatccaatatcttaaaaaggagttttcctttagaaacacacacacccttcctcttgctcaaaagatctcactccatgatactgtgtaaaatatttttgcactgttgtgaagtatttttgactttttttctgtacataactgtgttctcagagctgaatgtttatatcttttgctgtgcaaaagaaacatgtaaaatgttgttcagttgtatatacagaaatgtgtataaaacattttgttattttttaaaagtagcactgttctggttctgtttgcacgccagtggggagagaataaagaggaaaatttaacaganaaaaaaaaaaaaaaaaaaaaaaaaaaaaaaaaaaaaaaaaaaaaaaaaaaaaaaaaaaaaaaaaaaaaagcgg

SEQ ID NO: 57964 - DNA, 545 bp, Homo sapiens
  misc_feature 502, 503: n = A,T,C or G
cccccctcgaaatacttctagaattaattaacgcggggtggggcaaacattcaaaaaacaacctctggtaaaccagcccttactctaagattgaaagctggtgttgcacaaaaaagttaccatagcaacaacaaaatgtgactatagcccaatttctgacttaactgactcaacttccccttatacaaaagggctagcaaaaggaaagttactacactatttccaggcataaaaattgtttacctcagtctttgctatcctagatgtggtgtccaaatgccaacaaaaaactaagaggcattagacaaagcaaataaaaaaacaacaaattgtcaagaaacaaagcaaaaatatacccactctcagataggatagatgttgaaaatatcagactaggaattgaaaataactatggttaatatataaaaggctttagtggaaaaattagacaacatgcaaagccagataggtaatttcagtaacagaactgaaactgcaacannaaatcaagtgtaaatccaagaaattaaatattatagagatga

SEQ ID NO: 57965 - DNA, 599 bp, Homo sapiens
cgggcccccccctcggaagtcttctagaattaattaacgcggggttcttcccctgagttcactgtattgaaatagcatggtttaatcttggagccttgtttaatcctgcctctactgtttattagttttgtgaacttgccaagttctttcactgtttatgcctcagtttcctcatcaggaaaatggagagaaatatagttccctcttcatagattttatgagaattaagtgagatatgcatttagtgtacagaataatgcctgtcacatagtaagtatgtaataagcatttattattacttatcagggtatgatttatgaattgtggaacctgggattatgggagagtctggcttcaatcaagggctgaaattccatttccactgacatctcttccttccccatcccccgattctgtcctgcaggaagaatacagcgagtatatgaacaacaaagaagctttgcccaagtgagtcggtactgaatatgggcagggtgtgaggaggggtgtggggatttggtggaatagtgcatataaggttagagggtgtggtctggctgagatgttccccactaagttctttgcccacaggactctgg

SEQ ID NO: 57966 - DNA, 490 bp, Homo sapiens
cgggccccccctcggaagtcttctagaattaattaacgcggggtggggtgtgtgtgtatacatatatacatatatatatatagagagagagagtgagagattatttaaggaattgactcgtgatgtggaggctagcaagctcaaaacctgtagagtaggctggcagattaaagacctaaggaagagatgcagtttgagtccaaagacacagttttattcttctggaattattatctcctcttcaggggaggttcagtgttttcttaaggtcttcaaatgattggatgatgttcattcacattacaaaggacaatttgctctgctaaaattctcccagtttaaatgttaatcccaccccaaaaataccttcacagaaatatatagaataatgtttgaccaaatgtctcatattttggcctagccaagttgacacataaaattaaacatcacaatcaggcagaagcgaaaaaaaatagaaaaaaaaaaaaaa

SEQ ID NO: 57967 - DNA, 299 bp, Homo sapiens
  misc_feature 15: n = A,T,C or G
cgggccccccctcgngggtacttctagaattaattaacgcgggtcctgttaaagctgaactctagtttaatggctaaatatattggttttttttctgctattcactctaccaaatcagattgcccgatgtttttctgagggggagaaaagttgggagttgggggaagtactgtatttgactttatatcaatcagaagtataattatatgtttgagaggttttttctttaagtgtctctgaagctaaagtttcccttggagattctaactgtgttatctaaagaaaccaaaagatcaaga

SEQ ID NO: 57968 - DNA, 470 bp, Homo sapiens
cccccctcgagagtcttctagaattaattaacgcgggccctccatctgacaacctctaacagctacacatttactttactcttttccctgccacacttttacatagttttattttaaagcaatcttggtgtactcggtttatatgataccagtttatatgtgttaagccatagtatagttagggtccagataggagacagaaattacatctgctatttaaacagacagaagcagaagaattaataacaaaatgtaaagttattaatcaggtaactgaaagggtaaaaagtgaattctagtcatcaaggagatagcaactataggaagcagctatcacccttaggactgagagaataaagagaagataggagagttagtaaaacttagaaacttagaggaagggccctgaaaagctgaaactcaaacttcaaagttgagggcactggtgctggtgtgttgtggggtggggg

SEQ ID NO: 57969 - DNA, 528 bp, Homo sapiens
  misc_feature 37, 509: n = A,T,C or G
ctggggtaccgggcccccccctcggagtacttctagnattaattaacgcggggcagcagaggaggtgtcatattgtcttctgtgttatctcagtgataaagctcattttgacagtgtttgagattacccatgttaaatcatcatggcttagtggttaagatctaggctttgtaattagacatattgaagttgctgtctcctccctgtcaatgaacagagtttgacaatggaacattagatatctttctagacccagctttcccaactttatggtaaggacaacttcatagaactattatcagtggtagagacaggttttgagcccatgttctctggttctaagactcattctattgatggatatgttagaggttcaaggtgtattttgtttaaaaatgttatattcagatttatttattatatttattagagaaattgagaggaaaacaaaataagtcagttatttacatttaaaaattgaattttatcatatgatactttaataatgntaggaaaaaaagcgtaagc

SEQ ID NO: 57970 - DNA, 382 bp, Homo sapiens
cccccctcgaaagtcttctagaattaattaacgcgggcatggctatactactatcatataaaataaaatctagggcaaaaacatttataagagacaaggacattttatataagtaaaatatctaatatagcaagaatatataagaataaaaatatgtgtgcatcttatattagactatcaaaatatattaagcaaaaattgacaaaattgaagggagaaatagtgagttctacaataatacttgaagacttataaacctctttttaaatataaaatagaacaactagacagaagataaggatatagagaacttaaacaacacaacaaattaactagatcctaaagacatatacgtaataattctacccaaaaaaaaaaaaaa

SEQ ID NO: 57971 - DNA, 423 bp, Homo sapiens
  misc_feature 25, 51, 228, 229, 230, 231, 232, 233, 234, 235, 236, 237,238, 239, 240, 241, 242, 243, 244, 245, 246, 247, 248, 249,250, 251, 252, 253, 254, 255, 256, 257, 258, 259, 260, 261,262, 263, 264, 265, 266, 267, 268, 269, 270, 271, 272: n = A,T,C or G
  misc_feature 273, 274, 275, 276, 277, 278, 279, 280, 281, 282, 283, 284,285, 286, 287, 288, 289, 290, 291, 292, 293, 294, 295, 296,297, 298, 299, 300, 301, 302, 303, 304, 305, 306, 307, 308,309, 310, 311, 312, 313, 314, 315, 316, 317, 318, 319: n = A,T,C or G
  misc_feature 320, 321, 322, 323, 324, 325, 326, 327, 328, 329, 330, 331,332, 333, 334, 335, 336, 337, 338, 339, 340, 341, 342, 343,344, 345, 346, 347, 348, 349, 350, 351, 352, 353, 354, 355,356, 357, 358, 359, 360: n = A,T,C or G
ggccccccctcggaatacttctagnattaattaacgcggggttgcacaagnaaaaaaaaaaaaaaaaaaaaaaaaaaaaaaaaaaaccaaaaaaaaaaaaaaaaaaaaaaaaaaaaaaaaaaaaaaaaaaaaaaaaaaaaaaaaagaaaaaaaaaaaaaaaaggcggccccccccgggggggacctccaattccccctatagggagtcgttttaccccccctcattgnnnnnnnnnnnnnnnnnnnnnnnnnnnnnnnnnnnnnnnnnnnnnnnnnnnnnnnnnnnnnnnnnnnnnnnnnnnnnnnnnnnnnnnnnnnnnnnnnnnnnnnnnnnnnnnnnnnnnnnnnnnnnnnnnnnnnccaccctaaagggcaaatgaaaattgaaaccgttaattttttgtaaaaatccgcgtaaaattt

SEQ ID NO: 57972 - DNA, 600 bp, Homo sapiens
  misc_feature 38, 566: n = A,T,C or G
gactgggtaccgggcccccccctcgaaatacttctagnaattaattaacgcggggaatgcataaaatatatgtagacatagtctattttattatttaccatcctaaatatacacatcttttataaaaagttaaaatttaccaaaactttccctcacacatttacagaccatacatgacaccacttgctgttgacagaaatgtaaacaaaaataaagatgccgtattcaatcataattgcataaaattcactgtagtacatatcttactactgtaacaatttcgtagccacctgctgtggctattgcagtaagctcaagtgttgtgagtatccacttaaaatgttgtgtcatgctcacacctgtaatcccagcactctgggaggctgaggtgggtagaggccaacaaggggaaatcccatctctagcaaaaaatgcaaaaattagccgggcatggtgacgcactcctggaatcccagctacttgggaggcggaggcatgagaatcacctgaaactgggaggcggaggttgcagtgagccgagactgtaccactacactccagcctgngcgacagtaagactctggctcaaaaaaaaaaaaa

SEQ ID NO: 57973 - DNA, 497 bp, Homo sapiens
  misc_feature 15: n = A,T,C or G
ggcgccccccctcgnatgtactttctaaaattaattaacgcgggcatgcctgtaatcccaatactttgggaggtcaaagtgggaggattgcttgagtccaagagttcgagaccatcttgggcaacatagcgagaccctttatctattatttaaaaaaaaaaatagaggatataatcagggaagagggaatctagtctctatgttcatggaacattaattgcctagaaataaaatcagcctcattattcaatcaccttttgaacaaataagtgaaaaaaaatctattatcagctgggcgcagtggctcacgcctgtaatcccagcactttggaaggccgaggtcaggagatcaagaccatcctggctaacatggtgaaaccccgtctccactaaaaatacaaaaaaattagctgggagtggtggcaggcgcctgtactcccagctactcgggaggctgaggcaggagaatggcgtgaacccgggaggcagagcttgca

SEQ ID NO: 57974 - DNA, 486 bp, Homo sapiens
  misc_feature 28: n = A,T,C or G
cgggcccccccctcggggtacttctagnattaattaacgcgggctgtcaaaaactcattatattctttcatacatttcatttaaaaaaatcttctgtttatttgaagcagtgaaatcatacttcaattttgaaaaaagaaagcccccaaaatccatgttgactttttatatgattcattgagtaaagcctttacgcttctgactacttttaaaaatatcttcagttatagaattatttaaattgaaaaaaggtatcatttttatacttaagcttgttgaaggtattaaagaaataattgaagaataatgtatcactctaagtatcaacaatagtagtaaaagggacaacattacctataaacagaaaaagaaattttgacacaaagtggacaattattacagcatttgctgagcctacctttgaaatggatttcacaccttaagaattctttgctttttcatggatgtgactaatactcttccagc

SEQ ID NO: 57975 - DNA, 621 bp, Homo sapiens
  misc_feature 37: n = A,T,C or G
ctggggtaccgggcccccccctcggggtacttctagnattaattaagcggggactataaacacacatcaactttctttctgtttgctttcttttccttcttttcaaactcttaaactcaggcctttatgctgtgagtgactagtccaagaagcacacattttgtagtagtcctgcaccagccctgctcttgaataaaaaggaaaattactggctgcacccaaatcttctagtacttgagtaataagcatcaggcattggaagaggttttaaatttgcttttttgaggaaaagaactgggggtggattttggcatcgtagcatatcgattaaagaataatcaggacatcagatacattttaatacatagctggggccttatgttgtagatgaagcttgccgtttttagcaagttcctgggtttcacattcatttctgctgcatctagtagctccacacatttcataacctgatctctttatttgtatgcaaaaaatactgtcttaatacagagcagcatttttgtaacaaagagactcgctggagctatttggtgcttgaatgtgaccatcctttttacttttgctaagccttatttaaattttgtataccgtggaatatgt

SEQ ID NO: 57976 - DNA, 427 bp, Homo sapiens
  misc_feature 379, 407: n = A,T,C or G
cccccctcggaagtcttctagaattaattaacgcgggacctcttcagttcttaaaaacatgcccattggcacataattgagacataataactaagactagaagagccttggtttaagttatgaagcaaattaaaatggaaaatacaagaaaatagaaccaattaggttaaaaatgccccttactgaaaatctgtattaaaaataaaattaataaaagtaaaaaataaaaatagaaacacaactctactagtacaggctagcctggggagtttgataaactgagtgtttgggtcaactatcactgtacttccataatgaatttcttcagtcatgttagagtagcacatgaatgtgagctctataggacaggtactatatntccgtaagacccaatagttactgtacantcccaaaaaaaaaaaaaagc

SEQ ID NO: 57977 - DNA, 173 bp, Homo sapiens
cccccctcgaaatacttctagaattaattaacgtggggggcgggactctcacggtgacatgtttacagctgggtgtgactcagtaaagtggatttttttttcttaaaaaaaaaaaaaaaaaaaaaaaaaaaaaaaaaaaaaaaaaaaaaaaaaaaaaaaaaaaaaaaaaaaaa

SEQ ID NO: 57978 - DNA, 199 bp, Homo sapiens
cccccctcagaaagtcttctagaattaattaacgcgggggtgaaaagtaaaccttttcacctacaaaatttcacctgcaaaccttaaacctgcaaaattttcctttaataaaatttgcttgttttaaaaacaaaaaaaaaaaaaaaaaaaaaaaaaaaaaaaaaaaaaaaaaaaaaaaaaaaaagaaaaaaaaaaaaaa

SEQ ID NO: 57979 - DNA, 580 bp, Homo sapiens
  misc_feature 38, 54, 87: n = A,T,C or G
ctggggtaccgggcccccccctcggaaatacttctagnattaattaacgcgggnacactaggggcctttcagaggatggaggtgggngaggaaggagaggatcaggaaaaataactaatgcatactagcttaatacctgggtgatgaaataatctgtacaacaaacccccatgacacaagttcacccacgtaacaaacctgcacatatatccctgaaattataatagaaattataaaacaacaacaagaacaataaaataaaaacactttacatttgagaaagaatgacaatatcagtaggtaaaaccaacatcagcagttacaagaccatccttccagccaagtaaggcagtcaaaagaggtgtagatctggtagcagaaactgggtccataattatcaaagtggaagttcacagagcaattataattgagaagataaaaactcatgtaacttccattcagtactgcaatttaaaaatagatttttttcacaataactatatacaagataatatatttaacacataaaacaaaagagaaaaataacaattctttctcatcacacaaaaaaaaaaaaaaa

SEQ ID NO: 57980 - DNA, 368 bp, Homo sapiens
cccccctcggaagtcttctagaattaattaacgcgggactgttttaaaagaaatagttttttggggggccatattttggccacagagaataacagttcagcacagataaactcgatgacggtagagaaaacacagtggttttaagctcagggagtggtgggtactctattctagaaatattttcacatagctacttactccatcatcggtaaagcaagttttatctctgtttttgcagaagtaggtaggttaacattacctgaaaaaattaaaatttaaaaaaaaaaggatgccaaagaaacttcctattttctggagaagaacaagtctctgcctgaacctctaaaagcaaaataaaaaaaaaaaaa

SEQ ID NO: 57981 - DNA, 499 bp, Homo sapiens
  misc_feature 27, 367, 394, 481: n = A,T,C or G
cgggccccccctcgaaagtcttctagnattaattaacgcgggaggtaaggatacatttttggcagaaaattataaataataaattctataagttataatattttccatgtgtattttttaagattaattccaatggctttcaagcttttctgcaatgaaaaattttccgctaaaacatcttcacttgacaatattttaaaaattttattttatttggtaaagacttccaaaaatatgtttcctctgccagtatcagagaaatgactgaatgatagaagacattgagattattacatccattgctttagaacaagtgctcaggtcttggtgaaaatgatggagacattcaaactttgtcctttagatntcttctggcaaaaaaatccagcatctnttgttatttctcctggtattcttttttgtatataaatgtctgtaaattgcaaatcatttttattctgattaacttcatctatagctntacaccaaaaaaaaaaaa

SEQ ID NO: 57982 - DNA, 497 bp, Homo sapiens
  misc_feature 478, 488: n = A,T,C or G
ccgggccccccctcggaagtcttctagaattaattaacgcgggatctcaccaactccaagcagggcaataaagaaaatcatagccagtttgaaaaacaaaaatagaaaatcaaccttaaaagttacctgggggatgggataggaagccaatatcttcagagaagaaaagttaagacttaatactgacttttcaacaggaactatggaagccagaaatgctaacaaaatggcatatttaaaaattgaaagcctaactagaattctattcttagagaagataaatatttagataaatattccaaaatattgaaaaaagaaataaattttcaagcaatcaaaaactgactcctactagagagtgtctttcaggcaaaagaaaatgatcctagatggaagcatgttaatgcaggaaagaatgaagcacacgaaaaaataaaactcaattaactagtgaataaagagaaaaatagaaaaacanaatacttgantaatgcaaa

SEQ ID NO: 57983 - DNA, 420 bp, Homo sapiens
cgggcccccccctcggagtacttctagaattaattaacgcgggcatgtatttcaaataaaagtattagtccctgcctattaaagaatcttatataaatatcgataaaaaataaaagaaagagaaaagaaaaatcactcataatcctatcacctaaagataattactttaatatttgggtatatatccttctaatcatttttctgtgtatgtatgaatggatttttttctttaacccttctcaagattcatatagatcaatttatctaggagcaaattcaatgtgcccatttttaataggggtatatactctataactaatttaatagtctgacctgtggtctgatttggggaaatcaagccaaatagtacctgatccttttcaaagactagctaccctaactgtaaaaaaaaaaaaaaaa

SEQ ID NO: 57984 - DNA, 439 bp, Homo sapiens
  misc_feature 10: n = A,T,C or G
cccccctcgngggtacttctagaattaattaagcgcgggggaaaaaaaaaaaaaaaaaaaaaaaaaaaaaaaaaaaaaaaaaaaaaaaaaaaaaaaaaaaaaaaaaaaaaaaaaaaaaaaaaaaaaaaaaaaaaaaaaaaaaaaaaataaatgaataaaaccctgatgttactgtgattttttttttttgcgggccccccccctgggggggttttccttttcccctttttggggttttttttccccccccccttggggtgtttttttctaacgggggggggggaaacccccccccccccccccttttttcctttttggaaaatttccttttttggggtggttttttttcctatagggcccccccccctttttccctttctaaattttgccccccttcggggggggggtggttttttctccccctttttttttttttaaa

SEQ ID NO: 57985 - DNA, 542 bp, Homo sapiens
  misc_feature 41, 513: n = A,T,C or G
aagactggggtaccgggcccccccctcggggtacttctagnattaattaacgcgggggatctgtgttgctatcacagtctgtgcagtcttttagtcactgactcagatactcttaacgcttaagactttccctgtaatttttttttctttttcttcgttctttttttattttattttttaatgagacagtatctgtcacctaggctggagtgtagtagtgctgtctcagccactgtagccttgacctcccttgctcaagcgatgctcccacctcagcctcctgagtagctgggactataggcacatgccaccatgtctacctacctgaaaaaaaaattatagagacaaggtctcactatgttgcccaggctggtctcgaactcctaggctgaagcattcctccttccttggcgttccaaagtgctggggttacagaggtgagcccttgcacctggccatgctgtaagttttttagccatctttaaggtttttgttaattgaagtgacccacanataacagtttgtacaaaaaaaaaaaaaaa

SEQ ID NO: 57986 - DNA, 380 bp, Homo sapiens
  misc_feature 22, 324: n = A,T,C or G
attaattaacgcgggtggtganctagtgtgggtgaggggagaacattccataatctgatgaaatctcagttttttagtgggcctgtgtcttggggctgagaccttcacgagcatttctcctgtggcatagtttccctctctcgtcccctgtcccctagctccctactccttttcctggttgcaggactccccatctgtttccttgaagccctactatgttttctccctcttaggtgatataggtgagaccacaaggctagaggggactggagtgggagaaatgtccttctcccaacaggaataaggctctggtagaatagactnttgttatggaaaaagctctgagtgtgctatttcgcagtgattacctatctactacc

SEQ ID NO: 57987 - DNA, 563 bp, Homo sapiens
  misc_feature 482: n = A,T,C or G
cgggcccccccctcggaatacttctagaattaattaacgcggggtgaagagcagaaatacaagtttgacttcttttaacatatttgtttgtcaattttactttgaaaacatgtaaatattttaaataatgataaaaattaatttaaaaagcagttcttgaaattcaagagcaaaaagaaatatgtaaatctaaatgtatatcacttgatggcgtaaccatacaaaactatttagaatggcataagaatgcaattctccagtaagggaaaaaaacctagaaacatgtcttaaaaagaggaacgaagataaagacgtagaattaacaggttggataaatatccaatagcactgaatttgaattaaaagtagcggtatgagttcagaatgtctttatattaaaaagaaacaaacgaaaaacatatttcctgtctgtttctaaaaagcctagaaacaatgactgattcagtagctctgagcatccncagtgttcacattgtggtcaccaatatgaactatttctaaatggagccagaaatcctttgagaaatggatgcctacagatc

SEQ ID NO: 57988 - DNA, 386 bp, Homo sapiens
  misc_feature 28: n = A,T,C or G
cgggcccccccctcgaaatacttctagnattaattaacgcgggatctcatgagaatagaaaagaactacaaattaaatagaaaagaactacaaattaaatacaaagaaggccaaaagaagtatatgtaaatataaaagcaaaaataaagtagaaaacaaacctgcaggtaagaatatttacaaagccaaaaattgttaattttctgtgtcaacttcactgggccatgaggtacccagatatttggttaaccatttttctgagtgtgtctgttagggtgtttctttatgaggttaacatttgaattggtagactgattaaagcagattgccctccctaatgtaggttggccttatccaatttattgacagcccaaaaaaaaaaaaaa

SEQ ID NO: 57989 - DNA, 291 bp, Homo sapiens
cctcggggtacttctagaattaattaacgcggggattagagctggttttagaccccccacccccaacacatagtggttgagagaacagcagcataagtggctggcagaggcaaggaaagaccagcagagagagagaaaggaaagagacagagaggaaaagaggaaaagagagagaggaagagacaggaagagacagacagagagtcaaggatagagagagagagagagagagacacacacacacacacacacacagagagagaggaagaggcagaggcaaaaaaaaaaaaa

SEQ ID NO: 57990 - DNA, 500 bp, Homo sapiens
  misc_feature 277: n = A,T,C or G
ccccccctcgaaatacttctagaattaattaacgcgggatagttgaagattttgttttatttcaaaaacaaagtacatttttgaaataatgtttcagaataaaataatctcacttttaaattaagtgatccattttaaaatttgtaattcaataaagttttttttgttgttaaacataaaaaaaagaatattattaaagagtatgatttaaaatgcatattttcttttctttttttttttgagacagcctgggcgacagagcgagactccgtctcanaaaaaaaaaaaaaaaaaaaaaaaggaaaaaaaaaacccccaaaaaaacaaatgtttaaatgagcttcccaaactctgtggacaggtgtcttgtgagcttagatcctcataactgtcagtgaggctggtcaggttgtgggaacagcccaagtccctgggtctgttgactctagtcttgagcagccactccagttaatcccaaaaaaaaaaaaaaaaaagcggcc

SEQ ID NO: 57991 - DNA, 611 bp, Homo sapiens
  misc_feature 561: n = A,T,C or G
gggccccccctcgaaagtcttctagaattaattaacgcgggtacacacacactcacacacacacacactcacacacacacgcacacacacacacacagttgacccttgagcaacatgggtttaaattgtaaaggtctacttacatgtggattgaaaatacaagattcttgggatgcaaaacctgtgtatagggagggctgatgttttgtgtaagctcattctgcaggactgacttcagggcttgagcatgtataaattttggtatgcacaggggtcctgaaaccaatcctctctgtgtatactgtgggatgacatatgtacacatatgttccatatttatgtatatgtatatataaacatatatatatatatctttattagacttattataagaatttgggctcatgtaattattatgaagtctagcaaatccaaaatctgcagagtaagctagcaggctggagacccaggagaggtgatgttccagtttgtgtccaaaggatgtctactgaaaaagtagaaagagtttttttattgaaagattaattgaaaggttggctntttgaaaagttaaacaaaattgacaaacatttagccagactaactaaaaa

SEQ ID NO: 57992 - DNA, 473 bp, Homo sapiens
  misc_feature 31: n = A,T,C or G
taccgggcccccccctcggggatcttctagnattaattaacgcggggaagtcagctgatcaaacgtacagaggtgtggtcttgtgactagtgggaaggaagaggtgttcttgtgggactgagccctcaacctgtggtttctgaagctatttccaggtagataatgtcagaattcaattgaattggaggacacgcagtagatatctgctgcagaattgattgcttggtgtatgaggagaaaccaacacacatttggtcccagaagaatcctgggttgattgttgtggtgtgagaacagtggaagaacatggtttgagtttttctactatcccaagagtcagtgtaatcccaatcaaaatcttttttaaaaaatattttacagaaaaaattgacaagctgcttctaaagttcatatgaaagggaaaaataaaaaaaacaacaacccaaacttagagtagacaaaaaaaaaaaaaa

SEQ ID NO: 57993 - DNA, 474 bp, Homo sapiens
ccgggccccccctcgaaagtcttctagaattaattaacgcggggaatgaaaaaagtaatcaatagaaagagactcagtagtaatacagatgacagaattaaaggacattaaaacagatattgtaattgtatttcttatggtcaagaaggtagattatagcctgagtatgttaaaaagggacatgaaagatattttttaactgtaaatcaaacttctagagataaaactacaatgcctgaaagaaaaaatacattggatggaattaacagcagattagtcacttcagaaggaaagattaatgaacttaaggcagagcaatagaaactattcaaaaggaaacaaattaaaaagaccaataaaagtgaatacagcttcagggagtttagggcaagtttaagcagcctaatacacacataatgggagttcccaaaggaagtaagtgggaacagaaaaaaaaatcaaagatataatggc

SEQ ID NO: 57994 - DNA, 614 bp, Homo sapiens
  misc_feature 566: n = A,T,C or G
gccccccctcgaaatacttctagaattaattaacgcgggcaggcctgccatacaaaacaatattaaagggaattattcaagttaaagctaaagaacattaattagcaacataaaaatatttgaaggtatacaactcatggatgaaggtaagtatatagtcaaattcaaaaaactctaatactgtaatgatagtatgtaaatcacttttaactctataataaaagttaaaagacaaaagtgttgaaactaattataactacaataatttgttaatagatgaatagtgtaaaaaatataaactatagcctgggtgtgatggcttacatctgtaatcctagcactctgggaggccgagacaggtggatcatttgaggtcaggagttcaagaccagactggccaacatggtgaaaccccatctctactaaaaaaaatacaaaaattagccaggtgtggtggtgcatgcctgtagtcccagctactcaagaggctgaggcagcagaatcacttgaacccaagaggcagaggttgcagtgagctgagattgtgccattgcactccagcctgngtgacagtgagattctgtctaaaaaaaaaaaaaagcggccgccaccgc

SEQ ID NO: 57995 - DNA, 632 bp, Homo sapiens
  misc_feature 20, 33, 63: n = A,T,C or G
gtaccgggcccccccctcgngaatacttctagnattaattaacgcgggcacacagacacacanaactacacctgatcaaagatcattacgtctccctatgacttctgaataattttgctggaaatctaatataatttaaagataataacaagctattttgccctaccacagaaaataggtcttagaataaaaaaaaaggaaaagaaaaagaaaaaaaggtagaaaaacaacttgtaaaaatacagaaaggtgcccctcatacaagaaaggaataaaacaagggaactcaagtagctatagtgagatttatgaagccaaacaataaaaggatattctctaagcagttaacagggtaaaactgcattggactcaaggaaagaattactacctatttgtgttcatcttcagatctgtgaatgaataaaatagaaatgcaaaaatagaattttaagaatttactaacagtattacaaatgaaagaatacttcaacagtagtagaattctcagatattctaagagggaagaaaataatttaaaaagaaaacttttaatccacagcttaaaaagaaaagaaaaatattccaactttaataattattttctttagcaattttattaagatttaactatt

SEQ ID NO: 57996 - DNA, 640 bp, Homo sapiens
  misc_feature 19, 32: n = A,T,C or G
gtaccgggcccccccctcnaaagtcttctagnattaattaacgcgggcttcctgctagaatgttacctccatgaaggcagagagtttagttcgttttgttcactactgtatcaccaatacctacaatactgtctgacacatggtaggcagtcaataaatatttgatgaatcaaagaatcaaattcttaaaacaatacaaatgtatatgaattgatccataggaggaccagaaagttcaagaactacagaatgctaggtactggataactaagaatgttgattgtatgtgatgatatagatcagttccatccaaaagaagtataatgcaagctacaactaattttaaattttccagcagtcacataaaaaagtaaacaaaaacaagtgatattaattttaataacatgttttaattcaatatatccaaaatattatcacttcaaaatgtgagtcatataaaacctagtattttagtctttttaaatttttttttgaattatggtattttctgcagagcacatttccgttagtactactcatatttcaaacatctaatagctacatgtggcatgtggccagttgctaccatattggacaacacagatttggaccaaaattaaataatcccactgcagtggcg

SEQ ID NO: 57997 - DNA, 411 bp, Homo sapiens
  misc_feature 10, 23: n = A,T,C or G
cccccctcgngagtacttctagnattaattaacgcgggggggcgctgttgaaggatctcggccggctatggcgtggacttttgtctccttacccgggcaggacaccggtctgcctgccaacccgaaggatgcggccactgagtctcctcctgtgcgccacacccattactacatctttgaagatatcctcaacgtgaggctctgctgccatgaaggtgaagattaagtgctggaacggcgtggccacttggctctgggtggccaacgatgacaactgtggcatctgcaggatggcatttaacggatgctgccctgactgcaatgtgcccggcgacgactggccaatggtgtggggccagtgcttcaactgcttgcacatgcattgcattctcaagtggctgcacgcacagc

SEQ ID NO: 57998 - DNA, 618 bp, Homo sapiens
  misc_feature 8, 19, 32: n = A,T,C or G
taccgggnccccccctcgngaatacttctagnattaattaacgcgggaagtgttagcagctatatgaattaggaagaatttagaagacaatccctaaacacatgaaatgtccaagtaagaagataacatatttatccaaatatttaaagtgaaatgctccagatatgggaagcttacagttttcaagcaaagctttttagaaaaaattatggaactattttaaagagagctaaacatttctttgccttaggcagaatatacagaacacagattcaccttttctgtacatctctagatgatcacgaatgtcaaatatcacactacactgtgatatggggattccccttgggggttttcatgtgtatagggtgcctgcagctacactaaacatcttaaagctaccacaatgttcacttcatatttttgctttttataggctttcttggtctcctcctatgttcccatcattttcttgctttgaatctgtaagaatcgagttgaatcttctccattttaaattttccataggctgagaaactgtttagccaagtttggataaaattgtatccaaagtaagagtatacaagctatgggcaagtccaaaatcaagctgttcac

SEQ ID NO: 57999 - DNA, 440 bp, Homo sapiens
cgggcccccccctcggaatacttctagaattaattaacgcgggcctgcacatgtatcctggaacttaaaattaaattaaattaaaaaatggttcaaagatgaaaatactgcttcctcaaggaaggcttttctgattcccatctgggtcagtatctctgggtaatagcactctaccctcctctgtagtgcttgtaggcttttaaataaatccatgtgtttatctgaaaaaataaaaagaaaaatgaaaaagaaaaaaaagaaaaaacatcccatgctcatgggttggaagaatcaatatgattaaaacagccatactgcccgaagcaatctacagattcaacactattcccatcaaacaaccaatgtcattttttacagaattagaaaaaaaaaaaaaaactattttaaaatttatacacccccccaaaaaaaaaaaaaaa

SEQ ID NO: 58000 - DNA, 514 bp, Homo sapiens
  misc_feature 12: n = A,T,C or G
ccccccctcggnagtcttctagaattaattaacgcgggccttcattagaaatgcttgtgaccagatgtgtctgaagattttggattttttatggttttggaacatttgcatgtatataatgagatatcttggaagaggaccctagtctaaacacaaaattcatttatatttcacatacagcttattcagtgtacatagcctaaaagttttttatacaatattttaaatgattttttgcatgaagcaatatgttttaagtacttctgtgtggaattttccacttgtgatgtcatgttggtgctcaataagttgcaaattttcaatattcagcctgtattacattctcctctagcatcaggctagtgttatagtatcagatactccatcttcatcctttactatgacttcttttcttccaccaatgttatcaaaagtactgttaccaagggaaataaaaatgcagcaagaacctataggagctgaatattcttttaggcagctttggagcattttt

SEQ ID NO: 58001 - DNA, 596 bp, Homo sapiens
  misc_feature 28, 57, 538, 545, 555: n = A,T,C or G
cgggcccccccctcgaaagtcttctagnaattaattaacgcgggctcctgtgcaggngcctttgcacatgctgccacttctgcctggggtgcattcccccattctcccatggctgccttatttctttaggtcttagcttacacggcacctcctcagggggtccttccctgactacctactgtaatgtaggcttccccttttattctctcacatagcatcctgttccttttgttttctagcacataccacaatttgtgattttttcatgtgtttacttattcgatgcctactggcttgtagaatctactaagctcagtgagggtaagagccatgcctttttttttcaggtgcctactaagaggttattaatggtaggcaatcaataaatatttgtggaatgaatgtacaaaattactatgaagttattaggcactgactccatacctagcaaactgccatggaaggtttagaagcctgttggagaaaaggcctggtgcagtgactcatgtctgtaatcccagcactttgggaggcctangcaggcngatctcctgnagtcaagagattgagaccaccctggccaacatggtgaatcc

SEQ ID NO: 58002 - DNA, 616 bp, Homo sapiens
cgggcccccccctcggagtacttctagaattaattaacgcggggttttaggcaagaagtttccagtttttttcctgggaaatgctgtacagcagtgggccctgggaggaacggcatatacattaaactccttccagagaactatttgttctcttttagggacaagatgtgttcttaaaagttgggcagacttcacatctaattcttctactgtcgttacaatttcctacactaatcctaaattccgtggagtttttattacattggttggtggcattagcctgtcaacagctggatgagatagaagttagaaaatggactttttgaggtcaggaagctaagcaaccagaagaaccaatttgtcaacttaaatcatctggggaatggaaaaaattattccacaatgtgggaaataaaagaccgcctggagctactggtttttgtttttattttctttttgttattcctctttgcacttcccttttccgagcagcattatgtgtgggttatagaaagcttacatgttgactttgttatgtggtcatttgatgtggtcgcgctaacgtttattgtaaatactgtgagtatttttcacccttctggcttaattacctgtg

SEQ ID NO: 58003 - DNA, 613 bp, Homo sapiens
  misc_feature 598, 600: n = A,T,C or G
cgggccccccctcggaagtcttctagaattaattaacgcggggtgacattttttagttgctgccatctaatagtaaaaagcaatactaacccacatatatattagggacgcatattaagttaaacatggtttcttactgatgtctcccattctaatctgataccacatagatcatgttagtcattttctttgttgtttatttacaaatttctactcaaacattaagaatatagttcccatcatatgccatccatttacttaattgttcagttatagtatacatgtattgtagcacattttttgacctttatcctcatgagaaacaattttgccaactattgcttattgtggcattcattttgcctttaatgttgcagattccatttatctccaaaatcacttagactggtacctcttctcatatccctttcagtgagattgttttatacgttggtgtacattggtcagcttatcttgtcacaaacggcattctttcccagggtccttgaccttctaagttttttctttttaatttgtaaatattaagattaactattttcctagggatgaagccaacttgatcatagtggataagctntntcacgtgcttctg

SEQ ID NO: 58004 - DNA, 247 bp, Homo sapiens
gggccccccctcgagaagtcttctagaattaattaacgcggggggaaaaaaaaaaaaaaaaaaaaaaaaaaaaaaaaaaaaaaaaaaaaaaaaaaaaaaaaaaaaaaaaaaaaaaaaaaaaaaaaaaaaaaaaaaaaaaaattaaaaaaaaaaaaaaagggggcccccccggggggggaccccaatttcccctttaaggggtttttttacccccccctcttggcccgttttttaaaaacttgggaag

SEQ ID NO: 58005 - DNA, 561 bp, Homo sapiens
cccccctcggaagtcttctagaattaattaacgcgggtgcccttttgatccccacattctcactacctgtttctttgttggattaccaataaagagtgtgggctcccagagctcagggccttcccagcctccacaatcgctatggccccctggtcccactttagttctcaaactgtctttttctcaatcctttgactccaccagacttcctcacccctacgacctggtgctgggtctgattaccccaacactaaccgctataaattatcttcttagtactgcttttgctgtatcctataggttttgaaatgttgtgtttcccttttcatttatttcattcatttattttttaatttaatcactgacttgctggttatttggaagcatatagtttaatttatatgtatttgtatagtattaaaagttcctcttgttactgatttcaagttttattccactgtgatcagagaaaatacttaatatgatttcaatttttaaataattttttacttgttttgttgcctaacatatcttctacctttgagaatgttccatatgctg

SEQ ID NO: 58006 - DNA, 579 bp, Homo sapiens
  misc_feature 35, 52: n = A,T,C or G
tgggtacccgggccccccctcggagtacttctagnattaattaacgcggggnaaaaaaaaaaaaaaaaaaaaaaaaaaaaaaaaaaaaaaaaaaaaaaaaaaaaaaaaaaaaaaaaaaaaaaaaaaaaaaaaaaaaaaaaaaaaaaaaaaaaaaaaaaaaaaaaaaaagggggaaaaaaaagggggggggccccccttggggggtttttttttttttttttttgggggctttttgggccccctttttccggcgtgggtttgggaaaccccggggggggccccccttgggttttcccccatttttcccgttttgcccccgtgccttttttgcggggggggcttaaggggagggcccttccccggggggggttttttaaagggggcccggctttttgggccttttttttttttgggcccttttttttgggttttgggggcattgtttttttttttaccccttttttttttacccccaaggccccttttgggcccttttttttttcccaaaaagggttccccggtgttcccttttgggaccaagggtccttggtaagggggggggtttttagggtccggggg

SEQ ID NO: 58007 - DNA, 412 bp, Homo sapiens
  misc_feature 22, 38: n = A,T,C or G
ctgggttaccgggccccccccncggaggtacttctagnattaattaacgcgggggtttaaaaaaaaaaaaaaaaaaaaaaaaaaaaaaaaaaaaaaaaaaaaaaaaaaaaaaaaaaaaaaaaaaaaaaaaaaaaaaaaaaaaaaaaaaaaaaaaataaaaaaaaactaaataaaaaaggggggggcccccccgggggggggtttaaattttgccctttttgggggttctttttaccgccccttttttggccttttttttttaaaaccgttttaggggaaaaaaccctgggtgaccccaatttaaaaccttttaaaaaaattcctttttaatggggtggggaaataccaaaagggccttccaaattcccttttttcaaaatttgcccaccttattttggaattttaattttta

SEQ ID NO: 58008 - DNA, 606 bp, Homo sapiens
cgggccccccctcgagagtctttgattaatatgtaaattattgggagaaagcttaaaactttcgacaatactgctttgttaataacttgttacaaattaaattttatgtttttaaaaggtggtatttaaacttctgactagaaaattcagattatcaagtaagtgcccctacaaattctcctaaaccttaagaaaagctatttttatgacctgcttctgtgtttatgatcttaagtgataaagtcttagacagttgaaagacaattgctcaatgaccttacctgttgatattaatttatatgacttgatttctttccctaagattgaaaaggctgtggtgtctcagcgcctgacagaatctccgtgtgctttggtggccagccagtacggatggtctggcaacatggagagaatcatgaaagcacaagcgtaccaaacgggcaaggacatctctacaaattactatgcgagtcagaagataacatttgaaattaatcccagacacccgctgatcaaggacatgcttcgacgaattaaggaagatgaagatgataaaacagttttggatcttgctgtggttttgtttgaaacagcaacgcttcggtc

SEQ ID NO: 58009 - DNA, 301 bp, Homo sapiens
  misc_feature 25, 36: n = A,T,C or G
tgggtaccgggcccccccctcgganatacttctagnaattaattaacgcgggggagagaggggccagaaaaacatgaatgcaggcagatttcgtgaaatctgccaccactttataaccagatggttcctttctcaaccctgggtcaaaaagagaataatttggcctataatgttaaaagaaagcaggaaggtgggtaaataaaaatcttggtgcctggaaaaaaaaaaaaaaaaaaaaaaaaaaaaaaaaaaaaaaaaaaaaaaaaaaaaaaaaaaaaaaaaaaaaaaaaaaaaaaaaaca

SEQ ID NO: 58010 - DNA, 373 bp, Homo sapiens
  misc_feature 31: n = A,T,C or G
taccgggcccccccctcggggatcttctagnattaattaacgcgggggagaagacagtggcccctacagaatgttcataggttctcatccctcaccccccaccacgggagactagagctgcaggatcccaggggaggggtctctcctcccaccccaaggcatcaagcccttctccctgcactcaataaaccctcaataaatattctcattgtcaatcaaaaaaaaaaaaaaaaaaaaaaaaaaaaaaaaaaaaaaaaaaaaaaaaaaaaaaaaaaaaaaagggccgccaaaagagggggagctccaatcgcgcccaatagggagacgttttacaacgccctaaaatggaaaaaccttgccaaccacccggggg

SEQ ID NO: 58011 - DNA, 376 bp, Homo sapiens
  misc_feature 29: n = A,T,C or G
cgggcccccccctcgaaagtacttctagnaattaattaacgcgggcagcctctcacagcaggaactaacttgtgtacattgacaggctccgactcagagtcagctgccacttcctccagctcccctccctgcctgtccccaagacctcacctcaaactccctccaagtcccatgtatataggtcctgatgccttcccaaccccgcccctcaccctgttgccaccttgtttcatttgtaaaaggaaatacagaaacccccccaaaaaaaaaaaaaaaaaaaaaaaaaaaaaaaaaaaaaaaaaaaaaaaaaaaaaaaaaaaaaaaaaaaaaaaaaaaaaaaaaaaaaaaaaaaaaaaaaaagggaaaaaaaaaaaaa

SEQ ID NO: 58012 - DNA, 458 bp, Homo sapiens
cccccctcggaagtcttctagaattaattaacgcgggggaggggattgccttttctttcaagggtctgtaagtctgcagtaaaagtcaaaggtattcaaataggaagttttgttcttgttttagtatataaagaagtacaactttccatgttggaaaaattttaaaaaccttttttaaattataaaactcataagcaaccattgttgagaaaattagtaaagtacagaaaagagaaaagaaaaaaattaaagtctcccataatttatctacctaatataaccactattgacagttgacatgatggccattttctgccagtatatattttttctttgctagtaaaatacataacccttatacatatgtttaaatagttgaggtcatattctctatagttttatattctttttcttttttttttgtgacagagtctcactctgtcacaaaaaaaaaaaaa

SEQ ID NO: 58013 - DNA, 552 bp, Homo sapiens
  misc_feature 15, 28, 44: n = A,T,C or G
cgggccccccctcgngggtacttctagnattaattaaccggggnaaagtttgccactttggtagggagaaaaaaaattataaaaatggtcactatatcaagataaatgcccctgtctacaatgaagatttaattattgtaaatttttatgcagcatctaaatccataagtcaacaacttctaaaaatgtaatgagaaataggtaaaaatataattacagtaagactgtagcttatctttgaaaattaataaaaataaaaaaagtgtcctacagccaaaaaactttaaaactctctctgaatttgtttcagaaaaaattcaaatcaagtaaagtaaatagatccttttgtagttcataacagtgattactgggttttcacgttcatgtgtgagatgtgcctttctttttttttgtttttgtttgtttgttttttgagacagagtctcgctccatctcccaggctggagtgcagtggcgtgatctcggctctctgcaacctccgcctcccgagttcaagcatttctctgcctcagaaaaaaaaaaaaaaaaaaa

SEQ ID NO: 58014 - DNA, 506 bp, Homo sapiens
  misc_feature 477, 482: n = A,T,C or G
gccccccctcggaagtcttctagaattaattaacgcgggcagtatgtagatcacctgttgttatgctcccccactaaagaagactcagaaattgactccatttgccttttacagcaactcacacataagggtcacaaagcttcaatagaaaaacttcagttttcaagaagaaggtccactaattgagacatgacttgactgctgaaggtatttcactttcgcctaagagaataaaaactgtttaaagcatttctcagcctgcaaccaaaaaacaagaggttctcttggacttactggatattacagatcataggttccaaaattgtcctaaatgacctcatcattgtatgaacccactagaaatgctgtaccagagccattaccttaagaagacagtcatgagcaggtttttaaccaaacgtaattggtcttacaatagcccctagctttaagactagcaaattatactaaaccttntattntattcatttatgaatgtaacaatc

SEQ ID NO: 58015 - DNA, 393 bp, Homo sapiens
  misc_feature 39: n = A,T,C or G
gactgggtacccgggccttcccacggaaatacttctagnattaattaacgcggggttgactcactcatactcctcgacgattcccagggcactgcaaagaaactttcgtgttctgaaatttggtgctaaatgaagggataaacatcttccctgagaatccataactttaggctagtccttacataagtaaccgaaatgcgtgctacctggataatctgaaaaatctcaaactaaaaatttaatttaaagaattcacaggactgtcatacatatattatgcattgagaaagacacaacattttgtggtacttccactaaactacataatctgaatctaattataacaaaacagtagataaacccaaactgaaggacgttcaaaaaaaaaaaaaa

SEQ ID NO: 58016 - DNA, 515 bp, Homo sapiens
  misc_feature 469, 479: n = A,T,C or G
tctataattaattaacgcgggcagcattagggaaatggaaatcaaacataatgagctaccactttattcctaccaagatgggtacagtttaaaaaaaagaaaataactgttggcaaggatgagaagaaatcaagtgattctgctgagagagcatttgaaaaaaaaaaagaaattggaaactttgtgcactgttgctgggaatgtaaaatggtgcagctgctgtggagtacagtttggcagtttgtcaaaaagctaaacatagaattactgtatgactcagcaatttcactccaagtatatgcctaaaagcattgaaagcaaggaatcgaaagatatttgtgtgctagtgtttacagcagaatttttcacaagtcaaaagataaaaacaatccaagtatccatcagcagataaatagatacacaaaatttggcatttacatatatacacatacaatgattcagccagttntggtacatgnctacacatggatgaaccttgaaaatttatcctaagt

SEQ ID NO: 58017 - DNA, 549 bp, Homo sapiens
  misc_feature 28, 46, 373, 374, 375, 376, 377, 378, 379, 380, 381, 382,383, 384, 385, 386, 387, 388, 389, 390, 391, 392, 393, 394,395, 396, 397, 398, 399, 400, 401, 402, 403, 404, 405, 406,407, 408, 409, 410, 411, 412, 413, 414, 415, 416, 417: n = A,T,C or G
  misc_feature 418, 419, 420, 421, 422, 423, 424, 425, 426, 427, 428, 429,430, 431, 432, 433, 434, 435, 436, 437, 438, 439, 440, 441,442, 443, 444, 445, 446, 447, 448, 449, 450, 451, 452, 453,454, 455, 456, 457, 458, 459: n = A,T,C or G
cgggcccccccctcggggtacttctagnattaattaacgcgggggngaaaaaaaaaaaaaaaaaaaaaaaaaaaaaaaaaaaaaaaaaaaaaaaaaaaaaaaaaaaaaaaaaaaaaaaaaaaaaaaaaaaaaaaaaaaaaaaaatttaaaaaaaaaaaaaaaaagggggcccccccccgggggggcccccatttcccccttttgggggttttttttcccccccttttttgccttttttttaaaactttttgattgggaaaacccttggtttccccaatttttttccttttgaaaaatttccctttttccccgttgggttttttacaaaaaggccccccccgtttcccttttcaaaaattttcccccccttttnnnnnnnnnnnnnnnnnnnnnnnnnnnnnnnnnnnnnnnnnnnnnnnnnnnnnnnnnnnnnnnnnnnnnnnnnnnnnnnnnnnnnnncaatttgggaaatttcttttttttttaaaaaatttcccccgaattgggttggttttttttcccttttggaaaaaaattccctttttaaaa

SEQ ID NO: 58018 - DNA, 462 bp, Homo sapiens
ccgggccccccctcggggtacttctagaattaattaataggtgaattcagcaagattgcttgatacaatattagtatacaaaaatcaactgcatttctatactggggcacagaaatgaaaaatagctaaacattaccagttaagaaaaatttttaaatctaatatccaaatccaatatttagatatatatgttatatatctaaaatatatataaaacctctacacataaaaccatatgagttatgatagataaagaacacctaaataaatgcagagatatatcaagttgatgtataatgagtgaatcccataaagatattaattatctccaaacttatctaaattcaatataactgcaattaaaatcacaacaggtttttgaggcaattgagaaactgattctaaaatttatattgaaattcaaagggacaaaagaagccaagacacacaaaaaaaaaaaaa

SEQ ID NO: 58019 - DNA, 424 bp, Homo sapiens
  misc_feature 26, 39: n = A,T,C or G
ctgggttaccgggcccccccctacgnagatacttctagnattaattaacgcggggtatatgaggataaactacttacttaattatatgtagaaaaatataaaaaaaaaaaacattataaaaaaaatatactatatatcagagatgacagaccacaaatcaattaaattaacataaaaaatgaggaggacgactaacatggggtaagtatcataacatgctagccatttagacatacaccgcgtaatatacagatattacactatatgtgcattacactatttggtcacaattcgggttgaattatctgattgaatttacccatcaactctgtaatgaacatacagtcattctaatttttgtagatcaggatgctaagattcacggaagttagataattaacccaagtttatcgatatattacat

SEQ ID NO: 58020 - DNA, 616 bp, Homo sapiens
  misc_feature 32: n = A,T,C or G
taccgggcccccccctcggaaatacttctagnattaattaacgcgggctttcgtgcattgaagatagatcaatttttttctgtttttttaggttcatggggtacatgtgcaggtttgttaccttggtaaattgcatgtcactgagtcttggtatatgaataatcctgtcaccaagatagtgagtgtagtacccaataagtagccttctaacacatgtccctctctcacccttcactttcaagtgctccccagtatctattcccatctttgtgtccatatttattcaatgtttggctcccacttataagtgataacatgcagtatttgtttgctgtccccacattagtttgcttgcataatggcctccagctgcatccatgttgctgcaaaggacataatttcattattttttatgactgcatagtattccatggtctatatgtactatattttagaaaatttattaaatagatggatacatttgaaaaacaaaacacaacaatctgaagaaaataaggaagacaaagactagaaaaaaatgaacacaatataaatgaactaagggaaatataaatctttccatcatacatgttattgctcccaaaaaaaaaaaaaa

SEQ ID NO: 58021 - DNA, 417 bp, Homo sapiens
cgggccccccctcggaagtcttctagaattaattaacgcgggatctggcactgcattgatctcttcttagatttcattactgtcttcagaaaactcatgatgatcctggccatgaatgaaaaggataagaagaaagagaagaaatgaagtgaccatccagcctttcccaattagacttcctctccttccacccctcatttcctttttgcacacattacaggtggtgtgttctgtgataatgaaaagcatcagaaaaaaaaaaaaaaaaaaaaaaaaaaaaaaaaaaaaaaaaaaaaaaaaaaaaaacaaaaaacaccaaaagaggaacaccaaaaaaaacctttaaaaaaaaaaataagggggcccccccgggggggggccccaattcccccctttggggggtggtttaaccccccc

SEQ ID NO: 58022 - DNA, 446 bp, Homo sapiens
ccccccctcggacgtacttctagaattaattaacgcggggccgggctgttcttctacttgaggaatcaaaaggccactctggacttcacccaaaaggtattcctgacctgaagtgcaaatgacccattcaaaaaaaaactttctgccccaccttgaagggataaaaagcttcccctccgggctgtttttcttccaaaagaaagggctttctcaggacctgtttgctactggttcaccacctgcaaaaaatgccctcctttggggtttcctaagctcctgcccttggcctgaagtcccagctttgggggcagcccctaatcttaaacttttgggctcccctttgcctaaaccctatggcctcctgtgcatctgtactcaccctgtcccacaaacactttactttattaaatgtttctcaaagatggagttaaaaaaaaaaaaaaaaa

SEQ ID NO: 58023 - DNA, 604 bp, Homo sapiens
ggccccccctcggaagtcttctagaattaattaacgcgggactgttctgacaggccatgatatacaaactcttccttacagtacaagatactaaataatgcatctaagcaataacagatttttttctaatcaacactgattcaggtaaaagtcacctgtgcatattaaacctactatgtggaagtttgatgaaaaatagaatacctgtatagttccaaattaattatgaaggaatgttaactatagtggaaaagtccagtggacaccaatcgaaccaagagatcaaagtaattcaaagtgagacaaagtgacattatttgtcacctgagatgattcactaaggaagactgagaatactgaattatttctgctcaaaatgagtatcttaaaccttttcatgaggaaacacaaaattcaaaatctgaggtatctccttaaatctgttagctattactttttaagaacactgatgtgatcaaagtccaggaaactgtttcagattaaacaaaactaaagagacatgataattgaatgcaatagaagatccttttctggatgttgtagaagggaagaaactgctataaagaacacctctggaaaaatg

SEQ ID NO: 58024 - DNA, 618 bp, Homo sapiens
  misc_feature 28, 46: n = A,T,C or G
cgggcccccccctcggaagtcttctagnaattaattaacgcggggnggaaatactatatatattcctatcatttcaaaaaagaaaagatattttaatatccgagtatgatgggatataattaccaacagtactttggatgaaataaatttaatgttatgaaaatctctgaacactattcctgtttttttcttcattctgcagaggactggtgagaacatagtcgaggaccagtgtgaattcaagaactggcagttgggagccagtcgcttaggaattctggcagtgagtggcaaaaccagaggacagccaagcctttctgacgtcaaagcctgtgctgggaccatttatctatctagaatttgtgtgttcattctgtcattcaataactattgattgagcacctacgatgcgttgggtactatgctcctgcccagggcatgacaaatcattttcttccatttctctcaccacctctctatcctttggctatttggattgaaaccaaaaactcaactcttaacacagctcagaaaatcataactattagccaggtgtggtggctcacaccctgtatcccacactttgggaagccaaggtgggcggatcgcctaaggtca

SEQ ID NO: 58025 - DNA, 552 bp, Homo sapiens
  misc_feature 495, 530: n = A,T,C or G
gggccccccctcgaaatacttctagaattaattaacgcgggatcctaactagtctaagccaggagtcagcaaactaaagcccatggacaaaacatggccagccactgctgcctgtaagctaagagtggtttttacattttcaaatgactagtaaaataaaccaaaagaaggatagtgtgtgttgacacataaaaattatacaaaattctaatttctgtggccatgttttttaacagctttattcagatataattcacatactgtacaattcacccatttaaagtatacaattaaatggctttcaatatattcacagggctatacaattatcaccacaatcaattttagaacattttcactacccccaaaagaaacctcatgcccttaagccatcacccctcaatccccctagtacctcaagctctagatagtcaataatctattttcagtctttgtagatttatctgttctggacactttatatacataaataanagtttattggaacacatccacgctcatttacattntgtctatagctgcttctgcact

SEQ ID NO: 58026 - DNA, 432 bp, Homo sapiens
ggggaaaaaaaaaaaaaaaaaaaaaaaaaaaaaaaaaaaaaaaaaaaaaaaaaaaaaaaaaaaaaaaaaaaaaaaaaaaaaaaaaaaaaaaaaaaaaaaaaaaaaaaaaaaaaaaaataaaataaaaaattttttttttttattttttttttctccccttttttttttgccccccccccccggggggggcccccccttcccccttttttttgtttttttcccccccccctttgggctttttttttctcccctgttgggggggaccccccggcgcccccccctttttttcggtggggaaaaagccctttttttgggggggggttttttttaaaggggccccccccttggcctttttttttattttgggccccccttttttgtgggggtgaattttggcccctttttttttttttttattcccccccctttttt

SEQ ID NO: 58027 - DNA, 484 bp, Homo sapiens
  misc_feature 9: n = A,T,C or G
acttctagnaattaattaacgcggggtgggcggatcacttgagctcaggaattcaaggtcagcctgggcaacatggctaaactctgtctctattaagaaaaaaaatgttaacattatgatttaaaagtgcattaaccttaatctagataataaaagctttttggggcaacctcaaaaaaaaaaaaaaaaaaaaaaaaaaaaaaaaaaaaaaaaaaaaaaaaaaaaaaaaaaaaaaaaaaaaaaaaaaaaaaaaaaaaaaaaaaaaaaaaaaaaaaaaaaaaaaaaaaaaaagaaaaaaaaaaaaaaaaacccccccgccccccggggggaacccccatcccccccaaaaaggggggttttccccccccccccccgggcccctttttacacgttggggagggggaaaacatgggggacccccccaaaattttctcctgaaaaaatcccttttgggcgaggggggagatagaaaaaaggccccccc

SEQ ID NO: 58028 - DNA, 366 bp, Homo sapiens
taattaacgcgggcggtcatggtgccccccccctgtagccccacctactggggaggctgaggcaggaaaaatcgcttgaaccaagaggcaaaggttgcagtgacccaaaatcgccccactgcactccagctggaccgacagcgaaactttgtctaaaaaaaaaaaaaaaagtggatttcactctaaacccacttttaaaaatagaatattaccttcttttataaatgcactaaaataacactacatattttaacttcactttatgaggttttcttaagcccagggaataatttaaaataaatttttatggaaaggtagggcccatacagaaaagtgtgcaaatcataagtaaacataaaatttttt

SEQ ID NO: 58029 - DNA, 596 bp, Homo sapiens
  misc_feature 28: n = A,T,C or G
ccgggccccccctcggaagtcttctagnattaattaacgcgggctatatactagcaattaacaactggaaatatttaaacttaaaaacactaacatttacaatagcatgaaaatagtaaacagtgataaacctgatgagagattggcaagacatgtgtgctgaaaactacaaaatgtcatgaagatacattaaaaaaaaaaaggcataaatatattaagagagataccttgctcatagactagaagttcatcttcactgttgttatgatctcagttctttccaaatagatctatagttgatataatttataaaattaacatgtatatgaaaagtgtgtataatgggcacaaaactgtaaaaataagaacataggtgaagggcttacactatctgattttaagacatcataaaattaaaataaagatgattttgtgatattggaattttaaaaagataaatgaacaagtaagacgaaatagataatccagaaatagatccatacatgtatggtcaactgattttcctcaaaagtgcaagagcaattcaataagacaaggtaatcttttcaaaatatagtgctagaataattaaatat

SEQ ID NO: 58030 - DNA, 538 bp, Homo sapiens
  misc_feature 8: n = A,T,C or G
ccccctcnaaagtcttctagaattaattaacgcggggtctatgtcctaggaaccacaggaaggggaatcctttggaacctgggcagacattctggtttccaattcccagtttattcaggggagctctatcctcatcttacttatgtggtccaatcccctctacttattttactgtggctgctaggtggtgcaatatcaaaagtcccacatgacacgtctgctggggagattctttggggtgtacctttatcttaaatcatataaatatgagttcattgacatttagaataacaattattattaagcaatatgctctaagacaaaggatatggaaaaataaaaacttttattcagaacacaatgaatagatatgtttatacgatacatactatgagttaaaagtcttgggtaagatatttgaaaaaaaaataatcaagattcggaatatctgatcttgattaattttaatagcaagagaagctaaataataaggttctgtagaaagagtttgaagaagataccgaaaaaaaaaaaaaaa

SEQ ID NO: 58031 - DNA, 124 bp, Homo sapiens
  misc_feature 16: n = A,T,C or G
cgggccccccctcggnagtcttctagaattaattaacgcgggcctttactatggtctattatcctcgtgcagactttacaacagagtgtttccatactgctgaatgacaacaacagtttaactc

SEQ ID NO: 58032 - DNA, 605 bp, Homo sapiens
  misc_feature 16, 574: n = A,T,C or G
ccgggccccccctcgnaggtacttctagaattaattaacgcgggcagataacaaggtcaagagattgagaccatcctggccaacatggtgaaaccccatctctactaaaaatataaaaattagctgggtgtggtggcacgcgcctgtagtcccaactacttgggaggctgaggcagagaatcgcttcaacctggggcagggggcagaggttgcagtgagccgggatcacgccactgcactctagctgggcagctgagcaagactccgtctcaaaaaaaaaagaaagaaaaaaagaaaagaaaagcaaatctttaagttcaattaaaaaaatcttaaagttcaattttaaagggaggggaaaaaagaagccatatgtcttttttgtcaaagtctcacaaaggatatccctgaaagcttactgctttaaccatatgctagataacctgtaaaataacttaattcccaagtacttacaatactagaattctagagctagatggagggagtggaagccattcaggtcatctctctcacttttgtagtcttattctacaaaggtgtagattcacactangacccagatctatacttttctgtttggaaat

SEQ ID NO: 58033 - DNA, 316 bp, Homo sapiens
  misc_feature 25, 38, 115, 280: n = A,T,C or G
ctggggtaccgggcccccccctcgngggtacttctagnattaattaacgcgggctagcctggacaataagagcgaaactccgtctcaaaaaaaaaaaaaaaaaaagttatttttnttccaacaaaaaaacttcccttaaacgcagtagagtgagtaagtacatgtctctactttctcctaaaaagccactaatgtaacagtaagctaattttttaaaaccctgagatataaggcagtatattcaggaaatagcaaaatactgtaagaaaagaaaattcanaaaataagaactcaatagtttttaaatccatgaaaa

SEQ ID NO: 58034 - DNA, 548 bp, Homo sapiens
  misc_feature 34, 81: n = A,T,C or G
gggtaccggggccccccctcggagtacttctagnattaattaacgcgggggtactattgttatcaacaccttacatgttangaaaaaagacacaaagagctaagaaatttgttcagttatcacacaactattaagaaaaaagtcgggtacacaagtccatgcagtctggatccagggagtacatattcgctatcatttccagtcatattaatttacaaggcaagaaaaaaaaggattgaaaattaacacattcaacaattcagaatgtgaaaacacatagaaatggacgtgctttcttatgttttactctctataattaggaactgctaacattattcaaaaatacttcattgatgtagcagtgtttttaaagaataatcatggttgcctatcagataatgaatcaactatgctaaataaagaaaggaagagaggagatggagcaagatggcagaacagaaggccccatccattatcccccctgaaggaacaccaaatttaacaactatctacacaagataagcaccttcattaaaaaaaaaaaaaaa

SEQ ID NO: 58035 - DNA, 577 bp, Homo sapiens
  misc_feature 30, 78: n = A,T,C or G
accgggcccccccctcgaggatcttctagnattaattaacgcgggtctctgctttcatctcctgtaaaatgtttacanaatgagaaaaattttttttaaatgacatccactgctttttgacaaaaagaagaattgaaatactgtgtctgaaatatacaataaagaacagttgataatgttgtgaattatggaaggttagttagtgttggtgagtgtcaggaaagaactggaaatttaaaatctgattgcaagccagagttaggctggggcaacagggagttagatttgagtctctgcctgccacacatttggaaaatgcatgagaaaactagttcccttttggagtgttaaaataactaaaaaacaggtgattatgttgaggtggctctagtgtcctgagctctgagtggagagacaggccaaggcctccgtacttccaaaaagctgcccattcttctccagctgtgcacctgattagatagtttccactccaagacccatgattggatgtagttcaattccctaccctgccgcctcagaccatgagtgacatatgtgatttgacactgggttgaat

SEQ ID NO: 58036 - DNA, 580 bp, Homo sapiens
  misc_feature 28: n = A,T,C or G
cgggcccccccctcggggtacttctagnaattaattaacgcgggccagccgaggctacaaaaactaaccctggatcctactctcttattaaaaagatttttgctgacaaaaaaaaaaaaaaaaaaaaaaaaaaaaaaaaaaaaaaaaaaaaaaaaaaaaaaaaaaaaaaaaaaaaaaaaaaaaaaaaaaaaaaaaaaaaaaaaaaaaaaaaaaaaaaaaaaaaaaaaaaagggggccccccccggggggggcccccatttccccttttagggggtttttttacccccccccctgggccccttttttaaaacggggggggggggaaaccccgggggttccccaatttaatcccttggggacaattccccttttccccaggggggttaataccaaaagggccccccccgatcccctttccaaaaatttgccccccctaaaggggaaagggaatttgaaacccttatttttttgtaaaaatccgggtaaaattttgggaaaacccccttttttttaacccaatgggccaaattggggaaattcctttttaaataaaaaaaataccccccaatggggggggggg

SEQ ID NO: 58037 - DNA, 448 bp, Homo sapiens
ccgggccccccctcggaagtcttctagaattaattaacgcgggcgctgtctgattctttaaaagtcaacttgtaaacagcaacaagcaggaacacacaagaaccatgtttctcataggctaaacacaaagatcagccaggacatgatgttggatcggaaaatctaccctattctcattcaaagtacatattcctaggtcaaaacttattatggccattttgttgattggaagatgcctgtcaagacgcctggatgcctgtctttctgctgccttcttttgcaatccgacgattttgactgcagaattgcactactaatcctttctctttatcttgtgagaatcgaaactacgtgttctgcgtgtgactaccgtgagcttacatgaatcacgtcatagaaataaaaggccatgaaaagctgaagccgcacttgcttacaaaaactctac

SEQ ID NO: 58038 - DNA, 514 bp, Homo sapiens
ggtacccgggccccccctcgaaatacttctagaattaattaacgcggggttctgggagaatttaccaatgttaacattattttttcccgaataagttagtattatagttttaggcgaaatcttttttttttttttttgccaaacaaggataaggaggatttgaaaaatattgcactaatcatctctagtcctagcctctaaaactagatattgttaacattttcacatatcggctgccttatttttgtaatagttattatgaaaaatttcaaatgtacataaatgcagtgaatcctcatatatccatcattctgttttaacaactactagttcatggtcagtcttgtttcttctcttgtctcagacatttcccttgtccctttcctggaagtttttgaagcaaattgtggacattatatcattttatgcataaatatttcaacccagctgctttttacatgcataatttaaaaccattataaaaatacagtttccttacacaaaaaaaaaaaaa

SEQ ID NO: 58039 - DNA, 593 bp, Homo sapiens
  misc_feature 12, 17: n = A,T,C or G
attaacgcgggnacagnaaataaatatcaaattatcagtgaaaaatagggagtgctggtttccaataagaaaaaaggaaggatcagggactactgtttttcataacacaatttgtggtactattgaactctacttaactatgtgcacacataatttttatttgaaagctgcatgatatgaaaacttgtaggtgaaaacaaaatgaaagtcataaatagcagcgtttgtattagcaagcattgaaatagtgagctcatgaaagaaagagttgaaaaattccaccagagacagaaagtcctaatatccagaagacaagagtttcaaaagaaagaaaaaaaagagataaaaaagattgaatggattcttagcatgacaaaaaaatgatagttaagtatcttataccctggcttattatagtgaaatttaaagttatcaaagacaaaggaaaatttctaaaagcttctgaagagaaagaacagactacccaaaaaagaaatgataattaggttgacatctgactcctcaacaaaaactctagaaataaaagacaatggagaaatattttcaaaatatggaagaaagagaactctgat

SEQ ID NO: 58040 - DNA, 613 bp, Homo sapiens
  misc_feature 574: n = A,T,C or G
cgggccccccctcggaagtcttctagaattaattaacgcgggctgcactctagcctgggtaacagagtgagattctatctcaaaaaaaaaaaaaaagaaaaagaaaaagaaaaaggaaaaagaaatatttttgcatagctatacagtgtgttttaagctaaatattattataaaagtcaaaaagttaaaaaattaaaaagcttatcaagtaaaaagattaaggtaagctaagattaattcattattagagaaagtacacattttaaaataaatgtagtgtgccctaatgtttataaaatccacaccagcacacagtaatgtcctaggcttttacattcactcaccactcatctagaacaacttcaagtcctgcagtctccattcatggtaagtgccctatacagtgtaccattttaaatcttttatatagtatttttactataccttttctatgtttagttatatttagatacacaaatacttaccattatgttacaactgcctactattcagtatagcaacatgctgtacaggtttgcagcctaagagcagtaggctacactatacagcctangtgtgtagtaggctagaacatctaggtttgtgcaaatac

SEQ ID NO: 58041 - DNA, 183 bp, Homo sapiens
cccccctcggggtacttctagattaattaacgcgggactctagttccaaataaagtcacattctcagaaaaaaaaaaaaaaaaaaaaaaaaaaaaaaaaaaaaaaaaaaaaaaaaaaaaaaaaaaaaaaacaattcaaaccaaaaaaggaggcggcctcccccctgggggggctccgtttccc

SEQ ID NO: 58042 - DNA, 476 bp, Homo sapiens
  misc_feature 18, 31, 48: n = A,T,C or G
accgggcccccccctcgngaatacttctagnattaattaacgcggggnaaaaaaaaaaaaaaaaaaaaaaaaaaaaaaaaaaaaaaaaaaaaaaaaaaaaaaaaaaaaaaaaaaaaaaaaaaaaaaaaaaaaagaaaaaaaaaaaaaaaagggggccccccccgggggggacccccaattccccctatagggagtcgattaaccccccctaattggccgttttttaaaaacgtcggaacgggaaaaaccttggcgtaaccaaattaaatcgcttggaaaaaaatccccttttccccagtggggtaaaaaccaaaaaggcccgaaccaatcgcctttccaaaaagttgcccaccctaaagggcaaaggaaatttgaaaccttaattttttggtaaaaatcccggtaaaattttggtaaaataacctattttttaaaccaaagggccaaaatcggaaaaatcctttataaataaaaaa

SEQ ID NO: 58043 - DNA, 601 bp, Homo sapiens
  misc_feature 474: n = A,T,C or G
accgggcccccccctcggaagtcttctaggattaattaaattaattacaattaaataatatttaagaattagtttatcagacatatcagccacatttcaaatgctcaatagctacatgtggcaagggtctgccacactggacagagtagaaaacattcccatcattcagaaggttctcttggacgctgcagatctggaaaacaagacttccatattgaaataaatacaacctcaaaacttttatgctctgtgttccctttagttgttatctacatagaaaattatgaaacaagagaggaacttaccttcttccctattaaatatatggctaagggcacaagaaaataagaggaaaacttatccttcagggcctaaacaaggaaatgaaagaaatctcattcccaatagaataaaaaccagaagcttgaaatgactctggtgcaagaggctgggtggtggggaggagggtagcantctcaatcaacaagtttagatattaatagccactcaaagccttcagcccatataacatgaagtgacaactgagctctgcacataatgctcaagctctataataaccaacactctcagcacaagggta

SEQ ID NO: 58044 - DNA, 585 bp, Homo sapiens
  misc_feature 459, 479, 537: n = A,T,C or G
ccccccctcggaagtcttctagaattaattaacgcgggaccaaagcatttccacatgtaaataataaaaaagataacattaacattatatttttattttcaaggaagtcaaatttgaagagcaattacaaagtggacaggaacttgacaataaaaactttaaagttacatttcaaatgaaatactataacttttaaagaacaaaatgttattaacagcattaattttgttaaaataaaaacttaaccgacgttaaatttaacataatttaattgagcaaggaaagattcacgaattgggcagcactcagaaccaggagaagttcagagagctccacccagtaacatgggcaggcagtatttgtagacagaaaaaggaagtgacatacagaaacagcttgattggttagagctcagcatttgccttatttgagcatggtgtgctaaggcctttgctttanatgaacatggtttaatcatntgtgctgaagtttggcttgctgtgattggcagacagtcggttacaagaatatactctnagattgcaggttgtttacatactaaagttggctgttgctatgtaggga

SEQ ID NO: 58045 - DNA, 246 bp, Homo sapiens
  misc_feature 40: n = A,T,C or G
agactgggtaccgggcccccccctcggagatacttctagnattaattaacgcggggggtctcttctgaataaagcaattagcaaatcatgtaaaaaaaaaaaaaaaaaaaaaaaaaaaaaaaaaaaaaaaaaaaaaaaaaaaaaaaaaaaaaaaaaaaaaaaaaaaaacccaaaaaaaaaaaaacccgcccccccccgggggggacccccatttcccctttttgggattctttttcccccccccaa

SEQ ID NO: 58046 - DNA, 172 bp, Homo sapiens
  misc_feature 26, 38, 39: n = A,T,C or G
ctgggtacccgggcccccccctcggngatacttctagnnaattaattaaaatttggaaaaaaaaaaaaaaaaaaaaaaaaaaaaaaaaaaaaaaaaaaaaacggaaaaaaaaaaaagggggcgcgccaccgcggggggactcgactccgccctcatcgcgcgcactgttccc

SEQ ID NO: 58047 - DNA, 602 bp, Homo sapiens
  misc_feature 591: n = A,T,C or G
ccgggccccccctcgaaagtcttctagaattaattaacgcggggtatcaaaataccacatgcaacccataaatatgtacattatgtgtcaatttctttaattggggaggaaaagcccaaaaatatttctgagacaaaccttaaatataaaaacctaaaaatgttaaaatgaagtttgcaaaactagaaaaataaatatcatgaaaatactaacaaaagttttgtatctactaactatgcaacaaatattacaaagtcctatgtaatacaagacataggacttttaaggcaagagggaggtctttttcataatgataaaagggtcactctacccagaatatgtatcatctctaaatctgtagatacctaatgagcacatgatcaaaacagaattaaaaaaataaatagaaaactccataatcataggggagattttaacgtatatctaccagtaattgatagagaaggggaaaaaaacaaaattcttactaaagaatatagaatacctgaacacaaaaaaaacccgacataataacaaagataactggatctaacaaatccagactaggcattcttttcatgtgtacaaaanacatttaccaa

SEQ ID NO: 58048 - DNA, 548 bp, Homo sapiens
attaattaacgcgggcacttatataattattatttatagtcattcttaactaacaaatatttcttaaggatgaatttctgtgctatttgttagaatatgcatttcactttctgtatcatcatagttgattacttattatagatgtttgacttaggaaataaaataatttttcagagaatataacatatccagtgttgttaaacatttttatagataagattgcaacatgatagtagatgtggtaggcagaataatggtcttttaaagatgtgcccatctttcctaatgcaggggaactgcaaatagttatttcctttgtcaaaagacactttgcaggtgtcgttaaggctaaggggccttgagataagaagaccatcctatagtatccaggtggaaccaacctaagcacctgggtatttaaaatcagagaaccattcccacctgaattcaattcagaggagaggggatgtgattatgggagaatagtcaaagagatgcaaggttgctgatgtaagagggccaaaagctaagaaatgcaggcagcctct

SEQ ID NO: 58049 - DNA, 553 bp, Homo sapiens
attaattaacgcggggtgctcgatgggaggagggtttgctgggtgagctggttcagactccttgaaaaatcatcgtcactctttcttcctcgcggacgtcctgcccaacgctctgagccggcgccccaagtagagccagagtagttcgtacccaaccttttcacgtaactcggccgaggtggttcttctccgaattttttccgtcaggcccagattagcagattttgaggtcagctgggagaggcgttaacttttcttcgcacactcttgctttgtgcgctcaaccacagtctgaattctcgcagaggcgttccttgagtagcccttggccacactgctcacctccctgcagaagtcaaagccccagccctcctctgcgaatcccgaggccagcctggttggttaccttctccccttcgccctttactccaggccgtccagcatcaaacactagcctccacacgtggaaaagaccctgactcccacagtagactagtcttatgggagtcctggctcttgggccaggctgcattaggaaaatagaaaccagact

SEQ ID NO: 58050 - DNA, 519 bp, Homo sapiens
  misc_feature 24: n = A,T,C or G
gccccccctcggggtacttctagnaattaattaaaatttgtaaactcacatatgcatattgtatatgtgtagaaatgtaatcacactttgtcttggaattacattaaactgtttgaaatcactgtaaaaaaaaaaaaaaaaaaaaaaaaaaaaaaaaaaaaaaaaaaaaaaaaaaaaaaaaaaaaaaaaaaaaaaaaaaaaggaggaaaaaaaaaaaaacccaaaaaaaaaaaaaaaaagggggcccccccggggggggggcccaaaatcccccaaaggggaaaacattgacccccccccccgggcccggttttaaaaacagcgggggggggaaaaccggggggttacccaaaagaaccgccggggaaaccctcccccttttccccgcgggggaaaaggcaaaagggccccccccgagcccccttcccaaaaagggcccccccaaaagggggaaaggaaatgggaagcgtaaaaaattgggcaaaaaccgggaaaaaccttgggaaaacaaaccaattt

SEQ ID NO: 58051 - DNA, 589 bp, Homo sapiens
ccgggccccccctcggaagtcttctagaattaattaacgcgggaagcctgacctaacacgttctgaatattaagctaccttttatctgccagtccttggtgttcagaagaatccctcctcctcaccctaacttctatggggctatttccaaagacactgtcattgaagtgaggaagagtgagttgggccttatgacacaaagagacaagactatttgaggacaatagacacaggttttcatatacattccatgttattctgaattactgatgggttcactgatggaattattgagtatagccaataaggagaaccacagttaagctggtgtctctgggttctggacatcatcctcaagaaaactatttactaattacattgaatgaggttattaaaatgtgtaagtttcacacaaaaacaaaaagacaattcattccaaattgtgcatatggatatataatgttaattatgggaattccattttaagaattactacaattctatgtgttctgtataaaaacaggaaaatagttgttccaatatataaaaggaaaacatttaaaaatgtattttcttgggaaaatcagtt

SEQ ID NO: 58052 - DNA, 545 bp, Homo sapiens
  misc_feature 23, 37: n = A,T,C or G
tgggtaccgggcccccccctcgngggatacttctagnattaattaacacgggactgcaacttacacctcatttcctgttctatgcccttggaaatgaagaacaagaacagctgcctgccacttttacattcaacatgaaagcccctggttacgtctctaacttgacttttcctttccaatctaaaccagggttattttcctgtaggcttttgacttgtccctcttgaataatcgttgagtccttttttcccggtactattagaattgctcagcccttgaactggaaagagggagacaaggtatgagaatgttaatgatgacagggtaaatctattgttctctaactagcatgcagtgttttttttttttattgcaggaattataatgcttaacaatatgtcaaaatattatattattgaaaaacaaaaaaacattttcacccaccaaaaaaagaaaaaaaaagaatcctattaacacctgatatgcaatgccagtttctacaagtattcttaaagtccacataattgagttaaaaaaaaaaaaaa

SEQ ID NO: 58053 - DNA, 233 bp, Homo sapiens
  misc_feature 12, 37: n = A,T,C or G
ctgggtaccggngccccccctcggaggatacttctanaattaattaacgcggggtgggggggtcccggcacctggcgtgagtttcatgtatgaaaacataaaattgaaaaaaaaaaaaaaacctacacgagcaccgtgatttcaagtaataaacagaaaatgaaacacaaaaaaaaaaaaaaaaaaaaaaaaaaaaaaaaaaaaaaaaaaaaaaaaaccaaaaaaaaaaaaaa

SEQ ID NO: 58054 - DNA, 432 bp, Homo sapiens
cgggccccccctcgaaagtcttctagaattaattaacgcgggttatccttcaaaaaatatgtgtatttctagcttggttcaatgaaaagacctagaaatatgaatagcatcctagcagcaagcattaatgggtcccaattgtagtctttgaattccattttccactaagaagagccagggcttttttgaagaaatgtctgattccagatcttgagtaggaaatatgacataagcctgaagcatcttgttataacagaaagtagcagagttaagaaagatggtggggttatgtcataggaactagttagaagagactaccattggccaacaatgggacagttttagcaagaaaaaaagattgctaggattgaaaatcattaaatatgttcaaaagctgagaatcgtaaggatacaaacaaaaacaaaataaaa

SEQ ID NO: 58055 - DNA, 575 bp, Homo sapiens
  misc_feature 28: n = A,T,C or G
cgggcccccccctcgaggtacttctagnaattaattaacgcgggctagtcataggagataaatgaatatagttttgtgttttagactgttatatcaaaatatctttgttgaccttacttttatttcttattgatactgcttttatttccaagatttatttcaaatccaatcatttcttttaaatgttctcagagtctgtgagcaaagggtataattggtctaaataaaatttctagtcagtttaattttctgtaggtttaaattctaccagcaagttcagtagtaaaggtaaatgtatagtcaaacccagaatactccaatattttaagtgctctgtagatcacatatatctctagtatgacacttaaaaatcaaatgagtaaaaaataatgatgcccataataatttgttaagaaatatataatataaaatatgtatattgtgacattaaaagtataaattgtcagggggaagataaaagtctagagtttttatacatgactgaagttaagttgttattggtgtaagatactccattacaactataagatgttttatgtaaacctcacggtaaa

SEQ ID NO: 58056 - DNA, 594 bp, Homo sapiens
  misc_feature 530: n = A,T,C or G
gggcccccccctcggaagtcttctagaattaattaacgcgggccttctaattacagttctcttgctatttctaccccatctgcagtcccttcttccactaaagtcttgaaccctctcaaagtcatccataaaggctagaatcgacctcttccaaactctggtgatgttgctattttgacctcttcctatgtgtactaggactttatgcactaagactaatttgggggtcagattaaatttgtcctttttggctattttaaagacattgaggtaccattggaaattttgagtaaaggagcaacatgttctgacttatactttaaaagtataattgtggcctatgaggatgaaattaaactgttgaggaatttaaaataacttatatacatgccagaaaagaaaaaaaactctttaaagaaacacagcaaaattcagcgactaaaactacaaaaattccaatgtccagctttcaataaaaaagtattagatacacaaagaagcagaaaaacataagacattttggacatgtnttgtaaaattaaacatacacttttcataaaatccagcaatgtcatttctatgtacttacttaaa

SEQ ID NO: 58057 - DNA, 603 bp, Homo sapiens
  misc_feature 25, 38: n = A,T,C or G
ctggggtaccgggcccccccctcgnaggtacttctagnattaattaaataaaaataaattttaaaaaattgaaaaattcgcatgatgtttttaattatgagtacattgtggaatggctcagttgggctaattaacatgcattacctcacattctgaccattttttatggtgagaacacctaaaatctgctcttagcaattttcaaaatacattgcattgttattaactatagtcaccatgttgtacaatagacctgttaacattattcctcctatctaactgaaatgcattttttgatacagcagatcattagaatgtattcatcttgcatgactgacactatatatcccttgattaacgtttctccatttccctctgcccccaatctctggcaaccacaactgtcttctttgtttctatgaatttgactatttttgatacctcatgtaagtggaatcctgcagtattagtctttgcatgacttgcttgtttgacttagcataatgcccccacccgcgttaattaacgcgggagcggaccccaataccactaacctgcgccccacaacgtacgatacctggtgcggcgtggcccatggatgca

SEQ ID NO: 58058 - DNA, 246 bp, Homo sapiens
  misc_feature 9, 22, 43: n = A,T,C or G
ccccctcgnaaatacttctagnattaattaacgcgggacccanaaaaaaaaaaaaaaaaaaaaaaaaaaaaaaaaaaaaaaaaaaaaaaaaaaaaaaaaaaaaaaaaaaaaaaaaaaaaaaaaaaaaaaaatttaaaaaaattaaaaaaaaaaaaaaaggggcccccccccgggggggaccccaatttccccttttagggattttttttaccccccctttttgccctttttttaaaaactttggaa

SEQ ID NO: 58059 - DNA, 436 bp, Homo sapiens
aatgcttcatatttcaattttgtgtttagacttggatcccatccccaagatatctcattatttatatgcaaatgtttccaaatctgaaaaaaaattgaaatatgaagcatttctggccccaagcattttggataaaggtgactcaacctgtattgcagtaatgcatgttatgttaaatataaatttttatgtagatttcctttatcagactgagaaattttccttccattactagttattaactttttctcattgtgaaaatgtattagtacttgtcaaatgtttttctgcatctattgagtgctcatgtttttctgtttatttttttcttcaatgtagcaaattacaggttgtcttttaaaatctcaaaccaaccttctattcctgggataagctcaattggtcatgacatagtatgcttttttctttttttcgt

SEQ ID NO: 58060 - DNA, 626 bp, Homo sapiens
  misc_feature 594: n = A,T,C or G
gccccccctcggaagtcttctagaattaattaacgcgggaactaaaaactctttagagttcttaacaaaatttaatgatatgtaaaacaaaatatacaccatgaccaagtggaatttattccagggatcaagattgattcaatattttaacatcaatgaatgcaacacaccatattaagaaactaaagggaaaaaatcacaatcatgtcaattgatgcagggaaaaaagcatctgacaaaatccaacacccacttatgataaaaactctcaagaaactaggaatggaagggagcttcctcaacttgataaaaagcatctataaaaaaacgaacaaacaaaaattctacaaatgatggtatacttaatggtgaaagtcaaaatgcttttctcctaagggtgggaacaaggccaggatatttgttctcaccagtcctattcaacagagtgctgaaactgctagccagtgcagaataagacaataggaaaaaaaaaaaaaaaaaaggctacacaggtgggaagaaagataaaaatggttgccatctgcagatgacaccattgtttacctagaaataccataggaaatctgcaaaaanaaaaaaaaaaaaccctaaaacatgtccttcat

SEQ ID NO: 58061 - DNA, 601 bp, Homo sapiens
  misc_feature 27, 65: n = A,T,C or G
gggccccccctcggaaatacttctagnaattaattaacgcgggggcgggggcggcacagtgtgcntgaaagatcgcctatcaggtactatgctcactacctgggtgataggatcatttgtaccccaaacctcagcatcatgcaatatacccaggtaaacatgcacatgtatcctttaatctgtgagaaaagtcgaaattataaaaaataaaacaattcacacataaagattctcaaagactaaaaatgtataggaaataatttctaatcatttgaataggattctgccatctctttctgttcagttatttgttcatttgtttgttcaacaaatatttcaaatataataaaagcacaggcttgtattaggtacactgaaagtataattgttttgagcttttgtagtcactggctttatctgaaaagcaagtgaaagtgttacaaacattcctcctagaaaatgcacatgattacatccataaaaacagttttacagctgggcacggtggctcacgcctgtaatcccagtactttgggagactaaggtaggaggattgcttgagtccagaagtctgagacctacctaggcaacatagtgagac

SEQ ID NO: 58062 - DNA, 305 bp, Homo sapiens
  misc_feature 17: n = A,T,C or G
ccgggccccccctcggnagtcttctagaattaattaacgcgagggggggttatgtattcatgggacctttaatttgtacagaacacagaacttatttctgtcagttatttaatacattgaaaatttagtgaaatgttcaaagagaatagatgtttcccaaaacaacaatctttatgttaaaaatagtcattaaaagatctgttgtaatataaaaaaaaaaaaaaaaaaaaaaaaaaaaaaaaaaaaaaaaaaaaaaaaaaaaaaaaaaaaaaaaaaaaaaaaaaaaaaaaaaaaaaaaaaaaaaa

SEQ ID NO: 58063 - DNA, 269 bp, Homo sapiens
ccccctcgaaatacttctaaaattaattaacgcggggtgaatattttatactgtaagtgagcaatcagagtataatgtttatggtgacaaaattaaaggctttcttatatgaaaaaaaaaaaaaaaaaaaaaaaaaaaaaaaaaaaaaaaaaaaaaaaaaaaaaaaaaaaaaaaaaaaaaaaaaaaaaaaaaaaaaaaaaaaaaaaagccgccccccccccgggggaacccccaatccccccaaaaggaagccgaataccccccccccc

SEQ ID NO: 58064 - DNA, 617 bp, Homo sapiens
  misc_feature 599: n = A,T,C or G
ccgggccccccctcggaagtcttctagaattaattaacgcggggtcacaaacccttggagtcattcccagataatagaactggaaatgataaatcccctaatgccaagggtctagtgtgttcttagtggttatactgggaagtgtgtggagatttaggtgctgctctgctgctctggatggctgaaggctcctgggccatcttcatgtgctgcttgaagagctcctattttgtactcctggctagaatgctgtggaacaaatacaaagtgaaaaaagttctctgtagatttctgaagtgcatattcattgatgccaagaaaaaaaaagttgcctttttgaagtgatgttttttgctgtcttcttaaacacaaggctttttttgaatgattagtatatttcatggtaaagaaaacagcctgtctggctcaaagcaattaaatagaatgtaatggtgagtacaaatgagtgcacatgtcaggactcaggtctaactccttgtctcctgagcctaaagattgcaacatacacaagaacacactcctattcctaccccacacactcagggacaagcccaactaaagcttacaaggagaccagngtggttctgtccagggga

SEQ ID NO: 58065 - DNA, 454 bp, Homo sapiens
  misc_feature 17, 28, 52: n = A,T,C or G
ccgggccccccctcggnagtcttctagnattaattaacgcgggcccatcaanaaagatttgattaaaattatctgttcatataacataatactaagcaaacattgaaatgatattttggatatttaaagagataggtttaaagagatatttaaagagatagaaaaaaatcttcacagtgtatttttggtaaaaaatttgatgaataaaaaatatccagtctctgtataaaaagtctatataataataaatgatcatgatcatatttaaaatgtattcaacatctgatttttttggtgctctctgctaaatgtattatgtgagtttgctaatttaattatcataaaaatcctatgaaaaaaaatactcttaccctctttggtatacagctttcactaccgtagccaaaagaacgaaggttgcatagtcaggttaaataccaaaaaaaaaaaaaaa

SEQ ID NO: 58066 - DNA, 600 bp, Homo sapiens
cccccctcgaaagtcttctagaattaattaacgcgggtatccatgccattatccctggaatctgtgaatatattaccttacatggcaaaggaaactttgcagatgtaattaagggtacagacttctagatagggaaattattccagattatccaaatgggctcaatctagttacatgagttctcaaaagtggagaatctttcctagctggcatcagatagatataagtgacactgctgactttgaaactggaggatgagagccataaatcaagaaatgtgggaagtctttagaagctggaaaaggcaaggaaatgaactctctcccctataacctccagaaaggaacataatctggcaatatccagtgagaaccatgtctgacttctgacctatagagacctgtaaggtaataaattttcattgttttaagccactaagtttgtgataatttgtcaatgtagcaatagaaaactaacatagggacaaactcctggtacttcagagtctctgctttctgctattgcatgcaaagcaacttcagtagctcatggaaacttctctacagaacagttacaggtacaggagttggaggcaaaagt

SEQ ID NO: 58067 - DNA, 593 bp, Homo sapiens
  misc_feature 41: n = A,T,C or G
agactggggtaccgggcccccccctcggaggtacttctagnattaattaacgcggggggctgactttctgtttttaactaatgtgtccaaatattatcattttaacatgtaatccatgtaaaaaaaatcattcatgagacgttaaacacatttttcttgacactgtctttgaagtcagtgtgttttatacttccagaacatctcaactgggaccagccacgtttcaagtcccaaaatgctcatgtggatactgctaccatattgtacagccaagggtctacggtattagcaaacacttttatgggtgcaagtgaacatatttttcagtaattggaaggatattttttgcaggtgtcttagtttgggttcccacagcagcagacttgagacaggattagattgcaagtagtttatttggaggtgatcccagaaaacacttgtagggagtagagaagtaagacagaagagggaaggaagccaatacaaggggatttcaaaaagttcatggaatcacaaccagttacagatttctttgctccttctccactcccactgcttcacttgactagcctaaaaaaaaaaaaaaaaaaaaa

SEQ ID NO: 58068 - DNA, 564 bp, Homo sapiens
  misc_feature 38: n = A,T,C or G
cccccctcgaaatacttctagaattaattaacgcgggnaggaaaaaaaaaaaaaaaaaaaaaaaaaaaaaaaaaaaaaaaaaaaaaaaaaaaaaaaaaaaaaaaaaaaaaaaaaaaaaaaaaaaaaaaaaaaaaaaaaaaaaaaaaaaagggggccccccccgggggggacctcaatttccccttttaggaagtttttttaccccccctaattggccgttttttaaaaacgtgggaatgggaaaaaccttgggtttcccaaattaattccctttgaaaaaaatccccttttccccagttgggtaaaaaaaaaaaaggccccccccaatcccctttccaaaaatttgcccaccttaaaggggaaaggaaatttttaaccttaaattttttttaaaaatcccggtaaattttttgtaaaaaaactttttttttaaacaaaaaggccaaattgggaaaattcctttttaattaaaaaaaataacccaaaatggggtgaagggttttcccatttggaaaaaaaattccctttttaaaaaacggggcccccaacttaaagggggaaaaa

SEQ ID NO: 58069 - DNA, 582 bp, Homo sapiens
  misc_feature 27, 507, 528: n = A,T,C or G
cgggccccccctcggaagtcttctagnattaattaacgcgggcacatataaatatatatataaagaatatattcatctgattaaccaattattattcattcccatgcaggagtgagtttgtggaagggagaacattggactaaaagatagacaacttagatttaagtcccaaccccgcctcttaactctccaaatggtcttgagttaacatgattatcctttatgaatatcaacatccctatctggaaaatagagatgcataagataaaatttgagtccctatgaagattgttgtggagatctaatgagatgatggctatggatgaattttataaaagtataaatggttttatctcacatgagggttacattaaaaaatcagaacatgaaatggaaatcagttaatatcaaaaatacccatggaaaattatttaaatatcccttaaactataggatttaaggtagggttgtcaaatttcacaaatctaaacatactgaaaaagtatntgttgtttatctgcaactcanagttaacaggatgtcatcatttatttggggctactatataaaacaccatacagt

SEQ ID NO: 58070 - DNA, 284 bp, Homo sapiens
  misc_feature 23, 25, 36, 53: n = A,T,C or G
tgggtaccgggcccccccctcgngngtacttctagnattaattaacgcggggnaaaaaaaaaaaaaaaaaaaaaaaaaaaaaaaaaaaaaaaaaaaaaaaaaaaaaaaaaaaaaaaaaaaaaaaaaaaaaaaaaaaagaagaacgaataagacgtaaggggggggggatttccgcgggggggactcttatttcgccccgcccccccccccgggggggggccccccttcccccccttcttgggggttctttttcccccgccccccccccccccccctttttcccc

SEQ ID NO: 58071 - DNA, 278 bp, Homo sapiens
  misc_feature 37: n = A,T,C or G
ctggggtaccggggccccccctcggggtacttctagnattaattaacgcgggctccatctgccaggtgcttgccactggtcctggcagaaaggcggctgctgaaagtgaccttccaaatccttggtggcacttcagcgccacaggctctccaataaaaaccctttacacacaaaaaaaaaaaaaaaaaaaaaaaaaaaaaaaaaaaaaaaaaaaaaaaaaaaaaaaaaaaaaaaagaaaaaaaaaaagggggcgccccaaaggggggagataaaaaaa

SEQ ID NO: 58072 - DNA, 403 bp, Homo sapiens
ccgggccccccctcggaagtcttctagaattaattaacgcgggcccactcccttcggacttgtcaagatctccagaaaagccattatgcactactactgctactaatactaatactactactacaataaaaggatgtacatttaatccaacagagactgcatcctaatcagtgaagcagaaaatgaaatgttttgaaggcagatgaaaactcgtctcttcttgtgcacttggggttaatgaaacttcaggacaatttcagctttgctgaaatttcacacaaaggacttacagagttctactgagaaaagggtctttttcaccgtgtaggccatcccacactgccctcaaaacctggttcgacacatacatctttcaagaaggtttccccaaaaaaaaaaaaaa

SEQ ID NO: 58073 - DNA, 545 bp, Homo sapiens
  misc_feature 16, 521: n = A,T,C or G
cgggcccccccctcgngggtacttctagaattaattaacgcgggactccatcttaaaaaaaaaaaaaaaaaaaaggggaactggggagccagtcttaaattgtttattaaaaatgtcagcaaaatgcattgctaaacaggcccatgattttagaaatatgaaaaatgagtacagttatgtggcaattgcctctggaaaatcatgtgcagttgtgactttcatcatgcgaagttatgatttcatgctaggagagatataaaaggattagataaagatccatggaaaaaacaattgagatttgggggctgttggatataaaaagtgaataattacattctctagaaaggcttgaagaggaagctaagtgaaatctataaagctatgaaaaatatgagaggaaatgagaagtatttgacaaattttacaatatcagaataatttgagtgtaaactttaaaactttcttttttttcgagatggagctcgccccgtcacccagactggagggagactccgtctcanaaaaaaaaaaaaaaaaagcggccg

SEQ ID NO: 58074 - DNA, 502 bp, Homo sapiens
gaattaatcaccgcgggggggggcaaacaaaatccgtggtaaaactgaaaaaaactttgttgattttcgcatggtaaatatgtttaaatattatgccaaataaaatacagagattatcagacgggataataaacccaacccatctgtaagctgtgtacaaaacacacactttaaatataaaaatttacctaacaggaaaatatttaccccacccacaggggtttgtccctgtagccccacctactcaggaggctgaggcaaagggatcatttaatccaaaagtggggggatgtattgcactataatcacatctgagaatacccactgtagccaagctatatagcaagacctcacttttaaaaaaaaaaaaagttagggtttgcatgcaaatcctattaattaaaaaagccaaagggcctactttaaggtcagaaaaaacagatttcaaaacagggaatcctacctgggtgagggaggattttatataatgataaaagagtca

SEQ ID NO: 58075 - DNA, 476 bp, Homo sapiens
  misc_feature 21, 23, 34: n = A,T,C or G
tgggtaccgggccctccctcnanatacttctagnattaattaacgcggggttctttttcatgaaaagcaattttagactgaagctgactgcaaatgtttttaagaaaaatttagacaataactatggataacaaaagcttatatatttactgtaatctatcatttgataatattttacataaaatttaccaaataatctaatcatttaatctctgcaagatgagagacattttgtgagttttctcagaagcccaattggaaaatctaaaagttaattttagacccaagagacttaatgtaggatattaatcctggagaaagctgccaaaaatgtcaaaaggtttaaaacacttaattgaaacagaatcacaggtcatcgtaaaataataactgtttatttaactagagcaataatcaaaagacacaaaaacctcaacctttgaaagctcagttttcctaaaaaaaaaaaaaaaaaa

SEQ ID NO: 58076 - DNA, 592 bp, Homo sapiens
  misc_feature 8, 78: n = A,T,C or G
ccccctcnggaatacttctagaattaattaacgcgggaacttagtttagtggaccacaattggcatgacttttttatnatataaaaggatgtcttgttttcttaaaattgtttgagtatctctgatgtgttaggaattgacactttattttttatggtcataaagcttaaaattacaaaaatgatactggtctgaaattaaaaggtttaaataattttatttaaacctttacattaaattccagattttgtgatgaagtgaaaatttatgctagccatagcatgttggtattttcttcagtgtaggcatttcagtacattatacagatatatgagcccttctccttttaaatctaattgttcaatctctgtccactcttagttcatctgatacactgctgtcagattaattttcctctggttatttcacttcccttaagtattttggcagaaaatttcaattttttaaataacattatagagccagcctatttcaagtgacaaatacatatttatgccactttatatctggaaagttctaaattgttcagtatttaatggacaggagcatttgttaataaatctttactttt

SEQ ID NO: 58077 - DNA, 123 bp, Homo sapiens
acactttcttgagatggcttctccaccaacggaccctctggggacaagatctgaccgaacaccgagacctctgccctttgcagagcagaaccttgctcagaaactgtggtgcagtccccgcgt

SEQ ID NO: 58078 - DNA, 377 bp, Homo sapiens
cccccctcggaagtcttctagaattaattaacgcggggtgggagtgaaaacatctggattgtcaagacagatccctggcccctcagatcttgtctgatttctactccttaagaagatagaggcagctgggtgcggtggcttacagttgtaatcctagcactttgggaggcccaggcagacagatcacgaggtcaggagtttgagaccagcctggccaacatggtgaaaccccatctctaataaagatacaaaaaaaaaaagctgggcatggtggcgggcacctgtaatcccagctacttgggttgcagtgagcgcagatcaggcattgcactccagcctgggtggcagggcgagactctctcagaaaaaaaaaaaaa

SEQ ID NO: 58079 - DNA, 549 bp, Homo sapiens
ccccccctcggggtacttctagaattaattaacgcgggttctcctcaaatatattgtccctttaaaaaaattatcccacagggagaaaaacatttagggaattggcacatttccaagtctcttcaattcgttgcctaggtttctttcaaaaataggcattattgaagacttgagatgcaagtcttagtaaatacatcaagcacattaatttttctcccttgggctaattcagcataagtatcttaaaagtatgttagaaagtactgactttaacttgctctgactgaatgctttctggatggaaccctgtataccacttttatctgatttggagatgagacactatgaaatgtgactccacaagctttctgctgcttgctgtgtcttgataacattaatgctatgtttaacagaacaattgctgaaatgacctaaagggcctggcaagaggaagccatcctcccagccctgtgcgcatgcgagctttagtgtaaggctattctggtgctattcagtattatttcacgtggctttttctttatccttcta

SEQ ID NO: 58080 - DNA, 398 bp, Homo sapiens
  misc_feature 24, 92: n = A,T,C or G
gccccccctcggggtacttctagnattaattaacgcgggtccaggaaaacatgacctcacaaaatgaactaaataaagcaccagatagcaantcctgggaaaaatagagatatgtgacctttcagacagataattcaaaatagttgtgttgaggaaattcaaggaaattaaagataacactaagaaagaattcagaattctatcagatatatttaacaaagagatggaaataatctaaaaaaaaataagcagacattctggtgctgaaaaatgcaactgacacactgaagaatgcctcagagtctcttaacagcataattgaccaggcaaaagaaagaattagtgagttttaaaacaggctatttgaaaatgtagtcagaagagacaaaaaaaaaaaa

SEQ ID NO: 58081 - DNA, 250 bp, Homo sapiens
  misc_feature 20, 33: n = A,T,C or G
gtaccgggcccccccctcgnggatacttctagnattaattaacgcggggaataaaaaagatctactaacaaaaaaaaaaaaaaaaaaaaaaaaaaaaaaaaaaaaaaaaaaaaaaaaaaaaaaaaaaaaaaaaaaaaaaaaaaaaaaaaaaaaaaaaaaaacccaaaaaaaaaaaaaaaggggcccccccccgggggggacccccattcccccttttggggggttttttacccccccctcttggcccttt

SEQ ID NO: 58082 - DNA, 367 bp, Homo sapiens
  misc_feature 23: n = A,T,C or G
ccccccctcggaagtcttctagnaataattaacgcggggggagagagaggtttcagttagccgagattgtgctactagcctgggtgacagagtgagatcctgtctcaagaaaaaaaaaatagatatacgtacacacacacacacacacacacacacacacacacacacacacacacacatatataatcacatacggtaaaccttatctcataatataaaactgagtttagtagttcatttacattactacttgtattatctatatagataaaaagtgaccaagctttacatttcactttttttttgagacagggtctcgttctgtcacccaggtggagtgcaacagtacgccaaaaaaaaaaaaaaa

SEQ ID NO: 58083 - DNA, 617 bp, Homo sapiens
cgggccccccctcgagagtcttctagaattaattaacgcggggcagtgggatgatatattcaaagtgctgaaagaaaaaaaagttaaccaagaatcattacacagcaaaactattcttcaaaagaatagttgaagacaaaatgaatacaaaataaagtcattaccagaaaaacaaaaacagaatttgttgttatcaggtccatcttacaagaaatactacagattgttcttcaggctgaatgtgagtcacacaggacagtaattcaaattcacagaagagacaaagagcaccactaaaggtaattatataagccattataaaaaacaacgtatttgtatatttctcctcctttcttctcttaactgatttagaaaggaattgcataaaaatgcaaattattgtactgctgagcttatatagaaatgtaatatatattaacaggaagcacaaaaatatggaggagggaatagaattatataggactaaattttctatatttcactagaattaagttaatggacttggatgagtcaagaggtatattgtaagcttcagaccaaccactaagaaaataactcaagaagtagagttaaagatattctaaatgttcttatca

SEQ ID NO: 58084 - DNA, 447 bp, Homo sapiens
cccccctcggggtacttctagaattaattaacgcgggggaaaaaaaaaaaaaaaaaaaagggaaaaaaaaaaaaaaaaaaaaagggagaaaaaaaaaaaaaaaaaaaaaaaaaaaaaaaaaaaaaaaaaaaaaaaaaaaaaaaaaaaaaaaaaaaaaaaaaaaaaaaaaaaaaaaaaaatttaaaaaaaaaaaaaagggggccccctttttttttttttttcccccccctgggggccccctttttttttttccccaaaaatttttttccccccaaaatccctttttttttaaacccggggggccccccccttttaaattttcccccccccttgggccctggggttaaaattttttttccccttttaaagggggggaaaccaaacccccatttttttttttggggccccttttgggttttttcccccccccccattttggggggcccc

SEQ ID NO: 58085 - DNA, 584 bp, Homo sapiens
  misc_feature 25, 38: n = A,T,C or G
ctggggtaccgggcccccccctcgngaatacttctagnattaattaacgcgggtaacaagggaaagttaaaaaactgtaattgtttgtaatgtattaattttaaattaaatgccttgatttattttctaggtataaaataatatccttagatgcttggcgtgtagacataaacaaaaacaaaataaccagaattgaccagaaagcattatatttctgtggatttcctactctgaaacacatcagacacaaagtcagtggctatttagttcagaattttttcactttattaagtgtgaagtgattatggagaaagaattaaaattaaattatttgaattcttttaaagttttttttgaagaaaagtggtgttcaagtattccagcaaagcagtcgtggagaaaacatgatgttggaaatcttagtggatgcagaatcagatgaacttgtaagtattggatttatcattcatttattaaatgcctataatgtattaaactggagctgctgggatgtttaccagggaggtattatatgttgtaactctagaaatttggagcctaaataaggatgaagcaaagaaaca

SEQ ID NO: 58086 - DNA, 506 bp, Homo sapiens
cgggccccccctcgaaagtcttctagaattaattaacgcgggctggattcagatgtactagttcaaaagagccaactgatagatttttcagggatattttgagttagttcttaaattcgttgaagttactttatataataatgactttctataaaattattattttatataatttcattcacaataatgaatttacttaaattcattatttaaataatataaatgtataattaaatatcttatgttaaaaacaaagcttataaattaataattacacatattatgttaaaaaagcttatgaaagtaacaattttgtaattgttttacttcatcgttagtatcatctatgtccttgatattgttttagtatattttattcatgtgctagaaacactatgcaggagtgtgctgccaagcatctcttctcaacttgacatttgatgatgtcacattagtagccatggtgcaagtatatatgccatgaaaattgcaaaaaaaaaaaaaaa

SEQ ID NO: 58087 - DNA, 323 bp, Homo sapiens
attaattaacctgctttaaaatgttttaccagaatgatacccctacaaaaggggaagattcctcaattatgaaattccttttcggggattagaggtaaaatttgaaaaaaaagaattgggattaaatatcaaaaaaccttccctatggttttattaaatacactaaatagagataaaaattaccctattttcatatgttataaattatcctaaaattaattccaaaaatttttcttttttttggacagattaaaaaaactttttaaagtttaatgggattaacctatttttcttcatttctttaataaaaaaaaaaaaaaaaa

SEQ ID NO: 58088 - DNA, 583 bp, Homo sapiens
  misc_feature 27, 105: n = A,T,C or G
cgggccccccctcggaagtcttctagnattaattaacgcggggagagttgaacacaaaaatgacactaaaaatagacaagaaacatcactttttaaaaagttttnattatggaaaatgcatacaaaaaagtggacaaaatggtataataaactttcacgagtccatcacctagcttcaacaatgatcagctcatggccaatcttatttcatctattccccatgtatatacttcgcttctcccattttttttgaagtaagttccagaagtcatattatttcttctgtatatatttcaaaatgcatctttaaaaaataaatattttaacacaatcatcacagtaccatattataccttaaaaattaataatggttcacagtatcaccaaatattcagtaagttttcaaattttcaaccatcccataaatactatttatttttcttgtttacattaagatcaaaataaagtccatatattgcatatttctttaatctatggattcctgccacccatctctctatttgtccttgcaatttatttgttgaataaactggaacttgtatcctgacattttccatgatct

SEQ ID NO: 58089 - DNA, 302 bp, Homo sapiens
cgggccccccctcggaagtcttctagaattaattaacgcgggctcccctgcttccgaggtgaattatgaaggagatgttcatcattcccaggaatgtcttgatgctgttgccgtttgtgtatgcatctctaggtaatacataatcttttatatgttttaaaactctgtgggctgggcaagatgactcatgcctgtaatcccagcaatttgggaggctgaggcaggaggatcacttgagcccaggggttagagaccagcctgggcaatatagtgagaccctgtctctacaaaaaaaaaaaaaa

SEQ ID NO: 58090 - DNA, 624 bp, Homo sapiens
  misc_feature 13, 26, 42: n = A,T,C or G
ggccccccctcgngaatacttctagnattaattaacgcgggnaaggtataacaaaacttgtgtatcatttcatgcaattgcatgtgaatctataattagttcaaaaagattttaattatagaaaatagttttaaaatgtttgatttgagggaactagcattgaacgagcaaagcttttcagtgaatcatcataacagttctatgacatttcacattattttattcaatacacagactaagaacataaagggagagaatttaagaaatatgcttaagacttgattgttattaactagaatgaatgaaattagattaaaaatgtctgggtctacagatagaataaaatattccaaatatactcaattaccattactgatgaaactaataaatgcataatttttgtcaaataaagtagatctaaatttttttaaaaaaaataggtacttagttctctgtgcaggttatgagggtaaataatttttattactaagattccacagaacctaaatttcaatatgaacctgaaagtaatattttcgtaattcacctacaaacagacccaacctctaaaagttcataaggaatgactttggtattttcttggcagaaattgcaattttataa

SEQ ID NO: 58091 - DNA, 426 bp, Homo sapiens
  misc_feature 27: n = A,T,C or G
cgggccccccctcgaaatacttctagnattaattaagcggggcacagttgtggggggcaaaggattataattttaaaagacacttaactttatctttttttaaaaagacacagttttgctcctttaattgaggtgtaatttataaataaaattcacaggttttaagtgtagaatttactgattttgacaaatgcatacacctttgtaacccaatgaggatactgaattatttccaccatacaggcagttcccttggcctttcttcagtcaatctccctacaccctagagataacaagtgttctgatttgtatcaccatagattagttttgccagttctagaactccatatgtggaatcatacagtatgattttttgtctttggcttcttcactccacatgtttttaaattcatttcatattgcttt

SEQ ID NO: 58092 - DNA, 451 bp, Homo sapiens
ccgggccccccctcgaaagtcttctagaattaattaacgcgggagattgtcctcttttaatatgagacttcaacacacaaaattataatgacagaattgaagaaggctgataagtcattttgtaatacctgaaaactgaaagttaagaaatatttagggccaggtatggtggctcatacctataatcccagcattttcggaggccaaggcagaaggatcgcttgagcccaggaattcaagaccagcctggcaacatggtgagattttgtctctacgaaaaattaaaaattagccaggtgtggtgggcatgagcctgtggtcccagctactcaggaggctctggtgggaggatcgcttgaacccaggaggttgaggctgcagtgagccatgtttgcatcattgcaccccagcctgtgtgacagagtgagactctgtcttgaaaaaaaaaaaa

SEQ ID NO: 58093 - DNA, 540 bp, Homo sapiens
  misc_feature 28, 482: n = A,T,C or G
cgggcccccccctcggaatacttctagnattaattaacgcgggtgagtatagatacaaatatactaagccaaatgttagcaagtccaattcggcaatatataaaaaggacatgacaaaattggacttattttaggaatgtaaagttggtttgatatttgaaaatcaatcactgtaatttatcacacaagtagaatgaaggacaaaaatcatgctacaattgctcaacagatgcacaactcacatttggtaaaatttaacattggctctcaattaagaaaaagaaaccaactcagcaaactaggaacagaaagggagcttcattaattttataaaggatatgtattttaaaactatagcaaaaatcatacttttcagtgaaatgttgatatctttccccttgagattgtgaatgactgctatcaccagaacctctgatactgtattgaataaagaaaaaaagaaaacaaagatttaagctgtntttatttgtacataacatgaacatttccatagaaatttcaaaagaatctttatgtaat

SEQ ID NO: 58094 - DNA, 470 bp, Homo sapiens
  misc_feature 461: n = A,T,C or G
tcttctagaattaattaacgcgggcttttaattgcttaaaaaaaagaaactaaatctaccaatgccaatttcaaactgtttcattcatcttcgcttagttctgttaccacttctttgtaagccaaaggacactgcttcctactgaaagctgaagagacagatgttttggtaagaagcagttcttctgagtgcgcactggcaaataaggttaagcaggggattgtgactcagctaatgctggttcctaacttttctcattttattattttgatacgttccttctgaattaacttgccattcaggtgacaagaaagcctactgaagttcttggtaaataaaacactttatactaaaatgagatgaatctttaaagttcaaacctagactcagaataacaacattttattcttcctaagaagtcatctgaatgtggcatttccaatttgtcaaaaaaaaaaaanaaaaaaaaa

SEQ ID NO: 58095 - DNA, 373 bp, Homo sapiens
  misc_feature 38, 339: n = A,T,C or G
ctgggttaccgggcccccccctcggaaatacttctagnattaattaacgcggggtgggtaaagggtattttaacttaggggtagttcctgctgtgagtggttacagctgatcctcgggaagaacaaagctaaagctgccttttgtctgttattttatttttttgaagtttaaataaagtttactaattttgaccaaaaaaaaaaaaaaaaaaaaaaaaaaaaaaaaaaaaaaaaaaaaaaaaaaaaaaaaaaaaaaaaaaaaaaaaaaaaaaaaaaaaccacaaaaaaagaaaaaaaaaaaaaaccacaaaaaaaaaaaaaaaataaaaaaaaaaaaangggccccccccccggggggggccccctggccccc

SEQ ID NO: 58096 - DNA, 557 bp, Homo sapiens
  misc_feature 28: n = A,T,C or G
ccgggccccccctcggaagtcttctagnattaattaacgcgggctatacacaacttaataattatatatcagataaactgaataaaaaactttgtaagagtggtctacgcacacaggatcttgtcctccctaggcgtggatagagagatgccataatctgccagcatttggggagatcatggtaaatacttgaggcgttgatacatagtgcagtgagccaatttccttttcagttgtcactcagcaccataacatcacgaagaacatcattaatgcaaacctctcactaagccttcagaccaaagtggctttctgatggactctgcctgtctgtctacaagtggagtcagattcaaagtagaaatgtatccatccttgggaaagaaaataggaagtcttcccccactgtaggagtatataaaaatgtctcctggttgcttaattcccaacactcaatttccttcttctaaacacatttataaggagcgagagatggtgcacttattatgaattaatattaagcaatcactaaaagaaaggaatattctcttcctttc

SEQ ID NO: 58097 - DNA, 253 bp, Homo sapiens
  misc_feature 101, 119: n = A,T,C or G
aaaaaaaaaaaaaaaaaaaaaaaaaaaaaaaaaaaaaaaaaaaaaaaaaaaaaaaaaaaaaaaaaaaaaaaaaatttttataaattttttaaaaaaaaaangggggggccccccccggngggggggccttccttttcccccttttagggggttttttttcccccccgcctttttgggggggttttttaaaaggggggggggggaaaaccctgggttttcccaattttattgggtttgaaacattttctttttt

SEQ ID NO: 58098 - DNA, 595 bp, Homo sapiens
  misc_feature 27, 101: n = A,T,C or G
cgggcccccccctcggaatacttctanaattaattaacgcggggagactgtgttgttagttatcccttcaacatcttctaaggggtggcaggaaataatanttggaaataacattttaaagtaaaaattttaaagtttaaagaagagttttgccacttaaacaggggagctttgtctggaaaatacactgagttgaaacacttcatccttggaaggattatataagatgaacagttgtgataaatgtgtagattagagggatgtgaatgggcagttagtccagtgccctcatttaagaggccaagatcctgattcagaggaggcatcctttgcccagagctgcttagctaatctgaccaaatgttgggaaaaatgtctcacctaacccactattccttaattatggattttgtgaaaaacaatagaacatgttaatgagtaatttatattagttcgatgtattacaatttttagctttaaattacagttttcttataatgttgaaatgttttagaatcctttgaatctaagtatttgtttcctaaatgaaacatttgtacaacatttgatgtttttacttatgaaatattctcct

SEQ ID NO: 58099 - DNA, 582 bp, Homo sapiens
ccgggccccccctcgaaagtcttctagaattaattaacgcgggtctctgttaaattctttgtttgcaggaatcgctcttggatctacacacaaaagtaacaaaaactaactgttgtgaaagttctgaacagattaaaaggttgttggaaacataccttatacttgtaaaacatggaagtgggacaaagatacccacgcctgctgatgtctgtaaggtgagttcccaacttaatatgctcaagagtctggtttttaaaagctgattgctgagtatgcattgttttttctttttgcaggtgttatctcaaacactgcaagtagccagtctctccacatcttgctgggagaccctcttggatgtaatttctgctttgatcctgggtgaaaatgtttccttgccagagaccctcatcaaagaaaccatagaaaaagtaatttacttcaacaaatattaattgagcagttaataatatgtttagcattgagtaaccttctgaggaatacaagtgaagtgtgacaaaggctctgccctcaaggaatttataatcttgttaaggaaatgggaattgcatgcagtaatgt

SEQ ID NO: 58100 - DNA, 569 bp, Homo sapiens
  misc_feature 28, 45: n = A,T,C or G
cgggcccccccctcggaagtcttctagnaattaattaacgcgggnaggtgaggcatagtatttggaaagcttcctaaaacttccgataaaggctaagagctggcccaaacctacgttaaataacacagaatgttgtgctatagcaggcaatcctaaagtgaagccttgggatttttgtgaactcataataagaaattgatggtcaatttcttaattggttgatattattttgtaaatatttttgtatatataaatatatgtgtgtgtgtgtatgtacacacacatatgctgtcatatgccacataatgacattttggtcaatgacagactgcatatacaatgatagtgctataaaattataataccctgattttactgtaccttttctatgtttagatacatttagatacacaaatatttaccatggtgttacaattgcctgccatattcagcacagtaacatgctgtacggattggtagactagaaataataggctataccatatactctatgtgtgtagaaggctacattatctagatatgtgaaagtacactctctgatgcttgca

SEQ ID NO: 58101 - DNA, 471 bp, Homo sapiens
  misc_feature 19, 32, 431: n = A,T,C or G
taccgggcccccccctcgngaatacttctagnattaattaacgcggggtctagtgttaaggtatcaaagaaaattcaggaaatgagtgacacaaaaattagtaagaaagcaaagataagaaacattagtcaaagtcctgagtccagtggttatctaacacccaaaaagtagtaggccgggtgccgtggctcatgcctggaatcccagcactttggaaggccaaggcgggcagatctcctgaggtcgggagttcaaggccagcctgaccaatatggagaaaccctatctctactaaaaatacaaaattagccgggtgtggtggctcatgcctgtaataccagctactcaggaggctgaggcaggagaatcgcttgaagcagggaggtggagggtgtggtgagccgagattgcatcattgaactccagcctgngaaacaagagcaaaacttcatctcaaaaaaaaaaaaaaaa

SEQ ID NO: 58102 - DNA, 445 bp, Homo sapiens
  misc_feature 28: n = A,T,C or G
cgggcccccccctcgagagtcttctagnattaattaacgcgggtagacagttttacttctttcttttcaacttatattctgttacctttatttatttcactggctagaacttccagtaatacgttgaataaaggtagataaagcagatatttgtgctttagtcctaatcttaggaaaaaaggcattaggtcatttacatgtatgatgtaaatgttatgatgtaaaatgtattttaactgtgatgttaactgtgaattatcttagatgctatatcaggttgaaaattcccttctattctttgttgttgagagatttttataataaatagatattgaattttgtcaaatacttggtatacatctattgagatgatcatgtggtttttcttgtttctttttgtgtctgttaatatagaaaacggcattaactgttaaatattgaatga

SEQ ID NO: 58103 - DNA, 484 bp, Homo sapiens
cgggccccccctcgaaagtcttctagaattaattaaattgtagtcaaatcttaaatgaacattacaaaagtgtgtgtgtaaaaatatgcaccattttgtgccattttttttttatgagaattggtgccaactatttggagaataccaaaggtaggaaatggtgtcctgctttcttgttctttctcctttttaaaacgctttctttagaattctccctttgcacttccagttccaagttgtttctcaatggtttgagaagaaagtgaaaacttctcttttacaaacggatgaaaagagagagccctaatggaccacatctaggatgctagatcattgggtctggagcaaactacccagtttccaactctggctccagaatctaccatctgtgttaccttgggcaaataacctcagtaatccccagtttccatacttgtaaaatgtagataatgatattacccacctcatatgactgatgtgaagt

SEQ ID NO: 58104 - DNA, 585 bp, Homo sapiens
  misc_feature 40: n = A,T,C or G
ccccccttcggggtacttctagaattaattaacgcggggnaaaaaaaaaaaaaaaaaaaaaaaaaaaaaaaaaaaaaaaaaaaaaaaaaaaaaaaaaaaaaaaaaaaaaaaaaaaaaaaaaaaaaaaaaaaaaaaaaaaaaaaaaaaaaaaaaaaaaaaaaaatagataaatttaaatttttttttttctcctcccctggttggggattttttttttccttttttggggtttttttttccccccttttttgtttttttttttaaaatttttgttttgggaaaacttttgtttttcccttttttttgttttttcaaaattttctctttttttccaattttttttttttataaaagggccccccccaattttttttttaaaattttgccctttttttttgggattttggatttttttccctttttttttttttaaaattccccttttttttttttttaaataaattttttttttaacctgtggggcggattttggtattttttttttttttttaaaaatttaccccggattggggttttttttttttcatttttgaaaaaaaattttttttttaaaaattttttttt

SEQ ID NO: 58105 - DNA, 315 bp, Homo sapiens
  misc_feature 44: n = A,T,C or G
cgggcccccccctcggggtacttctagaattaattaacgcgggnaaccatgataggagaccagtctcaaatccatctctctgaccaactaaaattaggagtttgtttatatagcaaaagaaatgtaaccatttgtgggaaaacaggaattagtgaggggtaaggaagaggaattggtcaacagcaaacaggcagtgggttaggcaatcatgatgggtgaggggtctggcatcttattgttcaaatgcaatgatctgagaagtttcaattccttgatctgagaggcctgatagttggtttgcagagaaaggaactc

SEQ ID NO: 58106 - DNA, 569 bp, Homo sapiens
ccgggccccccctcgaaagtcttctagaattaattaacgcgggggggggtgttgaaagatacatagcaaaacactggtttgatattttgaagtatttcactaaaaatggagttcaatttattactcttaataacatcatttttggtggtctcccccatattgttatacactgatttgaataacaagggaagtcctcctctctgtgagaaactttcccctgcctcacagcctctcagcaagaattattgttattatatatatgcctttgtgttacataagggacaagaaatttcattcatttttctacttactggaacagggtttattgctgccttgacattgagaggctgaatgtcagaagttttttgttttttttttttcctaagaatatgttctaatccaagttcaaggaacaaagcacttttcgcagaacaaaacatctagctcttcagaaagattgagacacgttatctaagatctttcttccttctcaattgacaagacatattctttccttagccctcaatttctgggtatgcattcaataagcctatcaggccttttttttt

SEQ ID NO: 58107 - DNA, 333 bp, Homo sapiens
cccccctcgaaagtcttctagaattaattaacgcggggatggtgcggcctactatacacctaggctatacggtgtagcctattgcccctaggctacaaacctgtaggcaactgtaacacaatggtaagtatttgtgtatctaaacatatttaaacataggaaaggtgtagtcaaaatatatcataaaagataaaaaatgaggccaggcgaggtggctcacgcctgtaatcccagcactttgggaggccaaggtgggcagatcatttgaggtgaagagtttgagaccagcctggccaacatggtgaaaccccgtctctactaaaaatacaaaaa

SEQ ID NO: 58108 - DNA, 622 bp, Homo sapiens
  misc_feature 554: n = A,T,C or G
gccccccctcgaaatacttctagaattaattaacgcgggtatagtataatattgggaccccataccgttagcccttgtatgtataccaacactgccaaagtaaaacattaggtcaggcatggtggctcaggcctgtaatcccagcattttgggaggctgaggcaagtggataacttgaggtcatgagttcgaaaccagcctggccaaaacagtgaaaccccgtctctactaaaaatacaaaattagccagatgtggtggcgcacacctgtaatcccagctactcaggaagctgaggcaggaaaatcgcttgaacctgggaggtggaagttgcagtgagccgagatcgcaccactgcactccagcctgggtgacaagagcgaaactccatctcaaaaaaaaaaaaaaccaaagtgaaacactaaaaattccctatagatatattccaggaaatattttaattgggctgattttaattaggctgtatcattgatgattactggaatcgattttatgtcttttgtattttaatcacttgagttaatcaaccactggncaatcccatttgacaaagattagcattgtaaaaaacagatactgtggtagatttctagaaattcattc

SEQ ID NO: 58109 - DNA, 474 bp, Homo sapiens
cgggcccccccctcggaagtcttctagaattaattaacgcgggcaggagagcagaaagaaagagagagaagaaagtacaaattaccaatatcaagaatgagaggcaagacatcaattgagattctacagttattagaagactaaaatgagcttaatactataaattcaataacttagataaaatggaccaatctctttagaaacaaaaactaccatagttcactaaaaaagtaatagataattcaaatagccctatatctattaaagaactcaagtttttttttttttgcttaaaacatttccatagagaaaacactaggctaagagagctaaataaaaatattccttttatctaattgctttaaaacttcatcctatattatgcccaaaaatacctcaataaactcaaaatatagacataagataaaccatatttacaatgacaacttaacaaagccaaaaaaaaaaaaaaaa

SEQ ID NO: 58110 - DNA, 613 bp, Homo sapiens
  misc_feature 33: n = A,T,C or G
gtaccgggcccccccctcggaaatacttctagnattaattaacgcgggaatctctctatatataagaactctaaaaaaaaaaaactttaaaaattgagagaaaaccaaaaatctttaccaaaaaatgacaaaatacatgaacagatagttcacaaataaatgactcttaaatgtaaaaatacactcaacctcgctcataagagaaataaaaattaaaaccacattcacatatcatgttttaccaatcacaccagaaaaaaattaaaagcttgataataaattttgttggtgaggctataggggaaacaggtactctaatacactgctgctgggaatgcaaaatggtgaaatttcaatggaggggaatttggctatttctaacaaaactatacatgtatttaccctttaatgcaacaactccactctaggaacttattctgaggatacacttccaatattatgggaaaaaatacacacagctattcagtagtaatagcacaatttcggaaacaacaattcaaatttccaccacgtatgagtcttgttggccaggtgtggtggctcatgcctataatcccagcactttgggaggccgaggcgggcagatcacttg

SEQ ID NO: 58111 - DNA, 587 bp, Homo sapiens
  misc_feature 28: n = A,T,C or G
cggggccccccctcggaagtcttctagnattaattaacgcggggatcatcaggattcacatgtatgtgggatccaatcggaggcaagctaggattcacaatagaatattacagatgctgacatacagaacactcaggattgaaaagagtgttaccgacctgatcgagctgaagagacgcaggcagaatttcataatgcaattgtgggtgttaacagcggaatataccaacctgaggaatgaatctcaaagcttgaagactggctttctgaatataaaatagtcatgcaagactaatgaaatagtaataacaaggaacagacaaaacctccatgaaagtgatatattatgttaagagaccaaatctatgactcattggcatccctgaacagagatggagagaatggaagaaacttggaaaacatattccaaaatctcatccatgagaacttacccaacctagctagtgaggccagcatttaaattcagaaatgcagagaacccccataagagactccacatgaagatcatcccccagacagacaatcgtcagattctccaaggttgaaatgatagaaaaaatgttaaa

SEQ ID NO: 58112 - DNA, 480 bp, Homo sapiens
cccccctcgagagtcttctagaattaattaacgcgggggctggtgaaggggctggaggcgccatgtcgggccgggaaggaagataaggctttcaagcagaaacaaaaggaggaacagaagaaactcgaggagctaaaagccaaggccgccgggaagggccccctggccacaggtggaattaagaaatctggcaaaaagtaagctgttcctcacatctggggtgatagtgaccctcctcttccattcctatttaaacatctggattccctgccatagcatctttgccacctacagctagaatgaagtgttatcctgtgaccagtcaaacatctggattccctgtcataacatctttgccatgtaatagctagaatgaaatgttatcctgaagcctgttgtacattgtaataaacttttgtaaaaaaaaaaaaaaatgaataaagtaaataatgccatggcaaaaaaaaaaaaaataaaaaa

SEQ ID NO: 58113 - DNA, 409 bp, Homo sapiens
ccgggccccccctcgaaagtcttctagaattaattaacgcgggtactgcataatggtatagaccatttaatattccaaacataatctgaaagactagaggaatcgccattaatttcatttgtgtttgacaaagcgtcatccaatggattaaaacccttccttttggtggcagtggaacggtatgatacctaaaaagaaaaaaagagttaatcacctctcctggatatgaatgctattagaagtttgttgacttctcctaaattgataattgcctttctagatctataatgtagagagcaaaaaagttaaaagttagctatctgaaataccaaactaccacattttgattcaaatatatcatagacagctaaagaagaaagagagtttattaacctaaaaaaaaaaaaaa

SEQ ID NO: 58114 - DNA, 453 bp, Homo sapiens
  misc_feature 36, 52: n = A,T,C or G
tgggtaccgggcccccccctcggaaatacttctagnattaattaacgcgggngagaaagactctgtactctgctgtgatggggagacactaaggcactctgttttagagcagcagtccccaacttttttggcaccagggactggtttcatggaagataatttttccacagatggcggggtggggtggtttggggatgaaactgttccacctcagatctcaagcattagattctcaataaggagcacgcaacgtagatccctggcatgtgcagtttacaatagggctcatgttcctatgagaagcgagtgtcgcagctgatctgtcaggaggcagagctcaggtggtaatgctcgctcaccaaccactcacctgctgtgcagcctggttcctaacaggccacagacccgtacaaacctgcggcccagggattggggcgaaaaaaaaaaaaaaaa

SEQ ID NO: 58115 - DNA, 519 bp, Homo sapiens
  misc_feature 14, 27: n = A,T,C or G
gggccccccctcgngggatacttctanaattaattaacgcggggggggtggtggtgctgcctgattcttgtgttgttctttgctcgattaaactctgttaaattaaaaaaaaaattagtccaataaaattcaatgtaaatttttccttatgatttttaaattggtttaaaaaatttaacatacataaagaaataatatgaagaataaaatactaatttttattttttatatatagagtcctaaatttggtaagaaatcactaatccattaagtagaacagtaaaatgaaacaacaaatcataaggaaaaattaacaatggccagtacatatagtgaaaactttcagctattcaaacatttaaagaaacagaaattaggtggctcatgcttataatcgcagcgctttgagaggtcgtggtgggaagatatcttgaggccaggagtttgagatcaggctgggggcaaggtagtgagacccttgtctctacccaaaaaataaaaataaaaaaaaaaaaaaaa

SEQ ID NO: 58116 - DNA, 602 bp, Homo sapiens
  misc_feature 28: n = A,T,C or G
cgggcccccccctcggggtacttctagnaattaattaacgcgggtgtgggaagattgtatgataaagttcctatatataatacagattagtctgtattatatactggaattcgatgaaattgagaaggtttatgatcttatagtgtctatattatctatagttaggaaaacattcataagaatcatagagaatactcatttgatgagttttgctgtttgaaaatatttatcatagaaaggtcctcaaagacggtacctgtgaaaatatttggtctgaaatatttacatatttcagtacaaaaaaattaagaatattctccattttgtagaacatgctctgaagttacacagtacctcaacacttatgtggaaaactttattctcaattcagaatatgatgtatagagaaaaatttattggaaatgtcaaaaatttcaaatttattaacactaaaatgcaacgtggaagaagattgcatttatggaaaacaaaacaaaaacaaaacaaaactatggtggggcacagtggctcacacctgtaattccagcattttaggaagcccaggcaggtggatcacttgagcccaggagttcgagaccagc

SEQ ID NO: 58117 - DNA, 343 bp, Homo sapiens
  misc_feature 28: n = A,T,C or G
cgggcccccccctcggagtacttctagnattaattaacgcggggcataatcaaggcactgtaaatcttataattttaaaataaattacttaagaacaaaaaaaaaaaaaaaaaaaaaaaaaaaaaaaaaaaaaaaaaaaaaaatgaacatcaaagaagaggaaaaaacaggcggccgcccccgggggggatctcggccgccccctggggggagcctcctttccccctctactgggccgtgtggggcccccccccggggggggcccccccccccccttggcgggggaattccccgcccccccccgggcggtttttttccaggcgttctcccggaaacccccggg

SEQ ID NO: 58118 - DNA, 587 bp, Homo sapiens
  misc_feature 37: n = A,T,C or G
ctgggtaccgggcccccccctcggaaatacttctagnattaattaacgcgggggaactgtaaattaagaattttaagatgcatatcaaaaaacataagcaaattaaactataatgtctaggagtaggcacttaagccataaagatatataagtaagtgattaatggccgggtgcagtcttctttaccttacccactttcctcttgaggatctcattcatccccatggcttcaatgaccttctatatgctgataattcattaaaccatcaaaaaccctcccctttcttagcagcagaccatggcgcccacgtggccacctctactgagatgccttgttctcagcacgtgagaaaccaatcttttctccagcccactacctcctccctttagtgtggaatctctttctcagtcaacaactcttcatcttccaggtcacctgatttggaaacctgtgagagactctgtctccttactctgtcctaccaccaaccgaccagactctttttttttgagacagagtcttgttcagccacccaggctgaagtgaagtgcagcaagatcctgccaaaaaaaaaaaaaaaaaaaaa

SEQ ID NO: 58119 - DNA, 581 bp, Homo sapiens
ccgggccccccctcgaaatacttctagaattaattaacgcgggtctccctttagattttttaatatttgctttatatatttgagtgctctgatgttgaatgcatacatgtttactatttttacatcattttgctgaattgacccctttgtcgttatataataaccttctgtctcttacagattttgatttaaagtctattttatgtaatataagtaaaactactcctgctgttttatgatttctattttcatagagtatcttttatcatcttttgtctttcagtctatatttttttagaggtgaaatgagtttcttgtaggaagcatatagttggatcttaatttttaatacattcagccattctatgtctttaattggagaatttagttcatctacatttaatgttatattgatagaaaaggatttactactccattttgttacttgttttctagttgttttgtaactcctgtctgtcttccttttcttactgtcttcctttgtgattaattgactttctctagtactacgttttcaatttgttggcttttattttagtgtatctattatagatttttgc

SEQ ID NO: 58120 - DNA, 219 bp, Homo sapiens
ccgggccccccctcgaaatacttctagaattaattaacgcggggtgtgtccctggaaacagctcttcattccattgacttagaggcaacaggattgatcattcttttatagagcatatttgccaataaagcttttggaagccggaaaaaaaaaaaaaaaaaaaaaaaaaaaaaaaaaaaaaaaaaaaaaaaaaaaaaaaaaaaggaaaaaaaaaaaaaa

SEQ ID NO: 58121 - DNA, 298 bp, Homo sapiens
gcgtagctgctgtggggcctgctcgggcccggattggggcttgccatctgctggcatgtggcgatgaactctcgcaagtgccttcgggaggagatgcacaaggacctgctagggactggcgcgtgcgagatctgcgaccagggtgggggcgctggcggcctgcgcagccacctgaagatcacagatgctggtggccatatgctgtactccaaagaggatgcagccaaggggaaatgggccttgtgaccactgaagattatgacatgtcggaagtgtgggtggagagcaagggaacagg

SEQ ID NO: 58122 - DNA, 430 bp, Homo sapiens
cgggccccccctcggaagtcttctagaattaattaacgcgggacccagtaatgtgattgctgggtcaaatggtaattctgtttaagatctttgagaaatcttcaaactgcttgcataatggctggactaattgaaagagaatgggtaagtttaggaagagaggaattactgaatgatgtgaagtgagatgagaatattaataatgggggagttttcaggacgataaatcaagagtccagttttgaatatattatgcctgagatgtctactatacttccatgggaagatatcaagcaagcaattgaatatttatgcttggatttctggaatactttggctttggaaattttttaaaacctgaatttaaatttactgcacttgtatagtctatctaggaaattaagaataaacaggcaaaaaaaaaaaaaaa

SEQ ID NO: 58123 - DNA, 260 bp, Homo sapiens
ccgggccccccctcggaagtcttctagaattaattaacgcgggtcctgtaaagagtggtgtgtatccaaaaaaaaaaaaatctgtacaatgtattttaaaacttgtgtgcacaaaactgaagattttcttttttacctagtccaaatgccgtcctagcctgagtcctgctctttataaaaataaaataaaaagaatttgaagcttgtgaaagtaaaaaaaaaaaaaaaaaaaaaaaaaaaaaaaaaaaaaaaaaaaaaaa

SEQ ID NO: 58124 - DNA, 369 bp, Homo sapiens
gggtaccgggcccccccctcgaaagtcttctagaattaattaacgcggggtggtggaactagaaatagaaaaattatttttcaaacattatttgatttcagtgaaaaagtgtaaaagctcaactaatacatttataataacgataaatgagaaaacaatgcaaaatgaaaatatcatggtttgcatttctgtcctaaatttacactttttatttatttgtttatttatttttgagatggagtctcgctctgtcacccaggctgtttctcttttctattatttacttactggattgtaaattggtaatgagccagaaaggtttacattcatccaatttaaaggactgttaaaaaaaaaaaaaaaaaaaaa

SEQ ID NO: 58125 - DNA, 567 bp, Homo sapiens
  misc_feature 519: n = A,T,C or G
cgggcccccccctcggaagtcttctagaattaattaatcacacttaaatttgggaatttcatttgcattttcactgtggcccacatgactgatgcaggtggaactcaaagaagtaaatagaccagcttatagtgtctgaagcccaactttcaatgttacccatctctgattgcattaaagaatctaggattggtggttcccctagctataatgcagaaaccaagttaaacatcttcctgtacctcaaagatctctaaaatgcgtcatttatagtgtcaacactcaaagaatggacgaaaagaaagcaaggatataagcagaaaatacgatggaatcaaaatccaagagaaacagcagacaatagaaacagacccataagaaacccaggtaattgagttagtagattttagaatagtgggcttattatgcttaaaaaaaaaaaaaaaaggcagatgagaagtagggcaaaactattaaagaagaagcaaatagaattctaaaactaataatatggaaatnttatggatttaatgtttgggaataaattattagaccaaacagaactga

SEQ ID NO: 58126 - DNA, 539 bp, Homo sapiens
  misc_feature 38: n = A,T,C or G
ctggggtaccgggcccccccctcggaggtacttctagnattaattaacgcgggggggtgctactggcatctaggtggtaaaagccaggaatgctgcctaacatcctagaaggcacaggttagtactgaatgtcaatgaatcatccatcccaaaatgtcaacggtgctttaagtaaaaagaagaatgatgcataccaatgattttatttttgtatttatgacaattcttctttaaaaaattatcacaattcataattacttttaatgtaataaataaaattctattttgatgcagttctattcaagtgaaatatatattttcatgtgaacaaagtgaatacttacttgtgcatgttctccactcctatgatgatcatgatacagtaggaaattccactttgtacaagaaagtgtaaggcatacctataaaaagtaagagcactattagaagagggatgccaagtcacaaacatcaagctgaagtgaattaagctaaaaaatacttatgcataacacagtattcccaaaaaaaaaaaaaaa

SEQ ID NO: 58127 - DNA, 544 bp, Homo sapiens
  misc_feature 23, 491, 519: n = A,T,C or G
gccccccctcggaatacttctanaattaattaacgcgggttaataaatgagtatagcagggtgacaggatacaaagtcagtatacaaaattccattttattcctgtatacaagctgcaggtgttgaaaatgaaattttaaaaaattaccatcaaaaattatttacaatagcattcctaataggaatgaatataagaaaagatatggaagacctctacactgaaaactacaaaacactgattagtaaaattacaatgatctaaataaatgaagatataccatgcccatggattgaaagactcaatattgttaagatgtccatttttctctatgcattgaatgttgtcccatttataaatctcaatagcctttcttttagaaactgacaagcttattctaaaactaatatataattgcaaatgacctctaatgaaaacaatcataaaaaataaagaaggagggcttatactgctgatttcaaatttactgtanagctgtaataaatacatgtttgacatanagatagatgactagaaatactgaat

SEQ ID NO: 58128 - DNA, 405 bp, Homo sapiens
  misc_feature 9: n = A,T,C or G
acttctagnattaattaacgcgggggaggagaaggaagaggaggggttggttggttttactgtctcagcagtggcagaggcagaagaaaacctgtgaataagtggacctgcatagttcaaacccgtgttgttcaagtgtcaactatagtcatctttcttttgattgctgaagctcagtaatactttcaagaacttcatagtctcctccttgtaaactctgatcacactggatactaataataaagagggtgtgtttaaaaaatcattcagatgctcagacatccgtgttagaaactcttcatattatcctagatttcctaagcctctttaataaaactgggagttgatacactcactcaaagtgtgacaactattaacaacactgctttccaaaaaaaaaaaaaa

SEQ ID NO: 58129 - DNA, 609 bp, Homo sapiens
gggccccccctcgaaagtcttctagaattaattaacgcgggggtcactcgacggtttagataattctttttattttttatttttcctttccctcaatccttttttatttttaaaaatagttcttttgtaatgtggtgttcaaaatgaaaattgaatactggcactccatctcttagaacatatgaattctagtgttcaatattcattattggttgtttttgttgtgctgatttttggtgatcagacctcagctcccttaatactgccctttttcctttaagagatttcatgtgtgcacagagaggccacccttttcaggactgtgcattttcaggtttgtgatgataaaaagatcgaccaatgggagctttcctatgacctttcaattggctctgaagttccagcatgtggttgcttcactcctggactgtgattttcagtgggagatggaaatttttcagagaactgaactgtggaaaatgacctttcctcagcttgaagctacttttaaaatctgcgggtctggaccaaaagaagaacatcatgtttgtagtcaagatgacagatacagtgagagcaacagctaactccaaaggtggcttcactgga

SEQ ID NO: 58130 - DNA, 268 bp, Homo sapiens
  misc_feature 13, 41: n = A,T,C or G
cccccccttcggnagtcttctagaattaattaacgcggggnaaaaaaaaaaaaaaaaaaaaaaaaaaaaaaaaaaaaaaaaaaaaaaaaaaaaaaaaaaaaaaaaaaaaaaaaaaaaaaaaaaaaaaaaaaaaaaaaaaaaaaaaaaaaaaaaaaaataacacacactaaattggaaaaaaatatttccgccccccccccggggggggcccccccttttccccttttgggggtctttttccccccccccttttggcggtttttttaaa

SEQ ID NO: 58131 - DNA, 467 bp, Homo sapiens
  misc_feature 19: n = A,T,C or G
taccgggcccccccctcgngcgtacttctgtattaattaacgcggggagggtcccggcgggagccaataaagttggtgaaaatcgtttggtcgagaaaaaaaaaaaaaaaaaaaaaaaaaaaaaaaaaaaaaaaaaaaaaaaaaaaaaaaaaaaaaaaaaaaaaaaaaataaattaaaaaaaaaaaaaaaaccccccccccccgggggggcttctttcattcctccttttttttttttttttttcccccccccctttttttcttttttttttaatcttggttgtctggccccaccccttccctttcctttttttttttgccttccatccccccccctttcccccccctgtttttttaaacgagcccccccccccccctccctcctttccaatttgtagggggggattgagggggaaaggttttttgaaagggttttttttttgattaccccccccttttttttttcc

SEQ ID NO: 58132 - DNA, 600 bp, Homo sapiens
  misc_feature 24, 506, 573: n = A,T,C or G
gccccccctcggggtacttctagnaattaattaacgcgggtattgttacatccctatttacaagtgagattggtctgtagtttttgatacaatctttaccagattcaggtatcagtgtcatacttgcctcaaaaggaattgggaaaattttattcctttttaattctctggaccagcttaagtagcactgggattacttctttttggaaggtttcgtacagtttgtgtatgaaataatttaggttgagtgcttttttattgttagtttttgtttgttttgaagtaggtctttgataattttgtctatttcttataagaaattggtatgtttaaactttctctaactggaatcaatttgggaagttgcctttttaaataattatttggccgggcgtgatggctcacacctgtaattccagcactttgggaggccgaggtgggcggatcacgaggtcaggagatcgagaccatcctggctaacatggtgaaaccccgtctctactaanaatacaaaaaaaaattagccgggcgtggtggcgggcacctgtagtcccagctacttgggaggctgangcaggaaaatggcgtgaactcgggagg

SEQ ID NO: 58133 - DNA, 510 bp, Homo sapiens
  misc_feature 18, 28, 46: n = A,T,C or G
cgggtccccccctcgganatacttctanaattaattaacgcggggnaaaaaaaaaaaaaaaaaaaaaaaaaaaaaaaaaaaaaaaaaaaaaaaaaaaaaaaaaaaaaaaaaaaaaaaaaaaaaaaaaaaaaaaaaaaaaaaaaaaaaaaaaaaaaaaaataaaaataaaaaaaaattatttaatatttttgcccccccccggggggggattttttttttcctttttattgtgttttttttccccccttttttgggttttttttttaaatttttttatttggaaaacctttgttttacccctttttttttttttgtgaactttccttttttttcctttttggttttttattaaaaaagccccatcccttttttttttttaaaattttttcctcctttgttgggattgtttaatttttctcttttttttttttattaaaaatttgtcttttttttttttttttagtttcttttttttttaccatatggcttaattttgtgattttttttttt

SEQ ID NO: 58134 - DNA, 585 bp, Homo sapiens
cccccctcgaaagtcttctagaattaattaacgcggggtgcctatacttataaaagaaaaaaacagactaagtcaaaaactgtaaagctgtaaaattctaatgtagtagtaaatgcctgcattagacaaaagtgttaatatataataaagatgtcaatttatcaagaggttataacaattgtaaatatataggcacccaccatcagatcatctgaatataacaggcagatattgacacaaaggagaaatacacagcaatgtaacagtggcggactttaatattccactttcaacaatggatatattatccataccaaaaaggaaaaaagtcaataaggatgaagtggacttgaatgataaaccaaaggaacctagcagacatatagagagagcattccatctaacagcagcagaatacatatccttctcaaatacacatgaaacattctccaggattgatcatatgttgtgtcataaaacaaaacaaatttaagaagattgaaatcatctcaaatatctcttctgaccacaataatatgaaactaaaaagcaatgataggaagattgaaaaattcataaatatgt

SEQ ID NO: 58135 - DNA, 341 bp, Homo sapiens
ccgggccccccctcggaagtcttctagaattaattaacgcggggaccaaaaaaagggcaaatgcttttagaataaaaatgaaggtgactataaacagcttaaagtttaatttgcgggcgcccgctgatgtaaaatcatcagtaggccatcttttgaaaagagtttcacccgctggtgtgtcagagaccttacaactccatgacccgggaaaacttgggtgattccaagcttaattaactcatttactatacccataccaaaatgggaagattaatcgagagtggccggatgaaacactttgcacaacatagacgcttgctgtggggaactggaaaattgaa

SEQ ID NO: 58136 - DNA, 432 bp, Homo sapiens
cgggcccccccctcggggtacttctagaattaattaacgcgggcctctgaaatggatggctagagctggtcgtgtgcatggccatggccatgatgtctacggagctggggaccaggcttggcctcaaactcccttggcaagtccaggaactgctgctgcttctcggggctccgggcctgggccttactgtacaagtcgactaagctcaagaagtgcacaaggaactggaacatgacggcgtaggaaggcgtacagggtgaagatagcgggaccgggccggtctacggagatggtcatgatgggcttggaacgggagatgaagaggaaccaacagggcagcagcacgatctgagatctacctgccgtgacctcaagatgtgccactctgactggaagagtggagagtactggattgaccccaaccaaggctgc

SEQ ID NO: 58137 - DNA, 548 bp, Homo sapiens
  misc_feature 506: n = A,T,C or G
ggtaccgggcccccccctcggaatacttctagaattaattaacgcgggatgaataaaaggcctaagagagcacacaaggcaatgattaagatgcaaatacgcctttcaggttggctccttcctatctttccatcttgtgctaagcagtgagaagaaaaatatttatccacagctaaagcaataaatgtgggtgtacatgtgtatacacacacacacacacacacacacacacacaatttctaaatgcaggcaatgataatcaagattagctttcatcgacaggtcatctcaaatatgtagatgaggatactatcaaaaatcataaaatatttgaaggaaaactattatgaaaggaaaaaacaaataatttcaaagaaatgtaaatattttcaggaagatatgaaagtctgtcttatccatgaaaaaaataacaggataaattataaatcttgaaaataaaaaatatgtggtcattaatactaaaaaagaggtgggctaaatagcanaaatattacacctgaaatatacattagagtactggaatatta

SEQ ID NO: 58138 - DNA, 574 bp, Homo sapiens
cgggccccccctcgaaagtcttctagaattaattaacgcgggaggtacgtaataatcgtggcttttgtattaacaactttgtgttaaaatgctatggcatgtatttatcccttaaaaataatccattttctctggaaaagctacaaaaggaagtggcaccagttgttacctctagagagaggaactgggtatctagggtgggggtggggtgagtaggagacattcttttcaatgtataccctttcatttattttgatttttgaattatgtgctggtaactttaattgaaaaaatgttgtattaagtaaaacacatagaaaagcatacacatatattgcttaatgaattattataaaataaatacccttctaatatgtacctaggtaaagaattttcttagtcattgcagaagccctttcacagccttgtcataacctcttttctcctccccaaagtaaccactattgtgactttgaccacttccttgcatttctttatagttctgtcaaccagatgtgcatccttagacactatagtcttgcccaaaaaaaaaaaaaaagcggccgccaccgcg

SEQ ID NO: 58139 - DNA, 492 bp, Homo sapiens
gccccccctcgaaagtcttctagaattaattaacgcgggacataggatataggaaacagaaagattcaacacaggaacagagatgccctgagaacaactgtgcaataggcgtagattggcgtaggccaggaggttccagaagagactgcttcagaaagatgaaaatagaacacctcatctaaacctctggaaaggggagatttacacaatcattgaggggtttgggcttggtctagtgatgaatagtaaactaaaataagataattattaactagaggaaaaacaaaagcagtacagaagagaagtaatcatagtttcttatttgcctaaaatgtgaatgatatttacctagtcataatgaagtaaacataaatccaaaaaaaaggacagtataaggaatggaaagtttggtggagaaaggggaaggaaagagagctaaatctttatttttcattaagtgaagtcagtaaataatgtctaaaagtgaaaaat

SEQ ID NO: 58140 - DNA, 418 bp, Homo sapiens
cgggcccccccttcggggtacttctagaattaattaacgcgggctctactaaaatacaaaaaaattagccgagtgtggtggtgcacgcctgtagtcccagctactcaggaggctgaggcaggagaatcacttgaacccaggaggtggaggttgcagtgagccgagatcgcgccactgcactctaggctgggtgacagatggagactctgtcttgaaagaaaaaaaagtaaataaaaagagcatcaaaataaatgagtttgaacaccaaaaatagagaatgatataactgattataactcatggaataaaataggaaaccatgagtccacacagacataaataaatccattaataactggaagggccaggcatggcgtcctgcagtgatggcattctgttccagctactcagggagctg

SEQ ID NO: 58141 - DNA, 319 bp, Homo sapiens
  misc_feature 70: n = A,T,C or G
gggtaccgggcccccccctcgaaatacttctagaattaattaacgcgggaactataaaagacacactagnaaataaaaaggcaacaaataaaatcttactaccagagaatattacttatcacataagaaggtagtaggaaaggaaaaaagaaacagaagaataacaaaacaacaggaaaataagcaacaaaatgtcaatagtaagttcttacttatcaataataatactgaattcaaatggactaaattctccagttaaatggcattgagtggcagaatgggtaaaaaacaaaaacaaaagcaaaaaaaaaaaaaaaaa

SEQ ID NO: 58142 - DNA, 582 bp, Homo sapiens
  misc_feature 10: n = A,T,C or G
cccccctcgngggtacttctagaattaattaacgcgggtattttagtaaaaatgatacatgcttactgtaaaatattaaacaaattagaaaagcacaaagaagatcataaaaatcatctgacgtctcaagactgagaaataaacactgacagcattttgttaagaactctctagacctttctcatgcctggagatagatgttcactcttacatgagtggaatgttcttgatttgctgcactgtatttctccttacttctcaatgatgtcattcatctctttaaatgtcaccaaatatagggatgtaatgtgacttctaaggacctcatagttttccattttattttgtttatttcatattttcatatacttagtcaattccacattaaaaaaatacagttgttgagaaagaacttgttaagcttcaaaagaaccattacataaagaatgtgaagttatataaagaaactcatttacacaagaatctgttttagttgtccctattccaaaagcttgaaatagtgtatgtaaacaatgaggtactgtaaacatgtaaaagggtatctttattattactgaacca

SEQ ID NO: 58143 - DNA, 266 bp, Homo sapiens
  misc_feature 28: n = A,T,C or G
cgggcccccccctcggaagtcttctagnattaattaacgcggggacagagacttcataggctcctggtgtccttttttatgaggatattaattctattggatcaaggtctcacccttaggacctcatttaaccttaattatttccttagaggccccatatccaaatacaaacacattgggacttggacttcaacatatgaatttggttgggagatggggcacaaacatctagtctataacatccatccccccaaaaaaaaaaaaaa

SEQ ID NO: 58144 - DNA, 556 bp, Homo sapiens
cgggccccccctcgaaagtcttctagaattaattaacgcgggtatatatgtagatataggtaatatgtagatatacgcatatatgtaattatgtagatatatatacataataaatatatatatatacacacacataattatcaacagctaaaattttattgtgtgcttcatacataccagacactgaaataaactccttatatttacacattcatttagctcccaaagcagccagccctggagaatataatttccaattgacagttgagtcaatggaggctcacagctataacttgtttgaggtcatacgactagaaggtgtaaggatttagactgaaacctagactcagacataaaagcctttgcgccataccaatattatctacagccgctttgcctttgatttcccctaaaacagagtgtcctgtggctatgtaatacctgcataaaactgagaccatttggcactttcttacagaaatgaaaagtctgtggcagggcgcggtggctcacacttgtagccccagtactttgggaggccaaggcgggtggatca

SEQ ID NO: 58145 - DNA, 381 bp, Homo sapiens
  misc_feature 28: n = A,T,C or G
ccgggccccccctcgaaagtcttctagnattaattaacgcgggggaaggggagtcagtgctggaggtgactggagccgcggcgacggcggcagcagctgcggtggcggcgctctcagccgtggcagccgaggctgcagcccggcccagggcggctcagcggacaataaccgggctaggaacctgaccgggctggaccccactgtgatgcttcctgactgataatgttataacagtgcctggaagcctgaggctgcatttccagctggacgtacctcagttgtccccatcatcatggagacccaaaaggatgaagctgctcaggccaagggagctgcagcctctgggagtacccgtgaacaaacagcaaaaaaaaaaaaaaa

SEQ ID NO: 58146 - DNA, 507 bp, Homo sapiens
  misc_feature 459: n = A,T,C or G
ccgggccccccctcggaagtcttctagaattaattaacgcgggtctataaagaagagaaaatttggaaagagaaatttaaacagcatgaggagtatattagaaacttgcatttacaaatggaagaagaaagaacaagatttaaagaccaacaagaaaaagaaaaaaattctttgttaaaacagcagaataatgcagctgttaaaattcaagctaaatataaagcatttgttgcctatcaaaaatatggcccaattattaaagagcaaattgaaagtaagaaaaggaaagcacaagagtggaaggaaaaggaagcaaaaatacgacaaaaggaggaagaaaatcgaaaaagattagaggaggaacaaaggataaaagaagagggaaaaaagcaaaaggaagaggaaaggaaaaggagagaaaaagaatatgaagaaaaaaagaatattgtgaaacagganagagagcaactaataagcaaggaaaaaataatattaagagaagatgca

SEQ ID NO: 58147 - DNA, 495 bp, Homo sapiens
acttctagaattaattaacgcgggccttgagataagataccatgactggtttaacatgagttacataactattcctttgaacagagaagcagcagctgtgactatcagacactgataataccacctgaatagttcacaaaaaagggagaagcttttctgaacagataaaataaaataaataaataaaagtttactctagctcattcctttattctgtacacacacatacaccccctacacgcacacccctgcagtgataacttcaacgcctgcaaaacgctgggcttccctttcaagatcactctttttgtgtcacttacgtccttttcaaccagaaatcagcaccaaatttctatagccaatgggtcagtctgattcaatatatggcctacattgtagataatgaagacgaaaagggtggtctattttaatagcagccctgctattacctacttatgggcaatgagaaacctatctcaaaaaaaaaaaaaaaaa

SEQ ID NO: 58148 - DNA, 241 bp, Homo sapiens
cgggcccccccctcgaaatacttctagaattaattaacgcggggtggggtggggtgtgtgtgtgtccgcgtaactcaaagttcgcgatttctttgggggcgatgaaaatgtcctgtaattgtgacgatggtctcacaactcaatgtattaaaaaccacagaattgtagactatcaaaaaaaaaaaaaaaaaaaaaaaaaaaaaaaaaaaaaaaaaaaaaaaaaaaaaaaaaaaaaaaaaaa

SEQ ID NO: 58149 - DNA, 575 bp, Homo sapiens
  misc_feature 38: n = A,T,C or G
ccccctcgaaagtcttctagaattaattaacgcggggngagaaaacttgtatagtttagaatgaaagttttttttttcttgacataaaaccctgaaacaataaaaaaacaagattcataagttagattgtataaaaaataaaagattttgcatacttaaaactaccgcaagccactttgggaggctgaggctggcggatcacgaggtcaggagatcggagaccagcctggccatcatggtgaaaccccgtctctactaaaaacaaaaaattagccgggcgtggcggcatgtacctgtaatcccagctactcaggagactgaggcaggagaatctcttgaacctgtgaagcagaggttgcagtgagccaagatcacaccactgcactccagcctggcgacagagcgagacttcgtctcaaaaaaaaaaaaaccccacaaagtcaaaagacaagtttgaaaaatgtttacagctccacaaagatagacaaatttccttgatgtatgaaaaatgtcaacaaaccaataaaaagactaacaattcagtagaaaaatggacaaagaacaaatatggagat

SEQ ID NO: 58150 - DNA, 594 bp, Homo sapiens
cccccctcggaagtcttctagaattaattaacgcgggagtggggagcagggagcaggatctgagcacagatccatgatttactggctatgtgacctcaaaccactcgtcttaaatgacatttatttacagagacaacagaacgtagtgattagagcatgagctttgaagtcggactgcctggtttatagactgatcctgctacttaagtaacttgcagaaacttacttatcctctctattacttatgtgatgtataaatgtaaatatacacagacatacatacatatatacatacatacacataagcatatataaatgtatgtttgagtatatttgagcttatataagtcaaataaatgtagtgtctaagagaattgaagttgtttcctcttttaaatttggaaagctggtgcaatgataattttgaaagttttagcatatacacatagtatttatgggcttgtccttgttgctgtttatagtggaaagtaatgtaagtggaggtcttaagtaactattgcctaacctggatttaagtttttttttaaatactctatcttgactctgtaagtttacataaatttagtctcttta

SEQ ID NO: 58151 - DNA, 629 bp, Homo sapiens
  misc_feature 605: n = A,T,C or G
ccgggccccccctcgaaatacttctagaattaattaacgcgggtcattctttggtaagttctaacgtatcaaaggtaaaggaaaaatattgttgagatttgttccatagaaataaatttactcacttaaaagccttttttctgggtttatgtccttcctactttgtaatatttttaacaaaatcattttctgtatgcaatactaatatttgaaaatataagtttgaaaacaaaaaaaaattttggcaaaataaagcttaccatcattaaaaataaaaagttggccccccatatgtgtggatttctgtccttcaatacagtattttattttattttcttaagagatagagtcttgctctttcaccaggctggagtgcagtggcgtgatcatacctcactaaagcctcagactcctgggctcaagcaatcctcctttctcaccttcctaagtacctgggattacagtgaatactgtattttctatccaactttgcttgctgatgtgaaatctacagatagaaagggctgactatatgtatttttttaaaaactgtggaccgggcgcggtggctcacttctgtaatcccagcattttgggaggccgangcgggcggatcacctgaggttgac

SEQ ID NO: 58152 - DNA, 599 bp, Homo sapiens
  misc_feature 584: n = A,T,C or G
gccccccctcggaagtcttctagaattaattaacgcgggtccttacgtattgcttttttatagtaggccttttgtaaatgtttaattcaaggtgaataaatcacagtggtaaaaaaggtgaagagttaacctcagtgttactttccaaagaaattgctataaggcagtgtatctaggcagggattatgcttaattgagatgcacacagtttaacatctggtgtcaaacctggtttccttctttgtgaccaccctatagatgtttgcttttgggaccactgagtaaaccaggccctgagaatccaagcatgaatccacttctgccctacttttaaggatttacgttccatgcaggaaagcagataaccataatttctgaataaataagacaacaaaatgaaatggatgctggtcaactctgatgcaaattttaagaaggagactatgcctctgtgtctcccagcttcacagaaaaaaaaaaaagaaaaaagaaagatgctcagagtggggtacctacacttggaaaaaacgcaagtataagtctgccattcccatgaatccaagatgaatcctggcacagagtangtcctcaaattttgc

SEQ ID NO: 58153 - DNA, 549 bp, Homo sapiens
cgggccccccctcgaaagtcttctagaattaattaacgcggggaccatcaaaaagagacagcagtctgaataaacacagagattagagagcaccttaaaatttttggctggatggattggtgagatccttctcctacatgaggccagtctgacaagtctgggagaggttatattcttatgtaatgcatagaagctaacacaaaaatcaaagaacagagaatctattcccaaaaaaaaaaaaaaagacaaatctccacaagtgaaatagagatatgtgatttacctgacagagaatctaagataatggttataaagatgttcactgaagtcaaaagaacaatgaaataacaaactaagaactttgacaaagagatagaaagtataaaatagtaccaaatagacatcaaagatgtgaaaaatactgtaactgaactaaaaaaattcaatggaggtattcaacagcagattcaatgaagcagaagaaaggatcgatgaaatcaaagacaggtcactgaaaaaaaatcaatctgagcaaaaaaaaaaaaaaaa

SEQ ID NO: 58154 - DNA, 494 bp, Homo sapiens
cccccctcgagaggacttctagaattaattaacgcggggggctgtattacatccagagaggaagggctacctgtatacttttagtggtaacctcttttctagttcgtgcagatcagtggttctcaaatggggatgattttgccccccaggggaaatttggccatatctggagacattttcttcattttgagaaggacagtggctgttactggtgtctagagtagaaaccagggatgctgctcaacatcctttaatacacagactagcactctacaacaaagaattatctgactcaaaatgtcagtggtgccaaagacgagaaactttgctttagaagtatttttgaaactgaggattgtaaacttatttgtgtgtagtagaatcattttacctgttaccactgaaatttttgaaattcagtggtaatatcaggaactatcagactgcatcacataaatattgttttataaacttttgtttcgtgtgtgtgtaca

SEQ ID NO: 58155 - DNA, 505 bp, Homo sapiens
  misc_feature 22: n = A,T,C or G
cccccctcgaaagtcttctagnattaattaacgcggggatgaatccacaacaccttccattaagtagttttacaaaattctaggtttgaggctcagcaaaaatggaaactgggagaaaatccaaatatttgaaaccaaataaaacacttgcaagtaaccctcagaattcaaggaagaaaacaaaaggaaaattaggaagtattttgaaatgaatgaaaatgaaacatgttaaaattatggaatgtagttaaatcagtgcttagaaagaaaattataacatagagtgcctatgttagaaaagaagaaagataccagaaataaactctcagcttctaccttaaggaaatagaaaagaaaattttaaaaagcagaaaaatatcagaggacaaatcagtgaaagagaaaacagaatgatagagaaattcaataacaccaaaaactggctctttgagtagatcaaaaaaattgataaacccctagttaaactcatcaaaaaaaaaaaaaa

SEQ ID NO: 58156 - DNA, 581 bp, Homo sapiens
gggtaccgggcccccccctcggaatacttctaaaattaattaacgcgggacagaatgggaagaaaaaatattttaagaaatggccaaaaatttctcaaacataacgttatatacgtaagaaactcaacaaaagcaagcaagaaaatgacaaagaaaactataactaagtacttcatagacaaggataaaaggaaagtcttaaaatttccatggaaaaatgatactttacatacagagaaacaataattcgaatgactactgaccaattgttagggaaaaaatataggccagaagagggaaacaccttctttaaagtactgaaagaaaggctggacacagtggctcacgcctataatcccagcagtttgggagggcgaggcaggtggatcatctgaggttgggagttcaagaccagcttgaccaacatggagaaactccgtctctactaaaatacaaaattagccaggcgtggtgactcatgcctgtaatcccagctactcaggaggctgaggcaggagaattgcttgaacccaggaggcacaggttgcggtgagccaagactgtgctattgcactccagcc

SEQ ID NO: 58157 - DNA, 248 bp, Homo sapiens
gccccccctcgggggtacttctagaattaattaacgcggggcaattgagtcgtgtaagaccttaaaaaacaaagacaccacctaaaaaaaatagaaataagaacgattaaaaaacaaatagagaaagaaaagcaagcattcatgggtaccactggaacatagaccgaattgcaagggaagaatgagctttatgcccggatcagattttgctgttggtggggtctcaataaaagctctattccactgat

SEQ ID NO: 58158 - DNA, 415 bp, Homo sapiens
ccccccttcgaaagtcttctagaattaattaacgcggggtggggagaaagaagcttgttagacatcctctcgggctgccgtcgcaggctaagcgcccactagggcagagctgtctgctaacgtgagcggggaaggccagagtccagccgatcagccagaccaaatatagacacactggaacttgaaaaaaaaaaaaaaaaaaaaaaaaaaaaaaaaaaaaaaaaaaaaaaaaaaaaaaaaaaaaaaaaaaaaaaagggacgaaaaccgggggggaacaaaaaattcgccttaaagggagtcttattaaccccccctaaatggccgtattttaaaaaaaaaagggaagggggaaaaccctggggtgacccaaataaatcctcttggaaaaaatccttttttccccaccgggggtaa

SEQ ID NO: 58159 - DNA, 603 bp, Homo sapiens
  misc_feature 15: n = A,T,C or G
taattaacgcggggnaactaacgaatggctaaagttagaagtttagaatggaaataaggtctgactcttgaaatccttccagcatctttttctttagcaactctgttccacaggcagtgggagaaaaaaaaaaaaattaagggtaagaataaaagactgaaggagacagctagctaagaacagttcagaaaattagacaaatattttggccacattaaactttagttttcccaaactttctgaaatgtaaatatcttttctttttttatattttgaagactcttctccaaaattttgataaatggctttttataataacttaaccaatctttagagaattccatattttcagactttcacaaaatcaggttttggaatctgtagaggctacagaccctatatatggtttgattcggttttatattacaacacagcttatgctactgtctaaaatgttgaataaatcaaagtatttatgtactaaagatatttaacctacacttatatttttcttgcagatttatgaaggtacttcacaaattcaaagacttattgtagcccgtgaacacattgacaagtacaaaaaaaaaaaaagcggccgcc

SEQ ID NO: 58160 - DNA, 480 bp, Homo sapiens
cccccctcggaagtcttctagaattaattaacgcgggtcatataattataattcattattttaagtaaattattaaatattttaaatccctcagttttaatttttaatatagtaaatacataacctatataaacaaaagcttcttagtattctctttaatttttaagagtgaaagcagtcctggccgggtgcagtggctcacacctgtaatcccagcactttgggaggccaaggcaggcggatcacaaggtcaggagttcaagaccagcctggccaatatggtgaaactccatctctactaaaaatacaaaaattatccgggcattgtggcaggcgcctgtagtcccagctactcgggagactgaggcaggagaatcgcttgaacccaggaggcggaggttgcagttgcagtaagccaagatcatgccactgcactccagcctaggcgacagagcacgactctgtccaaaaaaaaaaaaa

SEQ ID NO: 58161 - DNA, 408 bp, Homo sapiens
ctgggtaccgccccccccccggtacatacttctagaattaattaacgcggggggtctgagctggcattcggtgctagtcctcgccgctgctgctcacctttctgctgggccattccctatggaccaaaaaaagtaagtgagggcttttctcctgccaggcagcctgcccccaccaccttcccgctcacatacttcctcctgaatggcgggaggcaggccacccaaaaactcagggctcacttaagtcacaccaggattccccaccactgcaggccctgatctttttggggagggggcagcccggttgggggaacaaatgcctacctggttctgtaaaactccccaacggatgtcatcaggcagggcacccaaaaaagaggggcccacaccttaagggaaactgatccc

SEQ ID NO: 58162 - DNA, 485 bp, Homo sapiens
  misc_feature 28: n = A,T,C or G
cgggcccccccctcggggtacttctagnaattaattaacgcggggaccaggtggaggtaattgagtcatgggtgcagtttccttcatgctattctcctgatagtgagtgagttctcacaagatctgatggctttataaggggctcttacccctttgctcagcatttcccattcttgctgccttgtaaagaagatgcctttcttctcctttgccttctgccatgattataagttttcagaggcctttccagacatgctgaactgtgagtcaactaaaacttttttctttataaattacccagtctcaggcagttctttacagtagtgtgaaaatgaactaataccgggaggctattagctgttcactaataaattgtctcctttcttggggatcttcatcagtttctgccttctaaagtttattaattatataattaaggtctccctcagctttctccctgatattagtctcatataaaacagtca

SEQ ID NO: 58163 - DNA, 393 bp, Homo sapiens
tgcttgaaaaatttgtacaaaaattagatattggagatgaaaaataagatcgggcaactgtgattttaacaccttggcttaaattatctaagtactaatgagcggtctacccacttacccttacttttggacaggaaaaacatggatggatggatggattgaatgaaatggatttttgcttttgtggcccagcctgtagtgcaataatgtgatctgggttcactgaaacatttgcctcccaggtacaaccatttctcctgccttaccctcctgagtagctgaaattacaggcccctgccaccatgctaagctaatttttgttttttaagtagagatggggtttcactgtgtgggccaggctggtctcaaactcctgactttgagatctgccca

SEQ ID NO: 58164 - DNA, 634 bp, Homo sapiens
  misc_feature 37: n = A,T,C or G
ctgggtaccgggcccctccctcggaaatacttctagnattaattaacgcgggatgacagattaaaatccaagtagatcaagaatcatattaagtataaatggtcattaaataacccaactgaaaagcataaatggtcagattagatttaaaaaaattcaactatatactgcccaccagacactcacattaaatagagacagaaattatttaaagaataaacaatatatattatgctaactaataaaaagaaggctgaagtgactatatcactatgagacaaagaagatttcagagcaaagaattatctccaggaataaagagggtcattttataatgataaaagggtcagttcatcaagaagacagtgatcctaaatatttatgcagacagagttcatgatagagcttcaaaatccattccacaaaactttaaagaactgcaacaagaaacaggcaaatctgcaactataatcaagatttcaatatccatctatcaataattgctagaacaagtaaacataaaatcagtaagaatataaaagaactggacatttatagaacgttccaccaaacaacagaatatatactctgtatatttgggtatatttaccaagatggactctatctgtaccat

SEQ ID NO: 58165 - DNA, 536 bp, Homo sapiens
ccgggccccccctcggaagtcttctagaattaattaacgcgggtactcaagagaaaaattcactcacccattggccaattgtcatatacatgctttgcaatgtcagaagcagaatcgttaggagaaaacaggaactcttttgtttttccgcttaccaaaatgaggcgcaaatttatctgaaagaagacaatgattcttttaacataaatctaaaaattttttaagtaaaagagaagactcaaaggcttttcatttcaatcacatcctaaattattaccactgccatattgtggtttttatttaaattctataaaacttttttaaaaagaatgggaatttgatatttgattttatttcctattatttaaagggtgtgtgtgtgtgtgtcagacatatttgccataataaatgaacaaaggaaaaccaaaattcattacacttttaaatttaatcactccaacaatgtccagaattgaacttttgcaagttatcactattattatagaatatacatttttacccaaaaaaaaaaaaaa

SEQ ID NO: 58166 - DNA, 470 bp, Homo sapiens
  misc_feature 384: n = A,T,C or G
ccgggccccccctcggggtacttctagaattaattaacgcgggctttaaagatggaggaaggggccacgagctaagaaattaagctctagaagctggaaaagacaaaaagaattctcccccagagtctccagagagagtgtggtcttgccaacaccttgcctttagcctagtggaaatgacatgaggtttttggactccagaattatgagagaaaaatacaggttattatttaactttgactcgtcactatattttttctatttttctatttctgggccccacctagactgcccttttttattcaccccactaaaatacaaattccataaggacaatggccctatgttattacctgctctatcttagtggctagaacagcaccntgcacatagcaggtgctcaataagaggttgttgaatgaatagattagagccaccttctcatcaaccccctgacttcagagactgag

SEQ ID NO: 58167 - DNA, 575 bp, Homo sapiens
  misc_feature 499, 538: n = A,T,C or G
cgggccccccctcggaagtcttctagaattaattaacgcgggggcacttgggcgagagctggaacgtggaccagagctcggatcccatcgcagctaccgcgatgagaggcgctcgcggcgcctgggattttctctgcgttctgctcctactgcttcgcgtccagacaggctcttctcaaccatctgtgagtccaggggaaccgtctccaccatccatccatccaggaaaatcagacttaatagtccgcgtgggcgacgagattaggctgttatgcactgatccgggctttgtcaaatggacttttgagatcctggatgaaacgaatgagaataagcagaatgaatggatcacggaaaaggcagaagccaccaacaccggcaaatacacgtgcaccaacaaacacggcttaagcaattccatttatgtgtttgttagaggtaaatgcttggctttctgcagtgctgtgctttcaagaatttaatatcctgctcttaattntggatgacatatggatgactgagccatagataaaatatntctggctgggtctagaaggcctaaacacatgtttctt

SEQ ID NO: 58168 - DNA, 453 bp, Homo sapiens
cgggccccccctcggaagtcttctagaattaattaacgcgggactcctgaccttgtgatctgcccacctcggcctcccaaagtgcagggattacaggtgtgagtcaccgtgcccggcctggaaatatttatcttttaaagacatttaaaaagtaagaaaaatagtattctatttttattcctgtatttaccaatgccagtgctcttcattcctttgtgtggttcagatttccatctagtagtattttccttctgtctgaatgacttcttcctttacatttcatatagtgtgggtcttttggtattctttcagcttttgtatgtctaaaaatgtatatttcactttcatttttgggaggcattttaatttttgctaaatgtagaattctaggttggccgctgttttctttcagttttttaaagattttgtttcactgttttctttcttccagtg

SEQ ID NO: 58169 - DNA, 630 bp, Homo sapiens
ccccccctcggaagtcttctagaattaattaacgcgggtggatcatgaggtcaggagatcgagaccatcctggctagcacagtgaaaccccatctctactttagaaaaaaaaaaattggctgggtgtggtagcgggcgcccgtagttccagctactcagaggctgaggcaggagaatggcatgaacccaggaggcggagcctgcagtgcgccgagattgcaccactgcactccagcctgggcgacagagggagactccgtcccaaaaaaaaagaaaaaaagaaaaagaaagcagccataacctacacataaattaatcaatgtggctgtatttcaataaaactttacacatgaaaatttgaatttcatgtaatttttaacttgtcacaaaataatatcattcttttttgatcttctttattcaattattttaaattatggaaaacatttttaacttgtggatcacaaaaaaacaggctggccacatttggcctgcagactgcagtttgccaacccctgctctaaagctttaaaaccaaaactcaaatgcacaggctgattttgttgactgtttaattataacttcaagtggtaccaggcaagcttaacgaacaggaacctagtggttatc

SEQ ID NO: 58170 - DNA, 572 bp, Homo sapiens
  misc_feature 24: n = A,T,C or G
gccccccctcggggatcttctagnattaattaacgcgggaactaagaattgaacagattgaaatgttacaaaaaatgaatatacaataatcagtattttttttaataccagaatcaaacagaacatgaacaactttttaaaagatacattaacactgaacaacccagacatactaatcagttgcaatatgtaaagcttttttttgattctgtttgagaggaaagggaaaaaagtctaataaaatcatttatttttatttgatgacataattggaattttgaacgtgactgcatgtttgattttaaataactttcctttaaaaatataataatgctgttgtggctaattaagtgttcttattttttagaaatgcatactaaaaattttttttaaatgatggggtcctgggatttgcttcaacaaaacacatgaaacaaagcagtatattcaggtggattggctatggtttaatggtttgagggctgggcggtggatatgggggtttatcctactgtttttgaacatattggaaattctctgtgataaaaattcaaaaaaaaaaaaaaaagcgg

SEQ ID NO: 58171 - DNA, 380 bp, Homo sapiens
ccccccctcgaaagtcttctagaattaattaacgcggggtgggggttgggaaaagggaaactggtgggatatggaacatggctctgagcaggactgttgagctcacatagtgttctgactccaaatctgggagcaggagaatgtgtaaacaagaataaagtggaagcaggttggtgtaaaaaaaaaaaaaaaaaaaaaaaaaaaaaaaaaaaaaaaaaaaaaaaaaaaggaaaaaaaaaaaaaaaaaaaaaaaaaaaaaaaaaaaaaccaaaaaaaaaaaaaggcggcccccaccgggggggacctcaaattccccttatagggagtcgtttaaccccccctaactggccgtgttttaaaaacgtcgggattggaaaaac

SEQ ID NO: 58172 - DNA, 402 bp, Homo sapiens
ggtaccggggccccccctcgagggtacttctagaattaattaacgcgggaggccagcattgccctattatcaaatccagataaatgtagtacatcataaaaaaaatgatagaccaatgtgtctcataaaaatagatgtgactactcctcaactaaaatattaagaaaaccaagtacaacaatggataaaaagaaatatttccaatggccatttgggatttactccaggtatgtaaggcttgaatagcacttggaaatcaatcaacataacccactgtatcaccaggttaaggaagaagaaaaaaaatacctaataatgattaaaaaaaaaccaacttcttagcaaagtaggagtagtggaaactttgcttaacttgataaagaacaccaaaaaaaaaaaaaa

SEQ ID NO: 58173 - DNA, 626 bp, Homo sapiens
cgggccccccctcgggagtcttctagaattaattaatgctttagcttagtactaataaactaagtttattctgtagaaattttatgtaggattttttttggtttattgctcaatattttcatgtccatattgattttctcattgccttagtccatttgtgatgttttagtacatttgagatataccaacatatcagactggagagctcgtaaataacaaaaacgtatatctttgttctgaggacagggaaattcaagtacagggtgctggcagatttagtgtctgtctggtgaagagcaactttctagttaatagacagcattttctcattccatcctcacatggtggaaaaggcaagggatctctttaagcctcttttataagaacactaatcattgagaatagccccaccttcatgacctattcacctcccaaaaggcctgcctcataatatcatcatctcaagggttagaattttaacatatgaattttgggagacacaaacattcagaccatagcacataatattccatgagttatttaggagtacattcacaaatttctttgtttgtttgtttgtttgtttgttttatttttttattatactttaagttctagggtacatg

SEQ ID NO: 58174 - DNA, 436 bp, Homo sapiens
  misc_feature 34, 39, 40, 53: n = A,T,C or G
taccggcgccccccctacaaggataccttctagnaattnnaattaacgcgggngccactacacaaggtatgtatccatgggtaagttccttgatattttcatctgaaaaatggtaataataagagtagctaccttgtaggactggagtgaggttgaaattaaccaatataggtcaagtgctgaaaacagctgatcgcacatagtaagcctattaaaatgttagcttattaacatttattattaaaacgttagatcattttcctcctttgctcaaagcaaagtggctcccttctctttcatctttatatttatcctccatgttccaaaacatcatggtactatagctatgtgggtcattttgcactcattgagcttggaacttaagaaacttttttgaatatcttcctttagttctgggattaaaaaaaaaaaaaaa

SEQ ID NO: 58175 - DNA, 574 bp, Homo sapiens
  misc_feature 28: n = A,T,C or G
cgggcccccccctcgaggtacttctagnaattaattaacgcgggtccttacttctttctccaggcacattacaaaagctctatgaccctcagttttcctcatcgataaaatgggttgaatagtagcaaacccagtgttatgcaggaaggattaaaatagttcattcagagcttagtgcagggcaagtgacctgtacatgtgagttgctctccattctctatttactgaaagtctaaacaaaaggaacagaattttagaggtgaaatgactctctaaagtcacttactctaatactgcttgtcctgtcacaataatccctgatgtagaatcaactctctgagacaacacattgtctattaggcagtttgttcttctactgagctgggatttgccacctttttacttttatccattggatatacatacatacataaacacacacacacacacacacacacacacacacacacacacacagacacagacacacatatatatttttttcctggagaaatctaatatgttcaggttaccctttgatccatgcaggtttagaaatttaatgtctgtcggt

SEQ ID NO: 58176 - DNA, 420 bp, Homo sapiens
cgggccccccctcgagagtcttctaggattaattaacgcggggtgggacgacagtgaaatctagagtaaaaccaagctggcccaaggtgtcctgcaggctgtaatgcagtttaatcagagtgccattttttttttgttcaaatgattttaattattggaatgcacaatttttttaatatgcaaataaaaagtttaaaaacttaaaaaaaaaaaaaaaaaaaaaaaaaaaaaaaaaaaaaaaaaaaaaaaaaaaaaaaaaaaaaaaaaaaaaaaaaaaaaaaaaaaaaaaaaaaaaaaaaaaagggggggcccccccaaaggggaaaaataaaaaacccccaaaactgaggcgaaatacccccccccccccgcggggaaaacaaaaaaggtcccccttgtaaaaccccttccccccccccc

SEQ ID NO: 58177 - DNA, 613 bp, Homo sapiens
cccccctcggaagtcttctagaattaattaacgcgggggtcggtcctggttgggcagggtgacttgctatcgccgtcctcgagtgaggcgaggaggaggacagctcctttccagccagcccttgggttgggagcgaacccaccccctctcctcagcagggtggttctcgtcccctcacccgggcagtgaaggggtgtgtggcccgggcaaggatggctttagggtgccaggtaatctttcatcgctcctccgaacatttcactcctttgcgagagaggagtcgggggtcgggtgcccatcaaaattggggctgcggctgggggctagcatctctgaacctgcagctgcaaagggataattttggaattggtttacgttaaataaaacacaaaaggcctttcctatcccctagcttgttgagtgttcccttagagaaatgggaactgcggatctccttgcttgagacagcaatccatgctgtgactgtggaaggcttctcttggcgagaattgtgtgtgcaaagggaacggtggagggtgggaacgaatttgtaagcgaagagaaaacgattgtgagatcttgatggtcgctgcagagtaacttcagcgctgag

SEQ ID NO: 58178 - DNA, 363 bp, Homo sapiens
gggcccccccatcgaaatacttctagaattaattaacgcgggtccctaagtgctgggattacaggcgttagccaccgtgcccggccttttctctaactcttatagctatcttttgtccttctgcttttttattgtttcgacaagaatctgcaatacaattttaaaaaggggtattgatttctgatatccttactttattttgcccgacatccccaggaagatttctgaagtttatttagtaaaatgtttgatggaagtttttgatttataccttttatcaggtaaacttttatcagttcaagttgggtccattttaataaacatttatcaagtgatcactgctgacatcttaaatgggttttt

SEQ ID NO: 58179 - DNA, 440 bp, Homo sapiens
gccccccctcggagtacttctataattaattaacgcgggtacactatcttctctgcctttgtacattttataataaatattccataattttttagtggaaaaagagcaatcttaacaaacaaattttttttctatccaaagttgttgaatattccatcctccaagaaatctccaagctatatagggccagctctgatctgcagtttgggattgtggtatcctcccaggagtggctgcctccatttatgaaatttgaccctgaagtgtgactaggctgaggaatttattcacatctttattgatcctaaaccttttaagtttagggtgtgatggaaatcttaatgatggtatgaatttgggtctcacaggtagtctggacctttttgtgaaaatgattgacatagataaaaaaggaaataattaccaaaaaaaaaaaaaaa

SEQ ID NO: 58180 - DNA, 419 bp, Homo sapiens
ccccctcgaaagtcttctagaattaattaacgcggggtgggagggaaccgtggcgtccctgcgtggggcccatgggtgagacactccagtattgagacctagagtccagatgcttgtaggagccaagtcgtgttctaagtatttatttaaaacaaaagaatcacgttttcccatttgtaaaaaaaaaaaaaaaaaaaaaaaaaaaaaaaaaaaaaaaaaaaaaaaaaaaaaaaaaaaaaaaaaaaaaaaaaaaaaaaaaaaaaaaaaggggcccccccccgcggggggcccccaattccccctatagggaactgtttaacccccccccattgcccaccttttaaaaccgtggaaactggaaaaacccggggtttaccaaatttaaacgattggcaaaaaatccccttttcccaaagggg

SEQ ID NO: 58181 - DNA, 229 bp, Homo sapiens
cgggccccccctcgaaagtcttctagaattaattaacgcgggggggaacctggcgctaaaccattcgtagacgacctgcttctgggtcggggtttcgtacgtagcagagcagctccctcgctgcgatctattgaaagtcagccctcgacacaagggtttgaaaacaaaaaagaaaaaaaaaaaaaaaaaaaaaaaaaaaaaaaaaaaaaaaaataaaaaaaaaaaaaaa

SEQ ID NO: 58182 - DNA, 605 bp, Homo sapiens
aattaacgcgggggtgatggagctctggcgctcccaaagtacaaaaaaaaacacttaacaacatagaaataagaaaaatgatctaacctttactcctgtcatcaaaaagagcggcagggatacgctaagttccccgtttcatctctgcgcaaacaggaccgcgaaaagatcctgaccacttttttttagcccggcaagaactctgcggatttgcccgagaagtaagttatcttctatggagaggaattctagaccgaatcagagacgatcccttaagactctggtttaagaaaggttcggagataagcatactttgatagcgttcacctgttttccctgaggacctttcgccactgggagtcggggaacacctgtcagtcagagtcctctgctctgaaattcgtattgagataaagtcaaagaaaagttggaggccagtcatggtggttcgcatctgtggtcccagctactgtggaggctgaggcaggaggattgctcaagcataggagtttgaggctgcagtgagccatgattgtgccaatgcactccagcctgggcaacagagcaagacccagtctcaaaaaaccaacccaaaaaaaaaaaaa

SEQ ID NO: 58183 - DNA, 586 bp, Homo sapiens
cccccctcgaaaatacttctagaattaattaacgcgggtcatcaggttcttagtctctcattcttaaaaatgaaccaacaacaacagattgcagtctctgatgtgaaagatagagaccaaaactaacagagaaaaaaagaaacctggataaaacagaaactttacaggagggaggaaaattttaacaatacaacaacaacaacaacacaaaaaaatctccacgcctatatttgaaatcctcagataagatattgaaacctcaaaaaaaaaaaaaaaagcggccgctttttttttttttttatagagacagagaggtcttgctatgttgcccaggctggtctcaaactcctgagccactgcaggtggcctgtgattctagttttcataaatatgtcagctttataatcttggtgcacccttgtgagacgaagcacccaaaaacaattactgtgattactactgctattcccatcatttatcatcacgtacctttgggcaaggcactgtgcaccggcaatacacaatttaaacctcacaaaagtctgcatcagaatttctgcagaacaagcacctgcagcagaactgc

SEQ ID NO: 58184 - DNA, 548 bp, Homo sapiens
  misc_feature 496, 527, 528: n = A,T,C or G
ccgggccccccctcgaaagtcttctagaattaattaacgcgggagctcttgtaaagatattttcatgcatggatggttgttcaaattgatgtttctgtgaagggatgaacactacatcttttctacatcttgctgatgtcactcctttcaatacaggctatttaatatttgctgttagtgttattttcactattctccctcatgggaaaatgagacctttacaaaaaagctaataaagggcaaatctgaatgatgctctaaaactcatatccttctccatttgatagctttacaatattgagctcagcaggtctaggttatctcccaagtctttctcattgcaacagggaactcttctaccagaaaacttccattgttgcacaggtgcattggtgtggtaataaatgagccctcaaaaaaaaatccctgatttgtggtgcgccagttctgagatatccatcttctcgctgtggccaatatcaagctgacaatgtanagtcactgaaagcactgctgggaagagacannacatattggcttctctgatg

SEQ ID NO: 58185 - DNA, 381 bp, Homo sapiens
attaattaacgcgggctccacccatatactaccattatctgttttttctttacccatcatcccccttccaaaaaactttattttctaaaaatgtttccataggccaaaaaagctttctctaccctaatgacattctgatttcactcttcgaaaagcattctttgggctcacctccaaccactgggctgggagtcgggagtgcactgccttccccatctttgcgtgtagggactatctaaagcaggggtgtccattcgttgggcttccctggcccacactgaaaaaaaatttgtctgggcccacacataaaatacactaactttaacgatggctgatgagcaaaaaaaaaaaaaaaagcggccgccaccgggggggacctcc

SEQ ID NO: 58186 - DNA, 370 bp, Homo sapiens
cccccctcggggtacttctagaattaattaacgcgggcacatggaaaaaaattgagacctgaatatttatacaaagaatcaattaaacaaaaagtttgttcttggaaaggataaacaagatgattctaactagtgacctattgatccctagttagagtaacaaaaaatagaagagataagattcaaataaacatgatcagaaatgaaaaaggtgacattacaacgaatctcacagagacataaaagatcctcagagactattatgaatacctctattgaatcaggaagaaattgaaaccctggagagactaatattgagttctgaaattaaataagtaattaaaaaaactaccaaccaaaaaaaaaaaaa

SEQ ID NO: 58187 - DNA, 626 bp, Homo sapiens
  misc_feature 38, 551: n = A,T,C or G
ctgggttaccgggcccccccctcggaaatacttctagnattaattaacgcgggatacatgaagggatctgttacaggaatttgagcatatacaattgtgggagctgggtaagtagtctctgtaaggtgttgtctttgtgtctgatgctgaagcttgaaggacaggacagtcagacaggaaggggagaaggatgtgaaatgggggatggatggaaaaagtgagaaccagctggtgcccataatgagggactaaaacccatgtcacttcctgttgcctctgacctggctggtgtgggtgtcctgcagaaactggggccctttgtcacagggctaacaacatcacctggcccaggtgcaggtctagttgcaggtttatgacaataagatgagccagcagataagcgacaatatatgagggctatgaaatggaggttgcttcacttcctacccccaaaattgcccccaaatctcttttgtggcccaccctaaccagaaagggcattctgggaaatgttgtttagcctagccaagctgactcattacaaagcctgngcattggtatcttttaaaatctccccacgtgatcttcatgtgcaatggttgagaaccagtgacttaggtgattct

SEQ ID NO: 58188 - DNA, 608 bp, Homo sapiens
cgggccccccctcgaaagtcttctagaattaattaacgcgggatgcaactggatttttggaccctgttaatagcattaaggtagaggtttactctatcacctaacacctcaacactacctgtgggatgccttagttacccagcagcaggttaccaagggctgtctggaaagggagggacaaaaggacccagaagtagaagaatggggatggagtggtgagaattgaatggttaatgcactgccattcataattgccaattgaggacaacacaaatgggattggtactttatagtaataaatctgaccagcagagggagggatcaggcagcagtgtttagagcacaccacactggccactgtaaactgagaagctaagttaactggtattttatgattttgagtatagtctttttataagttgtatacactttacaatgtaaaagaaacaaactttgtataatagcaaatcgggaaggggactgcttaaaatgttaatgcagtgtttttctttttttctctgcataaatggcttgagcatactggcatttacacagaaatgatatatgctgcttttatcatataacaaatattttcccactattacagc

SEQ ID NO: 58189 - DNA, 503 bp, Homo sapiens
  misc_feature 23: n = A,T,C or G
ccccccctcggggtacttctagnaattaattaacgcgggagatacacaaaccacacatacaatatagagatgattaaaatctaattacattttttaaagtagcatattttgcaatctagttagctcaatgattacccagcctaaaagaaaaaatctggcaaatgttaacgtactagttatcctccaaagataaaccatggttgactaaagtacagcatgatttgtaaacataagaacacattattcagaaacctagagacccacagagaaaaatgccaacaggaaattttcagaacaaaatgttctcaaaaacgtatgctggagatatgcaatgcctgacagaagctaaaactcttctgtttggaaacattcaattgataagttatatatttttctatatttaaatttcttttatttctgggatttaactgtatttttctttttaattacataggatatttatataaacataggctctcggcttcttaaaaaaaaaaaaaaaa

SEQ ID NO: 58190 - DNA, 570 bp, Homo sapiens
  misc_feature 24: n = A,T,C or G
gccccccctcggaagtcttctagnaattaattaacgcgggttcctatttaaatacacatacatgatgatatacatttggaatgcaaatataaatattagtaaacttaatagtgatattttatatattatatatacacttcattattattcatagaaatcaaatacttttgatattttaattcctattggagtaggtttctataatattcatataattaggtttaaaaattgtgtttttctaattcgtaggatgcaaataaacattagtccttctgttactggactaatgtgttactgaatgaaattaattttttaaaagatttagagaggttataaaaaatattcaggccgggcgcggtggctcacgcctgtaatctcagcactttgggaggccgaggcgggcggatcacgaggtcaggagatcgagaccatcccggctaaaatggtgaaaccccgtctctactaaaactacaaaaaatagccgggcgtagtggcgggcgcctgtagtcctagctacttgggaggctgaggcaggagaatggcgtgaacccgggaggcggagcttgcagt

SEQ ID NO: 58191 - DNA, 612 bp, Homo sapiens
ccgggccccccctcggggtacttctagaattaattaacgcgggggaggagttcaaggaatttaaggaaatttatttcattatcttgcctaaatttactggctagtttgttgacgataaatttgctcagtttttgtttatcttggaatgtcttaatttcttcttcatttttgagaataatattgccagacatagaagtctctatttgcacatgacataatcttgtatatagaaaatactaaggaatttactataaaattatgggaagtaagaaacaagttcagcaggattgtagggtacaagtcttaacactgtgtagatggcaatattccctaaactgatctacatttgtgcgatttctatcaaaattcaagctggcttatttgcaaaaattgacaatattcttataaaatttatacagaaagtcaagggacacagaatagctaaaacaatcttgaaaagaaagaacaaaggtagatgactcacacatccctatttcaaaacctactacaaagctagaataattaagacagagggatactggcataaggccatacatatggatcaataaaataaaattaagaatccagaaatagacccttatatttatgatc

SEQ ID NO: 58192 - DNA, 614 bp, Homo sapiens
cgggcccccccctcggaatacttctagaattaattaacgcgggattacaattaaaaacaatgatggtttagcagcagatttagataccttacattctctctttaagagagagaatgtaaggcctggtgcggtggctcacacctgtagtccagcactttggcaggccgaggagggtagatcacctgaggtcaggagttcgagaccagcctggccaacatggtgaaaccccgtctctactcagaatacaaaaattagccgggcgtggtggcgcatgcctgtaatcccagcaacttgggaggctgaggtaggagaactgcttgaacccgggaggcagaggttgcagtgagccgagatggtgccattgcactccagcccaagcaacaagagcaaaactcctatctcaaaaaaaaaaaaaaaaaagaatgtaaactacaagatggttcaaaagaaattacacggaattcagcatgggagaaacaaaaaacaagagtgggaaaagacatcaaacatgtttttactaatcgaagttctaaaaggagagacgagaatacagcacagataatatatgaagagaatggctggaaatctttcagaactgttgaaggatatctatc

SEQ ID NO: 58193 - DNA, 427 bp, Homo sapiens
ccgggccccccctcgaaagtcttctagaattaattaacgcgggtggtggatgcctgtaatcccagctactcaggaggctgaggcaggagaattgcttgaacctgggagggggaggttgcactgagctgagaacatgccattgcactgcagcctgggcaacagtacaagactcctcataaaaaaaaaaactataaaaaaaaaaaaaaaatacataaactaactaaaagaataccttaaccttgataaaagatgtcccacactttacaaataaaaccaatggcgctccctacatagagtgatgtctcatgtccccataaaaaaaaaaaaaaaagcggcccccaccgggggggatttaaaatttgccctatagggaaaccctttacgcaccctaactgaccggctttttacaacttcccgattgggaaaa

SEQ ID NO: 58194 - DNA, 457 bp, Homo sapiens
ccccccctcgtacagtacttcataaaattaattaacgcggggggggtggggggctttctcacaggaaacagacattttaaaaaataaaattttctaaaaaactatttttttaaaaagatgaaaaattttacccttgattttctatcattccaagggtaaaacctattaaataagattttttaggcttaaatttagtggggcaaattttaaaatgagtaaaattttgggaaggtaactttaaaaaattcttctccaaaacggacccaaaaaaccccacaataaaacaaatgtttggaaataaaaataataaatttatcaaccctaaatatcaaactttcacctaatacattttctaaaaaaaaagaccagagaaaccttgggagaggaaccttttaaagaaacagcaaagcaaattttccggaactgagggatgtgactttataaaaaaaaccccact

SEQ ID NO: 58195 - DNA, 602 bp, Homo sapiens
taccgggccccccctcggaagtcttctagaattaattaacgcggggggtaaatacattttaatgcctggaaatgggcacatctttccttctgctagttctgctaggtctctagtgtaagggtttgagttgatctaactaggagttgggctgacttggaggtttgttgtctctgtggttactctcagtgacctgccagcctcacattcctctagtgataccctgtgttcagggcaagggctgattgccaagtctattttccagtgactgctgcactctcagacttcagtctttcctgtgcaccatgtctcagagaaagtctctttcctgcatattacttgtcaatccatgcttgtcagccttgtagtagggaatgagggtcggaggttgttctcttattctgattaagcctcagtcttgggcaggcagtttatccccagaaaccaaggaaatggcattttcagtgatcctgccaatccttcaataatcccgccctttcctctaacacagtcctgaatctagcttgtaatcttgctcccgtcccaaataaagcttttgtcttctaggggagacacagggggaaagtcatacgccaactcccctt

SEQ ID NO: 58196 - DNA, 598 bp, Homo sapiens
cccccctcgaaaatacttctagaattaattaacgcgggggccttaagggtggaatttaagctcctattaacattcattcagtagaacttaggttactgatcagctcttcactgtgtaaagttgatactgattttggaagcagaatattgagtgacacagagccagaagttgtaaaactgcactgcaggtttcctgcccttttgctctgtaagcagtaactccaaatgtcacttcataacagttcttgtcaaccttaggcaggatgtatcaatgcatgtcagatgggggtagataactttggggcaggttatcacaacctaagagttggtggagaaaacatgggaatgaattctagagaccacaaaatgaaaacttgaaagtgttactctttctcagcttaacgtttttaaatccaaaaaacaatttttacatttcttgggattcgaagagttgaacttcaggttgccgtggttacagtgtacagtatatattatcagtctgtaccagtagaccagtaccctaactactgaaaagatatggcagttttccatttgtctaagttctgtatgtacaatttactatccaattaattacttaa

SEQ ID NO: 58197 - DNA, 262 bp, Homo sapiens
  misc_feature 16, 18, 29: n = A,T,C or G
cgggcccccccctcgngngtacttctagnattaattaacgccggggggaaaaaaaaaaaaaaaaaaaaaaaaaaaaaaaaaaaaaaaaaaaaaaaaaaaaaaaaaaaaaaaaaaaaaaaaaaaaacaaaaaaaaaaaaccaaaaaaaaaaaaaaaggggggccccccccgggggggacctcccattcccccttttagggatttttttccccccccctggtggccctcctttttccccttttggggggggaaaaccccccccc

SEQ ID NO: 58198 - DNA, 467 bp, Homo sapiens
ctgggttaccgggcccccccctcagagtacttctagaattaattaactcctaatgaactaatatagttttgtggtcaccagcttctagctagcacaggcacagttgtgggttggtaggagaatgagcagtaaagccatgagctaacacaccaagtaatctgttgtgttcacaaatgtccaaaagaataacaagagattaaagaaaggtaaatacagccacctggcaaaaatatttacccttttaaaaatgatggaagttatatatagaagaaatgtttttggtaaaaatatttgaaagtttgttttataatcataagtagcttgggctattttgactagaggggtgtgtgtgtatgtgtgtgtgtgtgtgtgtggttggcagggagagaaggagggaggcaggcagctggtaaggactgtggagtgtgtcagttgggagagggaaatgagatgattaagttagtaag

SEQ ID NO: 58199 - DNA, 608 bp, Homo sapiens
  misc_feature 25, 522, 553: n = A,T,C or G
ggccccccctcgaaatacttctagnaattaattaacgcgggttagtatataatatgaagtagacttaattttcagttccacagaaataagattaaagtgaatatagttagttttttgttctttgacaacgtataaccaagtgtttgatttttttcacagtattttaaagtatctgcttatatatgatctgtactgctaattctttttgttttggtttggttctggaaaaggtatgtactgctaatcttgaagatgtttttatttacataagtaacagtattgtttaaaaaattctatgtttcagaaaaccgaaaaaagtgaatttctaaattttttctacaaccattgtatgcatgttctcacagcaccacttttgaccaatacttcagaagacaaatgtgaaaagggtagggtctctttatttatctgctgtgatttctgtttttaaagaaggatgagataaatattaaactaacaggcaatttacttgagactttataagacagggagattacgactganaaacttagactgcaatataaaattatgattntcttgtttcttaaggttatggaaggtgaatgataaaatgtggcaagactattctt

SEQ ID NO: 58200 - DNA, 317 bp, Homo sapiens
  misc_feature 39: n = A,T,C or G
cccccctcggggtacttctagaattaattaacgcggggngaaaaaaaaaaaaaaaaaaaaaaaaaaaaaaaaaaaaaaaaaaaaaaaaaaaaaaaaaaaaaaaaaaaaaaaaaaaaaaaaaaaaaaaaaaaaaaaataaaaaaaaaattaaataaaaattttttaaaaaaaatttggggcccccccccgggggggttttcatttttcctttttttgggttttttttccccccttttttttccctttttttaaaaattttttttttggaaaacccttggtttcccccttttttttccttttgaaaaaatttccttttt

SEQ ID NO: 58201 - DNA, 583 bp, Homo sapiens
  misc_feature 26, 502: n = A,T,C or G
gggccccccctcggggatcttctagnattaattaacgcgggaggatacaaattctttacaaatacagatggaatatttactaagacaaggaatatacttgaccttacagaaatacatttcaaagaatcagaacaatacacatcatattctctggctacagtagaattaaattagaagaaaaaaattaagatgctttaagtagatgcatatgcttagaaattacacaacataattctaaataagctttagggcaaagaagaaattataacagcaattttttacattttgaattaaatgataatgaaaacaaaatatacacaaatgtatgaaatataattaaacaagggcttggagaaaaaataatagccttgaatatttatattagaaaagaaagattttttaaattcattatttatgcttctaccttaaggagctaaagaacaaattgaatttaatgtgagtagaagaaagaacataataaaaaccgaggagaaaccaattntttaaaaatgaattcaacaaaaacaaatttggttctttgtcaggattaataaaaccaataaatctctagttagactgatta

SEQ ID NO: 58202 - DNA, 586 bp, Homo sapiens
  misc_feature 9, 532: n = A,T,C or G
acttctagnattaattaagcgggaagctcaacttttctttttactagagatgttctctctgtgtgtgtgtgtgtgtgtgtgtgcgcgcgcgtgtgcgcgcgctctgagtttatcctacttttaaaaagctgagtggtgttttacacattttggaataggcagctagtgcttctttttctgcttttgaagtttcctgggaagtcccttaaaagcataccacaaaattaatctcttcctgtttgccagagggttgctctactctaaatttggctttacatctacaagcatgctctaggaagccaattaaaatggatgaacaagcaaaatgaaaacatacctatggaccaacccaaggttaccgtcaggtggtgaaggacttcagaatcacttacctgaagcattgtgtttctcagcagcaaagagtagcatccccagccctgaccctaattttattcctacttctcagttctgaggcatggacttacaaaaagacacgtacatgcaatggccatcatgatatccaaataagtangaaaaggaactgtgtttctgcccatgaagttttactgaattcaaaggcaaccta

SEQ ID NO: 58203 - DNA, 522 bp, Homo sapiens
  misc_feature 17, 28, 484: n = A,T,C or G
cgggcccccccctcggnagtcttctagnaattaattaacgcgggggagcttagaggaattaaactttggccctgcgcctcgtccagcctaggttccacccttttctgggaacgtgagtatcaaccaagaatgaatctcgctgtgttgtccaggctggagtgcagtggcaccatctcggctcactgcaacctctggctcccgggttcaagcgattctcctgcctcagccccctgagtagctgggattgcaggcacgcgccaccactcccagatggagttttgctcttgttgcccaggctggagtgcaatggcaagatctcagctcaccacaacctctgccttcttttttcttctgtttttaaaacttgtggtaaaatctagataacaaaaagtttgccattttaaccatttttaagtggacagttcagtggcattagttacattcccaatgttgtgtaaccaccactattatccatttccagaanggtttcatcaccccgaacagaaactctgtacccattaa

SEQ ID NO: 58204 - DNA, 407 bp, Homo sapiens
ccccctcgaaatacttctagaattaattaacgcgggggtggggcggaattcgtttagtgttttcccccataacttaattggggtataattgatgaataaaaattatatatatctaaggtaaaaaaaaaaaaaaaaaaaaaaaaaaaaaaaaaaaaaaaaaaaaaaaaaaaaaaaaaaaaaaaaaaaaaaaaaaaaaaaaaaaaaaaaaagccgccccccaccggggggaacccccaattcccccaaaaggaagtcgaataaccccccctaactgcccgtcttttaaaaacgtcggaactgaaaaaaccctgccgtaaccaaactaaatcgctttgaaaaaaatccccttttccccagctggcgaaaaaccaaaaagccccgaaccaatcccccttccaaaaatttgc

SEQ ID NO: 58205 - DNA, 567 bp, Homo sapiens
  misc_feature 536: n = A,T,C or G
ccgggccccccctcggggtacttctagaattaattaacgcgggggttacttaacttctctgtgcctcacttcccttatctgtaaagcagggatgataaaaatagggatgctgtgtattaaaatgacttaatttgtggaaaacagtgagattgatgccttgcacatggtacaaccatatgatcactagtcaatcttattaaatagaagaaaataattatatccagtcctaagtgctctgaacacagaaaaagaaagtgttggctattggaattcctctacaatagaatgattaaagctgtgtcatctctaccctttgggaaagtattacttacacgaaaaattttgtaaagaagctgaacattgtccaagtagcagaaaaaaatatagatgtattttcttgtgattaagatattttaaaaatacccccacactatataatggtgaacacatgggtattttttaaacctttccagatacaactgtagcttaaaattacacattttctttaacattatagaggaattactgttcatatntttttcttccaaatggtatctaaatacattg

SEQ ID NO: 58206 - DNA, 353 bp, Homo sapiens
ccgggccccccctcgaaagtcttctagaattaattaacgcggggccatcctgatcatcctcactggtacgcctcatgcatcaagtaggtgcttgctcccgacacacctcgctagtggcttatgacttgcgactggacctctggaccctcattctgggtaacctctacgacgcatcccaccaaaaatctgtcattgccactttaaccagaaccgatatgtgcgcgtcgaaataccacaaaccttactgatgtctctactctctgaagaagaagctgcggaatcccacacaccatgaatgtgagatcttgcacccatgtaacgacagaatgagattaccgagcagcccaacattg

SEQ ID NO: 58207 - DNA, 437 bp, Homo sapiens
  misc_feature 11, 152, 153, 154, 155, 156, 157, 158, 159, 160, 161, 162,163, 164, 165, 166, 167, 168, 169, 170, 171, 172, 173, 174,175, 176, 177, 178, 179, 180, 181, 182, 183, 184, 185, 186,187, 188, 189, 190, 191, 192, 193, 194, 195, 196, 197: n = A,T,C or G
  misc_feature 198, 199, 200, 201, 202, 203, 204, 205, 206, 207, 208, 209,210, 211, 212, 213, 214, 215, 216, 217, 218, 219, 220, 221,222, 223, 224, 225, 226, 227, 228, 229, 230, 231, 232, 233,234, 235, 236, 237, 238, 239, 240, 241, 242, 243, 244: n = A,T,C or G
  misc_feature 245, 246, 247, 248, 249, 250, 251, 252, 253, 254, 255, 256,257, 258, 259, 260, 261, 262, 263, 264, 265: n = A,T,C or G
cccccctcggngtacttctagaattaattaacgcgggagctattaaggtactagagttgataaatgtgtacagggtccttttgcaataaaactggttatgacttgaaaaaaaaaaaaaaaaaaaaaaaaaaaacaaaaaaaaaaaaaaaaannnnnnnnnnnnnnnnnnnnnnnnnnnnnnnnnnnnnnnnnnnnnnnnnnnnnnnnnnnnnnnnnnnnnnnnnnnnnnnnnnnnnnnnnnnnnnnnnnnnnnnnnnnnnnnnnncctcattttggggggcagcacatccccccttcctcggctggctttttaactaagaggccggggggaatcgcccttcctacccatttttcacccttactggccaatggcccttgttggcgtgggttttttgttaaaatgcgcccccattttttgttctttcacctcatttttt

SEQ ID NO: 58208 - DNA, 382 bp, Homo sapiens
ggccccccctcggaagtcttctagaattaattaacgcggggagctcttacactcactttttggccacttaacatgaagtactttgtaatattctggctgtgcttgctttgtctccccagctagattgacagcttcctgaaggttatgatgataaacctagcccctagcactgtatcaacatgtagcattagagtcaccacctggagatctaagaccttggctctatctggtgctggttctgccacacagaaaccatgtaccttgggcatgatcatctgtttcctcatctcttaaatggtgatattcctaactttcctatcacttgggcttttgcaaggatcaaatagggcagtatatagaaatggactttgtgaattgaaaa

SEQ ID NO: 58209 - DNA, 168 bp, Homo sapiens
  misc_feature 24, 37: n = A,T,C or G
ctgggttaccgggcccccccctcnaaatacttctagnattaattaacgcgggggggagtgtaaaccggaacttttcatctatttgaaggcgattaaactgcgtctaatgcaaaaaaaaaaaaaaaaaaaaaaaaaaaaaaaaaaaaaaagaaagaaaaaaaaaaaaaa

SEQ ID NO: 58210 - DNA, 623 bp, Homo sapiens
  misc_feature 6, 25, 38: n = A,T,C or G
actggngtaccgggcccccccctcnaaatacttctagnattaattaacgcgggatagaacataagatgtaattaatattacaagccaaaagccagatgaatgacataaaaataattaagtgaaaattttatattgtacattttcagaggcagaattccctctaggctgacaaagcttaagcttcaggaccccttacttgtatgggtcctatatgtgccaggagctatagagtgttctagataggaccccacgtttcaatcaggaagcacttcttcagaagcatttcagattattatctacagagttctcagaagaagaaatttgaatcttgttcatcactctagtgtttacagctcttttctcattctatgtaaatattcacttttatactcaattttttactcttaaagagacacccttccctgtaattaagctccaggccctacaaaatgcagatccatccttatgtactagcaaagtctgtcacatatactctgtcaaaagcaaaagggtcagctactacagtgaaatgagaattcacacatacagagtgctgacttggtgccaggcactgctctttcatacgtcatctcatttcagccttgcaacacttcctgtaggta

SEQ ID NO: 58211 - DNA, 618 bp, Homo sapiens
ccgggccccccctcggaagtcttctagaattaattaacgcggggatgcttgagttctgttaatggttcttctcatatccaatatatactccctatatatatactatatgtactgtaatatatactattacagttttttcaagtaggctacataaatggcttaattgctgagatgctttttaagtgaaaaagtctttcagttactttctaatcttaaacacagttttgctaaatgtaatatcctctggtcataggcaatcagattacagaaaatattaatatactcacgaatatactcattagttcaaaacaaaggaaacaagtcactaaaacaaagtctcctgctatgaaaggaacttacagggagaagtacaacattcaagacatctctgtattctaaaggatgtttcttaatcaagtctaaacattattataactacaaaatgtgatgaattgaaatcaggaaaggtttatttgattaaaaaacataaatataatattcaaaattaaatttaaggtaatgaatatctagattattttctgtagaaaaaactcagaaaataaaaatgaatatgaagtataaaatagaaatggagtaaagaaccaagaaattcaacct

SEQ ID NO: 58212 - DNA, 575 bp, Homo sapiens
cgggcccccccctcgaaagtcttctagaattaattaacgcgggggtttttgtttaatagaacaaataatcagtgtttcacttatattactaaatgtgaaaaacataatgtgaaaagtatacatacattaacttggttgtaaaactcattttaagtgttcatgtaatgtggtaagtttaaaaagtgaagtgagctgttttactacaatgaattcgtttgactcaaagattaaaatgcccctccccctatgtgtatctcttatggcctgtaataattgaaagcaatgtttttgcagtttatataatgcaatttttaatctgtgttcaaaaatggagttcatatgggcttaacacatgaaatgggtggcacagatccacttgcagaacccaaagatacacaatcagttttgaaatgcaacttaagccattaattgttggtgtgaatttaaaattttctagtgtttgtatggtggtatgctgcctaagagcaaagcatcctctgcacaaaagaaaattactgtagtggcttcgattttaattagaattttctccctggtgtttctttatagactaaagc

SEQ ID NO: 58213 - DNA, 492 bp, Homo sapiens
cgggccccccctcggggtacttctagaattaattaacgcgggatgtcttaggcttcttagtgcctcaaactaaatcctgttcagacatgatgcaataagatagtatgagtttatgttggtgcaaaaaaaaattgaaatcaatgcatagttttttcctaatatgcattttcccatgaactttttgaagacccctcatataccacctactgtgtactaaatgttgagtataagaagtgaacaaaacagatataattcctctctccatggcactttcagtttagttagttgtcctatctgatgaagaaaaacattgaacagccaaataaaaaattatcaaattgtattaattatggcatctatttagaaattaacttttaatttttctagaatcagctcaagcattacttcacctgataaaccatttctaacctccagggtagaagggaccactcttgaccttgataccctaccctatacagtcttctctcatag

SEQ ID NO: 58214 - DNA, 610 bp, Homo sapiens
  misc_feature 581: n = A,T,C or G
ccgggccccccctcggaagtcttctagaattaattaacgcgggtagggcatacataagcctcaataaatttaaaaagattggaataatataaattatgttctctctaaaatgaaattaaatataaaattaataatgaaaggaagtttgcaaaattcaaaaacatgaaaaatatgtggaaatcaatcagatgattctaaataatcagtggctcaaatcagaaaccacaaaggagattagaaaatactttgagattaatcaaaaccaaaccacattataccaaaatttaggaaatgcagcaaaacagtgcttaaagaaaagttttctacctataaaaaccgacattaaaaataataaaaatgtcaagtcaataacctagccactcaccttaagaaacaaacaaacaaaatcacaacaaaagaaactaaactcaaggagaatgaagaaaataataaatattagaacataaataaatacatataataaaacagaataaatcaataaaaagtagtttgtttgacaagatcaataaaattgacaaaccttggctagattgacagagattaaaaaaaaggagacatanattactaaaaaaaaaaaaaaaagcggccg

SEQ ID NO: 58215 - DNA, 484 bp, Homo sapiens
  misc_feature 27: n = A,T,C or G
cgggccccccctcggaagtcttctagnaattaattaacgcgggggactaggggctatttgaaagagatacgtttaaaacataaggatattaaaagattgaaagtaaaagaataggaaaagatactatgcaaacactaaccaaaagaaacttggtgtagctattttagtatcaaagtagattttaagggcaaaattattaataaagatatgctgataaatgagaaaaagttcattttggatataataatttaaaatttggaagtaatgacttcaaaatatatagaagaaaaattaacacaattgtaagggaaacaaattcataatcatagtgagatgttttaacacacctgtcttacatgctgtatacatcaagtagacaaagaaatttgtaaaagtgtagaattgaacaacacaagaacggaacttttttttttttttgggagactttgcttctaaaaacaaaaaccaaacaaaaaaaaaaaaa

SEQ ID NO: 58216 - DNA, 613 bp, Homo sapiens
  misc_feature 18, 31, 602: n = A,T,C or G
taccgggcccccccctcnaggatcttctagnattaattaacgcggggtcccaggcggctgccgaagatggcggaggggcaggttctggtattggatggccgaggccatcttcttggccgcctggcggccattgtggccaagcaggtacttctgggccggaaggtggtggtcgtacgctgtgaaggcatcaacatttctggaaacttctacagaaacaagttaaagtatctggcctttctccggaagcggatgaataccaacccctcccgaggcccctaccacttccgagcccccagccgcattttctggcgcactgtgcgaggcatgctgccccacaagaccaagagaggccaggctgccctggagcgcctcaaggtgttggatgggatccctccaccctatgacaagaaaaagcggatggtggtccctgctgctctcaaggttgttcggctgaagcctaccagaaagtttgcttacctggggcgtctggcgcatgaggtcgggtggaagtaccaggcagtgacagccactctggaggagaaacggaaggaaaaggccaagatgcactatcggaagaagaagcagatcttgaggttacgganacaggcagaaa

SEQ ID NO: 58217 - DNA, 435 bp, Homo sapiens
  misc_feature 38: n = A,T,C or G
ctgggttaccgggcccccccctcggaggtacttctagnattaattaacgcgggtggtgaggaggaggaggaggagttggtcttgctgtctcgtgggtggcagaggcaaagaaaagccacgtataagtgactcacacacttcaaattcgtgttgttcaagggtcaactgtagttgtttttaagatgcttcacatctgcttctaagtctgctccatccccattccccagctaacacaacctttctaagtcagtcctgcatgcactctgcactcttcccaggttattttgtctctcaatgttacaaccaacaggctcaagcaaagcaggaggatggcttgagcccaggaagtggaggctgcagtgagccatgatgatcctgccaaagcactccagcccgggcaacagaacaagaacctatctcaaaaaaaaaaaaaaa

SEQ ID NO: 58218 - DNA, 452 bp, Homo sapiens
  misc_feature 374: n = A,T,C or G
cggggccccccctcggaagtcttctagaattaattaacgcgggatgctaaactgggaatgacacagagaagattagcatggcccctgcacaaggatgacatgcaaattcatgaagcattccatatttttaatccgaaaattcatatagaatcaaaaaagagcctaaactgccaaagcaatactaagcaaaaagaacaaagctacaggcatcatattacccgacttcaaattatactacaaggctatagtaaccaaaatagcaagatactagcataaaaatagatcaatggaacaaaaaacaaaacccagaaacaactgatctttgacaaagtaaacaaaaacatacactggggaaaggataccctattccatanatggtgctaagaaaattggatagtcatgtgcagaatgaaaactagacccctatttctcactgtatacaaaaataaact

SEQ ID NO: 58219 - DNA, 230 bp, Homo sapiens
  misc_feature 79, 80, 90, 91, 94, 95, 109: n = A,T,C or G
ttctagattaaaacgcgggatattattaattatattagattataatatgtattatatattaattatatgatatgtaatnnatatatagtnnatnnatttatttaaaggnaaaggaccacagggataaataatttatattactatggactataaaatatatgagggttatatgttacatatgaggcatagcacataacatgtaacatatatcatctataattttttttttt

SEQ ID NO: 58220 - DNA, 594 bp, Homo sapiens
  misc_feature 27: n = A,T,C or G
cgggcccccccctcggggtacttctanaattaattaacgcggggacatacatatttctagggcttttgatacagattgctggtttgctcaccagttggaccagtctacactcccatcaacagttgtagtaattcatatttctaatgcttctgaaattataaataaaagtttttaaaaatatgattctttcagttcacctgagctacttgaagacccagaaaaattgattcttacttgtctttgttatcaagaccctgtttcatacctaagtactggtgaaacatgctctagtttgtgagctatttgagtagaactaatggaaagatgaaataatagtacatcaatagttacaatgaagaaactaattatcccagagagtttttgagcatatgggtagtgtttgtgaatttaagtttgttccccacattgtcagtttattctaaaattatcaccattttagacttaaagaattttaaagccaaaagataagcaaacagacttgcttaggtcctgtagcaaattaattcagaccttgaacaacatttcattgtgctgtttaggaagtgttaagtatattgagatttccatattact

SEQ ID NO: 58221 - DNA, 231 bp, Homo sapiens
  misc_feature 16, 29: n = A,T,C or G
cggggccccccctcgngggtacttctagnaattaattaacgcgggtgaaaaaaaaaaaaaaaaaaaaaaaaaaaaaaaaaaaaaaaaaaaaaaaaaaaaaaaaaaaaaaaaaaaaaaaaaaaaaaaaaaaaaaaaaaaaaaaaaaaaaaaaaaaaagaaaaaaaaaaaagggcgcccccccccgggggggacccccattcccccttttagggttttttttacccccccctc

SEQ ID NO: 58222 - DNA, 588 bp, Homo sapiens
  misc_feature 44: n = A,T,C or G
ccgggccccccctcgaaagtcttctagaattaattaacgcgggnaatgttacaaataaaaatgcagtgcaagagaaatgaataatgttcgatgggctcagtggtggactgggtacagccaggagaaagtcattgagcttgaaggcatgtcaacataaactttccaaattgaaacgcaaagagaaaaaagaatgacaaataacagaacattgcagaaaaggcatttgtaaaaatctaagactcactcatgataaaaactctcagtaaactgggaatggagggaaacttcctcaacttgataaagaatatctacaaaaagcctagagttggtatcatacttcatggtgagaaactagaaatttttctgctaagatcaagaaaaagcactgatattcccatttaacactcttttaaacattatacattagtccaggctaatgcaatcagatttttaaaaggaagtaaaaggtatatatattgggatggaagaaataaaactatctttgttcacaggttacatgattacttatatagaaaaccccccaagattgaccaaaaaaattctgaaattaacaacagcttatagcaa

SEQ ID NO: 58223 - DNA, 345 bp, Homo sapiens
  misc_feature 52: n = A,T,C or G
ccgggccccccctcggggtacttctagaattaattaacgcggggaaccaagnactcactaatttgacttagattcctgataagacactggtttatatttcttgttatctgacataaatgtaaatttaagacagagtaaaatataatcatagaaaataaatttttttggtccctgagttttttattttgaagttttttacctactagatgagggttcttagcagaatttaattgaattccaccttgcaataaattcacaccctggagaagatgtttccaaaatgagagacatagaacactgacccctccttcccctaaaaaaggtgatctcaaaaaaaaaaaaaaa

SEQ ID NO: 58224 - DNA, 431 bp, Homo sapiens
  misc_feature 10, 23: n = A,T,C or G
cccccctcgngggtacttctagnattaattaacgcggggtacaaaataaaaataaaattcaaaaaaaaaaaaaaaaaaaaaaaaaaaaaaaaaaaaaaaaaaaaaaaaaaaaaaaaaaaaaaaaaaaaaaaaaaaaagaaaaagggagcggaccggggggggggctcggtgtccgccctggtttttgttggtttttctcccccctctttttcccttttttttttgtgcccccggccggggcttgccgcttttttttccccttttgcttgttttccccccccctccccctttccgtgtgggggtatcggcctgggccgggcccccccctggtgccctttcccaatttttggggtgggtgggggggggggttttggaaggggggggcttattttttggggtgcccccttctttccttttttttctttttggcc

SEQ ID NO: 58225 - DNA, 381 bp, Homo sapiens
taattaccgcgggctaggagttaacccctgaaggaaaatcaaatattttgggggaccaccctaggatatgaatttgacctgtttgttaaacagcaagattatccccctaaatctagaaggctggggggagtccctcttttcagttttccccaaattttttttaaacaactacttttttcttttctaggccctagggatatagcaggggccacaaaaaacacaacttttctgctcaatgaccctattttttaaataaataatctgggtgggggaatccctgaggggcttggaaaattttttaaaattgtgagagtaggaaaaaattttttggtctaggcaggcaaagggagagtgctccaaaaaaaaaaaaaaaaaccggcc

SEQ ID NO: 58226 - DNA, 527 bp, Homo sapiens
tgggtccgggccccccctgggatctttaattattaacgcgggacactgaaatgttggagaaggtggcagagaggtacctgaaccacccgtctaaggaaaacgatttcattaagagcagtgacttgagccctagctaatcactgccttctaaggcatttggaaggaagagtggagatggtggtaacttactctgaaatacattaagaaaccagatggactgagggatgggtaaggaatgaacagacaagcacaggaaaaggttaatatagtagaatccaggtggtgggtatgtgggtgttcactggacacttcttccagctttgctacatgattgaaaaattttctaatcaaatattgagaggcaatcggtataaactcctttacttcttcatgggaccagtttcttaggctttcctcaataagaacacaagctcaggaaagggaaaaatctacgtttttattgctcacataatcaaactgaacttcagagttaaaacgagaaggccaggccaaaaaaaaaaaaaaaa

SEQ ID NO: 58227 - DNA, 593 bp, Homo sapiens
  misc_feature 45: n = A,T,C or G
cgggcccccccctcgaaatacttctagaattaattaacgcggggnagagcaaagagggaagtgccacacacttttaaaccatcagctctcatgacaactcactcactatcatgagaacagcaaggggaaaatctgccctcatgatccaattacttcctaccaggtcccttccccaacactggaaattacaattcaacgtgcgatttggatggtgtgacacagagcaaaaccatatcaaccatactgtatgccaaaaaattagatgacctagatgaaatggacaaatactcagaaaaacacaaactatctaaagtgaccagtgaagaaacagaaaatctgagtagtcctgtaacaagtcctgtaacaaaactggattagtaattaagaaacttcccacaaagaaaagcccaggttcagtcttcactggtgaatactatcaaatatttaaggaagatttaatccttcacaaattatttcaaaacttggaagaggctggaaccctttccaactaattctgcaaagtcagcattaccctgatgccaaaaccaaagatatgacacaaaaataaaactgcaggctaatatcacatttga

SEQ ID NO: 58228 - DNA, 547 bp, Homo sapiens
  misc_feature 452, 534: n = A,T,C or G
cgggcccccccctcggaagtcttctagaattaattaacgcgggtagtgcaacaacttaagccgtgaataacaccatgggacccatatgatgtgccactactgctactgcaagtactcccgagaaacagaaaaaagtcgtaacgttacaagaaaaagttgaattgcttgatgtgtattgtagattaaggcctgcagctgtggctacccaccatttcagatggacgattcagcttgtaaacaaatgatgtaaacttacggtactgataaacacaatattaaaaatacttttccctttcttataattttaataacttttctccaggttcctttactgaagaataaagtatataacacatataacatacaaaataagtgttaaccaatttatgctatcagtaagatatctaggcaatggaaggctactagtagttaagttttagggaagtcaaaantacaagcagatttttgactgcatgaggtgttggcaccactaacccccacactgcacaagggtcaagtttccgattaaaatanaaatgaaagatga

SEQ ID NO: 58229 - DNA, 399 bp, Homo sapiens
  misc_feature 23: n = A,T,C or G
ccccccctcggggtacttctagnaattaattaacgcgggatcctcagtgaacattattcttgatctctctttcctttgtagaacaagctcatctttcttgtggctctccacaatagctcctacctccacctttctcagtgccaggcaaagcttgatcagcagacagacctctttgttagcaatctgcagctagataagtccatatttggtaatttttatagcaatttgaccatcattttacatctgttgaatctgattaggaactggacttgtattttgtcccatttttggcagttccttttcgctgaatttttatgaaagaattagtccatattgaattggaagtaaaaaaaaaaaaaaaaaaaaaaaaaaaaaaaaaaaaaaaaaaaaaaaaaaaaa

SEQ ID NO: 58230 - DNA, 515 bp, Homo sapiens
  misc_feature 499: n = A,T,C or G
cccccctcggaagtcttctagaattaattaacgcgggacctcaaaaaaaaaaaaaaattaagaaaagacactggaggcatcgggaggggggcgttctaggtggcagtgctcctggggaagccttttgtcccactgaagacatgaagctcctgggagagcaggtggtcggcaaggctcaggttttcatccaccttttgcagatctaggaggcaaagtcatacctgctggggagggaggaccaagactggggccttcatcttctctgccagccccatggagactcaagctttttccagcctatgtcagggaaggagaaccagagacagcaacctcgggtgtgaagggagtcagctctgaacccaggactatggccttctgccactgcctgctttcctcttgctgctggggcctaggtcttcttgctgctgcttccttttccgctaatcaagagtccagggaggtgggaacagcctcaacaaagactttgaagatgagcggngaggatcgcttgagcc

SEQ ID NO: 58231 - DNA, 602 bp, Homo sapiens
cgggcccccccctcggaagtcttctagaattaattaacgcgggaaaaaagaaaataggaaatttgggacttaacaattgcaagatacaatgatttctcatctcctataaataaagaaaaaaaatgggccagacgcagtggctcacacctataatcccaacactctgggaggctgaggcgggctgatcttttgagcccaggagttcaagaccagcccaaacaatatggcgaagacttgtcgctacaacaaatttttaaaaattacccaggcacagtggcgtgtgcctgtaatcccaggtactagggaagctgaggtgggaggatcacttgagcccgggctatcaaggctgcagtgagccaaatggcaccactgcactccagcatgggtgacagagtgagaccccgtctcaaaaaaaaaaaaaaaaaatttttttttttttttttaaggaaagatgattaagacctagcctcaggacacagacaaaactaagggcacgttaaagtctctaaaggaattaagacacccccacctcgccctaccctaaccctagtaaatccttttagttgagcaaaattgctacaggaaaagtgattagtgacatg

SEQ ID NO: 58232 - DNA, 392 bp, Homo sapiens
  misc_feature 28: n = A,T,C or G
ccgggccccccctcggaagtcttctagnattaattaacgcgggaagtatcaataatgctaggaaaaccttattgtgccctcacaataactaagtgctttccatttcatttacatgtacaactttaaaaattagacggtaggctgagaccggcggatcactaggtcaggagatcaagaccatcctggctaacacggtgaaaccccgtctctacgaaaaatacaaaaaattagccgggcgtggtggcaggcacctgtagtcctagctactcaggaggctgaggcaggagaatggcgtgaacccaggaggtggggcttgcagtgagccgagatcccgccactgcactccagcctgggcgacagagtgagactccgtctcaaaaaaaaaaaaaaaa

SEQ ID NO: 58233 - DNA, 362 bp, Homo sapiens
  misc_feature 8, 28, 41: n = A,T,C or G
agactggngtaccgggcccccccctcgngggtacttctagnattaattaacgcggggaagtcagtgaggaggaagaagaatttggacttgatgaagaagatgaagatgaggatgaggatgaagaggaggaagaaggtggaaaaggtgaaaagaggaaagagaaagccaagatccactaccggaagaagaaacagctcatgaggctacggaaacaggccgagaagaacgtggagaagaaaattgacaaatacacagaggtcctcaagacccacggactcctggtctgagcccaataaagactgttaattcctcaaaaaaaaaaaaaaaaaaaaaaaaaaaaaaaaattaaaaaaaaaaaaaaa

SEQ ID NO: 58234 - DNA, 252 bp, Homo sapiens
ttaattaacgcgggggacacaaggggaaaaaaaaaaaaaaaaaaaaaaaaaaaaaaaaaaaaaaggaaaaaaaaaaaaaaaaaaaaaaaaaaaaaaaaaaaaaaaaaaaaaaaaaaaaaaaaaaaataaaaaaaaaaaaaaaaaaaaaaaattttttatttaaaaaataaaaaaaatggggcccccccccgggggggccccccatttcccttttttggggtttttttttcccccctttttttcccttttttt

SEQ ID NO: 58235 - DNA, 463 bp, Homo sapiens
gctgggtaccgcccccccccctcgtacgtacttcataaattaattaacccgggtcccctaccaggatttcttgttttatgaaaagatggcacccaacaaaactaattaaagaaaaccttactcctttttataaatgattaactggggaatttgatttttacatacccgaggggcctcattcaaatcttcaattttttattaaaacgtttgggtgggaccccaatttaattttcaaacatgtccaattaagggtggtattacattattgggggttttatttaaaattatttccaactatagttttttaaaagaaatcttacaaatcctgggagtctttggataaaattgaccaaatggggagtaaccttgcagttcatgataaaaaagttaaattggctttcttaaatttataatcacatgttatgtctaaatctcccttactgcacagggacaaaaaaatgta

SEQ ID NO: 58236 - DNA, 186 bp, Homo sapiens
gggccccccctcggaagtcttctagaattaattaacgcgggaagtgtcttttctaaaccaatgaaactagaaatcagtaggagaagaacaactaagaaattctcaagtattggaaatttttgatttcattgcatcaaggagaaacagaagaggggaattagaaaatatctccacccaaaaaaaaaa

SEQ ID NO: 58237 - DNA, 569 bp, Homo sapiens
  misc_feature 28: n = A,T,C or G
cgggcccccccctcggggtacttctagnattaattaacgcgggatacagaataattttgaatgggaaagagaaatataaagtatatgaagagcaaagtgatttcttacatagaaaatagaaggaaaaataaaagtcacatgagtgaaggagaaacagaacgcaagggtgaaaacaaggcaattagggcagcagaaagctggtggtatgagggtgaagagaggcactctcatgttttgggaactctgttggaaaggagaactctgtcctctgattcttcaggctggaaagactgtgggtttagtatcagagtttagctactctgcacggcacagactggggtgtgttttcagactggaaactatggaataggaaactcatcctttttcccagagaataattgattattctcaagaatttgcctgcttttggctattctccagtgtcttcaggttacaatggccaacattggaataaatggaaatcattctctggaaacctgtgaaacaacactttttgctctccgaatggcaacatggaatcaaatcttagatccttgggtatatattct

SEQ ID NO: 58238 - DNA, 567 bp, Homo sapiens
  misc_feature 22: n = A,T,C or G
cccccctcggggtacttctagnaattaattaacgcgggggtgaatattttatactgtaagtgagcaatcagagtataatgtttatggtgacaaaattaaaggctttcttatatgtttaaaaaaaaaaaaaaaaaaaaaaaaaaaaaaaaaaaaaaaaaaaaaaaaaaaaaaaaaaaaaaaaaaaaaaaaaaaaaaaaaaaaaaaaaaataaaaaaaaaaaaaaagggggcccccccccgggggggccccccattcccccttaaggggggggatttacccccccccccgggccggggttttaaaaccggggggcggggaaaccccgggggtacccccaaaaaagcccctgggaaacaccccccctttcccccgggggggtaaaaaggaaaaggccccccccgaccccccttcccaaaattggccccccccgaaggggaaagggaaaatggaacccttaaatttttggaaaaaaccccggaaaattttgggaaaaaccccccttttttacccccaagggcccaaatggggaaaacccctttaaaaaaaaaaaaaatcccccgaatgggg

SEQ ID NO: 58239 - DNA, 645 bp, Homo sapiens
  misc_feature 481: n = A,T,C or G
gggccccccctcgaggtacttctagaattaattaacgcggggtgggtcccaagtttaggcagatgaaggaacttcatcctggctttgagagatttgctgtgttatgggcgaggccagagagactatgatgcttcttcagtccagcaggtcaaaatgccatattttcgggtactggtttctaagccccaacgccacttttttcattattacagagaatgctgcagactggggttggtggctcatgcctgtaatcccagcactttgggaggccgaggagggtggatcacctgaggtcaggagttcaaggctgaccaacatggtgaaagccgatctctactaaacacacaaaatacaaaagttagcaggcatggtggcacacctgtaatcctacctactcgggaggctgaggcaggagaatcgcttgaacccgggaggtagaagttgcagtgagccgagatggcaccactgcactccaacctgngcaacaagaacaaaactctgtctcaaaaaaaaaaataaataatttataagctgctgaactctgttgagggataggtattcactctgtggttctcagccagggtacaagtcagtaaaacttgtctaccttttctccagtttatctgccttttctgagctgatttt

SEQ ID NO: 58240 - DNA, 218 bp, Homo sapiens
ccgggccccccctcggaagtcttctagaattaattaacgcgggggtaacaaaaaagtatcttggggaaagaaacgaatatgtgggaaaccttaaataaaaaaaatggttgctgatatagggaactgataatacatcggcggccgccaccgggggggagctcaaattgcccctttgagaatgctttttacccgccctcagtggccgcagatttacaact

SEQ ID NO: 58241 - DNA, 617 bp, Homo sapiens
cgggccccccctcggaagtcttctagaattaattaacgcgggggagtagattttaatttccttcaagaacttttcctttgcattcacacagggctgtttggtacaagaggcctagccttcggactgtcttggctttcaacaggcctgtttcactaagcttaataatttctagctgttgctttaaagtgggagacatgtggttctttctttcacttgaacacttagagaccattgtagggttattaattggcctaatttcaatattgttgtgtctcagtgaatagggaggcctaaggagaggtaggggggtggccaggtggtagaacagtgagaacacacacaacatttatcagttaggtttgctgtcttagatgagcgtggttatggtgccccaaaacaattaggatagtaacatcagagatcactgatcatagatctctataccagatataatagtaatggaaaagtctgaactattgtgaaaatttccaaaatgtgacacagagacattacacgagcacatgctgttggaaaagtgacaccagtgtattggcttgacgtatgattgccacaaaccttcagtttgtaaaaaacacaacatctgcaaagcataataa

SEQ ID NO: 58242 - DNA, 382 bp, Homo sapiens
cgggccccccctcggggtacttctagaattaattaacgcggggtaaggagcctagagactaggggatgatggggcttgttttatagagagtagccataggagacctggtaagataaccaagcagatacctgagggaagtgagagagctggctggcagccatctgggagctcttggctgaggggcaacagtgtatgtgtgaggaccctgaggtgggagcctgcctcactcatccagtagaagttagccaggccgggtgtcgtggcttatgcctgtgatcccagcactttgggaggccaaggtgggtggatcacctggggtcaggagttcgggaccagcctggccaacatggtgaaaccccgtctttaccaaaaaaaaaaaaaa

SEQ ID NO: 58243 - DNA, 433 bp, Homo sapiens
aaaaaaaattaaaaaaaaaaaaaaaaaaaaaaaaaaaaaaaaaaaaaaaaaaaaaaaaaaaaaaaaaaaaaaaaaaaaaaaaaaaagggggaaaaaaaaagggggggggccccccccgggggggaaattaattttcccccttaggggaatttgtttaccccccccccccgggcggggggtttaaaaactggggggttggaaaaaccttttccttcccccatttttttcccttttgcaaaaaacccctttttggaagggggctttaaaaaaaaaaattcccccccggggccctttttaaaaggtggcggcaaattggaagggtaaaaaaaattctcaccctccttttttttttaaaattcccccttcttttttttttaaacaaaattttttttttaccaatttgccaaaaaaggcaaattattttttttaaaaa

SEQ ID NO: 58244 - DNA, 604 bp, Homo sapiens
  misc_feature 33, 91, 566: n = A,T,C or G
gtaccgggcccccccctcggaaatacttctagnattaattaacgcgggttactaaataatccattcaaaaggcagattgtgtcagacgggngtaaaaaaacaaacaaacaaaaaacatgattaaccataggttctttgcaaaggcatatttctgattcaaagccaaaaatagattgaaagtcaaaggatggaaaaagagatatcatgcaagcagcaagtataagagagctgaagcgaatatactaataatgtcatagttttaaaaattaagacaaaaattattactagagacaaagaatgacatttataatgctaaaagggtcaactgaggaagatagaacaattatgaagatatatatacttagagccctaaaatacatgaagcaaaatctggcagaattgaaaggaaaaatagatgattcaacaatggaatcaaattagaaatcaataacaaaagaaatttgagaaattctcaaatatatggaaattaacaacacactcctaaacaaccagtaactcaaagaagactcagaagggaaataagagagtattttgagatgactgancatgaatatttagggaatacagctaaagtagcacttga

SEQ ID NO: 58245 - DNA, 387 bp, Homo sapiens
  misc_feature 16, 29, 46, 265, 266, 267, 268, 269, 270, 271, 272, 273,274, 275, 276, 277, 278, 279, 280, 281, 282, 283, 284, 285,286, 287, 288, 289, 290, 291, 292, 293, 294, 295, 296, 297,298, 299, 300, 301, 302, 303, 304, 305, 306, 307, 308: n = A,T,C or G
  misc_feature 309, 310, 311, 312, 313, 314, 315, 316, 317, 318, 319, 320,321, 322, 323, 324, 325, 326: n = A,T,C or G
cgggcccccccctcgngaatacttctagnattaattaacgcggggngaaaaaaaaaaaaaaaaaaaaaaaaaaaaaaaaaaaaaaaaaaaaaaaaaaaaaaaaaaaaaaaaaaaaaaaaaaaaaaaaaaaaaaaaaaaaaaaaaaaaaaaataaaaagaaaaaaaaaaaaaaaaccccccccccccccgggggggacccccttttccccttttgggggttgttttaccccccctttttggcccttttttttccccctttggatgnnnnnnnnnnnnnnnnnnnnnnnnnnnnnnnnnnnnnnnnnnnnnnnnnnnnnnnnnnnnnnggttttaaaaaaagggccccccccaattcccttttcaaaaatttggcccccttttttggga

SEQ ID NO: 58246 - DNA, 631 bp, Homo sapiens
cgggccccccctcggggtacttctagaattaattaacgcggggtgggttacatggtcagttttacatgagctgttaaaactcatcaaaacagtacacttaacatctgttcattttattgaaagtaaatcatacctcaactaaaagaaagtttactgagttatacatctacaagtgtatactttgccttatgtaaattacagcacaataaaaaatggaagtgcccaaaataaaagtccgctaagaagaaatgacttaaatatacaaaaagatgctcgatcttattcaaaataaaaaagaaatcagaaagacactaaagtaatatcttcactagcagattatcaaagagcaaaacatttggtaacactatgttggcaagaacatgggcagagacacattgagagcaggaatgtaaaccggtacagcctctgtgaagtcagtctggcagtcactaccctaattatttacaaatgcacgtatcctttgacccagcaattccaattatttatttatcatacagatatccttttatgcatagggaatgatctatgtaccaagggtattcactcaacattgccacagccacagactgaggggcacctgatatccatcaatgaagggaccggttaaact

SEQ ID NO: 58247 - DNA, 444 bp, Homo sapiens
aaaaaaaaaaaaaaaaaaaccaaagaaaaaaaaaaaaaaaaaaaaaaaaaattataaaaaaaaagaaaaaaaaaaaaaaaaaaaccccgaaaaaaaaaaaaaaaaaaaaaaaaggggggccccccccgggggggaaacccaaaactttttaaattttttttaaaaaaggcccccccacggggggggggcccccccccccaaaaaaggggaaaacccggggggaacccaaaagagggggcggggccaaaaaccccccttcccccgggggggggaaaaacaaaagggcccccccgaaggccccccccaaaaaggggcccaccccgggggggaaggggaaagggagcccccaaaaatcggggaaaaaccccggggaaaacgggggaaaaaaccccaatttttaaaccaaggggccgaaggggaaaaaccccaaaaaacaaaaaaaaa

SEQ ID NO: 58248 - DNA, 391 bp, Homo sapiens
  misc_feature 22: n = A,T,C or G
cccccctcggggtacttctagnattaattaacgccgggggaaaaaaaaaaaaaaaaaaaaaaaaaaaaaaaaaaaaaaaaaaaaaaaaaaaaaacctgaactttaaaaaaaaaaaggcggcccttaccaaaaagaaaactacaattaaccctaaaaaaaaataaaattaatcaaaaataaatgaacgggggttcccccccgggggggcggccccccccccccctttggccacctttttcccccccccccatgtcccttttttcccccctggggggctgggaaaaaccccggttcccccggaatttcccgcggggtgcccatcctatttggcgaagggggattttaaccttaaaggcccggctaaattcccctttccccctttgtccccccc

SEQ ID NO: 58249 - DNA, 469 bp, Homo sapiens
cggggccccccctcggaagtcttctagaattaattaacgcggggattacaggcacaagcaactctagactattaataaacccagagacacaaagaatttacagaagaaaccttctcaaaacaacccttatcttccattagttccctccatttatttaccttccacagtttgctgaccctaaaaacctaagcccatttttctttgtcttgtcacttctctaaaaatttgttatgaagccccatgttctaactaccctttttagctactcatcactgctgtttttcctgcatgtaagcacaatgcacatgttaataaattccacctgtttttctcttgttaatctgtatttgtcagtataattgtcagggtctcagttacagaaccaaggagaatagaggaaaaagaggtttcttctcccttcccctacagtttattttggataacagtcctttatatgtcttttgaaaat

SEQ ID NO: 58250 - DNA, 291 bp, Homo sapiens
cccccctcggaagtcttctagaattaattaacgcgggtacgcagataaaatatttaatacgaatatattaaaattatgaagtataaaataatatagaggaagatagatttttatacttcacttgaagcagtgaaattacactaccagtatgctgatataagttatacatagatataatgtaatacataggaataccagtaagaaacatatgaaataaataaatgaaaacaactgtgtataaatttttataaatctttacgtaatacaaggaggcagaaaaaaaaaaaaaaa

SEQ ID NO: 58251 - DNA, 548 bp, Homo sapiens
cccccccctcgtacgtacttctagaattaattaccgcggggtgggaacctgtaaattcaaacggctgggtaggaacccccctagcaggggcctctgcccttgctgagggtccctgtttccccttttccttccttttaccccaacaaaaccttgttttactcacccttaaaaccatctatgaccctaatttgtcggggtcggggaatggacaaggacccattctttacctaaactaaggaaaagccctgtttttgggcgcccaacaggggacctaaaaaaacaggcctcactcacggcatatggaactacccccccccttaactaaaaaggcacaccttatttgcagttaccacacatttaaagcacctctccaagttttaccttaaagttcaaattggctgggagtggaacctactaaaaatattttcacatgcaagagtcaaagaaactttgaactatttatggcctttaataataaagtagggtatactcctgtgatcaaaactgggaccatatttgtttctctctgccgggtccctctaaaaatg

SEQ ID NO: 58252 - DNA, 459 bp, Homo sapiens
cgggcccccccctcgaaatacttctagaattaattaacgcgggacactcactaaagtaaaaagaacgctcccaaaattacaaatgttaatctgatgattatacataaataagttaaaatcatatattaacataagtaaagacttttccaagcagtaatgaaataaactgctatgaaactggaaaaaggaatttaatagtcaactatctactattaaaaatctgtaagtcaggtactcaaaaatctgcaagggtctaataagctaaattcattccacttgtaaggagaaaatactctgctgcaagaatactgagaaccagctgagacataatttagcactggctgatgggaaagagctcatcaggaatgtacctattttatacaggatgttgtcaagcatcacagaaattaattttagaaataaggtcttacaaaacatagcttctgattttatccatca

SEQ ID NO: 58253 - DNA, 543 bp, Homo sapiens
cccccctcgagagtcttctagaattaattaacgcgggacactcatggatgatactgacatatactccattctcccttgctaatatctagatttttttagtacctctaatactaagagatttttaatttctttgctatacttctgtccttttcttctctattcatgctcaaaagaaagtaagtgctataactactcttttttgtttgcttaaaaaatgactcatgaacttaaggtacttaagtatggacactcctgacaactaataccatagcggagaactactgagttaaagggtaccagtgcaaatagagggctgaaaacaaggaaggtcagtcagtgaatgggaaagaaatatgacaaagcctaggaaagggagctcctctagcatcaaactgtctgcatgtcgagtctcagaaaaacaaggattcgtcagtcaacccctttctgcatgcacagtggatttagggtaaagtttatgttaccctgtctttggccgagcgcagtggctcctgcctgtaatcccagccctttgggagactgaag

SEQ ID NO: 58254 - DNA, 606 bp, Homo sapiens
  misc_feature 32: n = A,T,C or G
gtaccgggcccccccctcggggtacttctagnattaattaacgcgggccctccctttttttaaaaacatttttgtttcatttcttggttatattgcctatagttgttttcctaagtgtattgcttaagaaaaaaaaatgaattttaagatttttttgaaccttgcttttacatatcctagaataaatagcattgatagaaaaaaagaatggaaagaccagagattactaggggaattttttttctttattaacagataagaattctgacttttctttttttccatttgtgtattaggtggttgtgaatgcccttttaggagcaattccatccatcatgaatgtgcttctggtttgtcttatattctggctaattttcagcatcatgggcgtaaatttgtttgctggcaaattctaccactgtattaacaccacaactggtgacaggtttgacatcgaagacgtgaataatcatactgattgcctaaaactaatagaaagaaatgagactgctcgatggaaaaatgtgaaagtaaactttgataatgtaggatttgggtatctctctttgcttcaagttgtaagtgaacactattttctctgaatat

SEQ ID NO: 58255 - DNA, 621 bp, Homo sapiens
  misc_feature 604: n = A,T,C or G
cgggcccccccctcgaaagtcttctagaattaattaacgcggggagctacatcctttaatgtacgtaactgaaagcaccgactttcaaattcttttaggttgttgcctgaattcagttcctgacagttgtaggattggggtctctgtttccttgctggctttcttttctcttaaagacttcctgcacttcttgtgcttttcatgtgcctccttccagcaacagcagatggagtccgtttcacacttcaaatctctctgtcttctgctgcctctctggtccagctctagaaagttatctgcctgtaaggagttacggaattagattaggtccacctgaaaactttgaaatactatccttattttaagctcattaacttttcctctttaaagttctttttctcatgtaatgtaacatattcataggttttggggttagggcatgaccattttgtctaccacaataagaacgattcacataataatgtacctataaatagaatgtaaaatcaaagaaaaaaaaaagaaatgcaaacataatacagagaagattagttgaacacaagaagaatcacacaaggaagtaggccaagtgttctgaaaacanaagttctccatcgtctc

SEQ ID NO: 58256 - DNA, 585 bp, Homo sapiens
  misc_feature 492: n = A,T,C or G
ccgggccccccctcggaagtcttctagaattaattaacgcgggggttggacagtatataaatttcctgttactgctataaaaaattgccataattggtgacttaatcaatgcagatttattatattatcttatacttctatagattagaagtccatcaaagtgtcagcagggctgtgttcccttctggggacgggaatagtcaatattcttgctttttccagcgtttacaagctgcctacattctttgtctcacgcctgccttcctccacctttgaagccagcaacatgatgtctctctgactatttttacatagtcacgtcttcctctcttcacagccgggaaagttttctgcttttaaggatgcatatagttagtttaagcctgtctggataagctcctcatctcaaggtctttagtcttaattacatctgcaaaatcctgctggacatataaggtaacacagtcacaggttctggggattaggaccagngcatccttaggggccattattctttctaccacagacagctcttattattggaaagttattatggtattgagatctgcttctgagtactatctg

SEQ ID NO: 58257 - DNA, 472 bp, Homo sapiens
  misc_feature 28: n = A,T,C or G
ccgggccccccctcggaagtcttctagnattaattaacgcggggccctgtctctgaacaaaaagaagaaagaaaaagaaaaaaaagcgaagaagaaaactcaagaagttcataaccagtaaacctgctctgcaagatatgcttaagggagtcctgaaggtgaaacgaaaggacactagatagtaacatgaaactgtatgaagaagtaaagatctcaatagaggcaaacatatgtgcaattataaaagctagtactattgtaacagtaggttgtaaaactacttttggttttctgcagaatttaagagactattacactttaaaaaacaatcagtatcggccgggtgcagtggctcacatctgtaatctcagcacttttggaggccgaggcaggcagatcatctgaggtcaggagttcaagaccagcctggccaacatggtaaaatcctgtctctactaaaaaaaaaaaaaaa

SEQ ID NO: 58258 - DNA, 623 bp, Homo sapiens
cgggccccccctcgaaatacttctagaattaattaacgcggggggaagtgtgggaaaaagtgaggaataaaagactacaaatagggtgcagtgtttactgctcagatgatgggtgcaccacaatctcacaaatcaccattaaagaacttactcatataaccaaacaccacctgtaccccaataacctgtggaaaatataaataaaataaataaaataaaaaataaaaatatataaaagtaacatcaaagatgattaaataataataactacaacaacttttcaagacatagtacaataaagtataaatagaaacaacaaaaaattacaaagttaggggaacaaagttaaggcatagagtttttattaactttctttttgcttatttgtttatggagaaactgttaagttgttatcagcttaaaataaggagctataaaatagtatttgcaagcctcatggtaatctcaaaccaaaatcatgtaacacatacacaaaaaaattaaaaagcaagaaactaaatcatatcaccagagaaaatcaccttcagtaaaagaaagaaacaaaagaaggaagagaaatctataaaacaaccagaaaacaaataacgaactggaaaaagtaa

SEQ ID NO: 58259 - DNA, 445 bp, Homo sapiens
  misc_feature 10, 23: n = A,T,C or G
cccccctcgngggtacttctagnaataattaacgcggggtggggaaacagaggcgagaggatcacttcagctcaaaacgttgaggctgcagtgagcctgggagacagagcaagaccctgcctcaaaataaataaacagtaaacacaacaataacaaagaaataacaacaaacaataataacaataaacacataagtgggagtgaacatatttttctttaatctctctgtgttctcctctctctctctctctccctgaaaggatctccatctgttgcaccaggactggagtgcaggtgtgcgatgggtcgcggctcactgtagccttgatctcccaggctaggacctcccaggttgggacaggaggaatagcatgggccgaaggggggtcagggctgcagtgggccatggtcacgcacctgcagtttagattaaaaaaaaaaaaaa

SEQ ID NO: 58260 - DNA, 501 bp, Homo sapiens
taattaccgcgggggaggtggactcccaaaaagaagtagaagaaatgggggggcagttttaaaatcaaatagtaaggggtaaagaactttctaaattggattaagtgaacccccccaccaaattcaagaacctctgtaaacttcaaagatttaagggcaaaagacttcttattcgaatttctgcaaatcaagggtaaaaatttcgggctttaaaaattctaaggaaaaaaaagtcacttggtttacaagagagcaataagggaccttctcacaagaaacaagggagactagaaaataaaccagtgaattttttaaggtattaaatgaagggaaaaacctgtcaatgtaaaattctatatctgattaaaatattctccaaaacttttataaaaacaaaataaaccctttctcacggagtcaaatcagtttcctttttttttttaaagaagacttgcccaacacagaatgtaaaaaacctttcaaagttaaaaggaaccgtcc

SEQ ID NO: 58261 - DNA, 586 bp, Homo sapiens
ccccccctcgtacgtacttctagaattaattaacgcgggacctgattaggtgacaataatggaaaattcatttctagagtgagggaaatccttagtttttgaatccacatgatattatggagactagggtgcccacctcaatgtgggggagtgaaactggtctttaataaccatttatttggttggaaaactactttatagtattttggtaaagcaatttttttcattttcactatgggacaaaaatggctttatatgttataaatatttaacccatcacagtaacccaactttctgtgtaacaaaatgtataacatgggagtttaaaatgaccccttactttttttttttttttaaacctaagtaaacaccttatgctaattcccagctggaaaagttcttcattggctgataaaaatagtttattatgtttggctgatgtaaggggggacaaatttatccaaaaaaaaacagacttgggataaagttacccacccaaaattttgcctaactgggcaatgcctttggataccactaacttaccataaagttttaaaacttgaataagcccaaaaaaaaaaaaaaa

SEQ ID NO: 58262 - DNA, 612 bp, Homo sapiens
cgggcccccctctcgaggtacttctagaattaattaacgcgggggaggcctctttgcagttgagataagaggaaggcttctgtctcctgctcctccctgggattggaatgtctcagtgtaaagccgaccattcccattcgttcgattctgaggtaggagaaaaccaccctgtggctagaggcaagataagctggcaacaatgctgctctgttactctttgctacactgagatgtttatgtaaagtgaaagataaatctggcctacgtgcacatccaggcacagtacctttccttgaacttattcatgatacagattcctttgctcacatgtttccctgctgaccttctccccacgtgttgccctgctacactccgctggctaagatagtaaaaataatgatcagtaaatactgagggaactcagaggcgggtgctggtggcccccttcaaattgtcaaatggttctcatctataaaatgctaatgtctgataggcagctcaggacttcttgcttcctaggttttcactaaaatttaaggttactgaggataggaattatagttaatatataattctgtatataaaatgtgccaaagaagatgcgttcttgtg

SEQ ID NO: 58263 - DNA, 601 bp, Homo sapiens
cgggccccccctcgaaagtcttctagaattaattaacgcgggaaccactatccacataaaaatgcagagcagattagcacccaaagcctcctttgcgcccactcctggctattaccttcaaaatgctacctaatgagaggactcagagtgccatataaaactataaaggtgacaactggaacagaaattaaaatcttgctaaatattggaaacaacaataaaaaggattgaaagggaaagaaagagttaatattgctatggtttggatgtgtgtcccctctgaatttcctgttgaaatgtgatccccaaagttggaggtgggacctagtggaaggtgtttggggatggatccctcatgaatggcttgatgccttcctggaggtaatgaatgagttctcactttgttacttcatagagagctggttgtttaaaagaggctggctcctctctcttgctccctttcttgccatgtgacatgcctgtttcctcttagccttcttccatgagtaaaagcttcctgaggcctcaccagaagctgagcaaatgccagcactatacttcctgtgtaacctgaagaaccatgagccaaataaacctcttt

SEQ ID NO: 58264 - DNA, 391 bp, Homo sapiens
  misc_feature 9: n = A,T,C or G
acttctagnattaattaacgcggggactggttaataacatcataactaatatttctctaatgctttctatttgtcttgcactgtctcaagtgtattacattatcacaaaaatcctgtgaggtatgatattattattatccccattctacagtagaggaaactgaggcacagagagtttacaaattttgcccaagacacagacagagatagtaagtaataaactgggatataagtcaaaatagtttgatctacctactgtgtccttaaacactgtgatatactatctccaagatctctttagtatgtgcaaggaagacagctgtaggtgttgggctgtgtgtattattaaggttgctgttacagagaaaagaagaccaaaaaaaaaaaaaaa

SEQ ID NO: 58265 - DNA, 608 bp, Homo sapiens
cccccctcgtgaagtcttctagaattaattaacgcgggctttgaaaagctctgacattcttggtgttatgggttgaaatatgtatcccccccaccccaaagatatgctgcatcctaattcccagtacatcagagtgcaaccttatttggaaatagaatcactgcagatgtagttagttgagatcatactggtttagggtaggcccttcctctaatatgactggtgtgctcataaaatagccttgtgaagacatagacacacaggaaaaaatgccatgtgaagacagaagtagaaattggagtcacgcatttatgacccaagcaatggcctggcttgtcagctgtcaccagaagctaggtggaatggaacagattctcgcttagtgcctccataaggcaccaactctgccaacaccttgatttcagacttctagcatctagaactttgggaggctaagtttcttttgctttaagccactcaatttgcagtaccttgcagccctaggaaactaatacaatagttaaatattaaaagacagtataaatgtatttgttgtttgctactcctttttctcctatctgatttaaaatacaactgcataaagcaat

SEQ ID NO: 58266 - DNA, 367 bp, Homo sapiens
cccccctcgagaagtcttctagaattaattaacgcgggcctgctctatgaaagggaatgttcagctctgtgacttgaatgcaaacatcacaaagatatttctcagaatgcttctatctacttttttatgaagatattcccgtttccaacaaaatcctcgaagctctccaaatatccacttgcagattttacaaaaagagtgtttcaaaactgctctatgaaaagaaaggttcaactctgttagttgagtacacacatcataaacaagtttctgggaatgcttctgtctacttttcatgagaagaaatttcctttttcaccttaggcctcatagcgctccaaatgtccacttccaaaaaaaaaaaaaa

SEQ ID NO: 58267 - DNA, 581 bp, Homo sapiens
  misc_feature 32: n = A,T,C or G
gtaccgggcccccccctcggaatacttctagnattaattaacgcggggctgtatctgtgtcaatatgattgattgtgtgtgtgtttattatctgtttgctgccatcaatgctacctcccgcccccaaccccacactataatataaactacaaggagcagagaatctggtcagggttgtttattgctgtgtcctcaatgcctagaatagcacctggtaattgttaagcactccactgaatattaaggacactgatattctgaagtcaagatgacagaaacatctctagactctgactcttcagtaggtaggcaatgctcctcctttgcggccaaaggtggagactgtaaaaacaatatcaagctatatgtgaaatgtgagatacaggattatatattgatgtattgtcacttggctgaaataccttttttgagatagtaggaagagaaagatttagtaatatttactaattaaaatatggctcatgttttctttacacagcctgtttccaatgtggaaatgataataaagaagcaatagagtattgacatactaaatccaataggtcaaaaaaaaaaaaaaa

SEQ ID NO: 58268 - DNA, 456 bp, Homo sapiens
ccccccttcgaaagtcttctagaattaattaacgcggggtaccccaacaactattgaaataagctttttttttttttttaaaaaaaaagaaacctgcatgtaaatgctggatgaaaatataaactaaaacacagaaatgagtggggaacatactggatgaaaatataaactaaaacacagaaatgagtggggagcatactggatgtcagtggctttacatatatactcattcaattattaaaatatatttcataatctttcttaaatatcacagagtgccatctatttttctaagctacaaggacagccgtctctatagaccaacactagtaataagagaataatacgttgtgtttcttttctcaattcccactcctaccaccctcttcctagaaaatcagtcagtaaacacctaagataaatgcttttgatctcccccctcaaaaaaaaaaaaaa

SEQ ID NO: 58269 - DNA, 588 bp, Homo sapiens
cggggccccccctcggaatacttctagaattaattaacgcggggccttcagaaaggtaattaaggttatgtgggtagatcccaacccaatctggctggtatccttataagaggaggaaatttggacataaagacaccaggcatgagtacacacacagaaaggccatgtgagaacacagcaagcaggcttccatctacaagccaaggagagagacttgagaggaaaccaaacctgccagcaccttcatcctggacttccagcttctagagctgtgagaaaattagtttctgttgtttaagctacccagtctgtggtctctcattatggtagccctagcatactaatacaaactataacaaaagagacaaaacacctaagaataaatttaataagagaaatgatctgtttgaagatgttttaaaacacaccccacttcaaacatgttcttagttagaaataatttatcataagaatgcagattctccttgatttagttattaaatttgacacaatccccaaattccaaaaaaaataccaagagttatatgagaattagacaagttgatgttaaagtttacatggaaaaac

SEQ ID NO: 58270 - DNA, 473 bp, Homo sapiens
cgggccccccctcggaagtcttctagaattaattaacgcgggaaggctcaagaaccaagagaactgacgtctgaaggcaggagaagatggatgccccagctcaagtagagcaaatgcacccttcctcctaatttcggttctattcaggctctcaaaacattggaggatgtcccatggcattggtgagggaacagttctgtactcagtttgttaattcctatgctaatctcttccagaaacaccctgacacacacccagagatagtgttttatcagctatcttggcactacttagcccagtcaagttgacacatataattaaattatcaacaagatggaagttctagccaatgcaattagaaagaaagagagataaaagacatttcagttggaaaggaagaaataaaactgtccctatttgcagataatatgattgtttaaataaagaattccattgtatattcaaagaaaacc

SEQ ID NO: 58271 - DNA, 539 bp, Homo sapiens
  misc_feature 13: n = A,T,C or G
ccgggcccccccntcgagagtcttctagaattaattaacgcgggtggatgctcaaagcagagagatggacattcaagaaagaacaaaagaaatgttaagatatcaagaacaccataacataaaaaaaatatatatttgatgggcttattactagactgaatactgctgaggaagaatctctgagcttggggatatatcaatagaatctctaaaactgaaaaacaaagagaacaaagacttaaataaaacaccaagacagaatttccaaggactgttgagacactacagaaggtgtaacatgtacaatgggaataccaggataagagaaaaagagagagaaacataagaaatatttgaaacaatgattactaatttcccccaaattaatgtcagacatcaaaccagatcacgttccagatctaggaacgtgagaaaagaccagtagcataaatgcctaaataaataaataaataactatacctaggtatgttatacctagatagaaaatcaaacagaaaaaagaaaatcttgaaagaagc

SEQ ID NO: 58272 - DNA, 332 bp, Homo sapiens
taacgcgggcggagcgtcaaaaaaaaaaaaaaaaaaaaaaaaaaaaaaaaaaaaaaaaaaaaaaaaaaaaaaaaaaaaaaaaaaaaaaaaaaaaaaaaaaaaaaaaaaaaaaaaaggaaaaaaaaaaaaaaagggggccccccccgggggggacttccatttcccctttttgggggtctttttaccccccctcattggccgtttttttaaaacttcgggattggaaaaaccttggttttccccaatttattccctttgaaaaaattcccctttttcccagttggttttttaccaaaaaggccccacccgttcccctttccaaaaatttgccc

SEQ ID NO: 58273 - DNA, 100 bp, Homo sapiens
aattaacgcggggggcagcatatcaagaccccgatctctcatttaagataacacatagaaagacaggggtgtgagaatatgaaatgatagaaaaatgata

SEQ ID NO: 58274 - DNA, 621 bp, Homo sapiens
  misc_feature 13: n = A,T,C or G
ggccccccctcgnaaatacttctagaattaattaacgcggggggcttttttgtttcttatgctgacagttgtattttagccctgaatcctgcgagaatgtgctggtgtggccgatgaaatacagtctttgtatcaatttaatgttgatacttgatgaacttgctcagaacaccatgaggtaactgtgcttgtcaccttcagcttccatcctcattgattccaacaatctgctgttaaatttgaggtttatcccacatcttttactcagaatgaacttgatttcatttttatgaagttgatcaagatgtggacatataagtttccaaagagtatattgttgacatatgattcaaagatgcaaaaactacatatcatgaatgttctgatactgttcaaaggctctgtgagtatgctgttttgaacaagaaaattatgaggaacaacaagattccagaatttatgtcattcttgcagatgtcacttctcagtagtgagctgctatctgaacaacttaatctgttaaacatttgttatacatttggtctacaatcatcaatttacaactggcagtatgtaccaagaactctgtggagaacttacattacctccttttgatgtaac

SEQ ID NO: 58275 - DNA, 304 bp, Homo sapiens
  misc_feature 22, 38: n = A,T,C or G
cccccctcggggtacttctagnattaattaacgcgggnaaaaaaaaaaaaaaaaaaaaaaaaaaaaaaaaaaaaaaaaaaaaaaaaaaaaaaaaaaaaaaaaaaaaaaaaaaaaaaaaaaaaaaaaaaaaaaaaaaaaaaatttttaaaaaaataaaatgcgcctccccccccgggggggtctcttcttccccctttaggggtttttttttcccccccttttttgcgggttttttaaaaacttgcttttggaaaaacccttggtttacaaaattttttttcttttggccctttccctttttccc

SEQ ID NO: 58276 - DNA, 571 bp, Homo sapiens
cccccctcgagagtcttctagaattaattaacgcgggcttcacattttgtttagttaaaagcattacatatgcagtactaaaataacttggtagattggtggatgatgcagtacttacagtgcattttattagattcctgaaagtcttcatcttccttatccacctgatcaggtgcagttgtaaacattctaatattatcttccaggagtaaactctcattctcatcaaatactgtaggaaacaaatagaattccttgtctacatctttctgtaaatcaaaacaaaatgagatggagacagaatgaataaagcagaagacttccatgtgcacaatactatttatgcacaaacacacctaaaggaaagaatgagaacagaagtttctgttgctctttgtaaactagggttcctgaaatatttcagttcaccaccagagctttctttggtatctgtttagtggatttgtggttcaatatggtaatctgagtctctctctgcatctaaaagttctaactctaccttcctgcccacattgtgcataccaattgaagcctccaaaaaaaaaaaaaa

SEQ ID NO: 58277 - DNA, 457 bp, Homo sapiens
acttctagaattaattaacgcggggggtggaaaaaagaggaaactttaaaaagattcctgaaagatacaaaagtagatttggacaaatgaaaagcattgtcactggaaaaaattactcctgaaatttattttctcaaaagaatataaatttaatatgatctcaaaaatacaacaacagctatttttctggacctagacaaatttattctaaaaatcatacaggaaaaaaaatgcaagaaattctagtaaaaataaaacctaacaaagaagaaccctactgctacttcactttcactagatgagctaaaattaaaaagacttacaacgtcaaatttgaagcaactggaacttgcacttattagataaaagaatgatagttccctattgaactaaacattcacttaccctgtaccccaataattctactcttagatatttacccaaaaaaaaaaaaaaa

SEQ ID NO: 58278 - DNA, 168 bp, Homo sapiens
cggggccccccctcgaaatacttctagaattaattaacgcggggtgaatattttatactgtaagtgagcaatcagagtataatgtttatggtgacaaaattaaaggctttcttatatgttaaaaaaaaaaaaaaaaaaaaaaaaaaaaaaaaataaaaaaaaaaaaaa

SEQ ID NO: 58279 - DNA, 513 bp, Homo sapiens
cgggccccccctcgagaatacttctagaattaattaacgcgggtctcccctcccttttttttttgtagtttactcaaaaggcaaacaagatttgttttcattgtctctaatattacataaaaatctttttcaaaagagaaaactaagtttcatgtttgctttagggcatctttaatgctaaagctagtttttaataaaattttataaatttatgcagttttaattagtttgaccataaggtaagattttcataaacttcttataactctttacaattttctgttaaacagatcaatttttttaaaagaaaaccctgctattcagacacatgggcccagattctggctccacatcagtgtgcttttattttaatgtttgagctatagaaaaatactaaacaattcccttcaactcttagccaacttgctgcttctcacagaacttcctttatcagatcaacccttcacaaacctttctaacttgcttaaaccttcaaatttgtccctttactct

SEQ ID NO: 58280 - DNA, 544 bp, Homo sapiens
cgggccccccctcgaaagtcttctagaattaattaacgcggggagcataatggaacttggggaaggttaatacacaactccagcccacactagccatcctatgactcagaagcacatttaaagttcacagtatagaggcataaggattcgctgagacctaatcataagactatagaacactgcccacaagattgtagaacctaaaactataggaaacattgcctcactctacaccttatattactaaagacctatttacagaagttccttttactcaatgcatcatgtcccgctatcaaggaaaaattacaaagcatactaaaaggcaggaaaaaagattttgaagagacagtaagcattagaagcaaacatggtaggaacactaaaattatcaaaccagcaatttaaaagaactttgattaatatgctaatggataaaatagcatgcatgaatagagtggtgatgtgagtagagagatagaaatcctaaggaacaagtgaaaataaattctagagatcaaaaacacttttaacagaaatgaaa

SEQ ID NO: 58281 - DNA, 521 bp, Homo sapiens
  misc_feature 26: n = A,T,C or G
gggccccccctcggaatacttctagnaattaattaacgcgggcccaaaaataaaccactgtagcactatttgctctgtaaaaatatgaaataatagcataattgtgggagcaaggaaagtaacaaagaatacaatattaaatgtagacttattcagacctccatattactaaaatcaaactccttctatatgataaaatgtaaatcactgaatagacaagcagtggtttctctaagacagcaatttgtgtatccagtggtattattgaatgtaaagtcttttatataagcacagttaataaatgtgggaacactcaataagatttcaatttggaccaaagttggggcccattttcaatcagataatttttgaagggacatagttttttaaccctggcaaatcatcagaatctgccataaggtttgttgaaagacagaccctgctcaatcagaatttccatggatagttcagatcatttacatttgctatgctaatgtgccacagaggaaaaaaaaaaaaaa

SEQ ID NO: 58282 - DNA, 274 bp, Homo sapiens
  misc_feature 25, 27, 39: n = A,T,C or G
ctggggtaccgggcccccccctcgnangaatacttctanaaataattaacgcggggtggggaggggtgctctgctggtcttcaattaccaagaattctccaaaacaattttctgcaggatgattgtacagaatcattgcttatgacatgatcgctttctacactgtattacataaataaattaaataaaataaaaaaaaaaaaaaaaaaaaaaaaaaaaaaaaaaaaaaaaaaaaaaaaaaaaaaaaaaaaaaaaaaaaaaaaaaaaaaaaagc

SEQ ID NO: 58283 - DNA, 201 bp, Homo sapiens
tgggtaccgggcccccccctcgaaatacttctagaaataattaacgcgggggggtgtctaagtttccccttttaaggtttcaacaaatttcattgcactttcctttcaataaagttgttgcattccaaaaaaaaaaaaaaaaaaaaaaaaaaaaaaaaaaaaaaaaaaaaaaaaaaaaaaaaaaagaaaaaaaaaaaaaaa

SEQ ID NO: 58284 - DNA, 628 bp, Homo sapiens
  misc_feature 609: n = A,T,C or G
cgggccccccctcggaagtcttctagaattaattaacgcggggtagctcacagtgtcagacaacaccctgtggaggattagcttcctttccattaaccatctccactgtagagagtcaggggtcacttgtactcaccagagaaaacctgacttaggcaaagtcactattcatctgttcagcaccacatacctataaagcctcagaaaccgctattcagtgactgaatacatttctcaccttcccatcactttccccttacttggccattttcctaaacccataattcaaactttcccaaagaaaaaaaataatctctaggtaatgcgcttaagaattcttagaaagaaatctttattctttgagcactcttctgggaaacctaacctgtgattactgttaggactcaaaatgtttcaccacctgcatctacgtagataggatgaggagtctggggaaataatggagccaataggcttttagcttgaggagcgtggattctaaagccagggacactcatgaaaacaaccacctggcggattacaccctaacgttgaaactgtggcaaagtaccttttaattgcaaaagggtttaggcagagatttatctntgagttccttggcataaat

SEQ ID NO: 58285 - DNA, 645 bp, Homo sapiens
  misc_feature 41: n = A,T,C or G
aagactggggtacccgggccccccctcggggtacttctagnattaattaacgcgggcaaagtggggagagaggggaaaaaacaaaaacagaaagcaaagcaaacacctctcatttaatataagcctgcaaactaaaattcccaaataatcaagattaacactaagaaggaaaaccaacaaaagcaccagtcaaaagattaattcattctatccaagacgtctctgaaacaggtatgtttagaatcttcaaagacataaagaggggtaaccaattaaacaagaatgaaattacagctcaaattccagtagaaaataaacagcaacatttacctaccagggattctaaaaaagagaatagacagaatggcagagaagcaatagttaaagagattaatagctgagaatactccagaattaaagaaaaacatggcttttcagattgaaagtattttctgactgcagaactagacaaatgtaaaaaaatccacggcatacacattgtactaacactgtagaactcaatttagggtactataaaagctacctaaatatattaactacaaaaggacaatcgttaatcgacagaacaagaagcatcagcaagaagagataccagaagataatgggttaatagctgcacagtgc

SEQ ID NO: 58286 - DNA, 504 bp, Homo sapiens
  misc_feature 36, 53: n = A,T,C or G
ctgggtaccgggcccccccctcggagtacttctagnattaattaacgcggggnaaaaaaaaaaaaaaaaaaaaaaaaaaaaaaaaaaaaaaaaaggggaaaaaaaaaaaaaaaaaaaaaaaaaaaaaaaaaaaaaaaaaaaaaaaaaaaaaaaaaaaaaaaaaaaaaaaaacaaaaaaaaaaaaaaaataaaaaaaaaaaaggattttaaaaataaacgggcccccccccccgggggggccccccttccccccttttggggggttttttccccccccccctggggcctgtttttaccccctggggggggggaaaccccccggtgccccccctttttttccccggggcccccccccccttttgccggggggggttttttgaaaaggcccccccccctttccctttaacccagtttgtcccctctggttggggcagggaatttttcccccctttttttttttcaaaaccccccccattttttttgcaaatcccctttttttttacc

SEQ ID NO: 58287 - DNA, 592 bp, Homo sapiens
ccgggccccccctcggaagtcttctagaattaattaacgcgggggtccctgcctgagggagcccatggaccagaacacctaacaaaagaagtgagggcatggaaccagtgatcgaagggggctcctccaaagcccaggagccatctaggtgagcgagtcacctctctcccccacaccacagaggactactgtcatcttggccagaacaccgaagagccctgaaagagagtaggaagagcctatctacctgctagcactcttaagcgccacctgctggatctcaggtcaaaatgcaaacctaaaatattttgcaagtatgtatcacctgtgaaaactaaggaaaagatccagccagaaataaacattctgtacaaagtcatgaccctttgaaatatacccagaaacaaagccagctgactatcctcaacttatctcacgggtgaagaaacatcaacccttacacatgagaaagaatgaatccaagaactggcaactcaaaaagccagtgtttgcccttacctataaacgtacacattagcctcccagaaatggttcttaaccagagtgagctgactgtggacatagaattcag

SEQ ID NO: 58288 - DNA, 611 bp, Homo sapiens
  misc_feature 28, 586: n = A,T,C or G
cgggcccccccctcggaatacttctagnaataattaacgcgggtctagcagcacatcaaaagataaaacaccacagtcaagtgggatttttcccagggatgcaagatggttcaacatatgcaaatccataaatgtgatacatcactatcaacagaataaaggccaaaaaccatatgatcctcttaatagacatagaaaaagcatttgataaaattcagcattcctttttcacaaaagctctcaacaaataaggtatagagagacatacctcaacacaataaaagctatatgtgataaacccacagctagctttatactgaatggagaaaagctgaaagcctttcctctaagaggacaagaagaggatgcccactttctctactcctatccaccacagtactggaagtcctagccagaacaatcaggcaagagaaagaaataaaagacatccaaaatggcaaagaaattaaattgctgttctatcatagatgacataatcttatatttagaaaaacataatgactccaacaaagaaactcttagaattgatatttagtaaggttgcagaaaaccaaattcaacatancaaaatcagtcatattttcatatac

SEQ ID NO: 58289 - DNA, 487 bp, Homo sapiens
  misc_feature 23: n = A,T,C or G
ccccccctcgaaatacttctagnattaattaaccggggcctgttggggggtggggggctacgggagggatagcattaggagaaatacctaatgtagatcatgggttgatgggtgcagcaaaccaccgtggcacatgtatacctatgtaacaaaactgcatgttctgcacatgtaacccagaacttaaaatataataataataaataataaataacgagatggtttactttggactttcaggaagcaaacacaatggcaggaaaaaatagcttttttagaaatatcataaagacaacttttcaagttttatgatcatttaaatttaagtttctaaaagtgctttgacaatgataagtgtccatgtaaaaatgtattaatgttatactaaatatcagtttacaattttagaagagctatatattttagaaaacatcccatacaagacataaaaatttataatgtaaaatgtaaaaaaaaaaaaaaaaaa

SEQ ID NO: 58290 - DNA, 534 bp, Homo sapiens
  misc_feature 28: n = A,T,C or G
cgggcccccccctcgaggtacttctagnattaattaacgcgggggtggctccaggtattccttgtcctgtgacagtataactataatagacctctatcatctcatcactttctcctctgtgtttttcttcttctcttatctaataagaacatttgtcactggattcggggtccactttaatccagtatgatctcatctcaagatttttaactaaattttatctgtaatgatcctttttctaaaataggtcacactcacagtttcaggatagacatattttttggaggaccaccaatcaatcttcttcaatagtgatggttctattaatacatagtacttgcatttttagttactatatttaacttatgcatgtatataaacagattaagatagcatcttgtggccgggcgcggtggcttacgcctgtaatcccagcactttgggaggccaaggcgggcagatcaaaaggtcaggagatcgagaccatcctggttaacacggtgaaacactgtctctactaaaaaaaaaaaaaaa

SEQ ID NO: 58291 - DNA, 443 bp, Homo sapiens
  misc_feature 31: n = A,T,C or G
taccgggcccccccctcggggtacttctagnattaattaacgcggggctgtataactgaataggattccaggtcctgcccacaaaaacgtggggtttcttagggaagaaatgaacagaaatacaaacaataaaagatccaggccgggcacagtgactcacacctgtaatcctagcactctgggaggctaaggcaggaagatcacttgaggcgaggagttggggaccagcctggccagcatggcgaaaccgcatctctactaaaaatacaaaaattagccaggcatggtagcgcatgtctgtaatctcagctactcgggaggctgagacacaagaatcacttgaacccaagaggcagaggctgcagtgagccaagttcatgccactacactccagcctgggcaacagagtgagactctgtatcaaaaaaaaaaaaaaaaaaaaa

SEQ ID NO: 58292 - DNA, 497 bp, Homo sapiens
  misc_feature 22: n = A,T,C or G
cccccctcggggtacttctagnattaattaacgcgggcccatgcttataatttaaaaatgagactatttcagtatttctttgtgtttgttttctactattcctttctgagctatgttttagagaaaacaatttgatatgcttcaattttgtaaaatcaaattacatatatataaaaaaaacctatctgtattagacaaaaactgtttttatttatttctgtaagatatcaattaaataaatattttagtggaaatgaaaaaaaaaaaaaaaaaaaaaaaaaaaaaaaaaaaaaaaaaaaaaaaaaaaaaaaaaaaaaaaaaaaaaaaaaaaaaaaaaaaaaaaaaaaaaaaaaaaaaaaaaaaaaaaaaaatttaaaaaaaaaaaaaaaaaagcgcccccccccccggggggggcccccaccccccctaaaagggggttttttccccccccccccggggggggttttaaaaacccggggaggggaaaaaaccggggg

SEQ ID NO: 58293 - DNA, 265 bp, Homo sapiens
  misc_feature 17: n = A,T,C or G
ccgggccccccctcggnagtcttctagaattaattaacgcggggatactcaccactatacgaaaggaggaggagaagaggaaagaaggaggaagaaggagaagaagaaagaagaaaggagaagaactaagaagaaaaaggagaggaagaagaagaaggaagaaggggaagaagaaggaggaggagaaggaagaagaaagaaggagaagaagaaagaaaagacgaagaaggagaggaggaagaagaagaagaaaaaaaaaaaaaaa

SEQ ID NO: 58294 - DNA, 448 bp, Homo sapiens
taccggggccccccctcgggaatacttctagaattaattaacgcgggtgattttattttttgtttcaaaaagtttaagaaaatggaaatgggcaacagtgagtgaagacatattttagcactgaatagaatatttttaaaattaaactatttgaaatatgtaaaaaaaaaaaaaaaaaaaaaaaaaaaaaaaaaaaaaaaaaaaaaaaaaaaaaaaaaaaaaaaaaaaaaagaaaaaaaaaaaaaaaagggggccgcccccgggggggacctcaaattccccttatagggagtggtttaaccccccctaatgggccgtgttttaaaaacgtggggacgggaaaaaccctggggtaaccaaatttaatggcttggaaaaaaatccccttttcgcaagtgggggaaaaaccaaaaaggcccgaaccaatcgcctttccaaaaagtggccc

SEQ ID NO: 58295 - DNA, 479 bp, Homo sapiens
  misc_feature 19, 32: n = A,T,C or G
taccgggcccccccctcgngggtacttctagnattaattaacgcgggggaggtagatctggctgtcaagacaaaggttttaaagtctatatgataaaactaattatgctaggctagccccgaaaaaccaaacagacaagcccaggcatcatgggcctgtgtgaaagaaagaagcttttgctgactgtatatataaaacataatataatataaagctatagtaattaaaaacaatggaatactggtacaaaaataaataaatagaacagaacaggaaattcagaaaaaaaccaaagtaatataaaagtggcttagcatattaatggaactggttctatggtatttattttagacttcaataagccatgtgtctaaaacaaatgagtgtaataatctctaaggtaacaataaaatgaaataaaataatgtatagctaccaagttaatagaaggtaaaaaatggaatcaaaaaaaaaaaaaa

SEQ ID NO: 58296 - DNA, 552 bp, Homo sapiens
  misc_feature 34: n = A,T,C or G
ggtaccgggcccccccctcggaaatacttctagnattaattaacgccgggtcctccaaaattttcgtgtcaacaaattacttggcaaagtcagaaaaaggggtgagaaggaaagcctggtaataaaattctaattttttaagtctataaatctgaaaaaatctctagtcctggttccatgtacaacagcaacctaagaagcagcagataggcagccattgtcatgatttagcaacgagccacacgacagttaagaagggaacatggaagactgtgaggttccgtcttcgggggttcacactgtgtacccgacaatcaactctagggaagagatcattcagcctgggcagacttccagctaagtttgtaccctgtccttgcgtaagtctactggcacacacacaaagcacagcttgaaaaatctcagaagaagcaagagttctcttttaataggtgctatatctagtcaattctctgctgctcccttcttcctgccccaagttaaaaatattgccctgtaagttttcctgatgtactgtgtgggaagcacatg

SEQ ID NO: 58297 - DNA, 565 bp, Homo sapiens
cccccctcggggtacttctagaattaattaacgcgggcatgtaccaggccaccttcagctcctaggaatgtggtttttaacatcaatgaaacagcccttattttggaatggagcccaccaagtgacacaggagggagaaaagatctcacatacagtgtaatctgtaagaaatgtggcttagacaccagccagtgtgaggactgtggtggaggactccgcttcatcccaagacatacaggcctgatcaacaattccgtgatagtacttgactttgtgtctcacgtgaattacacctttgaaatagaagcaatgaatggagtttctgagttgagtttttctcccaagccattcacagctattacagtgaccacggatcaagatggtaagttccactgctgttctctcaaaacagacccataatttcttttgatgcataaatatccctcatgggcatgtatttattgcaggtgctatgcagtcatatacgttatacactgcagaggtaatgcactggttgttgttcttgttcttcctaaactcagaagatattttatattacttctca

SEQ ID NO: 58298 - DNA, 526 bp, Homo sapiens
ggccccccctcgaaagtcttctagaattaattaattttttattcaatcttcaccacaaacctttgaggtagatgctatttttgttcccactgtacagatcaagacactgcagcatagagaggttaagaatgaataatgatcaaatcatgaaatgctgatcaatagttcttctaagagatattatttctttagcactgcttgaataaaaaaatgtggtccccacaacttctcagacatctgacctagtcaagaccaccagtcctgaagggctacatggaatctcatggcctttttttttgtcaacccatttaggaaacttttagcaaacactcaatttgattcaatcacttaacacttattatattctcctccagttctcatttcatcacataaaattatattctccttgaatgatctctgggggactgaaggactaaaaaagcttttaagaacattgtttcagtagttcaacaccagcctggtcaacatggtaaaaccccatctctactaaaaaaaaaaaaaaaaa

SEQ ID NO: 58299 - DNA, 178 bp, Homo sapiens
  misc_feature 27: n = A,T,C or G
gggccccccctcggaggatacttctanaaataattaacgcgggcagccccccaggagtgagtgtctctgtccatgttagatctgatatctctgctcaaattctgttaaattgccttttttaaaaaaaaaaaaaaaaaaaaaaaaaaaaaaaaaaaaaaaaaaaggaaaaaaaaaaaaa

SEQ ID NO: 58300 - DNA, 618 bp, Homo sapiens
  misc_feature 26: n = A,T,C or G
accgggcccccccctcgaaaatactntctaaaattaattaacgcggggcagtgaggcaagatgatgccactgctctccaacctaaaaaaaatataactgataatctaagagagaaaatggaattatataaaatgctcaaaaccacaaaaggcagaaaaggagtgaaagtaaaaaataggaacaaagaacaagggcaacaaatagaaaattgtaacaaatcaatagataataattaaactatatttgaatgatcagtttgaatagcagtggcctaaatatacaaattaaatgtcaagagattgtcagcatggatgagaagcaagactcaactttatgttgtctataagaatcctactttaaatattaaaacacatgtagagtaaagataagttactggggaaagatatactatgctaacactaatccaaagaaagtgggagtacctatattaatttcacaaatagaagacttcacagcaaggaaagttgtcagagatgaagaggggcattacataatggtaaacgggtcaatacttcaagaagacgtagcaatccttaatgtgtatgtgcataacaacagcatatcaaaatatgtaggacaaaaaactacagaactata

SEQ ID NO: 58301 - DNA, 588 bp, Homo sapiens
  misc_feature 12: n = A,T,C or G
gccccccctcgnaggtacttctagaattaattaacgcaggcctctaccctgtaacagagcttcaaaatcacagtgagatcctacacttcaacttcatccctttacctatagttcctagcaccaaaggtcttacagtgacagcaacagagttttgcaacaagtgggcaaatctcctccagtaaatttcttctccactgtgttctaaatgtgccaggattttcaatagaaaatttcacaaccctgtgctctgtcaactctaaaaccctctcctctccccaagtcaaggcttcagaggaaataaaaaagtatcactgcttatacaggctgtactgagtttatcacatccattatctttctgacttctgtccttgggattccagttggtcttgaccttgtatagctgccctcacagtatctttgtcagtttatgcatactacttctattatttctctttctcaaatcaatttcattgggtatgttagaaatatgcagaaattctagaaatgaatgtatatgtaaaaagatattaacaaatatggaaaagagaaatatgtaacatatatactactctcaagatggtatcaatc

SEQ ID NO: 58302 - DNA, 589 bp, Homo sapiens
  misc_feature 27, 569: n = A,T,C or G
cgggccccccctcgaaagtcttctagnattaattaacgcggggggggtcttgatatgttgtcccgactggtctcaaacccatggccacaagtgagccatcttgacctctcaaaagttctgagattacaggtgtgagccaccatgcccggtccaaaaatggttctttgtaaaggtcaataaaatggataatctctagctaatcaagaataaaaggagagaagacagtttaccactacgaggaatgaagagaggacatttctacagatcctgcagatattaaaagaatattacatgtaactttgtgctactacatttggcagcttagaggaaatagacaaattccttcaaagacacaaactatcaaatatcccaggttactcgggaagaaagataatctgaatcgccctacatctgctaaaggaaatgaatttatagttaaaaaccttcccacaaggaagctttatatctagatggctttactggtgaattttagcaaatatttaaggaggaaatagagacgattctgtgcaaacttttcctgaaaaataagaacacactccaattcattntactaggctagcattatcta

SEQ ID NO: 58303 - DNA, 607 bp, Homo sapiens
  misc_feature 14, 27: n = A,T,C or G
gggccccccctcgngggtacttctagnattaattaacgcgggggagaatggaaataagtcatctaatcatattaataaacatagaaaatagcacttgccaaaatacaaaagcatttatggtaacactgtgcacctgaggaaataaaagagccttcctttaattcctgatcaaggcactaactgcacgatcgacagtgaatttcacacataacggtgagaaattaagtgctttccacctaagtttgaggatgacacatggaggtccacactcgttgctcttattcaacattaatacgaaactctagccaagacagcaaaacaataaaagacattcagattaaaaagaggtaaaactggatttattcacagatcccataattgtgtagcataaatgctaatgaatatctaagaagattattagaactaataggtagacttgacaatgttgcagaattcaatattaagaaattaaattccggccaggcgtgttgactcacgcttgtaatcccagcactttgggaggccaaggcgggcggatcacaaggtcaggagatcgagaccatcctggccaacacggtgaaaccccgtctctactaaaaatacaaaa

SEQ ID NO: 58304 - DNA, 588 bp, Homo sapiens
ccccccttcggaatacttctagaattaattaacgcgggcgcctgtagtcccagctgcttgccaggctgaggcaggagaatggcatgaacctgggaggtggagctttcagtgagctgagatcacaccactacactccagtctgggtgacaaagcaagactccatatcaaaaaaaaacaaaaaacaaaaaaagaattcactaaatttggatcacatcctattaaaatacagcaagtctcatcggatttctgcaattttatttctatctcacttaagaaatgtgaccgatggcagcttgcttattaatgactttatgaattagaaacattacaagaacattttaacattttttaaaaacatcagcaaaagcttatacattataattatgtgtgctttaacagtaaatctacaaaaatctgtgttattccagtgtcatctaaatgacgggttggcaaactttttctgtaaagggctaaatagtaaattttagggtttctgggccatacagtctttgttacacctattcaactttgctatgaagcacagaagcagccatagataatatataaacgaagaaacatggctatgtt

SEQ ID NO: 58305 - DNA, 618 bp, Homo sapiens
ctgggataccgcggccccccctcggggatcttctagattattaaatagttaaaataatgtagtgcaacttaaaaatatctatggctttgtttttgtttttcttttgtacctagtctcattggaaatgactagtattctgcctcattttcagggcagaatatgtgtttgtgacccaaaatgacaaagttaccaagttcaacctgctcatttaatcatctctctattagttctttgtaaatcacttagtacattagagctacaggttaagactagaaagtctgagttatgttttaggtatacatgatcgtctgagtggtcataaccttttcttttatcatgtctcgctaataaccccagctattgtctgttgtgttcagctgagatgcaaaaaagaaattaagcaaaaaagaaaaaggtgaagacttttcatgaattttgtgaacttgccaaaaggggaagggaaaaatctttgtgttacttcactcaaagaacataagtaactgcaattaacatatatgaaatttattactctgcttgcatttatgaaactaaccagttttttaaactttaattcttaaatttgtgggttggaaatgctgataatttattttgttattt

SEQ ID NO: 58306 - DNA, 618 bp, Homo sapiens
cccccctcgggagtcttctagaattaattaacgcggggatagagtgagatcttgtctcaaaaataaataaataaataaataaaagaaaacaaagaaactcagtgagatataggaatacactgataaaaatacaaagagatcaagaaaagaagtcatgatctgaatgagaaattcagcaaaggctagatatcataagaaagaagcaaacagaaatcctggaagtgaagaaatcaaaagaggagaataaaaatatagttcagagcttcaacaatagactagatgaagcagaaaaactaatttctgaattggaagacaggtcttttgaaataacaaagccacaattaagaaaagaaaaaagaagaataaagaaagcctacataatatattgggcaccataaaccaactaaatactcaaattttagttccagaaggagaagatatggccaaatgcatagaaaacctatttaacaaaatagcagttaaaaattcccaagtcttgcaagagatatagatactcagataaggaaggtcaaaaatctccaaactgattcaattccaaaaggtcttctccaaggcacattatagttaatcggtcaaaagtcacagacaaagagagaa

SEQ ID NO: 58307 - DNA, 591 bp, Homo sapiens
  misc_feature 28, 551: n = A,T,C or G
ccgggccctccctcggaagtcttctagnattaattaacgcgggctatcaatgaacaaatggaatttcaaataaaaacacattaccatttatattaacactccccaaaatgaaattcttaggtataaatctaacaaaacgtgtacaaaatctatataagaaaaactttaaaattctgttgaaataaatcaaagaacaaaataagtagagagatagtctatgttcatgaataggaggactctttattgttattgtcagtccttcccaacttgatctatagagtcaatgccattccaattaaaatcccaacaagttattatgtgaatattgacaaagtaattctaaagtttatgtggaaaagcaaaagacccagaatatctaatgtaatcctgaagaacaacaaaattggagtactgacactactctaagacttactataaaggtacagtaataaagacagtgtggtactgatgaaagaataaatagatcaatggaacaaaataggtagcccataaatatacctagataaatacagtcaactaatgtttgacanaagggcaaaggcaatacaatgaagaaaagatagttttttc

SEQ ID NO: 58308 - DNA, 560 bp, Homo sapiens
ccgggccccccctcggaagtcttctagaattaattaacgcgggcccattttatagatgagaaaactgaggcacaaacaggtcaagaaacttgctcggtagcacataccaagtaagtaaacagtgcactaggactggaacctgggctaactgcttgcagagtgcaagctttccccgctcaccttagtttcagtcttctgttatttatgctgtttcttcaacttttaatgttttgcctcctgtggtctccttgatactgttcctgtccacttcagacctcccctcttcagattagggttctcccttccttcatctgagggaacttggtaactacgaaaatgtcagatcagagaagcaaagtgaggaggggcagagtgctcactttacattccagagatgccagcatggcctaggaatgttgttgaactctggtgggaaagaggctcaaggccccgtcattcctcagagcctgcctgcagcgccaacctttgtctctctaatattaggatttcccagaatttcctcactttcctataagtctgtgctacccaaaaaaaaaaaa

SEQ ID NO: 58309 - DNA, 199 bp, Homo sapiens
  misc_feature 10: n = A,T,C or G
cccccctcgngaagtcttctagaattaattaacgcgggcactcattgtcttatttggaattatagtaattttttaaatcaagaagtataagttctttcactttgttccttttatgaattgttttgactatgctgggtcatttgcattaatttatagagtttcagatctggttgttaatttctgcaaaaaaaaaaaaaaa

SEQ ID NO: 58310 - DNA, 595 bp, Homo sapiens
cgggccccccctcggaagtcttctagaattaattaacgcggggtaaacagccttttcaacaaatggtgctggttctggagcaagtgaatatccaatctgagaatcaaaaataaaatcctaaatccccctccaaccgacaaactgatctcctcttggccaatgggatcccagagaaaccttaaaaatctgagttcctagccatgacagcaagggaggtcagacacacctcagtatgtcccttccttattaacctttaagcagaattctttcctcatgagtaagcagaaactagctctggaaaacaagaaatggttaatttgtttctttattaccttgagccaatcatttgaggctgtaactacactccccctccttctttgcagttttgatgggacagctcaccagttccacaattcatccccctcctaaaatgtcagtctctaagccagtttgtctgactcacagagggtgtgcagtaaacggtcttcgtggcttcagagggctgaaaactccacccttcgattatggtaaggctgccattttttaaagcatgtgaaccttgaagaggcataaatctcaattgcttctttctcct

SEQ ID NO: 58311 - DNA, 274 bp, Homo sapiens
cgggccccccctcggaagtcttctagaattaattaacgcggggccatcctgatcatcctacctggactcccaggcgcaagagggtggtgctcctgacacacctggctagtggcttatgtacttgcgactggacctctggtccctcattcgagttcctctacgacgcaacacaccagaaatctgacattgccacttcaaccaaaatcgatatcggcaactgtcgaaataccatcacatcttactgatgcttacttgctgaagaataccctgcgga

SEQ ID NO: 58312 - DNA, 556 bp, Homo sapiens
  misc_feature 30, 420, 456, 463, 489, 496, 537: n = A,T,C or G
accgggcccccccctcggaagtcttctagnattaattaacgcgggtccttctcaaaaagaaaaagacaaagattggcaaaacagattttaaaatatgactagctgtatgctgtctataagaaaaatgagttcaagtaaaatgatatgaaagtaaaagtatgaaaaaagttaggtcatgcaaacatcaatcaaaagaaaacaggaatggttctattaatatcagataaagtaggcttccaaacaaaaacaatgactaaagttagggaagaatattttataattattttaaaaaggtcagtccaccaagaagacatagaaatcttaaatgtatgcatcaagaaacagagctagaaaacatgcgaagcaaaaaatagaactgacgagagaaacagataaatgcatagttatagttaaagattntaatacccttttctcaacaattgatggaagacctanacagaanatcacccaagaaatagaagaactcantaacttncataaacaacacagtctaactcacattattagaacactgcntccaaaaaaaaaaaaaagc

SEQ ID NO: 58313 - DNA, 601 bp, Homo sapiens
  misc_feature 28, 500: n = A,T,C or G
cgggcccccccctcgaggtacttctagnattaattaacgcgggcctgttttgcagtggcagtggcaaccctgactgtgagccaaagcttattacaaatgtctatttctgctgtaagaatagaaattcctggagatgagaaatagaaaaagagggaagagtcaccaaattaaataaaaataaatatgacagtggattttaatctgtatcttagtagattaaatgccctgctgtatcttttaatttagcacttaaaatatgatgtgaagcctcttatgttccaatataacatatatttttgatggttatattaaaatgggttttacattttttctaaatataaatacacacattccatcatagtgatttaaaaaaaaatagaaatacaaaaactttaggaaaatgtcatccctctctaagataaccattgtgaaatttggagatatattttctgtgtgtgtgtgtgtgtgtgtgtgtgtgtgtgtgtgtgtgtgtgtgtgtnttatgagaatctaataatattttacatattaacaaaaccacttatcttgaaaatttttagttaatcttgagggtgagttatttggtgattgttaggaatgc

SEQ ID NO: 58314 - DNA, 164 bp, Homo sapiens
  misc_feature 28: n = A,T,C or G
cgggcccccccctcggaagtcttctagnattaattaacgcgggatagaaatccctgggaattgcgagataactcccctattttaaaatttatattcagatttgtttcgtttcataagacacatcaaacaggcctatacaaaaggtttaggaaaaaaaaaaaaaa

SEQ ID NO: 58315 - DNA, 424 bp, Homo sapiens
  misc_feature 24, 26, 37, 365: n = A,T,C or G
ctgggtaccgggcccccccctcgngngtacttctagnattaattaacgcgggggttttactctcttagagaggctaagaaatatagcactatctcctttgatgactacatttcaaagggatggctcccagctccccgagaaagaccttcctaggttgtaaaactggcaagaggctgggagaggatttatatctgaatgcggcagaggaagaatttacagtggaaagtttcctaaaataaatgctgtaagaaaagagaggtcagggacctataaccaggaagaaatctgtcttaagttgagtcaaggtgatagaaatgttaaggctatcttggtcaatagttattaagtctctgtgcaaaccctgngaattttcctcttaacagatggaagttggacagcaaagctaaagcagtgatcaaacatc

SEQ ID NO: 58316 - DNA, 499 bp, Homo sapiens
ccgggccccccctcgaaagtcttctagaattaattaacgcgggtatgccctgaaatcccagctgcttgggagactgaatcgcttgtctccgggaggctgaggttgcagtgagccgagatcgcaccactgcactctggcctgggcgacagagcaagactccatctcaaaaaacaaaaaaaaggtcttaaaatgtccaaatctttttaaaccaatatattatcatacttctccaaatgtagtataaggaaagttttaaaatgtaaaacaaaaattttcaacattaaagtatcaatatacaaagatgtttattatagcattctttgtaataggggaaagctagaaataaatgaaccacagatgaggtattggttaggtaaattatgttatatctttgtggtgggatgctaagcaactattataaattatgtttacaaagtgtttaataacgggtaaaattctaggtgaaaaaataaaacagaattagctcagtggtgctttg

SEQ ID NO: 58317 - DNA, 588 bp, Homo sapiens
  misc_feature 42: n = A,T,C or G
cccctcgaaagtcttctagaattaattaacgcgggggggggngaaaaagaaagaatattacacataagccagaagtcagcataaacaataaacatggttagttcaagagggaagaaatatcatttattcagttattcaatactttttaaaatccaagtgctacaaatgagaagcagtatttgaatgaggccaaagtggtccagtaacgtgacagacaaatgcatccaaacacaatgtgtaatggggacaaacaggttccactgtcaacctcccaaagatgttttgaaatagggcggaactttaagacaggaaactctcagaaaatttcattaaactccagtgttagggttttttggttttggcttttttgtgttttggtttctttttttttttttttccttaatctgagttcaaaaatgctttttgccaaagctagaatttattttaaaaatctttttaattcagtcacacactctaacaaagcttgctatgcaaatatacagagattcgacccactgctttctcttcccctttccacttcacatccacagattcctttcaaagagctataaggatgtgcacagatgc

SEQ ID NO: 58318 - DNA, 264 bp, Homo sapiens
cgggccccccctcggaagtcttctagaattaattaacgcggggatactcaccactatacgaaaggaggaggagaagaggaaagaaggaggaagaaggagaagaagaaagaagaaaggagaagaactaagaagaaaaaggagaggaagaagaagaaggaagaaggggaagaagaaggaggaggagaaggaagaagaaagaaggagaagaagaaagaaaagacgaagaaggagaggaggaagaagaagaagaaaaaaaaaaaaaaa

SEQ ID NO: 58319 - DNA, 596 bp, Homo sapiens
cccccctcggaggtacttctagaattaattaacgcgggctttttgtagagtatatcacattgaaaaaagtggatatgaaaccatataaacaggtagtatgatttttaactcagaactaaaattcagcattgaaaaagtttttgacagttttcacaaaaggcatagaaaaaaaaaagtcttggaagaaatggactaaaattgttggcaggggttgtgtttggaccacggctttagacaatgtttatttttatccctttccaagtattaagtgtcagtagatatttatttttttgagggaatcctgctctgttgcaaaaaagaaaagaaaaaagaaaatttttgaaaaatgccatttagcatttaaaaatgtgaaatactaagggatttatctaacaaaagtttttcaccctaaattgatctagattcaacataatcccaatcaaaatctcagcaggctttttgtagagtatatcacatgaaaaaagtggatatgaaaccatataaacaggtagtatgatttttaactcagaactaaaattcagcattgaaaaagtttttgacagttttcacaaaaggcatagaaaaaaaaaaagcgg

SEQ ID NO: 58320 - DNA, 398 bp, Homo sapiens
taattaacgccgggggaaaaaatatttaaaaaaaaaaaaaaaaaaaaaactaaaaaaaaaaaaaaaaaaaaaaaaaaaaaaaaaaaaaaaaaaaaaaaaaaaaaaaaaaaaaaaaaaaaaaaaaaaaaaaaaaaaatttttaaaaaaaaaaaaaaaccgggcccccccccggggggggcccccttttttccttttggggggtttttttccccccccccctgggccgtttttttacaccgtggggggggggaaaccccggggttcccccctttttttcccttgggccccccccccctttttcccgggggggtttttaaaaaaggggccccccccttttccccttcccaaagtggccccccccggggggggagggggaattttgcccccttttttttttt

SEQ ID NO: 58321 - DNA, 527 bp, Homo sapiens
  misc_feature 22, 38: n = A,T,C or G
ctgggttaccgggccccccccncggagatacttctagnaattaattaacgcgggggaaaaaaaaaaaaaaaaaaaaaaaaaaaaaaaaaaaaaaaaaaaaaaaaaaaaaaaaaaaaaaaaaaaaaaaaaaaaaaaaaaaaaaaaaaaaaaatttaaaaaaaaaaaaaaagcggcccccccccgggggggacccccatttccccttttggggattttttttcccccccttatttgccctttttttaaaaacttttggcttggaaaacccttgggtttcccaatttttttccttttgaaaaaattccctttttcgcagtttggtttattaaaaaaaggccccccccgattcccttttccaaaaatttgcccattttttttggaaattgaaatttaaaccctttatttttttttaaaatttcccttaaattttttttaaaaaaacttttttttttaccaattggcccaaattgggaaaattcttttttatttcaaaaatttaccccaaattgggtttattttttttcccg

SEQ ID NO: 58322 - DNA, 635 bp, Homo sapiens
  misc_feature 25, 38, 80: n = A,T,C or G
ctggggtaccgggcccccccctcgngggtacttctagnattaattaacgcggggtcctgctaaatttattttgtgtgctnatgtattggaaaccatataacgaaggtagtttaaaataagtatacattggctttgagtcatattttcagagataaattttcacagaaaaaggatgatgtaggaattgtggtgctgtgtgggtctcatatcatgtatgtacatatgtgtgcatctgtgtgtatgtgtgtgcacatgagagagagtgagggagtacccaagtgagagaatgtgtaaaacaaacaaatcagttgctcaaataacctgcttgaaaaggcttgttctaattctaagcagtattcctaaaacatgtagtttcctgatacttgaataatatatgatagcaattcacaattataaagctctttcacacgcattacctttcacttagtgtttaaatttgtagaaatttctggattttaaaggccacattttctaaaggaagctattgtgttccctgggcggtgtagacacagaactgggtgattgcacaattggacacagaaaattttttttctttaaattataggccagagaaacatgtctaaattgatgttttgaaactttctctatggctt

SEQ ID NO: 58323 - DNA, 397 bp, Homo sapiens
  misc_feature 12, 25: n = A,T,C or G
gccccccctcgngaatacttctagnattaattaacgcggggcagtggatccctgtggatggaggtctcagctggaagtctgagctcttttctttgacacctatactccaaacttgctgccggctgaaggctgtctggacttctgatgccctgaggtggaagtccacctgaggaatgtgtacagaagtctgtgttcctgtgatcgtgtgtgtatgtgagacagggagcaaaagttctctgcatgtgtgtacagatgattggagagtgtgtgcggtcttgggcttggcccttctggggagtgtgaagagttgaaataaaagagacggaagtttttggaaaaaaaaaaaaaaaaaaaaaaaaaaaaaaaaaaaaaaaaaaaaaaaaaaaaaaaaaaaaaa

SEQ ID NO: 58324 - DNA, 530 bp, Homo sapiens
cgggccccccctcgaaatacttctagaattaattaaccgggaggtggaggtcgcagtgagctgagacagtgccactgcagtccagcttcggcaacagagtgagactccatctcaaaataaataaataaaagaaaaataaaattctaaaatgaatgcagtaagatctctctgtgtgtgtctccatgtgtgtatacacacacgtgtgcctagatatgtttaggagtgttttatacctatgtacatatattatgttgcgtattgtgtatacagccagaaattccttgaggaattctattcagattggtttagataagtgagtgcttacataaattgttaaaatatataggaatcaacccaaatgcctttttaattcacataatttaagtaaatctttgataaataagctggttttaaatttattgatgaaataaaaataggaacatcttcagaactgttagcatacatttttgcctggttttactagttagaatttgtttctgctaaatgtttaagggtgtcatgattgacac

SEQ ID NO: 58325 - DNA, 578 bp, Homo sapiens
ccgggccccccctcggaagtcttctagaattaattaacgcggggcagcagagtgcaggtgcatgtggactcagagccacagcatgagagccctcaaccccaaccaggtccctgtggctgtaacattggctccatggcccttgggtatgctaaaaaaaaaaaccttccttgggtcacagacagttccagcctgtggccttctaacagagaccatcctcaggacctgcttgcagacattggggtggtggtctgcccgggtgtgctgctctaacctcccataggcttttggagttggccgtgcccttctcaaaaggactctccaactcctgacctcaggtgatctgcccgcttcagcctctcgaagtgctgggaatacaggtgtgagccaccacacccggcccagatattttaaaaacagaaatgacttgatgactttggagatgtgtttgtaattcacagcctccttctatgtgtgcattgtgtttgtgctgattccagtgagcctctcgctcctgcagacagaggtgaacctccatgcagcagctcagcgtgtcaccagctctgggtccctggcacgcg

SEQ ID NO: 58326 - DNA, 297 bp, Homo sapiens
  misc_feature 88, 124, 125, 126, 127, 128, 129, 130, 137, 138, 139, 140,141, 142, 143, 144, 145, 146, 147, 213, 230: n = A,T,C or G
ccctcggagtcttctagaataattacgcgggcgggcggcggacatggggccatgtaccgggtcggagatatgttactttgaattcctnccaagccaacccatacctaataagaaggatagaagnnnnnnnaaaactnnnnnnnnnnncaaaccaagaactgcaagtggcaacgtggaagcaaaagtagtatgcttttatagacgacgttgggnatattttccaacacacnttataatgctcgcagataagcatgctaaagaaattgaggaagaatctgaaacaacagtttgaggctg

SEQ ID NO: 58327 - DNA, 372 bp, Homo sapiens
  misc_feature 26, 37: n = A,T,C or G
ctggggtacccgggccccccctcgangatcttctagnattaattaacgcgggcgggtctataactcaactttgacgtccttaaaagatctaaaatatgccatattcttcagatgccatggtcaaaataaccagtgatctccaatctattttgcctgtttcaaaaaaaaaaagattcttatcgaacttatgcaaataactatacctgtcataaattaagaacacttggaaatactttcatgttgctggagaaatcatggtagtatagaaatatgcttcagattttgctcacaggagggtactttaccaaattatttaaagctgtagatatcttacaagaaaaaaaaaggttggctggactccaaaaaaaaaaa

SEQ ID NO: 58328 - DNA, 478 bp, Homo sapiens
  misc_feature 24, 26, 37, 54: n = A,T,C or G
ctgggtaccgggcccccccctcgngngtacttctagnattaattaacgcggggnaaaaaaaaaaaaggggaaaaaaaaaaaaaaaaaaaaaaaaaaaaaaaaaaaaaaaaaaaaaaaaaaaaaaaaaaaaaaaaaaaaaaaaaaaaaaaaaaaaggggccccccccggggggggcccccattttcccctttaaaaagggggtccccccccccggggggccccccttttcccctttggggggggggtaaccccccccccttcccccctttttttccctgggggggggggggaatcccccgggtggccccatttttaaaggggccggccccttccccttttccccagggggggccttccggaaggggccccgccctttgcccccttcaaattttggccccccccgggggggaatttggattttccccctttttttttttccaaaaggcgcggttgggttttttccctttccccttttttt

SEQ ID NO: 58329 - DNA, 241 bp, Homo sapiens
  misc_feature 26: n = A,T,C or G
ggcccccccgtcggaatacttctagnattaattaacgcggggcccctcagtttatacatttgattattgtaccaagcagagtacctttgaaattttttttcatttaaaaaatatggatcttggctcaggcctgtaatcccagcaaatttgtaggccaaggcaaggggatcacaaggtgaagagatgaagaccatcctggccaatacagtgaaaggctgtcactactaaaaaaaaaaaaaaa

SEQ ID NO: 58330 - DNA, 163 bp, Homo sapiens
  misc_feature 17, 44, 54: n = A,T,C or G
ccgggccccccctcggnagtcttctagaattaattaacgcgggnattccatggngaaaaaaaaaatcctgtcttgttcataaattgacaatgtcaataaattgaaatatggttcactgttaaaaaaaaaaaaaaaaaaaaaaaaaaaggttaaaaaaaaaaaa

SEQ ID NO: 58331 - DNA, 608 bp, Homo sapiens
  misc_feature 23, 541, 584: n = A,T,C or G
ccccccctcggggtacttctagnattaattaacgcgggggtagatgaaccttgaaaacattatactatgtaaacaaagtcagacacaaatggtcattaaatatgttaaatttccagaataggtaaatttaatctcagccctgcacctcagatgcaattttaatggagcgcctgctggctgcagataaaatcgtatgtatcaacaaatataataaaacccaaacattcctgaatccataagtcacttaattcttttcatctttttggaagccagtaaatcaactattttcaatgtgctaagcaaaaggaaagaatcaagcatgcatcctgactttccctcacaaactcaacctgaagtatacaaacagttgatatgggaatatttatcttttctgtagaaatgaggtctcactatgttccccactctaggctcaaattcctggcctcaagtgatcctcaaaaactaaagcacaaaaattaatctatgacccagcaattatattcctaggtttatattcaaaagaaggaaaacaagaactcanatctttgtgcaggaatgttggtatagttctattcataactaanaggaagaaacaatccaaatgccat

SEQ ID NO: 58332 - DNA, 324 bp, Homo sapiens
  misc_feature 28: n = A,T,C or G
ccgggccccccctcggaagtcttctagnattaattaacgcgggttccctgctttcttcattccatcctctctaccccagttacattgtgtaatataattttcatagagctcagaccctctataatatagctaaatttataacacagttgaaatagttaaaagagaaaataagaattagaggaaaagatctggctgggcacagtgtctcatgcctgtaatcccagcactttgggaggccaaggtgggaggatcacttcaggccaggagtttgagaccagcctgggcaacattgagagaccctgtctctacaaaaaaaaaaaaaaa

SEQ ID NO: 58333 - DNA, 230 bp, Homo sapiens
  misc_feature 32: n = A,T,C or G
gtaccgggcccccccctcgaaatacttctagnattaattaacgcggggtggggagcgagtcactgcctcctctgagcagagattcagagtaggatcacatgaataggggaaaaaagagagtctatttttgtctaataataaagaatttctataaactttaaaaaaaaaaaaaaaaaaaaaaaaaaaaaaaaaaaaaaaaaaaaaaaaaaaaaaaggaaaaaaaaaaaaaa

SEQ ID NO: 58334 - DNA, 606 bp, Homo sapiens
  misc_feature 18, 31, 67, 562: n = A,T,C or G
taccgggcccccccctcnaaatacttctagnattaattaacgccgggtgtacattaaaaatatacantaagaaaatgaacattacaaacaatatggatagctacaaagttagtattataagcacaaaatactgaatgaatactgaatacttattactcacctcttttcatatgacaaatatactgaattctcttgattgtacatttctattcccttctgaagtttattaacttcagttgtaagttcacttattttacttctattagaaaagaaataagaatgtcagcaatacttttaatccagaaaactctagttaagcaaaatttaaactttccattaatacgtaataataatataaatagttttgtgaaattcactaaaagaatgcagaaagtttaggtggcttatttcattaagaatgaggtatattctggctgggtgcggtgggtcaagcctgtaatcccaacactttgggaggccgaggcaggcgcatcacgtgaggtcaggagctcaagacaagcctggccaacatggtgaaaccccatctctattcaaaatacanaaattagctgggcatggtggcacacgcctgtagtcccagctact

SEQ ID NO: 58335 - DNA, 598 bp, Homo sapiens
  misc_feature 19, 32: n = A,T,C or G
taccgggcccccccctcgngaatacttctagnattaattaacgcggggccacacgtaagttgctcattttataagaatactgtgcatatgtatgagtatgtgtatgtacactaagatttccacttagctagactgtcacagactaagtctgtagttaaagaagacagaaggataaagctagggccaaaacaaaatgggaattgcaaagtctgtgcaataaagttgcaaaagcaggacgtatctgttccatcacaagcttcatataaccattaaattactttttgtctccaaaagtgtgcctcctcagaattttatttgaagagaacagtacagttgtggtctttgcttctgcatttcaatattttgcttgaaacaactgcaaacacacaactatacacacacacacagacacacacacacacacatatatatacatatctgaatttttttaaaacaagttttactttaatttcaacagctttaatttattcattaaaagtaaaaaatgttgctgagtcatagtgaatgaacgtttacataagcttgggaagataaattgcaattcatatgttgggcacaataaatcaaatttgcacac

SEQ ID NO: 58336 - DNA, 577 bp, Homo sapiens
ccgggccccccctcggaagtcttctagaattaattaacgcgggcctctaccctcctgaactagtcatctcctaaaggccccacttcctaacactgtaataacacagtgaggattatatttaaagatatgaattttggagggacacattcatatcatagtagaggtcaccaaagaaaagtgaaactaatatattgaggagaattaatcttccgtgggagaatttgggtatgaattagtgatagttatatcaaaataaatcaaataataaataggcaattcatggctacagagaaagcaaaagagttctgtttctgaaagactacatagctcatgagggaactctagctagttataataatgtaaatattaaataccgattgatgaaaaaattatgaaaaaactctttcagggtattgggggagacatgtattagagagtcaatattagagagaaaatcttcatattccaaagcataataataaatcaaaattataaaatcaagaaattgcatgttatttaagccggcataagtatgttatttagactaagtaggtaattagccaaaaaaaaaaaaaag

SEQ ID NO: 58337 - DNA, 590 bp, Homo sapiens
  misc_feature 28: n = A,T,C or G
cgggcccccccctcgaaagtcttctagnattaattaaacgcgggcagcacttgtattgttggccttaacattttagccattctggtagatatactgtggtttttcatggtagtttcaaattgcatttccctgatcaccaatgatgctatttttaaatatgattattgaacattagtataggttttgctgcagtgtatgtttctgtctacttcttaattggattatttgtcttctaataattgatttgaaagtgttctttattgatggttatgaattttttgttagatatatggattgtatatgattttctgtattctgcagattgccttctaaccatgactttagaaggcctaaatttttaaattttaaggaaatacaattcacaaatttttatatgtgttatgcttttactttttcatttgcagaattatttctctccacaatattgcaaatattttctcctatatttgcatctggaagttttctaattatatcttttatcttaggtctataatccatttcaaggtgttttctttttgcctgcaattccagcactttgggaggccaaagcgggaggctcacttaagcct

SEQ ID NO: 58338 - DNA, 517 bp, Homo sapiens
tctagaattaattaacgcgggggctgaataccagagaggatgatcctatattgacagttccagaggtctgcagaggggtccctttggctgaatactgatctatgcatgtataagaggaaactattaataacaggccggggaaagaaacataagaaagcagtaggccaatttctggagctgacataggactgagaatgttttgtttcctaccagtcaggagtagaatgaaaatgtaatatgtggggcatatggtagaggcttcagaagggtttcacttcagtagctgtgctaaattaaatgctatatcaaaggctgctttgcccttgccttaacactgcttaaaattgagcctcaaaaggatcagactaattccaagtaacttaatgcatgccaaaacaaagtccaacataatttaaaggaacacaacaaaatccagcaagcaagaatgtaaaatttattacaatgccttgcttacaatacaggtctttaaagcttgccaaaaaaaaaaaaaaagcgg

SEQ ID NO: 58339 - DNA, 419 bp, Homo sapiens
  misc_feature 38: n = A,T,C or G
ctggggtaccgggcccccccctcggaaatacttctagnattaattaacgcggggagttcataaatttaaacctatgtttggcaattaatattttagtattttatcttatttgtaaatggtctagatactcaatgaatattcacaatttaacttaacaaaaaaactctaagggtatatgttaccaaagagatttgggaaactgtttttcagtagacatattataaaaaatagttattgtttagaagtttatttataaacttatcccacttacattacttgattgtttttaacaattacatttggattattcatgaaaatttcacaagacagacaaatctcaagttattttctagccataattctcaagtattttcctgttaactatttttatccacatgtgttttcattgtaagcaaaca

SEQ ID NO: 58340 - DNA, 578 bp, Homo sapiens
  misc_feature 17, 28, 62, 68: n = A,T,C or G
cgggcccccccctcggnagtcttctagnattaattaacgcgggagaggaatcgtaggcattngaaaanatctagaaaaagtctttaaattacctgtcttaaatgtgctgcaaagataaataacatcaaaaggaaaaacatttcagaagaatagtgtctcatcaaatagaaaatattaatagagatagagattataaactgaagccaaactctaaagttgaaaattaagataactaaaataaaaaattcaccacaaaggttcaacaaaagatttaagtagacgaaagacacaaccagcaagcttgaggtcacttcaattcgtattatcccaactagcagaaataaaaaataatgaataaagatgaacagagcctaagataacaatgggatactataaaatgtgccattacaagcattatgaaaactcccgaaagaagggagaaagataaaatggggcagaaagaacatctgaagaaataatggctaaaaagttcccaagcatgatgaaatacgtgaatctacacattccaaaatctcattgaattcatagtataaactcaaagaactctacaccaagac

SEQ ID NO: 58341 - DNA, 496 bp, Homo sapiens
  misc_feature 41: n = A,T,C or G
aagactggggtaccgggcccccccctcggggatcttctagnattaattaacgcgggccatagggtgttctctgtctggtttctccccagttgaatctttcatttttgtcattctcctaaaacagaactttccagcttaccctttcttgtctagtatctctaaagcctatagccctggggccactagggagtaagtatgggcagagaatcatttgatgaactttttgaaatacctgcacacacatgcttccacccccactgagaagtgtgtgtgtgtgtgtgtgtgtgtgtgtgcgtgtgtttaaaagcttcccaaccagctccggcctggccaacatggtgaaactctgtctctactaaaaatacaaaaattggctgggcatggtgactcatgcctgtaatcccagcctttgggaggctgagatcacgaggtcaggagatcgagaccatcctggctaacgtggtgaaaccctgtctctactaaaaaaaaaaaaaaa

SEQ ID NO: 58342 - DNA, 597 bp, Homo sapiens
  misc_feature 22: n = A,T,C or G
cccccctcgaaagtcttctagnattaattaacgcgggagtagctatacattttttttcttttttcttttcttttttttttttttttaccacaatcatgactatataaggagtagctatacttacgataagagactttgtatcaaacacagtagggatgaaatcaggaagaggatacaaaaattgtaaatatatatgcacccaatatcagagcacccagatatgtaaggcaaatattattagatctaaaggggaagacaatacaataatacaataatacttgtggacttcaacaccctactttcagcaatggacagatcatatacatagaaaatcaacaaagaaacaccaagtttaaactgactttagaccaaatggacttaaaagacactaacagatcttttcatccaacagctacagaatacatattttttttcataagcacatgcaatattttcaaggagaggccacatgttaaaccacaaaacaaatcacaaaaattaaaagaattaaaatcacatcaagtacctttctgaccacaatgaaataaacctagaaatcaataacaagaggaacttttaaagcagcacaaataaatg

SEQ ID NO: 58343 - DNA, 147 bp, Homo sapiens
  misc_feature 22: n = A,T,C or G
attaattaacgcggggtgacangaaaaaaaaaaaaaaaaaaaaaaaaaaaaaaaaaaaaaaaaaaaaaagctgcacgccaaaaaagaggggcctgcaatcgcggggtaagctccatttgggcctacactgactcggtttacgcgcgc

SEQ ID NO: 58344 - DNA, 324 bp, Homo sapiens
  misc_feature 25, 38: n = A,T,C or G
ctggggtaccgggcccccccctcgngaatacttctagnattaattaacgcgggcactggtgggtgttaagtatcctcgttttcctatctgagcttcctcaattcctggagccaaggaggagaatcaaagtgcaataaatcagaacaggtactctttctgcaatgggatttatcaattctttatccccaagcctgcaacttgaccacaaaaatcaatctcaagggtagcatattatcaggcctggattccctctggcccttaatctcatttctatagtaataaaaaccatatggctattgtataaaacctaaaaaaaaaaaaaaa

SEQ ID NO: 58345 - DNA, 602 bp, Homo sapiens
  misc_feature 28, 151: n = A,T,C or G
cgggcccccccctcgaaatacttctagnattaattaacgcgggggttcaaggcatcttctgacattctataaacctactttaaggggagtttttaaacgaaatgttattcctttttttttttgttcttcaaaggggctaagtatgtacaanaaaagtaaccatctccttaactggaatattctaatacactccctttcgtaagtgccatgtgaattatctaatcatcccaagttatccattgatttctgactgccactcctttatttaaaggacatggttttgtcaatgaacaccactggctaatacaactcttcatttaaggggtaaagtctaactactaaaaccccaatttggctgctgctgtgcacatactgtgctatgggattaaaaaaactactgcctttctttgtcttaaagaatttttaaaaaattagtcatgagacttattcatctttccagggaacatactgattggtcttaaaagactagacagttaagtaaaacgtggctggaacatctatttttctacaaaactggaaaaatgaacctggttctagaagaatgtacaccaaaataaaacatgtgaagcagtaaaaaaaaa

SEQ ID NO: 58346 - DNA, 377 bp, Homo sapiens
  misc_feature 29: n = A,T,C or G
cgggcccccccctcgtgcgtacttctagnattaattaacgcggggggaaaaaaaaaaaaaaaaaaaaaaaaaaaaaaaaaaaaaaaaaaaaaaaaaaaaaaaaaaaaaaaaaaaaaaaaaaaaaaaaaaaaaaaaaacatgacctaaacaaactggggggcgtacgtttcgattctctgactgtttttttcctgaacatgcttggccccccccccccggggggctccccctccccccccctgcgtgttttttttccccccccccccgtttcgcctttttttctcccggcgcgctgggcccccccttcggctcccccctttgcctcgccggggggcaggccctttttggggtgggggggttttttcaatgggcccccc

SEQ ID NO: 58347 - DNA, 405 bp, Homo sapiens
cgggcccccccctcggggtacttctagaattaattaacgcgggggaaacctggaaaaaaaaaaaaaaaaaaaagaaaaagaaaaaaaaaaaaaaaaaaaaaaaaaaaaaaaaaaaaaaaaaaaaaaaaaaaaaaaaaaaaaaaaaaaaaaaggggggctccctttggggcccctcttttttggctttttttttggcccccctggttcgcccttttttttcggggggcccggctggattgccctggttcccccccccgtgttcctgccgggtttccccccctctcggcccgctttttttgccccggccccctcccgttcggccctcctgggcaggggtttttgggggggggagggggaagcttgtttgcggggttaatttttgggaaaccccctggttttttttcc

SEQ ID NO: 58348 - DNA, 464 bp, Homo sapiens
cccccctcgagagtcttctagaattaattaaaatgctttagttaatatactcggttttctacaaccaggggtcagcaaactactggctatgttcacagtctgcttttacaaacaaggttgtattggaacacatctgtgcccattcatttgtatatcatctctggctggcttcacactgcaatggtagggttgaatacttgcaataaagaccatgtaacctgcaaagctgacagtatctattctcaagccctttacagaaaaaggttaaagcacttttaaagcttaaagctgatcattgatttgaagcttaaatcagaagagaagttattaaacaataatagaattatgttgagatgtagtaaagactaagaaacaaatatttattacattaagtcccaaaacaaatgtgggtaaaattattagatatttaagttttgtagaacctaagtaatcattccccctat

SEQ ID NO: 58349 - DNA, 557 bp, Homo sapiens
cccccctcggaaatacttctagaattaattaacgcgggagaacaggtcataaaacaaatctcaacaaatttcaaagttatacagattgcattctctaataacagttgaactaagttagaaattagtaacaaaaatttactgtaaaaacctttatttttgcagtcttttaaagttacttgcaaataacttgttagtcaaaaaggaaaacataatggaaattataaaatactaagcaatactgaaaatagtgtatatcaaaacttgtggaatatcactaaaatagttcttaaatgaaatgtgtagtcttttacattgaaaagggcaaaagctacaaatcaatgagctaagcatttaactcaacaagttagataataacaaacccaaagaaagtttagggaaagaaagaatgaaaataagagtagataatgatgaaatggaaaatagaaataaacagaatcaataaagccaagagttgttcctttaaaagcctaatgaaaatagatgaaaccgacaagatttgctaaaaagagaaaaatttaaacaaaaaaaaaaaaaaa

SEQ ID NO: 58350 - DNA, 590 bp, Homo sapiens
  misc_feature 44: n = A,T,C or G
ccgggccccccctcggaagtcttctagaattaattaacgcgggnaaattcaacagatatatatcatttaaaaaagaaccaaatgaattctaagctaagattcaatgaataaaataaaaaatacaattgagagttctgacaatagaatggactgagccaaaggaaaaaaaaaaaaatccctgaacttgaagacaggtcttttgaaataatataggcagacagaaaaaaaaaaaagaagaagaaagaaagaatagaaagtttacagggtttatgagccatcactaagcaaacaaatatttgcattacaagcattccagaagcagaagaaaagggaaaagttatattaaaaaaacatatttaatgaaacattccaagtcttgggagaaagatggacatccagatctaggaagctcaaagaaccccaaatacattagattcaaacaggtcctctccaaggcacattatgtcaaattatcaaaagtcaaagataaatacagaattctaaaaacagcaagagagaagtgttgggtcatatgtaagggaatctctataagactaacagtgaatttctcagcagaaactttatgggca

SEQ ID NO: 58351 - DNA, 358 bp, Homo sapiens
  misc_feature 45: n = A,T,C or G
cccccctcgagagtcttctagaatttaattaacgcggggatgagnaacctacacacctcttttcaattatgcactcaggaacttcacattggtagcctgaaacaagccatggtgggactatttacaccatggaaatcggcaaacacaacaaacccaggctgttttcttctttcccagagagccgattgttagcatttaccagcacaccaccgaacactactgagattctcacacaaaaaaaacttcaggggaagaatctttccaaaggtcctctatctcagaaaaaacaaaaaaagccccacaaaaacaaaaaaacaaaatatttcaacacccaacatctgattaaaaaaaaaaaaaa

SEQ ID NO: 58352 - DNA, 561 bp, Homo sapiens
  misc_feature 20, 25: n = A,T,C or G
ggccccccctcgaagtactntctanaattaattaacgcgggtattccctttcctaactgtgggctggacttatttattcaattttaatgagtagaccacagaagcagctatgggaactcacttccaaggttatgttataaaagaagagtgacttccatcttaagatgtctttatctgtccttcttgaatcacttgccttggtgaatgccaacttccatggcatgaggtgtcactgtgcagagacccacccacctgccaaggaaacagggcctgtaagaagcatgtgaataagcttggaggaagatacctccatacctacatttgagtcttcagataaaactatagttccagatgacatctttgctgcaacctcataagagatcttgaccagagacactcagctaagcctcattctgcttcccgacctacagaatctgtgagatagaaaatgtttgcgttattaaattgcaagttttacagtgatccgttacaaagtaatagaaaacttacatagtttagttaaaagaatgagaatagttgagagttgagctcatttaaaaa

SEQ ID NO: 58353 - DNA, 507 bp, Homo sapiens
  misc_feature 11, 13, 24: n = A,T,C or G
gccccccctcnangatcttctagnattaattaacgcggggagggtaggggagagaaaagattgtctaaatcatgtttatatattttcattcacttaacacctttgtcagaaacaacaacaaaaaaaccaaaacaaagtaaaaacacttgcctcttagaatttttttaatcatgaaacaaatggtaaaaggcaaactaacttctgaaatgcgtcttaattatatattttctactttagtgcaattacaatcatgtaagtatatgtagtatataaattgcttgactagtgtttttcttgtagagggcatgtcactgtggaataataaagagtatatctgggccaggcacggtggctcacgcctgcaatcccagcactttgagaagccaaggcaggtggatcacttgaagtcaggagttcaaaaccagcccggccaacacggtgaaaccctgtctctactaaaaatacacaaaaattagccagagcgagactctgtctcaaaaaaaaaaa

SEQ ID NO: 58354 - DNA, 548 bp, Homo sapiens
  misc_feature 16: n = A,T,C or G
ccgggccccccctcgnaaatacttctagaattaattaacgcggggggaaattagaagaaaaaacatacttttagaagaaaaaagaaaatttaaacctgaaagtaggaagcagaagaaaaaagacaagctaggaaacaaaaagctaagggcaaaatgtacaaacttagaagaaaattggaagatagaaacaagatagaaaatgaaaatattgtcaagagtttcagatagaaaatgaaaaacaagctaagacaagtattggagaagtatagaagatagaaaaatataaagccaaaaattggataaaatagcactgaaaaaatgaggaaattattggtaaccaatttattttaaaagcccatcaatttaatttctggtggtgcagaagttagaagatagaaacaagatagaaaatgaaaatattgtcaagagtttcagatagaaaatgaaaaacaagctaagacaagtattggagaagtatagaagatagaaaaatataaagccaaaaattggataaaatagcactgaaaaaatgaggaaaaaaaaaaaaa

SEQ ID NO: 58355 - DNA, 420 bp, Homo sapiens
  misc_feature 9, 26: n = A,T,C or G
acttctagnattaattaacgcggggnaaaaaaaaaaaaaaaaaaaaaggggaaaaaaaaaaaaaaaaaggaaaaaaaaaaaaaaaaaaaaaaaaaaaaaaaaaaaaaaaaaaaaaaaaaaaaaaaaaaaaaaaaaaaaaaaaaaaaaaaaaaaaaaaaaaaaaaaaaaaaaaaaaaaaaaaacaaaaaaatattttttttaaaaaaaaaaaaccttcgccccccccccccgggggggccccccccccccccttttgggggggtttttcccccccccccctgggccctttttttcacccgggggggggggaaaccccccccccccccccctttttgttcgttgggccccccccccttttttccgtgggtgttttttaaaagagggcccccccccatcccctcttccaatatggtccccccc

SEQ ID NO: 58356 - DNA, 457 bp, Homo sapiens
  misc_feature 13: n = A,T,C or G
aacgcgggggggnaaagtctacttaatggaaaaaaaaatcaaatgaggtgtatttttctgaccagtaagaaattaaattagaaaaatcaacagcagaaatatccttgcaaaacccgaaaatacttgcaaactaagcaacacatttccaataacccctgggtcagaaagaaataaaaaagcaaacttagaaattatattcagctaaatgaaaatgaaagcataacatatctaaatgtatgagatacagctaatgcacttttttttttttttttgagatagagttttgctctgtcacccaggccggagtacagcggcgcgatcccggctcactgcacaccagcctgggcatcagagcaagactccatctaaaaaaaaaaaaaagtctaaaataagagcaaatcaatcccaaggtaaggaaaagaaaaagaaataataaagatcagaatggaaatcaatg

SEQ ID NO: 58357 - DNA, 586 bp, Homo sapiens
  misc_feature 36: n = A,T,C or G
ctgggtaccgggcccccccctcggggatcttctagnattaattaacgcgggtgtgtgtgaagaactctggtttctatagtagctaatatatattatttaaaatatatttttcatcaaaacactaagagacatgtaagaaacaggaaagtatgggctctacacaggaaataaagccagcaatagagattgtagctgagaaagccttgatatttgtattactataaaaatactttagctattaaaaatatgttcaaacactaaaggaaaatatgtctaaaggatcagagaaaactgtgatagcaattattttaccaaacagcaaataataataaaaatgtaaattatcttttgttttaaaagacctaaagagaaatcctgaagttaaaatttacaataatttaaatgaaaatgtattagaggggctcaacaacatattacaaacggcagaaaaaataaacaacaaatctgaacacagggcacttaaaactttctagtctgagaatccaaaagggaaaaaaaatatataaacaaagccttataaacaccaccaagcataacaacataggcataatttctaagaaaaaaa

SEQ ID NO: 58358 - DNA, 474 bp, Homo sapiens
acttctagaattaattaacgcgggggaaatgagagttgggaatggaagagagaagggaaagtggctcaagagagtcacaagcacctcttcggcaaagcccacctccctctctcgcttgattccccggccatccttatcaaagaccttccaggtgaacaggcagccatcctcagcagcagtcagcaggaactgatcatcaaagaatctcgctctgttgcccaggctggagtgtagtggtgcgatctcggctcactgaaacctccgcctcccaggttcaagcgattctcctgcctcagtctcccgagtagctgggactacaggcaacaaaattccctacggcagcacccaaaggcttgaaattagccattccaagtgtgtccaaaaaactaaaggaaaccatgattaaacaagtaaaggtagaaatgatatgcctcaaatagagaagaataaaaggatcccctcaatatagggata

SEQ ID NO: 58359 - DNA, 348 bp, Homo sapiens
cgggcccccccctcgaaagtcttctagaattaattaacgcgggtccacatggcttcttgtaagttatgtgtctcagaatgtcacttccactatattttattggtcaagcaagtcactgaagtcagtccaggttcaaggggagggttgttagatgtcacctcttgaagggaaatggtaagttcatgtcaaaggaattattatcatagttatctttggaatacataatttgcctgaggcctgttagttccataagtgttgaatcagaactttgaacttaacaaaacaatgaaaaataccattagaaaaaaaatattctaataaacaaaattataattccacttttgatac

SEQ ID NO: 58360 - DNA, 554 bp, Homo sapiens
ccgggccccccctcggaagtcttctagaattaattaacgcgggccagctatttttgtattggaatctctctttctctttagctctaataatatttgctttatatatctaggtgctcaagtgttagatgtatatatttaaaattattatatctgctgctgagttggcccttttatcattacataatgaccttctctgttgcttcttatagtttctttcctgaaatgtgttttctctgataaaaatgtaactactcctgctgttttttgggttttgtttgcatggaatatcttttctcatgcctttattttcagtctatgtgtgtctttataggtgaagtatgtttcttgtaggcagtagatcactgggctttgtttcctaattcattcgtccactccatgtattttttaaactgaggattaaaggaatgcaaaggtaactactaaaaaattcagtccatttcatcaaaccagggcaggaaattaaaagttagattaggaaatgatcactaatctaccacgagttagaaaagaaattcaaagcatgttaagaaaga

SEQ ID NO: 58361 - DNA, 503 bp, Homo sapiens
  misc_feature 28: n = A,T,C or G
cgggcccccccctcggggtacttctagnattaattaacgcggggccgtactgatcatcctcactggactcccgagggcaagagggtggtgctcctgacacacctggctagtggcttattacttgcgactggacctctggtcctcattcgagatcctctacgacgaacacaccagaaatttgacattgccactttaactcatactcgatatcgtcgatgtcgaaataccataaacatcttactgattcttacttgctgaagaataccctgcggaagcccactcaccaagaacgtgagatcttggacacaagataaagacaagtatgatattacagaccatcgcaagattgatcataacgctgtggactcacaaagtttaccatattatcaaagctcttcactcagctaacacggctacctgcaatctgtgtttgctctgaccattggaatttatccttacaacttggggtactaaatgtcttatgaacctagctgaatagctga

SEQ ID NO: 58362 - DNA, 451 bp, Homo sapiens
cccccctcgaaaagtcttctagaaattaattaacccgggggaaggggctgccatgaaaaccatccatctgtggaaatgacagcggggaaggtttttatgtgcctttttgtttttgtaaaaaaggaacacccggaaagactgaaagaatacattttatatctggatttttacaaataaagatggctattataatggaaaaaaaaaaaaaaaaaaaaaaaaaaaaaaaaaaaaaaaaaaaaaaaaaaaaaaaaaaaaaaaaaaaaaaaaaaaaaaaaaaaaaaaaaaaaaaaaaaaaaaaaaaaaaaggggggccccccccgggggggaccccaattcccccttaaaggaaggtttttaccccccccccaggggccgttttttaaaaagggggaaagggaaaaacccgggggttacccaaattaaatcccttggaaaaaatcccccttttccc

SEQ ID NO: 58363 - DNA, 531 bp, Homo sapiens
  misc_feature 13: n = A,T,C or G
ccgggcccccccntcgaggtacttctagaattaattaacgcggggggagccaacaacatctttaaattactgggataggaaaaatattttccaccataaattctatactcagcaaaaatatctttcaaaagacaaaaaggaaacaaaatgctttcagaaataaatgagtagaaagcctcatcaccagcagacacatacactaaaaatgttaaaaggagtcttttggacagaaggaaaataatgtcacatgcaaatataagtctagacagaggaatcagtggcctaaaaatgactactacatggggaagtataaactttttagcatttaaatctctttacaagataattgattgttaataaaaataatagtatacataataacatgcgtaagtaaaatatataaagtctcagacaggagaaatgaaaacattttgttaaggttcttataccacatgtgaagtagtaaatattatctttaggtcaaatgtgataagttaaatcttaaagcagccactaaaaaaaaaaaaaaaa

SEQ ID NO: 58364 - DNA, 365 bp, Homo sapiens
  misc_feature 26: n = A,T,C or G
gggccccccctcggaagtcttctagnattaattaacgcggggatgatccattaagtaaacaataaaagtgtccatttgaaacctgtgaaaaaaaaaaaaaaaaaaaaaaaaaaaaaaaaaaaaaaaaaaaaaaaaaaaaaaaaaaaaaaaaaaaaaaaaaaaagcggccgcccccgggggggaactccaaattccccctctcccgcggggggtgaccccccctccctgcccgtggttttacaattccccgcctggaaaacccctggttttacccaccttaatcgggtaaaacctggtccccctttaactaattggcttaatagcaaaaaggccttccccgatcggctttacaaacaaagggcccc

SEQ ID NO: 58365 - DNA, 579 bp, Homo sapiens
attaattaacgcgggccccattcttcatgatgcgattattatgtattgcatgcctgtattaaaacatctcatgtaccccatgcctactaaacacccacaaaaattaaaattacttttttaattgataaggaatgctacatagaatattattataacaagtcatttattgagttcttgttatatgctagacagtgaagtaaatgctttacattaacaatgattaagcttttaaatcacatcaaaatatttttattttgtctataaggaaattcagtctttattcatataaagatcagttattttgcattgccaccaacagtgtaaaagcattcctgtattgccacaaccttgccagcatttgttgttttttgacttcttaataattgccattctgactagggttagatggtatctcattgtggttttgatttacatctcgctaacgatcagtgttgttgagctttttttttcatatatttcttggccacgtgaattgcttaatacctaggtgattggttgataggtgcagcaaaccactatggtgcatgtttacctatgtaacaaacctgcacatcctgc

SEQ ID NO: 58366 - DNA, 482 bp, Homo sapiens
  misc_feature 9: n = A,T,C or G
acttctagnattaattaacgcggggcccagccaaattcacgttgttttaagccattaaatttgtagctaatttgttataacagcaataggaaactaaatgtagacattttagatttgagaggcctattagatgtcgaagtaaagatgctgaataggcagtctagagttcagaagagagggcaggactagagaaataaaagcacaatctgtttgaatcatggaccctcttctccacatcacctttaacactgcatccaagaaagcactcatgcacatttacaatattttttatataatttcaagatgttcaagaattccctatattcatagaactcccagaacattatatataatcacgaagcagcctattctaaccccagtaagattgctgcctccctacggaggaagaaactgaatatcatttcacttcaaaaaacttaaaaaccccttttccacttctacttatcaaaaaaaaaaaaaaa

SEQ ID NO: 58367 - DNA, 551 bp, Homo sapiens
  misc_feature 35: n = A,T,C or G
tgggtaccggcgccccccctcggggtacttctagnattaattaacgcgggatatctgcaattcaccatgttaactagcatattgtaaataaaaaaaggaagatgctttccaagttaagagctgtaaagtaattcccaagttgttaagagctgtgaagtaattgagactaagaggtttgatgtactaaaaaaagttacttcattactttactgttgcttctatatgatgtaaactttaaaaattaaggctcaaattttagaaatacacagaggacaaacatacactctaaaacatgtttatttcagtctaaacaaatgttttgtttatggatattagtgtttttgagaaatcactcagaaaatgttacttcatggccttgcaatgcttgatgttagtttagcacatacaagtgcacttttatacccattgtttaggaggttttatttttaaaattttcttttggataatctcaaaacaataaaggcatttagtgagtacaaatttggaaatcccattttatttttatatctattttcattggttatcttatt

SEQ ID NO: 58368 - DNA, 378 bp, Homo sapiens
ggtaccgggccccccctcggagtacttctagaattaattaacgcgggcccacaaaaacaacatgcaaacgcttatctcaaaaatatcagacattatttttatttttgccaattcacttgagaaaaaaaatgcctagtatttcatggtattttaattcacatttctgtaattactaatgaatgtaaaatatataaaatatatatgtatgtagatatatatctatacaatgtgtgtgtatacacatacacactttattttactgtttttatcctttgctctatcgtttttattggagtacctgtctcttttcttattgacttgagagaacttttccataaagttattaacccttttgtaatgggaaaaaaaaaaaaaaaa

SEQ ID NO: 58369 - DNA, 567 bp, Homo sapiens
cgggccccccctcgaaagtcttctagaattaattaacgcgggggtcaatgctatagggctcatgggttgcaggggaggacgacagacctcaggcccttgcctaagtctccccatctcataagctggtcaaagtgtccctgcctgctgactcaaggcccagacatttatccattcctcccccaacctctccatttcttcacctacttgttcagtcagaaattcaaccaatattaaatgcctcttctctacacacatatgcaacacatgccaactctcaaggaatgcaatttagtggaggagaaaaagcaagtaaatatgcagtaacaatgcaaacatgtgccactacagggataggtaccaagtgctaaggaaacctgcagggatgaacaaccagcccagcttcggagggcagagaaaccagcccagcttcggatggcagagaaagcttcctgaaaaaggtagctacaagaacaaagagcagcaggccatgccatcaggtgggagacagtggtgaggaatgccacagtgggtggaacagcatgtgagaggcaggaagagcaaatgtag

SEQ ID NO: 58370 - DNA, 566 bp, Homo sapiens
ccgggccccccctcgaaagtcttctagaattaattaacgcggggtttcatttaaaatatttaagctaagcctaaaaattgaaatcagttaagaatttggagagtttatcttaaatggaaatggtgtattcttttcaaagaattttgtaaccatctttacagtttctttgcttggaaaacttgggttgttaactaccagttaacaatggcattactttccaaaacgttatctaatgggcccaatgtgtacctcaagataaacacagtatgttatgtctaaaaatttccttgtctgttgatttaaatggttctgaaatgtctgtaataaagaaattttcaaagttgcttttcttgcagttgttcctcagtagtcagacctagtgcatagttttctaaggacttgtttcccatcctcacttaggagtagggaatttggagggagtcccgatactgcaagcccattctgtattaataagagatggaagactgtggctattgtgcatagtcagaagatgcgggtaactaggtaacttgatggcatacagagaatccagggcctgtgtggtc

SEQ ID NO: 58371 - DNA, 383 bp, Homo sapiens
  misc_feature 12, 24, 37: n = A,T,C or G
ctgggtaccggngccccccctcgngggtacttctagnattaattaacgcgggctgtcctaatcagtcagcaaccatcgacatcaagacaagaccctctacaaacaaaaagatatgactgactgaaggctgggataattgttagcatttttaagctatattttaaattaaaagacatacgcctttaatgtaatgttactgcacaattaatagactatattaaagtgtaaacacagctttctttttcctcccaacttttattttatgtgtgggggtacatgtgcaggtttgttatatgattaaattgcatgctgtggtggtctggtgtacagattatttaatcacccagaaaataagcacagattccaaacaatcctcattgtca

SEQ ID NO: 58372 - DNA, 631 bp, Homo sapiens
  misc_feature 37: n = A,T,C or G
ctgggtaccgggcccccccctcggaaatacttctagnattaattaacgcgggggagagagagagagagagacctgtcctatagccatacttagtgtgtaaaagccaaagagctcaatttctgctcatgatacttaataaaacagacggaacatgaaccaataattcagtgggttcagatctgcaccaagtgcctgttggatgcaggattctactgtctccaataatatgtctcagatggcctagtttttttttgttgttttgttttgttttgttttgagacaggaattaaaaccaaggccaggtgtggtggctcatgcctgtaatctcagatctttgggaggccgaggtgggaggactgcctgaggacaagagttttcagaccagcctgggcagcatggtgagaccttgttcctattttttaaaaaaagagaagaaattaaaactatggtgagattccaccatacacctaccagaatacctaaataatgataaatatgacaatactaagtgctggtgggaatgcaaggcaactggaactctcataaaaatggtagagaatagagaactacatacacataaaacattaaaaaacgtgtaaatctgagtaagtcccatgtacagtaccaatgt

SEQ ID NO: 58373 - DNA, 490 bp, Homo sapiens
cgggcccccccctcggagtacttctagaattaattaacgcggggcttaagcattccaaatccccaaatccaaaatctttcagctccaatgagcatttcctttgtgggtcctgatagtactcaaaaagtttcagattttggatttggggtttttagatttgggatgctctacctatataaccctgaaaccaaaaatagcaagtgtagttcaatagaacgtgagcatagagtaagtgcacttatgaacttagattaaatgttttaattgttaagaaataaaatctgggattatataaaaataaaaaataaattatgaccaagtagagttactccagaaatatataagtggttcaaaattaaataatttaaaaatcaacttactctattaagagatagaagaataaagaggaagtgctcttctcaatagatgctgtaaactcgttttatttatttttttacatttactttttattggtgggtttcttttttta

SEQ ID NO: 58374 - DNA, 268 bp, Homo sapiens
  misc_feature 44: n = A,T,C or G
ttctagaattaattaactgatctgaaagttatattgataagcanactctctaactaaaaccaatttttgagtgcattaaaaaataccaactttctcatcaaaaacctacaagtatcatgtaaaatgacatggcatgaagacaatgaagaaaactgtagcaatcacatagaaaaaaaggagagggggctgtgatgaatacacagaagacacatataagacaaacaaaactaaagataattatgaaataaaggaaacagagtttctcttt

SEQ ID NO: 58375 - DNA, 581 bp, Homo sapiens
ccgggccccccctcggaagtcttctagaattaattaacgcggggccccatgccatcccacctatccttgcttcctatttcactcaagggacagtttgacagggaagcaggaaagcagaagatctcttttctcatcaggatctttcccaactcataaatgtccagaagaaaacagaatatattttcctgattagttatactcattcttttctatatttgcatcttcccccagttaagaatgaaaagcaagacagggcaaacgtttacctagtttaccttggtgcttcctacagcagaattaagataaaacatgccataaaactgatggaatcataaggaaatggaaatcataatgaaatgaacgttgactttgaaaccctgggagagcattacaatgaaaagattgtttaatgaggcatttagaggcgaggaaaatgaccaccttcctttcccctgtccccctccccaccaagggccctgctccagtaactggttgctcagctgcctctaaggatgggtgttgggcttcggattcctcaggtggatatacaaggtgtagcctctcagaaaaaaaaaaaaaaa

SEQ ID NO: 58376 - DNA, 547 bp, Homo sapiens
ccgggccccccctcgaaagtcttctagaattaattaacgcggggagggttaagacaaacagagttgactgctaagataatagttatggggctttttgttgtttttaaagtggtcatggtgatggttatgattatgctaaaaaccatttgagttgtacaatttaagtgggtcaacagcttggtgtgtaaattatatttcaataaatgtttttaaaaaaataaaccagaaagttaaattataaaaaagtactcagcagaataaaagggaaaccatgctataaatatgaagagatgtgaaaaccaaatacactgtggtttcttaaaaatttgcttaagtgataaccctatatttatatcccttactcattctacagtctttcccacctttatttaaagacccccttatcataattggtttggtttgactcaataacaagtctaagcaagataaagctacagtggaataaatggtaaatgacctgggaacttccccaaaaagagaaacagaaaataaaattaaacctgtcttggacaaaaaaaaaaaaaaa

SEQ ID NO: 58377 - DNA, 635 bp, Homo sapiens
  misc_feature 34: n = A,T,C or G
gggtaccgggcccccccctcggaagtcttctagnaattaattaacgcgggggagtgaaagaaaaaaaaactctaccactgtaggggaaggaaacagtgttggacccagggtcttataccaaagacattagagatcttactaatgtctctaataccactgaggcaagagcagagaaactcttttccagataacaccgacaaagataaaaattgcagtctggcctagaggagcaagattactgatagagtcccactcatgaggccaaggcacataagccaaacgctgagaactgatcaggaaaattcagaaacaccttcccacatgccaactaccaatctaagcacaaagtaacacgagagaaatttgaagccaatggcgcacttaaggtaccctctgcaacaacaaaacagaaactcagcttaactcctgagtacactgactcaactccctaccctaaaagtccacgaatgcaatgttccaggtataaatattatttactcagtctttactaccctattcacaatatccagcattcagtaaaatattgcaagacacacaaaaaaaggaataaattacaacctcaagaggcaaagcattcaacagaccagaaatcaagatgaattaaaaaaaaaatt

SEQ ID NO: 58378 - DNA, 447 bp, Homo sapiens
  misc_feature 36: n = A,T,C or G
tgggtaccgggcccccccctcggaaatacttctagnattaattaacgcggggtgtgtactttcagggcattcactcttgattactccacattagacggtcttgaacaaattattaattctctttgagcctcagtatcctcttcatcaaatacggataatgacagtaaacacttcatttggtttctgctgctactctgtctctgtagtttttcctctcaaaaaaaaaaaaaaaaaaaaaaggaatgctggtccaggctggggtgtgtactttcagggcattcactcttgattactccacattagacggtcttgaacaaattattaattctctttgagcctcagtatcctcttcatcaaatacggataatgacagtaaacacttcatttggtttctgctgctactctgtctctgtagtttttcctctcaaaaaaaaaaaaaaaaaaaaa

SEQ ID NO: 58379 - DNA, 461 bp, Homo sapiens
  misc_feature 451: n = A,T,C or G
ccgggcccccccctcgaaatacttctagaattaattaacgcgggtatctaaaaacatcataaatgaaaatgttaacaccaaaataaaagaaatgaattaaactcattgaaatataaaatgcaaattatggaacaatagattttaatcttgtttctcaacttcttcatgaaattgatatatcaatagatattaagcttgaagttgtaggttaaatatgtgttaatctggaattgcatacctagctaaaatatttttcaagattgtggaaaaatgtaaattaattcatacaagtaatataaagtctttaatgcaattattcacatctttaaaaagtataggctgggtgcgggggctcacgcctgtaatcccagcactttgggaggccgaggtgggcggatcacgaggtcagagttcgagaccagcctgcccatatggtgaaaccctgtctctnactaaaatac

SEQ ID NO: 58380 - DNA, 220 bp, Homo sapiens
ccgggccccccctcgaaagtcttctagaattaattaacgcgggcctatgaataataactctttcaaccaattgccaatcagaaaattttttaatctacctatgacccagaagcccctccttctagttgtcctgctcttccagatcaagtcaatgtaaatctcatatatatagattgatatattgatatattgattgacgcctcccaaaaaaaaaaaaaaa

SEQ ID NO: 58381 - DNA, 613 bp, Homo sapiens
  misc_feature 25, 38: n = A,T,C or G
actgggtacccgggccccccctcgngggtacttctagnattaattaacgcgggatggtgtcagaattcaaacataggggccaggtgcggtggctcacatgtgtaatcccagcactttgggaggccaaggcaggtggatcacgtgagatcaggagtttgagatcagcctggccaacatggtgaaaccccgtctctaccaaaaatacgaaaactagctgggtgtggtggcagatacgtgtaatcccagctacttgggaggctgaggcaagagggtcatttgaagctgggaggtggaggttgcagtgagccgagatcgcgccactacgctccagcctgggcaacagagtgagaccctgtctcaaaaaaaagactttaaacacaagcctgtctttgtcttcctattctcaaatactgaactctgtgggagaaaagcaaaaataacctttacttgccctcattgattcttatagaaggctggaatgaaaactatgtaggaaatcttcaaataaaagaatttaggccgggtgcggtggctcatgcccgtaatcccagcattttgggaggctgaggtgggtggatcacgtgaggtcaggagttctagaccagcctggccg

SEQ ID NO: 58382 - DNA, 588 bp, Homo sapiens
  misc_feature 24: n = A,T,C or G
gccccccctcggggtacttctagnattaattaacgcgggatcgctctcaacagacacacatatgtacacagataaaataaattaaaaatgtaaaaatctatagaatgtataaaatattataactatcaagttagtttagcaatattactgaatacgcaatgtagaaaaatagatgcatgtttatatcttagtaataaagaataagaaaagtgagaaaaatacataatatttaaatatctaaggtatctaaatatctaaatatcattatatctaaggataaatttttaaaatctgtaatacctatgcacttaaagctataaaacattacagaaataatgttagataaagaatatctaaataagtgaggagatatactctcttcatggatcactcaatatttttaagatgcctcttctctccaattgaatctctacatccagttgattgtagtcaaaatccctgcagactttactatagcagtagacaagctgattctaaaagtcatacagaaatgcaaaggatctagaatagctaacaacactttgaacaagaagaacatagtggaaggatggataggatctgatttca

SEQ ID NO: 58383 - DNA, 563 bp, Homo sapiens
attaattaacgcgggtattcactaatgataacctgacttcaaaaacctttaggcaaagagaagacacatttaattatatttatgtatacagatagagatatatagatatacatacaattatataaaataattaccaaaacatatccgatctgaatgatttcctccaagttaaaaatgtattgactttaaaataaacatgaaaatgaaccaggtaggaaaaaatagttactccagaaaagattaaaactttgtaccagttggtctattttaatgttctattttataaagtagtatttaaaacaagactcctttgtaatgagtcatcatttaattaacgcgggaatttgaatatttatagtatctatgctacaggattataaagcacctgtggtctggcactataggcaatggagtataatgcttaaaagaatagattctagtggtggcacctgtaatctcagcactttggaaggctgaggcagacagatcccttgaacctaggagtttgagatcagcctaggcaacacagtgagaccctgtatctacaaaaaaatatgaaaatt

SEQ ID NO: 58384 - DNA, 469 bp, Homo sapiens
  misc_feature 17, 44: n = A,T,C or G
cgggcccccccctcggngtacttctataattaattaacgcgggnggaaaaaaaaaaaaaaaaaaaaaaaaaaaaaaaaaaaaaaaaaaaaaaaaaaaaaaaaaaaaaaaaaaaaaaaaaaaaaaaaaaaaaaaaaggggccgccccacggggggggccttctttttccccttttagggcggggctctctccccccgcggggactgcccctttttttttttagggggtttttgtcccccccctccctttccctatttttttcccccttgtgggggggaaacctttttgcgtttccctttttttccgttgggcccccccccccttttttttccttgggtggcttcaccaagggggcccccccgaattttccttcccaaattttttccgccattttgggggaaattttttttttacccccttttttttttaaccattgggccgaattttttttgaccccttttttttttttt

SEQ ID NO: 58385 - DNA, 565 bp, Homo sapiens
acttctagaattaattaacgcgggcccttagatctccaaatttcaaagagcctgggatgaaatatgtacaggtctgtttgcattgctataaaggaatacatcagactaggtaatttataaagaggtttattttggcttatgcttctgcaggctgtataggaagtgtggtgtcagcaactgttttgggtgagggcctcaggaaacttacaatcatggcagaaggtaaaggaggaaccagcatattacatggtgggagggagcaagaaagagaggtgtcaggctcctttttaaacagccagctctgttgtgaactaatagagtgagaactaactcattaccatgaggacaggatcaaaccattcatgagggatctgcccccatgacccaaacacctcctattagtccctatctccaacattagggatcacatttccacagaagatttgcaggggacacacatccaaaccataacaaaatgataacatttactggaaaaaaattaggtgtatttccctcctctacaggtagattttattaatatgacctccctctaactaaaagcaaa

SEQ ID NO: 58386 - DNA, 199 bp, Homo sapiens
aactgggtacacgggccccccctcaaaatacttctagaaataattaacgcggggtgaatattttatactgtaagtgagcaatcagagtataatgtttatggagacaaaattaaaggctttcttatatgtttaaaaaaaaaaaaaaaaaaaaaaaaaaaaaaaaaaaaaaaaaaaaaaaaaagaaaaaaaaaaaaaaaaa

SEQ ID NO: 58387 - DNA, 476 bp, Homo sapiens
  misc_feature 17, 50, 386: n = A,T,C or G
ccgggtccccccctcgngaagtactttctagtaattaattaacgcggggnaaaaaaaaaaaaaaaaaaaaaaaaaaaaaaaagaaaaaaaaaaaaaaaaaaaaaaaaaaaaaaaaaaaaaaaaaaaaaaaaaaaaaaaaaaaaaaaaaaaaaaaaaaaaaaattttttaaaaaaaaaaaaccccccccccccccccccgggggttcccccctttttcttttttttgtgggtttcccccccccccccccgtttttttttttttttacagggggtgggccgggaaaacccccggctttttctcttttttggggtttgcccctttcccttttttggctggttttgtttattgaaaaagggccccccccttccccccttttacaattgtnaaacaggccggggggaataaaaaaaatttccttttttttttttttttccgcccaactcccgttttttttttggatatttttttttttttt

SEQ ID NO: 58388 - DNA, 597 bp, Homo sapiens
  misc_feature 28: n = A,T,C or G
cgggcccccccctcggggtacttctagnattaattaacgcggggaggtatgaaattacatataatacagtgcatccattttaagtgcacaattccacgagttttgacaaatatatactatacacctgtttaactccctgcatagtcaaaatagagaacctttccatcacttcaaaaattctcttgagctccttactggcatccctggtcccagacaataactgacctactgttagtcactatagcttagttttgcctattctaaagtttcatataacttgaatcaaacaggatggattctttgtgtctggtttcttttgctcagcatgcgttttcagattcatcaatgttttgtgtatcaagtacttatttttattgctgagttggttttccattatatagttatacccaatttgttttcagtttttggcaattatatataaagccactataaacattcatggacaggtttttggtgaatataatttttcatttctcttgggtaaatagggcgaagacattgggtcatatggcaagcatatatttaactttagccaacctgttttccaaagtgactgcaatattttgcgttaccact

SEQ ID NO: 58389 - DNA, 522 bp, Homo sapiens
cccccctcgggagtcttctagaattaattaacgcgggggatttcctttgatttcctttttgcctcacgatcccagacttgaagtggaggaagccagcaacccatattgtcagtgattccagaacaaaagagccccaaaaaaagtctattctctccagccaaaagaccaagaaagatgtagccaaataagacaagaattttagacgatacccactctactccatccaaacaccatagaaaacaactgtggccccatccctacccccattagcaaaagtcaagaagcctaaacttccactcagcagatagcataacaaggtatcccaacacacaatcccaaagggctggtgtcagagagggacaagcagagagctgagagcttcatctctgctggccagtaacagggaccttcccctccccatagtgtcagtggagaccatatggggagcctggacttccagccccttccaacactaatgaggcaccctttgccattcctgccagggtggacaaaaaaaaaaaa

SEQ ID NO: 58390 - DNA, 400 bp, Homo sapiens
  misc_feature 33, 50: n = A,T,C or G
gtaccgggcccccccctcggaaatacttctagnattaattaacgcggggnaagattactttgttaaaacaaagtggtcgtgtgatatgctaaatgttaattactgattttatatgtttaaatcacgccaaacaaattatgtctgtgccatccagggtctgttgttaatctttttctgagtacttggattgggataaagggcttgtactatgcactttttattaatgaataaatagaaaacgttagtaacaaaaaaaaaaaaaaaaaaaaaaaaaaaaaaaaaaaaaaaaaaaaaaaaaaaaaaaaaaaaaaaaaattaaaaaaaaaaaaaaaagcggccccccccgggggggacctccaattccccctatagggagtcgttttaccccccctccttggcc

SEQ ID NO: 58391 - DNA, 540 bp, Homo sapiens
  misc_feature 15, 28: n = A,T,C or G
cgggccccccctcgngaatacttctagnattaattaacgcggggctataaaaaaaaaaaaaaaaaaaaaaaaaaaaaaaaaaaaaaaaaaaaaaaaaaaaaaaaaaaaaaaaaaaaaaaaaaaaaaaaaaaaaaaaaaaaaaaaaaaaaaaaaggtaaaaataaaataaaaaattgtggggcccccctccgggggggtttttcttttttcccttttttggaatttttttttcccccccttttttgcctttttttttaaaattttgttttgggaaaacctttttttttcccatttttttactttttgaaaattttcctttttttccggtttggttttttagaaaagggcccccccctttttcttttttaaatttttggccctctttttttgggaatggtattttttcccctttttttttttttaatatcccgttttattttttttttaaaaaccttttttttttcccaatttgggtatttatggatattttttttttttttttaaatatatccccactgttgttttgttttttttttcttt

SEQ ID NO: 58392 - DNA, 595 bp, Homo sapiens
cccccctcgagagtcttctagaattaattaacgcggggatactacagacaccccttctcccaaatgaagttagcattacattagtgtgcaagtcagtcactggtagccagtgtcatgtccacaaagccagggtacagggtaaagaatctggaagtggagaccctttcttgcaagaaaaactcacttcgaccccctatgattccatctccaacctgaccaatcagcactccccacttcccaagcccctacctagcaaattatctttaaaaactctgatgcctgaatgctcagggagactgatttgagtaataataaaactctggtctcccgcacagccagctctgcatgaattactctttctccattgcaattcccctgtcttgataaatagactctgtctaggcagcgggcaaggtgaacccattggatggctacaaactaaagaatctcaggacaagcaaaagccattccaaaggtccttgggcaagtgtctaatttccttctgctgtcatccacaagcaaaactgtagtttaccaactatcaatgcaaacaagttttaaagctgtctcaaaaaaaaaaaaaaaagcggccgcc

SEQ ID NO: 58393 - DNA, 524 bp, Homo sapiens
  misc_feature 28: n = A,T,C or G
cgggcccccccctcggaagtcttctagnattaattaacgcggggtttcagtgttgaatctgtttctaaatattcattattacatggtacacaagtgacactccatatattccacacagacttttaccttgctgtattattatgaaaacaatacattaatttgatttttcagtaattagtaattttaggttgaagattatccaaaagaaacaagcttatcacaagggaccatcatcaatatgatccaaatctggttcaaacattcaaaacttcaaagataattcatctttcgctaatgcttgtggttctgttgttcccttgaaaaaaaataaaaacagttgccttctaataaacattgttgagttaaaaattaatctgagctataatctaaatcgattcagtctcttaccagaactgaaagaaaaaagttagaaatagtgtttttggttcatatgattatttaaaaattaaagtataaatcttcaataaaaaaaaaaagcaacaaaatggaaaaaaaaacaaaaa

SEQ ID NO: 58394 - DNA, 373 bp, Homo sapiens
  misc_feature 26, 42: n = A,T,C or G
gggccccccctcgaaagtcttctagnattaattaacgcgggnagtcacttaagggaatggaaaaaaaggtggtggaacataactcttcatgctttatatgtgcacagtaacttccttccagaaagcataatgtggaaacgggaaaaatacaaacttaagggttgagaatcctgacaaactctgtcttaatcagcagatcaaggttaacatcaatgattatacattctgttgatactgtgtatccttgaaaggatgtaatgaaaatgacactttatatctgttttcttcctctctgaaactcataaatctagtctaatcataagaaaaacatctgacaaattctaactgaggaatattctaaaaaaaaaaaaaa

SEQ ID NO: 58395 - DNA, 433 bp, Homo sapiens
aaaaaaaaaaaaaaaaaaaaaaaaaaaaaaaaaaaaaaaaaaaaaaaaaaaaaaaaaaaaattaaaaaaaaaaaaaaacccccccccccccccggttgaccccccattccccccttttttaattctttttcccccccccccctgcccccctttttccaccttcttccctgaaaaacccctccctttccccactttattccctttccaccccttccccttttccccacttgcctttttaccaaaaacccccccccctttcccccttcccaccatttcccccccctaattgccaattgaaatttttaccctttattttttttttaaattcccctttaatttttttttaatccccctctttttttacccattaccccaaattccccaaatccctttttaattcaaaaaattaccccgaattaggtttaattttttt

SEQ ID NO: 58396 - DNA, 413 bp, Homo sapiens
taattaacgcggggcaaaaaaaaaaaaaaaaaaaaaaaaaaaaaaaaaaaaaaaaaaaaaaaaaaaaaaaaaaaaaaaaaaaaaaaaaaaaaagaaaaaacaaaagttaaaacccaaatatacactttaagggggtccgttaccggggggggcccccccccccgcgtgggggttttttttttcccctccccggggggtttacccccccccccgtggccgttggtttaccctgtggggtgcgggaaaaccttgggttgccccctttttctttttttgcggccgctttttttttcaagggggggggtttttggattttgtccccccattgcccccttttatgggggttgggcctttgtggggggtgttttttttttaaccctttttttttttttttatcatcccccttttttttt

SEQ ID NO: 58397 - DNA, 505 bp, Homo sapiens
  misc_feature 24, 473: n = A,T,C or G
gccccccctcggaatacttctagnattaattaacgcgggctgcctaataatggtgcttctaactatgaccatatagttttgtgtaagtacacatttgaggtttcaagataattaaacataatcagttgcttcatcagtttttctttttccccacatgggttttggccagtattaatgctaatggctatttttcaatcagcttactgcttaagctacagctataaaacatttaattttgttacttttttctcaaagaaagtaagcttatttactttagattttggcttgtaagaaaactcgtggaagaattataagagatcctatattacctagccaaattaatggagtctacaggaaattagattaagtaaaaatgggggatttcaagcattgtctggaaatcaaaggcataaattcctagtcatgttagcaaacctagtgtattttttaaaatggtataatactattaattnagctagatttgtcattctacaatgtatatgta

SEQ ID NO: 58398 - DNA, 593 bp, Homo sapiens
cccccctcgagggtacttctagaattaattaacgcgggatatatgaatgtatatatatatacacatatatatgtcagagtttctctaggatataaacccaggaacaaaatttaaaaatcatagggtgtattggatcttacatcactgcagaccctctcagcattacctcttgttccagtcagagccttggttactatttttatgtagactttggtcagtttcataaagatggaagtgatagtatgtggcttcagaccagagcaagaattcactttctgctgtgggatttctcagacaatgttgtgtggattgttgtaggcattttgcttgttactcataaatgcactgtctagacacatcgagaagttagcatccatgaggctatgcttgaaaaatggaactcctagagctgatggatacatatttcccccgttgtttcacttcagtgaatggtcatatagtattccatcacctaacttaataatgtgttctagattttactctctctccctatagcacccatcctgtttcttattcttactccacaatacactcccaacttaaacacacagtctcttctttaggtgttgggg

SEQ ID NO: 58399 - DNA, 590 bp, Homo sapiens
  misc_feature 13, 26, 538: n = A,T,C or G
ggccccccctcgngaatacttctagnattaattaacgcgggccagtagggaaaacagtaatactttgtaggtacaatagtggcatatgaagatggcaacttagagaagataataatttttatattcgtgtgattaataattgtaaatcattatgtgatttattattaccaacagtagagcagaatcctttcctgagcactttccatctacttggctaatgccttagttctgtgctgtccaatgcaaagaccacgtgtggctgctgagcactggaaatgtggcttgttcagactcattcagactgaacttttcatataatttaatttaaatctaaagacatattcaatttatttattggaaatcttttgaatacgtttgaaacaagttaggtatatgaatctaactttttcaattatacattttataaaatctaaacacaggtcaaataaattttctgatgaaaatttagtgtccaaattggggatgtgctggaggtataaaatatacatgcaattttaaaggcagcacaaagacttangaaaaaatgtgaaaatatcttgttaataatttttatactgattacatgttga

SEQ ID NO: 58400 - DNA, 606 bp, Homo sapiens
  misc_feature 15, 28: n = A,T,C or G
cgggccccccctcgngaatacttctagnattaattaacgcgggggatttcagttttactatagctgtatttaatcttatattaattgggcacttatattaatttagtgcctgtataatgttggcactgaaatggttctttagtgtgttgtgagaaaatttcaatgaagtcatttatagaaaactgtttttctcaagggaatttccctttccccttttcagaagtcagaggaaaaaaaaactggaattagagtatagagttagagataaagcgaaacgatggcagaatatgctgagacatttgctcaggggttaaaagacagggagtttatagaactcccttttctgcttgtcataaggttatctgttccttcttttggacatctctctagaggtgttcccaagctttgtatcacagattcttttatcgtgggggtcctaaactttaaccatttaaaaataaaaaccaagggttaccaaacaccttaatagagacttctctatgaagttacaagaagtaaacaaccatatggaagaatttgatgtgttctttgaagtcactgcttgtaagagaagaccacgtgtaatttttgagttactgtatgact

SEQ ID NO: 58401 - DNA, 595 bp, Homo sapiens
ccccccctcggaagtcttctagaattaattaacgcgggcatgtaacattctccaggatagactatgtaatagagcccaaaacaagtctcagtaaaatttttaaaaagattgtgattgtacaaagcatgtgctctgaccacaatggaatttagagatctataagggaaagaaacctgagaaaacatcaaatatttggaaattaaacaacacacttctaaataacccatgagttgaagaaatcacaagggaaattaagttttactgaatgaaaacaaaaacacaacatcaaaatctatgggatatatctaaaatagtacttagaaataaatataactttgattcctatatcagaaaataataaaagacaaataaaaaatgtaggcttccaccttaaggaactagaaaacaaagagcaagctaagcccaagacaagcagaaggaataaaataataaatattagagtagaaaagcaatagataaaaaatttaaatccctaaaagttttttatttcaaaagatcaacaaaattgacaaacccttaactagactgaccaaggaaacaagagaaacattactaattaccaaaatcaagaatg

SEQ ID NO: 58402 - DNA, 380 bp, Homo sapiens
  misc_feature 23, 84, 175, 180, 182, 183, 185, 187, 188, 303, 304, 319,323, 324: n = A,T,C or G
ccccccctcgaaagtcttctagnattaattaacgcggggatttttaactgtaaaatctgctcaagtgttatgctaaaagggtgngagaaataatactttcagatagtttttttcaaaagaaagaaatgaaatatttaaaagagaaatttgttaatctcaccaaaagcctcttttntaaanannananntttgaaatgatactaatatgctgttttttataaagccatatatattcccttcaagtgctttagaaaatagagaaaatcatataaatttaacctcccaaaatcacccccaaatttnntaccatcccaagaanaacnncatttgttaaatatttttttcacaatttgatgtatactcttctagttttatctatg

SEQ ID NO: 58403 - DNA, 619 bp, Homo sapiens
  misc_feature 32: n = A,T,C or G
taccgggcccccccctcggaaatacttctagnattaattaacgcggggaagcatttgagtaacttatctgtgaaaggtccaaggagatgctctcctaccaaccctactaaatttgtttcctttctaggcctcactgaaccataagtgttttcatcaaaaaggagcagagtggcaggtccaaactatatacctgataactttaggattaaagggaaagatagtgtaccattgcctccctgcttttattgtcatttaaagtttcgtcttcatggtgagtgattctgtagccaagtttgtgaccacccaatgaactatatagctgctgtatgtcctgcagagctcatccagaatagaatgttcttgatcaaaatgagagtgctagaaagctcatgaggctacaaggctacaaagaaaagtatattccaatttgggatgttattaagataattaggcagcccactctactcccaagagaagaatgaccaatttaatctgttgtcaccaagcggtttacagcttaaggccttttctgtaaaaattaaaatgcactcaaagaataaaaaacagcaaggtcaaatcaaggttttatctagtgttaggaacatttagattactctct

SEQ ID NO: 58404 - DNA, 609 bp, Homo sapiens
cgggccccccccttcggggtacttctagaattaattaacgcggggccttttaaaaattctcttagccacgttgattgtacgggaaaagcctttttaaaacatcttttacgttgcttaaacctacagtttcgaaagcattccgaaggctaaagtgagaaataagcccaggctagggagaggagaaacgaagttcacgtcctagtctggcaccgggttggattgtcgctgggacggcagtcaggcatttggtgtggtcgcctaaggggtgggtccttcggcgggagctccgggaaaccccgtgggcctgcgcggcgttcttccttttcgatccgccatctgcggtggagccgccaccaaaatgcagattttcgtgaaaacccttacggggaagaccatcaccctcgaggttgaaccctcggatacgatagaaaatgtaaaggccaagatccaggataaggaaggaattcctcctgatcagcagagactgatctttgctggcaagcagctggaagatggacgtactttgtctgactacaatattcaaaaggagtctactcttcatcttgtgttgagacttcgtggtggtgctaagaaaaggaagaagaagtc

SEQ ID NO: 58405 - DNA, 537 bp, Homo sapiens
  misc_feature 25, 38, 513, 514, 515: n = A,T,C or G
ctggggtaccgggcccccccctcgngaatacttctagnattaattaacgcggggcaggggttctaaacaagagtagaagtgcgcaaagcctattcaaatttagactcagaacattcttttagagcattcattctgttggaccaaacaagtcacaaagttggcccagattcaagaaatggggaaacagactctatctcttggtgggaggaagttgcctccgagtcacactacaaagggtgaggatcctggaagaggtagagaagtggggccatttttataatccagccaccaaaccttttcccaaaatgggtggcacaaataagccttgtgtttcctcattagaagaaaactatttctatactttaccctaaatatttgtcctttatatactcaaaggtaatacattttcagcaatggaagcctgtaacagcaagtcccaaaaggaaaattgttatatgtatttttctaaaggggatttggcatatgcctcctaatgaccgccccccccccaannnaaaaaaaaaaaaaaaaggaaaa

SEQ ID NO: 58406 - DNA, 323 bp, Homo sapiens
  misc_feature 33, 86: n = A,T,C or G
cccccctcggaagtcttctagaattaattaacngcgggaatggaccacacatacaacagtggtccaataacattataaaggggctngaaaaattcctgtcacctagtgatgtcataaccatcctcacatgtttgtggtgctgctggtgtaaacaaacctactgtgctgccagtcatgtaaaagtatagcagatacgattatgtacagtacataatacctgataatgataataaacaaccatgttactggtttatgtatttactatcctatagtttttatcattattttagtgtgtgctcctatttattaaaaaaaaaaaaaaa

SEQ ID NO: 58407 - DNA, 261 bp, Homo sapiens
  misc_feature 10: n = A,T,C or G
cccccctcgngaatacttctagaattaattaacgcggggtccccacacttgtctcagctgcagatgtgtaaaagcggctgagatggtttcttctagaagtgagttaaaaaggactgtaaggggccgggtgcggtggctcatgcctgtaatcccagccctttgggaggccgaggcggacggatcacaaggtcaggagaatagagaccatcctggctaacacggtgaaaccgcatctctactaaaatacaaaaaaaaaaaaaa

SEQ ID NO: 58408 - DNA, 478 bp, Homo sapiens
  misc_feature 424, 433: n = A,T,C or G
ccccccctcggagtacttctagaattaattaacgcggggggccccaaatacagtggactggggcggcacgtgacctattgagacaccagctggggcagccaagggactgctgacatcacctctctcctaaccccgtgctgctcagcttgcagctccaaaagaaacccctttcaccggcttgaggagagggaatgaaagagtagggagaactttgtcttgtatcttagataccagcacagctactgcagaatagggcgctggtcagaaagatgagccccccgtttcaggccctagattccagatgatatttctagacacaccctggaccataagaaaacctgctgtctttaagggaaggacctatccccggaagcatttatcacctgctagcaaaagagcccttgtgccctcaataaacagcagncatacccangtactaagtcaagtgttttgggtgagcctctgatacttgctggct

SEQ ID NO: 58409 - DNA, 578 bp, Homo sapiens
  misc_feature 18, 31: n = A,T,C or G
accgggcccccccctcgngggtacttctagnattaattaacgcgggcttcagccatttaaaaaaaaaaatcactcctgatttatgtgagatctaattattcagtttgctcacatatgaatgcacctatgtttctatcaggtagatcccattttacatatgaagacatagacagaggttaaggtcctttctcaaggtcacaaaactagtcattgcaaaacagttcatatctcagagctccaaactccccatcctcccttagtccaccaggctatgctgcttctctgagctgaaagtagattacaataaaagattaccacaaaagttagattctcccactcaccacttcatggactgtctttacaagtacaatactaaaaaaaattgatttggtattcacctttggtatttttcattgcaatgaagcagcaaagaatgtgacttaaaaggcagagccttactcatagaccacaccaatgcatatgttttcagagtaatcatctacaaaaatcagcaggctattaggattctggctaagtaaaatgaatttgctttaaaaaaaaaaaaaaaaaaaaaaaaa

SEQ ID NO: 58410 - DNA, 458 bp, Homo sapiens
  misc_feature 20, 33: n = A,T,C or G
gtaccgggcccccccctcgngggtacttctagnattaattaacgcgggtcctctttgtactatctttgtaacttttctgtaaatctaaaaatatttcaaaatgaaagttcattttagaaaaagaagggagtattatgaataactttacaattttgacaaattaggtaaaatgaacaaattccttgaattacagaaagtgactcaagaagaaatagaaaaatggcactatttctattaaagaattttatatctgtaaaactttcccacaaagaaaaccctaggcccagagagcctccctggtgaattctatcatatatttaagaagaactaacacaatcttatcaccaactttttcaaaaaacagaagtaaaaggaagatgtctcatcttattttatgaggtcagctttaccccaacttgaaaaccagataaataatttacaaacaaaaaaaaaaaaaa

SEQ ID NO: 58411 - DNA, 458 bp, Homo sapiens
cccccctcgagagtcttctagaattaattaacgcgggggagggcctggccttggtccccactctgcgatgatttctgtgaaattttgctgtagcgatgacattgttttcagaatttccaagagttctgtctgttctgttttttattcagaatgaaatgaaatattttttttagttctgaaaaaaaaaaaaaaaaaaaaaaaaaaaaaaaaaaaaaaaaaaaaaaaaaaaaaaaaaaaaaaaaaaagcggccgccaccaaaaaaaaaactaaaattacccccgcccccccccgggggggaccccccctccccccccatagggattacaatcccccccccgcaaaacccctgttttaacaaaacttagatcgggaaaacccctgccctccccaaaccaaatggcttaaaaacaaaaaccccttccccaatcggccttaaaaacaaaaaggcccccccaat

SEQ ID NO: 58412 - DNA, 299 bp, Homo sapiens
ggcccccccgcggagagcttctgagattaattaacgcggggggaaaaaaaaaaaaaaaaaaaaaaaaaaaaaaaaaaaaaaaaaaaaaaaaaaaaaaaaaaaaaaaaaaaaaaaaaaaaaaaaaaaatagaagaaaaaaaaggaaaaaaaaaaaaagggggccccccccgcgggggaacccccaatcccccctttggggggttttttaacccccccccccggcccgacttttttacacctttggaccgggaaaacccttgcggtacccaaactaaagcccctgggagaaaatccccttt

SEQ ID NO: 58413 - DNA, 185 bp, Homo sapiens
  misc_feature 16, 29: n = A,T,C or G
cggggccccccctcgnaaatacttctagnattaattaacgcggggaaccgatatcagaaaaaatgccttcaagtgtactaatttattaataaacattaggtgtttgttaaaaaaaaaaaaaaaaaaaaaaaaaaaaaaaaaaaaaaaaaaaaaaaaaaaaaaaaaaaaaaaaaaaaaaaaaaaaa

SEQ ID NO: 58414 - DNA, 552 bp, Homo sapiens
  misc_feature 28: n = A,T,C or G
cgggcccccccctcggaagtcttctagnattaattaacgcgggtcacaaaatacatttttatctctttatatttacaaaagacctctgttggaataaaaacagaatacagaaggtgaacttacatcattctgtatatgaggaaatataacttttaattctttgatttgttacagtttcatatgtaaatttagtgagttttgtttgcatattgtaataataatcagactgaggaagaagtatggtgaagtgtttaagagcttgggttctggagtcagattccccagtttaaaatctttgctatgccacttcctagaacagtaactttggtctcgttttatcttgtgtaaaattggaatagtgatagagtattgtatagatcaagtgagttaacgcaagttaatacatgtgaagcacttagaacagttgccttcacatagtgagcactcaataaatacttgccattatgatcatataatgtctatattaaaatctattttagagtcttaagaatgaagaacaaaagtagcgtaatatagaaatattatgattta

SEQ ID NO: 58415 - DNA, 419 bp, Homo sapiens
ttaattaacgacgggggaggggaagcagagcccaaaatcatggctcattttactactggccaaactgtgaagcagaatatatcactacatgcagcaaataacaagtaagcagagaatcaaagacatcacaatgatatatccataaaaaaagtattatcatatttgtcctaaagacaactctagaaataattctatttatctagtaagaaaaggcatgaccatttactatatataaaaacataatctttcaaagaatgtcaaaaatgaaaccactatattatccaataaattctgtgaccggggagagaaaacctactaatctctaataaatggaacctccacatcagagatattagaggtgctgtttttctaaacccatttaatgtagctctttgagcttgcaacaggatctccatgac

SEQ ID NO: 58416 - DNA, 588 bp, Homo sapiens
cgggccccccctcggaagtcttctagaattaattaacgcgggggctagagcacgactctttacctctctcttggcctcaatttcctcacctgtaaaatagatgaggaagctgctcacttattattgtctcgttctgaaagcttggaaagctacatcgaagatgagctcttcattcagctttgatttgacctgtacccctggtgggggattgcactggcaacatttgggtctcagcaaaaaaccaagcacacacatctttccttccatttattgaaaaacatctttgtaagatccattcattgaaaaacataatccatttattgaaaaatatctttgtaagatcacctgctaaatatgaaaatctgacttgaatttgtactctttaaagctgcgtatctgctctagtgggcaggacctagggcttaaaggggaacttcctttctccatttctaagaactgggactctaaaatgagaagctggttgtctgaagtaaccctgcaggtgtggttggggaaggtctgttttcttggatgaaggaactaaactaagcatatcagagcactgtcttaaccagttttatttccctg

SEQ ID NO: 58417 - DNA, 437 bp, Homo sapiens
  misc_feature 11: n = A,T,C or G
aaaaaaaaaanaaaaaaaaaaaaaaaaaaaaaaaaaaaaaaaaaaaaaaaaaaaaaaaaaaaaaaaaaaaaaaaaaaaaaaaaaaaaaaaaaaaaaaaaaaaaaaaaacaaaaaaggaaaaaaaattaaacgggggaatataaaatttttgggccccccccccgggggggggcccccctccccccctttgggggggttttttccccccccccctgggggggttttttcccccggggggggggggaacccccggggttcccccctttttcccccttggggccccccccccttttgggggggggggtttttgggaaggggcccccccccggccccctttcccaattggggccccccctttgggggggggggattctggccccccttttttttgggaaaccccccccttttttttttgtaaaccccccttttttttcccc

SEQ ID NO: 58418 - DNA, 595 bp, Homo sapiens
  misc_feature 201: n = A,T,C or G
cccccctcgaaagtcttctagaattaattaacgcgggtctgtgatcatactggaattagagtagaataataggtacaggaaggctaggcacggtggctcatgcctgtaatcccagcactgtgggaggccgaggtggccagattgcttgagcccaagagtttgagaccagcctgggcaacatagggataccttgtcactacnaaaaaaatacaaaaaattagctgagtgtggtagtgcatgcctgtagtcccagccactcgggaggctgaggtgggaggatcacttgagcctgggagatcaaggctgcagtgagccgtgattgtgccactttaccccagcctaggtgacagagtgagaccctgtctgtctcaaaaaaaaaaaaaaaaaaaccttttgtgattcttaacccattgtgaccaaatggttcttaggtagggaatgtctatgtagtaagtctccttattaatgttttcaagcatgaataattagttctttccagtgtggttcttacagacatttgcagggttaccatgttttccttccttatgaacactcccatctttacactgaatttggagttggcaggtcttgctct

SEQ ID NO: 58419 - DNA, 623 bp, Homo sapiens
  misc_feature 30: n = A,T,C or G
accgggcccccccctcggggtacttctagnattaattaacgcgggctctgaccaagaattcaaaacagctgttttaaggaaactttgttatctctaagataacacagaaaagcaactcagatatttatcagagaaatttaacaaggaaattgaaataatgataagcagaaatcttgtaactaagaactacatttgctgaactaagaaactcttcaggggatctcaaccacagaataggtcaagcagagaagagaatcaatgagctcaaagactggctgttaaaaaataaacagaggagagaaaagaaaaaaagaatgaaaatgagagaaggccacttacaagatatagaaaattacctcaaagacaaaatctaaaaattattgatgttcaagagagagcagagcaggagcaagggtagaaagcttattcaaagaaataataagagaatactttccaaaacatgagaaagatataaatattcaggtacaggaaggccttagagcatcacattagtcaaataagactaatgaaggtatttactaatcaaactgtcaaagatcaagcataaagataaaactgtaatggcagcaagagaaaagaagcaagcagcatataaaggagct

SEQ ID NO: 58420 - DNA, 301 bp, Homo sapiens
  misc_feature 9: n = A,T,C or G
acttctagnattaattaacgcgggggaaaaaaaaaaaaaaaaaaaaaaaaaaaaaaaaaaaaaaaaaaaaaaaaaaaaaaaaaaaaaaaaaaaaaaaaaaaaaaaaaaaaaaaaaaaataaaaaaaaagggggccccccccgggggggacctcaatttccccctttaggaagtctttttaccccccttcattggccgttttttaaaaactttggaaattgggaaaaaccttgcctttcccaaatttattccctttgaaaaaattccccttttccccatttggcttattagaaaaaagcccc

SEQ ID NO: 58421 - DNA, 611 bp, Homo sapiens
cgggcccccccctcggaagtcttctagaattaattaaaattttcttaaggcaaaagcactgagctaatttttaagaattttaagttatatattaatatgagtagtgatttataattttctgttgaaatacataaattcgagaagccccacccctaccacttgccagtcttgagtccccacggctcctttgcctaggtctaaagtcactgcttgcacactcctgccttgcatatgccttgccatcgtgtgggcctcttggctggaagtgttcttgtcctcccgttaggtatcttttatgacgtgaatccttacctctaattattatctgtgtgtacatctcatcacctgcatctgactgtgtgccttgtgtatgtctcttagccctcacaattgcctgacatgccttacaaacgggtagaccaagtgttaaatgaacaaatatttaataagaacttaaaagctttttgactttatatatttttaaagccattgtgattaaacactatgtttgatgtggtgctaattctgtgctttatcaactgtgtgaattgtagtatttttaaagtaggaataattgagaaatattttgaagttaggttaagcatagcagt

SEQ ID NO: 58422 - DNA, 605 bp, Homo sapiens
cgggcccccccctcgaaatacttctagaattaattaacgcggggggcagatgttggatcactaagcaggttctctaattttcttaacttttctgccctgttcatctctctgattattttcttctactttttgggaaatttcctaaactgtatttccttttcttctactgaatgttgtattgcagcattcatgtttttacttttcaagaattctgtcttgttctgtgatttttctttttaaaatatcttgttcttatttccaggatttccctgatattattaaccacattttctttaaagttttcttctttttgctgcactgtttctgtacactttgggttcttccttcttctttttctttcagtttttttcttttatagtagacactttcctcaaatggcatgatccttggctgttcatcacattgaaagccaactgggaggctgggcaatgtggcccacttctgtaatcccagcactttgggatgccgaggcaggcggatcacttgaggtcaggagtttgaggccagcctgaccaatgtggtgaaaccctgtctctactaaaactacgaaaaatagctgggtgtggtggcaggcgcctgtaatc

SEQ ID NO: 58423 - DNA, 576 bp, Homo sapiens
  misc_feature 459: n = A,T,C or G
gccccccctcggggtacttctagaattaattaacgcggggagtgtctcatcttcctcctaacctcacaatattgggtaggctagggaataaaagcctctggctaagtggtcatttaaaaatccctcattatttgagtgccctaaaacatgtccttgtcactccttcccatggtcctttgtcctctgactccgttttagtgctccaacaaccaacaaccattttatttttagtcttaaaatgtatgttatgttcacagttattttattttattttattttattttattttatattttattttattttttgctttcactccgtgggcaactgtttaaggcaggacaatttgttgtgagaggtcccctgctgtgctgattctgggatgccagattcacattgctctgtgtccccagccagacctctctggttcactgttggctgtccctcagatgctcctgngttttctgcctttggtcagtcccaggtactccaggatttctggcatttgatgcgggtaccctcatggactaatactcagatagtttgggttgttgccatttggtattgttggctgcc

SEQ ID NO: 58424 - DNA, 475 bp, Homo sapiens
cgggccccccctcgaaagtcttctagaattaattaacgcgggcatatcaacagagaggcagaaaataaacctgaaatgacaggcaaagaaaggtcatgaaggatattacaggcccagtttggaaatttgaattctcttccaagtgcagtagaaaatcattgccaggctttgaaacaggtaagtgaccccaatgtatattttaagtatacagacagtccttaacttatgatggttcaacttacaatggttcaacttaggattttcaagtttacagttgtgcaaaagaaataaacatcccaaagaaactgtacattgagtacaatcattcttttttcactttcagtagcatattcaataaataacatgagatatttaacactttattgcataatgggctttgtgttagatgattttgcccagctgtaggctaatgtaagtgtttggagcatgtttaagtacactaggctaaactata

SEQ ID NO: 58425 - DNA, 538 bp, Homo sapiens
attaattaacgcggggtacacactggagtttgaagacttagaaaaaaaaatatgagatattccattataataattattatacaatgtacatgtatatcaaaatactacattgtataccctgaattatatataattgttacttgtcaattatatctgaataaagcgggtaataattttatattgatttcatgttgaaataatattttggatatgttgggttaaataaaatatatattaaaattaattttatgtttcttttaactttttaaaatgtatcttaaggctagtccaagtgccatcgtgtttacaactgattgatcacaagcaattgcaaatttctttgttccttctccactctcactgcttcatttgactagcctttaaaaaatgtggcttaaaagtgagtttaggctgggcgtggtggctctcgcctgtaatcccagcactttgggaggccgaggtaggtggatcacgaggtcagatcgagaccatcccggctaacacggtgaaaccccgtctctactaaaaaaaaaaaaaa

SEQ ID NO: 58426 - DNA, 578 bp, Homo sapiens
acttctagaattaattaacgcggggcaggtgatccgtccgcctcagcctctcaagtgctgggattacaggtgtgaaccactgcgcctggcctacatagaatgcatgaagaacaccactaaagtgcctttctttcttcaaagcaatattatttccaagtatattaatttgttagaaaactttcccatgggaaatattgtcagttacctgtactgtaacaacttatgttcggtattcaaaattttctacatggatataaaccactctcatgtgctctcagtaggaggcattagataaacatacacaacagttgggttcctttgtacaaatgtgggataagaaatactttcttgacatttttccatggccaagtattcccattaaagtaagaacaagaattgaagagatattttgtgtatagaaaaattttcatttaaaaaatattattggtaatcttgaaggcatagataatgggcatgtcataaaattatcaattataactggcattgaggggctgtccttccaaaactaaactgaaccttacctggttacagatgtagaactagatcactcctttttc

SEQ ID NO: 58427 - DNA, 451 bp, Homo sapiens
gggccccccctcggaagtcttctagaattaattaacgcgggtcctgtttcatcgccctcctcttactcagccccatatataaaatgcttaccttttatttactttaagtcttactgaatttccaagcctagtggtccactgaaattctgtgcatatggcgcattgcaaaggcaatctgcaagtggagtgtcaaggaagcacagcgtacatgtgccctgaatgtatctcctctgctcacgtgcatgttccattatcccattaaactccgcttagaaagcacagtttaaagcaaaagttgttaagaatgttcagataataacagcagagttaaaccagactcagcatctttctgagcatagggctctgtgtaactgcactggtcaaatgctcatcaagcctactctgatttgcaggatgaagtctgaagactgaagtttctccacaccctgca

SEQ ID NO: 58428 - DNA, 403 bp, Homo sapiens
  misc_feature 371: n = A,T,C or G
accgggcccccccctcggagtacttctagaattaattaacgcgggatattctgtgatataaaacacaacttaacaaatctaaagaaataaaaatcataccaggtctgctttcacatcacagtggaattaagttagaaatcattaaatgaaaaatagctggaaaatttcaaaatatttgaatattaaacaattacctctaaataaaatataggtcaaagaacaaatattaagaacaatgaaaatatttggaactaaatgggaatgaaaatacaacttaccaaaatatgtggaatgcagtaaatggagcacttaaaggaaaatatatggcattaaacatgtatattagaaaagaagggtgttctaaagtcagntatgtaagctttaatcttaaggaagtagaaaa

SEQ ID NO: 58429 - DNA, 376 bp, Homo sapiens
cgggccccccctcggaagtcttctagaattaattaacgcgggggaacttttgagatgatccctaacatactgtactacttgcttttacaatgtgttagcagaaaccagtgggttataatgtagaatgatgtgctttctgcccaagtggtaattcatcttggtttgctatgttaaaactgtaaatacaacagaacattaataaatatctcttgtgtagcaaaaaaaaaaaaaaaaaaaaaaaaaaaaaaaaaaaaaaaaaaaaaaaaaaaaaaaaaaaaaaaaaaaaaaaaaaaaaaaaaggaaaaaaaaaaaaaaggccggccccccccgggggggacctccatttccccctatagggagtctttttaccccccct

SEQ ID NO: 58430 - DNA, 311 bp, Homo sapiens
ccgggccccccctcggaagtcttctagaattaattaacgcgggcagcacatgaataaacagagaagcaaatattcttgtttgtctacttataaaaatataaaacagaggagggaaattatctttcaacatattgatgtcagtgggggacatgatggaaaaagagtgactggtacagaacattcaaggagaccagagaaagaaagagaacgaattcagaatttcataaactggggaattctttctaaggtcaggttctaaaatgtgagccattaaactcattacttggctgtaaacaaaaaaaaaaaaaaaa

SEQ ID NO: 58431 - DNA, 276 bp, Homo sapiens
gggccccccctcgaaagtcttctagaattaattaacgcgggagggaggtggagggagggaagggtttctctattaaaatgcattcgttgtgttttttaagatagtgtaacttgcttaaatttcttatgtgacattaacaaataaaaaagctcttttaaaaaaaaaaaaaaaaaaaaaaaaaaaaaaaaaaaaaaaaaaaaaaaaaaaaaaaaaaaggccgccacacgccgcggagctgcacccccccctacaacgattcgtattccccaccccccc

SEQ ID NO: 58432 - DNA, 596 bp, Homo sapiens
cgggccccccctcggaagtcttctagaattaattaacgcgggcaccacaatcaagatatggaacagttccatcaccacaaggatcccccaagttggcctttcaataaccacacccatctccttcccacaaccctccaccccagcaaccactaacctattctccacttctatcatttttttttcaaaagtatcatttacaaatggaatcacatcaagttcaaaagcttctgcaaagcaaacaatcaacaaagagacaacagaataggaaaacatatctgcaaactatacatacatctgacaagagattaataaccaaaatatttaaggagctcaagcaactcaacaggaaaaaaactaataatctgatttttttaaatggacaaaagatctcagtagacgtgtctcaaaagaagacatacaaaggacaaacaggtatatgaaaaggtgctcaacatcatgcattgttggagaaaagcaaatcaaaacttcaatgaggtatcatctcaccccagttaaaatggcttgtatccatccaaaagaaaggcaatgacaaatgctggcgaggatgtggagaaaagggacccctcataaactgc

SEQ ID NO: 58433 - DNA, 575 bp, Homo sapiens
gggccccccctcgaaatacttctagaattaattaacgcgggattgacttcaggaaatgatacacctctcacctctggggacatgtttttgagagtaaaagtaataagtaatgaaagtgacctgacttgaaaaaaaaaaaaaaaaaaaaaaaaaaaaaaaaaaaaaaaaaaaaaaaaaaaaaaaaaaaaaaaaaaaaaaaaaaaaaaaaaaaaaaaaaaaaaaaaaaaaaaaaaaaaaaaaaaaaagggggccccaaccggggggaaccccaaattcccccaaaaaaaaaggaaataaccccccccaatgggccggttttaaaaaacctggaaacggaaaaaacctgggggtaaccaaataaaatacctttaaaaaaaaaccccttttcccaagtgggggaaaaaaaaaaaaggccccaaccaaacccctttcaaaaaatgggcccacccaaaagggaaaagggaaatttaaacctaaaaatttttgtaaaaataccggtaaaattttggaaaaaaaacctatattttaaaaaaaaaacgcaaaaagcggaaaaatcctttaaaataaaaaaaaaa

SEQ ID NO: 58434 - DNA, 646 bp, Homo sapiens
cccccctcgaaagtcttctagaattaattaacgcggggggattgcttgagcccaggagtttaaggctgcagtgagctatgatcgtgccactgtactcccactgggggtgacaaagtgaaaacctgtctctgaaaaaaaaaaaaggaatcaaattaaaatttaagtttaaaattacaatttcactttgcttaaaaataaacaatctacagaaaaaaatgagtattcagtcaagtgctctgaaatatgtacaggttgagtatccctcatcgctcatctgaaaatgcttgggatcagaagtgtttcagatgtttttccaggttttggaatatttgcgttatacttactggttgggcatccctaatctgaaaatcaaaaatccaaaaggctccaatgagcatttcctttgagcatcatgttggtgctcaaaaattttcagattttggaacattttggattttccaattgggtgtgttcaacctgtaccacaattttatattgaggatacaatcataatgtaaaacttctgctattaagtggaattccacatggtacatgaaataattttttttgtagtccaacttattttttcacctgtacttttagtgtcatattcaagaaatcatttccaaatctaatctcatgaagc

SEQ ID NO: 58435 - DNA, 326 bp, Homo sapiens
cccccctcgaaagtcttctagaattaattaacgcggggaaatataaatacttccatcagtacaggaagttgtattggacagcaccgctttagatactgatactcaaggaacaatctactcaaagctcaaaggcctcactttacaacatagggctggctactttcagatgccattatattgtgctatatatatatataaatatatataaaaataaagataagtctcaagttatctcaagttatctccactaaatgtttataaatgtgtaagttctgaaaaggtgtactttatcaaaatttcataaagtactaaaaaaaaaaaaaaaa

SEQ ID NO: 58436 - DNA, 559 bp, Homo sapiens
accaaatatacaaccaccaaaagaaaaaatagataatagtgaacttcattcaagttaaaattttttgtatctcaaaagacactattaaaaaaaccaagtgaaaaaaacctcacaaaatacgagaaaatatttgcaaatgttatttctgataagggtgtagtatttaggctattcaaagcatgcttacagttcaacaacacaaagacaaagaagccaatttaaaagcaaacaaatgatttcagtactcatttcttcaaagaaggtagacaaatagccatgaacaatgaaatgctaaatatcactagttattagggaaatgaaaaattttaaaaatgagatatcacttcacacacactataacttttcaaagagtattggtgagaatgtggagaaattggagttctcatacattgctgatgggagtgtaaaatgagtacaactgcttcggaaaatagtctggcatttcctcaaaaagttaaatataaaattaccatatgacctagaaattttactcttaaccactaccaagaactgaaaatacgtgttccaaaaaaaaaaa

SEQ ID NO: 58437 - DNA, 531 bp, Homo sapiens
  misc_feature 28: n = A,T,C or G
cgggcccccccctcgaaagtcttctagnattaattaacgcgggaatgaaggaatcttacagaatttatggcataacatcaaaagagcacttttatttttatgcttagttttattttatcagcttcattgaaaaacaatttacataaataaaattcagtaattttaatatacatttctatgagctttaagaaatgtatgcagtcatgtaaacaccaccacaattaagatagagaacaggctgggcatggtggctcacatgtataatcccagaactttgggaggctgaggtgggtgaactgcttgagcccagaagttcaagacaagcctgggcaaaatggcaagaccctctctttgcaaaaaatttaaaaattagtcaggcatggtggcatgtgcctgtggtcccagctatgtgggaggctgaggtgggaggatcacttgagcctgggaagtagaggctgcagtgagctgtgatcatgccactgaattccagcctgggtgacagagcaagaccctgtctaaaaaaaaaaaaaa

SEQ ID NO: 58438 - DNA, 515 bp, Homo sapiens
  misc_feature 9: n = A,T,C or G
ccccctcgngggtacttctagaattaattaacgcgggcaaaaaaaaaaaaaaaaaaaaaaaaaaaaaaaaaaaaaaaaaaaaaaaaaaaaaaaaaaaaaaaaaaaaaaaaaaaaaaaaaaaaaaaaaaaaaaaaaaaaaaaaaaaaaaaaaaattaaaaaaaaatatccccccttttaaaaattttgggggccccccccgggggggggctcttttttccccttttttgggtttttttttccccccctttttgggttttttttttaaactgtgggggggggaaaacccttggttccccctttttttttccgttgggaaaattcccttttttggggggggggttttttttaggggggcccccccggtggctcttttcaaaattttgcccccttttttgggggttgggaatttttcctttttttttttttttaaaacaccgcgttaattttttgttaaaacctttttttttttaccacatgggggtttttggcgaaattcttttttttttttaaaaaa

SEQ ID NO: 58439 - DNA, 408 bp, Homo sapiens
  misc_feature 28, 247: n = A,T,C or G
cgggcccccccctcgaggtacttctagnaattaattaacgcgggggaaaaaaaaaaaaaaaaaaaaaaaaaagaaaaaaaaaaaaaacggcacgccaccgaggaggaacctccaatctccccctataggtgagtccatattaccgcgtcgctcacatggcgcgtcgattttacacacgtctgtgcactgggaaaaacccgtggcgttacccgaggattaatcgtccttgcagcacatcttacctttncgtcgagctggcagtaatagttgaagaggcctcgcaccagatcgcccttacgcaacaaattgcgcagccttgaatgagcgtatgtgaaattgtaagctgttaatatgtttgttaaaaattcgctgttaaattttgtgtaaaatcacgctcattttttaacc

SEQ ID NO: 58440 - DNA, 526 bp, Homo sapiens
  misc_feature 23: n = A,T,C or G
ccccccctcggaagtcttctagnattaattaacgcggggtgacaaaattaaagtgtagagttattactaattttctttgcgcttgttagtttatttatgcaagcagtgctaagttgttatagcttaaaatagtgggttataagataatatttgcagcttcatagtaaccgtcaaatcaaaaaaacatacaacagattcaccaaaaaaatgaaaagcatgaaatcaaatcacaccatcagaaaatcatcttcactaaaaggaagacaggaagaaaggaaagaagaaagagaagactacagaacaaccagaaaacaaataacaatggcaagagtaagtccttaagtatgaataataatattgaatgcaaataaactgaattcttccagaaaattacagagtggctgaaaaaatttaaaaaaaaagacacaatgatctgttgcctacaataaatacacttcacttacaaagatacatatagactaaaagtaagaggataaaaatagatctttcatgccaatggaaacca

SEQ ID NO: 58441 - DNA, 384 bp, Homo sapiens
  misc_feature 24: n = A,T,C or G
gccccccctcggagtacttctagnaataattaacgcggggacgtattagtttattaacttactaaatgaaaactactggaaaaatacatatgaaactgtaaaaatgtatttgctatatatgcgtaaatagcaaaatatccaccatcctttctattatccaatccttaaatagactgattcgtatttccaactatatatccatgaaactctggaggacttactctaggtactgtgcatttaaaactgatgctgggagcagtggctcacacctgttatcccaccacattgggaggccgagacaggcagattacctgaggtcaggagttcgagacaggcctggccaacagggccataaaccgcgtctttactaaaaaaaaaaaaaaa

SEQ ID NO: 58442 - DNA, 631 bp, Homo sapiens
  misc_feature 21, 38: n = A,T,C or G
ctggggtaccgggcccccccnctcggggtacttctagnattaattaacgcgggggatcttctttctatcattacagattagtttgcattttccaggtgtttatattaatggacacattcaatatacactccattttcatctttttttattcttctggtttcattcactcagtatgattattttgaaatccatccatgttgttgtgtgtatcagtaacgtatttccttttgtgactgagaagtttgccattgtatgagtgtatcacaatttgtttatctatttgccttgatggacatttgagttgttttcaatatttggctattatacataaagcttatatgaatatctgtaccagtctttatatgaacacttgctttcatttctcctgtatatctaacagtgaaagggctgaatcattgcatagttgtatatttaactttttaggaaactggaaaactgtttttcaaatggacttaccatagtttgttcctacacgcaatgtatgagagttccagttgctccatacacttgtcaacacttgctatggtcagtctttttaattttagccattctaataggtgtttagtggtatctcattagggtttcaatatcatttctctaataactaatg

SEQ ID NO: 58443 - DNA, 393 bp, Homo sapiens
  misc_feature 27: n = A,T,C or G
cgggccccccctcgaaagtcttctagnattaattaatgtaagaatcaaaatattattttgtgggatttgtgatgtatgcagatgtaaaatatataacaaaatagcacaaacaataagggaaggcaagtggaattctacacaactgcaaagtttttacattttatgtgaagtgatatgacattaaatctaaatagactggggataagataaagatgtgtggtataatacccagagaaaccactaaaaacaaatatccaaaagcagcggagctaagaagtcattgtaggaattaaaataaaatactaaaaaatggattaacataaaagatggcgggaaggaaagaccagaaatgaaaaacagaaggtatcaatagaaaacaaaaaaaaaaaaaaa

SEQ ID NO: 58444 - DNA, 584 bp, Homo sapiens
cggggccccccctcggaagtcttctagaattaattaacgcgggtgattataatttttgtgataatttctggcctgattgaaggaaatttgagaggtctgcatttatatattttaaatagatttgataggtttttaaattgctttttttcataaggtatttataaagttatttggggttgtctgggattgtgtgaaagaaaattagaaccacgctgtatttacatttaccttggtagtttatttgtggatggcagttttctgtagttttggggactgtggtagctcttggattgttttgcaaattacagctgaaatctgtgtcatggattaaactggcttatgtggctagaataggaagagagaaaaaatgaaatggttgtttactaattttatactcccattaaaaatctctaatgttaagaaaaccttaaataaacatgattgatcaatatggcagatgatttacagtccattatatgacatttgtaagccactcaacactagccttacaaggttcatgaaaggaggaaaacattaattctttctgcctttgctgatataatccacatagtaataatttaagc

SEQ ID NO: 58445 - DNA, 620 bp, Homo sapiens
cccccctcggaatacttctagaattaattaacgcgggggtgaaattaaagtcatagcaatataaacaaagtgaaacacaaaaaattttttaaaatgaacagagctatggagcaatttcaagcaacctaataatatatgtgtaagtggaattctggaataacaggaagggagtgagagagaaaaaaatcagaaaaatatccaagcctaaccaaagcaaaccaaaccaaaccaatcatcctccccaaaacaaacaccaatgaatggaaattataattgaattgcttaaaaccagtgctaaagtgtaaattttaaagatagtgatggcagggcgcattggttaaaggatgacagtagatttatcatcagatgcaatgcatgctgaaagaagtactgaaaggaaaaaaaattgtcagcatagaattctatacccagtgaaaagatctttcaaaaaatagaggaaaatcaatacttttcctaaccatacaaaagctaaaataatttatcacctacagaactacactatgagaaatattaaaagtaatacttttcacacaaaggaaatgataccagataaaaatcttgatctacacaaaagaaggaagagcactggaaatagtaag

SEQ ID NO: 58446 - DNA, 454 bp, Homo sapiens
  misc_feature 17: n = A,T,C or G
cgggcccccccctcgangatcttctagaattaattaacgcgggggctggttcatagaccataccttctcaccatgtcttcaaacggaggaaggggtgagaaagctccttaaggtctcttttataagggcattaatcccattcacgagggatccaccctcatgacctaatcacctcccaaaggccccacctccaaataccatcacattgggcttcaggtttcaacatatgaatttggggggatcataaacatacagtctacagcaggttataaatggtattttcactatgggactcaggagcatctgaatcctgtcctacccatctccctttaaaggagatacataaagcaacccctcctttagcaaaaattttctgggcctctggcttcttccaaacagggatagctcagtgttatacactaagtaagttgttgcatgaaaaaaaaaaaaaaaa

SEQ ID NO: 58447 - DNA, 492 bp, Homo sapiens
aattaacgcggggctagaatacaatctcagaagctccagcaaaaatatacttgttgaaggtttagggtggaccctaaattgttttgcaacagtttgacaactcactgtaactgggttgtgtagagatgggagaacaatatttcatggatggaattggtccagagaagcagatcaggcagactattcaacaattatgtaaaccaatagcatgtatccaaagtagtttgtctctgtggcagcaaaggagagagccattcaattgtgaggcctaattaatttgaaatgctaccctggtcttccttcacctcccatctttttataggagcttatacaagttaccaatcgaggaaaattcagctcattcaatgagtaattaaaaggtactgttaaaaaaaaaaagagagagagacagagagtcgttaccagaaataacatttttaggaagcaggtgaaaattctcataaaatatttcactacaaataaaaaaaaaaa

SEQ ID NO: 58448 - DNA, 514 bp, Homo sapiens
cccccctgcggaagtcttctagaattaattaacgcgggcagatttgcctctgggaatccactcgccccaggctagggaagggcaggaagaaggtaaggcaggcagaggagcctcggcctcgtgtagtgccggggaggggcttgaccttctcagtcatcctctctgcgccccatttctctgcagctggcgtggcagtgggccagctgttggaggaggctggtgaagagaactccatgcctgcctctcaggcaccattgccacagggtcctgggatgagggtaaagccaaggcagcaggacaaaaatctagactctataaaaagcagtcctttccctgggctcctagagaagccctttggttttaaggcagatacaaggaaagaaaggggaaggacttaggattgagataaagattttttttttttttgcttgagtttttccttcagtataaaaccactgtagaaaataacttctcttagaaaaagaaaaaaaaaatagaagaaaaaaaaaaaaaa

SEQ ID NO: 58449 - DNA, 262 bp, Homo sapiens
cccccctcgaaagtcttctagaattaattaacgcggggggaaaaaaaaaaaaaaaaaaaaaaaaaaaaaaaaaaaaaaaaaaaaaaaaaaaaaaaaaaaaaaaaaaaaaaaagcggccgaccacaaaagaggagcgtgcccgccaccgccggtggagctccatttcaccctctctaaatggcctttaccccccctcactggcactggtaaaaccctggcgtgaccgaaaaaacccgggttgaaccaaatttaattttctgga

SEQ ID NO: 58450 - DNA, 534 bp, Homo sapiens
  misc_feature 40, 41, 441, 516: n = A,T,C or G
cgggcccccccctcgaaagtcttctagaattaattaacgnncgggcccattccaaaggggaaagacaatcaaagtaggcaaccttgttttgatcccaatgttgaaattatcagacaaaaactttaaagtggctgttataaccctgcaagtgaggtaagaaaaaatctgctccaaataaaaaaaaaaatagaaaaatttagcagatatgactgaaaaaagagtcagtgaagtagaaaccaagtaagtagaaattctccacttataagagagaaaaaatattttttaacaaatcctcaagaattagtgggacaaatttaagaggtctaagagttaattggagtctcacaagagaagagaaagataatttctaaaaattaaagatattaagaaataatgctcaaaaacttcctaaattttataatccacataaattcacaaatntaagaatctcaaccaaatataatttggataaatttgaaaaccatacctagacatagcataatcaatggctagcanaataaagaaaaaaaaaaa

SEQ ID NO: 58451 - DNA, 616 bp, Homo sapiens
  misc_feature 9: n = A,T,C or G
acttctagnattaattaacgcggggcttcagtaaagtgtgactaaaattttagtggcactctctaatatagtagacactaaacaaatatggctatttaaaatttagttcctcagtcataataaccacattttgactgctcagtagtcacatgtggtatgtgtctactgtattagacagtgcagaggtataccatttccatcattagagaaagttctgctgtacagctttgcatgttgagactcttatttgctctgtgataaagaaaatggaattttctttcatctttttgctcagatctgccgtgtgtggggctaaaagacatggattagatggattccttttcaagttttttttccaactcagtttttgggtgaccttcatctaatacctagacaaattgaaaagtgaaatttgccatctatcattggttggatcaaatcacacaatcataattaataaatcggacagatttgctttttttttaacgacaaattctttttggccaatgaaccactggcctttatttctaaaaagtgcagttattcagggaggcccctgacatgtctaaaattgaaatcatagtaaagaaagtaaattgctgggcatggtgatgca

SEQ ID NO: 58452 - DNA, 614 bp, Homo sapiens
  misc_feature 28, 46: n = A,T,C or G
cgggcccccccctcgaaagtcttctagnaattaattaacgcggggnaaacacaaatttagcacacgcaatactccctacatagccagcagaaagttaaatattaaacagacgatattaagtgatggcaagcattgggaatgataagtaatttcaaataatgctggtagaaatgtaaactaaaactattattttgacaacagttgttattatttctacagttgattcttaaacaacataggggttttggacactgacctctgtacagctgaaattacttttgatttcccaaatcttaattactaatagcctactcttgaccagaatctttacttataacataaaccacaaacataaaccattaactcatattttgtatgttatatatattaaatactgtattcttacaaaaatttatggtaatgttattaagcaaatcataaggaagagaaaatacatttactacttattaagtagaagtatatcatcataatggtcttcttcctcatcttcatgttgagtaggctgaggaagagaaagaggaggaggaggtggtgatgctgtttctgggatagcagaggcagaagaaaatctgcatacaagtgggcccacacag

SEQ ID NO: 58453 - DNA, 477 bp, Homo sapiens
cgggccccccctcggaagtcttctagaattaattaagcgggggcatttatctgcaataagaagttacacaattacagtgctcatgtgcataaagtgatgatgctttcccaagcagctcatagacagaaacacagaaacactttttaaacatatttgttgatgaccctaaagacacacacttctaagtgtttgctttggaataaatgaacagccagcattttacttatcaagaaaccccaaggctttattagtattagaaatcagtaaagaaatccaaaactaaagaaaaacaaaaacgcctttttaaaaatacaacttcccttgttaagtgtattaatgcagtttttgtgtacctttgaaaattcttcaggttcctttatatctaatgaccttgttgcaaattctaatagttcttcagagttctccagggcactattacattgactaatctgactctagggaaaaaaaaaaaaaaaa

SEQ ID NO: 58454 - DNA, 611 bp, Homo sapiens
cccccctcggaagtcttctagaattaattaacgcggggggtatgcttaattagctgaggtcatgttccatatgtacatctggctacaagggaaactgggaatgtgagccccaatacttatgtttgtagaatatttagaaatttgagaattccctccaaataaagagtttttttaaaacattgttagacaaaaagtttgaattacaaaatgtggcagtagctcaggtctaactcaaatgcagggaaaaaaactattagctctaaaaaaattaaatacacatttgatggtaatgagaaacagaaaacaggcagaaatagtagaatattcaaccactgatgaagtattcgaccattgaataaagaaaattgcaatgatttaaatttgcatcaaggcaacttcacacctgatgacacttcccagtctgtgcaaaattaggtgtctacgagtaaagtggtgagttttactagcttgaggaataagagcacagagttccaggctgacagaaaagaagaactgggaaatttgaatgacatgggaggaaatctcacaaaactgaaagtcacagaggagaatgtcacagagtaaaaatctaaaatcagcacttaaacttc

SEQ ID NO: 58455 - DNA, 457 bp, Homo sapiens
ggccccccctcgggagtcttctagtaattaattaacgcgggagagcactcacaaatcacactaaaactgccagcggcctgactcttactcagtttagcaaaaattcttgcctaaaaagtgataagtaaaaatctgtttatggtatacagttatgtctcgaatctttgaatcaaatccatgttcttattttagaaaggtaagagttcttcaaattcagctacataccaccggctctcccaacctcagacggtgggcatttctggatggatggctgcggttatggataaaggctgtaactgttaacacagaaaaacatgaaaagctcaggcccaagaaaggccttggagccagccaaacagaatttgttctaatggacatggatgatgttgaacagaaaaaagtttacaagtgctttgtggttgcactaatgtatactcgctgccattttaagaggggg

SEQ ID NO: 58456 - DNA, 470 bp, Homo sapiens
  misc_feature 9, 19: n = A,T,C or G
cccctacgngaagtacttnctagtaattaatctaacgacgggggtttagaaaaaaattcagtatcagccctgaatgcaaataaattacaataaagctgtcactgctaagccatcaaaatcctgtgtggttggccaaatgaggatattcagcttttattactaacaaatagtcatgtaactgacagtggttaagttcattagagcaaatgaagttgaccattgatgcctgtggttcagtaatacctgattaagatatttttccacaaaaaaactgcaccagacttcaaacatcctacattttctcagactttgtaaaatagtccaactaagtatttttctactttaccatcatcagttgtgacatatcttagcagattacacttcaagttgtactaaaatagtttttctcagctgctttgagaatattcttgcctctagttagtccacatagattatttatagagggtaac

SEQ ID NO: 58457 - DNA, 583 bp, Homo sapiens
cgggccccccctcgaaagtcttctagaattaattaacgcggggatgcagtaaaaatatcttcaaagattattaaattcgttattataaaacacatagaagagtttatgtgtgtatatggaaagcaggtatacatcaataattcttaatgaatacaagaaagaactaccaatattggggcaaatttttcaaatacaaacatcagtgaatataggcaaggccttttcttttttattattctattttaagttctagggtacatgtgcacaacgtgcaggtttgttacataggtcgacatgtgccggcaacgccttttcaataatgtcttacaaggagaaacgtggctcctctaggtgagcagccctcagtgcgcatctccctgaagtccacattgatccggcagagctgtggggttcacagctcacactgaggcattcagggcctaaaccccactttactcttttgtacaatgaatgggaaatcagtgatctaaatgagtttaaatcttattagggattcagcctgcccttcagactctgtctctattcctcccagagctgggttcaacatgaattcaaatacaaa

SEQ ID NO: 58458 - DNA, 447 bp, Homo sapiens
ccgggccccccctcggggtacttctagaattaattaaagactggatattcctacatgccagagatgttgttataattaagttcttttaagaacttgttattaatatttcaacaatctggaaatcatactcccaggtattcacccaaatgacttggaaacttatatccatttaaaaacctgcacacaaatgttagctttatagcagcattattcataattgtcaaaatctggaagcaaccaagatgtccttaaatagttgaatggatacaaaaattatactataacttatacatgggaatattattcagcaattaaaaaaaatgagctattaagcaacaaaaagacatgggaaaccataaatgtatattgcttggtgaaagaaaccagtctggaaaggctacatattgtatcattccaactgtaagacattctgaaaaaaaaaaaaaa

SEQ ID NO: 58459 - DNA, 619 bp, Homo sapiens
  misc_feature 28: n = A,T,C or G
cgggcccccccctcgaaagtcttctagnattaattaacgcgggccctcagaacatgaacttgttgtcagacacacataggtttcagtttcagccctgcctcttaatgactgcaacctcaggcatttaactttgagtctccgagcctcagttttgtttttgtaaaatggtttgctatgctatctcagatggaggagaggatttaatgaaataaaaatccatgtaaagcattgagcctaggggctggcacacacagtgagtattcaatcaaggttagccatgtagcttcataatgtgtattgactgtaaatactcagacactgcagcaaagtattacaaagaaggaagtgttaactttttggcatatgtatctctttgcactttattttcaaacaggtaggataataccacgtatactttttcacagtacgcttttttctcttaatatgtgttgagatatatgttaaatatataaaaaactgaatcattattttaaattgcagggttatattcaattttatgaaaaccttatttctctattgtttgactttttgtaggttgcacaaggcattgaattaaaatatacatatcagaatgcattgcatttataaagataaatat

SEQ ID NO: 58460 - DNA, 593 bp, Homo sapiens
  misc_feature 585: n = A,T,C or G
ccgggccccccctcggaagtcttctagaattaattaacgcggggtcttatcagtgggttgattcatcttctacataaatcagtgttttatgaccaagatattgcttggattgttttgaaagtaaaagaaccacatagtttctactgacaggtttcagagctcccaaagattaatttccaacttagaggtttgtttttattttcaacctatgacgacttgactggtcttaaagctgctatttgatagtatttaatatgttgtcattgatagaagcctgttggttcagcaaactgaaatgagtgttgcagacagggttttcttttcctcgttggtgttgctgatttgtgagcatgctttctgaatacaaaagcatgagtggcgacctccgtgaggcacggtgacctcctcgaggcacggtgacctctgcgaggcacggcgtcagtccgcactcttctgtcctgatttgaagctgcctagtgtagtgctattacaattttgttcagttaactttctttttaaaaggttgttcgcacatttttagggtgcccttacttcagcaaaggagagggagtaggagagccttanaacttttg

SEQ ID NO: 58461 - DNA, 540 bp, Homo sapiens
accgggcccccccctcggaatacttctagaattaattaacgcggggatactcattgacacagacaggtaaggaccacaggagtcccatgccatgggagtgtaccgtctggagcagcattatccaacagaactttccgcaatggaaatggtctagatctgcgctgtccaaggtggtagccacccagccatatgtggctcttgaaatgtggctagtgcaacagagcagctaagtgttaattttctttaatttcacttaatttaaatgtaaacagccacatgtgactagtggctaccatcctgaatattgtagttccaggggagttacacgaataagccaatagttgtcttaatagagatttaattgttattgcagtaagcagcatggagaggaagagcaacacacagtgaggtgtgcaatgggggaatttcacctttcctgggggagagggaacatcactctgaagcagtcacatttcagtgggtgatccaactttggatataaaactgaaactctatacggtaccaaaaaaaaaaaaaaaa

SEQ ID NO: 58462 - DNA, 612 bp, Homo sapiens
cgggccccccctcgaaagtcttctagaattaattaacgcgggggaatattagagtcctgccttgggacaggtgaaagaaggacagaaggtcagagagattctatttcctgaggcccgacacacccaacattataacaaaaaactataacaagggctatggaagttgtgagccaagaactgtggacaaaaacctatatctgtatctctcttttttttttattatactttaagttttagggtacatgtgcacaatgtgcaggttagttactatgtatacatgtgacatgctggtgtgctgcacccactaactcgtcatctagcattaggtatatctcccaatgctatccccagagtgtgatgttcctcttcctgtgtccatgtgttctcattgttcaattcccacctatgagtgagaatatgcggtgtttggttttttgttcttgcaatagtttactgagaatgatgatttccaatttcatccatgtccctacaaaggacatgaactcatccttttttatggctgcatagtattccatggtgtatatgtgccacattttcttaatccagtctatcattgttggacatttgggttggttccaagtctttgctatt

SEQ ID NO: 58463 - DNA, 308 bp, Homo sapiens
  misc_feature 43: n = A,T,C or G
acttctagaataattaacggcggggaatcaaaagttacacgtngaattttttaaattttaagattcataaaaatatttcataaatttgcatgtcatccttgcaaaggggccatgctcatcttctctatattgatccaaattcagtatatctgctgccgaagtgagcacacatggatttttgactgtgcaggtcagtgccactaacccctgcgttgttcaagggtaaacggtatataatttcacccttaaatatttcagcatatgtctctagcagatgaggatcactataattcctcgggttttatttt

SEQ ID NO: 58464 - DNA, 615 bp, Homo sapiens
ggccccccctcgaggtacttctagaattaattaacgcgggaggataaagtaccaaagagtggcatgatgtaagatgaaactggagtgctagggagggcccacatctttcatgatgtcagcaaagctaaggatttaggcctgtatcctaagtgcaaataaatcagcaaataatttaagcagaaataaaaacaaaaaacctcatgcagtctttcaaaaagaccatacaagaattaacttgggattggggtggataatatagaggaataggatcagaaagatgagtgagtaggctagttcattagtctgggtaagaaatgttgatatttggaaaacaacaaagactcaactgaattttgaaaaataaagttcagaaagtcccctaaaacttcaaggaaaacagaaaatataagaaaattggagcaccagcctagtgtatcctatatccaaataacaaattccaaaaagagagagagagaaaaaaaaaaaggaaaacaggtaaaaggtggaatcagaatacattttctttagacctcttcaggaatatttggaaactgtataataacttcatcccttggaaacttctctccagaaatggccaaaaaaaaaaaaaaagcg

SEQ ID NO: 58465 - DNA, 607 bp, Homo sapiens
  misc_feature 18, 552, 559: n = A,T,C or G
taccgggcccccccctcnaaatacttctagaattaattaagcgggtcttaatttcccaatatgtaataagctattctgaacacaaaaattaatatctgttaatgagctatactctaattggtaaaaattttgccattagaattgttttcaattgggtttgttcctagaaaggaatagtaaatatgctggctttgcctctgtttctttcatgttctttctctttttttttttttcattagtctttctgaatctaagttcatggatgaatttaaccaggacacacaataaaatccatggctgaattaagaatcctttagtcatcatagatgcttcccagcttaccattttagatattattgatattttattttctattatgttttttgaatccatagttagagaaggatcaagaatgaagacaaattaaaattttgacaccccaacctgcaataagaaaatttgtcaatagaacaggaactaatattttatgctaattccccctctgtcttggtttgcattcagtatgttctcaaatggtcaattaaaaaatgnttggcanttactatgagcctaattcaatgccaggtaccacaaaaaaaaaaaaaaa

SEQ ID NO: 58466 - DNA, 418 bp, Homo sapiens
cgggccccccctcgaaagtcttctagaattaattaacgcggggatactgattcagaaatcctgtagcgtgtaataaaagaagaggaaatggcatggaatcactgcctcctgtgatttgaaggccattgtgaaggaaaacaatgcagtgaaagaaagttcttcatattaggacagatatcattgcatcacatttatttatctttctgggtatttttatagcccttaataaaaaatattaaaataaaaaaaaaaaaaaaaaaaaaaaaaaaaaaaaaaaaaaaaaaaaaaaaaaaaaaaaaaaaaaaaaaaaaaaaaacgaccaaaaccaaaaaaggggaaaaaaaaaaaaccaaaagggggccccccccgggggggcccccaattcccccttaagggggtgattttagccccccccctg

SEQ ID NO: 58467 - DNA, 440 bp, Homo sapiens
gggccccccctcggagtacttctagaattaattaacgcggggaggtggagcttgcagtgagcagaaatggcaccactgcactctagctcgggcaacagtgtgagactccatctcaaaaaaaatatttcttagctgtcaagtaaatctggtccaacagattatttcatcacttcatctattcctattacaggctaagtatcccttatctgaaaatctgaaatctgaaatacttcaaaatctgaaactttttgaatgctaacataatgctccaagggagtaattcagatcttggatttttggattaggaatgctcaaccaatgtaatgcgaatattccaaaatctgaaaaaccctaaattcaaaatactcctggtctcaagcattttggataagtgatacttaacctgtattacatttccttaaacgaaaaaaaaaaaaaaa

SEQ ID NO: 58468 - DNA, 454 bp, Homo sapiens
  misc_feature 34, 52: n = A,T,C or G
tgggtacccgggccccccctcggggtacttctanaattaattaacgcggggnagctaagacattagtaagccttggttagtgaagtggcatcaggaagtgcctacattttcatggcctggtagcgttcagtgaaaatgttcattaacagacacaggccattcagtcccgaatcccaagacactgaagactctgtttgaatcagactcacgggttccttcctagccactctcagggacaggaatgcttctggtgaagaagttttcggtggtggttcatggagcttccctacaccaacttggaaatggcattcattttattggcttttgttatcttttccttatttaccctggcttccatctacactactccggatgacagtaatgaagaggaagaacatgaaaaaaagggaagggaaaagaaaaggaaaaagtctgaaaagaagaaaaattgctc

SEQ ID NO: 58469 - DNA, 592 bp, Homo sapiens
  misc_feature 25: n = A,T,C or G
ggccccccctcggaatacttctagnattaattaacgcggggggaaaagaaagagaaaacaatttggagacatgactttggagaagtgtagccaggaaacattttagaattcagttcaaactgctgaaaataataaaaattgaaaaacattaggcaagagtagaatataataggtgtaatagtttgttttgaaatataatttctctcttcagtctcctattcttattaaaaaatattaatagcaccaatttatttgtaaaagaacaagctctattcttatgcttggcattattatctgtataaagtgaagcaaggataattatttttcacataggcttttaaatccgcttttatggaactctttcaaataagacttcttttttcagctgagcccagccatgggtttgtaccctcaaatacctacgaggtgagcaaattcctctcctcttgaggtcccaagataacttggggctgctggacttgtgagaaagtgacattctttagttatcacaggtcagaaatcctatacaggaactctgcagacaaggcatcaggctggtttttccagtgggcttttattggatcttcaagtc

SEQ ID NO: 58470 - DNA, 540 bp, Homo sapiens
gggccccccctcggaagtcttctagaattaattaacgcgggtctggaagtgtgaaaacagtgaacgttcccttccatttagcactgaggtaaggtgtgtccagtgttgctgattgacgctcctctgctaacttttcctagttcctaggtttgttgtactctcttttgtagttgctattttgttgtttcctttgtctttagactgatatctttaaagtcaaataggaaatatataaaggaaaaaaaagttggagtgtgtcagaattagaaagaaaataatttcacattctgtaataatttgttatatttattggtttagtgataagaagagtgaacgagccaaggatatgcacctagtgaagaaactagcagccttactgaaaacaaaatctcccaatcttggtaggtattctctcatacaaataataaagcatattgttctatcatcttttaaatcaataaaatattctgaatggagcaatcaaaataatgcatggatgagcttattggaattgctctgtaaggctgaagtgtgccatct

SEQ ID NO: 58471 - DNA, 375 bp, Homo sapiens
gggtaccgggcccccccctcgaaatacttctagaattaattaacgcgggggaggactaatggggagtcggggaatatttgtgggtattttttttacttcctcttggttcccagctgtgacacgttttgatcaaaggagaaacaataaagggataaaccataaataaaaaaaaaaaaaaaaaaaaaaaaaaataaaaaaaaaaaaaaaaaaaaaaaaaaaaaaaaaaaaaaaaaaaaaaaaaaaaaaaaaaaaaaaaaaagaaaaaaaaaaaaaaaagggggcccccaccgggggggacctcaaattccccctaaaggaagtcaattaaccccccctaatgggccgttttttaaaaacgctggaatgggaaaaacc

SEQ ID NO: 58472 - DNA, 128 bp, Homo sapiens
aaaggtggggctatactagcggcagagaaagaatgctggggctgcacctgccgggtatttgcaagaagctgaatctttgggactgattctgaggggagggctgagatcatacagaaatctgtattggg

SEQ ID NO: 58473 - DNA, 527 bp, Homo sapiens
cgggccccccctcggaagtcttctagaattaattaacgcgggacccttcccccattccatgctctcattcatggctgactcttaaatgccacttctttcctgaagccttccttcacacagtcaccatcctgacaccaactcccaggtagaatcactttctccttgagccttgaagaactttataaccagaacacccatcacatttcagaagtatctatttcccttgtggactgtgatagcgattttaaagttttaattatctttgtatctccaaagctaaggcaaaagtcaagtgcctagtaagcactcattcaaatgccactgaactgaatttctttaggaaaaagttattaatggtccctgttcaaatctatcctgaaagtgtaaaaagtcaatatatataatccagcaactaaaattctgaaatgtttaatactgcttttacatattaaggggggaaaccccagaactccccaatctcacagtataaaaataacacaataaaacagtaaaaaaaaaaaaaaaaa

SEQ ID NO: 58474 - DNA, 513 bp, Homo sapiens
  misc_feature 26, 192: n = A,T,C or G
gggccccccctcgaggatcttctagnattaattaacgcggggcctctcaaaagcacattttagattactgaaatagtaaggaaaggaaatgcatcttcaaacattttttggaatcttaccacatataccttgttagatttgtgtattgtagggtgtttgtttttgtatttttgtattgtatatgaactttanaaaaaagtaacaagcaccatctttaaaagcattgtcacagacaaaagaaacatacagtataaaaatttccttgaaaactcctacagtattgtatttggaggcagcttcagactgttttattggtggtaactgcttgctgagctcttttaatcggtaataactctagagaagcagcctgtgtatattcctaacactttgttcactagcatttaagtttagaataggcccctagtaaaacaatggaaatatatttagaactcttagttcttatatgatttcattattatcaagatgcatgaattaaacttactttaatgaggc

SEQ ID NO: 58475 - DNA, 562 bp, Homo sapiens
  misc_feature 35, 445: n = A,T,C or G
tgggtaccgaggccccccctcggagtacttctagnattaattaacgcgggatagaaagcaagtattctcctaattagcaaaagttaaaattttatctctaccattaaaattacaatagattttgataaataaccagaaaaaacgcctttttttttttcacacctagcaatcctcccgtttttattgtaaggactttcttttttccctaagagactttctgttagactctttatatatgagatgcttgtttaaatatggtggtctgtaacatttttccagctcatgtgaaaatggaaaactagaacctgaactagtatctacaacattgccaaagtccagggtaaagctaaaagttgataagtagacaatttattgttttgtgtgtgtctgtgtgtgtgtgtgtgtgtgtgtgtgtgtgtatggtgtgtatatgtatatatcacanagttgtattttaaatatgttaaataccctttcttttaatttaagggatgtcaaataaatgaaaggagtttaaaaatagccaaaataaatgagctataaaggcccataacatactaaa

SEQ ID NO: 58476 - DNA, 604 bp, Homo sapiens
  misc_feature 16, 29, 52: n = A,T,C or G
cgggcccccccctcgngggtacttctagnattaattaacgcggggatccaanatggagaacagagtcagcaagctcctggtcatttcccaactccaaatggggtatctgaggaggtagtttgacgttgctactgaagtgagacagtgtgttattctcccagctattatcttccttaagaaattcaccagtgatagaagatatgtatctctcagcagagagttgagttgccaaacttgaaattccattcctggagatttcgggcggatatgcattcccaaaagcaggtgaacaagattgaccaatgttggggaggacccttaacaatcggtggcgagatggtgcagtggaaccactagaaggtcgaggagctacaggtgggtgaggttttatcttgacagctttcttaggctaaaaggaatgaatatacagtttctttacacagtcgttttctctgcccattaacaaaaattagcgaaggaagaaaatgttacttaccataacatactagcatttttactatctcaatttaaaatgtttaagaagaataaaatcttaagattatgacagagaagatgctattttccttcactgagtatacttttc

SEQ ID NO: 58477 - DNA, 625 bp, Homo sapiens
cgggcccccccctcgaaagtcttctagaattaattaacgcggggacattcgattgacagcactggctgggctcccacgagaacattaaaggatgttatttggagattaaattatttgtttactaatcttctgaattttgacgatccactgaatgttgaagctgcagaacatcatttgtaggacaaggaggacttcttgaataaagtcgatgactacatcaagtgttaatgccagatgataaaaggagaagattgcaggcccatggactgtgtgttacagtttgtctctaatgtgaaaaagcagcaagaggcattgccttctctcccctgtcccctgactctccctctcattcccctggattgtcccagtcctgtggccatgttgtcctgacgaagaccatcttcatgactgcccgttgtagatggagaattcaacataaagacagcaagaaaacgtatttaggtttctaaagagttatctgcttgtcttatgttttaggttgttcttgcattgctataaatgcccaagactgggtgatttataaagaaaagaggtttaattggcttatggtttggcaggctgtaaaagcatggcactggcatctacttggcttctggggaggcct

SEQ ID NO: 58478 - DNA, 639 bp, Homo sapiens
  misc_feature 40: n = A,T,C or G
agactggggtaccgggcccccccctcggggtacttctagnattaattaacgcgggtactaacgcaaacaaaactaccacgtgtggtttatctctgagggaaaatatgaagagaagttacttacatacctcatagaacagtaaatgagctcccattttgatcaaggtctttagcctagtattaattacaatcatggctttgttgtgttgctacagtggcaagcatgagtaatgatcaagaaaggaacgatccatgctggtgccattcgcacctactcctctgttaggatgaaaacgaggtgttaccactggccttttctatagccttgctgacccctggcatctttcggttctcaggggattccagcaacacttcccactcaaaaacaaagcaaaagcaaccaaaaccccacaattgtcggctcttcctgaccccaaaggaacttcagctatttcatgcagctgtacttgctttcctaaccccttcctcagagccgactcacctggtcataggaactctgcaggtccctacgatcaatacgctctcacccactgcgaggcagagctatgccagtcttttctctcgagccacatttccagtgcattcatgattttctttttctagctaccccaaaaccagg

SEQ ID NO: 58479 - DNA, 449 bp, Homo sapiens
  misc_feature 407: n = A,T,C or G
gtggtgattttggttgacttaaggatattgaattgtgtatcagggaataaaatattcattatgtgtgttttgtggggccctgggttacactgtagcctccagaatagattgagtagaaaaatttagggttggtttcctgtttgtctgtgcttctaattttcatttgtttgctgtttactatcctgagttttgcttacatatgcatatatataaagccctaattttttttagtttccagtggaaggcttttatttagttctattaatagccattttgtttcctatgcatatctagcaagtcactatttgtttcatttatcttgaattcctagactacttttgtcaggcctgcagaaattgatggagcacatcaactttctaaccttaagctaaatttttggaaattangattcctgatactttacatgtgttgagtatactttcataaaa

SEQ ID NO: 58480 - DNA, 589 bp, Homo sapiens
cgggccccccctcgaaagtcttctagaattaattaacgcgggagcgacagagtggttcatttccacctttcgggcgctctgtaaatctaaatcaaaaaagtaaaattaaatgtttatttaaaatatgtagaattaaaacacatggcaatgacacaaagcatggaaagagtatatagggctggactattcttagattctagcattatcaggcaagtggtaagaataataatttcagatagaccctaatacacatatgggctccgctctctagaggaacactgtaaaataaaaatttctgcaattgtagaaatgtcctgtatatgtactaacaataccatagtcactgaccatttcaaatgtagctagtgggactaaggaatgaaattttaattttatttaaatttaaatagccagctgtggctcctggccaccaagctgaggagcataattctagagtagcctaaaagaacaataaaaacttaggtggccaacaaattatcaggaaaaaaatcaaataatgaaaaattatatttcattcatccaattgaaggcaaagaaggtaagaaaacgtagcataatacaagtgggt

SEQ ID NO: 58481 - DNA, 441 bp, Homo sapiens
  misc_feature 28: n = A,T,C or G
cgggcccccccctcggaatacttctagnattaattaacgcgggccaaccatgaaaatcacaacgttcaatggagaaaaacaatcaaatgacaccaacaattagacgttgaaaatttctaacaaggcttttaaagcagctatcagaaaatgattcaacaagcaattacaaattttcttgaatcaaatgaaaagaattagaaactctcagcaaagaaaaagaagttataaaaaaaaaaaactaactggcaatctaatgccagaaaaaaattctcactagttgagctaaatagtaaagtggagatgacagaggatagaataaaaaaattgaggccataacaatagaattcacacaatctgaataacagagaaaatagacggaaaaaaatgaacagagcatgggatacctattagagaataatgaaagatctactgtttggatca

SEQ ID NO: 58482 - DNA, 535 bp, Homo sapiens
aagactctaattgtatttgtattcaatgacagtactttaaaacatcgatatttaaacagttgtcagaatattagggctcattcaataattcactaatattttataaatccacagatggtacaccatatacggtggtaggtgctgaaaacaaatatagttacaactttcactttatcttgtccactgaagaattcatcaaaataatgaaagataaatgaaataattgctatgcaattttgaaatccattttcaatgagcagttcttcctaattattgtcacaaataggatcataatgagtgcttgtatcctccaaagactggatactgattagttgagaaagcagttcaatagcatgcttgaaagccaatttgtgcacagtgctttctatgtaacaagccctgtcccaagtgccttggctagaatagctctatggagataggtacctttattactgccattttacagatggaagaactgaggcacaattgtttatcttcactcacaatgacgtaagtgggagagcttgtgtcaaac

SEQ ID NO: 58483 - DNA, 528 bp, Homo sapiens
  misc_feature 13: n = A,T,C or G
gccccccctcganatacttctagaattaattaacgcgggatttaacgaatttaaaaagctaatgacaattttgagaaaagtttgggatgtatattgctatgtaatttaataaactgattttatggatataaaaaaaaaaaaaaaaaaaaaaaaaaaaaaaaaaaaaaaaaaaaaaaaaaaaaaaaaaaaaaaaaaaaaaaaaaaaaaaaaaaaaaaaaaaaaaaaaaaaaaaaaaaaaaaaaaaaaaaccccccccccccccggggggcccccccacccccccaaaaaaaaaccattaaccccccccccccgcccccttttttaaccccccgggaacggaaaaacccccgccctccccccaaaaaaccccctgaaaacccccccccctttcccccggggggaaaaaaaaaaaaaccccccccccaaccccccccccaaaaattgcccccccccaaagggcaaaaaaaaattccccccctaaaatttttcaaaaacccccccaaaaattttggaaaaaacccccctttt

SEQ ID NO: 58484 - DNA, 429 bp, Homo sapiens
  misc_feature 19, 32, 312, 313: n = A,T,C or G
taccgggcccccccctcgnaaatacttctagnattaattaacgcggggtggggggggttccaggaggcacgtagggtaccttgcagggtcctaggagggaaacccaggattccaggagggatcccaggaactgtgggcacccattttctgtgtctcccagcccatttccactcctagtttgtcatggataatttttgttcttccctgtgtgatttttgccatcaaaataaaaatttgagactcgttaaaaaaaaaaaaaaaaaaaaaaaaaaaaaaaaaaaaaaaaaaaaaaaaaaaaaaaaaaaaaaaaanncccccccaaaggagctcaaataccccccataaaaagagttattactccccccccctggccggcgtttaacaaggtaataactgggaaaaccctgccccaccccaaataatttaatt

SEQ ID NO: 58485 - DNA, 373 bp, Homo sapiens
  misc_feature 13: n = A,T,C or G
gagtacttctagnattaattaacgcgggggatatcgaaaaaaaaaaaaaaaaaaaaaaaaaaaaaaaaaaaaaaaaaaaaaaaaaaaaaaaaaaaaaaaaaaaaaaaaaaaaaaaaaaaaaaaaaaaggggggggaacacaaaaagggccggccccccccggggggggccccccctcccccccctgggtttttttttcccccccccccccgggcggggcttttccccccccttttggggggggatccccccccccccccccccggttgtgttttaaaccgcctcccccttgtcccgccgggctttttccaattggccccccccgggggggcgtcttgccttttgggggggtgggttttgggggggggggcccc

SEQ ID NO: 58486 - DNA, 589 bp, Homo sapiens
cccccctcggaagtcttctagaattaattaacgcgggcccctggactagaacactcaagaccatatgacacaacatcttttctatatgattttgtgttacatgtctcatgtaagcaagttgcatgcttacaagagacaataaaattccattaaagaaagaaattagaaaatattttacacatcactttgtgacaagttcaagagatcatatgtaaaaactattaagctgaaagtacccagaaaaaaagtaagataaatagtgtccattaattattttctctaaaaatatgaaagtcatatcaattttaagtcactagtttgcaaaggaatctcagcaatacagctctatatattaaaacaatattatctaagaaactacatctttacacatgcatactggtttatttatatgagagtttattaacttgaatttaatatattctatatttatagttaaaaaccaatataatatttctctgttctcataagtagttttgttacctgtaaaagttgtccaggttcttggcatcttgaacaaaaaattggacaaaatgcacaaagcaaggaaagcaaaagcaaggatttattg

SEQ ID NO: 58487 - DNA, 620 bp, Homo sapiens
  misc_feature 568: n = A,T,C or G
tgggtaccgcggccttccctcggaaatacttctagaattaattaacgcgggccataggttagagtatatcttgaaaagtattaaagctattgaattatatatataattatatattgaactatatatgtaatatataattatgattggaattatataaatgtatataattgtatatatgtaatatataattatagatgtttaagcatatgtaatatgtaatatataattatttaattatttatgtaatctataatatataattaattgcatttatttaattatatatgcaatatataattatataattaatataatcagttatatacaacagaattatatattattaataattgtatatatgattaacatataaacatacataattatatatataattcaatagcaagatatcaggaaagatggactttactagctgaattttagttggcattaacaacaaaataataatttaagaaaacaaaacaaattttcaaattcctaaacctttgcattatcagaggatggagtcagtggcatgatgagcttttcccatttagatctatgtatntacatgaggtacctatactgtccattaaaaccaagtatcaaaacaaattgaa

SEQ ID NO: 58488 - DNA, 489 bp, Homo sapiens
  misc_feature 32: n = A,T,C or G
taccgggcccccccctcggaggtacttctagnattaattaacgcgggtattacaagaattaaataagttaattattttaaagtacttagaatagtgcctggtacatagtagttgcttagtaaatatgagccataattacttctttcctgtatgtttgaaatagttcatagtaaaatatttataaaaaaggaatgggccgggtgtggtggctcacgcctataatcccagcactttgggaggctgaagtgggtgaatcacctgaggtcaagagtttgagaccagcctgaccaatgtggtgaaaccccatctctactaaaaatacaaaaattagccaggtgtggtggtgggcacctgtagtcccagccacttgggaggctgagacaggagaattgtttgaacctggaaggtggaggttgcagtgagcagaaatcgtgccactgcactccagcctaggtgacagagcgaaacttggtctcaaaaaaaaaaaaa

SEQ ID NO: 58489 - DNA, 583 bp, Homo sapiens
  misc_feature 27: n = A,T,C or G
cgggccccccctcgaaagtcttctagnaattaattaaagcgggggaccaccaggttgccaaaggaggggtgaaccggcccaggttggaaacagcagatcaaaactcctgtgctgatcagtagtgggattccacctgtgaatagcctgtgttgcccactccagcttgggcaacatagtgacaccacatctctgttaaaaaaaaaaaaaaaaaattttgagacagagtccgctgcgacgtccaggttggagtggaatggcgtgatctcggctcactgcttcctgggttcaagccatctctgcttcctgggttcaagccattctcgtgcttcagctactaggaaggctgaggaaggaggctcacttgagcccaagagttctggactgtagagcactaagctaatcagatgtccacattaagttcagcatcactgtggtgacctctcgggagcgggggaccaccaggttgccaaaggaggggtgaaccggcccaggttggaaacagcagatcaaaactcctgtgctgatcagtagtgggatttcacctgtgaatagcctgtgttgcccactccagcttgggcaacat

SEQ ID NO: 58490 - DNA, 326 bp, Homo sapiens
  misc_feature 173, 174, 175, 176, 177, 178, 179, 180, 181, 182, 183, 184,185, 186, 187, 188, 189, 190, 191, 192, 193, 194, 195, 196,197, 198, 199, 200, 201, 202, 203, 204, 205, 206, 207, 208,209, 210, 211, 212, 213, 214, 215, 216, 217, 218, 219: n = A,T,C or G
  misc_feature 220, 221, 222, 223, 224, 225, 226, 227, 228, 229, 230, 231,232, 233, 234, 235: n = A,T,C or G
gggccccccctcggaagtcttctagaattaattaacgcggggggaaaaaaaaaaaaaaaaaaaaaaaaaaaaaaaaaaaaaaaaaaaaaaaaaaaaaaaaaaaaaaaaaaaaagcggccgccaaccgcggtggagactcaaattagccctatcgcgacccgggtgaccccccnnnnnnnnnnnnnnnnnnnnnnnnnnnnnnnnnnnnnnnnnnnnnnnnnnnnnnnnnnnnnnnggggaaaaccttgcccctttccacctaatggcgtattaacaaaaaggcccttaccgatcgtgctttaaaacagaagggccccctgaagggc

SEQ ID NO: 58491 - DNA, 581 bp, Homo sapiens
ccgggccccccctcggaagtcttctagaattaattaacgcggggtccctgagtttcctgcaaatagcccattgcatctagagtcctgatcacactcaggttcaatcgtttcagcaagacctcaagtggtggggttttcttccataaggatcacaaacataaatatcttaataatgaaaagaagatgtagataaaaattccataggaagataggaattttacattataggtttatttctagtcaagtgcagaatgttactcctttctctgaccgcaagtatatcaagttaaatatcagtatcaaaaaaaactatactcatacgtttaagaaaagtttctcttttataaaattatcaaatattataagcaataatgaaatagaaatattaattttaaagtcagaaacaagaaaaacaagtccataatcaagatgtctatacaacatcaaatttatgtgtatttatatttttagttttaaaatgttatcttcttggcctttaatgtccatattctactgagcttattctaactaatgcaattctttgcccagtttttgacaccttactgatatgatgattcccc

SEQ ID NO: 58492 - DNA, 319 bp, Homo sapiens
  misc_feature 27: n = A,T,C or G
gggccccccctcggaaatacttctagnattaattaacgcgggggaaaaaaaaaaaaaaaaaaaaaaaaaaaaaaaaaaaaaaaaaaaaaaaaaaaaaaaaaaaaaaaaaaaataaaaaaaaaaaaaataaaaaaaaaaaaaaaaaaaaatcccacaataataaaaaactgtgggcccccccccggggggaactttcatttcccctttttggggattttttttccccccttttttttccgtttttttaaaatgttggggttggaaaaacctttggttttcccattttttttccttttgaaaatttttctttttttccctt

SEQ ID NO: 58493 - DNA, 453 bp, Homo sapiens
  misc_feature 17: n = A,T,C or G
ccgggccccccctcggnagtcttctagaattaattaactttttaaaagatttaaacatgagagaaaattgtcttttaagtttatccacgtattcactatttctggcaatgttctttcctttgtgcagtttcagatttccatatggtgtcattttctttcttttaaagagttttctttaatatctctttagcatatatctgctagttatgagttttctcggcttttgattatctggaagagtattttgccttcattttgaaggtttaaaaaattttaaagacggtgtcttgctctgtcacccaggctcaatcatggctcgctgcaaccttgacctcctgggctcaggagaatcacttgagcccaggaggcggaggttgcagtgagccaagatcgctccgttgcactccagcctgagtgacaagagcgaaactttgtcttaaaaaaaaaaaaaaa

SEQ ID NO: 58494 - DNA, 612 bp, Homo sapiens
ccccccttcgaaagtcttctagaattaattaacgcgggtccttccccttccatttactagctttttaatagtgcagcttcaggtcttccactagaaatattagaattgtcacttaattttcaacctcccgatatttaattgaaagatgtacaatataatttaaaaggtacctacccatagggcaactaattctgaaaacgggtgataagtgaataaaggaagtatgcttaatttcattttcatgctttcgcagtttctatcttatattgataaagaaatcctaagctctacatctgtataagaatgtatcatcctttcaatatacttgtatctatataaaatgcagatgtgtatattcttgtgtgtgcatacacacatgcacagctatagaatatagatattttaatttagataattttaggactttacataaaatgaatcacatatgcactattatgatgttttccccaatgcaagataatattttctaagattttagacataagatgtattttatcatgtacaatgcactctaaaacttaccaagtttccatttacaagggaaaacgattaaaaccacaaattgctatagttaagagtttgggattattt

SEQ ID NO: 58495 - DNA, 468 bp, Homo sapiens
  misc_feature 46: n = A,T,C or G
ccgggtccccccctcggaagtcttctagaattaattaacgcggggnaaaaaaaaaaaagggaagataaaaaaaaaaaaaaaataaaaaaaaaaaaaaaaaaaaaaaaaaaaaaaaaaaaaaaaaaaaaaaaaaaaaaaaaaaaaaaaaaggggccgcccccgcgggggggctccctttccccctcttttggttctttttttgccccccccctggccgtcttttttctccccctttgcctgggggggacccttgcgttcccccctttttttccttttttccccctccccctttttccccctgttgttttttggagggggcccccccccgtggccctccccatttttttccccccctgaatggggattggttttcgttagcgttattttttttttaactttccccttcttttttttttaaatctcctccttttttttcccctaggccgaatttggcccattccctttttt

SEQ ID NO: 58496 - DNA, 472 bp, Homo sapiens
gggccccccctcggagtacttctagaattaattaacgcgggctgggatgcaagatgttgtctcaaaacaacaacaaattacgttaagaagactaaaattatacattgcgtgttttctaacaaaaactgaatgaaactaggaattaaaagcaaaagtcaaactggcatattcaaaactgtgaatatgaaacacactcttcaacatattcttgctctgtgtcaaaaaatgtcatttttcaaagatgtcaatccaacctacagttaaaagctacagaacataaacagtgtgatattgacacaaagattaacagatgaaagaacaaaatagagttcagaaatgaacccttctatatatgatcaaatgatcttccacaacgttgccatgagcacaaaacagagaaaaataatctcttcaaaaatgatgttgaaaactgaatatcaaaactgataaaaaagttggattatttccttga

SEQ ID NO: 58497 - DNA, 368 bp, Homo sapiens
attaacataaattataaattccattgtgaattacaaattaattttaaatatatttattgttatttatagatctatacttacatataagcatacataagtatatattgtatattacataagcattatatttatacatactatatatttatatattaaatatagtatttatatataaacataataatatagtattaaacgtagtataagtcatatagtatatttgaatataatattaatataatatactatattcataatatataaagtgtatagctgacctttgaacaaggtagaggttggggcactgacctccacccctgcacagtcagaaattcacatacaacttttaactccccaaaaaaaaaaaa

SEQ ID NO: 58498 - DNA, 636 bp, Homo sapiens
cccccctgcgaaagtcttctagaattaattaacgcggggactaaagacttaaatataagattttataaaactataagctactagatgaaaacatagggaaaacattttaggacattggtctaggcaaagattttatggataagacctcaaaagtacagaaaacagaaacaaaagataaatggtactatattaaactattaatgtggtgcaaattaattgcagtttatattgttacttttaatggcaaaaaccacaatttcttttacaccgacctaagaaaaagcttatgcaaataaaattagtcaccagagtgaagagacagtctgttgaatgggagaaaatatttgcaaactatgcatctgacaaggaatttatatccaaaatataaaataaattcgaacaactcaacagaaaaaaaaaaagaattccattaaaaaatgggcaaaggacatgaagagacatttctgaaaagaggacatacaaaggcaaacaggtatatgaaaaaaatgctcaacatctgtaatcatcagagaaatgcaaaccaaagctacaatgagttatcaccttaccccagttggaatggctgttattaaaaagtcagaaaattacaggtgctgttgagaatgtggagaaaag

SEQ ID NO: 58499 - DNA, 300 bp, Homo sapiens
ccccccctagggcgtacttctagaaattaattaacgcgggggtgcgccggaggtgatcccctgcgtggctgggctgctcgggttagaaccgtcaggaaaaaccctaaagattagactgtaagaaaaagaaaattagaacccttgtttcaaagacctgttttacgggtccttcgtcagtttgaaagacttgagtccaaaccacctcccagttgggtttttgaaagatccctgaatcgtgtgcccttactggggcgagtgggtcaggaccctgttttgagacggggggagggaaaaaatcca

SEQ ID NO: 58500 - DNA, 346 bp, Homo sapiens
  misc_feature 43: n = A,T,C or G
cgggccccccctcggaagtcttctagaattaattaacgcgggnggaaaaaaaaaaaaaaaaaaaaaaaaaaaaaaaaaaaaaaaaaaaaaaaaaaaaaaaaaaaaaaaaaaaaaaaaaaaaaggccgcaaaccaaaggaggaaactaaaattagccctataaaaaattttttttaaaaaacactaattggccgcccccttgggggggcccccactgggaaacccttgggggtaccaaactggccccccttggggcgtttttcctttcgccagctggggaaaaacccaggggcccccacctttagcccttccaaaaaaatcccctttttgaatgggggttggaaatt

SEQ ID NO: 58501 - DNA, 511 bp, Homo sapiens
cgggccccccctcgaaagtcttctagaattaattaacgcgggcccactggaatgctgtattcccaaataaacatcgttttcttctagagagcctccctctgttatttagattgaaagattaatactactgtttttagtttccacttccctgaagcaggaaaaaatttatattcctctacttgtgtaagaatttgcctatgcaaatgttaattggctctatagttactgattattccagtgatatttcagtgcccctttcagataaatgatttgggcaacgccccaactgcttaccttttaatccagatctggttgtggttaaaaaaaagagcaggaatatacaaaaattgactgggcatgatggggtgcaagcctataatcccagctgctccggaagctgaagcaggagaattgcttgaacccaggaagtggaggttgcaatgagctgagatcacactgttgcactccagcctgggtgacagagcgagactgtctcaaaaaaaaaaaaaaa

SEQ ID NO: 58502 - DNA, 408 bp, Homo sapiens
ccgggccccccctcggaagtcttctagaattaattaacgcgggtctagtatttcattacatagatcaattttctgacaataagaactcaatttctcaaagatacattataatgcagctgaaattatacattatactctctacatggctgagtccctaccagcccccgcatcatacttctgctcttcaaatccaatccccaggaacctagcaacttcgtgggaaggaattgtttccttcaccccaaatgctcttgccaataaatatactttatccaagaatattttcactccctcagtatagccctaaatagctattttaataatttctacaatctagaaatgaagagagtacaagaacaatatctaagaagggtcttacctcaactatcccccaaaaaaaaaaaaaaa

SEQ ID NO: 58503 - DNA, 532 bp, Homo sapiens
aattaacgcggggtggtaaatttttgtcctaaataaaatgatgggattgtacaagaaagagggatatttaagacaaaacagcctaaacatgttgtgaatgaactatgtaagtcataataaggttagtaagataaattttttaaaggggttgtataattcagttggctataatcaaaaagaaatcataataatctttctagagatgggtctttaatattaaaaaatgcactattacaaaactaaataattcgttaaaacaagattgtattacagatatcgacttatttttaatgcaagaagtttttaaatttttaaatgctgtttaacattctttaacattcttcagattgatatcttaaaagtgccactctttctcttttgaaaagtgcttaaatgatggctctctctttcacctttccttggctcctgtaacttttactacttatctaagggagaaaaattgtgttgaaaacaggcaaataaagtgtctttggaacatgccttttattctgcatgcctataatacctgtat

SEQ ID NO: 58504 - DNA, 609 bp, Homo sapiens
  misc_feature 23, 36, 47: n = A,T,C or G
ctgggtaccgcggccccccctcnaaatacttctagnattaattaacngcgggagtattttattttttctgtggctgttgtgaataggattgcattcttgaattggtgctcagcttgaacattattggtttatagaaatgctactgatttttgtaaattgatattgtatctttaccaaaaatacatttttctttatatactatgtatatagaattgtttctcttatatctagtaattttaataacatacattaactattttaacttttagtaaccctaatttcaagtgaaaaccctaagattacttaatataacatgactttaagatttaaaattactgaagagaattttgaaactagttttatttaccaaggattactaaagttgtgtgaactaaagggcatttgagcgaaattctgttttttttaaataaaataattgatttaagcacttacttttctttggtcagttgattagagctctttcgtatattttggtagtgatacatcacatacacatgacacatatatagacatacaaacacacagaagcagatcttctagatttataagattcttcatttgccagttttcactttctctccccctctt

SEQ ID NO: 58505 - DNA, 594 bp, Homo sapiens
ccccccctcgaaagtcttctagaattaattaacgcgggtaaagctattgttttgagctgaattatgtctcctcaaaatgtatcttgaggctgggattacaggtgtgagctaccgtgcctggctggacttttattaatacatcactggacaaatcggaagtactggcttataccctttatatgttagttggattgctcacagaatctctcctctcctttgtttaaatgttttgtaaatagatatttcagttttggtatctgttaaatttagttggaaataaactctacatcagttactgatgtaactaaggcaccagtactttattttgaaaattggaaggtaaaaggaaagaattaaatagttatcctagttttcctgtataaagtgtaattcagagtatcaaaataggtttagttggtgagagaagaattccaactaataaatgtagttggaccagcagcattagaaaatcaccacttacagcccctcatgtaataattgattcaaggaatgactatcaagtctttagatgaaaagttgataagagagctgaggctgttaccatttgaaccctctgatcactcttagcatcac

SEQ ID NO: 58506 - DNA, 547 bp, Homo sapiens
  misc_feature 492: n = A,T,C or G
ccccctcgaaagtcttctagaattaattaacgcgggatgggactgtctagttgcaggaaaaaaacacagggctcccactgattctacattactgtgagttgtgtaattatttcattatatattacaatgtaataatagaaataaagtgcgcaataaatgtaatgcacttgaatcatcctgaaaccaccccctcccatcccgccccctaaatccatggaaaaattctcttcatgaaaccggtccctggtgccaaaaaggttgggaactgctgacatagtgtattacagaatcattttcaggctatcttgcttaaattagaagggaaaaaattgtaacaagttttgtttttgttttacctcacatacctattatttatttgtggtgaaatatttaaaatctattctagcaattttcatgtgtggaatacattgttattaactatagtcactgtgttatacaagagatctcctgaacttattccttctaactganaatttgtatcctttgaccaacatctccccaaaaccccaataacgcgtttttttta

SEQ ID NO: 58507 - DNA, 605 bp, Homo sapiens
ccgggccccccctcgaaagtcttctagaattaattaacgcgggcttacaatgctaatttgataataaaatcttgatgtatggtctagttacttggataatagtaataaaaatgtgtgaagcggtgaaaatctaaacaacaattcattatatgaacttgggacattctaatgcactgggttttttttcttccatttccaaacactaattgacagcgcttgaaaacagcgattcagcttccgcatgtcatatgatacctacggactgtacctatatacctcaggccactccactgactaatcagaagataagaagtacctctcaccttaaatcaactgaaatgtgtcagtaaaatacatttggcataatcttcacaaatgtcagatttgcccatgacaggataggcacagtattcctgacagttttagcacaccaaagtctcatactccccgttagaatgagaaggaaaataaccacttttgtctgctattctggataaaacttatacaaaacaagaggaaatctatgacatgccactttgagtctctgactaacatgttataaaatgcctgactgcctaattaatggaatacacaacttgggaaac

SEQ ID NO: 58508 - DNA, 492 bp, Homo sapiens
gccccccctcggagtacttctagaattaattaacgcggggtggggtagacatgtcaggatgcagaatggagctggacagaatgtaggcatttctgctgcatctggaaagtaagataagtgagctcactgtcacaaaaggcacagaagaggaaactaaatttgcacttggtggagaaaatttaactctactaatataaactgaccatcgctacatgtttactgggcacctggtgcagggctaagaaatctgccattataatctgatgcagtggcactgagcctgcagagtcaatgtgcactcacaaactcaaccactgtcatctcacttaaccctcacacatcacctgtcagaggtaatccccaatctccatagtacaattgaggagactgagaccaaggtggtgaaggatcttaaccaaagccaggtacagtggagttctcaacgcgaaaggaactcacacctgagcacacctgcatgaggtgacctacgat

SEQ ID NO: 58509 - DNA, 593 bp, Homo sapiens
  misc_feature 30: n = A,T,C or G
ccgggtccccccctcgggggtacttctagnattaattaacgcggggctaaaacaacttattgtgaatacaaaaagctccctcagtgggcatgacattttgacaaacataggatatttgatgtaattatggcaagtatatactagttattagttatttcagataactaggaaccaatcagaggcattgaaaatggcttttaaaaaatttctatttatacacatggactgattaaattgaattcttaatgtgggacactttaaaagaaaaaggtgggggtaggcactacagctcatttagaaccaaagggagtggcacaaatcacctgttttcctaattctcccatttccagttataaagtaagacattctcataacctggagttttttcttcaggaagcatgtaatattggtggcgtctctttgtcatactttgaatttactagctcctagtttcagttggttcttcaacaagggaattaaaagggtcagatagggtagcattttccaggcaaaaagacacagtataggcaccatagcagtttgctacatactgtcctaagtcctcttagggtgtcggccttttgttctcatct

SEQ ID NO: 58510 - DNA, 608 bp, Homo sapiens
  misc_feature 37, 48: n = A,T,C or G
ctggggtaccgggcccccccctcggggatcttctagnattaattaacngcgggcagtagggaaaacagtaatactttgtaggtacaatagtggcatatgaagatggcaacttagagaagataataatttttatattcgtgtgattaataattgtaaatcattatgtgatttattattaccaacagtagagcagaatcctttcctgagcactttccatctacttggctaatgccttagttctgtgctgtccaatgcaaagaccacgtgtggctgctgagcactggaaatgcggcttgttcagactcattcagactgaacttttcatataatttaatttaaatctaaagacatattcaatttatttattggaaatcttttgaatacgtttgaaacaagttaggtatatgaatctaactttttcaattatacattttataaaatctaaacacaggtcaaataaattttctgatgaaaatttagtgtccaaattggggatgtgctggaggtataaaatatacatgcaattttaaaggcagcacaaagacttaggaaaaaatgtgaaaatatcttgttaataatttttatactgattacatgttgaagtgata

SEQ ID NO: 58511 - DNA, 314 bp, Homo sapiens
  misc_feature 30: n = A,T,C or G
accgggcccccccctcgaaagtcttctagnaattaattaacgcggggggataaaaaaaaaaaaaaaaaaaaaaaaaaaaaaaaaaaaaaaaaaaaggccgccaaccgaggaggaaggcccccgccgccctgtgtggagttccatttcgccctcttcttggtccttttactccccctcattggctgggaataaacacggggtgactggtaaaaccctggggttaccatacttatttgccttgctggagatttacctttaaggacctggcgtatttccctttaggccagttccgctccctctttcgagaatgggaa

SEQ ID NO: 58512 - DNA, 437 bp, Homo sapiens
cggggccccccctcggaagtcttctagaattaattaacgcggggtctatataaacagttgtctttcactgtgacaagagtcctcagccagcaaataacaacaaactcacaatactgcaatactgagaccaccttagagcttaagacgatatttttttaaggaaaaaaaaatactggcacaaaatttaataaaataaacttcaacataaaaacagttttggaccccttcaatcaaagtccatcattgtttcaaaaagtagaaaggttaataattcttgagtttagtaatcccctgaagaaactgttttcagcccacccacaaaactgactggctttcatcaatctctttcatctcaatgtgatcattcctcccactagtagatccacaactcaagatgaatttttttttctttgatttaaaaaaaaaaaaaaaaaaaa

SEQ ID NO: 58513 - DNA, 456 bp, Homo sapiens
gccccccctcggaagtcttctagaattaattaacgcgggggacttacaagatatattgttaaatttaaaaacaaatatgtgaaaaagtatgtacagtatgctattttatctcagaaaaaggtagaaataaaatgcatgtacgctcttgttttgactggatgtttatgtcccctcttagattcatgtgttgaagtcccaatccctagtatctcagaatgagactgtatttggacacagggtcttgaaagaggtaattacattcaaaggagttcaccagggtgggccgtaatccagtatgacttatgtccatatgagaagaagaaattatgacacagacacatacagagggacacaaggagaacacggccaaggagagaagcctcagaagaatccaagcctgccaacaccttgaactcagacctccagaactgcaggaaaataaacttctgctggtta

SEQ ID NO: 58514 - DNA, 574 bp, Homo sapiens
ccgggccccccctcggaagtcttctagaattaattaacgcggggattctctaagacttcttatcttctattttccctaaggtagaacaaaaaacctttcacctccatatttctctaaatattccagaatttcttgatctacaggctagatcaagcttgtccaatccacagcccacaggctgcatgcggcccaggatggctttgaatgaagctcaacacatttgtaaactttcttaaaacattatgagatttttttttgtgcaatcttttttaagctcatcagctatcattagtgtattttatgtgtggcacaagacagctgttcttccactgtggcccagggaagccataagattggacactcctgggctagatcaaaatgttacattttgtcataaaaacattgcactaggccaggtgtggtggctcatgcctgtaatcccagcactttgggaggccaaggcaagcggatcacctgaggtcaggagttcgagatcagcctagccagcgtggtcaaaccccatctctactaaaaatacaaaattagtcaggcgcctgtaatcccagctattcgg

SEQ ID NO: 58515 - DNA, 495 bp, Homo sapiens
  misc_feature 437, 444: n = A,T,C or G
gggccccccctcggaagtcttctagaattaattaacgcgggaagtctttgagaaaaataaaaataccaaaaaagaaagaaaaacattaaaatttaaaactcagtgaatgaaataataaacaaattagttacaagtaaagagaaaggcaataaactggaaaatgtacatagagaaatcatccataatataggaaagagaaatgatgtgcatgcaatatacgagtagaggttaagagacatagagaatagaataagaagctatagtatctttaaatagaattcaaaaaaagaaaaagaaaaaaactaagagagactactggagaagaaacgacatgggaaaaaataatggaagatagttttttaggcctaagaaacaacatgaattcacagaggaaagaaagtatatgtatactaacagaagagaaacattagactgancacatanttaaaatagcacataaagccatacattcttgatctagtatcttcaaactac

SEQ ID NO: 58516 - DNA, 362 bp, Homo sapiens
  misc_feature 16: n = A,T,C or G
cgggcccccccctcgnaaatacttctagaattaattaacgcgggctaccgggtggcagataccatgctggttgcttaggcacaaaagtaaaaggatgctgccctttaaacactgaacagaattgcaatctaacatgttacattttgaggtaaagaagtatgccaaggatcctcttatttgaagcataaaggagaagcctttaaatcagcctgtggtttttaggcaaagcttcctgggggagaggccattctgtgttgagttttgaaggatgtgtaagaagagttagccatttaaggaaagtagaaaggctttttcaggcaaagaagtataacaaagatgtggtggcaaaaaaaaaaaaaaaa

SEQ ID NO: 58517 - DNA, 486 bp, Homo sapiens
ccgggccccccctcgaaagtcttctagaattaattaacgcggggggactctctcccaccagagaaggccttaagagacaacagtcaatttacaacctcagttaggcccatgagggaactctgtccaagtgtcttgaaacaatggccattttacaatctagctctgcccacaatggcgtcagcttgaccatcgggtagataaggcacccaagaagtcacatagaccgtgcacctgcttgcaccctcttctgcatgccatttatgccaagtccccctgtaaaagcccttgttttttgtcccagaagggaaacagtaccttaaaggcaggagcctatacttcttcccctaagctagctttggaataaagtcactttcttcgtaccagacctcactcttgtgaattggattctgcaagcagcaagtgattaaacttgtattttcgttacattaccaggtttctattaagaatacaaaaaaaaaaaaaaaa

SEQ ID NO: 58518 - DNA, 582 bp, Homo sapiens
  misc_feature 44: n = A,T,C or G
cgggccccccctcggaagtcttctagaattaattaacgcggggngtctcacaacattctttccttttccttttctttatttatcatccagttggataacaatgttctaatctaaaataaaatttaacattttatatcattctgaaaatacattcagaaatttagaaaacataaagtaaaacatctggtttctcgattttgtaataaaattataaggccaggcacagtggctcacacctgtaatcccaacattctgatcttcttcatctaaatctgtacaatacacactatgggtctgtagaggtcatagtacactatcttccacctaacttcaacagatcacatcaggcaatggaactatggacagtccccaacttatggtttgggttacgagtttcaactttatgatggtgagaaggcgatacacattcagtagaaacagtactccaagcacccatacaactattctgctttttcactttcagttttcaataaattatgtgagacattcaacacattataaaataggcattctattagatggttttgcccaactgtaggctaatttaagtgttctgagcat

SEQ ID NO: 58519 - DNA, 614 bp, Homo sapiens
ccgggccccccctcggaagtcttctagaattaattaacgcgggggcagctggagggcggcggggctcctggcgccggtagcgcacctgggcaggtgtgccagccaggtccccggttctgggatccgaggccatggcttggagtggcccagacccgaacttcgctcctgtgcccaaacttggaactctggaaatgtggcttcgctcactggcgccttgagcttgggcgactgccgggtccgcgaaacccgacccctgcagagctgactccgggactattttagtttctaacgtcaacttgcccgattcaagagggtttgcgcaaaaaacgtagcccgttgtcctcctgctgcagctgttgttgcagctgtgtggctgcgtttagtaggaataaccaactcaaattgggaagttcttcagctcagtatccgctcctgtaattagaactttttttctttaagcgatgaaattttggacagagagatctggagtttagtttgtgactcgaagaaaaactccaaaatgtaataccttgtcccatttggggggaaagtttgggctaattcaattcgccatggaagtgtcttctttataaagtagtttagtacgtatatga

SEQ ID NO: 58520 - DNA, 605 bp, Homo sapiens
  misc_feature 59, 534: n = A,T,C or G
ccgggccccccctcgaaagtcttctagaattaattaacgcgggcaccaagaacatacanttggagaaagaacagcctttttaataaaatgatgctgggaaaactgaatatctctttcaaaagaataaaactagatccccatcttttgatatgtaaaactagtaaactcaaaatggactaaagacttaaatgctaggcataaaaattcgaaactaatatttttagggtaaaatctcaaaagaacagaaaacaaaagcaaaaatagacaattgtaatgacctcaaagtaaaaagctttcacacagaaaaacacacacatgtaaacacacacacacacacacacaacaaaaaacaaaaaacaattaacatggtgaagagattacctgcaaaattggattacatgttaacaaactatataacaagatattaataaccagaatatataaggtactcaaactcaatagcaaaaataataatccctttaaaaagtaaacaaaggccaggcacggtggctcacgcatgtaatcccagcactntgggaggcccaggtgggcggatcacgaggtcaagagatcaagatcatcctggccaacatggtgaaaccccc

SEQ ID NO: 58521 - DNA, 537 bp, Homo sapiens
cgggccccccctcggaagtcttctagaattaattaacgcgggacctacattcttcctgttttttcacttactcaaaccaaaagccatggagtcttccttgactcttctttttctttcacaatccagaaatcagtgggtctacagttagagcatgtccagaatctacctctgttatcatctttctacaaactgccatcgtgattttcattcattttttgcctagattattgcaactgactaagtgagctccctgctttcccccttataccttacagacaattctcaacacaagctagagtgatctttcacaaacataaatgagatcatgccactactgtcccaaaccctgcaacacagctgccaatttctcttggagtaaggctgaagttcttctactaacccactaggcccagtatgttgtggctcccagtcacacacattacctcgtctgctattctcctcagtggactgtagatgatcatgtatatgatgctccttatacacatcagtcatgccctgcttcagtgtctctgcact

SEQ ID NO: 58522 - DNA, 602 bp, Homo sapiens
  misc_feature 16: n = A,T,C or G
cggggccccccctcgngggtacttctagaattaattaacgcgggtaccaccacagccagctaatttttaaaatttttttgtagatacagagtctctttatgtttcccaggcttgtctggaactcctggcctcaagcaatcctcctacctcaaccacccagtgagtataaatctctaatgtggtatatccagagaacaaaaagaacagcagaaagcttggttgaggcattcatagtgttactcagattctgttgtgggtatattgtgggataaatgatcaatcatataatgttcttattcaatcattcctggtttgattgagtaccagcattcttggagtgggagagagaaaacacagatgttaacataaaatacctgaaaaacaaaccctgaatttgactggaagattatatatgtctatttgtctatctgtacgtgtgcatttgcatttttttttctggcgctattctctgtaaaggcctagacatagagatcaactcagtagctgtgatgtctcctagtacttagattcttaaatacctttcctcctaaagaaatggtgcttcttgagaatggctgattctgatctggagaagaatgaaa

SEQ ID NO: 58523 - DNA, 602 bp, Homo sapiens
  misc_feature 36: n = A,T,C or G
tgggtaccgcggccccccctcggagatacttctagnattaattaacgcgggtgtccattcatttactccttgtcttttataggagaatataatccgtttacactcaatataattgttgataagtaaggaaaggactaactttctcgccattttgttaattattttctatcattgggtctttttttcttgaagatattttgtttccttcttcatctcttgcaattttcctttgtggtttgatagtttcctgtgtggtatgtcttgaatcttttgaatctaattttattttttgtgaatctcctacagatttttgctttttggctaccatgaggcttacaaagaatatcttacacttctgtctattttaacctgatagcagcttaacattgattaaatacaactcaacacctttacccagccatcttatgtttctaatgtctaaattacatcatattataatatatatatcccttgaaagtttattgtagctgtggttgcaattaataattttgtcctttaaccctgtactaagaataaaattactctacacaccaccattaccatcctaaaaatattctgaatgttgatcagtattacttata

SEQ ID NO: 58524 - DNA, 518 bp, Homo sapiens
  misc_feature 28: n = A,T,C or G
ccgggccccccctcggaagtcttctagnattaattaacgcggggaggattgcttgagcccaatttgaggtcagcctgggcaacatagagaaaaccgttgtcaaaaaataaaaataaataaataaaaagagataaccagagtagcccctgtatctaccaaaggactcaaaactgtacttaaaaaccttatcagaaagaaaaccccatgcctagatagcttcactgttgaattctaccaaacatttaaggaagaaatgcagtcaactctacataaattcttccaaaatattaaagaggagggaatatttctcattctatggaacaaagacatcacaagaaaagaaaactgcaaatcaatacctcataaacatagatacagaaattctaaataaaattttaacaaattaaattcaatatatagtactaataaaataataatacaccatgacgaagtcggttttatcccaccgcagagttggtttaatatttgaaagaaaatcatgtaattcaccacattaa

SEQ ID NO: 58525 - DNA, 619 bp, Homo sapiens
  misc_feature 24, 37, 48, 55, 56, 57: n = A,T,C or G
ctgggtaccgcggcccttcctcgngggtacttctagnattaattaacngcgggcnnntgccctcagttctaaggggtggggttcctgaaatcaaaaccaactgtggttctcccagccctcaattttccaagagttggttcattcaagaacctggccttagccaagcagtttgtaacctttctctgaagcctgatactggctaaggaagtggctttccaagtgtgtccagcagcagcaacatcgtctggggacagaaatgtgaattcttaggatctgggacttactgggtgagaaacttcaggagagagccccagcaatctgcattttaataagccctccaggtgattctgaggcacaaatttgagaactcctgaattagataataggagctcctcaattagataggagctcctgaattagatgggctcaatctgatccaaggagaggatttttatctcatggatgtgagaaaggtttcgtctgttcctattgatttgaatcaggaactaaattatccccactgctgctggcagcctttctgacagcatcagagattttggcctgttgattgcaaaagtcaaaatgtttgtcgtcttcacctcaaattaacagattgata

SEQ ID NO: 58526 - DNA, 409 bp, Homo sapiens
  misc_feature 19, 25, 36: n = A,T,C or G
tgggtaccgggcccccccnctcggngtacttctagnattaattaacgcgggaggaggagcttgcagtgagctgagatcgtgccactgcactccagcctgggtgacagagtgagactccatctcaaaaaaaaaaaaaaaaaactggagatttcatctactgcctaagagacagatttgtagtttgagttaaccaagttagatactatgaaaacaaaagtaaaaaaacaaaagtcaatactctttggaggaatataaaggactccagagttgctgtaatataacattcaaaatatccaggatatattccaaaactactcatatacaaagaaacaggaaaatgtaacctattctcaagctaaatgacactctagagagtgaccttaaaatgcttaaacgttgggattagcag

SEQ ID NO: 58527 - DNA, 551 bp, Homo sapiens
cgggccccccctcggaagtcttctagaattaattaacgcggggggcatactcgtagaccttgcctgactgtgctcatgtccaggcaggggggacagtgtatgcaagaataatttggagttcctgccagctctagccagcttcatcagtggctggataaattgcaggactctaaacatttccctgaagaaaaaaagaaaacttaatttggaaatggttctaattgaaaaacctctacttagagtatggattttgatttttaaaaattaaaaatcaaatattttgggctgggcatggtggctcacgcctgtaatcccagcactttgggaggctggagtggacggatgacttgaggccgggagtttgagaccagcctgaccgacatagcgaggcttcatctctgctgaaaagacaaaaaattagccgtggttgcaggtgctacttgggaggctgaggcctgagaattgcttgggcctgagaggtggggcttgcagtgggccgagatcacaccgctgtactccagcctggtaaacagagcgagagtctgtctcaa

SEQ ID NO: 58528 - DNA, 608 bp, Homo sapiens
cgggcccccccctcgaaagtcttctagaattaattaacgcgggtgtactgtgcatataggttcctgtgaattagcatttccagaattagccctgaaccaacaccgtacatttgtgtgtgtgtgtgtgtgtgtgtgtgtgtatgtatatgtgtgtttcccagagactgatgtataattatacatcagctttttctcctttcagatgggacaactctgaaggctataccaaatagtgtcctggagggcttgggtggcattggcccgttgtctacaatgataatctatctgctcatgaatcctaccactactgcttcttcttctctgtctgaattttccacttctctacaggtgatggccctcaaagcctgtctcaggatctgcttctggagcaaagaataaggacccaggttttgggattctgagattaggcacagatgtctgtaaaagtttgttgaaaggaattgaattatgtgaaatttaattgaattaaattaaattatcctgcaacctcaatctctttgggccaaatccaaatactcatgtgctgttatgagagctgggaaagaaggggtggggcatgttattattatcaatctgttgacaattaa

SEQ ID NO: 58529 - DNA, 489 bp, Homo sapiens
ccgggccccccctcggggtacttctagaattaattaacgcgggaaagtgaatctttaaaaaaaaaaaaaaaaaaaaaaaaaaaaaaaaaaaaaaaaaaaaaaaaaaaaaaaaaaaaaaaagaggaaactccaattcgccctataaaagagaaaaataaaaaacaactcccggccccccccgggggggagccccaattggccaaatcggggggttattaaacccccccccctggccctcatttcactttcgccagctggggaaatcccggggaggcccaaattaattgcccttcccaccattcccctctttccatgtgggatataaaaaaaagccccaaccttttgccccttcccaagtttggcccaccttaaatggcatttggatttaaccaccttgtttttttcggaaaaatcccctttaaattttgggaatataccctcatttgttacccagtgggcccaattgggaacattcctttattattaaaa

SEQ ID NO: 58530 - DNA, 490 bp, Homo sapiens
  misc_feature 28, 45: n = A,T,C or G
cgggcccccccctcgaaatacttctagnattaattaacgcggggnaaaaaaaaaaaaaaaaaaaaaaaaaaaaaaaaaaaaaaaaaaaaaaaaaaaaaaaaaaaaaaaaaaaaaaaaaaaaaaaaaaaaaaaaaaaaaaaaaaaaattaaaaaaaaaaaaaaagggggcccccccccggggggacccccaattccccttttagggggtttttttaccccccccttttggccccttttttaaaaccttggaatgggaaaaaccttggggttccccaattttatccctttggccccattcccctttttccccggtgggttaaaaaaaaaaaggcccccaccaaatcccttttcaaaaatttgcccccccttttggggaaaaggaaattttaacccttttttttttttaaaaattccccaaaaattttttgaaaaccccctttttttttaacccaaagcccaaaatggggaaaatccctttttatttaaaaaa

SEQ ID NO: 58531 - DNA, 455 bp, Homo sapiens
ccccctgcgagatacttctaggattaattaacgcggggcggggatggcctgcatcagtccacttcttgctatgaactaaaaagtgaaacactaaatggactgctacatgatgtcaggactgccgagaaataatcacgtaaaaactacattgctattccttcatttaaggcggaaccatcaaggctaaatggatacacaaaagtgacattaaatcctgaagcataattctgatcagggccaatgcaagatatgacattaacattcaaaacttgtccagacaaattgaatggtattcaaatccatgcagtctggagcataaaaagtaagctagacaagccctgtaagattgcaatcatcactgaacataatattcatgtggtttctatcaccctcactgctagcaatttgtccctcatgcgttcactcatggaaaattctgcaaagcctgttctgga

SEQ ID NO: 58532 - DNA, 579 bp, Homo sapiens
  misc_feature 28, 542: n = A,T,C or G
cgggcccccccctcggaatacttctagnattaattaacgcgggactgcgcccatccagaaaacacattcttttcaagtgcacgtgaaacattctccaggatagaccatatgtttggccataaaagaagtctcaataaattcaaaataatgaaaatcataccaagtatgttctctgaccataatgaaataaaattagaaatcattaatagatgaaaatttatgaaattcacaaatatgtggaaattaaacaacacactcctacataaccaataagtcaaagaagacatcccagcgaaaaccagaaaatactttgagatgaaagaaaactcaacttaccaaagcttatgggatgcagcttaaaacagtgcttagagggacatttatagctagaaactcctaattttttaaaataaaaaagaaaagacgtcaaatcaataacttaatcttccatcttttaaaaaatggaaaaaaaaaccaaaccaaacccaaaacaagcagaaaaatgaaataacaaagattagagagctacttgaaaggctgangcaggaggatcacgtgagccccagtcaagaccagcct

SEQ ID NO: 58533 - DNA, 640 bp, Homo sapiens
  misc_feature 38: n = A,T,C or G
actgggtaccgggcccccccctcggaaatacttctagnaataattaacgcggggcaactcaaaggataaatgcttgaggggtggatatcccattcttcatgatgtgcttatttcacattgcatgcctatatcaaaacatctcatatacgccatgaatatatacacctactgtgtacccacaaaaataaaaaaaataccatctaccatatctaccataatatcataacacataaaatattcaggataaatttaataaaagttgagcaaaacctctactctgaaactttaaaatatttctaaaggaaaataaagtatacttaggtaaataaaatgatctatcatgctcatggattagaagacaattattaaatctcatcttcaacgattatgcagagagagaccgcaattctaatcatatttccaggaaacgttgacaacgaattcctgaaatttacatggaattgcaaaggacgtaggacagccaaaacaacccttgaaaaacaagaacaaagagaagtcacattagctgttttcaagagttgttataaagctacagccatcaagactgaaccaggaccgcgtggagtcagcggcaggacctgataatagactccgggaacaaaactgagtgttcggaaac

SEQ ID NO: 58534 - DNA, 554 bp, Homo sapiens
  misc_feature 520: n = A,T,C or G
gggccccccctcggagtacttctagaattaattaacgcgggccctaatttaactgggtttctattgctaacactttctattcttttttacttacagcttcatgatctcaaagtcaaaataaaaagtgaaatttcaatttatatgcatactttgttatagtgaagtatgatacattgataaatgctttggggcatattacatcacattaaattctatagcgaaactgaaatgaagatataagttcaaaaagaggatgctctctattctaaaatttctgatagataaagaggagcttgctagtttatatatgttttatagatggattatggcagatatcaaatctctatggtatttagattgcatttgattcatttaaaagagcaatataacaggtttattttaaaattcaatatttatagcacactagaaatgacatattttacaactatgtaaggctcgaatggaaaattatggatgccaatttaaacatgagcaagagtataagcagcctttaaaaatntttttagtggatgatatacaaatcattttgagga

SEQ ID NO: 58535 - DNA, 565 bp, Homo sapiens
ttctagaattaattaacgcggggcccagctgcacctctaggagggctgatatcaacactgtgctgaaaggcaaggggggtcaagtttaaagttcagcatacttctcctttgaggagtcaacctcccgtcttccaggcaaggcatccctatgttctgggttttcctggacagtctcaacttttaattttacttctaaatgtataattacatttgacttaaaaaatactgtccgaatagctatgctgatttttggtttggaaaatatgctcaccatggctcaagaaaccatgtaacataataatgcagccaatctcgacctacaacacaagctgtaagttaaggtaccctcgagaacactactctttcctcttccattccttcaggtgttataaaagcaagcctaagttaaagttctatttcctaagagggaaaagaattgcttttcaatgcaactgtagttcacggtggcccctcttactaatgactgcaaagcttctgccccacagtgttgttttatacagaacagacactaattctttttataaacaatgatattacatggaac

SEQ ID NO: 58536 - DNA, 609 bp, Homo sapiens
cccccctcggaagtcttctagaattaattaacgcggggtgggctgcatcataatgatttatgttgtcttctcttagaaaggtaagggttttaataattgaatgtttatttatagtctaaattactccagaaacaatcttttctattttactaatggaatgttttgtctttcaggcaagaagatatcagattgacatcatttagaagaattaagaaaactatgaacatgactgattattaaatgtctcatgttaaacaatgcaatgtttgacatcactttacaaacttggatcataaactggcactttggtatgcataagaatttcttcaggacaataagaaattatgagtgaatttctctatattctgagtgagaaaaatgtttagctgtgaagaaaaatgcatgtcattaaaaaaagtttgataaatttaatcacattacaaaaaattatccccccttccctctggaaaaaaactatagagaaagtgggctgaggctgtgcaaggtggctcatgcctgtaatcccagcactttgtgaggatccgttgagcccagaaattggagaccttcctaggcgacagagagagaccccatctctacaaaaaaaaa

SEQ ID NO: 58537 - DNA, 215 bp, Homo sapiens
cccccctcgaaatacttctagaattaattaacgcggggaggagggcgggtgaggatttccccatataccagtgtgtgttcatctacccatgaggaataaaaccatgcagcagcatgcaaaaaaaaaaaaaaaaaaaaaaaaaaaaaaaaaaaaaaaaaaaaaaaaaaaaaaaaaaaaaaaaaaaaaaaaaaaaaaaggggccgcaaaaagaaggg

SEQ ID NO: 58538 - DNA, 541 bp, Homo sapiens
  misc_feature 13: n = A,T,C or G
ccgggcccccccntcggggtacttctagaattaattaacgcggggtgggggagtcacacttttcagaccgattagaataatgagattctctaaacagttgagaaccatttgtaagaatagcacattgtgttagaaggcaattagagctcattcttttaataattaggttttttgagttcttacagtatgctgagtactaagattataaaaatgaacaaaaattgttctcaaatgcataatctggcaaggaatttagtcataattagcaatacaacaatatcataatagatgttgaacaaagtactatggagacttcgaggctgaagcgattaatttggtgtcagtttgagaatgaagctggaatgtttttatatattaaagttgaatcttgataatcaatactaaataaaagaaatgaagtggtaggcagaagtaacaccataaaccaaagcatagggttgtggcatcatatctgtaaagagaatccaggttagctggagggatgaggcattagtagagcacgtggagatgtaactggaaa

SEQ ID NO: 58539 - DNA, 430 bp, Homo sapiens
attaattaacgcgggcagggatagacacagagaatggcctctcacaaacacatgatcataatggattcaggcaagaattgttagtggctgtttaacaccactgggcaaaagaccattgggaatgagatatccatacagcctccaagaatcacccacatgttactttttaattacaaggggaaaaagttacctttataaatggagaaatctgacaggcactacctttactaataacgatgagacttaacaccacaaatatcgggggaagtcaacatcacgcgcccttcccgtgatgccctgagaaggacgggtgtcatcacaaggtgctcctgcaaaaacgctcaccagagtctccaggcaagtcctcactgaggagcattcttcagaacaactggcctgacctcttcatgaaagacaaaaaaaaaaaaaa

SEQ ID NO: 58540 - DNA, 607 bp, Homo sapiens
  misc_feature 585: n = A,T,C or G
gccccccctcgaaagtcttctaggattaattaacgcgggttccttaaattttcatgtaaataatatataaaattaaaaacttttatgtttcaaagaacatcatcaagaaagtgaaaagacagtgcatagaatggggaaaaatatttgcaaatatatatctgataacaggcttattgccaaaatatataaagaactctcacaactcaaccgtttaaaaattcgattttaaaatgggcaaaagatttaaataaaaatttctccaaagatataccaacagctaatagccacataaaaagatactaaaaaatcattagtcattatggaaatacaaatcaaaaccacaattagatacaacttcacatctacagtcattgctgtaataaaaaagacaggcaataacaagtgttgagcatgtggagaaattagtaccccatgcactactggcggtggaaaatggtgcagctgctgtggaaaacagtctgacagcttctcaaaaagttaccataggacctagcaactcaactcttaataatatatcaaaagaattgaaaacaatagtccataaaaaatgtgtatgcatatgtntaagcaggattatttataatag

SEQ ID NO: 58541 - DNA, 520 bp, Homo sapiens
  misc_feature 468: n = A,T,C or G
gcccccccttgggaagtactttctaaaattaattaacgcgggctagaatataatttgtaggtgcagtaaatgtgaagaaatatttaggctaaaattaagactatgtaaacatcagaggatttacagtagaaagaactaaggaactaacacttcagactttaaaataaatcagagtattaagtataacaaaagttgaacctgttagaaaatttccttgtatataagttgaaaagtaggtttttgaagagatatattcgaaatatattttttcacttgaaaaaagtaaaaatttttttcaaaagcaaataattcaactctaaaattatactatttcaacattctcatttatgtgaaagcatgtgataaattgttgctgcgtcagagatatgagaaattcctttgcattaagtgggcattattcatagacttctacatgaaagagaagagaaataaaagatgcaccagganaatctgagcagagaggcttttagtggttgacttactgagtgatgcctgaagt

SEQ ID NO: 58542 - DNA, 232 bp, Homo sapiens
cccccctcgaaaatacttctagaattaattacgcgggggattccgtgaaggaacaacacctaaacccaagaggcagctgttgcagcatccagttcatcttaagaatgtcaacgattagtcatgcaataaatgttctggttttaaaaaataaaaaaaaaaaaaaaaaaaaaaaaaaaaaaaaaaaaaaaaaaaaaaaaaaaaaggaaaaaaaaaaaaaaaagcggccgccacc

SEQ ID NO: 58543 - DNA, 518 bp, Homo sapiens
  misc_feature 44: n = A,T,C or G
ccgggccccccctcgaaagtcttctagaattaattaacgcgggnaattagtaattatagtattataagtgaagggtctgggtatatttttttaacattatctccctgactacaatgtaatagttccatttattttctccattacacacatacagacacatacctacatacacacacatatttacacaaatatccttaacagaggccgactatctcatacatcttcttgcaaagaaacagtgattgagtcagttaaaaaatattatttactccaataattcctcaaaatactggattttctctctttgatattttgtaccaattctttcagtagtgcctgctgtggtgatactcttttgtgatgaaacatttttttttccacagcaaatggaggagtttgtacagagctctggagaatatggtgctgtggtgttttctctggggtcaatggtcagtaacatgacagcagaaagggccaatgtaattgcaacagcccttgccaagatcccaaaaaaaaaa

SEQ ID NO: 58544 - DNA, 262 bp, Homo sapiens
agcgggtgagcctgtgggggcccttcaccctcctaagacctccggcctacctgtgatttcacttccactcctaacgctcctatactagcctactaaccaacacactacatataccatgatggcgcgagtacacgagaagccataccagggccaccacacaccacctgtccaaaaggcgtacgtacgggataatcctatatattacctgagagtggtttgttcgcaggatttttctgagcctgttccactccagcctagcccc

SEQ ID NO: 58545 - DNA, 453 bp, Homo sapiens
  misc_feature 44: n = A,T,C or G
ccgggccccccctcggcgtacttctagaattaattaacgcgggngaaaaaaaaaaaaaaaaaaaaaaaaaaaaaaaaaaaaaaaaaaaaaaaaaaaaaaaaaaaaaaaaaaaaaaaaaaaaaaaaaaaaaaaaaaaaaaacacgcactctctttacggggtgcgtgcccccaatcccacttaaaacgactcttaccctctaccgtttggcttgccgcgcatcaccttggcgtggggactatcactcttactgaacttggacattacctgcccaccaaagcgagatctatacataacatcaaacgaataaaccgattgttaggtaatcgttacctccacaaagagcgactctctgtatacggggggcatgctagctttatctgttcgggcaatacgatgcccattgtacttgttgactggtctgattttcgtgagcagcaacgacttatggtat

SEQ ID NO: 58546 - DNA, 442 bp, Homo sapiens
aattaacgcggggggaaaaaaaaaaaaaaaaaaaaaaaaaaaaaaaaaaaaaaaaaaaaaaaaaaaaaaaaaaaaaaaaaaaaaaaaaaaaaaaaaaaaaaaaaaaaaaaaaaaaaaaaaaaaaaaataaaaaaaattttaattataattttttgggcgccccctcccggggggggttttttttttccccctttgtgggtttttttttggcccccccttttttggtcttttttttaaaccctggggggggggaaaaacttgggttttccccctttttttttttttgaaaattttccttttttaccggggggggttttttttaaaaaggcccctcccggttccttttttaaaaaattttccccttttgaggggtttttgaattttttaccctttttttttttttaaacctcccttttaattttttttaaccccgttttttttt

SEQ ID NO: 58547 - DNA, 347 bp, Homo sapiens
tagtaattaattaacgcggggcgaaaaaaaaaaaaaaaaaaaaaaaaaaaaaaaaaaaaaaaaaaaaaaaaaaaaaaaaaaaaaaaaaaaaaaaaaaaaaaaaaaaaaaaaaaaaaaaaaaaaaaaaaaattaaccaaataaaaaattttttttgggcccccttttttgtgggggcccccccccccgggggggggtctttttcccccttttggggggttttttcgccccccctctttgccttttttttccccctggggttttgggaaattcggggggtgccccatttttttctttcggtagcgctttcttttttgcaaggggggggtttaaggaggagggccccccc

SEQ ID NO: 58548 - DNA, 577 bp, Homo sapiens
  misc_feature 27, 40: n = A,T,C or G
agactgggtaccgggcccccccctcgngaatacttctagnattaattaacgcgggggtagggtgagatagaacaggaaccccctcttagggacctggatgccccaccaaacataaatgttttttatattttaaattccttcaaaaattttttcagatacctattgatagctagccctgagaagtaaataacttaataaaaaaaagataacagtagccaaaaacaatagccaagaacactaaaatcacaggatgtttgctacccctatgacctcttaacatatgactgaaacccggacccccaccaaatgaatgtgccaggtccatagatgtcaaataagggggaactgggactaaactctaaccacattctttttttttttgagacggagcctgggcaatagagtgagactcagactcaaaaacaaaaacaaaaacaaaacaaacaaacaaacaaacaaaaaacagaaataaaatataaaattgttttgggatagtttgatgcactataatttatttgtagttacaaactcaggatcaaaaaagaccgcatagcaaacatctgcaaaaaaaaaaaaa

SEQ ID NO: 58549 - DNA, 616 bp, Homo sapiens
ggccccccctcggaaatacttctagaattaattaacgcggggtaatcgaaatatactacagtaaagttctgacattttacatgaaatgtagaatattatttgactatagactataagttaaagatatatattgtaaaccctaaagccacaactaaatatttaaaataaagatgtatagctaataagggaataattactatgcaatagattaataaaaattctcactctgaaagagaaaaaaagaagaaaagaacaaacagagcaaatagaaaacaaatagcaagatggtaggtttaaacccaacattattgataattacattaaaggctgaatattccaattaaaggcagagactgtcagattagatttaaaagtaagtcctggctagatgcagcctgtataccaatgtttgtagccgccttatttacaatagtcaaaaggtacaaacaacccagatgtccaacaggcgaatggataaacaaaatgtgatatatacatacaatgaaatattatttggccttgaaaacagtgaaattctgatacacactgcaacatggatgaaccttgaaaaaaggacaagtattgtatattagtgtattcctgattccacttgcat

SEQ ID NO: 58550 - DNA, 434 bp, Homo sapiens
ccgggccccccctcggggtacttctagaattaattaacgcgggagaagcatgctgctgaattatcaacgaggattttcaagttaacttttaaatactggttattatttaattttatatccctttgttgttttctagtacacagagatatagagatacacatgcttttttcccacccaaaattgtgacaacattatgtgaatgttttattattttttaaaataaacatttgatataattatcaattaactgaaaaaaaaaaaaaaaaaaaaaaaaaaaaaaaaaaaaaaaaaaaaaaaaaaaaaaaaaaaaaaaaaaaaaaaaaaaaaaaaaaaggggccccccccgggggggggccggaaccccccctagagggagaggaataacccccccccacggcccggggggcaaaaacgccgggacgggaaaacccagg

SEQ ID NO: 58551 - DNA, 447 bp, Homo sapiens
attatgcgggccattaagcacaacaacatacacattacaggagttccagaaagacaggagagagaaaaagcacagagaaaaatttcaaagaaataattagctgaaaacttgccaaatctgatgcaaagcattaatgcacacatctaagaagcacaacatactccaaaaaagataaacaaaagggatatatatctagacataatcaaagtcaaaatgttaaaagtcaaagataaaatcatgaaagcagcaaaggaaaaagaacttatcatttagataagaaccccaataaaattagtatctcacttattagaaacaatgaggtccagagacaatgggatgagacagtcaaaatgctgaaaggaaaaaaaactgccaagcaagaatcttatatctagcaaaactataaatgaaagcaaaataaagacattcacaaaaaaaaaaaaaaaa

SEQ ID NO: 58552 - DNA, 562 bp, Homo sapiens
acttctagaattaattaacgcgggttacttattatacatctattcaaattatctatttcttcacgagttggtagacagtatatttctaagaatttgttcattccaactgtgttatccaataagctgacatagaattatttatagctttctcttcaaatttttttatttctgtaaaatcagtgtaatgttcctcctttcttttaagattttagctatttgagtcttacatcgtttttattcatgcagttattctgtctaaagatttgtgaagtttgttgaacttttcaaagaaataaaacaatgttattgatttttctctactgtttgcttgtcctttattagtatctctatgctaggctcatgttttctttttggggggtttagcttaatttactttttgtagtttcccaagtgcaatatgaggttatttatctgagatcttttttttttcattaaaaatgtatgtggttatggctataaatttccctgttagcactgctttttgctgcaacccataagtttggtatgatgtgttttgttgtgagtagtctcaagcgatttc

SEQ ID NO: 58553 - DNA, 608 bp, Homo sapiens
  misc_feature 40, 75, 88: n = A,T,C or G
gactggggtaccgggcccccccctcggaggtacttctagnattaattaacgcgggttggatgtcaaaagttgcangaaaaaagaccanaacgttcagggaaaaaacttaactgtatccagcaattcagatatagcgaaagtgaagtcaatgttccaggaagttcttccaaaacaaaggtagttgtctctggaagatggaaccacagtggtggtatgtaaacccaaacttttacccttaaaatctctgactctggtaaaattagagaaaatgcaccaagcagcacaggatacaattcgccaacaagaaatggcagaaaaggaacaatggcaaataacccactggatgataccttagcactttagggaacaatctgccttatctactatttaacaataacttggctgtatgtggtggctcatgcctgtaatcccagcactctgggaggccaacgcaggcagatcacctgaggtcaggagttcgagaccagcctggccaacatggtgaaaccctgtctcaactaaaaatacaaaaattagctgagcgtggtggtggggcgcctgtaatcccagatactcaggaggctgaggctcaagaatcgcttgaacct

SEQ ID NO: 58554 - DNA, 565 bp, Homo sapiens
ttctagaattaattaacgcgggttttgcttactgtatactctccacctaaacttttatccatttccaaggcttctattaccttgttgacagttcccaagtacatattgccatttcttatctctccattgagttccagacccacaagtcccactgttttatgaatacctggaattggcaattcaaattcaacctcagtttaaactcaatttctcaaacaaatcttctcaggtaaaattgattttcagcttaatagtgtgctagatagcaccattgtctactccattcttttgacaaaagcctggtggacattcttgacttcttctttaactcccatagccagtcaaagatcaggttctaagggtcataccaattctcaaatccatccatctttctgcatctctaccactgtgatagaataagaaatttatctttgatctttatccataatttgtggtacagagctcctaaaactcttgtaatttcctgaataattggtggtgataggagattgagttaataaacatgcatgtatgataaaaccctccaaaaaaaaaaaaaagcggc

SEQ ID NO: 58555 - DNA, 582 bp, Homo sapiens
  misc_feature 28: n = A,T,C or G
cgggcccccccctcggaatacttctagnattaattaacgcgggcagtgctagaagttatttttctagccaagttttcccataaccaatttcccctaggctaattgttcaaactccttgaaaattacagcattctttcctaatgttttataataattctaaaataataaaaataatttacatattttactataaccatgaaaatataaaatatttggttcacagaattatagacacaaataagactgaagatattatttactgaaaactcctcagtttgttatacagatgaggaagtaaagactccaagagtttactggatttgcccaaagtcacagggctagtaaatggagagtccagatagtacattttccatcataccaacatgtcatcaaaaacaaaccatatgatagaagtttcttagtcaatctaaactgcaatattaaccggataaagaagaattcaaacatgagaacatagacttgataaatgttaatatgccttttcacatcctcagtgagtccaggaacctatattgtcattattaatgcactgctaagtccaattccaaaaaaaaaaaaaaa

SEQ ID NO: 58556 - DNA, 602 bp, Homo sapiens
  misc_feature 23, 34: n = A,T,C or G
tgggtaccgggccctccctcggngatcttctagnattaattaacgcgggaagtatttagagaagtcagggctgggtaggggttgtgtgggcagacaggtggaattcaatgaagggagattctttagcctttccttcaagtacatctttctcctgagtacatttacttccatcacaatggactagaagagatccttgcttagtggtgcagaacccttgagacctaatttagcttttataggaaattcaaaaagagaaagacggcacaagagcaagagaacagaacaaagatatgagtttgtacagagaatattgatacttgtggactgcttctgtaactcttttaaaataaattttctaagtaaatgctgacgtaggcttttctgttagtggaaggctgagctcctcccgccaaacaatgcgctgcccaaatcatctttacaattcccgacagtctgtcgtctccgaagctcgggttcattggtttttattctgtgaaggtcaggaagcgttttggaaaaataaattttcctttttaatttcttaaattaaatgtgtcttcccaaggatgcccagagataggaaagttacataaatgctaatt

SEQ ID NO: 58557 - DNA, 598 bp, Homo sapiens
  misc_feature 16, 523: n = A,T,C or G
cgggcccccccctcgnaggtacttctagaattaattaacgcgggatctttacattggcgaatacaaaataacattggaattcagagtcaaattcatgcctcagttggcctgttaatatcatcatcttttggataccatttcacttttttccattgacaacttgtacctattagctatatattacttgtttatttatttgaacatttatgttttttttaatctttcagtagcccattgttttttaattgaaaaagttatacacgcaaatggttaaaacaaattttatacaagagcatataatgataaaaatgtttccttaccaccctagatctcttagtcccctttctcagaagcagctatgtatgctttttcagttttctgttttattttcctgttgttctatttaatacagataccaaatgtgagttgtaataatcagcattgcattacatttttatacacttaatgcattcaaggtgtatatcacattctaaataaatgagatattggtgacattgctatntaaattctgccttttattaatgcatttttcttttttatttactttgaacatgttagttaccattcatattgttaa

SEQ ID NO: 58558 - DNA, 610 bp, Homo sapiens
  misc_feature 554: n = A,T,C or G
gggtccccccctcggagtacttctagaattaattaacgcggggggggtttcaggtgggcccacagtttatgattgcctcctcttaactctaccagtggcatgcttttgttaccaaactatatttgtcatacagccagtcaattactaatctatttttatcttgatgttatgactatatcttaatcacattactttttgtagttcttaaagtctgttgctaaaattatccctataaactttataaaattaagaagggaaagatgggagagggagaaaaaaataaaccaaactggcagcatattcagcattaatcattaggtcagttgctctctgacctgcttctcaagtttgctgcctatcatgtagactctgtcacaggattatagcaccccccgccccatctgctctatagataacaacttgaatgttttgaaacattgagttttctatttgagacattcttctaggtcctgcatatcgatgaaactactgacagcagctgtctgaaagaccccacaagaagctgtcttaccaaataattcagtttccacatnctggtgatctaatactccttactatgacgaaatcatgatgcctattttctagcccc

SEQ ID NO: 58559 - DNA, 365 bp, Homo sapiens
  misc_feature 23, 36: n = A,T,C or G
tgggtaccgggcccccccctcgngaatacttctagnaattaattaacgcgggggtccgcattacataaatatttactttgctgcaaaattcattcctcttaatctgatcactgttttttcttcttctgtgcaattcctcttgtgagaatataagatctttgacaatacggaatgtattgtcgctgttcttatatgataagctattaccgatattcccagcaacaagtgttgtgtccactatgtatgatgagctcaatatgtatttactaataaaatgaattagcaaacagcttgccattttcttcaatggacaatacacttaatcactcatactgagtttcctaacaggaagaaaaaaaaaaaaa

SEQ ID NO: 58560 - DNA, 608 bp, Homo sapiens
  misc_feature 22, 85: n = A,T,C or G
cccccctcggaagtcttctagnattaattaacgcgggactatactcaacttacactacagttaaaggaacactgaccctcccagnatgagaaaaaatgagcaattcaaaagagaactctggcaattcaaaaagacaaagtatctcctacctccaagtgagtccattagctccccagcaatgatttttaacaagtctgaaatgactgaaatgacagacataaaatttagaatctggatgacaaggaagttcattgagattgaggtgaaagttgaaacccaatataaggaatccaaggaatacagtaaaacaaagagctgaaagatgaaattgtcattttaagtaagaaccaactgaacttctagagcttaaaaaaattcactgcaagtatttcataatacaatctaaatattaacaggataataaacaaggacagaatcttagagcttgaagaccagtgctttgaatcaactcagataaaaataaagaaaaaaatgattttaaaaaatgaccaaaacctcacataattaaaggattattgtatagagactatatctatgattcattggcatttctgagagaggaggaggggaaataaacaatttggaaa

SEQ ID NO: 58561 - DNA, 405 bp, Homo sapiens
  misc_feature 266: n = A,T,C or G
cgggccccccctcggaagtcttctagaattaacttatcgcgggctacctctaactacatgtaattctgtcttggtggcatttctatcttgtcaactcaatgatataagcaaaagatgacatatattagaaaagcagtactttttttcagtttgatgaaaattgtaagaaagctaatatctgacaatattagggcaattactattttgtctaaataatttttatagaaaagatggttaagtgacataatttaaaaatattctccagnagccaaaggaaaatatttggaagaatagctatatactagtggatatcctaaaatagactgaaaaaagagtcttacagagtgtgtgtaacattgagcctggctggtattcaaggatgtgtgcaattctggtacatttaat

SEQ ID NO: 58562 - DNA, 453 bp, Homo sapiens
  misc_feature 29: n = A,T,C or G
cgggccccccccttcgaggtacttctagnattaattaacgcggggctaggtaacacacacagttactttcatcatcatttgatctatttttaaaatgccagctgggcatggtggctcatgcctgtaattgcagcactttggaaggctgaggcaggcaggaggatagcttgaggccaggagttcaggaccagtctgggcaacatagcaagaccgcagctctaaaaaaaaataccctcagaaggctctaataaacactgcagtgctatagtagacacagagacatcagtaggaactcatgtttacattagtgtgtatacaggtagatatatacatatatacgtatatttcctagctttcccatcgagaaggcctagaagcagtgatacctcaatagcaatgaacgctcagcacccagatgttcatttctaaataccgttctccaaaaaaaaaaaa

SEQ ID NO: 58563 - DNA, 585 bp, Homo sapiens
  misc_feature 108: n = A,T,C or G
cggggccccccctcggaagtcttctagaattaattaacgcgggtaattccaatcagtccaataatctaataagcataagacagagaaagtggatcaaaagaaatattntgaaaaaatgatggcatagaattttctagaattaattactgacactaaaccacagatcaaaatagagaatgctgactaagataaatatcacaaaaacacacctatgcatattagtcaaactgctgaaaacaaaagacaaagagaagttcttaaagcagttgggtatgggggaatcctttacatataaaggaacacagatgagacgtggagccatcttccttccagaaactacccaagccagattatgatgagacattttatagtgcagaaagaatgatttacttgttaaaaatttacccagaatttataggcagtgaatataattttcaaaaataaagtaggaaaaaaactgaaggagaaatactttctcagacaaatatgaagggaagtcattttaacatagaaaacctacactaaaagaaatggtaaaagaaaatttcttcaggaagaaaatgatacaaaattgaaatttagatc

SEQ ID NO: 58564 - DNA, 501 bp, Homo sapiens
  misc_feature 27: n = A,T,C or G
cgggccccccctcggggtacttctagnattaattaacgcggggggaggaaaaaaaaaaaaaaaaaaaaaaaaaaaaaaaaaaaaaaaaaaaaaaaaaaaaaaaaaaaaaaaaaaaaaaaaaaaaaaaaaaaaaaaaaaaaaaaaaaaaaaaaaaaaaccccaaaaaaaaaaaaggggggccccccccgggggggggccccttttcccctttttgggggtttttttacccccccttttggggggtttttttaaaaggttgggggggggaaacccttgggtttccccatttttttggcttgggggaatttcccttttttcccgggggggtttttaagaaagggggcccccccatttccttttttaaaagtttgccccccctgggggggaaggggaaattttacccttttttttttttttaaaatccggttttttttttttgaaaaccccctttttttttaccccatgggggcaaattgggaaaattttttttttttttaaaaa

SEQ ID NO: 58565 - DNA, 535 bp, Homo sapiens
  misc_feature 524: n = A,T,C or G
attaacgcgggatgtgtccaggaatttatctattccttctagatttttttagtttatttgcatagtattctctaatggtagtttgtatttctgtgggattggtggtgataccccctttatcatttttttattgcatctatttgattcttctctcttttcttctttattagtctcgctagtggtctatcaattttgttgatcttttcaaaaaaccagctcctggattcattgattttttgaagggtttttttgtatgactattgattttataaagcaataataatattgccttctggggtttaaaattaaaatagaagcaaaataaataaaaactggtatatatattaagagaggaataaatacaattataattctctaatgtctttttcttttcccgaacaagcttccaattaacattagactttgataagctaaagatgtaaattcagcttttagtttaaccactaagagaatagaaaaataaatgtctaatcagccaatgaatacataaccatcccccaaanaaaaaaaaagc

SEQ ID NO: 58566 - DNA, 622 bp, Homo sapiens
  misc_feature 43, 231: n = A,T,C or G
cgggccccccctcgaaagtcttctagaattaattaacgcgggngaaaaaaaaagcaactaataaaatggtgtgtttaaatacaacaatctcaataacttcagtaagtgcaaatggtctaatcaccctaactaaagggcaaagtttgtcaaattaaattttaaagaacaagacccaattatatgctttctaaaagaaaccaatttaaagataggttaaaagtaagcacaggngaaaaaaatatcccatgcaaacaccagtcaaaataaaactggagtagctatattaatatcaaacaaaacagatttcagaacaaggaataaagggaaatatccaatagaagtggtcaagtcaacaaagacacaacactaactgtatacatatataacaacaaagtttcaaaatgcataaaacaaaaactaataaaactgtaagaagtagaagtaggaaaatccaaacttatagttggaaactttaacactggacaaaacaagtaatcataacagatacagggcctgaaagaagaaatcaagagggaaatcagaacatattttgagttgaatgaaagtaaaaacccatacagcgtgtatcccagaggtaaaaaaaaaaaaaaaaaaaaaaaac

SEQ ID NO: 58567 - DNA, 358 bp, Homo sapiens
gggccccccctcgaaagtcttctagaattaattaacgcgggaggtggaggctgcagtgagctgagatctcaccactgcactgcaacctaagtgacagagtgagactctgtctcaaaacaaacaaacatatataatttttatatgtatatatataaaaaacatataaacatatataaacatatattatatataatatatgcaataaacatatataatataaatgtatacaataaacatagatttactctaaagaattgcctcatgcaattacagaggctggcaaatcccaagatctgcagccagcaagacccaagagagccaggccaatggccagcaggctagaaaccctgatagaacc

SEQ ID NO: 58568 - DNA, 564 bp, Homo sapiens
  misc_feature 9: n = A,T,C or G
acttctagnattaattaacgcgggacacctactttcaccacttccatttaacattgtattggagatcctagccaatgcaacaaggcaaaaaaaaaatttaaataaagtaaagaacatacagattaaaaaaaaaaagaacaaaagttcacgatcctgtatgtagaaatcctaagaagtctacaaaaagccactacaaagagttttaaaaaattagttcagcaaattcacaggatataaggataatataaaaatcaaaaatcaattgccttctaatatactagcatttactgtaaaactacaataatatagtcaatgttgtattattgtatgaatagaaatgcagcttaaacaaacagactgagacatgcatatgtagccaactgatttttgacaaagatgtgagttacttcaacagagaagtacctttcagcaactgatatccatttggaaaaacaatgaacctcaactattatcacatattttgtaccaaaattaacttgaagttaatcatagaacactatattaaggcaaaaaacttaaaacgtgtataagaaaacacagaga

SEQ ID NO: 58569 - DNA, 252 bp, Homo sapiens
  misc_feature 25, 37, 53: n = A,T,C or G
ctgggttaccgggcccccccctcgngaatacttctanattaattaacgcgggngtgaaaaaaaaaaaaaaaaaaaaaaaaaaaaaaaaaaaaaaaaaaaaaaaaaaaaaaaaaaaaaaaaaaaaaaaaaaaaaaaaaaaaaaaaaatttaaaaaaaaaaaaaaaggggcccccccccgggggggacccccattcccccttttagggggtttttttcccccccccctttgcccgttttttaaaaactttggaa

SEQ ID NO: 58570 - DNA, 515 bp, Homo sapiens
  misc_feature 34: n = A,T,C or G
gggtacccgggccccccctcggaagtcttctagnaattaattaacgcgggtgatcacctgaggtcaggaattccagaccagcctggccaacatggttaaccccgtctgtaccaaaaaatacaaaaaattatctgggcatagtggtgcgtgcctgtaaatcccagctatccggaaggccgaagcaggagaatcgcttgaacccaggagacggaggccgcagtgaccgagatcgagtcactgcactccagcctgggtgacagagtgagactccctctcaaaacaaacaaaaaaagattacaagaggatttaataacaagattacaagaggatttaagagacatatcagcccatggcaatgtatggaatttatttagattccaatttgaaaaaaactatacccccaaacatttatgaggccgggaaatgtaaacggtgactggatatttgcttatcttaaagaattactattcttaggtatcatcatggtagcgtgactacttaaaaaaaaaaaaaaa

SEQ ID NO: 58571 - DNA, 620 bp, Homo sapiens
  misc_feature 27, 38: n = A,T,C or G
ctgggttaccgggcccccccctcgganatacttctagnaattaattaacgcgggggctatttacacactgactgatgtgaccatgtaactcagtttttacatgaattttagtaccaatgctgcaatgaattgtgaagggtaatttcttaaattcattttcaaatgagctttttaaaaagaaaactagtgtcattccttgagtttcattttaatgtatctattcacatactgcttttaacttcttttcatactgctaattttttttcaatttgatcttttcaagattgagactacatattccaatttatagtaaatcagaaatgagattttcaatttcataatgaactttaataaaatagatttgttttctgtcagtgaaaatatttaggctaaatttccagaaaaatttcaccttcatttaataactgcattgttgaccaaaacttctgattaccttatttcgcaaatgtaaaaataaaataaaataagaaaagacaaataaaggaaaaagtcaagaaaggtatacttgagaataaggcagaaatcttccagaaaatccagactgttcatacacaatactttaacataaatattaggaaagtaacaatgctagacatttg

SEQ ID NO: 58572 - DNA, 592 bp, Homo sapiens
  misc_feature 38: n = A,T,C or G
ctgggttaccgggcccccccctcggagatacttctagnattaattaacgcgggtctcatattaagataggcaagtaaattggaagaagtgtaaaatattttttctattcaacatgactttattgtttggtagaaacagatcactttaaccattgcaaagtgtaaaatattactatcgtacatccatgtgccacataacagtgttttggtcaatgacagcatgtacaatggtggtcccataagattataaaggagataaaaatttatatcacctagtgacactgtagccaccttaacatcacaatgcaatgcattactcacgtctgtggtgacgctggtgcaaacaaacctactgcactgtcagttctataaaagtatagcacatgcaattatgtacagtacataataattgatcatgataagcaactgtataactggtttatatatttactatactatactttctattattattttagagtgtactccttgtacttatttttctttaagttaactataaaacagtgtcaggcagggcattcagaaagtattacagaagaagtcattgttatcatagatgccagctccatgac

SEQ ID NO: 58573 - DNA, 272 bp, Homo sapiens
ggtagaagaggaaactcaagaataaacccctggtgcagagccccaattcctacttcatggaggggatgtgcctagtatgctatgaaatcaccagggactttagccatgcacaaacggttgggacgtgagcaggctgctccactgacctctgcccgcctacaggaggagagagcaacggcttacagataggatgttccttcacgaggagagcagcgctaaaagcactctgagtcaagatgagtggggagccatctcaataaacacattctgga

SEQ ID NO: 58574 - DNA, 598 bp, Homo sapiens
  misc_feature 38: n = A,T,C or G
ctggggtaccgggcccccccctcggagatacttctagnattaattaacgcgggcaggcttgggcaagttgcaaattaaaaaatcctatcttgttggtaaaatgaaagttgtcaatttaatgaaattgtttatatttcataataaatacatatggctgtttttgcttcattttggatataattcttgccacctttctagacagatgtcagaactttaaaaaaaaaatactacagataatgtatcattttacaatttatttctataaagcatttatttcttcagagttcatccagttttagcctgttgtagatgatagaaaattttattttgattatggaaataatcacaacatttatttatttttgttccaaaattcaagaaatctagtttttaatggtattttcggatttggagtgaaaaataagctcaagaaatactcttcagtttattgttatttcatatttacattctgaattgaaaccctatttaaagtttcttaattctctactccccacccctccaaaacttattgttgcaaaaatgtaaaaacaatattagagagacgtcttactcttatgaaaataagcccaaaggagtc

SEQ ID NO: 58575 - DNA, 589 bp, Homo sapiens
  misc_feature 15: n = A,T,C or G
gggccccccctcggnagtcttctagaattaattaacgcggggcctaggcaataagaatgaaacaccatctcaaaaaaaatatatatatataatctgatggtggggatgataaagtgagatttcactgttctttaatgtatatttccctgatttctaacgaatttgagtatgtttttgttagctgtgttttcttcaatgaacccatgtctatataaataaataaaactgtcctttctctctatagcacctagcaagataaacgggctgcattataaacacatttactctgctcctttcttataagacaccaataaattccacttaccaaaggaaaaaatggatgtaagtttgtgttaactgggttactgtgagcctgaatgggaatctaactaaagcaatacttaataagcatctagtgatgacgagagaaaattcctgacctcagagtggggaaaacataccaataatggtaatttagattttatatatatatatatatttgttttttaaaaattatctttatattttaagaaccataggaaagacattaatagtgtctaaccggagctcagatggagaaatacaatga

SEQ ID NO: 58576 - DNA, 552 bp, Homo sapiens
acttctagaattaattaacgcggggggatacaaaagcagtctaacatatgatctctgtcctatgaatgtgtttttaaaatgtatactagtcattattggagtgactattatataaagacaaaagccactagggtagccatggttttttgccagttattagccatatatagtgcgtgcatgcacacatacacacacacatacatatatgtaatatataattttagtatatttaaattaatccatattttcaagaacttcattaacttgaacactcagaaataccctgagtgttttaagacataattgcaaataactcatgtaatgcgtatatttttatatctttgcatgtatgaagtttatacattcaggcttgtgcaaatgtgtttatatcatttgcctaagcccttgattatttacatgttcctatgtgggatcacagtccttcagatatgaatcatagcacagtgatttctttacatattcgtattctactattgagatactttaagaatcctgtgagttgtgtacctggaaatataaaattgatattat

SEQ ID NO: 58577 - DNA, 596 bp, Homo sapiens
  misc_feature 14: n = A,T,C or G
gggccccccctcgngggtacttctagaattaattaacgcgggtatctctagatctgctgttgttttttaacgtcaaaatggagagcaaaggctgacatctgatgagtattagtaaattaggatatagagtttatatataaacatcaaaaataacatttatacatttattcttcaggagaggaaatgctaggtttcccaccagttgtcattaattctagctttggtaggtttcctggggctttgaccagataagtaagttaaataaataagtgcactcccctcagtagtaaatttacccaatttttacattctgaattttaaaaattgtttaagagaaaataaacctagctctgcctactttactattttttttttattttttctgatgtggtggtaactttttgagggataatgaaattatgttcagcctcaaaaccctgaaaattaattataatgctgctcagtcttgcttatgcatttgtttgctctaacatgctctttccattaaaaattgttaacttcctccattgctgttaaaaaaattaaaaagggatggaaaaaagagagagacaaaaaagatgaaaaaaaaaaaaaaa

SEQ ID NO: 58578 - DNA, 481 bp, Homo sapiens
gccccccctcggagtacttctagaattaattaacgcgggtagttggccatgtttttcctatggctgtttacctcatcttccctctgtgtatgtctatgtctgtatttccaccttttctaaggatatcaagggtattggattagaggcccatcctactgcagtgtgacctcatttttaactaagtatatcaacaagaactgcatatccaaataagtatcacattttgaggtactagggattaggactgtaacgtgaattttgaggggacacagttcaacccataacaatcttatgtggcaaaactgacagtacagatcagtggagaaagaatgaacaattcagtcagcatcgctggagtaattagttatccacatgcaaaaaataaaaagtgatacctacttgaagctatgtacaaaaaataattccagattaaaaacttgaatggtaaaagcaacctttacaattttttgaaaaaaaaaaa

SEQ ID NO: 58579 - DNA, 594 bp, Homo sapiens
cccccctcgagatacttctagaattaattaacgcgggcctcgatgtgtaacatttttatttctaagttaattctgcattttaatttgctatatttaaatcatcagcagtcagtttttaaattataagcctcaaaactccctctttgccaagtatggggaaaattaaacccttaaaaaaattccacattaaaaaacttttctggctgatgttgaaacctccatctcaaattcaactttattctgtagactaccagaataatattttctgattctatctaaaaacttcttctcctgttcaaaatcctttggggaataattactaaaaagaaatgcttcaatgaaaatttaaccctttagaaagactgttgttagatgtggctactaggctaaaattcaaacccattcacattatttcaagttatttgggccctttttatggcagttttcatgatatgatcaatacgaccaatataaaaccaaattttcagaagccctcccttgcattcttcttgaccaaatgtaatcccaagcaactttagaaaaacagagaactgctgggtaaaatattacatttgcagatcagactctcatagc

SEQ ID NO: 58580 - DNA, 542 bp, Homo sapiens
  misc_feature 9, 26, 450, 529: n = A,T,C or G
ggccccccnctcggggtacttctagnattaattaacgcgggggaaaaatttagcacatcatctatgcaagtatagtaaagtaagataagtggttaataatattgtaaatgttactaatgaactctgtgtaaccttttgcttcctcctctgctgcagccagtccccttaatactttgagaacactgggatgtgatgtctccgtctgccacctcagaatcatttgttcctacgagaaggccaagagtggtacttgctttgatcactgtttttaaatagaagacacattggtagaaatctttcatataatatgttgctgcttttgggggggtgttggggagtaccagagaggtctgcatgcatctgcagtgtacactggcaaacaaaagatttgtcattcccgttgtcctgttgtgcttcctttccacctctccctggctgttcccccacccncttgttccttttgtaaaggatgcaggtgtagtcttgtgccagtctgtgacataacacctgaacaatttctatggtatcncctaccattgctc

SEQ ID NO: 58581 - DNA, 599 bp, Homo sapiens
  misc_feature 24, 37, 54, 64: n = A,T,C or G
ctgggtacccgggccccccctcgngaatacttctagnattaattaacgcggggnaaatacatgngctctcagtaacagcatgagaaatttcctggttacatgaaataatacagacataccaagaagagccaagaatacagattcaaattatactgaaagaaaacttcgtttttctaggcctttaagataaacgtttctgcatcaggccataacaaagttcaaactgaaaaaaaaaaaaaagttctaggagttgaggaaaaaggttgaaggagggagttatcaacccagccaagcaaaaagatatacctttcaagaaagagaaggggatgtatgaccttcaaatcatgtgtagcgtgacacagcaaaagccgaacttctgaaatataaatttcaaaaggaaaactttacctcaagaaatggaattactatttttaatgaagaggacagcatttcaaacctaaaactagggaaattaattagatctcaggaagaaatgtggcagaaatagaaattgcactttggaagatggctgtcaaagaaacagattttataattaaaaatcacaaccttttgcagtattattgagagcagatcaatac

SEQ ID NO: 58582 - DNA, 414 bp, Homo sapiens
gggccccccctcggagtacttctagaattaattaacgcgggggagacttcagaataacatacatggtgaataatagtgatttttcaaaaatagtttaaaatattctaccaaagaaaacacaaatagctacagcctacagcaagaaacaaaagcccacccagaaaaggaagaaaaatttgattataagagttccaaactgtaatattcaagatgtacacttttcaatcagaaattgtaaagcatccaaagaaataagaaagtgaagtccattcacagatgttaatagaaactgctgctggggaggcacagacattttactcaatagagaatgactttaaatcaattgtgttaaatatgctcacagagctgaaggaaatcatgaataaagagctaaaggaaaccagaataacaatg

SEQ ID NO: 58583 - DNA, 465 bp, Homo sapiens
  misc_feature 22, 24, 35, 55, 56, 72: n = A,T,C or G
gggtaccgggcccccccctcgngngtacttctagnattaattaacgcggggctgnnggggggagcaaggggnatgtatttttcttcttaataaatattcctgtgcagtaaaaaaaaaaaaaaaaaacaaaaaaaaaaaaaaaaaaaaaaaaaaaaaaaaaaaaaaaaaaaaaaaaaaaaacaaaccaacccccccagaccaccccctccccatcttttaaagtgcgccccccccccccccttttttccctccccccccccccccggccgggtccccccccccccccttccccttttttttcccctccccccctcggactcccctttcctgccccccttttttcgaggtccccccccccccccccttcctccccatggtgtaccccccatacgtccggcccgatgggttttctcaaattttccccccccccccccccttatccaaatttctccccctcctcttttt

SEQ ID NO: 58584 - DNA, 613 bp, Homo sapiens
  misc_feature 27: n = A,T,C or G
gggccccccctcggaaatacttctagnattaattaacgcgggactacagcagcagaagagggtgctcctgatttaagaaacacagtaagccaccaaaacaacactccctgttcctctgtaagaacacctgttattactgataatggaaaaatccaacgcaaataaacatgaacatctataaaataatctagcactcatgcagttacttatgaagaaaacctcaaaactgagcagtaaaatcaaaacaaacacgccatgaagcagagaaaaacttaccaatgctcccaacatagattaaatataattaactaagcatttgcagatattaatgaacactataaaacagaaatttttaaaatttgtaataaaaatggaaaataggaaggtgtgaaatgaaaattggccaaactcaagaaataaagaaaaagaaattctctcagaaatgaataaattagcaggtgttccaagatggaacatatatgaccaaaaatatagtaagaaaaacatagaatagaaataaaaggagccaagaaagtgaaacataatgaaaagagtaaaatggatcagaatgaaagtggcagatataaaggtaaagaagatctaagataagact

SEQ ID NO: 58585 - DNA, 179 bp, Homo sapiens
  misc_feature 26: n = A,T,C or G
gggccccccctcggggtacttctagnattaattaacgcggggtaatgggtcaagaaaagcagatagcctctagaaactggaataggcaagaaaacagattcctcctgaacccttcaggggaaacagtgacttctgatgattttagccttgtacgactcatttagagattgtgacttcca

SEQ ID NO: 58586 - DNA, 221 bp, Homo sapiens
  misc_feature 26: n = A,T,C or G
ctgggtaccgggcccccccctcggangatacttctaaaattaattaacgcggggggagggaggttcctcgcaggtctcagcccgggacagggtcttgcaagcagcctcctgagcagtcgtaagggttgcggcgtgatgtcttcaataaattaagttttatttggaaaaaaaaaaaaaaaaaaaaaaaaaaaaaaaaaaaaaaaaaataaaaaaaaaaaaaa

SEQ ID NO: 58587 - DNA, 515 bp, Homo sapiens
cgggccccccctcggagtacttctagaattaattaacgcggggagtggggaaaaagaagagggaacttaaaggatgggtccataggtgcagcaaaccaccatggcacacgtatacctatgtgacaaacctgcactttctgcacatatatcccggaacttaaagtaaaataaaatagataaataaataaataaaattagattaaattttaaaaaagaagaggtttaatggactcacagttccacatggctggggaggcctcacaatcatggtggaagccaaaggaggagcaaaggcatgtcttatatggtggcaggcaagagagtaggtgcagggaaactgccctttataaaaccagcagatcacatgagacttactcactgtcacaagaacagcacgggaaaaccccacccccatgactcaattacctctcaccaggtccccccccacgacacttggggatccagcagacaccaccaccacttcatcccacttcaaatgtggtctcccatgctcg

SEQ ID NO: 58588 - DNA, 214 bp, Homo sapiens
  misc_feature 23: n = A,T,C or G
cccccctgcgggatacttgctanaattaattaacgcggggtaaaaaactaaaaaaaaaaacatgaaaaaaataaaaaaaaaaaaaaaaaaaaaaaaaaaacttaaaaaaaaaaaaaaaaaaaaaataataatattaaaaaaaaaaaaatgcggccccccccaggggggaagctcaactccccctttaaggggaaattttccccccccctcatgg

SEQ ID NO: 58589 - DNA, 284 bp, Homo sapiens
  misc_feature 46: n = A,T,C or G
cggggccccccctcggggtacttctagaattaattaacgcgggggngaaaaaaaaaaaaaaaaaaaaaaaaaaaaaaaaaaaaaaaaaaaaaaaaaaaaaaaaaaaaaaaaaaaaaaaaaaaaagcggccgcccccgcgggggaagctaaaattaaccctatagggggccgcatcagggggcgcaccctgagccggccttaataaaagggtcgtttattggaaaaaaccctggggcaaccaatttaaatggcgtggcgggaaaaacccttttcttcccctggtt

SEQ ID NO: 58590 - DNA, 587 bp, Homo sapiens
  misc_feature 33: n = A,T,C or G
gtaccgggcccccccctcggaaatacttctagnattaattaacgcggggggtgaggcctgtgacttgtggcttccccccacttccctggggacctgtatgactcagcagaggcagccataataccactgggaacataagtccattggcttgggaaccacaatcccatcccccacagtagtcacacggcaagcctcacccagggagactctgagctcagacatacccatccctgccccaacctggtagtctttctctacccactctggtagctgaagacaaaggatataatctcttggtagctctatggccctgtccaccacttgagaaacctgaatactaaaccaggcacccctagggcaaatctgcatcctccctgtacaaccacagctgatgcactcttgaaagcaccaccttctgtctggaggccaaccaacacaaaactggtgcactaaacagaaatacaaccaagactcacagagtcttcttcactcccctgctacctccaccagagcaggtgctggtatccatggctgaaagacctgaagacagatcacatcacagcgttctttgcagacactccccagta

SEQ ID NO: 58591 - DNA, 455 bp, Homo sapiens
  misc_feature 27, 40, 379, 380: n = A,T,C or G
gactggggtaccgggcccccccctcgngggtacttctagnattaattaacgcgggcaagacgagcctggccaacatagtgaaaccccatctctactaaaaatacaaaaaattagccgggcgtggtggcagacgcctgtaatctcagctgctcgggaggctgaggcaggagaattgcttgaacccggggagtggaggttgcagtgagccaagattgtgccactgcactccagcctgggtgacagagtgagactctgtttttaaaaaaaaaaaaagattcatgtccttagattagattgtaagcccactgggcaggtactgtgtctaatgttttgtgtggcacctgtcacattgttagagctcaataaacgttcaacaccnnaaaaaaaaaaaaaaaaaaaaaaaaaaaaaaaaaaaaaaaaaaaaaaaaaaaaaaaaaaaaaggaaaaaaaaaaaa

SEQ ID NO: 58592 - DNA, 323 bp, Homo sapiens
  misc_feature 31, 47: n = A,T,C or G
taccgggcccccccctcggaagtcttctagnattaattaacgcgggngtgaaaaaaaaaaaaaaaaaaaaaaaaaaaaagcggccgacccgaggaggagctcccgttccccctatgggactccatattacccccatctcactggccgtcactccacacaccattgggcactgggtaaaaccctggcgttacctggcaaaaccctgttgtaacccatcttaatttcttcagctggcatactatttaagaggcctggactaatcgccattaggcccagtcgcacagcctttatggcgaatggaacatgctaacgggaaaatggaa

SEQ ID NO: 58593 - DNA, 585 bp, Homo sapiens
  misc_feature 36: n = A,T,C or G
tgggtacccgggccccccctcggaggtacttctagnattaattaacgcgggccttccacatataagtagtgtcatacaatatgtgtcttctagagtaatttttagtaacataatcttgaagatgaggagggtttaaatagccactgttattgctgacatacttgttaatgaacagttcactcaaaattatcttagttacctttacctctgttatatccatttattttccccaaatgttgattaaatacctactttgttttattcattaggctttgaaattaaaaaacaaagaaaagagagccttggtattgcatttcagaattcacagcataagtgtatgtctgtgcgtatataaaatgaataatatatctatgttatagagataatttgtattatatgttgatattgtatatgaatatacatataatacatcagagaaaacaagatataattgatctaaaatgaagtgtggagtcagatctggatacaaatttccatgcaagctcttaatagccgtgtgacttctggcaagttatttaatcactctgaggtgagaagaaaatcagaatagttatctgacaggac

SEQ ID NO: 58594 - DNA, 617 bp, Homo sapiens
  misc_feature 539, 579: n = A,T,C or G
gggccccccctcggaagtcttctagaattaattaacgcgggggccatcgcaccctgctacactttcttataaactctggataatataaaatgctgctctcagttttccagatgatgatatttattattgtatttgaagaacttgtgttaccatcatagcaactttataatttaattagctgtcagatgataaaaagatactgaataagtgacagaaacgaaatgaatgtaaaatacagagtgatggtgaaggctattacaactctaccccttgcttaaagttgtagcttcatctagtctttgtcaggtgacttttgtacaatctggctttttatcttcatttttacagagattataaaatcaatatcaaaccactactttaaaactctatttctctgattggtgtaatatgccataacaatcacagaagatgtctaacaagaagatataaggaatcttcttccttgttttgctcttactgaggttttaataaattgctgtaattttccagtgaacaggttcatctacatcaaatgaatntcaagtcatgcataaaaatctaaagaaagtgtttgtgatngtatcattaactatatatgggactaaggatttcagtaa

SEQ ID NO: 58595 - DNA, 419 bp, Homo sapiens
  misc_feature 50: n = A,T,C or G
cttctagaattaattaacgcggggaattctcaaaactaaaaaagctgcangagaaaagaacaaaaagtgagcatcacaagaacaatagaaaaaaatgaaagatgagttccccataaaattgagagaggagatcagatccagaagattttaaaaagtaagctgccatatttatttaagtacatgaaaataacgaaagagacagccaggttaagccagaaaagctaccttgaactttaatcttctgaacgctgagtaaaaccaaattaatgtaaaaactaatagaaaaagaaaagggtcaagcccgcaaaaagttataataaaagagaataagaagcaaaataacatatctatagataacaaatgcatgctaggaaatcatgcctatagttaaattaaaataatagcttattatttcaaat

SEQ ID NO: 58596 - DNA, 394 bp, Homo sapiens
ttaattaccgcgggtccataagaatgaggaaagaatccaccaacaggatgtaacaaatctgaacttttttttttttaataagcaaagaaccctgacaaaattttggggataaattgacaaatccacatttcctatgggagatttaaacatacccctttaagtaattaatatatcacccttttagtttggatagaaaaaattacccccacaatcataaaattttttttataattgtggatacaaagctgggtataatgataaaatgtacaccttgcccccaacaattgaaaaaatttgcttcattttttgcacacatataacattcacaagtgttgttaagtggggccacaaaaaaaaaaaaaaagcggccgccaccgggggggacctccaattc

SEQ ID NO: 58597 - DNA, 622 bp, Homo sapiens
  misc_feature 27: n = A,T,C or G
gggccccccctcggaaatacttctagnattaattaacgcggggggaccaacaatctcttggaaaatacattataaaaaggaattcactatagcatactctcatcagactgtctaaaaaatgtgaaaaaaagaattgtaaaattatcaagagaaaagtatctactgacccacaaggaaaccctatcagactaagtgaaaacatactagcagaaaacttaacagtcagaacagaatgggatagtattatcaaacgcttaacaaaaagctgcaatcaacaattttatatccagctagattaagcttcaaagaagaagaaataatttccagagaagcaaatgctgaggaaattcatcaccactgcactaacttatgagaaatgcccaaaggaatcctaaacatggaaattaaaagtcaatattcaccatcatggaaacacccagaaaaagtaacctcacaggtattataaaaccatcacataaaggatgaagagaaataaatcaaatggtgattcaatacaataacactaaagactaacagaatttataaaacagctggataatacttttatttatttatttattttgagacagagtctcactctgttgcccaggctggagtgcag

SEQ ID NO: 58598 - DNA, 615 bp, Homo sapiens
  misc_feature 19, 32: n = A,T,C or G
taccgggcccccccctcgngaatacttctagnattaattaacgcgggaatgtactaagctctttttaaagaaaaaaaaaggtaggttatagtcagcttacatatccagctgggttagagatcacctatgtatggaaaaactttaggctaaacttcaaatatgtaagaaggcagctttaggctaaaaactatacataatacaatgtaaatgttttataaatagttgcctatactgtattgtttagggaatgatgatgagacaaaaaggctgcacgtgtttgttacagatgtagtttttattctggaatttttaaatctgtatttggttgaatccatggatgcaaaacccatggatatagagggccaactggatataaaaattatgcatacagttttgcaagaagaaaagcaatgatatagaaaaatgttattctcctattttattcattaatttatcacatgtttaataatgcttatatagcttttaccttgtgccagacactgttctaagtgttttacagaaatgaactcatataatcctcacaacaacttaataagttaggtagtattatctttattttagacatgagagagctgaatcacaaggagttatata

SEQ ID NO: 58599 - DNA, 600 bp, Homo sapiens; identical to SEQ ID NO: 43095

SEQ ID NO: 58600 - DNA, 397 bp, Homo sapiens
  misc_feature 25, 38: n = A,T,C or G
ctggggtaccgggcccccccctcgngggtacttctagnaataattaacgcgggcatggctatactactatcatataaaataaaatctagggcaaaaactttataagagacaaggacattttatataagtaaaatatctaatatagcaagaatatataagaataaaaatatgtgtgcatcttatattagactatcaaaatatattaagcaaaaattgacaaaattgaagggagaaatagtgagttctacaataatacttgaagacttataaacctctttttaaatataaaatagaacaactagacagaagataaggatatagagaacttaaacaacacaacaaattaactagatcctaaagacatatacgtaataattctacccaaaaaaaaaaaaaa

SEQ ID NO: 58601 - DNA, 588 bp, Homo sapiens
cccccctcgagagtcttctagaattaattaacgcggggagcctggaaggttgaggctgcagtgagctgtgatcctgccactgcactccagcctgagtgacagagtgagatgagggttttgtttttttctgtttttttttttgttgttgttgttgtttgtttgtttttaaaaaccatcagagatctgatgtcactaggtaatctgagtttcacagaatggcaggcccctccaaagaaagacaagacaaacatattatttcaactttgttagaacatgtgaaaaagactgggctgtcataaaaacaggtgagaaaaattcttttgataatggaaaaaccaaattctgtcaaaatatatttaaagaggtttattacgaatcaatatgagtgactgaggctggcttacacaatctcaagaggtccttagaaagtgtgcctgaagtgtttgtgttataatttggttttatacatttcaaagaaataggaattgcaggtacaaccataaatcaatacatggaaagtatacattggtttggcctgaaaggtgggacaactaaaagtgggggcttacaagtcataagtgggtttta

SEQ ID NO: 58602 - DNA, 600 bp, Homo sapiens
cgggccccccctcggaagtcttctagaattaattaacgcgggcacaactagaagattcttataaccaagtgcagtccttttccaaggctatggccagtctgcagaatgagagagatcacctgtggaatgagctggagaaatttcgaaagtcagaggaagggaagcagaggtctgcagctcagccttccaccagcccagctgaagtacagagtttaaaaaaagctatgtcttcactccaaaatgacagagacagactagtgagtagctagttctttctttctgatctgtttaagagtttttgaacctttctttaaatttatttttatagaaaaggataaacacattcttatacatattatctgggaacgcagggaaagtattatgtatcccacaggttctgtttggtcttagagaagcacagaaacatgatttaaattgctaaacctgccaataccattagaaaaaaaatcagaaatttccttggcacaaaactctccattagttataaaaggactaagaggtggagaactgttttatatattttatatacacaaagacatgtgtaaatgtttccagaatttgtcatagcttaactgaaac

SEQ ID NO: 58603 - DNA, 498 bp, Homo sapiens
  misc_feature 27, 423: n = A,T,C or G
cgggccccccctcggaagtcttctagnattaattaacgcggggggattgcttgaacccgggaggtggaggttgcagtgagccgagatcgcgccactacacttcagcctggcgacagagcaagactcagtctcaaaaacaaaagaaaacaaacaaaaatagactcattttgtaatggcccattcatcacagaacaattaaacactacataaaaattaaacctgcttacatattagaaataaatttcacttcacccacagatccaacactttaaaatggatagaaaaaaatgaaaactaaaatggatagaaaaaaattttattaactaacttaggataaaaacacttcctattaaacctcaggtaccactgcttaaagagtatcattctcacatttccttgcaaaagtggaaacccataatccanagatcctttttaagaatgagtcacaggggccgggcaaggtgtctcatgcctataatctcagcactttgcgaggct

SEQ ID NO: 58604 - DNA, 591 bp, Homo sapiens
cgggccccccctcggaagtcttctagaattaattaacgcgggggatcaaataaactaagcattaatcttccatctgaaattgtcaggaaaccttgagatcaaaagaacatccctgggaaggtgttaggctcagcttattattatgtgggggctcagcgtctatacccacctgaagctgggctggccatgaggcttcagttcactaaccagatgtgcatgaaacagatacaaaaaggggaagcctttagggccaaaaaaatagacctaggtttgtattactatttcagcttaatcgtgtataccttgtgtttcctcggccaacaatggctaattatggtaaatactatttagaattatgtgctatgtactaagtgtttgacatatggtatctcatttaaaccttctgtgatcctctgaagagtgtcctccaatttttcccattttaacagatgataaaactcacagaagggcctatggttatatagctagtaaaagtggcagagtccgttgaacttgaattcagattggggaatgctttaacagttggtatccagcagctacaggacttaatatttctcagtgttgtttcct

SEQ ID NO: 58605 - DNA, 433 bp, Homo sapiens
ccccccttcgaaagtcttctagaattaattaacgcgggcacccctcattcagtcagggaaaaggacaccttgcaaatccctgacttgttttgctggctgtgggcacacctagacaccagcaaggaagagaatagaaggcaaattctccccaaaccggctactgctttgaacacccttaactatcctagacccttctggtctcaatctttgaaactttataagttcttccagctatgccaggtttcttgaacttctgctaatagccttgtctaatagtctcgactggctgacattaaattcaagtataaatcttggaattcaaactcaagaatcacttgaacccaggagacagaggttgcagtgagccgagatcgtgccattgcactccagtctgggcaacaagagcaaaactccgtctcaaaaaaaaaaaaaa

SEQ ID NO: 58606 - DNA, 444 bp, Homo sapiens
aattaacgcgggatctgctgttgaaaaaaaaaaaaaaaaaaaaaaaaaaaaaaaaaaaaaaaaaaaaaaaaaaaaaaaaaaaaaaaaaaaaaaaaagaaaaaaaaaaaaaaaaaagggggtgccccgccgtggggcccctcgctttcccccttttctgctttttttttttctccccttctgcccccccccggggggcggggtttcctcgggggggtttcggggggtgccttgcgcgcccccctcttggggggggtttttcccctttcgggggggggggcccccccggggtgccccctttttcccccccgtgggcccttggcccctttttcgggggggggattgtaacatagggccccccaccctttttcttttttttccgaattcgccccctgtttggggcctttttttttcccccggctttttttggggaaaacccccctttt

SEQ ID NO: 58607 - DNA, 465 bp, Homo sapiens
taattaacgcgggggggttattggaacaaaatttttcatatcagtagtaatgggggcaattaccccactggaaaaacccatagtgccttgtttctgcaaactaaaccatgggaggagagaaataataactttccctatccaacagggctgggtgcaaatcaaaaaaattgattgatttcctggggaaagtccttttgcgaaatgctgaaaaatttatgtgcgttaaggggggtttaaatttttttgggcacaggaaaagagtcaatcaaaatttttgaagatcacccaaaaaaaaaaacagcaagattttttggccctaaaaaagttagagttgcaaaaaaaaccattcctcacagaaagtgaaaataaacttcgggaccttcagcaggaagcagagccttacagaactgtaagtttaaataatattcaaattctggagttgtgaaattatttgcatataaaaat

SEQ ID NO: 58608 - DNA, 224 bp, Homo sapiens
  misc_feature 26, 43: n = A,T,C or G
ggccccccctcggaaatacttctagnattaattaacgcggggnattttggaaaaaaaaaaaaaaaaaaaaaaaaaaaaaaaaaaaaaaaaaaaaaaaaaaaaaaaaaaaaaaaaaaaaaaaaaaaaaaaaaaaaaaaaaaaaaaacccaaaaaaaaaaaaaagggggcccccccccgggggggaccccaatttccccttttggggggtttttttcccccccctc

SEQ ID NO: 58609 - DNA, 499 bp, Homo sapiens
  misc_feature 28, 50: n = A,T,C or G
cgggcccccccctcgaaatacttctagnaattaattaacgcgggcatcantcatctccaaagttatcagaaagttgcattcaagagtacctgtcaaagttttatagctgattataaaaccaccttccaaagtggatcaaaatgagacaattgccttggatgacaaaaatattttagggcagccactgttaaaaacacaattgggctgcgtgcagtggctaacgcctgtaatcccagcactttgggagactgaggcaggcgggtcacgaggtcaggagatcaagaccatcctggctaacccagtgaaaacccatctgtactaaaaatacaaaaaaattagtcgggcatggtggcaggtgcctgtagtcccagctacttgggaggctgaggcaggaaaatggtgtgaactcaggaggtggagcttgcagtgagccgagatcatgccactgcactccagcctgggtgacagagcaagattctatctcaaaaaaaaaaaaaaa

SEQ ID NO: 58610 - DNA, 509 bp, Homo sapiens
cgggcccccccctcggggtacttctataattaattaacgcgggggtggggccctaattcaatataactgatgtcctatgaaagggggaaatttggacacagagacagacatatgtagagggaagatgatgtgaacagacacagggagaacatgggcatctgtaagctatgagagacctttccttcacagttctcagaacaaaccaaccctgcccgtattttcagcctccagaactgtgagacaactttcagcctccagaactgtaagacaatatattcctattgtttaagccactcagtttgtgggtttttattacaacatccctagcaaactaatatgccatctcagtgtcacaagcatatcccaagcttcagataccacactaggcaaggccagtcccacatttgggaaaatttgggcaaaagcactcagagcacgactaaccagaaacatgcctgcatctgcctgcagcttgttcttatgctgtgacccccaaaaaaaaaaaaaaa

SEQ ID NO: 58611 - DNA, 519 bp, Homo sapiens; identical to SEQ ID NO: 58115
  misc_feature 14, 27: n = A,T,C or G

SEQ ID NO: 58612 - DNA, 397 bp, Homo sapiens
  misc_feature 25: n = A,T,C or G
ggccccccctcggggtacttctagnattaattaacgcggggaagaaagatggtggatcagcttttctgcaaaaaatttgtaactccagtcggactccattgtctccaagtcgactttcgtcctcatccacaactcctccacagaagccctgaacacatgtccatatggagttttactcttgttgcccatgctggagtgcaatggtgtgatcttggctcaccgcaacctctgcctcccggattcaagtgattctccttcctcaacctcccgagtagctggaaatacagattgagttttgctctattgcccaagctggagtacagtgagctgagattatgccattgcactccagcctgggtgacagagtgaaactccgcctctaaaaaaaaaaaaaaaa

SEQ ID NO: 58613 - DNA, 435 bp, Homo sapiens
  misc_feature 28: n = A,T,C or G
cgggcccccccctcgaaagtcttctagnaattaattaacgcgggcaggcatctttgaatcacagaattttagaggtagagagggttatcagaggtcaagttcaacctcttagtcctatcaatagagtttcacagagtgtgatgatgcatttttacaaacaaaaaagcttcccctttgggagggtgaggtgggcggatcacttgaggtcaggagttcgagaccaacctggctaacatggtgaaatcatgcctctattaaaaatacaaaaattagccagatgtggtggtgcacacctgtaatcccaactacttgggaggctgaggcaggagaatcgcttgatcctgggaggcggaggttgcggtgagccgagattgcgccactacactccagcctgggtgacagagtgaaactgcctcccaaaaaaaaaaaaaaaaa

SEQ ID NO: 58614 - DNA, 574 bp, Homo sapiens
aattaacgcggggttctgactaagactgcccatcttgaaacagcctctgccaaaatatggggaattatgacagtgttttagatcagacctaactgactccatcttgcttctaacctctaaactgtccttatccattcctgggcataggccgaactagccttgggtttgaattttttttatagttttaaataacagcccttcccaaaagcaaatctgttcttgtaaaacgaatgaaaggccaccagccaccaagttaggatgagaggggctggaactctaaatattaccagctgttacgtggaaggtcatgagatttgcaacttccctgattactcttgaagataacatcaccattgtgaacctgagattggccttttgagatgtcttttcaggtttttccatttctgacaagtggttggcctcacctggacctgccaaccagttctgtggcactcacccaggaactgactcagcataagaggatagcttcgactgcctatgagttcatcctcaagccaaccaatcggtgctcctggctcactggacccctacccaccaaattattcttaaaaac

SEQ ID NO: 58615 - DNA, 438 bp, Homo sapiens
  misc_feature 389: n = A,T,C or G
cttctagcaattaattaacgcgggcattgtcattcaatgatgcatcaaaatatctcaaatcctaagtgactgtcaaaaaaaatcctcgtaaaagaatctcagaaggatggagtccattttagaggaaaatgagttgtgtggatgaaaagttcatctttaggaaaacctaaaactgctttcccaagaagccagaaggtgaaaatagcagtgcaggaaccaaaggaacaaataaaaatgtttaacaactctaacatgcaaatggaacaggttgtaagtgactgaaaaccacttatggtctctaattagattagattactagctctctttagaatcagaaaatggaagccactattgataatctttatcaatcaaaagtcgacttgaaaaanaacctcattgatggtgttaacttaaatgtttcctttaataaggcttgaa

SEQ ID NO: 58616 - DNA, 625 bp, Homo sapiens
cccccctcggaagtcttctagaattaattaacgcggggcatgaggagtgaccctcaattactcattagcatgtgtgtaaaatatccaagacatgccagaagcatgtttgtttttccagcatgatcattattgtctgtcccatgtttttatacagcttctcacatcagccattctcttctcaccactctactcctagttaaatgtcttgttccaagttcaaaacctcccttttgccagggcacagtgtatcctattgatattaataggtagtgatggcttaattatcttgataaaacagtaactccattttaatgtgggttctctagagatagagttataactaatttggaaggttacaaacaggattgcggtcaattttgggatatgagaaccctttgatatccctcaaattaaactagaggatattttgatggatatttccctctgcaatttatcatactctctcctgcaccttcaatttgtcagttactacagaatcatttacattatgtacagtctgccattttaaaataaaatggtttcttgatccagtgttctgcttcagtgactgcctcatttctttttatttatttatttttataaatagaagcgggatctcgctgtg

SEQ ID NO: 58617 - DNA, 608 bp, Homo sapiens
  misc_feature 549: n = A,T,C or G
ccgggcccccccctcggaatacttctagaattaattaacgcggggtgtttgaaccaaccatagttaaagttaagagtttgaaatttgcaacagaagctgcaatcaccattcttcgaattgatgatcttattaaattacatccagaaagtaaagatgataaacatggaagttatgaagatgctgttcactctggagcccttaatgattgatctgatgttccttttatttataacaatgttaaatgcaattgtcttgtaccttgagttgagtattacacatttcttcctgctaaggccattggacacagaatccgagtgatgctgtacccctcaaggatttaaactaacgaaaaatcaataaataaatgtggatttgaaaaaaaaaaaaaaaaaaaaaaaaaaaaaaaaaaaaaaaaaaaaaaaaaaaaaaataaaaaaaaaaaaaaagcggccgccaccgggggggagctccaatcccccctatagggagtcgttttaccccccctcactggccgtcgtttaacaacgtcgggactgggaaaaccttggntttacccaccttaatcgcctgggagaaaatccccctttcgccagttggcgtaataccga

SEQ ID NO: 58618 - DNA, 621 bp, Homo sapiens
  misc_feature 555, 560, 608: n = A,T,C or G
cccccctcgagagtcttctagaattaattaacgcgggatgtatgacatggttaggctttgtgtacccacccaaatctcatcttgaattgtaatcctcataatctccatgtgtcaagggagagaccaggtggaggtaattgaatcatggcggcagtttccccaccgctgttctcatgatagtgagtgagttctcaggacacctgacagttttaaaagaggatcttttgcttcactcagtacttctccttcctgccaccttctgaagaagatgccttgcttccccttcgccttccaccaggattttaagtttcctgacacctctccagccgtactgtgattcaattaaacctctttcctttataaatgaccagtcttgggcaattcttcatagctgtatgaaaacagactaatacagagtaatatgctattgctgtagagtatgacatttagtctgcaagtggaagaaagcttttaaagaatgtattcaaggctgggcgcagtggctcacacctgtaatcccagcactttgggaggccaaggcgggcggatcacgangtcangagatcgaggccatcctggctaacatagtgaaacgctgtctttactanaaatacaaaaaat

SEQ ID NO: 58619 - DNA, 630 bp, Homo sapiens
  misc_feature 20, 22, 33: n = A,T,C or G
gtaccgggcccccccctcgngngtacttctagnattaattaacgcgggcgcggggtaacatatagcttttctatttagctataagaattatatttttacttcatttggcttttgacaggtcttttttaggagacctttccctcttgtcataccctaatctatttttgaggtaaatggactatttcttagtatctcagaagtaggaaaaaattgtttctcccagaagttattggactggtctagtctcattgagtatattaaacttgaatctagcctgaacataaagttttctgattgctaacttttaaatatgtattcataaagtctagaggtgagggtggggggaaaatgaatatttatttgtcatgtgccaataagtttggtcagtacaattatctttatctcatttaatttttacaactaccctgaaaaataattcttacaggaaaaaaagaaaaaaaacgtacagagcatgaagaggggtagagtaggaatgcttgttggggatacataggttgttaatagcaaccttagatctagatctggcttggtcttataggagaataacactgactttgtttttgtggtgtttttttttttttttaaaaatccagcagccaaaaccagatt

SEQ ID NO: 58620 - DNA, 272 bp, Homo sapiens
  misc_feature 26: n = A,T,C or G
gggccccccctcggagtacttctagnattaattaacgcgggggaacattcagaaaataaagagacaatggagcctaagaatatttgaagcaacaatggctaagaattttccaaaattaattatagatacaagactatagatctaagaatgttacagaacaagtaggataaattccaaaattctacacctaaagctatattcaaactgcacgaaaccaaaacgggaatcttctaagaagacagggaacatttacctgcaaaaaaaaaaaaaaa

SEQ ID NO: 58621 - DNA, 438 bp, Homo sapiens
tgggtaccccccccccccctcgtgcgtccttcttgaattaattaactccaaaaaataaataaaggttaaaacctcatttgtttaagtaatccatccttttattcagaattctctaatcccgaagggatggtgggaaaagcatttttttcccccctttgagattttaaaaattcttttaaaaatttacctttattaaatagataaaaatccaatttcctttaaataaatcctttttgaaatcaaaatcataaaagggggggggggggaagtaaaagtttaaagttttttatgtggttaaatctcattttttatcaattaaaaataccctgttttaaataaaaaatattttgtgtaacctctcctggtacccacaaaatcaaaccctataaaatctacacaaaaaaaaaaaaaaagcggccgccaccgggggggacctcc

SEQ ID NO: 58622 - DNA, 267 bp, Homo sapiens
  misc_feature 38: n = A,T,C or G
ctgggataccgggcccccccctcggagatacttctagnattaattaacgcggggtctcaaaaaaaaaaaaaaagaaaaaaaaaaaaaaaaaaaaaaaaaaaaaaaaaaaaaaaaaaaaaaaaaaaaaaaaaaaaaaaaaaaaaaaaaaaaaaaaaaaaaaaaaaaaaaaaaaaaaaaaaggggcccccccccgggggggaccccaattccccctttaagggggttttttaaccccccccaatggccctttttttaaaaaccttggaa

SEQ ID NO: 58623 - DNA, 450 bp, Homo sapiens
  misc_feature 446: n = A,T,C or G
cccccctcgagagtcttctagaattaattaacgcgggctctgtctcaaaaataaataaataaataaaataataataataatttgaattttaaaatataataatgagtgtaatatatttcattttatcccagtgagtcatcataagcacctagagcatggagtggcaaactttttctataaagggccaggtagtaaatacgttaggctttgccggccatattctttctcttgtaaagatgattttgtctgatgttagtatagccatttcagctttcttgtggttgctatttgcaagacatataattttctattcttttactttcaaccaatttgtatccttgaatctaaaatagtatctcctatagggaccccttatacatggttgatggggatgtaaattaatatagtcattttagaaaacagtatgaaagtttctcaaaaaaaanaaaa

SEQ ID NO: 58624 - DNA, 186 bp, Homo sapiens
tgttttcatatatttattttattttgtagacaggcctgggcaacagacgagactcctctgaaaaacaaacagacaacagacagaagctgggttctcaaaaggcctgcccactgtctcccatggagcttgacagcccatgccattagctctcactgttaggcttctggggtaaggtctcttctactt

SEQ ID NO: 58625 - DNA, 603 bp, Homo sapiens
  misc_feature 10: n = A,T,C or G
cccccctcgngggtacttctagaattaattaacgcgggacaataatttcacagtcttgaaagaaaaaaaaattgtcatgcaacaacactgtatccagtaatgctatcctttagataagagagatagtctttcccagataaacaaaagctgagagaattcactgccatcagaatgatcttacaagaaatgctaaagggaattcttcaatctgaaaatgaaagaaaacaaaacactgacatgcaacaagaaaacatttgaagatataaaattcactgataaaattaaatacacagacaaacccagaatactctaataacactaataacattattctagtgtccaatccactggtaactttaatataaacctcaaaaggcaactttatccaaaataatagctccagcaacctattgaaagatggcaatatttttattaatttatattttaacttgagaaaacataaagtcaaaatgtgggggtgatgaaattaaagtactaagcttttttctttgtttctattccttttttgcaatctaagatacattgtcatctccttataataacttgttatacctatacaatgttttttgtaagcctcatgga

SEQ ID NO: 58626 - DNA, 532 bp, Homo sapiens
ccgggccccccctcggaagtcttctagaattaattaacgcgggaggctgacagactttaaaataaggatattagtgtactcaaagtgataaatgatgaaataacataaaagattcaaagatattttaaaaagcataattaatgaaagaatatatggatataacaataagatcaataaataagcatagttgatcaataaaagaacacagttaaagaaagaacagcacagggaaaaagaaataaaaacatgaaagaatgattaagaagcatagagaataaactaagatgctctaacctacatctaatatgagttccagaaagagtttccaaacgtaaaaaagaaaacaattctgggccgggcgcggtggctcacacctgtaatcccagcacttgggaggccgacgcgggcagatcacgaggtcaggagatcgagaccatcctggctaacacggtgaaaccccatctctactaaaaatacaaaaaattagccgggcgtagtggcgggcgcctgtagtccagctactcaagagctg

SEQ ID NO: 58627 - DNA, 422 bp, Homo sapiens
  misc_feature 15, 278: n = A,T,C or G
cgggccccccctcgngaatacttctagaattaattaacgcgggattctgttttcatatatttattttattttgagacaaggcctgggcaacagagcgagactccatctcaaaaaacaaacaaacaaacaaacaaaaacatgggttctcaaaaggcatgcccactgtctcccatggagcttgacagcccatgccattagctctcactgttaggtttctggggaaggttcttctacttgattggaaaatttccaaataaatctttccagaagatactaanaaaaaaaaaaaaaaaaaaaaaaaaaaaaaaaaaaaaaaaaaaaaaaaaaaaaaaaaaaaaaaaaaaaaaaaaaaaaaaaaaaaaaaaaaaaaattttaaaaaaaaaaaaaaagggcccccccccggggggaaccccaattcccc

SEQ ID NO: 58628 - DNA, 626 bp, Homo sapiens
cgggccccccctcgagagtcttctagaattaattaacgcggggtgctgattacatgggtttattcaggttgtcgaaataaactgaactatatacttataatacgtgcacttgtctttatgtgtattaaaagtttcaaaaagaagaaaaatgtattcaactttgggtatgcagtatccagagttttccctgcatcttattgcctgatgattcctacaatacaagttgccctggaaaaacagaaaaaataggcaaagtgttcaacataatttataaggccaatataatgttgatacctagtcacataaagaaaaaaactcctattttacttatgaacatagatgcaaaataatgctaagtaaaatgttaggtaacagagtctaataccctactaaaaatatattacaatcaaatagggttaatataaataacgtaaatttggttcaataaaggatgatctacaataaaaatcatcacatcaagggacataaacaggaaaaataatcacatgatcatctcagacacagaaaaatcattttataaagttcaataccagttaatgatttaaaaatctcttagaaatttcacaagaaaataaaggaaggttttcaacctaacagaggacatc

SEQ ID NO: 58629 - DNA, 314 bp, Homo sapiens
  misc_feature 16, 25, 27, 47: n = A,T,C or G
cgggcccccccctcgngggtacttntngtaattaattaacgcggggngaaaaaaaaaaaaaaaaaaaaaaaaaaaaaaaaaaaaaaaaaaaaaaaaaaaaaaaaaaaaaaaaaaaaaaataaaaaaaaaaaaaaaaaaggggctctccaccggggtggaacttccggtccccccctttggggggttttttttttcccccctcttactggcttttttttttcccccctttttggcgcgggatttccctggcgttccccactttaacccccttgcggtccctccccttttcgcccgtgggcgttttccctttttgg

SEQ ID NO: 58630 - DNA, 624 bp, Homo sapiens
  misc_feature 430: n = A,T,C or G
cggggccccccctcgaaagtcttctagaattaattaacgcgggtatcagcaaagatataaaatactcgagcaagaccagaagccaactaagcctcactaacatctatagaacactgcacccaacaaagaccatataaatgaaatagaaaatacaaagacaacagaaaaaagttctcaaaaccaaatgttgattctttgaaaagatcagcaaattgacaaaactttatatagactaaccaagaacaaaaagagagaagacaggttactaaaatcaagaataatagagagcacataactaccagccttaacgaaataagggttataaggaattctatgaaataaaaagtttagatttattcaaatgaaatgaacaaattcctagaatgacccaaacccattaactgaaggaagattattaaaatttgaattngaactccattaggagatggattgggggactaaaaaaaaaaatggtaaaaagaaaatcttaggccaaaaaggcttcattggggaattttctctattcacttaaaaattattccaacttttacacaactttttcaaaatataagaagggaaaacactttcccaatcaattttaaaacacttttgtgtgatattaaa

SEQ ID NO: 58631 - DNA, 606 bp, Homo sapiens
  misc_feature 28: n = A,T,C or G
cgggcccccccctcggggtacttctagnattaattaacgcggggatccctctgcttaaacaccttaaatgctagatgatgcttacaccaactagaaagcaaaaaaattcttcataaccagaaccccaactagctttcaagatttagcctccatttctccactccacatgccagtatttggcatgtacattcccttgatataatgtatattcttgttagtctttcttaaggagtctaggaaatgctacctcaaaatatgctgctttgtagactgattacttcaaactgaaggcatttgataaagcagcaaatatagggagaggctttctctgggcttcccttatctgcctaaagacagatagtccaaaagaaactcaactatcatgaatcccctccctgggagtctcatcaaccagggaagattaactcgtatcccaggagaggaggctggaaatcaacaccacactcagacttcatcacagactgtcgcctgttcttttaagatcccattcatctttcctcaaaattatttattctcccctaagttttctataaccccctcccctataaagacagtatataagctagtgaatctcactgttttggg

SEQ ID NO: 58632 - DNA, 576 bp, Homo sapiens
  misc_feature 21: n = A,T,C or G
attaattaacgcgggggctcncttggtggagtatatcctaacaaagaccctcaaatttaagcaaataatttttattactatgtctttttatttgaagacgtacatttgcctccaaagttcaacacaagttcaactgaccatatccttccatgacctgaatagatgctttcctttattactatgttcaattgcctttgaaagagagtagtccaggtatattcctgatcaaaatttggcatttttgatgatactactctacacagatcagactcatgtgcagaatcgtgcctggagagagaggtttggttaagacagagatttctggaaacattcaaattgcaaatggaaacttgaaacccacaatctaatgaggaatgtactggaaaaataatctgaagagttgacaaattgtgtactagattgaacacatggaatgcaatgcaatgagactttctgcactaaaacttatcctcatatgtacaacaatgatgtgtgtattatataacagtgatgtgtacatttctgacaccccatacataatatacacagtttgtataaatgcatacatttaaaaaa

SEQ ID NO: 58633 - DNA, 481 bp, Homo sapiens
cccccttcggagtacttctagaattaattaacgcgggggtaaaaaaaaaaaaaaaaaaaaaaaaaaaaaaaaaaaaaaaaaaaaaaaaaaaaaaaaaaaaaaaaaaaaagaaaaaaaactaaacatgcctaaacaaactgaatagaaagtacatttaaatttctagactgtattagcctggccccgcttgggcgaaccttgtttctgaccatgaacgcccgcaagccaacctgccatttgaagcatcagggcaattagcagcatgatgtaaaaacgctctgagctgctcattcggctatggcgtaagcctactccttatgcaggactgttaaagtataggaaggccccttcaatctgccttcgctaaaaatagatcttaacaagtggggggggagttcgaatcccaacatgtttgttagtagctacaacccatggctcctttgacgactctgattttattttaggtgacgggtggttgaca

SEQ ID NO: 58634 - DNA, 400 bp, Homo sapiens
cgggccccccctcgaaagtcttctagaattaattaacgcgggggatgctcctggtttgtccatctactgctttgattccttggatcccacccattctttcactttaagaaaaaacaaataattgttgcagaggtctctgtattttgcagctgcccttttgtaagaagcacttttcccaaataaaacacttaaaaaaaaaaaaaaaaaaaaaaaaaaaaaaaaaaaaaaaaaaaaaaaaaaaaaaaaaaaaaaaaaaaaaaaaaaaaaaaaaaaaaccccaaaaaaaaaaaaaaaggggccccccccgggggggacccccaattcccccttatgggggtttttttacccccccccaagggccgggttttaaaaaagggggaaagggaaaaacccgggggtt

SEQ ID NO: 58635 - DNA, 351 bp, Homo sapiens
ctgggtaccccccccccccctcgtgcgtacttctaaaaattaattacacgcggggcaagaaaaaagggttgctcattttggttatcactgggattctgatggaaaagaagaataggcccttctctggagttgatcgttactatgtgtcaagagggtttggaaaactttgtttagggaaccttttccctgtttgataaaaaaaataactcatttttggccatctccccctgctaaagggttacagtgttttatgtaccatgcaatgtgttatgtagggcttaataaaattaaattgaaaaaaaaaaaaaaaaaaaaaaaaaaaaaaaaaaaaaaaaaaaaaaaaaaaaaaaa

SEQ ID NO: 58636 - DNA, 572 bp, Homo sapiens
  misc_feature 27: n = A,T,C or G
cgggccccccctcgaaagtcttctagnattaattaacgcgggtacccatcccagcttttgattaaacaaaattaccaacaaatattaaaattttgattttcctgttcgacatggatttgttggcattcaattttattgttgaaaaatactgcaacggctgggtatggtggctcgcacctgtaatcccagcactttgggaggcggtggcgggcggattgcttgaggtcaggagatcaagatcagcctggccaacatggtgaaaccgcgtctctacaaaaaatacaaaaatcagccaggcttggtggtgggtgcctgtaatcccaactacttgggaaactgaggcaggagaatctcttgaacccaggaggcggagggttgcagtgagccaggatcacaccattacactcaagcctaaggctacagagtgagactcggtctttaaaaaaaaaaaaaaagtactgcatgggctgggtgcagtggcttgcacttgtaatcccagcactttgggaggcataggcaggaagatcgcttgagcccggagttcaataccagccttggcaacatagcgagat

SEQ ID NO: 58637 - DNA, 449 bp, Homo sapiens
  misc_feature 257, 371: n = A,T,C or G
cgggccccccctcgaaagtcttctagaattaattaacgcggggtgggggtcagagccagttatccggcttctgttttgtcgattgcttagatttgttcctgttgtcaaaactgttacccccaaaattggtgtgacacatgctcatgcataaaatgttaaaatgagtacatccttgtatttgtatttgttttcaacatcgccaaggtgctatgggaaattaacaaaattagaaaaaaaataaaattattaaaaagcanaaaaaaaaaaaaaaaaaaaaaaaaaaaaaaaaaaaaaaaaaaaaaaaaaaaaaaaaaaaaaaaaaaaaaaccaaccccccccaaaagagaaacaaaaaacccccccttaataantcgggggcccccccccgggggggggccacaaccccccctttaagaggttatttacccccccccccctggccctttttt

SEQ ID NO: 58638 - DNA, 521 bp, Homo sapiens
  misc_feature 83, 474, 497, 498: n = A,T,C or G
ccgggccccccctcggaagtcttctagaattaattaacgcgggccccaactttttaataaagacatgcatcagttaatgacangagatacactctaaaataacaataaatagtaaatacataaaccagtaacatggttgtttatgatcaagtattatgtactctacatagctgtgtgtgctattcttttacgtaactggcagcacaggtttgtttacgtcagcatcatcacaaacatgtgagtaatgtgttctgctacaatattatgacagctatgatgtcacaaagtgacaggaaattttcagctccattataatctgttttctttttatattctttttttctttgctccattataatattatgggaccaccatcatatatacggtctaccattgtcttaaacatcattatacagtgcatggcggtatattaaaagggattatacgccatgactaagtgagattaattcttgncatgcaaggacggttcaacattnntaaaactggtgtatataccattt

SEQ ID NO: 58639 - DNA, 554 bp, Homo sapiens
  misc_feature 27: n = A,T,C or G
gggccccccctcggaaatacttctagnaattaattaacgcgggaacctgtaatcccagctactcgggaggctgaggcagcagtatcacttgaacccgggaggcagaggttgcagtgagccaagatcgcaccaccacactctagcctgggcatcagagcgagactccatctcaaaaaaaaaaaaaaaaaaaaaaaaaaaaaaaaaaaaaaaaaaaaaaaaaaaaaaaaaaaaaaaaaaaaaaaaaagacaaaaaaaaaaaagaaaaaaaaaaaaaaaaaaaaaaaaaggggggccccccccgggggggggcccaaattccccaaaaagggaaacgtttaaccccccccaactgccccctttttaaaaacttgggaatgggaaaaaccggggggtgcccaaattaaatggcggggcagaaaatcccctttttcccagtggggttaaaaccaaaagggcccccccaaatcccctttccaaaaaattgccccaccctaatggggaaaggaaatttgaaaccctaaatttttggcaaaaatgcgggaaaatttttggta

SEQ ID NO: 58640 - DNA, 569 bp, Homo sapiens
cccccctcggaagtcttctagaattaattaacgcggggcctcccaagtgttgggattaccagcatgagccattgtgcctggccctgaaagcatcttatattcctctttcttagcacagtgcctggtgtatggcaggaactcacaaaatatttgttaaataaataggaacattcccacaggaagaacaatcacatctaatggggtagaggtgggaggtggtcaggggaagcagggaagaaataacatttgagagctgagtcttccttgaagtgggaattaatcattcaaaatttactaagtccctattttatgccaggcattgggcaaggacccattggatatacagagatgactgacacagcatttagtttttcagaatctcatcggatagaggagacaatccaggctgagagcactatataaacaaaaggctggagtcctgaaaatgctttatgtgtttgcaggggatatagtttatgaaggaggggattaggcttaaaaagagctagacagtgaaaggtgaaagtagagaacagtggaaggtgatatggcctttaaactttgctgct

SEQ ID NO: 58641 - DNA, 580 bp, Homo sapiens
  misc_feature 8, 46: n = A,T,C or G
acttctanaattaattaacgcggggctccaacttcaaaaacctagnaggaaaaaaatcaaagtaagcaaaaggaaggaaattataaaaataaaagcagaaattaataaatttgaaaacaaaagcaataaagaaaattattcaaacaaaaatctggttatttgtaaagttatttataattgacaaaacttttactagacttgttaatttaaaaagaaagaaggtgcgaattaatgaaatgagggaagtcatacagaccctgcagatgtcaaaagaataataaggaatattgcaaacaagtttaatcatataaatttgataactttatgaaatgaatcaatttcttaaaaaaccagtcatccaacatgatattcagtagccttaaaactctaaaaaatcgaacttagaatttaaaatctaccaaaaatgaaacctctaagctgagatggtatcaattgagaattctacctgtcatttaatgacaaattaagattgattttacacaatcacttccagaaaatgaatacgcaaaaaaacttctaattcatttttttgaagctaatagtaacctattaccaaaac

SEQ ID NO: 58642 - DNA, 280 bp, Homo sapiens
taattaacgcgggggtgaaaataaaaaaaaaaaaaataaaataaaaaaaaaaaaaaaaaaaaaaaaaaaaaaaaaaaaaaaaaaaaaaatttaaaaggaagggagcggccgggggccccttggacgtgcgcccctccccccttttggttccccgcgccccccccccccgggggccctccctttccccctttgggggggcttttttcccccccccctgcgggctgttttttcccccccggctggttgggggaaccctgggggtcccccgttttttcccctt

SEQ ID NO: 58643 - DNA, 611 bp, Homo sapiens
  misc_feature 582: n = A,T,C or G
ccccccttcgaagtacttctagaattaattaacgcggggaggacgggcggaaaaatgccacttcccgactaacaggcggaatccagcccagattttcagtcctttcttcttattctttcttccctttcactaatttatcccgatgttagcacattctgtctcgttactagcggacgcctgtaggtttgctacatgggatcattactgatcacggtgactctgaagtctggaactgaaggcggaatgagaagttgggaaaacttttttctctaaactctctgttttttaaaaaactattattctcgatgcttgttaagaggaaaaaaaaacctttggtgcttctgttgtgaatgtgaaacattattttccagctgtacagtgacacattttttttaaggagaaaaggactgattcgtttgccaaaaggggggtggggaggtggaataatgttatcgagtgattattctggctgagatgtgttatttggtttcttccttcttgatcatttggtgtttaagtaaaatgaggcacaggcttgtttgccgagtggagtgggaaaggcattttgatttgctggcctanttaaaaaatgataaaggattaaaaggaaa

SEQ ID NO: 58644 - DNA, 352 bp, Homo sapiens
  misc_feature 13, 52: n = A,T,C or G
ccgggcccccccntcggggtacttctagaattaattaacgcgggtggctctnataagtcaaatttgattccttacagggaaagcacatcattgatttaagcacttattatttttaagccaattaattggagcacttcatatataaacatcacacacacaacatatataaatacacagacagacagaagatccggtagttgtaaggttttttcatttgccattttataagtttctctttaaagcatgcaatttctaccacttaattagcaggcactactggaaggcaaaacaaatccccaaaagctaagggtcccatttttacaccaaatcttagatcccaaaaaaaaaaaaa

SEQ ID NO: 58645 - DNA, 504 bp, Homo sapiens
  misc_feature 16, 18, 28, 30: n = A,T,C or G
ccgggcccccccttgngngatacttttngnaattaattaacgcgggcgggaaaaaaaaaaaaaaaaaaaaaaaaaaaaaaaaaaaaaaaaaaaaaaaaaaaaaaaaaaaaaaaaaaaaaaaaaaaaaaaaaaaaaaaaaaaaaaaaaaaaaaaaaaaaaaaaaaaatataaaataaattttttttgggggcccccccgggggggggtttttttttccctttttgggggttttttttggggggttttttgggggttttttttaaaagttttggttgggaaaaccttgggttttcccattttttttgtttttggaaaatttccttttttggcggttgggtttttttggaaaggggcccccccctttcctttttcaaaatttttgccccttttttttgggtttggaatttttggggttttttttttttttaaatttccgttttttttttttttaaaaaaatttttttttttaccattggggggaatttgggaatttttttttttttt

SEQ ID NO: 58646 - DNA, 546 bp, Homo sapiens
  misc_feature 28: n = A,T,C or G
cggggccccccctcggaagtcttctagnattaattaacgcgggtcaagctatctaataaaatcctaagagaggaggagaatagggctggaggaaaaaggcagtcatggaagcaaggggtagaggaattttcttcagggatatgagaagtctcattggaggaactatgaacagagaagaaactgggaatttaggctgggcacggtggctcatgcatgtaatgccagcactttggggcgatgaggcaggaggattgcttgagcccaggagttcaagaccagcctgggcaacaaagtgagatccctgtctctacaacaaaataattagctgagtatggtcgtgcacacttgtggtcccaggtacatgggaggctgaggcaggaggattgcttgagccaggaggtcgaggctgcagtgaactataatcatactactgcactctagcctgggtgacagagtgagatcctgttgaaagaaaagaaaagaaaagaaagaaagaaagaaagaaagaaagaaagaaagaaagaaagaaagaaaaaaaaaaaaaaa

SEQ ID NO: 58647 - DNA, 349 bp, Homo sapiens
cgggcccccccctcggagtacttctagaattaattaacgcgggagtcagatatacatgtgtggaagttggctgaggctattaatctttcatcccctactagtctagaccagaattttttaaatgatcaattttcaaaatttttggttccaggctcctttagcctcttaaaaatgattgaggatatcagagaactttattctgtgtgagctatattaatcaatatatattacatgtattggaaattaaactgacaaaagttaaaaacatccaataataataaactcatggaatattagcataaataacattatatgaaaaaatcgtatattttctaaaaaaaaaaaaaaa

SEQ ID NO: 58648 - DNA, 576 bp, Homo sapiens
  misc_feature 559: n = A,T,C or G
cgggccccccctcgagatacttctagaattaattaacgcgggggttaagacagaatacgaaagaagaccacaaaagaaaaggaaaaaataaagaaaaataaaataaggagaggagtcaggaagaaaaagaaatggaaaaatataaggaaaagagaaacactaagtagttacatctcctttacttgtcctggttactttgggagggacttgcactcacctgacagtaggagggaaagccaggatcatggagtgcagccttcagcagcctgaccagcaggtcttgcacctcacccaagctgtcaccttgacacaggagtccctcctgcaggacccccaggctaggcacatctttggcaggatcaaagcccagcaccttgccaaagctatgcaggaactccacaatggtcaagcagtctgagaaggctccactgggcaatgtcagaccagggactcgtgagaagtcaggcaggggctagagagagaaaagtgagtagagagttctgttaaacataacagaagatgacaatttgcatgtctacaagaggttcttcctttaatnttatgtaattttttttt

SEQ ID NO: 58649 - DNA, 493 bp, Homo sapiens
ccgggccccccctcgaaagtcttctagaattaattaacgcgggaccactaatcttttaatgatccccatactttcacctttagcattatttttttaagttgctaaataccttcccctagggattttatttattctaatttttagaaattattttcctttatgggctaaacagttaagtatgttcttaacatacagcatgtttcttaaatgttactgatacattttatgtacctaatatatacaaaatatcaccatttccacatataatcaacataacaaattattaatggaatattttccacacatttccttgtactaagtctcaaaactccagcatgtattttatacttacagcacatctcacttcaaatgctaaattttcatcacaaatatttgatctatgtttagatttcaaaaaatttgtagttgaaaaagtagactaacatatgaaagttatttgaaacatacctaaaagctttccaaaaaaaaaaaa

SEQ ID NO: 58650 - DNA, 586 bp, Homo sapiens
gggccccccctcgaaagtcttctagaattaattaacgcggggatgtgatagttacatgcacacacatgtaataaaactacataggtatgtaaaaacacacacagacaaatgcatatatgtaaaattggtgaaatctaaaaaagctcgatgttcatttactggttttgatattgcactaagttatgaaagatgttaccactaggggaaactgaaggaaggttagatgggacctctctataaaatatttttttcagcatcctatgaatttatatttacttcaaaataaaaagtaaacaaaactaataaataaaaatatactatgacataaaatagcatgaaatggagcaagtttaatatggtacatttttattaaatatgtattatgacatgtaaaaataatatcaaagactgaaatgtaaaacctataactagaaaccttctacaagaaaatatagaaagacatctttgtggctttggttcaaaggaaaggcaaaatcattgcaaaatgataaattttgataaattgacattcatcaaaatttttaaaattctcctcatcaaatgatactgttaagaaagggaaagt

SEQ ID NO: 58651 - DNA, 590 bp, Homo sapiens
  misc_feature 38: n = A,T,C or G
ctgggttaccgggcccccccctcggaaatacttctagnattaattaacgcgggtggccaactctttttacagataaggaaactgaggtttagataggatgaatgacttacccaatgtcacacagcttgttaggggcaaaataagactgggagtttttttctcttggttcatagtcccaagctcttcaggctaaccatggtccctcccttccactaaattctgtacctactcaaagccctactgaagtttctaccatcctggcttttcctgagctcatctgatattgatcatgttggtacttcatattatctgaataactcatatgccatttttccttacataaatttgcctttgatatatacccagtatcggaagtatttttaaaaaaccttttgctgtatttatctttactgtttagatttttgtttttatatgctgtaaatcaaatttgcctcctcatgttggctgactaatctctgatcaatagatttttctagagaatgtctccttcactagtatttaagggagggaaatgtgatatactaaataataaactctcctagttttcccaaaaaaaaaaaaaaaagcgg

SEQ ID NO: 58652 - DNA, 581 bp, Homo sapiens
ccgggccccccctcggggtacttctagaattaattaacgcggggggaataatgattttgaaaatgagaaaaaattgtacctaagttttttttttttccaaaaagatctgaatttttaaaatcaaacgctctccaaataccaggcaagattagaagctcagtatctacaacttattcttgtaaaaatttctagcttaaaagataaaaatgaaatgctatccaaaaaggtgggtaatagttacctaaaaaaagggatttttcatcagaacaccacctttaatcagacaccaatttttttttttttccgaaatggagtctcactctgtctccaaaaaaaaaaaaaaaaaaaaaaaaaaagggaaagaaagaaagttgctgcaataaaaaaaaaagaaaacttaaaaaaaaatcaagtaataactagcaccctcagtaagatctagcatattgaaaaaaagagcttactgactgtcataaaagagagaacaaagtagatgcgggaggaataatgattttgaaaatgagaaaaaattgtacctaagtttttttttttccaaaaagatctgaatttttaaaatcaaa

SEQ ID NO: 58653 - DNA, 604 bp, Homo sapiens
gggccccccctcgaaagtcttctagaattaattaacgcgggtgttatttcatttctctcaatgatgtttgtgcagtggtcaacatggaggtcttgtgcatctttcttcagacacattcctaggtatttggtgggttttaatgctatttttaaaagtatttttaatctcacttttgtaggtttttggataccttctttatcagatcaaagaagttcctgtttatttctagttagttgaaagtgtttaatcatatatgtgtttgaattttatcagatgctttttctgtatttattgagatgatggtatggtttttctcctttagttctttagtctcctttagccaccacctcatagtgatgaattacatcgatttctattggagtagtaaataaacttttcacacctggggtaaatcgcacttggtcattatatactattctttctatgtattgctggattcaattggctaatattttattaagaatttttgcaaatatgttattaagggatattggtctataattttcttgttaggttttcataccaggattatgctgacttcataaaacaaattgagaagtattccctcctcctctgtttcctc

SEQ ID NO: 58654 - DNA, 615 bp, Homo sapiens
gggccccccctcgaaagtcttctagaaattaattaacgcgggggaccctcatattcagggaaaacaaaagtctatagaaactgtctataagtgttcccagataatggatttagcagagacaaacttcaaagcaattaatataaatatgtccaaagactaaaggaaactatattaaagaaataaagtatgacaataatgaatggcagcaatgagtcaacaaatagagattctcagtaaagaacataaaaattctataaaagagccgagccagacagacatgctggaattggagagtacaattttggaaatggaaaattcactagaggccttcaacagcagattcaaaatagtagagggaagaatcaattgaaggaaaatgaacagagcctcagatgcctgtgggacactgtcagacacaccaacatatatcagagacctaagatacacaaagcaaaaactgacagaatgggaaggagaaacagacatttcaatcattatagttggggattttaacaccctactcttagtaattgatagaatagctagatagaaaattagcaagcatatagaaaccttgaccaacactattaaccaacttgacctagccaacatatg

SEQ ID NO: 58655 - DNA, 621 bp, Homo sapiens
  misc_feature 29: n = A,T,C or G
ccgggcccccccctcgaaagtcttctagnattaattaacgcgggccatgcagtaagaacatgaaaaaaataactttaatagaagaaaaaatattttatttttttcaggtgtgatgactgaatatatacaaaattcaaataaatctacagataattatttagaaacagaaggttagcttaataaggttgctgaactgaaggtagtcagcaaatgacattttaaagataccatttacaataaagtccacaaaataaaatatctaggaataaatctaaaagatgtgtaaaactctcaaggcataatttcacaaaatattgttgaaagaaattaaagaaaacatacatgttcactgactagaagattcaattgattataaatttgatacagtcccattaaaaatctcaagaagttcgactctgcatgctgtgtgtgtgtgtgtgtgtgtgatttgacaagttgattctcacatgtatgtaaattgaaaaagaatagagattaaacactattgaaaaagaaaaacataatgggaaaacttcccctactagatgtcaatttaaagctagagtaattaagacaatgtggtatttgtgcaagaatagatggatcaatagaacagattag

SEQ ID NO: 58656 - DNA, 578 bp, Homo sapiens
  misc_feature 36, 488: n = A,T,C or G
ctgggtaccgggcccccccctcggaatacttctagnattaattaacgcgggagagctgggaggtgccacacactcttcaacagccagatctcgtgagaactcactcactatcatggggacagtaccaagggggatggggataaagcattcaagagaaatctgcccccagatattttatttaattccttttaattcatataactttagtaatctttgataaacaaagatagttcttaagattatttgtaaaataaaaaaaatctttagaatttagatacttggtctatgacatttttgtataattttttgacttgtctgttttacagccgtttaaattctagtaaggcctgggacatgtagagttagccaagtcccctgcctatgctgggaaaagtcagatgctgtctgtggtctgtcctttccctgggctctgcaacctgatacatggttaaaatttcttacttaccagggttttcactaaaagtaanagtttcaaagagttaacattgtcaaattgaaattgagactacaagaggaacagttttatataaaagatgtataaagtaagtagagtgtgt

SEQ ID NO: 58657 - DNA, 571 bp, Homo sapiens
cgggccccccctcggaatacttctagaattaattaacgcgggataatatataacatatgtgacatgtaattaataacatagtcatataatatatatttaatataggtattatacatacaacgtattatatataatatataatatatattacagatgtcataaaatataatatatattatatgtcgcattttatatatacaattatatattattatatgttgttttatactatacataacatagacataatatatatattatgcataatgggtattatatatagcagatatattatatataatatatataatgtataatttatatttaatacgtatattaaccgtataacattttctatatatgatatgtaacatatattatatatgtcataaattataatatatactatatgtcatattgtataaatataaaacttatatattatcaattattatattttacacaatatatataatataagatgcaggatgtaaaacaatattatacataggttatatatattatatatatgatactggatattattatatacataatgtatacgtatgtt

SEQ ID NO: 58658 - DNA, 223 bp, Homo sapiens
  misc_feature 9, 28, 67: n = A,T,C or G
acttctagnattaattaacgcggggagngggtacacaatgggtatctaataaatacttaagaggtgngaaaaaaaaaaaaaaaaaaaaaaaaaaaaaaaaaaaaaaaaaaaaaaaaaaaaaaaaaaaaaaaaaaaaaaaaaaaatttaaaaaaaaaaaaaaggcggcccccccccgggggggccccccatttccccttttagggggtctttttcccccccccc

SEQ ID NO: 58659 - DNA, 640 bp, Homo sapiens
  misc_feature 26, 39: n = A,T,C or G
gactgggtaccgggcccccccctcgnaaatacttctagnattaattaacgcgggccctctagtctggagctgttaacagaatctgctagaaactagctttattctaacataccgtaggatctaaatcctcctacctggatcatgaattcctttgaaataattcatattttcattgactctcactaaatgtcaaataaccttgttttcacttggataggctcaacctacctggcatatttattttgcagtcttgttgaaagttcatgaaactttgtactttttaataagatgatacactcgaaggaaacttttaatctctgcagtttattctctcttaaggaataaacactcccactgtttgttctcttcaatgtgtaaggagattaaatgacattttagaaatattacaattaaaaatagtgatgtagctgtaacatatgctggaattggatatttaatttatgtttgtgtcaactataatcccttccccacccctttcatttatggtaaacatcttgggcaaacccaaagatggaaagtgcttgttgggtgggtaagcaccacctggtctctcagcaaacactcctgagtggttgaagatgctggacattggattctagcactgggtttatctggtgac

SEQ ID NO: 58660 - DNA, 325 bp, Homo sapiens
attaattaacgcgggactttgtgtggcacacatatattcagttcatacattctgccctggacccccaagatgtccttctcacatgcaaaatacattaattttatcccaaaagcctcaaaagtcttaacagattccagcatcaattctaaagtacaaagtctcatttaaatagtatttaaatcaaatataagtaagccttatccccaaaatcaaaattattctccagctgtaaacctgtaaaaccatacaagttatgtgcttccaaattacaacagatagtggaataggcatgagatagccattcccattccaaaaaaaaaaaaaa

SEQ ID NO: 58661 - DNA, 487 bp, Homo sapiens
  misc_feature 16: n = A,T,C or G
ccgggccccccctcgngggtacttctagaattaattaacgcgggcttggtgtccggctcaagtagccttcctctgctctgggaccagtggtttattttcccgcaaacgctgagtgacttggggccggacagttcataaataattgattcctttccccactaaagcagtcgaggagatttgtaatccactttttagtgcaacaagagctccatgttatgcttgtaataaattatttacacgggaaaaaaaaaaaaaaaaaaaaaaaaaaaaaaaaaaaaaaaaaaaaaaaaaaaaaaaaaaaaaaaaaaaaaaaaaaaaaaaaaaaaaaaaaaaaaaaaaaaaagggggccccccccgggggggacccccattcccccctataggggggcgtttaacccccccccatgggccgtgttttaaaaacgtggggaggggaaaaccctgggggtacccaaattaattggcttggaagaaaatccccttttcc

SEQ ID NO: 58662 - DNA, 403 bp, Homo sapiens
  misc_feature 27: n = A,T,C or G
cgggccccccctcggaagtcttctagnattaattaaatacaaaaaataaataaaagttaaaaactcaattgtataagtaatacatacttatattcagaattctctaataccgtaaggatggtaggtaaagcaattttattcccactatgagaatttaaaaaatctattaaaaatataactataataaatagataagaatacaaattactataaataaatacattttgaaatcaaaatcataaaaagtggggaggaggaagtaaaagtataaagtttcttatgtggttaaatctcagttattatcaatttaaaatagcctgttatgaatagaagatattttgtgtaagctctcctggtaaccacaaaatcaaaacctatagaatctacacaaaaaaaaaaaaaa

SEQ ID NO: 58663 - DNA, 274 bp, Homo sapiens
  misc_feature 46: n = A,T,C or G
cgggtccccccctcgtgggtacttctagaattaattaacgcggggnaaaaaaaaaaaaaaaaaaaaaaaaaaaaaaaaaaaaaaaaaaaaaaaaaaaaaaaaaaaaaaaaaaaaaaaaaaaaaaaaaaaaaaaaaaaaaacccaaaggggggggcattttagccctccctcttgggcctttttttttcccctctctgtctctgggttttggcgcccccccccccggggggggaccccccttgccccccttttcccttttttttctccccccccc

SEQ ID NO: 58664 - DNA, 603 bp, Homo sapiens
  misc_feature 18: n = A,T,C or G
ccgggtccccccctcganatacttctagaattaatttaacgcgggggaaaaaaaaaaaaaaaaaaaaaaaaaaaaaaaaaaaaaaaaaaaaaaaaaaaaaaaaaaaaaaaaaaaaaaaaaaaaaaaaaaaaaaaaaaaaaaaaaaaaaaaaaaaaaaaaaaaaaaaaaaaataaaaaattgtggcccccccccgggggggctttcattttccctttttttggattttttttcccccctttttttggcgttttttttaaaatttgggttttggaaaacccttgtttttcccaatttttttctttttgaaaaatttcccttttttcccttttggtttttttaaaaaaggcccccccccattcccttttcaaaaattttccccttttttttggggatttgaaatttttacctttttttttttttttaaattccccttaatttttttttaaaaaattttttttttttaccaaaaggcccaatttgggaaatttcttttttttttaaaaaatttaccccgttttgggtttggtttttttcccttttggaaaaaaagtcctttttttaaaaactggggcttcccccccaaagggggaaaaatctttttt

SEQ ID NO: 58665 - DNA, 633 bp, Homo sapiens
cgggccccccctcgagatacttctagaattaattaacgcggggactgtgtgcatgtccagggctgtccctactcagaagtggtcagaaagagaagatcaaagttactagtccctggctgaatgtgaggcaaaaagttaaactccttgatctatgatagcacctccaagccacacaaacacagccaatggtaaaacataaaaacataacttactaagggagcataaacaccacgctgggcaaataagaggcttctgctgacccaggagggaccatttgttagccaggcaaaaagacgaaatcaaggaagacactctgagaaagggcatgctccagaagaaacagactttacagaattagattagccaagtcattaaacaaacatacaaagggaaagcaaacaacaacaatattaacccaacctagggggatcaatatccaaagttgatctatattatctaaatattatctaaatatttagataatatatatatattattatctaaaatatattatctataatgtattttatctaaatatatatatttagatattatctattataatattatctattatctaaaatgcttattatctaatatattatctaaaatgcttattttttaaacaaaaaa

SEQ ID NO: 58666 - DNA, 609 bp, Homo sapiens
  misc_feature 17, 28, 563, 572: n = A,T,C or G
cgggcccccccctcggnagtcttctagnattaattaacgcgggcagataaggttcacaagaaaggcgaggagtgaggaggagagaatgcagccttcagagaaccagagagaatgcagccttcagagaaccacaatcacccccttgcagaaaagaaggctaaggagctgtcagagtcatctttctgcctgttttttacagaggcgagtaggaaacgttgtcttttacttccccttggatttggtgacagagaggaggggagatgaaacctgggcatgcatggaaggtatcacgcaggtgaacatcatctgtcctgtgacataggggcaaaagaaaggtaaaaaggctgaatttctggccgggcgcggtggctcatgcctgtgatcccagcactttgggaggctgaggcagggggattgcttgagcttaggggtttgcgaccagcctgggcaacacggtgaaaccctgtctctagtaaaatacaaaaaattagccgggcgtggtggcgcacgcctgtggtcccagctactcgggaggctgaggcgggagaattgcttgaacctgngaggcggangttgcagtgagccgagatcgtgccactgcagtccagc

SEQ ID NO: 58667 - DNA, 272 bp, Homo sapiens
  misc_feature 15: n = A,T,C or G
cgggccccccctcgngaatacttctagaattaattaacgcgggagaaatagcttttggccagtggatgtgctcttttgagaaagtcaattctgagctgaaatttcatgttggaacagtttcctctataagactcatcttgaaaggttcccgcagaagataaaatgtcatcctcacactgggcctgggcagtgcgcacttaactgggagggggcacaggcacctcagaacttaactggttttccaaactctcaatctcaaaaaaaaaaaaaaa

SEQ ID NO: 58668 - DNA, 330 bp, Homo sapiens
  misc_feature 309: n = A,T,C or G
gggccccccctcgaaagtcttctagaattaattaacgcgggagtgtttccaaaacactgaatccaaagaaaagtttaactctgtgagctgagtgtacacatcacaaagcaatttatcagaaaggttctttgtagtttttatcagaagatagttactttttccccataggcctcaatgcactcttaaatatcccttcacaggttctaccaaaacagggcttcaaactgctgaatgaaaagaaacactaaattctacatgatgaatgcacacatcaaaaagcagtatctcagatagcttccttatagtatntatgctggaatattctgtttt

SEQ ID NO: 58669 - DNA, 459 bp, Homo sapiens
aattaacgcgggtgtggggtgattttttgttgagttacatttcatgttggtggacctctagatattagtatctatagaatctttctgtgagaaatttactttcttcagttaccactccacaatttgtattggtgagctattgctatagccacaaatgccccccaaatctccatggcttacgacagcactgatcttttgtttaagttacatgacagctgttgctcctctaggctccattgggcctggctccacatgactttgcattctggctttctagcttgagagcagacatcatctggggaagtttattctcctggtgaaggacagaagcacaatgaaaagaactgaaccacagaagtgcattaatgcttctgctcagacatgtcttatgtagtatttgctcacactccattggccaaagcaagtcaaatggccatgcccaaagtacatggggtggag

SEQ ID NO: 58670 - DNA, 359 bp, Homo sapiens
cccccctcgagggtacttctagaattaattaacgcgggcccacagaactgtgagccaattaatacttttttctttctaaattactcagtcttgggtatatctttataacagtgcaagaacaaatacaccctgttaccctgatcatcctcactacttatttaaaggagtctgggaataagcaaccttagtagtgctctaaagtagccagctgaaactatagcagatatgcatcccaccaggagactccctaagaaaatcaatggtcctcatttgggaaagagcacaatctcattgcaaagcttagggtcctgtaaatttaccagtgtctttcctcaaatgctcaccaaaaaaaaaaaaaa

SEQ ID NO: 58671 - DNA, 247 bp, Homo sapiens
gggccccccctcgaaagtcttctagaattaattaacgcggggccgcccagtgtattcacagagataagctgggaagttttggaaatggttactggtggggtgggataatccttttaaactttttactgatttttttttctttcccacagagttaagcacaaaggaaaacatttcaataaaggatcatttgacaactgatgaaaaaaaaaaaaaaaaaaaaaaaaaaaaaaattaaaaaaaaaaaaaa

SEQ ID NO: 58672 - DNA, 348 bp, Homo sapiens
cgggggggcaatcaccaaaacaattaccagccttactaaaggagactttggaaaaaacggaggagatgttaaagtaccccatttggcgggacgactttgaaaatgggttttgtgtagatctaaaatgattttttggaaaaaaactttttagtgtacaagaccccttggggtccaactgtatatacctgccaattagtttttttggttttaacttggcccttggctatctgggttatgactcaagggggatttgtttatacacattttattggtttcattgcatgtcaaacctcaaataagggcttccttatgggaaaaaaaaaaaaaacgcggccgccaccggggggg

SEQ ID NO: 58673 - DNA, 549 bp, Homo sapiens
  misc_feature 28: n = A,T,C or G
cgggcccccccctcgaaagtcttctagnaataattaacgcgggaggatcgcctgggcctgggtggtggaggctgcagtgagctgagatcacgccactgcactgtagcctgggtgacagatcttgtctcaaaaaaataaaacaaaacaaaaaacaaaactataacacacatacaaaaaagtatatacattttaattgtacaactgagatttttacagactgaacatacctctgtaaccagcccccaggtgaagaaagagaacaggacccgccccccgcaaaggccccctcatacccctttccagattcttcttcctcttccaagagtaaccgctccatggattcattttgcctatttctgacctttatttaaatagcatcatacagtgtgcattttgtggcatctggcccctttgctatttgtgataatttgtggttggtttttgaatgcctttatcttttccgttacctgaaacagttagtgaaaaccacagtggtttaaaaaccaaaaaaaccaaaaaaaaacaaaaaaacaaacaaaaaaaaaaaaa

SEQ ID NO: 58674 - DNA, 574 bp, Homo sapiens
  misc_feature 23, 36: n = A,T,C or G
tgggtacccgggccccccctcgngggtacttctagnattaattaacgcgggctaacacttcctgattccaaaacttactacaaagttacagtaacagaaacagtctggtactggcatgcagacagacatacagaagggaataaaacagaatccagaaataaatgccatatacaattatcaacctacaatggatcatgatctaaatgtaaaacctaaaacttaaaactgttagaagaaaacacaggctaaaagcgagacactggaattgtcaatgatttcttggatatgacacaaaggtacagacatgtcttgtctgtaatctctgacaagacatgagacccagaatacacagaggaactcctaaaactcgacgataaaaccaaacaccctaattaaaaaatggtcaaggaactcatacagacattttcccaaagaagacacacacatggacaataagcacatgaacagatgtgtcacaaatgcaaatcaaaactacaatgagatgtcacctcacacccactagcctggctactatgaagaaaacagaaaataaaaagtgttggtgaggatgtgg

SEQ ID NO: 58675 - DNA, 297 bp, Homo sapiens
  misc_feature 28: n = A,T,C or G
cgggcccccccctcggggtacttctagnattaattaacgcggggaggtgctgggattataggcatgagcaactatgcctggttgtaaaattcttgttttgtagttttgtttttcaaaacaggaaactccaaactttctcaatttgaaatacagttaaccgttgaacaacacgggtttgaactgtgtgggtccatttatatgtatttttttcaatagatatattataaaattttttgagatttgtgacaatttgaaaaaacaaaccatgtagcctagaaatatcaaaaaaaaaaaaaa

SEQ ID NO: 58676 - DNA, 605 bp, Homo sapiens
  misc_feature 16, 438, 501, 502, 551: n = A,T,C or G
cgggcccccccctcgngggtacttctagaattaattaacgcgggggggggttgcatacaaagataacatatatatccaactttctgaaatgaaatgtttttagattactttttcaactgtaaataatgtacatttaatgtcacaagaaaaaaatgtcttctgcaaattttctagtataacagaaatttttgtagatgaaaaaaatcattatgtttagaggtctaatgctatgttttcatattacagagtgaatttgtatttaaacaaaaatttaaattttggaatcctctaaacatttttgtatctttaattggtttattattaaataaatcatataaaaattctcagtgtctgttttcaggcaaaagtttcttaaagaataagtgtgcagagaatattactagaacatcagcattacttaatgtttataaataaatntcattagtcagaattgcagaatatcatcctttcacttttcctttctagcaggccaaatggcannttctaaacatccacacatggattaccaagttgtaaaaattagacaacantaaaattattcccggcatttattttaaacccaaaaaaaaaaaaaaaaaaaaaaa

SEQ ID NO: 58677 - DNA, 462 bp, Homo sapiens
  misc_feature 17, 45: n = A,T,C or G
cgggcccccccctcggngtacttctataattaattaacgcggggngaaaaaaaaaaaaaaaaaaaaaaaaaaaaaaaaaaaaaaaaaaaaaaaaaaaaaaaaaaaaaaaaaaaaaaaaaaaaaaaaaaaaaaaaaaaaaaaccgaccaaaaaaagagaaagcccctcaaaataaaaattgggggcccccccggggggggcccccttttccccttttttgggatctttttccccccccctcctggccctttttttaaatggttggggtggggaaacccctggttttccccattttttttctttgggaacaccccccctttttcccccttggttttttttggaaaggcccccccccaattcccttttccaaagttttgccctcttgtggggggacgggaatttttacccctatttttttttttaaaaccccctttaattttttttgaacccctcttttttttaa

SEQ ID NO: 58678 - DNA, 380 bp, Homo sapiens
  misc_feature 28: n = A,T,C or G
ccgggccccccctcggaagtcttctagnattaattaacgcgggggagtatggttgcaaagctgaaacttaaaggaattgacggaagggccacaaaatgaaaccattaaagacccttaagagccaaaaaaaaaaaaaaaaaaacaaaaaaaaaaaaaaaaaaaaaaaaaaaaaaaaaaaaaaaaaaaaaaaaaaaaaaaaaaaaaaaaaaaaaaaaaaaaaaaaaagaaaaaaaaaaaaggggggccgccccggggggggagttcaatttccccttttagggagtgtttttacgccccttaattggcggtgttttaaaaaggtggggatgggaaaaacctggggtttaccaaattaattggttttgaaaaaaatccctttt

SEQ ID NO: 58679 - DNA, 538 bp, Homo sapiens
  misc_feature 524: n = A,T,C or G
cgggccccccctcgaaagtcttctagaattaattaacgcgggtacatatgaaataacatataggtcaaataaatcttcagggaaatgaaataatattttgaacttcataaaattaaaataccactcattcaaatgtgtgggcttcaatcaaaatagtgattagagaaaaatttgcagtattgaataacatattagaaaaaaattgaaagatctaaaatcaattaggaagcttgaaaaagtacagcaaattgagtccaaagtaagcagaaaaaatgtaataataattagaactgaaatcaaggaaatttgcaatggaaaatcaaaagaaaaaaatcaataaaatctaaagctgtttctttaaaaggtcagtaaaatcaataatcctctagtcaggctaattaaagagagaaagagaaacaagatgaaaaaactatacatcaaaagtgaaagatgagacatcactgcagatcccatgaatattaaaaaataataaaggaatattatgaacaattctacgcccacanaattgattacctag

SEQ ID NO: 58680 - DNA, 608 bp, Homo sapiens
cgggccccccctcgaaagtcttctagaattaattaacgcgggtggctgcttgtgcagaggtgaaggattgatagaaaagggatcatgaaagaattagggtgacagaaattttctataccttgattggagtggtggttatactggaatatacatttgtgaaaatgcatcatactgtatagttaaaaatgtgcgtttactgtctagtagtccccacttattcatgagggtaaattccaagaccttcagtggatgtctgaaactgaagatagtactgaatcctataagtacaatgtttgttcctatgtagtcattagctgtacaacaaagtttcggtcaaggatagaccacatatatgacagtgatcccctagattataatagagctgaaaaattcctatcaccagtgacatcatagccattgtaatgttgcagtgcaatgcattactcatgtgtttgtggtgacaccagtgcaaacaaacctactgtgctgtcacttgtataaaagtataacatgtagaattatgtacagtatatacttgataatgataataaatatgttactggtttatgtattcactatactattttttatcaatattatagtatact

SEQ ID NO: 58681 - DNA, 381 bp, Homo sapiens
ccccccttcgaggtacttctagaattaattaacgcgggggtggggggaactcttggaagggaagaagtatcacttctttctcaagtggagtgtttacaccttgctgtaacatttgaactttcacaagagatgtaataattttgataataaaattcttaaccataataatcaaaaaaaaaaaaaaaaaaaaaaaaaaaaaaaaaaaaaaaaaaaaaaaaaaaaaaaaaaaaaaaaaaaaaaaaaaaaaaaaaaaaaaaaaaaaaaaaaaaaaaaaaaaaaaaaaaaaaaaaaaaaaaaaaaaaaaggcccgccccccccccggggggggcccaacaccccccttacggaacttatttaaccccccccccagccccctttttt

SEQ ID NO: 58682 - DNA, 510 bp, Homo sapiens
gccccccctcggaatacttctagaattaattaacgcgggtcgttcatagtattctcttactgaccttttaatatctgcagaattcgtagtcattgttacctctctcattcctaatattggccatttgtggtttttttattttgatccacctatagctataggactacagatttactacattttctcaaggaactaacttcaatttttatcttttccactttactttgatatttatgtatcttaattttgggttttattgatttatttctctagttttttaaaaatgtcaggatacatttaatttaatgtagtcatatttgcatttgaagaaattttgatgaattcagttgtgaataatgttttacttggagcatataaaacaaggcgtcctcagcctaaaagctcctttagctgataaacaacttcagcaacgtttctggatacaaaatcaatgtacaaaaatcaccagaattcctgtacatcaacatcagccaagccaagagccaaatc

SEQ ID NO: 58683 - DNA, 533 bp, Homo sapiens
ttaacgcggggatcctatctggagaaaaagtttgtgtttcaaaaagtagtgggtagtaaataaactagctcttgagtgttgaaaaaataagatggtatccacaaaccaggcaaaggaggttgctcatctaccaagtgcataagtggaatttttttttttttttttagacagggtctcaaaaacaacaacaacaacaactacaaaaaaaaaaaaaaaactcattgagggggaatctattatctccattttacagaggaagaaactgaggctttgagagtttagtttacccagctcataaggtcctaaacaagagaagaacaatctggattagagttaaaaactagcatataacagtcattgtcccaaatgtcacttgaaaaataggtgcacatcttctattgagtatctattgctacataacaaattatcccaaaaacttagtagtctaaaacaacaaatatcctttatctcaaagtttctgtgggtcaagaattcagagacagcttaggcgggttgttctggttcaggatcac

SEQ ID NO: 58684 - DNA, 494 bp, Homo sapiens
gccccccctcgaaagtcttctagaattaattaacgcgggcaaaatgttcctgctttcagaaaatagaacagagacatgcagaaaacagtgattctattattgtgtattatgacttttgttttatagttctcttttccaactcatctcttttccctgcagctgtggaatctggacagcaaaaatcttgtggacgtttattccactaagcccagggatgagatggcactcaggttaaagaactaacattttctgaacccttcattaactttttaccagcatcaggccctctaagtacaagtgtaagaatccttcattcaattcttcactccgtcattcccattacaagccatctatatgatcaaaatttcagaaacactaggtatgcactaagaattgtgttacatgttgccaagaatacagacatgaataaaatattctgatctgctctctccagctctctcagtaaatgactatcctttgtagaattttgcata

SEQ ID NO: 58685 - DNA, 616 bp, Homo sapiens
cccccctcggaagtcttctagaattaattaacgcggggtgggggacgagcgccgggttccgtccaagccctgttgaagcaggaaacccctacgactctcggcgaagaacgtctctcatcagagactcttaatagcagagttgaccaagcagaagaattggcgagcttgacgacaggctatttgaaatatccactcagagataataaaagaaaaagcatgaagcatgcctacaagatctagaaaatagcctcaaaagggcaaatctaagagttattggccagtagagagagagatagcagagtagaaagtttattcaaagggataatcacagagaacttcccaaacctagagaaagacatcaatattcaagaacaagaaagttatataaaaacaagcagatttaaaccttattaaataagactacctcaagacatttagtaatcaaacttcaaaaggttgagaatacagaaaggatcctaaaagaagcaagagaataaaaacaaataacatgccaagaaccttctatatgactggcagcaaatttctcagtgaaaaccttaagggccaggagagagtggcatgacatagctaaagcactgaaggaaaaagtatttta

SEQ ID NO: 58686 - DNA, 597 bp, Homo sapiens
  misc_feature 23: n = A,T,C or G
ccccccctcggaagtcttctagnattaattaacgcgggggagatttgcgaattgcagactctgtggcctcacctctaggctatctgatttcttaagtataagatatggtctattcacaaagcatttgagttgattctccacaaatcacacttagaaaaagtaataaaaatgaacatacctgattttagtcgacattaataatttacaagattttaagtgttttgtcaccagtaaaggatgagagagaggtattttagatcttttttacgtccacaaggttatagaatctctttattttctcctctgtgaatctgaaacagccagtgctactaccatcatgtatcaccagtaaaggaatagctactgatgtagaattaaaaggcaaaaaggacatgtgaaaataggtagttataaactttccaggatcaaactgaggcctttatatgaaagaatttcagcaatgagtgatgtcatggattttctgtgtattgtgtgtgtgtgtgtgtgtatatatatatttgatgttttcttggcaaataaaaagcaacagtggccgggcgcggtggctcacgcctgtaatcgcagcactttgggagg

SEQ ID NO: 58687 - DNA, 410 bp, Homo sapiens
cccccctcggaagtcttctagaattaattaacgcggggatgtaagggagataagcaaggaaggaaggaaggataaactgtctattaacagataaatatttggtcatgtccataatgatcatttacatgttttctttttttttttctttttctttttttaagaaatagagacaaggtcccactatgttgcccaggctagtctcgaactcctgagctcaagtgatcctcccatctcagcctcccaaagcgctaggattacaggcatgagccagcaaacccggccactacaaatttttcatcctatacaagggctatatggtcaatttaagaatatgacaaatgtggcatatcgcacactactgtgatacaccagaaagctagattaacactctgtacaaaaaaaaaaaaaaa

SEQ ID NO: 58688 - DNA, 566 bp, Homo sapiens
ttctagaattaattaaaaaaaaaaagaaaagaagccgtatttttttcctaagtcagtaagaaggaagtgagcagtaacattacagtaacagacatgtcctgagtgggaactgcatgtcaggctttgatatacaccttctcacatccgatcttcattcaagagtgaactcttccttatccctattttacagaggagggagcaaaggcttaaaaaaggtaagtaacttagcctttcggacttatagcttctaaatatttagcacttacaaagttcttacacatacattacttcatttgttcctctcagtaaactcacaaagtaggaattcttggtaaccttatagttgagacaacagagccaagatgacttggggcccctgatcctgtcagggcagggccatgactagtacacaagactgtggttttcaaagactatagtttttccattatcacatcctgaacaatgattgcatgaagagttatgaacttcatggggctccaacttactgcccagtactaagcagaaatagatactacatatgggttttgcaacatccatttgcttct

SEQ ID NO: 58689 - DNA, 607 bp, Homo sapiens
cgggcccccccctcggaagtcttctagaattaattaacgcgggcagcccaaaagtttatcagctgataggtccctgctaacacaagggtgggtgcttccctgcctgtgtgctgcagatgtgtgtccattctccacagtcactgtccactcaagtgtcaccagaggcagggggcctgtgacactgaccatctattttctagtaacttaaactgatgccacttctctgttttttcccttcagcaataactggaattgtgactcgagggatagacccctggatgtgactcttctttttaaaaggaaactatgtggaggacgatgcaaaaacatatttatcttagtttgctctgctgtagttctgttatttatacttggtgttgcttgtcatggacaccggtgaacatgccgtaactctgtgactgcattgtaagtgcagtgggggtaagcagtcctgtgagtggcgcatgaacgctggagcttattccgccgcctgccccagtgtggggggagatacctttaccatgaacttacagaattaaagatggcccataaggaattccagaccaatatttcttcctgcggtttattctatgttttatatattatc

SEQ ID NO: 58690 - DNA, 514 bp, Homo sapiens
  misc_feature 16, 43: n = A,T,C or G
cgggccccccctcggnagtcttctagaattaattaacgcgggngaactgacaattaacagcccaatatctacaatcaaccaacaagtcattattaccctcactgtcaacccaacacaggcatgctcataaggaaaggttaaaaaaaaaaaaaaaagcggccgctttttttttttttttttttttttgagatggagtcttgctctgtcacccaggctggagtgcagtggcccgatcttgattgactgtaacctctacctcctgggctcaagcaattctcctgtctcagcctcctgagtagctgggactacaggcgcgcaccaccacgcctggttaatttttgtattttggtaaagacagggtttcactgtgttggccaggctggtctcaaactcctgacctcaagtgatccacttgcctcagcctcccaaagtgctaggattacagatgtgagccaccacgcccaaccaatgtctttagataaatacattttttaattggcttgttaaaatgctt

SEQ ID NO: 58691 - DNA, 583 bp, Homo sapiens
cggggccccccctcggaagtcttctagaattaattaacgcgggtcagtaaacataagaatcacctggaaagcttgttaaaactaagattcttgaataccatttccagatattctgattgattaggtctgggttgaggtataagaatttacatttctgtggaacaagctgcccgatgctgatattgcaggtcagtggaccacacttttgagtaaggtctagggtcttagcctttatgcgagagtctcagtttcatttcttaaggcccttctgcccctgcatatgtattaaaacccaagttggttttaatacatgggtaacacagcatgttacccatattaatcagtgcactctcagctctgtcctccagattcttcatttctggtacgtgaggcatttcctacctaccttttcagcttagcttgatgtgtgtgtttgttggggaggggagtgggtatacgtgtgcacttatcacatattttatccattatatatagtaataagacttttaagttgtcttcacatacttctctgaatagtttggtcccaccaataaacctatcactgttcaactggaagtttcct

SEQ ID NO: 58692 - DNA, 489 bp, Homo sapiens
ccgggccccccctcgaaagtcttctagaattaattaacgcgggacaacctaccagatacacatctttagaatccttctatcttgagagcttgtttggaggttctagcaggggagcgcagctacccgtatacccttgaccaaagaccggtcctcctctatcggggatggtcgtcctcttcgaccgagcacgcagcttcgggagggacgcacatggaacggtgagggaggaaggggacacccgcctagccagccagatcagccgaatcaactctggcgatcaatggggtgacagatgtcgcagccagatcgccctcacatccaagaatccttctatcttctatcttctctcatcagcgcaccagactccgttctctctgccctgcctgtggctgccctcctgcctccatctcaatctgtttgtccattaaaatgtcctggggtggggggatgtggagactttaaaaatacacatttccaaaaaaaaaaaaa

SEQ ID NO: 58693 - DNA, 623 bp, Homo sapiens
cgggccccccctcgaaagtcttctagaattaattaattttaaagtgtagataacccaccaaccttggtaaactatttaaaccaggccaatatgaatgaaactaaaatatgacactatgccattgaaaaaagaatctgccaccaacattgcctggctagttgctcaaggagagctgatgctataaaggcggcagtccccaaccttttcggcaccagggaccgattcatgaaagacaatttttccatgaactaggggtagggggatagtttcaggatgaaactgttccacctcagatcatcaggaattagattctcataaggagtgtgcaacctagatcccttgcatacacagttcacaataaggttcaccctcctataagaatcagaatctctgctgatctgacaggaggcggagctcaggcagtaatgctcaattgcctgccactcacctcctgctgtgtggcccagttcctagaacgccagggacctgtagggttccatggccccaggggttggggacccctgctgtgagactccacacttcaactggaaccacagcaagagagcagggcccaagatcacttaagagtttcacaggtatcagatggcaagaagtcccattct

SEQ ID NO: 58694 - DNA, 527 bp, Homo sapiens
  misc_feature 21, 82: n = A,T,C or G
ccccctcgaaatacttctagnattaattaacgcgggaggattttaaagaatagtgtgacatatttggaaatcaaaaatacanaatgaaaaacaataacaaaataataattctcagaaatagaaaaggaaaaataatttaataatcttaacaaataatataaaataccgaaaagtaaacttaatggaaaatcatgtagtttactacaggaaaacacttaaattttacaagatggcatagaacagaaactgaaaaaagtgagaaaaagaccatatttctagatgacaagatgtagtaccgcaaaaatagtaatctttccacaatcgtcttttagacaatactaaccacaattgcaatagttagttggggtagttggtggggaactgggaaaattagttattgttcatatggctcttaagtgtataagaaataggaaagtaagaaaagtattggtgaagggtgatttgctttattagatattaaaatttaccacaaaacaatgaaatagcataagaaaaaaaaaaaaaaa

SEQ ID NO: 58695 - DNA, 576 bp, Homo sapiens
cggggccccccctcgaaagtcttctagaattaattaacgcgtggtggcacatgccaagtaactgatactacaggtgtgcaccagcacacccagctaattttgtttttattttttgtagagatgaagtctcaacaatgttgcctaagctgatctcaaattcctgggctgctgggatcatcggtctcccagaatgagccactgcaccaggccaaaagggcttattttaagaagatggcttagcttatattaaaatgtagctgatttacagactggcttctggttttgcaggaccttaggatatttcctatttgtgctttctgtaggtttactcctggcttgggggcattaggaagcactggaggctcttcgggaactaatggatctaacgccacacctagtgaaaacacaagtcccacagcaggaaccactgaacctggacatcagcagtttattcagcagatgctgcaggctcttgctggagtaaatcctcaggtatcagttcttttccgttcaagttttgtattccttaatgttggaaatttagaaatttccaaaaagaaggaaaaaaaaaaaaaa

SEQ ID NO: 58696 - DNA, 347 bp, Homo sapiens
ccgggccccccctcggaagtcttctagaattaattaacgcgggtgcagaacactcaacaatgcagaaaatacattcttttcaggagtgctaggatcattcaccaaaatagaccatatggtctagtgtaaacaatgtaatttaaacaaaataggccatggagactaatttaaccaatcataaactagtttcaaaggatacaaagaatacaaaatatttttctggcatgatggatgcgtaatagatatttggaataacttaatagatctttggaaaattcctaacacttggaaattatacaacatgctttgaaataacaggtcaaataaaaaaccaaaaaaaaaaaaaa

SEQ ID NO: 58697 - DNA, 565 bp, Homo sapiens
  misc_feature 28, 328: n = A,T,C or G
cggggccccccctcggggtacttctagnattaattaacgcgggggacttaagatggcggcgtttgcacggagtgcaatcactgcgtccttacgggggttgcaaggcgtccgaagtatgagtccactaacaaaagtccagaaactcgccagttaatagtattgtgtctctactaaaaatacagaaaattagccagatgtggtggtgtgcgcctgtagtcccagctactcgggtggctgaggcactagaatcacttgagcctaggaggcagaggtggcagtgagccgagatcacaccactgcactgcagcctgggcgacaaagactgtcnaaaaaaaaaaaaaaaaaaaaaagttacgtaaccaacaagtcaaaggagaatttataaggaaatcagaaaatactttgaggtgaatgaaaatacagaaacaacatatcaaattctgtgagatgtgtgaaagcaacgcttacagtgaaattaatagctatgaacattgtaatgaaatgagaagtacttcaaattactaacctaactttccaactttagaaaatacaaaaaaaaaaaaaa

SEQ ID NO: 58698 - DNA, 612 bp, Homo sapiens
  misc_feature 37: n = A,T,C or G
ctggggtaccggggccccccctcggggtacttctagnattaattaacgcggggacacatcagcctggaaaataaagtgatgtgaaaatatatttcatgtcattggaaacaagaaaggtccaagaatcacttacttttaccagacaaaataaatttcaagaccagactatatgagacaaagaagctcactatgtaataataaaggagtaagttcagcaagaagatacaacaattttaaagatatatgaacccaacactggagcaaagagatatataatacatacattacagccacagagagaaatagggtccaatacaataatagctggagacctcagccccccactgttaagattagatagattttccagacagaaaatcaacaacacaaaaaagtcataattaatctccactatagaccaaataaatttaatagttatttagagataattttatctaagagcttcagaatatatatccttttactcagcacatggatcattctcaaggatagactataccttaggtagcaaatcatgtctcaaaacattttaaaaaattgaaattatatgaagcatcttctcatcaatggaataaaactagaaattaataa

SEQ ID NO: 58699 - DNA, 490 bp, Homo sapiens
  misc_feature 9: n = A,T,C or G
acttctagnattaattaacccggggaggcggtgctcggtcagccttgccttttgagatctctcctgtgctgccccctctacgcccggctccactcaactcctcctacctcgctcacatgtgagtcggacctgagcgggttgcacgtgtgcctatacacgtggcggatataaaacaccatattctctacatcagccgaacagaagagcgcaatttgcaaatgccttctctagtaatggctacccaatataatagcctgccatagcaggccccacctctctaggttgccctgggtgtgtctcctctcactgcctgccccatggccatgatgtctggggcttgtctcttctatggcatcccctgattgactctcgtataacaacctatgagctcaactccaccatatgatgccttcgtaataggatgccttgctaaagaagtcactgccactctgaacacgtgatgattattggttgacataatacacccagc

SEQ ID NO: 58700 - DNA, 582 bp, Homo sapiens
cgggcccccccctcgaaagtcttctagaattaattaacgcgggcatgtagtgaatgtgatctctgtgcagagctatatatagaaacaggtggaaaactcatggaaaaatacggtgttttcggggcatacattttttttctgggtgtgcatctgtctgaagtgctcaagcacttagttatccgcctttgcaaatcgctgtgaatgcccccatccggttcctcttcttgccacctgtgccaaggaattaatcttggtttcactacagttaaactccactgctttccaatcatgtcattgaccgtgcctttaacgaacgaaatggtagctgaatgggaattcttttaacaaaccctgacattaaagaaagactatgtggataacttataggaaagcctagaccctcccattagagtggggatgattttcttcttgccttatctctttcggacaatagttaacttatcagtgttagttatgagtttggtcgcagagcacttatcttgagggctgatgcccgaaaaccacttgctgctgaatttaccagggatcctcatacctcagagtgacaaccacttactacca

SEQ ID NO: 58701 - DNA, 533 bp, Homo sapiens
  misc_feature 9, 407: n = A,T,C or G
acttctagnattaattaacgcgggggacttgttgaaaggaaaatctataaactaaaaaaaaacacatatataaaactatatatagaaaactgaaattgaaccaaaaaaatcatttatgaaggccaggcacagtggctcatgcctgtaatccctacattttgggaggctgaggcgggtatatcacctgcagtcaggagtttgataccagcctggccaacatggtgaaattctgtctctactaaaaatacaaaaattagctgggcgcggtggtgggtgtctataatcccagctactcatgagactgaggcaggataattgcttgaacccgggaggcagatgttggagtgtgccaagatcgggccattgcactccagcctgtaggcaacaagagtgaaactgtgtctcanaaaaaaaaattggactcacttatgaaataactgggaaaatctgaatagtcattttagatcttataatttttttaaatttgatcatgtatgggggtatttaaaaccatctgtgaccaggtgtggtgg

SEQ ID NO: 58702 - DNA, 599 bp, Homo sapiens
  misc_feature 28: n = A,T,C or G
cgggcccccccctcggggtacttctagnattaattaacgcggggtgatgtcacaggaacactgtaatggggatggcagtgcccagaagagttctatcataaaatggaaatggtttataagagatcatgctacctacctgaggaatgcaaggaggagataacctcccccttaggcctgactctggaactgtgtgaggagctgctggattcttcagtgtctgataaacagctctctgattgactgacaaagaactgctgtgtttatgatgcatttcaaggcagtttcaaggtgaacagacaacagcccatctgatcaccaaaggccaatgatgcaatcaaccatgcctatgtaatgcagcttccataaaagcccccgaaggactgggtttggagagcttctgaataactgaacacacagaggttcctagagggtggcacacctggggagggcatggaagctccacactcctgcccccatacctcgccctgtgcatccctttatctgtaccctttgtaatatcctttataataaaccagtaaatgctgtttccctgagttctgtgacctgctctggcaaattaatcaaacccaagaaggggg

SEQ ID NO: 58703 - DNA, 390 bp, Homo sapiens
ccgggccccccctcggaagtcttctagaattaattaacgcgggcatacaaacagaagaaaaaaaaaaagcatgaaaggacacaaaatgtcactgagagaagaaagtgttaagaaaaagcaatagaactaattatgaagcccctcctttatgccagtcaatgtgctctaccccttctatctcacatctcacaataaccctgtgaagttcccctattttttagatggggaaactgaggcttaaaagttaaattatttgcctaaggccatacagctaagaagcagcagagttagtatgtaaacaccaatcaacacaactactccaaagcccaagttctcctttaaacttacagtggaagagggaagcaaataataaaaccctaaattgcaaaa

SEQ ID NO: 58704 - DNA, 600 bp, Homo sapiens
  misc_feature 23: n = A,T,C or G
ccccccctcggaatacttctagnattaattaacgcgggtagggctggctgccaagatcagcagtgacctgcgcaagagcggcgtgaagcagctcatcgataagttagaagaaaggtttcgattcaacaggcgcgacctgatagggtttgagttcacagtgctcgtggccttggagctggccctgtatcttcccgagaaccaagtgttacctcattacaggcgcctcacccagcagttctagcagaggccccacagaaggctcagggcaccgaggtgcacttgccggcctgggaggtgtcccactgaagccccgcgcctcctcctgccatttccttggaaagagacgtcgctttcatccccaagtgcaccgtccctccgaggggatttctgagaattctcctgcatttttacataaactaaatgtgaggtttgttactggtatttttttcacgtgcctgagaccagcctggtaccaggaccttttgttcacagcgtgcagcagcgagccggctgcagtgtgtctcccctggcctcgccttctgcaaaccaccgcagccaccacagcgtcagggtggagatctgggtttctagacctcactg

SEQ ID NO: 58705 - DNA, 605 bp, Homo sapiens
  misc_feature 28: n = A,T,C or G
cggggccccccctcggaagtcttctagnattaattaacacgggacatagcataaacagtatttttatgagaatttcagctggaggatgagcagaaaagttatcaaggaataacaaaatctcacagtcatcattcagtccaattttcctgcagtaagcatgagctgctggtagaaaatgtttgtgaaattagaccaaatgttgtccccagtaatccatgcattttttgagaacacaacagtggcctagtaggaaattccctccttgcaaacagtgaggacataagcttttgcctatcacagcaagtttatacttctgcatgcctgctgcattagcaattgccaacacaaatttctctccttggcatccttaattcctataggggctgtttcctcagctgtagtcagtgtctttctgagataataatacccaaacggtgacattttgccagcataatagatttgtccttgcatcatattccatcatcgatgaccttggcaaggtcatcaatgaatttctctgctgccccataatctgcaggtgctttatctccacaaatatttgaaaatgtaatgtcaatatcaatgtcttttcttaaatttctgcc

SEQ ID NO: 58706 - DNA, 543 bp, Homo sapiens
  misc_feature 503: n = A,T,C or G
cgggccccccctcggaagtcttctagaattaattaacgcggggctcacaccactgcactcagcctgggcaacagagtaagaccctgtctcaaagaaaaagaaaaaagaaaaagaaaaatgagtctgcattaccctttcccagtcctattccctgacagtgatgggtttgaacagatgtgcatttgtggacttatatatagtcataggagggtatgtggcggttttttggttgttgtcttaaaaatgttttttaggcccggtggctcatgcctataatcccagcactttgggaggcctaggaaggtggatcacttgaggtcaggagttcaaaaccagcctgggccaagatagtgaaatcctgtctctactaaaaatacaaaaattaggtgtggtggtgtgtgcctgtagtcccagctactcaggaggctgaggcaggagaatctcttgaacccaggaggcggaggttgcagtgagctgagatgcgccactgcactccagcctgngtgacagagtgagactccacctcaaaaaaaaaaaaaaaaa

SEQ ID NO: 58707 - DNA, 581 bp, Homo sapiens
  misc_feature 9: n = A,T,C or G
acttctagnattaattaacgcgggtgatagctgagcatatttgaagatggtcatgttaagtacccaaactttctcttataatcatttgcagtaggaggaacacaatctgcaaagccagcgtttgtttcttgagaccattcctttcaggggcttgtccctgttgaagcacatgtcagcacaggtgagctcatgattgcctggagatctccttgtggctcctgtgacaagcagaaaggaacacattgtaggatagaagcctcctgtgtttatggagggtggcttccaaagttgctgtctcctctcctctccttgctttatgtagatttaaatttctgacctatttcatttttcttctctccaaagaatgttttttaacatttcttgttcttgcaaggtaagtctgctggcaacacattctctgaattttgtttgagaaagtctttatatcttcttcacttttcagggaaaattttacaaagtacagaattccaggttggtgggctttaacaaatctctaaatactttaaatatttcactccactgttattgcttgcatggtttctgaggatgaattgtatgta

SEQ ID NO: 58708 - DNA, 601 bp, Homo sapiens
cgggccccccctcgaaagtcttctagaattaattaaccgggtggtagggagaaaaagagtggaaaagacagaagatgagatgatgtctgcagcaatttcataggccatgtctacaccgatctctggtgtttacaatgctggttggggtttgcttgcagaagggcaatgacagtgttaggggcgtttgaaccagagcaactccatcttaaataggagctaggtaaaatgaggctgagacctactgggctgcattcccagacggttaagacattctaagtcacagggtgagataggaggtcatcacaagatacagatcataaagaccctactgataaaacaggtcacagtaaagacaccagccaaaacctaccaaaccaacatggccacaagagtgacctctggtggtcctcactgctacactcccaccactgccatgacagtttacaaatgccatggcaacgtcaggaaattatcctatatggtctaaaaaggggaggcatgaataatccaccccttgtttagcatatcatcaagaaataaccataaaaatgggcaaccagcagccctcagggctgctctatggagtagccattcttttatt

SEQ ID NO: 58709 - DNA, 579 bp, Homo sapiens
  misc_feature 9: n = A,T,C or G
ccccctcgnaaatacttctagaattaattaacgcggggtgggtagagaaaagcagaggtttgctggttttcactaccaatccagcagcattatttgatttctttttaactatgtatatgtttttctttgattaaaaactaatataaataaacatcatttttaaaagttcaaaaaaaaaaaaaaaaaaaaaaaaaaaaaaaaaaaaaaaaaaaaaaaaaaaaaaaaaaaaaaaaaaaaaaaaaaaaaaaaaaaaaaaaaaaaaaaaaaaaaaaaaaaaaaaaaaaaaaaaaaaaaaaggggcccccccccgggggggaccccaatttccccctaaagggagtgttttaacccccccccctggcccgttttttaaaacgggagaaaggggaaaaccccggggttacccaaattaaatcccttggaaaaaaatccccttttcccaagggggggaaaaaaaaaaaagccccccaccaatcccccttccaaaaagtggcccaccctaaggggaaaaggaaaattgaacccttaattttttggtaaaaatcccgttaaaattttggtaaaacaacctttttttta

SEQ ID NO: 58710 - DNA, 498 bp, Homo sapiens
  misc_feature 9: n = A,T,C or G
acttctagnattaattaacgcgggtgatttttttttccatcttacttttctgatttaactttcctcgacttttggacatctacttatttatgttctaatccattttacaacacaggaaagagacctcctaaagacattcagaatctcatctgacacatttataacctacatgatgactttagaagaccattaccattctgacgtggcatatcacaacagcctgcacgctgctgatgtagcccagtcgacccatgttctcctttctacaccagcattagacgtgagtaattatgacctgttttgcattcctgcccatcctccttcaaaaatgccatatcagctggatgtagtagcatgtgcctgtagtcctagctactcgggaggctgagttgggaggattgcttgagcccaggggttcaaggttacagtgagctatgattgctcccctggactcccgcttgggcaaccctgtctctaaaaaaataaaaaaaaaaaaaa

SEQ ID NO: 58711 - DNA, 590 bp, Homo sapiens
  misc_feature 509: n = A,T,C or G
ccgggccccccctcggaagtcttctagaattaattaacgcgggacccaagttaatgggcattttttaaaatacctgaccaataatctttaaaagtatcaatacataaattagaatgaaagattgaagaactgtcacagagtggtagaaataagggcatataacattgtgaaatcctagattagaaaagaaaaaataataatggaaaagctgaagaattctgaatgaagtttgtagtttagttaacagtattatatcagtgttaattattagttttgatcatcataccatgcttatgttatcattatgctatgttatgttatgttatgttatgttatgttatgttaacattaggggaagctggatgaatggtaggcaaaggctgtctgtgctatatgtgcaactcttctgtaagtcaaaaattattttaaaacacaaagtaaaaaaatgaaatatcaaaattagacattagtggatgttgatattgcagcacactgcttatagtctgcanaaatgtgggtttcccaattcttggcttctaatagaaaaactaactgtcagccagctgcttcctgtaaaattctgatttcca

SEQ ID NO: 58712 - DNA, 607 bp, Homo sapiens
  misc_feature 23, 52: n = A,T,C or G
ctgggtaccgggcccccccctcnaaatacttctagaaataattaacgcgggngaagaagcctgctgcataaactcttaaatttgattattccataaaggtcaaatcattttggacagcttcttttgaataaagacctgattatacaggcaaaaaaaaaaaaaaaaaaaaaaaaaaaaaaaaaaaaaaaaaaaaaaaaaaaaaaaaaaaaaaaaaaaaaaaaaaaaaaaaaaaaaaaaaaaaacaaaaaaaaaaaaaaaaaaaaaaacacaaaactggccgcccccccccgggggggccccagggacccccctgggggaacctaaataaccccccttgcggacatttttttaaacccaggtggggggaaaacccagaggccccccaaaataaaccttcccaacaaaagccccctttgaatgggggggggaaattggaaaaggcccccccctgaaaccccccccaaaaaatttccgcccctaaggggatttggaaaccgaaaggcctaaattttgcaaaaaacccccgaaaaaaatgagtaaacccagattttttttaaaccaagtgcccgaatggaacaaaattcctttataaaaaaaaaaaaaccca

SEQ ID NO: 58713 - DNA, 294 bp, Homo sapiens
gtcttctagaattaattaacgcgggcagcatacagccaaaaatgtttgacttatatgaatgttaagaaatacattgttatttcaggcttccatttcattacctatattcattttaaaagaaaaagttaaacaaaaattttttaaatccttattttttaaaaatacctggcttattcctactactcccttatgagatgtctataaagagtatacagagcctaacaacatagtaaagtagatataagtagttataagcctgactcattggtttgtttgcagaaaaaaaaaaaaaaa

SEQ ID NO: 58714 - DNA, 575 bp, Homo sapiens
ccgggccccccctcgagaatacttctagaattaattaacgcggggacttccagcctcaagaactgtgagaagaaaacaaaaaatacgcttgttgtttaaccctcttagtttatagtattttgttttagaagcctgtcatagactgaatgtttatgtacctcccccccaaattcatatgttgaaatcctacccctcaatgtgatcctattagaacatggtgcctttgggaggtaattaggattagatgatgtcataaaggtgtgaagcatttgtgaatgggattagtgtccttataagagttctggtaaaggttacttccctctctgctccctgccatgtgaggacacagagaagttagcagtctgcagcccagaagaggactctcaccagaacccaaccacgctggcaccctgatctcagacttccagcctccggaatcgtgagaaacaaatgtctgttgtttataagccacccactctatggtattttattatggcagcctgaactgatgaagacacagcccaagcagactaagaaaatcagttataaattatgtttccaagccctatgcttgt

SEQ ID NO: 58715 - DNA, 596 bp, Homo sapiens
cgggcccccccctcggaagtcttctagaattaattaacgcgggacatctgatgcttgaaacaagactagagttaggggcacagaccacctgcacggtcaaaaatgcgcaaatcacttttgactccctcacaacttaactactaatagcttgctgttgactggaagcctcgcggataacataaacagtccattaacacacattttatatataatgtactgtatttttacaatgaagtaagagaaaaaatgttattaagaaaatgtattatttttcatcaaggggaagtggatcatcataaaggtcttcatccttgatgtcttcaagtcaagtaggctgaggaggaagagaaagggttggtattgctatctcaggagtggctgaggcagaagaagcaaatccaggtacaagtggagtcattcagttaaacccatgttattaagggtcagctgtacctatatatgtcatttgagtgtaatggttaagaggatgggactgaattccaaatcctggctttgccatttattagtgtctgtgggcacaatccttaatctgtcttaaatttctggtctgtaaaatggagatgataaaagtgcct

SEQ ID NO: 58716 - DNA, 282 bp, Homo sapiens
ccgggccccccctcggaagtcttctagaattaattaacgcggggatggtagtcgccgagcctacatggtgacaccggtgacggtgaatgagggctcgatctcggagagggagcctgataaacggctcccacatgcattgaaggcagcaggcgcgccaatcacccactcccaacccggggtaggtagctgaccatgctaaaaactaaacccggccgaccccgctgcggagctccattgatccctttactgagccaactgacccgcgctcactgaggcataaca

SEQ ID NO: 58717 - DNA, 553 bp, Homo sapiens
  misc_feature 13, 25: n = A,T,C or G
ggccccccctcgnaaatacttctanaattaattaacgcggggcagaaagggagtgataagctgccttcatagactgtgctttcattttttgcaaaagtaaatgtaatcaatatgaatttgtggaaagtgtagcatatattgccatgtgttatgactttgagcttattttaaaataaagatggatgcctgtttctgcctaacatgttagtcagtgttatcaaagacaagaggcagaccattcattcactcatttccaaaacactgaatgccattctgtgcctagcgctatacaagacatcggaaattcagtgtcaataagtctttgctttccaatcaacagggacgattttaattatagattgtcttcctattaagtatgaattttagcaggtattaaaattagtttgataatatgagaaaaaaatgaagattgaggccgggtgcagtggctcatgcctgtaatcccaatactttgggaggctgaagtgggaggacttgagcctaggaatttgagaccagcctggacatcatagtgagacctcatctctacaat

SEQ ID NO: 58718 - DNA, 612 bp, Homo sapiens
  misc_feature 37, 103: n = A,T,C or G
ctgggtacccgggccccccctcggaaatacttctagnattaattaacgcggggtctttacccattaagtattacttagccaatatcatggaatagataattgntggaaaacgtcacacatataatacaactttgacaaccagtagggagggctctacgctatatatttaccaagatatttttattgaagaaaaaaattagcaatgcaataaatcgataaaaccttgagccaaagcttaatccctagaaaacattagaaaattcattttctagagaaccactacaaatgtagaaagtgtgagaaagtcttttattagttcttcatctttattatacatcagaataccaatgttcagagaagtcatacaaatataataaatgtgtagaagtttttagccagttgtcaaaacatactcagcattagagaatctatattggataaaactcagatacaataaatgtgagacagttcttagttaataatcaaatctaaaaaaacatgagatagcctggcgcggtggctcacgcctgtaatcccagcactttgggaggccgaggcgggtggatcacgaggtgaggagatcgaaaccatcctggctatcacggtgaaacc

SEQ ID NO: 58719 - DNA, 216 bp, Homo sapiens
cccccctcggaagtcttctagaattaattaacgcgggattcggaatctgagggcacagccaagcccccgccaactttgatcccggatcccagcgtcactcagctctggacggttcttcccccattgcttctgtcggctgcatagacgtgaggggcagataggtgctctcagattccgcaccaataaagccttcaaactccctaaaaaaaaaaaaaa

SEQ ID NO: 58720 - DNA, 546 bp, Homo sapiens
  misc_feature 480, 483: n = A,T,C or G
ccctcgagagtcttctagaattaattaacgcgggagagtatatttgttacttcagataattttcacctctggggggttgccatggagtggggggaaaccagactacgaagatgcttgtcactcatatttagctgtgctaaaaataaggactatttgaataaacttgtgaaattagacattttattttatttatttgtttgagacaattactctctgtcactcaggctggagtgcacaagatactcgtgttaagagggagatgcagtcaagcaagaacagaaaagtctttcttcatgacatcagtatttaacaagtcagaaactagactagatcaggtattgtcttatactacaaggagtcaggggcacagaagagaagactccttcgttcaaatgcttggtattttagagccaaagaaaaagagacatgtactattttaatgacaaatgttaggtttaagtttaaaagaagagagaacanaantggtattgctaaaataatagacttagttgatcaaattaagttcaaatgtgttctcaatgatat

SEQ ID NO: 58721 - DNA, 590 bp, Homo sapiens
  misc_feature 28: n = A,T,C or G
cgggcccccccctcggaagtcttctagnattaattaacgcgggactcactaaagtctctgtatgtccacctttataaaatatatgttttataatccatagttttactttgtagttagtggtttcttagtatatatttgttaaattgaatcatggcaaaaaaaattcaaatgaagactacagatggctcttgtaaagaatcatgtcaattttactaacgcattctacaatgacatttcataaaaataagcaacataaaaatgttaattatattgttaaagtatgtccccagatgttgtgaaagtatcacaggacctccctttctaccccaaatcagatcctttctacaccaaatcagattctgttgtcagtgccaaaatagacggcacaggaaatctaccacaccacagaccatctgcaagaaacatctgacagagacttctggttttgggcttgaacaccaaccaatcagacttcacctgccccagccagtcaggtttcaactttattaaccaatcagaattcagctacacctacccctctgaactaagctagttttaatcctttatttcccaaaactgatcagattgag

SEQ ID NO: 58722 - DNA, 564 bp, Homo sapiens
ccccctcgaaatacttctagaattaattaacaaataattgtatatatttatggggtatgtgatgtttcaatacatgtatacatcgtggaatgataaaaatcaggcaaattaacatctatcatgtcaaaaaacttatttctttgtactgagatttaaaatataaattattaactatagtcactgtgctgtgtaacagatcatgagaacctatttctcctgtccagctgaaactccgtaccccacttcatcaacatctctcctttccccagctttccaatcctcagcctctggtagccatcattctactcttctacaagttagacttttaaaagttccacatatgtgagatcatgcccatcgcacctatttttgatcgtttcttgttccttactaacacaagtggcccttgaataatgtgggggctaggcgtgctaaacccccatgcagtaaaaaatacatgcctaaattttgactcccctgaaacttaactactatagaatattgttaacaggaagacttaccaacaaataaacagtcaattaacacgttacatgtattttatat

SEQ ID NO: 58723 - DNA, 598 bp, Homo sapiens
ccgggccccccctcggaagtcttctagaattaattaacgcggggggaggggcacctcattacctcattttcaacatcgctattcttttacttttctttttttttagagacagggtcatgctctgtcatgcagtggagcaatcatagtaattcactgcaacctcaaactcctgggctcaagtgatcctcctacctcagccttccgagtagctaggactaaaggtgtgcaccaccacgcacagctaatttttttaaattttcctgtagagatggggtctcactatgttgctcaggctgggctctaactcttggtctcaggtgatcctcccaatttagcctcccaacattactattctaactttaactacctgccatctgttctaaacatttacatacttgttcctacttgacatatctttttccaggttatctcaagaaaaaagaaaccaggccaagctttgtggctcacacctataatcttagcactttgggaggctgaggcaggagtgtgagatcagcctgggtaacacagggaaaccccatctctacaaaaaataaaagagaaaagaaaacaaaaacagcaaaggtagggattagaa

SEQ ID NO: 58724 - DNA, 614 bp, Homo sapiens
  misc_feature 28: n = A,T,C or G
ccgggccccccctcggaagtcttctagnattaattaacgcgggaaggcaccatctagagctgaaaagaaggcagtaacctagcagtaaaggacctctaagcaaatatactcactaaaaaaaacaaaacaagccacatagaaaagactaattagtaaataatccttcaatgcaaagagatagatgtacatcaacaagaaacaacagcaaacaggaaaatatgatctccccaaatgaacaaagcaaataactaaccctaatgagacggtgatatatatatgtgagctttctgaacattaattcaaaaatactagttttaaggaaatgccataatctccaagataacatagaaaagcaattcagaaatttatcagtgaaatataacaaagagattgaaataattttaaaaaatcaaacagaaatcttggaactgagaaatacatttgttgaatgaaaaaattcattagcagctctcaacagcagaatggatcaagcagaggaaagaatcagtgaactcaacaacaggctattttaaaatacacagaaagaggaggaaaaaaaaggaaaaaataatgaagatcaatgaagatcacctacaagatattaaaaattatct

SEQ ID NO: 58725 - DNA, 509 bp, Homo sapiens
  misc_feature 33, 39, 45, 50: n = A,T,C or G
cccccctcgagagtcttctagaattaattaacngcgggnaccagnaacangtggaaacgctacatgcacatacacaaaactacctcgactctttttattttgcatcttgtttgatacacaagcattctaccaacactttctatcttcagcttactgatgagtaagaaagaactgaaaggaaaaagaattatgggttgctctatctttctctttcctttgatgtcatcttttttttagcataagtggttggctaatataggaaagtgatgcgagtaggttagaatctaatagtgtcccttggccattcgtgtttcttagaacactatttccttcattctgtgttgaatgcaagtgctggttcaaatagaaagtgtggccgggtacggtgactcatacctgtaatcccagcactttgggatcccaaggttggtggatcacctgaggtcaggagtttgagaccaacctggccaaaatggcaaaaccacatctctaccaaaaaaaaaaaaaaa

SEQ ID NO: 58726 - DNA, 605 bp, Homo sapiens
  misc_feature 33: n = A,T,C or G
gtaccgggcccccccctcggaaatacttctagnattaattaacacactataggattagccaatacaaggggctcaaattatggttatacctgggagacccactaaaatttaagcaaggtatcccctgataatcttaagggagttactgaatataaaatagaagacaaataagtatgtctcatcttagccatcataactgtgcctaaattccccatgttcatggcacccagtgtcctaaaatacgccagaatgaacaggtaaactctaaaccagtgagtcataagtgaaatttaaattaaatctttggcacttacaaactggcttgacagaatgagaccctgtggaacttactccccagttaaattagttatgatggctcaatataaattgaacagggccttgaagggttgaaaagtattatgtaaaacttgtttagtgaggaagtgattattccccgtgcttctcgttttaaaagtacagtttggcctttcttaaacttggagagaatgaatggcaacccacaatggattaccataaccttaatgctgtggtcccacccattaagcccctataccaatatccaacatggaaattactgacaccat

SEQ ID NO: 58727 - DNA, 484 bp, Homo sapiens
  misc_feature 15, 28, 349, 350, 351: n = A,T,C or G
cgggcccccccctcnaaagtcttctagnaattaattaacgcgggtggggtggggtgccgccgaccgttccgctcttccggccaggtgcttttctgtcaatttctatggaatgcaaaaggaggtttttgttttattttgtttttttgtaaagcttaagaaaaaaatctacatcttatacttgagcctccatacttaaaaaaagaaaagaaaagaaatcaataaaaagaaactggggcgcaaaaaaaaaaaaaaaaaaaaaaaaaaaaaaaaaaaaaaaaaaaaaaaaaaaaaaaaaaaaaaaaaaaaaaaaaaaaaaaaaaaaaaaaaaaaaaaaaaaaaaaaaaaaaannnccccccccaagggggaaacaaaaaaaaccccataagggggccgcagggggggggcccaaaaggccaaaataaaaaaaggggaaaagcgaaacccccggggggaaaaaaaaaaaaagggggggggaaaaaaccc

SEQ ID NO: 58728 - DNA, 599 bp, Homo sapiens
cgggccccccctcggaagtcttctagaattaattaacgcgggatattttcagacacattgttgcatttgatactcaaaaaaacttagagctgttttaagttttaatacaggaaaactgaggtcaaacgggcttcattattctgccaagttcatacacctgagatggattcttaaacagtagagaattaacagtgtcaaatgagaactgaaaaagatccctggatttagcaatttgctaacttacaagattctttcaaaaaatggaatttgtggtggctcatgcctataatcccagcactttgggaggccgatgcaggaggactgcttgaggccaagagttcgaggccagcctgggcaacatagtgagacctcatctccacaaaaaaataaaataaaataaataaaattagccaggtgtggtggcatgcacctgtagtcccagctacttgggaggctgaggtgggaggatcacttgagcccactagttccaggctgcagtaagctatgattgtgccactgaactccagccagggcgacagagcaagaccctatctttaaaattaaaaaaagaatttcaaggaaaaggcaaggactgaagc

SEQ ID NO: 58729 - DNA, 613 bp, Homo sapiens
  misc_feature 596: n = A,T,C or G
ccccccctcggaagtcttctagaattaattaacgcgggtgtataaaagcggaagttcttgttttcaaagccaacggttttactggggaggcaagactaacacattcaataggctgtgagcttaaaaagaaaaagaagtagggaggtaaagaattctgaggtcaagaggcctgaattcttatcatagctctgtcatttattagctgggtaaccttgaacaattcatttaacctctcaggacttaaccgttcttatcggtaaaacagggatagtgatgcctgcccagaaaattaacatgaaccacaaataagaatatatgtacacactttgtaaaactatcaagtactatataaatcaaaagttaaaatggttttgtttagcactaatctgtggtgtagattttgtgctgcagaagtcacggtaaataagaattctgactgggagagttcattaggaggtggatattgggaaaagaaatggtgaatagttagggagtaaagcaatagttatcaacgccaaataatctgtacaacaaacccccatgacacaagtttaccatataacaaacatggacatttactgcattggattgaattnttttaacctaaagtaaa

SEQ ID NO: 58730 - DNA, 480 bp, Homo sapiens
  misc_feature 23: n = A,T,C or G
ccccccctcggaagtcttctagnattaattaatagtatttaatttctctgagccttagtttcctagtatttaaaatagggataataattgactgctataggggatgaggtgaaattatgtagaaaattcagcaaaaatatccagaatgtaacatgaaatcaatataatttttttagagttataattattatttatcttaagttacatcagtgagggatggaatgacttgacttaaatggtgctgtatttggagcagaataaaagcaacagtttaagaaatacttttgcacagttctattcatctctccccaagtctcaagtgttcatgaaagttctggtaatgctttgcatagtgttagagaagtgaagagaaaatatcttgctgttaacagccttaacaaagatctgtaggtcctctataaaacatacacattaaaaatctaactgtccccagaggttttcagaaaaaaaaaaaaaaaa

SEQ ID NO: 58731 - DNA, 611 bp, Homo sapiens
cgggccccccctcgaaagtcttctagaattaattaacgcgggtatctaccaaaacacattgctacactcttctttcttatcaagttcccaattttgtccaatagcgacctcgccacctccagtgtgggactgccatacgatcacatgtgccacctgactgttactgccattccccaagtacaacccccaggggcccaaggactagtcttcccagaacctatgtttgctgccccggggatgaaggactgatgtgactagggcctgctggtatccatatacatgccacttgggctcaaggacagacccaccttgggtttggctcttcatcttcatcactatgaaagtcataccaaagcctccacaaacaactgcagcctaagccactgaggaaatctcagacactgctgatgattatagctgaagaaatcacacagagactatgtggctgctcccacccaaaactccaaacactctacttaatcgatgctgtaaatacatctgcaggaaaaagtcttagcttattaaagctactctataaaattagaagtgattattagaggaggtgcacagatatcactttagggacacacaaaaaaatctgaaaaagaaag

SEQ ID NO: 58732 - DNA, 607 bp, Homo sapiens
ggccccccctcgaaagtcttctagaattaattaacgcgggccttcccacatttttccatcaaagccaacagtcatcctgataaaattttagaacctcaattacctatgcttatttgattgtaaaaatcctgcatttggggagggtggttcttctgctcagtattgcaaaagagtgacaagctagaagggagatgctgtgtaattcagggtctcctacctgactgctgtgtctaaagaggttcactcaattcagaaactatccgacctcctgtcttcatcgtcagacgttttgaggaaatataattttaaaaagattctcctctcagcccagaaaacctctccacagaagtggaaaagaaagaaaacatttcgtgaataagctttaaactagaatttgaagtgcatcacaggcaatttgctaaagagattgtaaagaacgataacgacaaaaacttgccattttatatagcaaaatatatacaatttattcttacttcatacatgttctcaatataaataacaactagtgctcaaggaacaggacttaataacacaatttgtcagaaatatttcatcctaaatacacctggaaattggaatagctaca

SEQ ID NO: 58733 - DNA, 605 bp, Homo sapiens
  misc_feature 28, 45, 46, 58, 85: n = A,T,C or G
cgggcccccccctcgaaatacttctagnaattaattaacgcgggnnaactctaacagnaaaattttatctatattatttactatngaaaaatggataagttttcaaaaattagcatgtatgtgtacaattcaagtcacccttaactaaccaaaaagtgtttaaaaagcagtgcagttgtgtcctactggatagttgtaagcatctctttaggcacttcactggttcattgacataatacaaattaaagctataaacacataatgtgctctctgaagatagtctaatcaagcaacgtaaaccaatgcaaaaatgtgactttttggccgcttattcctcccctatgacttaataacgtttttaaaccagttgtccaaggagatttttctggggaagggaatgctttggcattatgaaaggaacattgttcaatcccagaaaggtaaaactgaaaaaagcctgtacaataaagaaatttgaaaaaaatttctttatggctctgtttaaaaggacacttttgcagtgatatgacagggggaaagtttagttgagtattttttgaacatattgcactctgtttttgtagttcaatcacattaatgcatac

SEQ ID NO: 58734 - DNA, 605 bp, Homo sapiens
cgggccccccctcgaaagtcttctagaattaattaacgcgggatggcaattgacatccgtggacttaatacacatttactaaattttgtaataagccatgctattgatagaagataatataaacttgtattcagtagtttggaggtacgtgtttgtggactgactgaagcatttttcagggaatgtatatgggtattggagacaattgtcatttagctattgtaataatgttataaaggatttcctgtcctcttcaagtagctctgggaaaatgtgtctgtacacataccatgcttatgaactaaaaatacttttaactagattgaaaaggttaaagaaatgtacatacacatatatacatacatatgcacacacaagaatgtgatcactgctggtgcagcatgtaaatacgaacacattcctgatggttgctatatatggatgagtagttgtagtaagttcacttcacctcaactaaaaaataaaagtgatgtttcatagaacttagtcttccacttgatctggaccctcatcttgaaacctcatatgataaaatggagaacttcttttaacataagaaggtagtaatcacctgtggtcccagt

SEQ ID NO: 58735 - DNA, 584 bp, Homo sapiens
  misc_feature 9: n = A,T,C or G
acttctagnattaattaacacggggatattctaagagtcaagcctgatagtgaaagtgccagtgcttaaatgttgtttagtaatattgttaatttgaaatatgggaataccaaagcaatatttcaaagtagagtcttcatattgtcggttaatttaaaaagtcccaccattcaacattaacgcaacttggacaaaatacatatttgaggatgtagtagaagtggttgagagggatgctgaattcctaatacaactaactttcccatttataaaagtaaaacatgcttgctgagtaatattaagaaactacagataaacataaagaatatagaaagtatctataactttaccatccagatgtaagcaatattttatgctctttttcaaaattatgataatataaattattttacctagattatttcagttaacttaatattttgaccatttgtttcattcaagattctttgaaatcgtacttttgattctctgcacatttcctactgtatagcaatacatatgttgtttattcccctcttcctgatcccagtgctttttttttttttttttactttcccatggca

SEQ ID NO: 58736 - DNA, 608 bp, Homo sapiens
  misc_feature 25, 38: n = A,T,C or G
ctggggtaccgggcccccccctcgngaatacttctagnattaattaacgcgggggatcacttgggtccaagaggtagatgttgcagtaaaccaagatcatgccactgcactgcagcctgggcaacagagcaagatcctgtctcaaaaaattaaaaagcattttatagactgcatgtttgtgtcccccctccctccgcaccagaattcatatattgaagccttaatctccaatgacatgatattagtaggtggggcctttggggggtgattaaataataagggtgaagccctgcatgggattagtgcctttacaacaagagaccctagacagcttgcttccactctttctttgctcttcaccatgtgaggacacagcaagaaaacagacaactacaaatcaggaagagggcctaatttgtgccaaccatgctggcactcttctctaacttcccagcctccagaactgcgagaaataaatttctgttgtttaagtcacccagtttatggtagtttggttatagttgcccatattaagacagcaggatgcaaaattgtggccagtatgattgctttgacatgaaacaaattttaagcacaaattgcaaaaa

SEQ ID NO: 58737 - DNA, 543 bp, Homo sapiens
  misc_feature 431, 477, 481, 516: n = A,T,C or G
ccccctcgggggtacttctagaattaattaacgcgggatgcttcttagaaatgaaaaatgataccactacttataatttatgagatttggtcaaaatcatatttagaaaatttcatatccttaaatacttctacttttaaaaagtgacttttagttttgagacaagatggcatagactcacttctccctattcctcctgctaagtgcagctaaaaatccttgacatatataaaacaaacataagaaaactctgaaagttggaaaccaggcagatcagctagagactttaagacctgaagaacagcagagcagtaaatatcctgggccttatatgtcctggactggaagctagagaagctgacatctcagaaatacaaaaagaaaaaaaaaggaaaaacaggtttttttaaagacccaaggaaaatctgctntgtctagctgaaggaacaggaaaggagcaacctagagagacagaanactnttagaccctattttactaggccccacttatgcccntgtcagcagagactgagtggggactct

SEQ ID NO: 58738 - DNA, 439 bp, Homo sapiens
ccgggccccccctcggaagtcttctagaattaattaaggcggggcagaaacatttttaaatattgctttatgggtgagaaaggaagaaaattttgcagacaaaaaaaaaatctgccaggaaataatttcttcttttataaaactacgaggttagtctaaatatgatctttgcaatctcttttagttcaaaactgattatttgaagattagtatgtaatcttcctcgttcattgaatggcgttcttcttttatgtgtgttgcaaaacaacctttttagaaaatatctgtgaagcttatcttctgattaatagctatgattgttctttgtaagacaccagcttgaatgtcctgaaaccagaagccctagtccactggatatactcagagtatcttaccaaaaaaaaaaaaaaaaaaaaggaaagaaagaaaaaaaaaaaaa

SEQ ID NO: 58739 - DNA, 608 bp, Homo sapiens
ccgggccccccctcgaaagtcttctagaattaattaacgcgggacatttcagagttattaattatccttatttcatttaataatgattatctttaatcagtttttataagcaaattccattgttcctcctattggaacgtaacactgtttacacagcataattgaagttgcaggggagacaggctaaatctgacttcatctgtactcactttcactaagcattgaatggccttaccactcttctgcaagatggaggaagaccgcaaaacttagtgcccatcacactgaaggaagggatgtggttttttttcctgcttctgtactgctacctaactttgtgatttgctttggattttaatatttgtttctgttttagattcaagcccgtaagttttgaggtgacttcagctccattgtgaaatagatagttctcttcatatttcataactacatttcaataattctaaactttctacattgatttttagatacttatttttcaagcttggtttctcagctgatcagatgaatttattcaacttcaatacaaagaaagacaaacctattatagtttcaagtgagtagatattatactgtacaggacagct

SEQ ID NO: 58740 - DNA, 599 bp, Homo sapiens
cgggcccccccctcggaagtcttctagaattaattaacgcgggatattttgaaaggaaccttgttttctgagaagtaggcccactgttttatttttttaacaatgggcttaacgtattcggtaaaccatgctgtaaacagatgtgctgtcataaaaggattgtttctttatagagcacaagcagagtagatttagcataattctaaaggctccaggatatttggaatggtaaatgagcactggcatcaacttaaaatcaacagctgcatcagtccctaacaagagcatcagcctgtgctttgaagctttggagccaggcattgacttctcctctctagctatgaaagtctcacagggcatcttcttccaatagaaggctgtttcatctacactgaaaatctattgtttcctgtagccacttttaacaattatcttagccagatttctggataacttgctgcagcttctacatcagcacctcctgcctcctcttgcacttttatattatggagacagcttctttccttaaacctcatgaaccgacctctgctagctttcaaatattcttctgcaacttcctcacctccttcagcctttat

SEQ ID NO: 58741 - DNA, 196 bp, Homo sapiens
aattaacgtggggtgtactttcactttccgataagtgaggtaatccaggaaagtgagttaatttggccaaataaagcttgtttttatctggaaaaaaaaaaaaaaaaaaaaaaaaaaaaaaaaaaaaaaaaaaaaaaaaaaaaaaaaaaaaaaaaaaccaaaaaaaaaaaaaagccgcccccccccggggggaacc

SEQ ID NO: 58742 - DNA, 481 bp, Homo sapiens
ccgggccccccctcgaaatacttctagaattaattaacgcgggtacccaaaatggaattgctggatcatatagaaattttgtgtttaactttttgaggaattgccttactattttatgttaccaccagcaacacacaaggattccagtttctctacatcctcaccaacaattgctattttctccttttttttttttttagcgagtagccatcctaatgtgtgtgaagtgttatctctgcggttttgatttgcgtttctctaatgactagtgatgtggaccatcttttcatgtgtttattggctatttgtctatctttggagaaatctctattcacatcttttgcttattatttaattggtttgcttgttttgcaaaggagttctttaaatattctggagatatatatatgtatgcgtgtatatatgtgtgtgtgtgtatgtatatataaaaccttatataccttatcagtatatgatttgc

SEQ ID NO: 58743 - DNA, 183 bp, Homo sapiens
  misc_feature 45: n = A,T,C or G
cggggccccccctcgaaatacttctagaattaattaacgcggggnaatcaataatccgtggcaacatatctctgtaaaaacaaacactgtaacttctaaataaatgtttagtcttccctgtaaccttcaaaaaaaaaaaaaaaaaaaaaaaaaaaaaaaaaaaaaaagaaaaaaaaaaaaaaa

SEQ ID NO: 58744 - DNA, 190 bp, Homo sapiens
ccgggcccccccctcgaaatacttctagaattaattaacgcgggggaggtgtattgaagtcctccagacaaccctcagatttgatgatttcctagtagaactcacagaaataaagagctgttatactgtgaaaaaaaaaaaaaaaaaaaaaaaaaaaaaaaaaaaaaaaaaaaaaaaaaaaaaaaaaaaa

SEQ ID NO: 58745 - DNA, 596 bp, Homo sapiens
cccccctcgagagtcttctagaattaattaacgcggggaagggatttttgagtatttgcattatacttgccagttgaacatcccaaatctgaaaatccaaaatctgaaatgctccagtgggcatttctcttgagcatcatgttgatactcagaaagttttgggtttgggaggattttgtattttcaggttgggcatgctcaacctgtattcatacagtgggatactaatcaacaatataaagaaaggaattattgtcccatgcaccaacatgaataaatctcaaaaacatcatgcttagccagggacagatataaaagagaacattttgaatgatttcctttatatggagataggaaaggattggatagaaaacaagggatctttctgtgatgatgagtatgttctatatcttgtttttatggatggttatgtagatttatatggtcttcaaaacttgtcaaaccaaacacttaagttttgtgcatttattatttggaatatatctcaagagaaagcagttgattattaatcacagtgacagcagagagaaaggacaaaggttatcacaaatgtgattagcaagaagacaaagaga

SEQ ID NO: 58746 - DNA, 443 bp, Homo sapiens
gtaagcagcactatgctgatgtgctaggcaaaaatcaaacgttttttttaggcaagcctatgattcagttattccatattacaactttgaaatcctagagtattacaaattatcaaatctaggtaatttactgaatatttgacaatgattttgaaagaagaatttaggaggcttgcagttccactcacaataacgtaactgatatcaacattactctcccttcataaataaataagatgggacaaataaataaaacaatagctttcaagtaatggataaaaatagctcacagctgagacagctgagtgaaggaaagcaccgaaggtgatccctgcacgcacccttcctttccctaaagatgttttccaaacaccactgaaaggaaatacagcccaagtagagagcaattatctccctgggtgcaaaaaaaaaaaaaaaaaaaa

SEQ ID NO: 58747 - DNA, 584 bp, Homo sapiens
  misc_feature 24, 37, 541: n = A,T,C or G
tgggataccgggcccccccctcgngggtacttctagnattaattaacgcgggtatcatggggtttttaattgatcatactgtaattacctgaaaatagttttgtagcccagttgtggttaccacctttctttctttcctcttccctcctttacattccacaaatatttgtcgagaacttccattgggaatgtagcaatgaataaaacagacaaaaacccatgtcttcatggagctgaattacagtcatgaagagacatttttaaaaagtaaagtatattaggttttgaataggcattatgaagaaaaatgagggaggagtagggatttttgggctgggaggggaggatggtttgagctgcacttttagatagggtggctaggaaaggccttcctgaggaagacttaaggacttgaaggaagtgagctgtgcagatacgtatctgggggcagagtgttccaggcagagggaaccagcgattgcttaagccaggagtttgacagtagagtgagcaatgattgcaccgctgcactccagcctgngcaacacagcgagactctgtctcaagggaaaaaaaaaaaaaaa

SEQ ID NO: 58748 - DNA, 590 bp, Homo sapiens
cccccctcgaaagtcttctagaattaattaacgcgggtattcaatagattattatatactacattcacttactgatctaacagcaggtcttattccttctatcataccgtgtatttgtacccattgatccacttctctgcatccccttccttttccctttcccggctctggtaaccaccagtctactctctgtcttcatgaaatctactttcacagctcccacatacgagtgagaacatgcaacatttaggcctggggcattattgacagagaattgttgctttgaagttggaaaatgccttatggtgctaaaagccaaagagaggcctctgagaacttgaagctaaccatgtgttcctttccagggcactgaccatccgtgcactgccaataacccagagagctgctccgtttcactttcaccccaggactttatcaacttgttcaagttctgaatcccagcacatgacaacacttcagaagggtccccctgctgactggagagctgggaatatggcatttggacacttcatttgtaaatagtgtacattttaaacattggctcgaaacttcagagataagtcatggag

SEQ ID NO: 58749 - DNA, 568 bp, Homo sapiens
ccccccctcgaaagtcttctagaattaattaacgcgggtttaactttggaaacaaaaatgtacaattaagtaaagtcaacatatcgcaaaatactgtacattgtgaacagaagtgtaattcatagcaatttcactctctgcattgacttatgagataattaatgattagaactattaatgataaaaataatgcatttgtattgtgcataatatcatgtgcacttcaagaaaatggaatgctactctttcgtggttcacgtgtattatttccaatatctcaataccctaataaagagtccataaaactcccctaatattaaaaataaataaaaattaaactaatgggacctctgcagttcaccaattaaaaatgacaaaatgacaatgattaaaaacagtgatgatacttaatactaatgaggctgccccgaaaatgaacagtcttatacatcgcatatagtagtgttaattgcaacacctgtcctggaagatggtttaactgtatatataataaaaccttgcccttccaccttataagtgcagcttttagaatcttatcccaaggaaa

SEQ ID NO: 58750 - DNA, 565 bp, Homo sapiens
  misc_feature 24: n = A,T,C or G
gccccccctcggggtacttctagnattaattaacgcggggaagttatgagaggattagatgtaacaagtggccagtagagggtgctaaaacatttactcatggagtaagccatgtggataggaagctagttttatttagtcaactcatactctaaagagctagggataatttgaatagagtatatagatttattattgattacagagctagatgtcagtgatagtactcaagatttattttataaacacatactgactttcagggccttcccctctccccataatattttattttttataagtagtttatagttagcatactttagtaaaaggtcagactgtatgacagtcttgaagactagttgaagaagttttattaatctgttccactaagcctttcttgttttctgaagccacgatctgaagattaatgtgaacattaaatttacagaaagtccttgatcagtacctcagcccagagctcaccctcaaagggttggctgaaaaaggccttcagtttcttttgggaaaaaaaaaaaaaaaaaaagggaaaaaaaaaaaaaaa

SEQ ID NO: 58751 - DNA, 582 bp, Homo sapiens
  misc_feature 28: n = A,T,C or G
cgggcccccccctcggaagtcttctagnaattaattaacgcgggggagagcggcggcagctcgtgaggaggacccgtacatggacaccaccctgaaaggcttgcccacctgtcagacatggatgtctgtgctttaaaaatacagcttttcataagcttgaaagccatctgtcactttaaaaaccacatcatacttttgactaaagcagaacctgaagccattccactacagaagacagtcacccaataggctcctgtaagcatccccttgccccaggcattcctgccagtttctggaatgagttgtaactggtctatttggtgtctatcttttttgcaaatcataacttggaatgatcaaatggctcttttatggtggtctttctccacagaaagaaaagaaggttctaacactctctgtaatacactttataactgacctgcaaacttttagagacaaaatggatcactcaaatcaggttcagtaaaaatcaaaggtgttttagattaattaaaggccatgcttttctgtgtaattaatgagaaagactgagcctataatgctaattgaaactacaggact

SEQ ID NO: 58752 - DNA, 502 bp, Homo sapiens
  misc_feature 324, 439: n = A,T,C or G
ccgggccccccctcggaagtcttctagaattaattaacgcgggtagaggcttcttagattctcccagcatccgcctttccctttagccagtctgctgtcctgaaacccagaagtgatggagagaaaccaacaagagatctcgaaccctgtctagaaggaatgtatttgttgctaaatttcgtagcactgtttacagttttcctccatgttatttatgaattttatattccgtgaatgtatattgtcttgtaatgttgcataatgttcactttttatagtgtgtcctttattctaaacagtaaagtggttttatttctatcacanaaaaaaaaaaaaaaaaaaaaaaaaaaaaaaaaaaaaaaaaaaaaaaaaaaaaaaaaaaaaaaaaaaaaaaaaaaaaaaaaaaaaaaaaaaaaaaaattttaaaaaaaaaaaaaangggggccccccccgggggggggccccaattccccctttaggggggtttttaccccccccccct

SEQ ID NO: 58753 - DNA, 570 bp, Homo sapiens
  misc_feature 9: n = A,T,C or G
acttctagnattaattaacgcggggcagtttcctcccaaatcccaaagagtgcatgtgacgtaaactgctgagctaaatggtccccgtgtaactgattgtgtatgtgtgtgcatgtttgtgtgtgtgtgtgtgtgtgtgccctgagatagggtggcatcctgcctcgggctggttcctgccctgtgtcctgagctgcggggatagactctggccacccacaaccctgaactaggataactgggtaaaagctctggccacccacaaccttgaactgggataactgggtaaataattatcctacgtgtttttattaatcttttttttttttttctgagaccgcgtctcactctatcgtccagactggagtgtagtggctcaatcttggctcactgcaacctccgcctaccaggttcaagcagttctcatgcttcagcctccccagtcgctgggacttcaggcacgtgccaccacgcccggcatttttgtattttcaatagagacggggtttcaccatgttggccaggctggtcttggactcctgacctcgggtgatccacccaccttgacct

SEQ ID NO: 58754 - DNA, 463 bp, Homo sapiens
cgggccccccctcggaagtcttctagaattaattaacgcggggtggggtggggatggaaatgtgtggcatgcacatgagttgaaattcttttatgcatttttttgaagaaaaaaaaaaaaaacaactctgaggacataggggatgtcagtttcctatggaagagacacctctgacccgttattcttataatcaaaatctgaagggaaaaaaatgttttagttctttccccactcgttgggttcaactagattaaaaggctgattttcagaaaaaaaaaaaaaaaaaaaaaaaaaaaaaaaaaaaaaaaaaaaaaaaaaaaaaaaaaaaaaaaaaaaaaaaacggcccccccccagggggaaccccaattaaacccaaaaaaaaacccaatcccccccccccccggggggggccccaatccccccttagggggggaaaatcccccccccccccggccccttttt

SEQ ID NO: 58755 - DNA, 530 bp, Homo sapiens
cccccctcggaagtcttctagaattaattaacgcggggggggtggcgggacaggaccctggactctaatgctagacagatgaagaggaattcacatcagaattgaaagggggaggttttattttgggaagctgtctgaaggggaggggagaagggatatgccactctcgggttcccagttggctagcatccccttctttcttattggctctagctgaaccacaatctctacgaggtgatgagcaaactggagaagagaacattagactcagggaatatttaattctggttttagcattattagaataaggttttatacattaactaaagtggagctttaatcactataaaaagcaaaagtatctatagacacagacacttgcctatacagagacataaccacacacactcagaggatagtgaacaaatctgtctttgacttacgacccattttgcaagacttaaagccggaagaacacattttcagattgttaaataaagtctgattctgactaagaaaaaaaaaaaaaa

SEQ ID NO: 58756 - DNA, 587 bp, Homo sapiens
  misc_feature 524: n = A,T,C or G
ggccccccctcgaaaagtcttctagaattaattaacgcgggcttgttcaaccagtcaagaaataaatattacaccaacaattccagagtctagaaaatgtgggcacgtttctcaattcatttcatcatggtgcataatcttaatgccaaaacttgacaagaaaaacatgagaaggcggggcatggtggctcacgcctgtaatcccagcactttgggaggccaaggtgggcagatcacgaggtgaggagttcaagaccctatacttatttcacttagtataattataatgtacatttctttattagattggattgttctcatagtttccttggaaaacgtctcttacatttaaattggatgcatcttatgatctgtaaaaagctcttatataattaggacagttggccctttgtaatgtgttacatatatatgttttcaatttagattttatggatttttatagtttcatgttttcaattaaaaaattgtattgtacacatttaaggtatataatatagatagtnaaatgattaatatggtgaagcatatgaacacatctattatcttgcatagttattccccccttt

SEQ ID NO: 58757 - DNA, 581 bp, Homo sapiens
attaattaacgcgggggggacttatgaatctgaacagcagcccttgagccccagatcttttctctgataatagtctacccaaatgagaaggaaccagaaaaacaattctggtaatatgacaaaacaagtttctttaacacccctaaaggatcacattagctgatcagcaatggattcaaaccaagaagaaatcactgaattaccagaaaaagaattcagaagatcaattataaagctactcaaggaggcaccagaaaaaggtgaataccaacttaaagaaataaaaaaatgatacaggataaaaatttccagagaaatagcctaaataggaaacaatcacagcttctggaaatgaaggacgcagttagaggaatgcaaaatacactggaaagtctcagcaatagaataaaacaagtagaagaaagaacttcagagcttgaaaacaaggcttttaaattaacccagtcagacaaagacaaagaaaaaagaaaaaaaatgaacaaagcctccgagaagtttgggattatgttaaactgccaaacctaagaataattgatgttcccaaggaagaagagaaatct

SEQ ID NO: 58758 - DNA, 540 bp, Homo sapiens
  misc_feature 474: n = A,T,C or G
cgggccccccctcgaaagtcttctagaattaattaagtaaaaaccgatgctgataacagaaagaaatgcatgattttctttggtaactcagtaccatttcatcattgtccgtcacgctgagggatgccttataaattcaatggctcatgcaatgcaaacaaatacttcctttagtaaggatggctgtgttgaatcttggcctgaaagatctttgacctgaaacaaaactacaacatccacagaaacgctacataaagtgtacaggtaaaataatagtcaataaaaatcaacccctagtcttattattattctcaagtcttctgggcatccccgcgttaattaacgcggggggggttgtgtgggaagagtacttattattgtgttttcttcagtgtaattgttcttggtaattgatacctctctgttttatttctctcattctttcaaaataaaactttttgaaatttgaaaaanaaaaaaaaaaaaaaaaaaaaaaaaaaaaaaaaaaaaaaaaaaaaaaaaaaatttttaaaaaaaaaa

SEQ ID NO: 58759 - DNA, 607 bp, Homo sapiens
  misc_feature 38, 131: n = A,T,C or G
ctggggtaccgggcccccccctcggaaatacttctagnattaattaacggggacacgtcaaaaggacataggacccttcccttaagtgtatgctggaattaatgtattatttccaaagaatagtgaatggngaaaaatagtatctttacagaggagtgacttagcagacatccccttaagcaaatgatcaaggttaacatcaccagtggtaagtcatgttaatgtcatgtaccccctgatatgatgtcatcagaagctacttcacctctgtggtattcttccccaaaacctataaccccaatcttatcttgaggaaaaacctcctacaaacccaaattaagagacattctaaaagatacccaaacaaaaccatcagggtcatagacaacaagaaaagactgagaaactgtaacagaatggagactaaggagataggataactaaatgcaattatgtatctcagactgaatcatggaacttaagtgaaaaaactaatgaaatctaaaatagagtctgtaatttagttaaaataatatgccagtgttgatttctaagttttgactgatgtacattggttgtataagatgtaacatcaggggaaactggg

SEQ ID NO: 58760 - DNA, 607 bp, Homo sapiens
  misc_feature 28, 566: n = A,T,C or G
ccgggccccccctcggaagtcttctagnattaattaacgcgggcaaatcacgaggtcaggagatcgagaccatcctggctaacacagtgaaaccccgtctctactaaaaatacaaaaaattagctgggcgtggtggcgggtgcctgcagtcccagctaatcgggaggctgaggcagaagaatggtgtgaacccgggaggcggagcttgcagtgagccaagatcacgccactgcactccagcctgggcaacggagcgagactcagtctcaaaaaaaaaaaaaaaaattcagattctggagaatttcggattttggatgctgaactgaaaacattcccaaatctgaaaaaatccaaaacatttctggtcctaagcatttcagataaaggatactcaaacctgtatatcgataagctgggaattctcttatcagctcctagatggaaactgaggtatagctgaagaaatgttggcagaacgagaaatcaaaattctgagtctcctttgccagagaaatgcaaaaagttacctgacaagtgaccaacaaatgcttttgttacaaatagtntttaaaatttaaaaaggttctattataggactgacataact

SEQ ID NO: 58761 - DNA, 593 bp, Homo sapiens
  misc_feature 28: n = A,T,C or G
cgggcccccccctcgaaatacttctagnattaattaacgcggtgtttcccaatcatctaaatataagaagctatgagcagctccaggctgccttatctctctcacagatatctgcctcctcttggtcctgggattaaatcttctctagatcactatctcacccttcagctattcagttccccattgacaatgtaaatgtcactttgaaataactgtccctgtgacttactttgaggatgcttgaaaaagtagtgcttttgcagaagttgacgttgggttatattatttcacataaaacagaatgtggtcagtgggcaaattctgcttcttaagggtgttctagttccttttaagaaagattttatgccaagagaaaataaaaagtaactgaccttaccttgggccacccctccttttttcatgattgtaacatccatattatgtcaggaggctaacaggtcataggtagtggtgttttttttaactaaaaattagtgtcctccactgttgtacattttggccaaatgtttgttccacactggtgtggagtggagatttctgattctcagaaggccttgcctaactgttcaccc

SEQ ID NO: 58762 - DNA, 574 bp, Homo sapiens
cgggcccccccctcggaagtcttctagaattaattaacgcgggcacacacacgacacacgcacactcacatacacacgcacatgtactacaagtatggatatacaacacaggacggtttttttttaggtgtgaaatgggatagtgtctttttaagagtttttatcgtttcaaaacatacatactaaaatatttatggatgaaataatatgatgtctgagatttacctcaaaattacagaggatagtggacgttgaaaggatggagctcgagcaaaactggacaacaaatgactatttggagctgaatgatgggctatatggggattcatcagactactgtgtatgctgtctatgtttgtacatgtttaaagtattccacaaaaaagatttttaaaaataaaaagagaaattagctggctaagataattcttatttttttgtttgagagagagagtctcactctgtcacccaagctggagcgcaaaggcacaatctgagctcactgcgacctccgactcccaggttcaagcaattttactgcctcggcctcttgagtagctgggattacaggcac

SEQ ID NO: 58763 - DNA, 574 bp, Homo sapiens
  misc_feature 55, 498: n = A,T,C or G
ccgggccccccctcgaaagtcttctagaattaattaacgcgggatttaggtaatnggaagaataagtaaatgacgggagctctccagagttgggaatacaaaagaaacaatgctcataaaactgttcattttctatgtttcaaatgttatctgactgaaacgaataccactgtattatttatttttcattcatttttttcttatatctttttctaatgcctaaaatatgggttcacatgaaataaacatcctcaaaccatgtgctataatttcagtaaatcatttaaaacacacatattgaaggtctacaaggtgctgaactaagatttttctcatccctccacctacttaaaactatggtttaggtgaagttaaaataatgaaacagtgagacagaaatttgtcactggatttggtaaataaggggttttacttccttggcttttttttttcttttctctttttggttaaaccattttccaatcaagggcaatctangcaaaaggttttgtgcctaaatgcagtaaaaataatttgaaagaatgatataatttataggcacgctgtagtcttt

SEQ ID NO: 58764 - DNA, 565 bp, Homo sapiens
  misc_feature 24, 165, 531: n = A,T,C or G
gccccccctcgaaatacttctagnaattaattaacgcggggatgatgcagagaaaacagcaccaacagaaaccacatcgtaagaggtaattttggggaaaaagggtaattttgtaaatcctgtgttgtcactttaacatgtatgatgacattatttgtgcttatntcttcaatattatacctttatactcgagaatctaaaaaactgtttaagacccaccctgcatggctgtcctggggattacggctaatgcatattcggcaaccttgtcccagaacacctgttcaacaaaccacggtttgcctcatttcagagtgttttgctatttggacacggggtattctttttcatcccccactgcaacctccgcttcccaggctccagggatcctcccacctcagcctgacctcagcctctcgagtagctgaggctggagaatcacttgaacccagaaggcagaggttgcggtgagccaagatcacaccgttgcactccaccagcctgggaaacaagagtgaaactccgtctcanaaaaaaaaaaaaaaaaaaagcggccgccaccgcg

SEQ ID NO: 58765 - DNA, 283 bp, Homo sapiens
cgggccccccctcggaagtcttctagaattaattaacgcgggtttaactcaaagttgttaagatttactcccattttcttctaagacttttataactttagcacttacatttgggcttaagatctattttgattcactttttgtgtagagtgcaggaaaagaagttaaacttcattgttttgtccctgggtctgggaccatctgatgaaaagacaattctttcctccattgattttccctctcacccttgttaaaaatcacctgaccaaaaaaaaaaaaaaaa

SEQ ID NO: 58766 - DNA, 420 bp, Homo sapiens
ccgggccccccctcggaagtcttctagaattaattaacgcgggggtggaaggtactgaacatcttaggaaattgcaagacattgcagaaatgctatcataagcatcattaattctatttattggatacccaatcatcaccaggcactgtgcaggtctctgtccatacattatcttttaattctcacaaaatcccatgaagtaagtactactatctatttgactgactggaaaggaaaggctcaaactcattggatgagttgctcgaggtcactcggctggtgggtggcagaggctggcctttgaacctaaggttggccagctccaaggtccatatacttctctcctagttatgctgcctcctctggagtgaagtgtgggtgacagagtgagactccgtctcaaaaaaaaaaaaaaaaaaa

SEQ ID NO: 58767 - DNA, 597 bp, Homo sapiens
  misc_feature 25: n = A,T,C or G
ggccccccctcggggtacttctagnattaattaacgcggggccatgatgacttgatggagataagcacgtttgaaccagtgccagataatgaggaagaaacgtagaagaagccgtgcaaggaaacaaattgacattagacaatctgggagaaaggcttagattattcaagactgcttttgacttattttataacatggacccttctatgatacaggcacttaaactaaagaaaacagtggaagaaggactagaatccttacagaaacatatttagataaatgaaaaagcaaaaaaacaaaaaggaagaaattatgatgtatttccataaagttacaccaagtatgcctacctcttctccctccccttccaccttctccacctctttcacctctgctacccccgagacagcaataccaacacctcctcttcctcctcctcctcagactacacaacacgaagtcaatgaggatgaaaacctttatgatgatccatttcctaatgaatgttaaatgtattttctctttcttatgattttcttaataacattttcgcttactttattgtaagaatacagtatataatacatatacaaaatt

SEQ ID NO: 58768 - DNA, 588 bp, Homo sapiens
  misc_feature 27: n = A,T,C or G
cgggccccccctcggaagtcttctagnattaattaacgcggggggtgcagaggccccagaccagccttgaggattctctgatttttaatttctcagtactcacctctcttcttcatttgatcccctcttttcaacatccatctccccgcaatacacaattttgcatatgttcacatacacaaagacacacaaacccacacaaacgtacacaagcacattcatacaaacacataaatacatataaaacacactcatacaagtgaacacacacaattgcacacaacaaaacagcacatataaacacacacacacacacacacacactcatacagagaaggaagccatcactagttcaatcaggaattatgtcaaggagcgatttccccataggagcctaagttgggaaaggtgatggatgagtagtaggtgggggctttggggttggggtcagggagtggcctttcttgcagagccaatgggtcagggacacttggaaacaaaaccaacctcaacttgtttagtttcgctgttcctaatggtaacctaaattctcaaaatgttaaaaaaaaaaaaaaaagcggccgccac

SEQ ID NO: 58769 - DNA, 552 bp, Homo sapiens
  misc_feature 11, 12, 31: n = A,T,C or G
agcaacaaagnntaattaaacgaaaacacgnggtacccagaaaatccaggatccatttctgctaaattttccatttcagttcatgcctaaactaatctacaacagaatgtggtagaagtgaaattgtacaatggcctcaggaggccttaaagcttccaccttcccccttttggaatgttcccagcaacacctaaggaagcctggactaaacagatgaatggtgaaaacgtgaaaagaaaggcccagatgagctggcaccagacatttgagtgagagaccttcctagaccctccagccccagtatagctgccagatacagatgcatgagtgacttcaggcagtatcagcagaagaactgctcagctgagcccaactcgaatgacagaattattattttaggccactaattttttccatagtcagttaatgcagcaaaagataaccaatgcaccaaagaacttagttccctatcagctgggcacagtggctcacgcctataattccagcactttgggaggtactgaaacggattaagaaatacttctcttttat

SEQ ID NO: 58770 - DNA, 591 bp, Homo sapiens
  misc_feature 32, 566: n = A,T,C or G
gtaccgggcccccccctcggggatcttctagnattaattaacgcgggaataagtttggatgtactttggggtttgtcgtactttccacctaaaaacttaaatgaaaaaaacttatacactcagattatttttgaaatttcaatgagactttttccatcctttaaattgtcagaatagcattactattcttcaaaacaaaatcgacttatattcttacctaaatctgagcaatgtacaactcgtgaatagcactgacatccaaatggacacattggaaacagatcaaatggaaaaaaatggcttcttggctctcttgttggaaaaagagagttgtcctcatcatcatcatcatcatcatcatcatcatcatcatcatcatcatcatcatctgtgtcttccatatccttcagcatcatattcttcagtgcgatgtgtgaagggctaaagaagggtttggcagagcacaaagccaggaataataggagcacatactccttcatggtgtcttagtgtagaagaccagtctaggactaaacagacattggatattaaatttaaatggatantattcctgcatatatacatttctca

SEQ ID NO: 58771 - DNA, 415 bp, Homo sapiens
cgggccccccctcgaaagtcttctagaattaattaacgcgggggagtcatttttcttcttgaggaacaatacatgctgttctgtatttttccattcatcgcccaaacctgcctgtgtctttgaaatgcaagtaagatcccaaaggcagctttctgaaagcccgtggcatttttagcttatcccatcccccgtgtgtgtcctcatcttcagaattgaaagttaggatactttttaaggtttcaaaagaaaataatttaaaatgttaaggtttatccatagaaacacaataattcttaaccaattcatgtaccaaattcaacagtattatctcatttttagggtcacaaatgtgtcctttttgcacttaaacctcctccctctctcaaaaacaaaaacaaacaaaaaaaacaaaaaa

SEQ ID NO: 58772 - DNA, 572 bp, Homo sapiens
cccccctcggaagtcttctagaattaattaacgcggggatggcgttggctctgggggcaccagtgtgacagggcagggcaccgagctgtggccgaggggcagagtgtcagagggcctcctggggaatgctgtctctggcagagaggcagactgcctccactgagggaagaggatctgaggatagagaatggccgcgtgccaagttggaggccgccattgccgaggctgaggagcgtggggagctggcgctcaaggatgctcgtgccaagcaggaggagctggaagccgccctacagcgggccaagcaggatatggcacggcagctgcgtgagtaccaggaactcatgagcgtgaagctggccctggacatcgagatcgccacctaccgcaagctgctggagggcgaggagagccggttggctggagatggagtgggagccgtgaatatctctgtgatgaattccactggtggcagtagcagtggcggtggcattgggctgaccctcgggggaaccatgggcagcaatgccctgagcttctccagcagtgcgggtcctgggctcctgaaggct

SEQ ID NO: 58773 - DNA, 576 bp, Homo sapiens
  misc_feature 35, 36, 63, 480: n = A,T,C or G
cggggccccccctcgggaagtaccttctagaaatnntaattaacacgggggaagggaaggagnaaaaataggaaatacactaatttcattattgctcatagaaaaaaacagtatctaaaaataagaggtattctataaaattataaaagtaatcactaaacacagaaatacagttataagaaatacaattagaaacaccacagttatttctaatcaaaagaaacaacacagttatttctaattaaaaaaaaaaaagaaacaagagctggggccgggcgcagtggctcacgcctgtaatcccagcactctgggaggccaaggcaggcagatcacctgaggtcaggagttcgagaccagcctcgccaacatgctgaaaccccgtctctactaaaaatacaaaaattagctgggtgtatgatggcaggcgcctgtaatcccagctattcgggaggctgaggcaggggaatcgcttgaacctgngaggcagaggttgcagtgagccgagatcgcgccactgcactccagcctgagtgacagagcaagactcggtctattaaaaaaaaaaaaaaaaaaaaa

SEQ ID NO: 58774 - DNA, 403 bp, Homo sapiens
ccgggccccccctcggaagtcttctagaattaattaacgcgggtccagacatatcttttctgtaatttttaaaacacagatcttattaaatatataaatttcacctgaatatttttaagaagtccctcctgtttctttagagattcttggactttagttgtaagacctccatagactcgatctagttcagtaacagaaagagcttcttcatttatcacaccatcttgagccagggctgtcaaaaacttgcttgtcatgtcaaaattcacagatttcaagtcattctccagaccccctctttccttctttacttcatcaagatttgacaataaggattttaagacatttacaacctaaacaaaaaagacaccttagtttaactgcaaaaaaaaaaaaaaaaaaa

SEQ ID NO: 58775 - DNA, 598 bp, Homo sapiens
  misc_feature 27: n = A,T,C or G
cgggccccccctcgaaagtcttctagnattaattaacgcgggatggaatgtcactgtgtgatagcaatgattagtgatagggatagtaataataataactaaagaattatcacatttatcagaagtcccttttggggactgtggtagaacctacaaaacattgtaaatgcaacttctcaatttggtggaagagagaggccaagacttccttttaactatacctttgcaagcctctgttaagatttttaaatggttattctcctcaataataatcaccaaaatgccatcaggaaaatgcatttttctttgttgtcatggtaaaatacgttctgaaattgtttcccattatattataaagccaattataaaaaaccttgtaaactgtacatggcatatggatgaaaatcatgctttgagacaatttgatggaaagttatacttgtttcttttaggtttttgtttcatagtagggtctttcagatttgcttctttctgtcgtcttttgctcttgcttttatttagaaattttagatatacaaatgaaaaaaagagaaaatgttttagaagtaatcataaaaacacacaaaaatgaaaatgt

SEQ ID NO: 58776 - DNA, 615 bp, Homo sapiens
ccgggccccccctcggaagtcttctagaattaattaacgcggggagcctgtctcaaaaaaaaaaaaaaaaaaaaaaaaaaaaattggcgggtggtctatatttataaagaatcttggtgtatagttttcttttctctttcttttgttaaattaagcttagcctaaagctacctccttacatactttaagtttaacctaaacgtttctcaatacatagtgaactataacttaaccgaatgtggaaacagactagcctacttttgtagcaactacctgagtctcagccaatcacagaagcaatacttcaaccactcacaggaggccaactgttccaatagtgttcaaacaaggtaaatgctgcgctgtagccaaggcaactgtttcttttcttttcttttttcttcttttttaaactttttatttcaaaatactttctaaaattgtattttagaattgacacatgattgtacatatttatggggtacatagtgatgttttgatacatataatatatagtgatcagatcagggtaactagcatatacgtccacctcaaacatttatcatttctttttgttgggaacatttaatatcctcctagatatttgagttgctc

SEQ ID NO: 58777 - DNA, 369 bp, Homo sapiens
ccccctcggggtacttctagaattaattaacgccgggggagagagagagagatagggagaggaaaagggaaagaggacaaaacaaatgcttcaaattaaaaataggtcacttcaaaaaagaatgtcccaagtgggaaaaagaataaagtcatatgtaaaagcaaatcagctaatattaactttctgctaattctggaagcagggacaaatctgtggggaagaggtttaatgctagaattaggcttaggcctcgaaatcaatcatagaaaattcctcctttccctgaacttgccaccacagcaaaagatgggaagcagggaaagttacagattcctccaattcatgttaaattaaaaaaaaaaaaaaaaa

SEQ ID NO: 58778 - DNA, 587 bp, Homo sapiens
  misc_feature 532, 556: n = A,T,C or G
cgggccccccctcggaagtcttctagaattaattaacgcggggtcctgcacagggttctttgctgctcaccaccctgtgtttcttggaatttgggaacaggcacatgggaggctgaatcgtggtcttcaaagatatccgggtcctaatcaaaatttgtaacttctagcctatatggaaaaagtgcctttttggacatgattaagttaagaatcttgagatggggagattacgttggatcatccaggtgggcccaatttgatgagtagtagccttataagagggaagcagaaaggtcaaaggaggaagcaggagatggaatcgtggaagcaggaggatgtgaggagagagtcacaagtccagggatgccggtgctggtgagtatccactccacctgttatgccgtgggactgggagcctgggctccagatcagaggccgggtttgtatctcagctctgtaacttagtaattacctagacaagacaattcttagggctctcagtctcagctctgtcatctgtacaaagtaaatnttactgggatctacctcactgggnttataagtgacgagctcagagttttgattac

SEQ ID NO: 58779 - DNA, 107 bp, Homo sapiens
  misc_feature 28: n = A,T,C or G
cgggcccccccctcggaatacttctagnaattaattaacgcggggggaggtggtgtgatagaccccgacgacaacagctgtggttcttctcacccctcccgctccct

SEQ ID NO: 58780 - DNA, 577 bp, Homo sapiens
gggccccccctcgaaagtcttctagaattaattaacgcgggaggatgacccgaggtcaggagttcaagaccagcctgacagacatggcgaagccagtctccaccaacaatacaaaattatccaggcgtggtagcacatgcctgcaatcccagccactcgggaggccgaggcaggagaatcacccgaacccgggaggtgggggctgcagtgagccgagatcccgccactgcactccagcctgggcaacaagagcaaaactcccgctcaaaaaaaaaaaagtgtgagtctcaaattagataattacatttgttgacagtattatactttctagaccagcactgtccagtagaaatacaatgcagtacaaatgtataattctgaattttctagtatccatatttttaaaaatgaaaaagaatcatgtgaaattaattttcatgatatagtttatttagcccagtagatttaaaatattatttcaaaatgtaatcaagggctgggcacggtggctcatgcctgcccaagtggaaggatcacttgagttcaggatttcaagacaagcctgagcaacatagtg

SEQ ID NO: 58781 - DNA, 599 bp, Homo sapiens
  misc_feature 39, 547: n = A,T,C or G
ccgggccccccctcgagagtcttctagaattaattaacngcgggccaaatgggtctctaaagcaactgctcagctctgctactgtagcacgaaagcagccttaaacaatacataataaacaaatgggcacaactgtgttccaatacaactttatttataaaaacaagcaacaggccattttgccccagaagctatttcattagttgatcaatctgttcatcacccagttttaaaatagttgtgggcccagcacagtggctcacacctgtaatcccagagctttcagagtcggagaaggaaggactgcttgaggccaggagatcaaggttacaatgagctatgatcatgcactccagcctgggcaacagagtaagaccctgtcacttagaacaaaaaaaaaaatcgctgtctctctcacacacacacacacacacacacacacacacacacacacacactggttatggcagcaaatataaactcatcaaactgtattatcacgctagtcacatctctccatcttgtctgtgacaccagagactctcanagtggctggctgaaatcaatattcactctctatctggcattcccttcatgta

SEQ ID NO: 58782 - DNA, 317 bp, Homo sapiens
  misc_feature 23: n = A,T,C or G
ccccccctcggggtacttctagnaattaattaacgcgggtcaccaaaaagcaaccaacttagccagttttatttgcaaaacaaggaaataaaggcttacttctttaaaaaaaaaaaaaaaaaaaaaaaaaaaaaaaaaaaaaaaaaaaaaaaaaaaaaaaaaaaaaaaaaaaaaaaaaaaaaaaaaaaaaaaaaaaaaaaaaaaaaaaaaaaaaaaaaaaaaaaaaagggggccccccccggggggggcccccaattcccccttttggggggttttttccccccccccctgggccctttttttaaaaccgggggggg

SEQ ID NO: 58783 - DNA, 424 bp, Homo sapiens
  misc_feature 24: n = A,T,C or G
ctgggataccgggcccccccctcnaaatacttctagaaattaattaacgcgggggaaaaaaaaaaaaaaaaaaaaaaaaaaaaaaaaaaaaaaaaaaaaaaaaaaaaaaaaaaaaaaaaaaaaaaaagaaaaaaaaaaaaaagcggccgcccccgggggggacctcaatttccccctataggaagtcttttaaccccccctaattggccgtgttttaaaaacgtcggaacgggaaaaaccttggcgtacccaaattaaatcgctttgaaaaaaatccccttttccccagttggctaaaaaccaaaaaggcccgaaccaatcgcctttccaaaaatttgcccaccctaaagggcaaaggaaaattgaaaccttaaatattttgtaaaaatccccgtaaaattttggtaaaataacttaattttta

SEQ ID NO: 58784 - DNA, 209 bp, Homo sapiens
ccgggccccccctcgaaagtcttctagaattaattaacgcgggcgaggagcagaaaatcgttgtgaaagtgttgaaggcacaagcacagagtcagaaagctaaataaaaaaatgaaacttttttgagtaataaaaatgaaaagacgctgtaaaaaaaaaaaaaaaaaaaaaaaaaaaaaaaaaaaaaaaaaaccaaaaaaaaaaaaaaa

SEQ ID NO: 58785 - DNA, 603 bp, Homo sapiens
  misc_feature 29: n = A,T,C or G
ccgggcccccccctcgaaagtcttctagnattaattaacgcgggatgcctcctcagcctcagaggactcacctcctagttgctcaactcttctgatatttcttctcacctaaaaaaaaagaaaaaaatacaatgcacagtaaccttttaatcaaaacacagccttgtaggtggagcctgaaagcttgccattgtttgtacagctgtttaacagctgatgcaggtattctggtgatgctactgtgttgcttattattttttactgtattaatggcatgccatatttttacttatgtgtgaataagtgtgtgaaaatgattgctcatcagtagcatataaattcagagtcaaaaaggatggtcagtgacatcagacagccacagattttccacatggaagctgagatagtgacacctttgctttctgatggttccatgtacacaaactttgtttcatgcacaaaattatttgaaatattatataaaattacttttaggctatgtatataagatatatgaaacataagtgaatttacatttagacttggatctcatccccaagatatctcatgtagatgcaaatattctaaaaaaaaaaaaaaaaa

SEQ ID NO: 58786 - DNA, 609 bp, Homo sapiens
cgggccccccctcggaagtcttctagaattaattaacgcgggggtgaggggtacgattttgaggacagatttaaacatgctgagtttgagttgcctgtacaatattctagtgtaaatgctaattaatcagttggatataaggatcagcgaccaggacagtaatttagtttgggaactgttaacatacagactgtaactgaagccattacgagggatgaaattacctagagaaagggtaaggaagagtggctctcaaacttggtgacacacgagggctaccaggggaacttttaaaagttttgatgctggctactctgggtgtactattatgggttagccctgctctgcaagaagcacttataaaacagaaaaaaaaactttttttgatgcccagcccgcagtcttggaccaatacataagaatctttgggaataggacccaggcatcacttccataacatttgtaaacttctccaagtgattccaatgtgcagccaaggatgaaaggaaaagaaagcctgagacattaagaattaatagtactgtactacagaaaggacaagagattaagagattaagcaggtttctaatcccagctaccttataatgt

SEQ ID NO: 58787 - DNA, 392 bp, Homo sapiens
  misc_feature 392: n = A,T,C or G
ccgggccccccctcggaagtcttctagaattaattaacgcgggggagggcaggaagaagtgcacagagggtgaaatacaattgaggtaacattgtatttcttacatattttatactaggtggtagatacatagctgttggttctattatgcttttcggtatttttgaaatacttcataataaaaatgtatactttttatttctttttagattctgtagcatcattgttttaaagaagagcttatatccaggaaatagtcatcaaaataaatttggtgtttgaagatagaaaaaaaaaaaaaaaaaaaaaaaaaaaaaaaaaaaaaaaaaaaaaaaaaaaaaaaaaaaaaaaaaaaaaaaaaaaaaaaaaaaaaaaaaaaaaaaaaaaaaaan

SEQ ID NO: 58788 - DNA, 251 bp, Homo sapiens
  misc_feature 72, 245: n = A,T,C or G
tgggggaccgggtccccccctcggagtacttgctagattaattaacgcggggggatggtcactgaccttggnaagactgatagtctagtggagaaataaaacaaatatatgaattaattataatataaaataaaataagatgaacaaaattggaagactaagctataaggtccactaagcagtggctatttttttcatttcccccctatgtatacaagtgtttatttgtattatgtttacaatgnggggat

SEQ ID NO: 58789 - DNA, 593 bp, Homo sapiens
  misc_feature 27: n = A,T,C or G
cgggccccccctcgaaagtcttctagnattaattaagcggggtgggcaatgcaaaacccaacaactacttattgactactttggattaatgatatttatctaaattcatgtaacctgtttagtcatatttacagccttgctacttcttgggacatgaaaagccagctcactgtcttataggaagctggtgtaggtgtctaatagttcagatcaggcaaaaaagtgagatatagattgtgcatccaaatccaaaaatgtgaaatccaaaatttttcagaaccttctccccccgccgtctgaagcgaaatctgaaactttttgagtgccaacatgacactcaaaggaaatgctcagtggaacatttcagattttggatgttcagaaccagtaagtataatgtaaatattccaaaatctaaaaaaaatctgaaatccaaaagaattctcgtctcaagcacaggggatactcaacatgtagtacagaaaagaggccaagaggtgctccccaaaatatggacatgtgacaatattaaaacaaggtaactactagcaacaaacttctacattaaatcaatgcttattcctagtgaagtt

SEQ ID NO: 58790 - DNA, 598 bp, Homo sapiens
  misc_feature 557: n = A,T,C or G
cgggcccccccctcgaaatacttctagaattaattaacgcgggataataaaaatactaaaaagcttataatgccaattctcatcaggtacaaatttgattcctgaaatcaccaagggagaaaaatgtaaaattacctgaaatgcgttattttaaagatgttaaaggaagaaacagaagtcctcacaattgacttaaatattcaaatctttgataatttacttgaatttctgaattgagttttaggaaactcagactactttttctcaatgtagcttttccttcatagataggcaattctggttcaaccaggaattgtgatgacatcataaacacgtaaactcttagcaatttatttattttaaaatattctcttagagtgctttttacttactatctgttccaaaagaaaccccctcaaaggagaatagagttcactgctctttgggacaagattacctttatatccagcagttatcaaagttggtttagattatggcctcaagcaaattttactaaaatgtgaaaatatgccaccttccaagtcagaaataaactntggagtatgttcatttaaagagttttacatatttataattg

SEQ ID NO: 58791 - DNA, 591 bp, Homo sapiens
  misc_feature 565: n = A,T,C or G
ccccccctcggatctttaattaatacgcggggagaaatgacatctttaccatattgagttttccgatccacgaacatggtatgtctttccatttggttatatcatcttttctttctttcacctgcatgtttacatatacaaatcccatatgttttcagtatacagattctgtacatgttttgttagatttatgcagaagaatctaattttctttgaaacaattataaatggtatgtgttttaaattttgatttctaaatttttgctgttcttatacagaaatgcgttgattctgtgtgtgtgtgctgatcacaaatcctgctattttgctgaattcattcatttttttctggtaatcattatttatagattccttgggattttcattgtagataattgttattgaaaatagggacagttttatttcttcctttccaatctgtatgacttttgttgcctttcttgacttaccgctctgtctagaagttccaatgatatgttgaatcacagtagggagagacattcttgccttgttcccagtctttgggagaaatgttcagtctgtncatctttatatactaatgatgctatc

SEQ ID NO: 58792 - DNA, 233 bp, Homo sapiens
  misc_feature 28: n = A,T,C or G
cggggccccccctcgaggtacttctagnattaatttaacgcgggggaaaaaaaaaaaaaaaaaaaaaaaaaaaaaaaaaaaaaaaaaaaaaaaaaaaaaaaaaaaaaaaaaaaaaaaaaaaaaaaaaaaaaaaaaaaaaaaaaaaaaaaaaaatttaaaaaaaaaaaaaagggggccccccccggggggggcccccaattcccccttttaggggttttttttccccccccttt

SEQ ID NO: 58793 - DNA, 590 bp, Homo sapiens
  misc_feature 26, 538, 545: n = A,T,C or G
gggccccccctcgaaagtcttctagnattaattaacgccgggaaccaaatcaagtaaattttgatgcataaacattgtaaaagatgagataaaacactcacacctccttttagaaaatgggatgatcctggctcttactgtgaaatattgcaagatgaagtccttcctgctgatggctctcccagtgagagtacatttcttgtttgtcttttttttctttttcttgtcaattcttgggtgggagaaaagccttctaatatttcctcatccaaaaactcatagtctgagatttttgcagttaattttatcatgattagtctagaatacgactgcctttcattttgcattcaccttcttcgtctaataatgattaatgccttctgtcagttttttctctttgccattatgaatggaaaatgaaaaattgtgaattcccatcggtgttcagtgaaagctaaaagtagacaacaggtatgatgtcttgaaagatgatgatgaaatactttggacaatacaatgagaaaactaatatcttaanaactatntagttatttttagcatagttgagaataatgaattataaataatga

SEQ ID NO: 58794 - DNA, 529 bp, Homo sapiens
  misc_feature 24: n = A,T,C or G
gccccccctcggagtacttctagnaattaattaacgcgggtgggtaggaaagggaaatcccccaactgcttgcacttcccgggtgaggtgatgccgtgccctgcatcggcttgccctctgtgggttgcgcccactgtccaaccagtcccagtgagatgagccaggttcctcaattggaaatgcagaaattacctgccttctgtgggtatctcactgggagcagcagaccagagctcttcctatttggccatcttgccagaccctctccagactgcttttcaagtttatttggggtacctgtacactttagcttaccctggtgaggcttgccagaactgatgttccaactgctgggatgggcgattcccctctaactaggggtggtttaaatactccctccaagtgtaaattggttcatccattgtggaaagcagtatggtgatttctcaaaaagctaaaagcagaactaccattcgacccagcaatcccattactgggtgcatatgcagaggagtatgaagcattttac

SEQ ID NO: 58795 - DNA, 575 bp, Homo sapiens
  misc_feature 564: n = A,T,C or G
ccgggccccccctcgaaagtcttctagaattaattaacgcgggatccaagcaattttttactgtgggtggtaacaattgtagaactgtttctaattatttaaaaaaacaaaaccacacacacaaaacaaaacaaaacaaaaatctatgttgccaattgcagagaggctcagaagccacaacttccggtaataaagattttttctctgcaaggatcagaagccagcatatctggacagcatctgtgtgctctgagcttctcatacagctgggcccacttccacattacaggacagaaggttgtcattgatggggaggtgggcagcctcgtttggacaacatttgaagacccagccttcaaatcccagtcctaacaattactttcagtggaaccaaggacaaattattaaaaagaaaaaaaaagtctgcaccagtttcctctctataaaatgagaaaaaatggttcccacaaattgagcagattaaatgagttaatatatgaaaaccgcttaaggcagagcctggtatacagtaagtgctgagtacatgttagcgactagcttatntatacataaac

SEQ ID NO: 58796 - DNA, 597 bp, Homo sapiens
  misc_feature 12, 28, 566: n = A,T,C or G
cgggcccccccntcggggtacttctagnattaattaacgcggggggcgtggtggcgtgtgcctgtagtcccagctactcaggaggctgaggcaggagaattgcttgaacccaggaggcggaggtttcagtcagccaagatcgtgccaatgcactccggcctcggtgacagagtgagactccatctcaaaaaagaaaaaaaaaaaaagagagagaaagtgtctctcacatgtgcacgctctctctgttactccttattttaaaaaattttcaatttacagaaaagttgcaagaataattccgtccaccccttgctcggactcccccattattaacactttgccgcagttgctgtatcagtgtgtatgtgtacatgtatggatatggagatgcagatctgtacttcttgctaaaccatttaatggtaagttgcagacatgatgctcctttgctccaaatacttcagtgtgcatttcttaggaacaaagcattctcctaaaaaccacagcaggatgatcaaaatcaggaaattaacactgatacaatatgcttctgtaattacaaactntattcaaactttgccagttttcccagtagtg

SEQ ID NO: 58797 - DNA, 348 bp, Homo sapiens
  misc_feature 7: n = A,T,C or G
ttctagnattaattaacgcgggcaggttcctgtagttctcccacatcacagccctgtataaagcgttctgtgcagggtccaggcgtttccactccagcaaagagaactctatagccacgtctctgaaagtcaagtatccctaaaatgagaaacacgtttaaataaaacattatggaggcgttatcaccttcacacgaaatgagaaatgggaaattaagtatcgattgggccaaagaatatgttctgacaaacccgtattaaggtatttttgaacatcttttctctattgttgcattttattgtacttttccatgagagatttcaagatcccctaaaaaaaaaaaaaaa

SEQ ID NO: 58798 - DNA, 591 bp, Homo sapiens
ccgggccccccctcggaagtcttctagaattaattaacgcggggtgtgtttgttatttagggcatggttttgtccctcttactctctctctcaccgtctcttttcctttccaccatgtgatgccttccatcatattatgacaaagcaagagggccctcacagatgcccatgccttgatattagacttctcagcctccagaactctaagaaataaatttctgttcattataagttactcagtctgtggtattctgttatcacatacaaaacagactaagacacttggctattactaaaaaaacaatttaataagtgttggtggagatgtggaaaaattggaacctttgttaaaggttcccactgctggtgggaatgtaaaatggtgcagccactgtggaatacagtatgccagttcctcaaaatattaaaaatagaattcccttatgatctagcaattctactcccaggtatatacctaaaagaactgaatacgggaactcaaacagatatgtgtacacctatgtttataacagcattactcaaaatagccaaaaggtaaaaacaaaccaacccaagtgtctagcaacagat

SEQ ID NO: 58799 - DNA, 411 bp, Homo sapiens
cgggccccccctcgaaagtcttctagaattaattaacgcgggcatatgtatatttgccacttaaatatgtattattttaaggcctctgtttcaggattttgtgtgtctttttcatagttgggtaggtggcatgtctttatcgtagcaatttatgaaatttttaagatatggatgttagaccttggtctgatattcgcattgggaacactgtagtttgccttgacactttcctaatggtgaggaaaggatattttagattttaatagaaactagtttctcggccggccttggtggctcacgcctgtaatcccagcactttgggagaccgaggcaggtggatcacgaggtcaggagatcgagaccatcctggctagcacggtgaaaccccgtctctactaaaaaaaaaaaaaa

SEQ ID NO: 58800 - DNA, 326 bp, Homo sapiens
cgggccccccctcgaaagtcttctagaattaattaacgcggggagacactaacagtaaacaaaagaagttaaataccatatctactttgacagatggtggtaagtgccatggagaagaaagaagaaaagggattgggagcacccaacaagtgggaagaagtgtgatttaaaatagggctgaacaggaagttttcactgaaaaggtaacatttgagccaagacatgcaggagatgacaaggacagtgccatttactccaagcatctctggagcccacacccaacgtggttggtgactgggagacagaaaaagaaaaaaaaaaaaaaa

SEQ ID NO: 58801 - DNA, 542 bp, Homo sapiens
  misc_feature 486: n = A,T,C or G
atagttttaatcaacttggaatgatattggttaatacgctctgctcaatctctcaggtaggtttcatctcccaacactggaatgcattaaagacaaatttccagcatcttcctttccaactggaaaacacatgctttagtaagcacaaatggaaaggtagctccatctgtgcagctgccatatgattctctggcaggactccaaggtaacttttcaaagatcagataaactatgtctaatccatactttgtacttacacattttataaacccaggtagcactctcttatgcatttatttgttccaaagcttgccaattatttatgacagataacagtttctaagcacttaagggtcagggtatattcatgtcaaagagcccactgactgagaggaattattttctctccggacacctggaaagtagaaatcattggctgcatttgacaggtgaggaaactgaagtgtactacaacacttgatccangggataagctaccaagtgatggggccaggatcggaacccagaactgactggcccta

SEQ ID NO: 58802 - DNA, 351 bp, Homo sapiens
aattaacgcggggtgggaatattaaacttggaacaaatagaatttaaggttgaaaacattaagcagggataaagagccacattataataataaaaagcacaatttataaaagagatctaacagtcataaacccgtagacacctactaacaaagcagctaacaagataaagcgaaaattattaaaatgcaaggattacttgattaaaggtacagctaggctgggcgcagtggctcacgcctgtaatcccagcactgtgggaggccgaggcaggtggatcacctgaggagtttgaggccagcttggccaacatgatgaaaccctatccgtactaaaaatacaaaaaaaaaaaa

SEQ ID NO: 58803 - DNA, 600 bp, Homo sapiens
cgggcccccccctcgaaagtcttctagaattaattaacgcggggccgggaacggtggctcacatctgtaatcctagcactttgggaggccgaggttgggggatctcttgagctcaggagttcgagaccagtctgggcaacatggtaaaattccatctctatataaagtacaaaactccgctgggtgtggtggtgcgtacctgtagtcccagctacttgggagggtgaggtgggagggtggcttgagcccaagaggtagaggttgcagtgagctgagatcgtgtcattgcattccagcctgggcaacagagccaggccctgcctcaaaaaaaaaaaaaagcaaacaccattggactgtccccttatggtttaactgggtcaaaaaatacctttgctctttttttttgtaatcagacaacatatgctgtgagcctcttaaactgtgtgaacaagatgttcatggtggcaagaagcacttctgagaggttgtgcctgatttcatcactgaaatttctgaaggcagccactctctcttccacactttcctgattcaggggcaccagcttcaagcgctcaatgatctgtttaaaacaaccaccgg

SEQ ID NO: 58804 - DNA, 406 bp, Homo sapiens
  misc_feature 28: n = A,T,C or G
ccgggccccccctcggaagtcttctagnattaattaacgcgggcaaatgctagtattgtatgctggtattgtattgtagtattgtactgtagacaaatgctagtattgtattgtagacaaatgttagtaatataagtcagtcattatccacagtattaaaacactgaaagtttttgcacttcattgcaccaagaattttaagtggccttctggaaaaaggtatgagatcataataaaaatggagaataaggactagggaaatagaataaaacagctcttgttgcatgtgtatgatttatattcctcacttacctgatcttggtgttcttttttatgtttttaaaaaatgtgtaaactaaaactcaaaacttgaaaaccatttgataaaggaaaaaaaaaaaaaaaa

SEQ ID NO: 58805 - DNA, 482 bp, Homo sapiens
cccccctcgaaagtcttctagaattaattaacgcggggagggataacattagggagaaataatgtaaatgacgagttaatgggtgcagcacaccaacatggcacaagtatacatatgtaacaaatctgcacattgtgcacatgtaccctagaacttaaaatataataataaaaaaaatgaaaacacaatataccagaatttatggtatgatgccatagcagtatttaaggagaaatttacagaactaaacatctatattagaaaacaagaagggactcattaacagtgactttgacttccaccttagaataccagagaaagaagagtctcctaagcagaaaaaaggagagatcagtagaagttcgtgaaatagaaaacagaaaatagagaaaaatcaatgaaatccaaaagctagtgttttgataagctcaataaaattgataaatctttagccagagttaacagggaaaaaaaaaaaaaaa

SEQ ID NO: 58806 - DNA, 588 bp, Homo sapiens
cgggccccccctcgaaagtcttctagaattaattaacgcgggtattacagggctcattccttcacttctttcaggtgcctactcaggtatttccttatcagaacagtctttcgaacgaccccattaaaaaaatagtcctgtcaaccctatgttaacaattttatttatttttattatttgttaacaatacataataggtgcatatattttgggggtacatataataatttgatacattcatattgtgcataaagattgaatcggagtaattgggatatccattgccttaagtgttttaccttttctttatgctgtggacattcaaattactttctaactttttgaaatatacaatagaagaatgttaactataatcaccctattgatctatcaaatgctagatcttatttcttctaactatatattgtacctattaatctgtaattccacaactatatttacttcttatacttttccccttctaggctataaaccaaatgagagctgagcatctgtttggttcactgcccaacacgtgcatgcctactacatggcagtcaaaatatttgtggaataaatgaatgaatg

SEQ ID NO: 58807 - DNA, 382 bp, Homo sapiens
cggggccccccctcggggtacttctagaattaattaacgcggggtgggattattaaacttggacaaagtagaatttaaggttgaaaacattaagcagggataaagagccacattataataataaaaagcacaatttataaaagagatctaacagtcataaacccgtagacacctagtaacaaagcagctaacaagataaagcgaaaattattaaaatgcaaggattacttgattaaaggtacagctaggctgggcgcagtggctcacgcctgtaatcccagcactgtgggaggccgaggcaggtggatcacctgaggagtttgaggccagcttggccaacatgatgaaaccctatccgtactaaaaatacaaaaaaaaaaaa

SEQ ID NO: 58808 - DNA, 564 bp, Homo sapiens
aattaacgcgggtagcccctagtggtttttattgtttaaaatatcttttgtagactggtttttgtgaaaagacttttattcaagttctaaaattcttcttcttgatctagtctattcttgaaccttttgaatgtatctttttatttcattcaattacttttttaatccttttttctgcttggttctttttttataatatctatctctttggtaaatttctttttcatatcctgaattgtttttctgatttctttgtattacttatctgtgttctattgtatctcattgagcttctttaacatcattatttttctctgattttataaatttcttttttttttttggaatttgttgctagagaattattgtgttcctttggaggtgtcatatttctttgctttttcatgtttcttgtgtctttacatttatatgtgtgcatcttgtataaaagccacttgtattagttcattatcatgctgctaataaagacatacctgagactgggtaattcataaaggaaagtggtttaattgactcatagttcagcatgactggggaggcctc

SEQ ID NO: 58809 - DNA, 421 bp, Homo sapiens
ccgggccccccctcggaagtcttctagaattaattaacgcgggtggctctgccgtgggcgtccttctacacagtgctgccgtcttctggctgactcatgcacctgatgcgagaaccactacaacctgcttcaagcggctacacactccgctgtccttcctttccatgcgctctaacttcatgctgattaaatatgatacactagtttgtctcactctatggcacacacgccaaaaaaacacacacgttctatttacccgtggacctctacctactcccctataccttttttgttgtacgctcgctaactgggcacttgctacggcgtgtgaactgtacagactgtgctttcttgacacttaccctcctttacttacatgcctttggttgcggaaatggaaaaaaaaaaaaggaagcggccg

SEQ ID NO: 58810 - DNA, 111 bp, Homo sapiens
  misc_feature 15, 55, 56, 64, 65, 101: n = A,T,C or G
acgcggggagactgnagctagcgacacggaagaggcaaacgcatcctctagccgnncccggagnnagggcctagcctgagacggagggaaaagaaaatggnctagctgcgc

SEQ ID NO: 58811 - DNA, 449 bp, Homo sapiens
ccgggccccccctcgagaatacttctagaattaattaacgcggggactcctgatttcaccaggtaaaaaccatgaaataaggacccatcagaaacagtcagcatgtatcaccaattggccggtgaagatggtggcaatgatatatgtcaatatatgattactatggaaatagacagaggcctgagagagcacagcttctatgttcttctacctgattcaaagaaaccaatccaaataagacatttttgagataattagagaaaattgaacacagatggggtagtagctgatcataagaaattattattaatgatgttaactgtgataatggtattatggtaatgttaaaataaaaagtccttatctattaaagatgcatactaagtatttaaagtaaagtgatataatgtctggggtttgcttgaaaagtactcccgcaaaaaaaaaaa

SEQ ID NO: 58812 - DNA, 603 bp, Homo sapiens
cccccctcgagagtcttctagaattaattaacgcgggtcaggggcaataacacacatggagctgtcatcttgtatgacaataatgccctcttctagaatgcctcctgaagaacctgcatgaggctgttttttataaggaggaccacactctaaaataacgataaaaagtataggataataaatatacaaactagtaacacagtagtttgtaaccattgtgaagtattaggtactttacataattgtacatggtatacttttataagactggcagcaaagtaggactgtttacaccagcatcaccacaaacatatgtgcaacatgttgcattattatgatagctgcaacagtcactaagtgataggaatttttcagctccactacagtcttacagggtcactatagtatatgaggtctgtcatcgaccaatacgttctgaatgtggcatatgactgtgctttaaagatgtctctttccctaaatttgcttacaatttaaggtaatgtcactgtctttcaaaaaggaaacaaaatagagtttcttgtaaacaaaagttaaaaaaaaaaatcaacaatcctgaactaaaaaaaaaaaaaaaagcgg

SEQ ID NO: 58813 - DNA, 479 bp, Homo sapiens
cggggccccccctcgaggtacttctagaattaattaacgcggggtgggtcaaggttcagggttttttgtttgcatataaacatccaattgttccagaatcacttgctgaaaagttgcctttgtacttttatcaaaaataactgatcataaatatctgggtctattatggattgtccagtcagagatcggtaaactgagctgctgcttgtttttacaaataaagttttactagaacacataagggttaaaatctgttttcaaaatcttaagctattcctctagtaacgcatttgaactactaacttgaaaatcgtatttgagatttttctcaccaagacttcacttctaaactttaaaagcttttttctttttgagacaaggtcttgttcggttgcccaggcttgaagaagaattagaattgtcttgggccatacataaaatacacttagctgatgagctttaaaaaaaaaaaaaaaaaa

SEQ ID NO: 58814 - DNA, 339 bp, Homo sapiens
ccgggccccccctcggaagtcttctagaattaattaagcgggagtggtttcagcaagatggcagaatagaactttctagcacttgactccctgcagaaacatcagtttgaatagctttccatgcacaaaattaccttcacaagagctaaagaaaccaagtaagagatcacagcacctgggtatagtgtagaaataaaggatgcggccgggcgcagtggctcacgcctataatcccagcactttggcaggccaaggtgggtgggtcacctgaggtcaggaatttgagaccagcctggccaacatggcaaaaccccgtctctactaaaaaaaaaaaaaaaa

SEQ ID NO: 58815 - DNA, 601 bp, Homo sapiens
  misc_feature 28, 539: n = A,T,C or G
ccgggccccccctcgaaatacttctagnattaattaacgcgggaaggataaagtgtagtgcaaaagagtgagttctaggccagaggtaggccaataatttaattttcccaactcacgggccaaggttctttccactgcaccataatactgatccccaattttaaggttccttgtctgtccttctaaaccatcaattcactcaacaactgcttaagtgtatatagtatgtgcacatctgtgccatttgttgggtatgcaaagtctaaaagacagggtgcctgccctgagatgctcatgacctaattcaaatgcatccttcctgtccctctccccacttctcctggatcttctcatctgtatccttttccacgtttgtaaataaattcaatagaaataaacagttttatatatggcaaatcatgatgagctatgaaagaaaggtgagtagggggattaaattttaaaatagatacaaaaggataaatgcactatttcttgagagcaatggctttcaatctttattttgaagtgacctatantttgattcaatccagttcccccaacttgctcacaattgtgtaaagtgaaaaaaaactgtgtc

SEQ ID NO: 58816 - DNA, 439 bp, Homo sapiens
ccgggccccccctcgaaagtcttctagaattaattaacgcgggtacggtatatactttcagggttgtattttagtgtaattggtttcctttgtaataccatgtattttattttatgcccttaaaaatgttattttgaggccggcatggtagctcatgcctgcaatcccagaactccgggaggcctaggtgggtggattgcttgagctcttgagttcgagagcagcctgggcagcatggcaaaaccgtctctacaaaatatacaaaaataaaaataaaaaaattagcttggtatggtggtgagtagtcccaactactccagacgctgagataggaggatggcttgagcccaggaggcagaggcggcagtgagccaagatcacaccactgcactccagcctgggcgatagagccagaccttgtctccaaaaaaaaaaaaaa

SEQ ID NO: 58817 - DNA, 542 bp, Homo sapiens
  misc_feature 28, 76: n = A,T,C or G
cgggcccccccctcggggtacttctagnattaattaacgcgggttggaaaagcttgatttagagtaacatgtactntgaaaaaacaaataggtatttcctcactataatttctcagtgtgactcagaacaccaaaagcttattttttagttttttttttttcaggtttttgttttccaccgagttttatccacacggaaaactctcaaaaactataaaccaaaatgttcactcaggaatatgttttaattttgcttttctttttttttgtattttctaaaatgtctataataatgttatttttgtccaaaaagaaaaatgtttatggccgggcgtggtggctcaaacctgtaatctcagcactttgggaggccgaggcaagtggatcacttgaggtcaggagttcaaaagcagcctgacaaacatggtgaaaccccgtctctactaaaaataaaaacattagcagggcgtggtggtgcatgcctgtaatcccagctacttgggaggctgaggcaggagaatcgcttgaacccgggaggggga

SEQ ID NO: 58818 - DNA, 532 bp, Homo sapiens
cggggccccccctcggaagtcttctagaattaattaacgcggggactcttgatttagcccatacctggactttcaattattctggtgtatatatctgtcaagggaccagttccctgggtcaaatatgtgaccaactagtcatctacatttcacatcctcctactactaccacccttcaccctacaatttattggcatccctgaactgctgacgtcgatgtatctaacagcagcatcctaaaaaattgcccttcccattgcctactttggctgcccttaaggatgacacattggccactatcattgctagtgtagtgggtggggctctctctgtagcactcgtgagcgacctggctggagtattctgctataggagaagacggacgtgtcccggatactactttgccaagaactacattccaccatcccatttgcaaaaggactcacagatagatgttctgagcaagatgagcttgattcttaccgctaccgtgtaaaaaatgctcaataagcggccgccaccgtggaggagc

SEQ ID NO: 58819 - DNA, 570 bp, Homo sapiens
  misc_feature 17, 28: n = A,T,C or G
ccgggccccccctcggnagtcttctagnattaattaacgcggggtggctagccttctcttcaaactaaagagattttttttttctttttttgagatggagtatcactctgtcacccaggctgcagtgcagtggcgtgatctcggctcactgcaacctctgcctcctgggatcaagggattcagtctcaggagttgctaagactacaggcgcacaccaccacgcccaactaattttttgtatttttagtagagatggggtttcaccacgttggccaggctggtctggaactcctagcctcaagtgatcctcccatctctgcctcccaaagtgctggaattacaggtgtaagccaccgtgcccagccctaaagagatcttttaatttcaaaaggaaaacatgtttgttggaagaaataaactaaacaaaactgtaaaaagtaaaagcccctctcctagttgttgagtttatcagtttacttaaaaaatggctgtcgcttatgcctgtaatcccagcactttgtggggctaaggcgggaggactgcttgagaccagcagtttgggaccatcct

SEQ ID NO: 58820 - DNA, 602 bp, Homo sapiens
  misc_feature 28, 107, 125: n = A,T,C or G
cggggccccccctcggagatcttctagnattaattaacgcggggagtagagtgtgccttgctcccaaggaaaacagttcttgtaaaaaaacaaatggggaaacatgngctacaagtaaaactggngaagactgcaaggcaaaaacatgctaactgacaagaaaatcatgggttttatacaaggataacaagtgctgggttgcttagctatgaggaaggctaggctcactgcataccagaagatgtacagcgttggagaattcagggatttttatcaacaatcaaactatatttgtggaaattttgtgcataagtgccaaagatggctgacatcggaccacattctatttaactcaactgaatgacaccaagctctcatcctaaaacttatagttacatccacccttctgaaatatttaattattctccaatacactggaggtaataggtataaaaagaatgagcatgtgcaacttagtatctcatatctaattttgtgtcccaagttcattcttcccctgaatgtcccatgcctaccaggtgcaggattatctggatgggtcagttcaaaacaatttcagggaataaattgtgtaggggact

SEQ ID NO: 58821 - DNA, 485 bp, Homo sapiens
ccgggccccccctcggaagtcttctagaattaattaacgcggggctgattgtgttgaggatttatagagacagggtccctctatattgccgaggctggactcgaactcgtgggctcaagtgacccacccactttagcctccctaagtactgggatctacttgcattagccactatgcctggccatgtacagaactttgcaatagcttcctgatcccacagcaattaatgaatcaccaaatcacagagaaaatcggcctcaatttcaagtgttttccgctaaacaattgtggttagaaatgttactaacatttattttataaggaatagttatagttactttaaaataacgtcattgccagtgattagaaactaaattatcaagtattcatacaatatatttttttcaacattatttcttcattatatgcatgtgtgattaccttatttgtggtgtgaagaaatttaccccattcttctgcttcca

SEQ ID NO: 58822 - DNA, 256 bp, Homo sapiens
  misc_feature 17, 28: n = A,T,C or G
cgggcccccccctcggnagtcttctagnaattaattaacgcggggtgaatatgattttcgtcgagccacctgataactctacaattgaccttttagctctgacattccctgagactgagttgtccaacaaacaccttctctttgttgtttgggttatgcttaagagccagcgttctgaaaatcctggcttcaggtttccaaactagcaggttgtgctcagagcctaatccttgctggatggtagcacatttaatca

SEQ ID NO: 58823 - DNA, 162 bp, Homo sapiens
cccccctcggaagtcttctagaattaattaacgcgggggcagcgcagcagcacccaacgcagtgagtaccttgatctcctgcgtggcctcgtccctggtcttagttccaccgggcagcgggagtcaggaccgcctgtcctcagacccctccgcagcgactgt

SEQ ID NO: 58824 - DNA, 251 bp, Homo sapiens
cggggccccccctcggaagtcttctagaattaattaacgcgggtgggggataagagcaagactttgtctccaacaacagcaacaacaaagtactcctatgtttacaggtttcaaaatgccgtggaaaatgtttaaacatcacagatcaaaataaataacattgttttaaggaagaatctaagttttccttcccattcaagtaaataagataaagagaaaaaagcccccccacccccaaaaaaaaaaaaaaa

SEQ ID NO: 58825 - DNA, 593 bp, Homo sapiens
cgggccccccctcggaatacttctagaattaattaacgcgggaagaagctgttaatttttatgattttcctactacaaagatactcatctatattttgagggtggaaaattaaaatagccacagaaaacagaaatgagatttcaaaatataagccagttaaatgtcatagtggcaagcaaattgtcatcaaatagtcatcaatagtttattatagcaaaatacaataaattatattttattgaattcattaagtggcagttaaaaaaggattacttcactgctgaaagtaatgtctcgataatgtggaaattttacatatatatataaaacagttctaatgatcatacataagaagacatttgtgaagacagcttacataataaaaacaatttatacatgggtcattgataaccaccagtatctctctttttccccggcctttcccagttatctgaagattgctgcacaaaataattgttttcccatatatcattaatatcaagcattttgaagaaattatagtatctttttttctgtatatgaaaggaattacaaaatatggagaacggttgtatgttgattaatggtgaaa

SEQ ID NO: 58826 - DNA, 436 bp, Homo sapiens
cgggccccccctcgagagtcttctagaattaattaacgcgggtttgctattattattatgatccatttttaaattttcttctttatatctctaggttttaaaaatagtaaaggttttatttttaaaaaataagcacttgtgggccgggcgcggtggctcacgcctgtaatcccagcactttgggaggccgaggcgggtggatcacgaggtcaggagatcgagaccatcccggctaaaacggtgaaaccccgtctctactaaaaatacaaaaaattagccgggcgtagtggcgggcgcctgtagtcccagctacttgggaggctgaggcaggagaatggcgtgaacccgggaggcggagcttgcagtgagccgagatcccgccactgcactccagcctgggcgacagagcgagactccgtctcaaaaaaaaaaaaaa

SEQ ID NO: 58827 - DNA, 565 bp, Homo sapiens
  misc_feature 9: n = A,T,C or G
acttctagnattaattaacgcgggtggatattagatataaatatgtaattatgaataattttaatatactactcataatgtatgtaggattttaaaaaattttctgcaactataattcagttgaaaaactacatttcaaaactatgaatcacaatattaaaacaactatttaaggaattcattcaaagtaaatattgtggctttatattcatactcttgcagaaaatactattgaatgtatatgaatgcaggttgtctacaaacattatacattactatgctaattgtactgaataaatagaaacaaaggtatgacaacacactccacttttcagtttataaactgaactctttttttctttctctttttttttttttttgagactgagttttgctctcattgcccaggctggagtgcaacggcatgatctcggctcacctcaacctccacctcctggattcaagtgattctcctgcctcaatctcccgagtagctggattacaggcgtgcgccaccatgctcagctaattttgtatttttagtagagacaagattactccatat

SEQ ID NO: 58828 - DNA, 173 bp, Homo sapiens
  misc_feature 29: n = A,T,C or G
cgggccccccccttcggggtacttctagnaattaattaacgcgggattctggagcttgtcaccattggacagtctccctgatggaccctcagtcttctcatgaataaattccttcagcgcctaaaaaaaaaaaataaacacatagaaaacaaaaaccacaataataaaaataa

SEQ ID NO: 58829 - DNA, 591 bp, Homo sapiens
  misc_feature 543: n = A,T,C or G
cgggccccccctcgagatacttctagaattaattaacgcgggaagttcagaccctcactttgcttgtcttgaaagtggagattctcattgaagtttgttgtgggactaaagagacggcaaatatcctttcatgataaaactgctcaacaaagtaggaatagaagggaacttccccaacctgacagagggcatatattaaaaaaaccccacagctaacaacaaattttatggtacaaaaatgaatgcatcccctccaagatcaggaacaagatgaggatgtccactcttaccacttctatttaatattatattggacattttagccaaagcaattaggcaagaaaaagaaataaaagagatcaagattggaaatgaagaagtaaaactatctctatttgcagatgatatgagtctgtatatagcaagttctaagaatccactaaaactgttagaactaataaatgagttcagcaagattgcagtttacaagatcaatatacaaaatttaattatatttctatacactggcaatgaacaatccanaacgaaatttagaaaacaattccattcataatagcatcaaaaattata

SEQ ID NO: 58830 - DNA, 521 bp, Homo sapiens
  misc_feature 518: n = A,T,C or G
ccgggccccccctcgaaatacttctagaattaattaacgcgggggagggagagcacagggattgggaagagaacaagagaacaagagtctctgcctggtaatctagagagttctcccagatttatccaaggcagtacctctaccagtctgcaagaaccacatcattattgggcttgaggcccaagtccctttgaataacctggaaagccttcccaaatacaataagcacaaacaagcccagactgtgaagactacaataaatacctaacttcaatgcccagagactgatgaacatctgtaagcatcaagaccatccaggaaaatatggcctcaccaaacaaactacataaggcgtcaggggccaatactagagaaacagagagatacgtgacccttcagacagagaattcaaaatagctgtcttgagaaaactcaaagaaattcaagataacacagagaaggaatttagaattctatctgataaatttaacagatattgaaatagtaaaaaaaaaaanaaa

SEQ ID NO: 58831 - DNA, 449 bp, Homo sapiens
  misc_feature 41, 373: n = A,T,C or G
cccccctcgagtagtcttctagtaattaattaacgcggggnacctaatatttgtaaatggtctgtttgggcaggtaaaattatgtaatgcagtgcttggaacaagagaattttttttcctttttatttctttattttttcttttttactgtataatgtccctcaagtttatggcagtgtaccttgtgccactgaatttccaaagtgtaccaatttttttttttttactgtgcttcaaataaatagaaaaatagttataaaaaaaaaaaaaaaaaaaaaaaaaaaaaaaaaaaaaaaaaaaaaaaaaaaaaaaaaaaaaaaaaaaaaaaacggggcgccaccccgagaggaacacatattgaaccaatattaanccccccccccccccccggggggccccctttttccccgttaaaggttgggtttccccccccccccccgccctttttt

SEQ ID NO: 58832 - DNA, 583 bp, Homo sapiens
  misc_feature 28: n = A,T,C or G
ccgggccccccctcggaagtcttctagnaattaattaacgcggggtggggagttgaattacgttaaaaagtcacttaagtgccttccaactctaaggagaagtacttatctgagctttggggcacacacaactactacttggcatggagagtttctcagcttcatgtgttccgtctgttattgaagctgtattggaaagtcggttcttgtttttatctgagcccgccgttttcatcccattcttttcgtcaaaaatatgttacatctgaaagaggcagatgaaaagattattctatgctaagagggttttgcagcccgataatgtcaccgttttttgttgttgttgttgtaggatcggggttcatttgcagtcttttttgtgggtgagcagaggcaggggccaataaataaattaaggcgggatatttggagttatttggttgtaataaaatatgtggttcaacccagtgctttcatatcttcttttatctgaatccatgtgtttctgtaaaccatcggaagtctaatctgtcttctaccaatatctctccatgtcagcaaatgttcaatcaacgtttaccca

SEQ ID NO: 58833 - DNA, 218 bp, Homo sapiens
aaaaaaaaaaaaaaaaaacaaaaaaaaaaaaaaaaaaaaaaaaaaagttttaaaaaaaaaaaaaaaaaaaaaaaaaggggcccccaccaagggggacccccaacccccccaaaagggaggaaaaaaaagcacgccctttggaaaattttttccaagggggggacggggaaaacccgggccccaccaaaaaaaaaggccgggcagaaaatcccccggag

SEQ ID NO: 58834 - DNA, 423 bp, Homo sapiens
  misc_feature 44, 364: n = A,T,C or G
cgggccccccctcgaaagtcttctagaattaattaacgcggggnagaacaaaattataggatattgattgcaacacttaaaaagttacagtaattgtattagtcaatttttacactgttataaagaactgcccgaaactgggtaatttataaaggaaagaggtttaattgactcacagttctgcatggctggggaggcctcaggaaacttgcagtcatggtagaaggcaaaccagaagaaaggcacctttttcacagtgtggcaggaagcagaatgaactcgggaggaactaccaaacacaaaaccatcagatctcgtgagaactcactcaccatcaagaggacagcattgagaaaaccacccncatgattcaattacctccacctggtctctgccttgacagggtggggctcatggggatta

SEQ ID NO: 58835 - DNA, 585 bp, Homo sapiens
cgggccccccctcgaaagtcttctagaattaattaacgcggggtggtacctttacaaatgccctttctacagatttcaattaatgcacattgctcttgctctcctcccactcctttttcttctaaaataaaatacagagaaccattgattctcacccagtctttccaagttcctttaggattcttgctgatgatgggttcgaggcgttttagaagagtttgacaggcatcctttactgccaaaccgttgagatctgccaccacagaacctccagagatatttgcattagggacagtttctgtgcttgttccacgcaggtggacattcgacattggcattcttaattcacggctgaccacctgaatcattttagtgtggaccccctgccccatttcaattccaccgtgagtgaccagcacagagccatcaagataaatgtgaaccaaggcagcagcctgagcagaaaagacgaaaactgaccagcagcacgtgagccaaggccaacaggaaacttcagggggaccatgccagtcctttcttcttcaataattctctgcattgaacttttccacagcaactttcctc

SEQ ID NO: 58836 - DNA, 487 bp, Homo sapiens
ccgggccccccctcggaagtcttctagaattaattaacgcggggtatgaccacacaatggattatttttcagcactaaaaacgaaatgaactattgatactatgctataacatggataaaccttgaaaacatgctaagtgaaagaagccaggaacaaaaaaaccatatattgttagattctatttatatgaaaatgtccactacaggcaaatcagacacgtaacaattggtggttgccgaggctggaggacgttggggaaatggagaataaatgcgtatgggtatagggtttagggtggaggtgatgaatatgttttaatattggatgtggcaattaatatggtttggatgtgtgtcctctccaaatctcattttgcaatgtgatccccaatgttggaggtggggcctggtgggagatgattgggtcacgggggagatcccttatgaatggcttggtgccctccccataatgagtcctcactctgag

SEQ ID NO: 58837 - DNA, 539 bp, Homo sapiens
  misc_feature 9, 26: n = A,T,C or G
acttctagnattaattaacgcggggnaaaaaaaaaaaaaaaaaaaaaaaaaaaaaaaaaaaagagagaaaaaaaaaaaaaaaaaaagggaaaaaaaaaaaaaaaaaaaaaaaaaaaaaaaaaaaaaaaaaaaaaaaaaaaaaaaaaaaaaaaaaaaaaaaaaaaaaaaaaaaaaaaaaaaaaaaaaaaaaaatttttaaaaaaaaaaaaacccccccccccccccccggggacccccccctcccccccttttaaatttttttttcccccccccttttgcccttttttttccccctttttcctaaaaaaacccccggttcccccctttttttttcttttcccccattccctttttttccaatttgtttttttaaaaaaaacccccccccatttccccttttcaaaattttcccccccttttttggaaaaaaaaattttcccccttttttttttttaaaaaacccccttttttttttttaaaaacccctttttttttaccccaaagcccccatttcgaaaacccccttttttataaaaaaa

SEQ ID NO: 58838 - DNA, 588 bp, Homo sapiens
  misc_feature 27: n = A,T,C or G
cgggccccccctcgaaagtcttctagnattaattaacgcggggtacatgggagttattttattattcttctttaaaccatacatatatattctatacattttctctatgtataatatatttcacaatgaaatgttctgaataatgaattagatcaccctcaggggcccttctaactcttggattttgaaatttcataaaatccagtctcattcaaaaagttgaaaatcactaaaactgtatgacagagtcttgcactttctgttctagatgtgtcctcagttaaccacccagccccttcatcttacaaatgagctccagagagctgggataactttttcaaaatctcccagcacttgagtgctagaacaagaccacagacaaaggtccaataacctacaaaacatcacattgttcactgacgcattctggggctgtgtgcaagtcctccttctgggccttatatttacattgagcatttattccggatttgctcaaagcagttttaacgttcaatattgcgtttcactcagcctcagatccatctgtcatgctggtccagcttgccttcatccctgtgctcccactgt

SEQ ID NO: 58839 - DNA, 601 bp, Homo sapiens
cgggccccccctcggaagtcttctagaattaattaacgcgggcaaaggcaaaagaaaaaaaatcataagcctggtttgcctttatccagagtccccaaagctgctgagcagctcctcaaaaggcacattgtctaggatgatcgaaatggcatcttatccaggagccactgaaaacttgcaatctcaagtttattgggctggctttaaaaacatcattattcttggatgtgcaactgaatgttcagaacccaagtgaaaatgtaatttttcactcactcgccgtccttgctttaattagattaaatgcatctgtttcctaagtcctcataatgccttggatactgagaaatttaaaatgtcgacccgttgagaaaaaagaaacgaaaccgaagcacccccctcagccttctgaggctggactgtgggccaggggctggcggagaaagcaaggcagcaggaaattgccggctccattcccattaggcggatctggggagaaatcaggaaaaaaataactgtataaggctgacactgtaaacatcctagtacagcagcagccttcctagaccttattttcaaacatctgacctcaggcatggct

SEQ ID NO: 58840 - DNA, 562 bp, Homo sapiens
ccgggccccccctcgaaagtcttctagaattaattaacgcggagcctaaacctcttttctttatacccagtctcaggtagttcgttatagcagtttgagaacggactaatacaaagtggaattaaacaacacactcctaataaccaacaggtaaagatgaaatcaaacacattagaaaatactttgatatgaatgaaaatgtaggtacaatgcaacaaaacttatgaaatacattgcaaatggtatgtggagggaaatttgtacttgtaaattcctattttaagaaagaagaagaatctcaaatcaataacctaactttccattttaagacactgaaaaaagaagagcagactaaaccaaaagcaagccgaaggaattaaataataaaaattagagtgggccaggagtggctgctcacacctataaatcgcagcactttgggagggtgaggcagggtcagaagtttaaggccagcctgagcaacacggcgaaacactgtctctagtaaaaatacaaaattagtgacagagcaagactccgttaccaaaaaaaaaaaaaaaaa

SEQ ID NO: 58841 - DNA, 324 bp, Homo sapiens
ggcccccccttgcaaaatccttttaaattaaataaccccggggcctttcccatccaaggccaacctactttcctaattggatccattacctggcccaacggaccaggtacccttagggataacaccccattcttattttaaagtccttataaccattagggttaacaacctcatatgttgaatcaggacatcccattggtccacccgttattaaaggtccgttggtccaacaataaaagtcctacttaatctgagttcaaaccgaagtaatccaggtcggtttttatctacttcaaattcctccctgtacaaaaaaaaaaaaaa

SEQ ID NO: 58842 - DNA, 427 bp, Homo sapiens
cgggcccccccttcgaaatacttctagaattaattaaccgggaagctgctctactactacagacaataattataaaggcctgacatagtataagggcaatgaagacagaaagaagagacaggaatcaagaaatatgttggatccttcaaaagtggagaaagacaaaaaagaaatatattggggcttgaagggagaaaatttgacatctgattggatgtagagtgagaaaggatcaaagacaaagaatctgagttttttccttggagacatggaaaaggtgggataatatcagccataatgaagaatgatctcaagaatgtcctcaaaaagttatgtcttagccgagatgggcggatcacgaggtcaggagattgagatcatcctggccaacacagtgaaaccccgtctccactgaaaaaaaaaaaaa

SEQ ID NO: 58843 - DNA, 568 bp, Homo sapiens
  misc_feature 14, 27: n = A,T,C or G
gggccccccctcgngggtacttctagnattaattaacgcgggaggaatgtggagtgtgggtgaggggcacaattctccaccccaggggcttccaggctgtagcaaagcagccacgtctctccacctgcccagggcacagacccggtgctcagccgcctccagctccagctgagcccctgctgcatgggcggcccggggcctgggggcagagaggagagagccgctgtgggaggagagtttgggggcgtggtcaaggcagagttggtggggtttgaagtccagcaggagtgggcagagagaggacttgacgtttggcactgggaaatgctggtggagactggacctgggggacgtggggtagccaggctggagtggggtgagggcagggctgggcgcacaagcctaggagacattgttctgttggggacattgagagccacaaggtggggctaggcaggttggctcacgcctgcaatctcatcactctgggaggctgaggtaggaggatcacttgaggtcagaagttcaagaccagcctgggcaacatagctagactcgtctctacaaa

SEQ ID NO: 58844 - DNA, 432 bp, Homo sapiens
  misc_feature 9, 372: n = A,T,C or G
acttctcanattaattaacgcggggcaggggggtttccagttttgggctagtgtgaatagtgccaatgtgaactttcagatacttatctttagtgagctgtcattctaggaatggaattgctagatcatagattttgcatatggtccacctgtagaaatactaccaagcagttgccaatggtttgccaaaaatgcgcattcccatcagcaacatgtattctagcttttctacatcctttctaatacttggtatttcctgtattatttttaacaattctagtggatatggtggttttaatttgaatttcttaacagagatgattgccttttcatgtatttatagatgacagcatattccatgtttatatattnagaatactcaatgttataaagttgttaatgttccccaatatataaaattaatgcagtcct

SEQ ID NO: 58845 - DNA, 210 bp, Homo sapiens
  misc_feature 37: n = A,T,C or G
ctggggtaccggggccccccctcggaagtcttctagnattaattaacgcgggggcagcagggagagtacggggaatttgtcatcaaggatccagatgaggtggcccgcctctggggccgcaggaaatgcaaaccacagatgaattatgacaagctgagccgggccctcagatactattacaacaagaggatccttcaaaaaaaaaaaaaa

SEQ ID NO: 58846 - DNA, 449 bp, Homo sapiens
cccccctcggagtacttctagtattaattaacgcggggaagcgtttactttgaaaaaattagagtgttcaaagcaggcccgagccgcctggataccgcagctaggaaaaaaaaaaaaaaagcggccgcttttttttttttttttcgagacggagtctcaccctgtcacccaggctggagagcagtggcgtgatctcggcccactgcaagctccacctcccgggtccacgccattcccctgccttatccccccgagtagctaggaccacaggcacccaccaccacgcccagctaatttttttgtatttttagtagagacagggtttcaccacgttggccaggctggtctcgaactgacctcaggtgatccacatgccttggcctcccaaagtgctgggattacaggcatgagccaccgtgctcggccctaaaccatgtgttataggatga

SEQ ID NO: 58847 - DNA, 300 bp, Homo sapiens
cgggccccccctcggaagtcttctagaattaattaacgcgggccaccacgctgaggtcgcacgcgccgagcacgagacaatgatgcacattttaaaataaaagaatgatgcacattttaataaagcacagcataaactgttctttccaaaaaaaaaaaaaaaaaaaaaaagaaagaaaaaaaaaaaaaaaaaaaaaaaaaaaaaaaaaaaaaaggagaagaaggaaaaagcaagaggtaaagagaaaaagatcatatcgggaaagaaaggtgacgccccgtccctaggggaaaaaaaaaa

SEQ ID NO: 58848 - DNA, 521 bp, Homo sapiens
  misc_feature 19, 32, 451, 452: n = A,T,C or G
taccgggcccccccctcgngaatacttctagnattaattaacgcgggtgagaggagtatagtataactaaccaacaatgtactattgtacaataaagtactgttaatattgaggtaaacaatttactttggtctttttcttgaattatgggttaggttcaatgtaaaacattttgtcttcacttattaggaactagcctgttgtttttttgttgtttttgtttttgtttttttgagactccagcctgggcgacagaatgagactccgtctcaaaacaaaacaaaacaaaatctgtgaaattttctatttcagaaaacaaagaacttacccttgaaaaccaaattaaagaagaaagagaacaagacaactctgaatctccaaatggcagaacatcaccccttgtgtcccagaataatgaacaaggctcaaccttacgggatttgctgactanncacagctggaagctacgtgtggggtctacagatgctggcattgcctttgccccagtatttcaatgggag

SEQ ID NO: 58849 - DNA, 428 bp, Homo sapiens
catccaatcagtgggaaggcgtgtaagtagaaaaaagacctacaaagaaaagggaattctgcctcaagactgtcctcctcagactcaagctgcatcatcagctcttcccagggtctctggcctgccagctgccctgcagattgcagacttacgtcacctgcaagttgcgtgagacaattttatcaatcaatctaccaatctctctctgcatgtacatacacgtgggccctatcagttctgcttctctggagagctctgactaatacagacggttttctaaataagtgagacaaaataggaaatgacctccagacactaagtgcaatccccttatttaaagacaataaaaccaatgcccattagagtttggtgagaacccaaagtctgcgtgccacccccgccataccacctgttggggctgctctttg

SEQ ID NO: 58850 - DNA, 609 bp, Homo sapiens
cgggccccccctcgaaagtcttctagaattaattaacgcgggtgtgaatgaaaaactcctcataaaagagaaaatagaaatagttcttgaacatataaaaagaagctcaaccttcatttataataactaaaattagacagattaaaaaggccacaataatcttaaaaaagaacaaagtaggagggcttataatgctagatatcaagatttattataaagctacaataatcaagctagtgtgatactagcatacaaacggaaaaacaaactaataaaaaagaatctaaaagcacatcaacacatatatgcagtctcttgatttataacaaaggtacctccacaattcaatggtaaaaaatgaacttttcaataaatggttctaaatgtttaaaaaaactaacttgagatggattttaggcctaaatataaaaggcaaaataataaagcttcacaaagaagacataagaatactttcatgatcttggaatgagtaaaaatgtcttaagtagggcacaaatacctcaaaccattaaaggaatggtcaataaactggacttcattaaaataaataactattcatcaaaagacacgattaagagagtaaaagag

SEQ ID NO: 58851 - DNA, 564 bp, Homo sapiens
  misc_feature 44: n = A,T,C or G
ccgggccccccctcgaaagtcttctagaattaattaacgcgggngcccaaataggaagggtaaagttccctcctaggggtgccgcacctgcatatgcctagggttggccagagtgactccatcttgtttattacccatgagcactaagcaaaatccatggggtgggggaactcaggtaaagacaaaaacacaatgctaatgtcatgttagtgatattataatgagctggattaagataaggaaatttaggttgattcattgtacctataccaaagttgggaccatcccttctgagcaacatcctagcacaaggagaatttcttaaccatattccatcctattaccagcagaggcagtgtaggtgctgtcctgtggtttttcctttgctcttctctgtccttcttctgagaccctccctctctgtctgcctaaccagaccctaactgcctcctctctcagtctaggcaaataattcatgaataagacctccaaagcacaagcaaaaaaaaaaaattaacaaatgggacttaaaatataaatattctacacaaaaaaaaaaaaaaa

SEQ ID NO: 58852 - DNA, 520 bp, Homo sapiens
attaattaacgcgggcaagtgagaacaaagcttcatctgtatttacagccgctcctcatcctccctatcattggcattactgccggagctgtgagctccacctcctgtcagatcagcagccgcattaagttctcacaggaaggtgaatcctattgtgaagtgtgcatacaagggatctaggttgcatgctccttatgagaatctaatgcttgaagatctgtcaccatctaccagtatgcccagatggcaccatctagttgcaggaaaacaagctcagggatcccactgattctacattatggtgagttgtataattatttcattacatattacaatgtaataataatagaaataacttcaacatacaataactatttctaattaaaaagtctatcacagccgggcgcggtggctcacgcctgtaatcccatcactttgggaggctgaagcgggcggatcacgatgtcatgagatcgagaccatcccggctaaaatggtgaaaccccgtctctactaaaaa

SEQ ID NO: 58853 - DNA, 521 bp, Homo sapiens
ccgggccccccctcgaaagtcttctagaattaattaacagcggggtacagtcttcccaatactaaagatactttgatgagatcagaacaaatgtgcttttaaaatattatataataaaatatgtcaacatttgaaaactctttataaactagtaaaccaataagttccagatgaccaatgcatgatgttacaaagtcatgcacaggtaaaagatccattcaaatctcaaagtagaccaaaaaatttatgcacagtgaaaaggttaattgatacagattccattttgcagcttacctttaaggaatagccacttgttgacccttagtgtactaccaaagatggtatatacaagtacttaaaaagtctataaaatatacctccttttccaattatatgttggtgggaggacagattgtcttcatatatttcaatctaaacaacagatcacaacagattgaatatggagacagatatgagaatcaacatcttctattaaaccagacattaaagagatttgcaaa

SEQ ID NO: 58854 - DNA, 605 bp, Homo sapiens
ccccctcggaagtcttctagaattaattaacgcgggccatcttgcttctaacctttaagctgtccttgttccttcctgggcgtaggctgaactaactttgggaggagcttagtttatagtttaaaacaaagacgacaacagcccttttccaaaacaaaccttcttcttgcctggggactagactgcctttgtaggactaagaaattagccacaaaattagaaattatggtttaggagttatacagttggaggctacaagattctgaccctccctaacctactcccaagatcaatgcttgagatattttgcaggccctgcatttgatggatcagctggcaccacctatacatcgataaactggccctcaaccaggaactgactcagttcaaaaggacagcttcaacttcccatgatttcatctccaacccaaccaatcagcactctcaactcactggccttccccacccaccaaattatccttaaaatctttgctccctgaatgctctgggagactgatttgagtaataataaaactccagtctccacacagccagctctgcatgaattactctttctctattgcaattcccctgtcttgataaat

SEQ ID NO: 58855 - DNA, 611 bp, Homo sapiens
  misc_feature 25, 592: n = A,T,C or G
ggccccccctcgagatacttctagnattaattaacgcggggatcttttacaagttttaataatggtgttaccttgaccttgtcagaggatgtcaaaggaaagtttacaaacaacaaactccctctaattattctcaaatactttgtcaactgaaatactgaggtgttaacagctctccaggcatgcgctgtggaacactgaacaattaatgagcatgcacaggcaatgccagctttaccacaattgctgtatagctgacacaattttaatacaccattaaaattttatcctgatttctacaattttaaaatagaacccagaagagactttcttcttcaaacaaacaacaacaaaaaaacttgagagtgattaaccaaaacctacaattaacatcatacttagtggcaaaagactgaacgaacggtaaggatgtctgctctcactactcctattccacattatacctgaatttcatccaatacaatagggcaagaaagaagaaataatcgtctctatttacatatgacacgactgtctatcagaaaatcctaaagaattaacagaaaaaatctactagaactaaaactgagtntagccaaatcactgaatac

SEQ ID NO: 58856 - DNA, 587 bp, Homo sapiens
  misc_feature 28: n = A,T,C or G
ccgggccccccctcggaagtcttctagnattaattaacgcgggatacagttgaacctttgttttaattgagctgtttggaaacagtctttttgtagattctgcaaagggatatttgtgatccctttatggcctatagtgaaataggaaatatcttcacttaacaactagacaaacattctgagaaacttatttgtgatgtgtgctttcatctcacagagttgaaactttcttttgattgagcagtttggaaagaggccttttgtagtatctgaaaagggatatttttgagccctttgaggcctatgatgaaagaggaaatatcttcacatataaactagatagaaactttctgagacaattctttttaatgtgtgctttcatcttacagagtataatctttcttttcattaaacagtttggaaacagtctttttgtaaaatctgcatagggatatttctgagcggtttgaggcctatgatgaaaaagaaatatcttcacataaaaactagacagaagcattctgagaaacttcttttttaggtgtgcatttatctcacagagttgaaacttagttttcattgagcag

SEQ ID NO: 58857 - DNA, 569 bp, Homo sapiens
cccccctcggaagtcttctagaattaattaacgcgggctttaaagatggaggaaggggccacgagctaagaaattaagctctagaagctggaaaagacaaaaagaattctcccccagagtctccagagagagtgtggtcttgccaacaccttgcctttagcctagtggaaatgacatgaggtttttggactccagaattatgagagaaaaatacaggttattatttaactttgactcgtcactatattttttctatttttctatttccgggccccacctagactgcccttttttattcaccccactacaatacaaattccataaggacaatggccctatgttattacctgctctatcttagtggctagaacagcacctggcacatagcaggtgctcaataggaagttgttgaatgaatagattagagccaccttctcatcaacccctgacttcaagagtctgagtccaattctttaagctcagcattattcttgttgacccaaaactctacactagagatgcagctggattccgagagtgattacaagatcagtgaatactggcgaaac

SEQ ID NO: 58858 - DNA, 506 bp, Homo sapiens
  misc_feature 24: n = A,T,C or G
gccccccctcggaagtcttctagnattaattaacgcgggtgtgggggggtatatttatatatgtactaggatcacgtaaattaactatctttgttatgggttatagccaaacaagattaaaagctactagtctaaagtaagtcacttaaactctatgaaactgtgccctcatctcttaaatagaacttaccattcaacttcaagggtggactcagataagataattgcactttttaagtaaaacattgcattactgagttacggctacagccttttataagggtgacatcagagactgatgttcctctgatgcatatattcacaggatgaagtcactgagatagaaaatctacctatggtatcaaacgtaactcaaaaaatgttgcctcctttcggaaaagaatctagctagagatactgaaatgctaaatttcttgaactctgtataatctccctcgtactagctaccataacggcctctcccttacgtaacctaacttaaaaaa

SEQ ID NO: 58859 - DNA, 539 bp, Homo sapiens
cgggccccccctcggaagtcttctagaattaattaacgcgggagtaaaagactggttaatgataacaatgcatcgtaaaaccttcagaaggaaaggagaatgttttgtggaccactttggttttcttttttgcgtgtggcagttttaagttattagtttttaaaatcagtactttttaatggaaacaacttgaccaaaaatttgtcacagaattttgagacccattaaaaaagttaaatgagaaaaaaaaaaaaaaaaaaaaaaaaaaaaaaaaaaaaaaaaaaaaaaaaaaaaaaaaaaaaaaaaaaaaaaaaaaaaaaaaaaaggaaaaaaaaaaaaaggggccccccccgggggggacccccatttccccttttagggagtcttttaaccccccctcatgggccgtgttttaaaaacgtggggatgggaaaaacctgggggtacccaaattaaatgccttggaaaaaattccccttttccccatttgggttaatacaaaaaaggccccccccaatcccctttccaaaaatttgccc

SEQ ID NO: 58860 - DNA, 596 bp, Homo sapiens
ccgggccccccctcgaaagtcttctagaattaattaacgcggggtggggtgaaaaaagacaggattggtgttttcttgggcaaatggggtaaaagaacaaagaggaaataaatgtagggtttggggaagtgagagattgaaccacattgaccctaactgcctaagtaaggaaagcgtggataggctggtgccaacgagtaaggagaaagtccccacagtattgaagaacagatgtggtaagagtggggatcagagaggttctgaagtttaggaagcttgcaagatggtatagttggagcacaagagcgtatgtagaggtgagatggggagagtagggaggaagaaaggaaataaatgggccttcctgaactttatacctgtttgaaagtggggacgtagaattaatattgttgaaaaagcaaaccaaggctggacatagtgtctcctgcctttaatcccagcactttggaaggccaaggctggaggattgctcgaggccagaagttgggagaccatcctgggcaacataggaaaatcccatctctattgaaaaaaaaagaaaaaaaccagagcatatgtccatttttcacatctgc

SEQ ID NO: 58861 - DNA, 304 bp, Homo sapiens
cggggccccccctcgaaatacttctagaattaattaacgcgggtacattttggaatttatgtcagaggaagctccaaactggtaacttccctgtgctaagggttccacaataatttattaatttgtttattcaacaaatatttattgtgtatctgctgtatatcaggtacttttctggatgatgtggttacaggcacaacacagaaaaggatcctagtctcagggaacttaactttcagtggagggagacagaataaaaataaataaataacataatgtcttaagtttcacaaaaaaaaaaaaa

SEQ ID NO: 58862 - DNA, 613 bp, Homo sapiens
cgggccccccctcggggtacttctagaattaattaacgcggggccaggaccctcctctgggggactctaaacgctgtgtttgtaaccaacatgctgagcctcctgagggctatcattgtaaatgtccaaaatcaatgtccaagtaagataggcaaacttaggccaagaatcttacctagacttagatatttcttaagcattgctaaatgtgagagaagccatgccataaagtgttaagaacacaaacaagtcaacttttcacaatccaccatcaaactttcccaacaaaatattacctagcattgcttgggtgatagtgagtggcatgaaactgcttaagctgctcccatgtaagctccgggatgcacagtgggtcacccccggagaccactgagtacgtgtggtcgggaagaagtctgttctgaaggtgctgggagaatatcctctcattgtctgtcttgaaacgtaaaataaataaatcataagtatacatgtaaaataatacacacgttacattacttacaatatagccaattgatcacattctggtgcatacacctgtaatactttgcaaataaagctgttctaatggtttaaaaaaaaaaaaaaaaaa

SEQ ID NO: 58863 - DNA, 561 bp, Homo sapiens
ccccccctgcgggaagtaccttctagaaatttaattgaacgacggggcagggcaggaaaaacagaaatgtacaagtaacagagattacaagagctaggaatgctgatctcatggaggtagtgagtagaaagatagtaaccagaggctgggaaggctatggcacaggcagatgaagagaggctggttaatgggtacaaacataaagttagatagaaagaataagttttagtattcaatagcacagtagtgtaactacagttaacaataatatatatttcaaaacagaagatctgaagtgttcccaacacagagaaatgatacatgtttgagacaatggatatgctaaatactctgattggatcatgacacactgtaggcatatatcaaatatcacatgtaccacataaacatgtacaactaatatgcatcaatttaaatattttctttagaaagagattctcttcttcaacacaatctccatcggcgcacaacatgcaatgtgctatacgaagcacccacataaagagagagaagtcaaagactttatgctcagtctacctg

SEQ ID NO: 58864 - DNA, 600 bp, Homo sapiens
  misc_feature 588: n = A,T,C or G
ccgggccccccctcggaagtcttctagaattaattaacgcgaagtaaccatcctacagctcccccttttcttccgtgggccggatgtatcccccgcgttctcccaagtctgctgcccctgccccaatctcagcttcctgtccagagcctcccatcggctcggcagtgccaacctcttcagcctccatccctgtgacctcatcagtctcagatcctggagtgggctccatttctccagcttctccaaagatctccctggcccccacagatggtaagagctaggtgtttgagtgctgtgaatgcatatttagtgtgatttgtggttctggacagaaggacctttaggcatttctctttacttgaacagtaaaagaactctctaccaaggaacctgggagaactctggagccccaggagctggctcggatagctgggaaaggtgagggtggttttttttctgctgaggattaatgctcctttgtctgggggagagtatttcagttaggaagtttgttggaattcagaggccaaggcaggtagatcacctgaggtcaggagttcgagaccagcctggccaactggtgaaacnccatctctacta

SEQ ID NO: 58865 - DNA, 581 bp, Homo sapiens
  misc_feature 27: n = A,T,C or G
cgggccccccctcgaaagtcttctagnaattaattaaagtcaccttcctaccattagagcagaagacagctcctatagttttgtattttggcagctatgagatattttcatggtaatgtcaacatggtcaagcactttgtaccaagttattaagtaacataatttttaaaatttaaagaatgtgtcttcaactaaaaactttattctttagcatttatttatatttctctgtagggtgttatccctgtgacattgtctctttagtttgctctttcaagagatacttacagatgttgagatggctgccctgcatttccagctaatctcttctgctctaaatatttaaaaacagttcttctcaaacattttcattcagatagctttctgaaagttccctatccctctttaccataattttttaaatgtagccacattgtaatagtaaacttcatatataatgagtgcttcatatttttgttatgggaaagcaatatattatgcagccagtctgtagaacattcagatccctcttcctttactcaatacagtttcaaaaggaagactcatgagaaattcataaa

SEQ ID NO: 58866 - DNA, 239 bp, Homo sapiens
  misc_feature 44: n = A,T,C or G
cgggcccccccctcggggtacttctagaattaattaacgcgggngagatattaaacacatttttaaatgacattcagtaaagaaattaaatcccttactcttccttgttggttagaacactccacacagctgacttggatgtttccatgcttagcaccaggaatgatctgtacacattcaaagtcatttgccaaaataacaatatcacagcctgatccatatgcctaaaaaaaaaaaaa

SEQ ID NO: 58867 - DNA, 457 bp, Homo sapiens
ccgggccccccctcgaaagtcttctagaattaattaacgcgggttactacctaccactcaaggaaagaaggagaaagcaaaaatattcaaaataagcaatgacaagggtgaaatcataaaacaacaacaaaattttaatcacggtaagcaactactttacaaacttttaaatacaaataaatttgaaaaatctatatgaaatagataatttctaaggaaaataatagttttccaaaaatgaccccataagagagagaaattttcattagaaaaaatagagaaagttatcaaaaacaacacacacacatcaggcccagatggtttcatagaggaattccataaaaccctcaatgaccagttaatcccaatgatactacatatgctaaaacatagaaaaccaaggaaatagcgcagtttattgtataaaacaaacgtaacgttgatacccaaatctgac

SEQ ID NO: 58868 - DNA, 484 bp, Homo sapiens
  misc_feature 28: n = A,T,C or G
ccgggccccccctcggaagtcttctagnattaattaacgcggggtcaatagtaaggcagagtggggtgggggagtgttctattccagatgtggggggatagggaaggtctcttttgagcgggaaccagaagaacagagccaagtgggaatctctctgagcctattccggtgcaggaggctgcctaatttaaaaaataaaaatagctaagcgggcattttcaggaagagagtgagggatgagagaataaaccctgagtgcaaagacgaaggcaggtgcatattaatcaaaagcttactgaaagctcctgatcaacctgaagtaatcggtattataaaattccagccagaggtaagaaattttacctcattctgcttaatgtaagcagaaatctgccttattctgcttactgtggtttagagtataaactgtttgaaatataattagtacccaggccctctttttttcgtttttgagacagaatct

SEQ ID NO: 58869 - DNA, 536 bp, Homo sapiens
ccgggccccccctcggaagtcttctagaattaattaacgagggcgagagagaagaagagaaaagagggcaaaataaaaaaaaaaactcctattctgaatgagcaaacaaccaaaattgtagcacacacctaagaaatctaatactagaacaaccaataaattcaataattggaataagaatttactccagatgaaatttaaatttataaaaaatgaacaaaaacgatgtgtcttgaggatgttcaaataaataaacataaacttacattaaagaagattaagaaattaaacgtaatgaaacaagatctactagatagaaaaaaacagctaattagaaaacttggaaatgaaaaatagagttattgaactttttaaaaagcaatagagaaaagaaactttagacttgatatagtcaaagaatgagttttgaagatagtatggagggaccttatccagaacatagtaggagaagcaaacgttaccaacattcatctaatactaatttcagaaggaaaaaatggaggaaaaaaaaaaaa

SEQ ID NO: 58870 - DNA, 240 bp, Homo sapiens
cggggccccccctcgaaagtcttctagaattaattaacgcgggtggggtggggtgctctgctggtcttcaattaccaagaattctccaaaacaattttctgcaggatgattgtacagaatcattgcttatgacatgatcgctttctacactgtattacataaataaattaaataaaataaaaaaaaaaaaaaaaaaaaaaaaaaaaaaaaaaaaaaaaaaaaaaaaaaaaaaaaaaaaaa

SEQ ID NO: 58871 - DNA, 479 bp, Homo sapiens
cccccctcgagagtcttctagaattaattaacgcaggtcacactcctggtccactttaatgttccatcctgtacacctggctctgccttctagatagtaagagaattactgaaagtattaaaagtctctgaaatgcagaaataatggcgtaagctgtctctcctctctccacctgggctgccaaacagggaaaggccccctttccagtgtacatgtgacccacgtgaccttacctatcactggagatggctcacactccttacccttcccccttgtcttgtgtctttatttctatgatctctcgtctccgcacatggggagaaaaacccacagaccctgtaaggctgtcccctacatctggcgcccaatgtggggctctccctcgctgtgtgaagttgcactttgagcatgggactcagtggaggattttgacataagattcctgaagattgcagtcgacaagcatggtggtaagcctg

SEQ ID NO: 58872 - DNA, 545 bp, Homo sapiens
  misc_feature 35, 528: n = A,T,C or G
tgggtaccgggcccccccctcggaatacttctagnattaattaacgcggggtggggggagagagaatcaaaaaactatgtatcaggtaccatgcttattacctgggtgacaaaataatctgtacaccaaacccccacagcacgtaatttacccatgtaacaaacctgcacatgtacccccaaacctaaaataaaatttagaaagaaaaaaataaataaaataagaattatactggataatgtttaaaaagttaaacatatatcacagcaatttcactcctaagaatgtgcccaagataaatgaatgaatatatccatgaaagcttctacaacgtcatagtgaaactaccattgcaaaattataactgtgacagcgaaagagatctgacctaaccaactccatcttgcttctaacctccaagctgtccttgttcattcctgggcatagggcaaactaactttgcgaggaacttaatttagagtttaaaacaaagatgatgtaatcccagcactttgggaggccgaggcnggccgatcacgaggtca

SEQ ID NO: 58873 - DNA, 587 bp, Homo sapiens
  misc_feature 27: n = A,T,C or G
cgggccccccctcggaagtcttctagnattaattaacgcgggctaccacaggagtgtgccagggaggctttaactcttttattatatgctcttctgaacttttaatttctttttcctttttcttttctttttttgagacagggtcccagaaacacttggattgcattgttttggtgcttttgagcattaaaagaaagtgattaagaagccaagtgctaagacaggtaaatgatatattatttgaacgaggagaaaactacctagaaacgtattttgtaatgactacttttgctttggctcagatctcttgtctacaacttactttcatagttatgggaatgacttcgagttcattaacttttgatgaactaagataactaagagtataaatacggaagctgattttaaaaagcaggtcttttcagtatgagagatgaatgttctataaatcatggggcaggcagttaaattccactgttatagttttgtttgtatttgctcagagacagttatatatttttagagtatctgtaagtcatttatctggaattttctctctcctcttccctctctagaagaaaatagta

SEQ ID NO: 58874 - DNA, 130 bp, Homo sapiens
ccgggtccccccctcgaaagtcttctagaattaattaacgcgggggagacgctgcggcagaaggctgaggccgacaagaatgataaggcagttaaagacctggtggtgctgctgtttgaaaccgccctgc

SEQ ID NO: 58875 - DNA, 594 bp, Homo sapiens
cgggccccccctcgaaagtcttctagaattaattaacgcgggtcaagcagtatgtcttaaggacacactggcagcatcccatccccttccttctcccactctcccagtctggccctctctctaaatataaggggtggaagggcgcatgatggtcaaatataggtaacagattgtagcttgagtaccatctaaatctcatctatcacttccagagtgtgggatgtaaatacaggtgaaatgctaaacacgttgattcaccattgtgaagcagttctgcacttgcgtttcaataatggcatgatggtgacctgctccaaagatcgttccattgctgtatgggatatggcctccccaactgacattaccctccggagggtgctggtcggacaccgagctgctgtcaatgttgtagactttgatgacaagtacattgtttctgcatctggggatagaactataaaggtatggaacacaagtacttgtgaatttgtaaggaccttaaatggacacaaacgaggcattgcctgtttgcagtacagggacaggctggtagtgagtggctcatctgacaacactatcagattatgggacata

SEQ ID NO: 58876 - DNA, 367 bp, Homo sapiens
aattaattaaccggggatgtcagaattaggaaaggggagggaagtgtggtcgtaaaggggccacatgagggatcctggtggcaataaactgttcggtatctttactgtagtggtggatatagagacccacacgtgatcaaatggcctagaaaacacagctacatacctgtaaagccagtgaaatctgagtaggatctgtgcattgtaccagttgcaatatcctggctttgacaggaagtgatataagatgttaccactggggtgaagtaggttaaaagtgtatgggacctctctgtattatttttgcaacttcctgtgactttatgatcatttgatcatgtctaaataaaatgtaaaaaaaaaaaaa

SEQ ID NO: 58877 - DNA, 598 bp, Homo sapiens
ccgggccccccctcggaagtcttctagaattaattaacgcgggctctttttttaacaaaaacaattttttacaacataaatctagttcctttacaatacataattaaagtatacaacttactagttaatatttgcagcatactcactttgtacccaaacatactgacacactctcaccaacctggaagacttggcattattagcaacattttacaggaaactgaggcacagaaagatgaaataacttgcccaaagttacacagctaatgagtggaaaagccaaaacttcaacccaggtcagactcttaaagttatgctttttccgaacatggttaagtgaaatttgatttttttaaaaagataatcctcagaagacatgtaaaaatacacatccttttaataaaacataaatggaagttaaacatatcagagaaattcttaatgtatatacagttttgaaaagaatagactgaattccttgtagtaataagaattatccagaaatgcattcaatcatacaaattcattcattcaagaaatatttgagtaccagcacctactatgtgccaggcactgctactatgacctccttcctgta

SEQ ID NO: 58878 - DNA, 394 bp, Homo sapiens
ccgggccccccctcggaagtcttctagaattaattaacgcgggtgattggtatcttagaaatctctcctgccagacttcccaaacctggcaaagtatagaaactgttgctaagaagagtggtccatgctgagataaacatgtactactcctaaataaaaatggaaaaaaaagggaaaaaaaaaaaaaaaaaggccaaaaagacttgatttaaaaaaacaaaaaggacggccgccccccgggggcgaactccaattacccctatagagaactgctttaagcccactcactgcccaacaattaaaaccttcttgagaggaaaaacctggccgttacccaacttaaccgccttgaagaaattacctttttgcacagctggcttaataacaaaaaggc

SEQ ID NO: 58879 - DNA, 579 bp, Homo sapiens
ttctagaattaattaacgcggggggaagagcattaagaaaaagagctaaggcatgctgggcttaatacctaggtgatgggttgccaggtgcagcaaaccaccatggcacatgcttacctatgtaacaaacctgcacatcctgcacatgtactatggaacttaaaaataaaataaaataattatataaaaagaaaacactgctaaaaaacctaaccctagcccattgtaatgccagggatgtcttgacctatgtatttccttcatcccaagatgctgaacatgtcaagacattcggtgagccagagtcaaaaggcattgaggagtcgttctgtttttgcagcagtgcaggcttgagaggctccagggtcagatgctcaagacaaaggaggccctccttcgcatgtgtgagacacccttctgtttcatttctccttacataggcacccatgatggttcacagagaagccatgtgcacaaggccaggaaaagtaacagagctgaacacagacggcagtgcatatgcaaatttaccaaaaatcagatgttgctgaatcaaaatcatttaaattggagttattt

SEQ ID NO: 58880 - DNA, 529 bp, Homo sapiens
  misc_feature 31, 482, 485, 495: n = A,T,C or G
taccggggccccccctcggggtacttctagnattaattaacgcgggactcgcactgctgtttcaggggctctcaatagaattgctttgggctaggagttcatgaaacccttcagatttctggatttagtgagcccataaataagtctcatgttgaactttaattattttttggaccacacttcattgtgcagattaattttaattgaagtattcttttcttcatttgcttttccattaaattgagttctttttattattattattttcatttttggagggactggttctttatttcaaaaagacacttgtcaatattcagtatcaaaacagttgcactattgatttctctttctcccaatcagccccaaagagaccacatcaaaggagagtacattttaagccaataagctgcaggatgtacacctaacagacctcctagaaaccttaccagaaaatgggcactgtgtagggaaagaaactntanagatcaacanactgccagcccacggactgcagaggctgtcacag

SEQ ID NO: 58881 - DNA, 512 bp, Homo sapiens
ccgggccccccctcgaaagtcttctagaattaattaacgcggggtggggggggtgttcggtccttgcgggcttcacgagatcgattcctgactactttgctgtgaattgcacaactcacacagtaatgtagcttcacatacagcttgggaagcacataggctaaggaatagaaaatagagttatactggtattatatacctaccttgcttttttgttacatgaatgaagagcaccttacatgtttacgtcaattaaaactaaacctatttaaatgcctgtcgggcacataaaagcacccccaaagcacctgttcagcccaatacctgagcacatatgtataaccctcagttttacaagtgaattaacatcccacgtgagttcatcttgacaccgcaaggaccagactgacattctaaatgcaataaaccaataatccagttgcttgtacacctacacccgccctaatgcctaccctgaaccttgctctttgtataaaagaaaaaaaaaaagc

SEQ ID NO: 58882 - DNA, 474 bp, Homo sapiens
ccccccctcggaagtcttctagaattaattaacgcgggccgagagatccgatctgaatactacttaatttgccattgttggctttgaaagtggaggacctagatcaaggagtgtgggcggcctctaggagctggaaaaggcaaggaaacattctctcccgccgccctgccgaaaccatcgtttggacccagtaagatccatgtcagattgacctccagaattgtgaaatgacagatttgtttagccggtgcagtggcacaagcctgtagtcccaggtcctcaggaggctgaggcaggaggatcacttgagaccaggagactggggttgcactgggctgtgattatgctactgcactccagcctgggcaagaccccatctctataaaatgaaaaaaaaaaaaaaaagcggccgcttttttttttttttttttgggaaacaatcacacggtttattaattcagcagactttactca

SEQ ID NO: 58883 - DNA, 377 bp, Homo sapiens
  misc_feature 27: n = A,T,C or G
cgggccccccctcggggtacttctagnattaattaacgcgggggtattcccctcccaggagtaaatatgctaactgaagcacacaaaaaagaaaagataaatgcaaaaaagagcataaaatatatatgacatagttttaaaaatgtgtaacatgcatgtaattgaagtatcagaaagaatggagacaaggaataggggaagaaggaatatttgaagagataataaccaaaaactttctaaaactaacccacaaaatcaagaaattctgaagaaactagaaaagatacatgcaaaataaatcccattttggctcatagtgaactcctgaaagccaaggacaaggaccaattacttaaagcacccaaaaaaaaaaaaaa

SEQ ID NO: 58884 - DNA, 615 bp, Homo sapiens
cgggccccccctcggaagtcttctagaattaattaacgcgggtctgaataccgaagagagtattcaatacagatttaaactaaatgtttgtgtctcatccaaaattcacatattgagatcctaatcctcaatgtggtggttctgggaggtagagcctttggaagatgattaagtcatgaggacggagtcctcgtgaattgaatgagtgtccttataaagaagatcccagagagctctcctgacctctttgtgccatgtaaagacacagcgagaagtcggcagtctgcaactcagaagagggccctcaccagaacccagtcattctggcaccctcatctcagacttccagcctccaaaacagtgagaagtaagtttctgttgttataagctgcacagtctatggcacattgttatagcagcctaaattaaaacaattggtaaaatagaaattttaccattttctaactttgttataactgggtatgacccagacataatttgtttgcataccacagtaatttcttttacagtttatacattttgccaatgtttaactattaaaaaggtttaggtaaaaatacagatttacagcttctttcaaaagatcaaaagatc

SEQ ID NO: 58885 - DNA, 442 bp, Homo sapiens
  misc_feature 20, 33: n = A,T,C or G
gtaccggggccccccctcgngaatacttctagnattaattaagcggggataaattactcaaaaaaaaaatcctatttttcccttcaagtcaagcatcttggtgtttaaataaacttcctgttggaaaaaaaaaaaaagaagaacagggctgggtgcagtggcttagcacttttgggaaggccgacgcgggcggatcacttgaggtcaggagttcgagaccagcgtggtaaaaccgcgtctctgcatctctactaaaaatacaaaaattagctgggcatggtggcagttgcctgtaatcccagctactagggaggctgagaatgaggcaggagaatcacttgaacccgggaagtggaggctgcagtgagccgagatcgcaccactgcactccagcctgggcgatagtgtgagattctgtcgcaaaaaaaaaaaaaaaaaaaaa

SEQ ID NO: 58886 - DNA, 513 bp, Homo sapiens
  misc_feature 44: n = A,T,C or G
ccgggccccccctcgaaatacttctagaattaattaacgcgggngtgactaaggggaggaaaataaatatttgatttttttaactatacatggtcaattacagaggaagagatgcaacagaaagttgagaatataaatctaatgtaaaacaggacatctggtattaagggtaatggagaaaaggaaaaactcacccctctccagcaagaacaagcacagcccaagccagatgtacagcacacacagcatcccatggtggccaaagacaggcagcttcctaccttaatggcacagcccccgcaaactgtagtacaggtgcttgcagtgaaaaccacgcagcagctccctaaactgcagcaggctccgaaccaaccaaaaatctacgtgcaaccccaaaccccgcagagccaaatgtcgctcccagcttcttcagagaaacagacggcaagccaggtaacggaatattgatagcatgcaaagttaaacttctctgttcacggaaaaaaaaaaaaa

SEQ ID NO: 58887 - DNA, 541 bp, Homo sapiens
  misc_feature 25: n = A,T,C or G
ggccccccctcggggatcttctagnattaattaacgcggggggaagaaggtcaagtgcacggccccacagtacgttgacttcgtcatgagctccgtgcagaagctggtgacggatgaggacgtgttccccacaaaatacgagaattccccagctcctttgagtccctggtgaggaagatctgcagacacctgttccacgtgctggcacacatctactgggcccacttcaaggagacgctggccctggagctgcacggacacttgaacacgctctacgtccacttcatcctctttgctcgggagttcaacctgctggaccccaaagagaccgccatcatggacgacctcaccgaggtgctatgcagcggggccggcggggtccacagtgggggcagtggggatggggccggcagcgggggcccgggagcacagaaccacgtgaaggagagatgagccccccgggccggacaggggcacacgtgtgcaaagagacggtggtgtgtgttctctcctgcatctgcgtgtgcacacatgtgctggg

SEQ ID NO: 58888 - DNA, 639 bp, Homo sapiens
  misc_feature 16: n = A,T,C or G
ccgggccccccctcgngaatacttctagaattaattaacgcgggttgtttgtttatatataacaagagctgtcattaattggcttataaaaataagcacttaaaccaaatattattgtcagaaacactgacgaaacgcttcaatgccttgtttagtctcacactaatcttgtagataatctttgtggaaacaatagacatgtttgtaatgaatttatcggtacaaataatagatgtctctgaaaatgtatacatttggtactaaattaacgtcagatgtcagatttgttaaatgctttaaggtcaaactgtttctttgacttttgaaaattgtttaatttacctaccttaaagccattaaattctagatgaggcctgaggacatgtgtggttagccatgccccctagctattctggagagtcagctgttatctgcacttctgcttggtgtgtcctaagctaggctccacacctagtacataattaaaatctcaaacttactaaggtttccaccaaaaataaaagtttctaagagttaacattataacatgtaattaaaactactaaagaaacaattttgcatgcaagttgtgtaaagaaagtaaaatgtgttttggtgaaagattgtaagaagtcatgg

SEQ ID NO: 58889 - DNA, 589 bp, Homo sapiens
ccccccctcaagtctttgaataataacgcgggaaataaaaggccttgtaatcactgtgctctattgtctcactttctgggcctacttactggggctttgagtatttcaggcactcttgccccatcccctctgtcaccacccgcaagcctcatcaagcctctaatctggaggtgggtggtggtaaatgagcaagagggaacttgcttagtctcgggatccatctgtaggaacataacgttcttctaatatctgcagatacccagtttctgcaggataaatttcctcatggtctccccatagaagggcctttcctgctgttctcgatgagcagattaatgtagggcacaggtcttaccttctccatgttttccagttctgcctcttgcattgcacaggataaagctttccaggactaggcacagataatttcggaagctaagaaatagctgtgatggtgacaccaacattattctgtggattaatttggttatttagacctatttaaaagaatccattataggtattttatgtaatatttttcttaaatttgtagtcctgtgtgtggctttcatttgggctatgctattat

SEQ ID NO: 58890 - DNA, 575 bp, Homo sapiens
gggccccccctcggaagtcttctagaattaattaacgcgggtattattaaaattaatttcacctgtttcttttaatttttttaaacgtggctactgaaaagtttaaaattacatacttggttcgcattaacttctgctggatagcactgtcctgagcacctgaaagttcctggagccgccacggtctgagatggggaagactgtgttcaggcagctgggaggagagggtagattaggagtgcagttctggatgtgttgaatttgaggtgtaagttatgcctccaagaagaggtgaaaatagaccactgggtagacgaacttagagtctagagagaggtcggagctggagacctaaacttgagagttgtcagcacttagatgggtgcatagagctgtgagtgagtgcagatagagaagaggaccaagatcaaagcccttgtgcactcccatatctagaggtttgggagaagcggaagaatctgcaaaacggacagaagagaaatagcaaagtagaaggccaggagaatgtgatgtcataggagcaaagtgaggaaaatgtaaaaaaaaaaaaaaag

SEQ ID NO: 58891 - DNA, 547 bp, Homo sapiens
taattaacgcggggtaaaatattttcatttttttagggcctgttatctgtcatgtgatgctataccagaatcaggttggaatctggtatcttattgttacaaaaagtctgttttgtcagtcttaagttctctgttttaatgttactgctggtcagttgtacctgaattccaaacagaggagagcataatgaggcatgtccaacctacccctccaacccccagtccctgcttcctctcatggcctaaagtatcagtttttcgggttaactttgaatgcccccggccaagaggaggggtgcattcagttggttggggggcttagaattttatttctggtttacaacagtaatgatgtggcttgggtcttgagttgtcttcagattaataacctggcttttgggagtcagtggcagaagtaataatatggaggaggtccaacagcaggtgcaggacaagttagattattgttggtaacataacccgcagcacttctactatctccaggatggtctatatttaactaaattccaacttcacacacatcttc

SEQ ID NO: 58892 - DNA, 504 bp, Homo sapiens
ccgggccccccctcgaaatacttctagaattaattaaaaattcaaccatcatttctatacctaacttctgcaaaacttctatatgtaatatttcttaaaacctttactaattaagtaaccagcattactgtatttactgcagtattcttactaaaatgcatattcccattctaatctcataatccaaattcataatctcattctaatcatgagaaacccttagacaaacctaaattaagggacattcttcaaaacacccaaccagttactcttcaaagtgtcaaggacttgagtcatacgttttataacatgtattacaaaaacatacaaaggccaggtgccgtggctcacgcctgtacgcccagcactttggcaggcctaggcaggcggatcatgaggtcaggagttcaagaccagcctggccaacatgataaaatcccgtctctactaaaactacaaaacttagccaggcgcagtggcaggcccctgtaatcctagctactc

SEQ ID NO: 58893 - DNA, 442 bp, Homo sapiens
  misc_feature 46, 371, 372: n = A,T,C or G
cccccctcgagagtcttctagaattaattaacgcggggtggggggngaataaaacaggaatgtatatttaggtcatgttaaataaaatggctggaggaaggagggaagaaattaggaactgcagtacatcatcaccccaggtgtaagagttatttctctcccagtgcagaaaggggagtgtggcccctggctgtacctgagcttcctcttctccatccctgagacatcacagaatcacccgggttctgacctctccacttctagctctcactgacatctggatatcttgatgcactgcctgtttgtaacaacatatacttctttgctgaatgctaataaacttctgggttcaagagggaacccctcagtcnnaaaaaaaaaaaaaaaaaagacaaagcaaaaaaaaaaaaaaaaaaagaaaaaaaaacaaaaaaaaaaaaaa

SEQ ID NO: 58894 - DNA, 512 bp, Homo sapiens
actgggtaccgcggccccccctcggaatacttctagcaattaattaacacatggggtgatgagtataatatttagaactatatgcagcaaacgctacaataaggaatcaaaattcccacaaagtagattactttgaggagcacccgcaagcatggggaatatttcattggaagtctttttgtggctgaacacggaggctcatgcctgtaatgtgtgaagaatctttacaagaccctgctaaattcatccatgtagatacatagatgatattatgccagattctcaaatcactaaaacagatgctatggtctgaatgttagtgtgccattccccgccccctaccccaaagtgcaaatgctgcaattctgaaccccgatgcaatcgtattaggaggcacggccttggcaggtgattagatcaggacggtggagccctcacacaatgggataattgcccttgtcaaacagaccccaaagagctgacatgccccttgcaccacgtgaggacacagc

SEQ ID NO: 58895 - DNA, 560 bp, Homo sapiens
cccccttcggggtacttctaggattaattaacgcggggctctaatgagaaatgtaacatacctacttcctcattttcatccctgtttatactttggtgggcatagattgagaacagagtgcttgccttttataaagagaggaggaattgttgagtagaagaattgctcagctagtgttcagaaattgagatcacatctgagctcgaccgtttatttactggctgtcactctttgggcaagttattttatctctacacatttagttcctcatctatcaaatggaactttaacgtgtatcttgctggcttccttaccgaaaacatatatttgaaactgcttggcaaagtttagaatgctgaatagttgtaagatattaatgtgacatgaaattgagaaaaaaagtattggtgaccactggctacgtgaggatctgatgatatttgcacagtatgaagattccaagtattatttgaatctttatatttggtcatttagcaaaattcttttatggcactaaatccacatgtactattcttcttaaatcagtcttaaaataattg

SEQ ID NO: 58896 - DNA, 583 bp, Homo sapiens
ccgggccccccctcgagaagtcttctagaattaattaacgcgggtgaatcaagatcacgccactgcactccagcctggcgacagagcaaagctccatctcagaaaaaaaaaaaaatacatggggggagaaaaacttaaaagctatcttttcatctttcctcaaacatttaaaaaatattggcttttatgcctctatccaaaataaattttcaatttctaaaataaaaactctgttagtgaacatctactatttgtctgtactgtttttagtactatggatgtgctttttgtcatctacaaacaactgtgtaaactaagtgttgttatgccaattttacagatgaaacagctatagcgcaaaaaaggtaaatccttagcatgatatcacacagggagtaaaagttctggagtcatgttttgagcacagaattgctccaaagtcaagattagttccactccagtgcttgcccctctgagttaacatgagagtgtcctttcagtatcttcttcaaggtaagatacattctttactttgttaggattactagatgacaccaatatttataatttttaaatgactttt

SEQ ID NO: 58897 - DNA, 580 bp, Homo sapiens
cccccctcggaagtcttctagaattaattaagccgggaaaaaaaaaaaaaaaaaggttaaggcagaattgtaaaccaatacagagcccaaggtaaagatggaaagaatttttgcttccaggcatttatgaaaatctctttccaattattagctgattacccagctaatgtaacagacttcagtggctacacataacaaaaaatagagacttcatagaattagttcagaaaactcactaaaaacaaacaactacaacaagcccaatactacgaatcctttaaaaagtagagatctgattttcataattgctgatttataacatttaaaatgtctaattttcgttattattattattatttttgagacagagtctcactctgtcatccaggctggagtgcagtggcgtgatctcttctcactgcaacctctgcctcccgggtccagacgcttcttgtggttaagcctcctgaggagctgtccaccaccacacccagctaattttgtatttttagtagagagagggtttcaccatgttggacaggctggtctggagctcctggcctcgagtgatcctcctgcc

SEQ ID NO: 58898 - DNA, 400 bp, Homo sapiens
  misc_feature 19, 32: n = A,T,C or G
taccgggcccccccctcgngaatacttctagnattaattaacgcgggggtgggggaaaagaagagtattgtgcttattactcttctctggaggatcaactgcattttctttattaaaaaggattacttccctttgggaggccaaggcgggtggatcatttgagattaggagtttgagaccagcctgaccaacacggtgaaaccctgtctctactaaaaatacaaaaaaattagccgggtgtggtggtgcatgcctgtagtcccagctactcgggagatggaagcacgagaatcgcttgaacccgggaggcggagcttgcagtgagccgagatcgcaccactgcactccagcctgggtgacagagtgagactccgtctcaaaaaaaaaaaaaaaaaaaaaa

SEQ ID NO: 58899 - DNA, 506 bp, Homo sapiens
  misc_feature 10: n = A,T,C or G
ccccccctcngatctttagaattaattaacgcgggtcactgcattgcggaccggtgatctctgtgtttgcagtcaaagggcgtgcctcacacatggtcaagtattataaatgtcctgtgtatctgacaatggaatctattctacaatgtttgagtatacgctttctgtatatggccattaagtgaagcttaataatcttgtcttttctgtcctcatagatattcttatctgtggcatcctcctgtactctcaccattttgggaggctgaagatgagagggttgcttgaggccagcagttcaagacaaacctaggcaacatagcaaccctgtctctccaaaaaaaaaaaaaaaaaaattagctgagtatggtggtgtgcacctgtagtcctagctactcaagaggatccttgagcccagaaggctgaggctgtagtgaattatgattgtaccactgcatgacagcctgggtgacagagcatgaccccgtctccaaaaaaaaaaaaaa

SEQ ID NO: 58900 - DNA, 505 bp, Homo sapiens
  misc_feature 28: n = A,T,C or G
cgggcccccccctcgaaagtcttctagnaattaattaacgcgggaaaatagtagcaaaaaattagaatattttattttatttttgagatggagtttcgctgttacctaggctagagtgcagtggtgcaatcttggctctagaggactcaacatatgttactgatacagctcagttgtttatttgggcagtcaatacagacttcgaagtgactgaataattagcctctctaatgaatgtttggaacaacaccaccaagaatattttcaaacttgaataaacactaattcagttcaacctgaaatggaatctgctaaagaaacattacaactgatggtaaaaaaaaaaaaaaaaaaaaaaaatagatgtgggacagctaggcgtggtggctcacgcctgtaatcccagcactttgggagtcagaggcgggtggatcacctgaggtcaggagtttgagaacagcctgaccaacatggtgaaaccctgtctctactaaaaatacaaaaa

SEQ ID NO: 58901 - DNA, 334 bp, Homo sapiens
attacagttgctttttattttttctcctcgtctcttcagtcaagaaaaaacaatttacaagagcttaaaaaccaaattaaaataattaacaaaaagaaacacaaactccagtcccagttagctacaatccctttttaataaattccagtcttcattttaaacctagttagctcctaacacctatttttcttatatgcctgtgttaatgtttaggccttgtatactcaatgctgtaacccaaattgtttcctctcgcctaaaggctatcaagctccaaagggcaatgcaataaaaccacgcataaatacgcctttcttccaaaaaaaaaaaaaaa

SEQ ID NO: 58902 - DNA, 610 bp, Homo sapiens
ccgggccccccctcgagagtcttctagaattaattaacgcgggcagtgatccttggagaaaattacagtgtgagtctgcacacactgttgtgaccattcatgtgggagctgcacgttagccttgtttcctatctgccatcttcccccaatatccgatagtttgctttttgaaaagatcaacacaattgataaaccctctggttaaaaaaaaaaagaaaaagaaacagactcaaattactgaatcaggaatgaaaggggatattactaccaatctttgagaaataaaaagaattattagagaatactatgaacaatcatatgccaacaaattagattagttagatgaaatggacaaattcctaaaagaatacagtctacttaaactgattaaaggagaaatagaaaacttgagtcaatctataacaaattaaaatattaaactaataatcaaaaaaattgccaccagaaaaaaggtcagaaccaaatctcttcactggtaagttctaccacatatttaataagaataacactaattcttcacaaactttttcaaaaaatagaaagggaggagacatttcccagatcattctatgaggccagtatttacttg

SEQ ID NO: 58903 - DNA, 613 bp, Homo sapiens
  misc_feature 546, 578, 592: n = A,T,C or G
cggggccccccctcggggtacttctagaattaattaacgcggggccagcatttgagaaagcatatatcccagtgacttgagtatttgctatgcaacctcctggacgagaaactgggaaaaggcacacttccgcccacagttgtggacagcagcagtcacccgtctgaatgctttcattcaatgtgaagatgcagcttgaacaaaagtttctttttgtttgtttgttttctgagatggagtctcgctctgtcacccaggctggagtgcagtggcacgatctcagctcactgcaacaatggaatacatatatttaaataactgcacataatacaccctccatttttgttaccaagagaaagcttccatcaggtagctttaccaatacatttccattcccatgaaatgcaataccacagtactaatattctattcagaaaaagactacaattcccttgtaactctttttctttttcccttgtaactctgagttctttcttttaatcgttcaggccacataggtaaggccattttagaaaaggactgctntcaagtatctaaatatacttccggagggcggnggaggaatggagtncatttacacttgtcactctcg

SEQ ID NO: 58904 - DNA, 285 bp, Homo sapiens
  misc_feature 16, 24, 29: n = A,T,C or G
cgggtccccccctcgnaaatactntctanaattaattaacgcggggtataggcactgggtaaatattcactttccaaaagagaaaaattggccaaaacaaaggggctacaggctcatgtaagtccaagtccaaaaaccagcagggcaatcattaaatctcaaaactccaaaataatctcctttgtctccatgtctcaaatacagacaacactgatgtaagaggtgggctcccaaggccttaggtagaaccttacttatggctctgccagatacagcccctgtggc

SEQ ID NO: 58905 - DNA, 415 bp, Homo sapiens
cgggccccccctcgaaagtcttctagaattaattaacgcggggggaaataaatgggccagaaatagtaactgccatattggcctttttttctttttaacatatataacttgctctctttaggtagcaaatacctttgagtacattaagaagaacatttacccttaaattaggcttaagggttcacgtgcatcagggcctttaggaatgcagtatccttaaacacgaaacacacctaccaggggagtgcctcctgtctgtaaaaaagctgctttttgtttttctttttttttgagatgggatcccttctctgatcacctcaaatagtttgtctgaacctttcctctggcaatattgttttattctttaaaaatacattttttttagatagggtcttgctccaaaaaaaaaaaaaaa

SEQ ID NO: 58906 - DNA, 604 bp, Homo sapiens
cgggcccccccctcggaagtcttctagaattaattaacgcgggatgactacaattttacttcttattttccaatataaatgccttttatttctttttcttgcctaatttccctaccctgaatctacagtatagtgttaaatcaaagtggtaaaagtagctatcctcatctcattcctgatcatagggaaaaggcattcagtctttcactaataagtatgacattacttttgaattttttacagatgccctttaacaaattgaggaagttccttgccattcctattgtgttgagtttttttataatgatgggatgctggattttatcaaatactttttctgtgtctcttgggatgatcatgtggttttggtcatttattctattaatgtggtgtattacattgattgatttttggaagttacactagccttgtatttcctgggataaatcccacctggtcatagtatttcatctttttataaacaaactgagcattcctaacctgaaaatctgaaatccgaaatgctccaaaattcaaaacctttagagcgctaacctgatgtgcaaaagaaatattcatcagagcatttcagactttagatttt

SEQ ID NO: 58907 - DNA, 503 bp, Homo sapiens
  misc_feature 9, 83: n = A,T,C or G
acttctagnattaattaacgcgggagaggtcttgagcttcactacacaatgccccaggctctacatgcaccctctttatatantttctaccttggaaaaaaatttttatataatattaataatatatatttttatataagtaacacatatgtttattttatagatagatatagatatacatagataaagatctctagtcagccttttttaaggctgggctgatcgcggtgcctcaaaactataatcccagcactttgggaggccaaggtggccagatctcttgagtccaggagttggagatcagccagggcaacatggtgaaaccctatctttacaaaaattagctagtatggtgtcatgcacttgcagtccctgctactcaggagactgaggtgggagaatcgcttgagcacagtatgtgaaggcttcagtgagctctgatcacatgactgcactccatcttgggtgacaaagtgagaccctctctcaaaaaaaaaaaaaaa

SEQ ID NO: 58908 - DNA, 583 bp, Homo sapiens
ccgggccccccctcggaagtcttctagaattaattaacgcgggattctataaggtggcagagatttctgtgattgaataaaacaaataggtagacgcacctaactattatttattattattattattttggtgtaacttttagctattgaaaagtcagtcttgcagaagagagaacaccttgctgttttttgtaatttggtaaaatactgtcccttccatcagtatttccaattcagagggcttttgctgtatgggctttaactgacttagctgaataggaattaccatggggtattttggcagtgccatcattggtcacctgtttagcttctgagatgctagcaaattactcttagtttgttgtccaaaatattttgtgggaagaaggttagaaaatagaaataagtatactactgactctatcttatacatggaagttttgaggacaaaccacactccagttggtcatttaccctagattgtggcattgataccgtcttctatctctgagaagtagcccatagtaagcagtataaagaggaaggtgactggtggggcgtgatggctcacatctgtaatccc

SEQ ID NO: 58909 - DNA, 568 bp, Homo sapiens
  misc_feature 481, 489: n = A,T,C or G
cggggccccccctcggggtacttctagaattaattaacgcggggtttgtccttttgtgtctcgctcattatttcatgtagcgcagtattttcagggttcatccattttgtagcatatagtataggttgagcatcgctaatctgaaaatccaaaatccgaaatgctccaaattccagcactttctgagtgctgacatgacatcacaagtggaaaattccatatgtaagtacttaatgcaaaccatgtttcatgcacaaaattatttaaaatattggccaagcatagtggctcactcctgtaatcctagcactttgggagggcaaggtgggtagattgcttggggccgggagttcaagaccagcctggccggcatgctgaagccccgtctctactaaaaatagaaaggttagccagtgtggtggcacgcgcctgtagtcccagctgctcgggaggctgaggcatgagaatctcttgagcccanaggcggangttgcagtgagcccagtcacactactgcagtccagcctgggtgacagagcaagactgtccccccaaaaaaaaaaaaagc

SEQ ID NO: 58910 - DNA, 598 bp, Homo sapiens
ccgggccccccctcggaagtcttctagaattaattaacgcgggggcagaggagaggagcggccggagcgagacacttcgccgaggcacagcagccggcaggatggcgaccgtggtggtggaagccaccgagccggagccgtccggcagcatcgccaacccggcggcgtccacctcgcctagcctgtcgcaccgcttccttgacagcaagttctacttgctggtggtcgtcggcgagatcgtgaccgaggagcacctgcggcgtgccatcggcaacatcgagctcggaatccgatcatgggacacaaacctgattgaatgcaacttggaccaagaactcaaactttttgtatctcgacactctgcaagattctctcctgaagtcccaggtgaggcttccgctcagtgttggtcagcctagaattccaaaggacaaggagcaagctagaaagctttgtctgaggcagcaaaaagactctcctattgctaaaaggatactttgtatttgttattatcaactaggttagccagcagccacagtttaggaagtcactctaggttatcactgtgtgggttatctattttgtggattcttaatga

SEQ ID NO: 58911 - DNA, 559 bp, Homo sapiens
  misc_feature 37: n = A,T,C or G
ctgggttaccgggcccccccctcgaaatacttctagnattaattaacgcggggggattttggccctttaagtcctggctactttgatggctctttgatgccctcaaataaatgtttcttttttatttgtttggggttttttgttgttgtagatccatcgtttgtaggtatttggggtgccaggttttgtggtctttgcaacccttgtggtcattgtggccttgatattaatcttcgtggtgggtcctcgccatggacagacaaacattcttgtgtacataacaatctgctctgtaatcggcgcgttttcagtctcctgtgtgaagggcctgggcattgctatcaaggagctgtttgcagggaagcctgtgctgcggcatcccctggcttggattctgctgctgagcctcatcgtctgtgtgagcacacagattaattacctaaatagggccctggatatattcaacacttccattgtgactccaatatttatgtattctttacaacatcagttttaacctggtcagctatttcttttaaggagtggcaagatatgcctg

SEQ ID NO: 58912 - DNA, 537 bp, Homo sapiens
attaattaacgcgggtcaatctagttggggtgttgatattttcactgggttcctcagagagatggcctctctgaaaaagagatggatcagattagagatttaaaaaaatatcagtcagaaataatctccaagaatattagaaccactcttaagatgccaccctctggtaattcccttattccagcaattgcctcaaagcatctcatgaacagcttttggggaaagtcattagataattattcacccttttcttcagcttgtgcttagactttctcttctcttttgaccgtccagattttttgtgtgtggccatgggctggctgtttttgctgctggtgagtccattcacacgctgactcttgcctccgatgattcctcgacatttctcaaagccacacttacaaagttgctttgaagaggagagaataatttttttatttttatttttttaaggcagggtctttcctgtcactcaggctgaagtacaatagtatgatcatggctcactgcagtctcaacctcctgagctcaaccgat

SEQ ID NO: 58913 - DNA, 511 bp, Homo sapiens
  misc_feature 16: n = A,T,C or G
ccgggccccccctcgngaatacttctagaattaattaacgcgtgtggggtaggggagggatagcattaggagaaatacctaacgtagatgacgggttgatgggtgcagcaaaccaccatggcacgtgtatacctatgtaacaaacctgcacgttctgcacatgtatcccagaacaagtataataataataaaaaaaaaaagaaacatggctttgcatgagaaaagcctattgaatgtctcagagatggacatgttaatgttgccttgagtagaaagatctggatactgatctccagctccccgctctttcagttttggattctactgttacctaatgtgtttaaagccatattggttagcagggagtagtgatcccagctactcaggaggctgaggtgggaggattgcttgaacccaggaggtggaggctgcagtcagctgagatcgccccactgccctccagcctgggcgatagagtgagactccatctcaaaaaaaaaaaaaaaaaaaa

SEQ ID NO: 58914 - DNA, 576 bp, Homo sapiens
gggccccccctcgaaagtcttctagaattaattaaaatgcaagagttaccttgaatattttctttcaaattagttacgttgcatttttatcattttataaattttctgtttttctctactattttaatacttaagtgcaaaaaaagtaattttcttaacagtattatcattaatattcatatatatttatgtttaaagatcatctttcaattcaatttatataaatatgtatgtttgaaacatcattaaaaggtttaaaattatttttcttgtgcaatatttatcttaaattttgttatttctgattttcaaatatatttatagacataaaatattttatcttttattttaacatgaaaagaaattagcacatatctgagactcttgagactttaccaaatcattttatttattttcttttctcataaaaccaacttgtctcctataaatgaagcaaaatggagcttattctttgatggcaaatatatgtttgtttctctatattctaaattcaggtttgatttgtgtgcatgtgtatgtgtgtataacagaattattcattttgttatacaaact

SEQ ID NO: 58915 - DNA, 611 bp, Homo sapiens
cggggccccccctcggggtacttctagaattaattaaatctttaccttagcacaagggaaaaaaatggaatttgcctaatataggtgatgaagcatacacaatgaatagaaacaatcacattttagtaaaaggcaaaaatttgagacttataagctatatggtagcttatttttgggtggggaagaaatgagaaaagaatataacatctcttactggcatgacacattttgataaaaaatcttattgtcctttcctactagaatgatccactgtaaggcaaaaataatatacaagcaaagttttttttttggagacagagtctcactctgtcacccaggctggagtgcagtggtacgatcttggctcactgcaacccctccctcccgcgttaattaacgcgggatgtttttgtttaataaggtttcatctggagggagggaaataattcttatattattctggttttgcctttaaagatgtcttgttacagtactctgcaagctgtttcagaaaatttctcactcatcttctgtgtagggagtgtggtcagtttataagaaattattgtcaattacaaactttagtctttatttctacagctaaccactac

SEQ ID NO: 58916 - DNA, 376 bp, Homo sapiens
gggccccccctcggaagtcttctagaattaattaacgcgggcaggaatgtgattcttcatcttccaagtgactaggtctcattgtgttgtccaggctgatctcaagcccctggggtcaagtgattcttccgcctctgcctccgaaaatgctaggattataggcatgagccaccatgcccagccaattttttttatattgttccttatctatgatttatttaataaggaattaagtgacagatcacttcaagaaataatacatttttgactgtattattttgttttcattttggaaataatacatgtttattacagattatttggaaaatgcagaaaaataaaagataaagaaaataaaagccaaaaaaaaaaaaaa

SEQ ID NO: 58917 - DNA, 566 bp, Homo sapiens
  misc_feature 41, 286, 458: n = A,T,C or G
agagtacttctagaattaattaacgcgggtctgtcttttgnacagctaaaactaagaagatagaaagaaagatatttttcctgccccacagtgtcaatttcagtctagtggaatggtactgatatgatttggctctgtgtccccacccaaatctcatcttgtagctccccataatccccacgtgttgtgggagggacctggtgaaagatgattgaataatgggggcaggtctttcccggtgctgttcttatgataataaaataggtctcatgagatctgatggttntaaaaactggagtcgccctgcgcaagctctctctttgcctgctgccatccatataaagatgtgacttgctcctccttgccttccaccatgatttggaggcctccccaccacgtggaactgtaaatccaataaacctctttcctttgtaattgcccagtctcgggtatgtctntatcagcagcatgaaaacggactaatacaggtacaattaaaatacttacgtataccatcacagaatcatactgaaaactgcaaaacaaatcaccaaaaaaaaaaaaaa

SEQ ID NO: 58918 - DNA, 387 bp, Homo sapiens
  misc_feature 24: n = A,T,C or G
gccccccctcggaagtcttctagnattaattaacgcggggtcctacagaaacattctgccaagatggatcatatgttaggctacataaacaactcttaacaaattgttaaaagtactgcaactcatctctagagtattccgtttcggacaacaatgtcactcgaacttatatatcaataactaggaggaatcttggaaaaatcacaaatacgggaaaattaaacaacaatctcctgatcaaacagtgattcatagaaggacttaaaaggaaagtttaacatatttcaagacaatacaaaaatgaaaacatattttatcaaaatttatgagatgaagcacaagtggtctttagaggaaagtatacagcattataaaaaaaataatgca

SEQ ID NO: 58919 - DNA, 343 bp, Homo sapiens
ccgggccccccctcgaaagtcttctagaattaattaacgcgggtctgcttccaagaggcaccttgaatgctgagtcctccagaggtgagaaacgctgtgtcctaacatggtggaaaggacagagaaacaaaagaagaaaaccaagctaggtaggtccctcaagtcctttcataaggtcactaatctcactcatgaggggggtcttccctcacaactcaatcatctcctaaagacgccacctcttaatattaccacattggggcttaagttccaacatgaattttggaggagacgcaatcattccaaccatagcaaatatactttactaaaaaaaaaaaaaaaa

SEQ ID NO: 58920 - DNA, 594 bp, Homo sapiens
  misc_feature 474, 498: n = A,T,C or G
ccgggccccccctcgagagtcttctagaattaattaacgcgggggggaaaaagacttattatattgcctccctttatacatcaaacccaagttttggatgatttgcacaccctgaacatctggatcttctgggccttaacttcggagaagatattataaatcaaggactcggcaattttaagtgttaaaaaggggcagagttaaactgggatctatccaaatcatacttagacataagtaagcaaaggagcaaacaagcaccaaactgcttaattcaagtcggaagtattttagagcttacgcttatagaaaacattagggcagcaaaatgtctgcctgtagtctcattagcattcctgcaaagaggtggatgagaataaacttccccagggtaagagacaccaaggagggttcccaatagggattctgtaatatgactacttcctcttttgagagattttgaaagcatacttntaagattttgttgctgaaccacantaaatagaccattaaaaagtagacccacccattgagttagtgctagtggaatatgtccttctggaagtgccatatggagataaaagaaaaaaaaaa

SEQ ID NO: 58921 - DNA, 430 bp, Homo sapiens
gcgggccttcccacaaggatggctgcgaatagcccaacagtgaagactgcgataaatgcctaactcttcaaaacccatacactgaagaacatctactagcatcaaaaccatccacgaaaacatgagctcaccgaatgaaataaggcaccagttaccagtcctggagaaacagagatatgtgacctttcaggcagagaatttaaaatagctgtgaagagactcaaagaaattcaagaaaacacaaagaaggaatccagaattctattagataaattttaaaaagagactgaaataattgaaaagaatcacgcagaaattctggagctgaaaaatgcaactggcacactgaagaatacatcagagtccttaatagcagagtggatcaagcagaaagaatttttgagcctaaagacaaacaatttgaaatgaa

SEQ ID NO: 58922 - DNA, 535 bp, Homo sapiens
cgggccccccctcggggtacttctagaattaattaacgcggggtgatgtgataaagtagttggttagattttggttctcataagtccggggttgtgcacttaatagataaaaataacagcctatgtcctgaagttgttttcagaaatctggttagctttcttgcaaaaagagtggtattgagccaaggggaataggaaaagagtagcaatagctcatttgaagccttcattcctaaaaaacaccacaagttcgtgtcctgtccaatggtgacttagtggcattatcttcatttcataacatttttttccattaaagatatttggattatattcctacttctgaattgctctttgaatcacagacgtttttctgaggttcagcttaacgtattgctacttgaatctgattttatcaagtactaataggatatgaagcattaataggaattatcattagtgaaataggccaggctcagtggctcatgcctgtaattccaacactttgggaggccgaggcaggcagattgcttgagcc

SEQ ID NO: 58923 - DNA, 278 bp, Homo sapiens
cccccctcggggtacttctagaattaattaacgtgggcatctctagggtgagagaattaatccattgccaacccctcattccatctctcacctctcctccccagcacccttgtctgtttttgaatcctagcccaagcagagatgctttcagagtttgaggagaaatgacttcccttatggtttacaggccagaaataagcggaaacaagagaccaagagcttaaagcagaaggaagctaagaagaaatccaaggctgagaaagaaaaaaaaaaaaaaa

SEQ ID NO: 58924 - DNA, 337 bp, Homo sapiens
  misc_feature 28: n = A,T,C or G
cgggcccccccctcgaaatacttctagnaattaattaacgcggggggggggggaggggaactgttatctcccaaaattaaccttcacttttaaaaaattattgtacatgtgattttttttttttcctgttcatacatttgtgctgcccatgtactcttggcacatttcaataaaattgtttggaaaataaaaaaaaaaaaaaaaaaaaaaaaaaaaaaaaaaaaaaaaaaaaaaaaaaaaaaaaaaaaaaaaaaaaaagaaacaaaaaaaacgcccaaaaaaaaaccggatataccccccctccactgaccgatgtttaacaacgccacaacataaa

SEQ ID NO: 58925 - DNA, 298 bp, Homo sapiens
cggggccccccctcgaaagtcttctagaattaattaacgcgggggaagtagtctcgggtatgctgttgtgaaattgaaactgtaaaagtagatggttgaaagtactggtatgttgctctgtatggtaagaactaattctgttacgtcatgtacataattactaatcacttttcttcccctttacagcacaaataaagtttgagttctaaactcaaaaaaaaaaaaaaaaaaaaaaaaaaaaaaaaaaaaaaaaaaaaaaaaaaaaaaaaaaaaaaaaaaaaaaaaaaaaaaaaaaaaa

SEQ ID NO: 58926 - DNA, 610 bp, Homo sapiens
ccgggccccccctcggaagtcttctagaattaattaacgcgggcccgcccaccctcacacaccccttacctcccaatccccacagtctgcggctcgccttataccacccccccactctcctctctgtagaagcgggtacctttttgcgggacacttcgctggctgtgttgtttttgaggctttgggggctgagaagagcagatgaaaccctaaaatatttcatttaagagagtcttggcgaatgtgttttggccttggggtagcagatgaaggttatatttggcagttatattgaagcgattattgacccacagatggatctgggagagatgatcaggattgtattcgctcctgacgtacaaagcctgatgctttgacttctcagcagcccctaaccttccagcaatgggagataaagtgtgttctgtggctctcttctcttacactaaaaataatgattctcaggtgggttcagtcgtctttaataaaccagacagtcaagaaaagacaccatgccactttggaatctcaaaaacaagttcattatctccggctttgatatttgttcccagtggtggagcctgtgcagcggagtctttgttcacgggct

SEQ ID NO: 58927 - DNA, 461 bp, Homo sapiens
cgggccccccctcggaagtcttctagaattaattaacgcgggggagactatctgccctcaatgttggcgggcaccatccaatcagccagtggccaggagagaacaaatacttaagacaaaatgggctgggatcggtggctcatgcctgtgatcctagcactttggagggtcgaggtgggtggatgacctgaggtcgggagttcgagaccagcctgaccagcgtggcggaaccctgtctctgccaaaaatgcagaaattggccgggcgtggtggtgcacgcctgtggtcccagctacttgggaggctgagacaggagaattgcttgaacccaagaggcagaggtcgcagcagtgagccgagatcacgccactgtattcagcctgggtgataagctgagactctgtctcaaaaaaaaaaaaaaaccaaaaaaaaaaagcggccgccaccgcggggagctccaa

SEQ ID NO: 58928 - DNA, 488 bp, Homo sapiens
cgggcccccccctcgaaagtcttctagaattaattaacgcgggctaatttgcagatgtctttacatatttcaatacagaaactataacattcaatagtgtgctgtcaaagtgtgcttagctcacctggatatacctacattgttaaatgtctaaacagtaatcattaaaacatttttgattaaaaaaaaaaaaaaaaaaaaaaaaaaaaaaaaaaaaaaaaaaaaaaaaaaaaaaaaaaaaaaaaaaaaaaaaaaaaaaaaaaaaaaaaaaaaaaaaaaaaaaaaaaaaaaaagggggggccccccccgggggggaccccaattcccccttaaaggaagtattttacccccccccaatggcccgttttttaaaaacgtgggaatggaaaaaacccggggttacccaaattaaaccccttggaaaaaaacccccttttcccaagtggggtaaaaagaaaaaagccccccccaaaccccctttccaaaaa

SEQ ID NO: 58929 - DNA, 381 bp, Homo sapiens
ggccccccctcgaaatacttctagaattaattaacgcgggtcccttttcttggaaggcttgtactatggccatgacagtgacatcgccctcaccatgatccctctccaaagtggttgtctttctttaccttgtgtcttctcttgtaaaaatgaaactcaaaaataaaataaatgtgtcaattttgaaaaaaaaagaaaactgaaaaagctaacatgaattgtgtgaaattgcataatgctgtaatgctaatctacaatatgtaatgctatcttgtatgttgaatttgttaatgcaccacacaagtgcaaaataaagactgattcacattacataggcaaaaaaaaaaaaaaaaaaaaaaaaaaaaaaaaaaaaaaaaaaaa

SEQ ID NO: 58930 - DNA, 589 bp, Homo sapiens
cgggccccccctcgaaagtcttctagaattaattaacgcgggaacaaacaaaaaaggtagttaagcaaaaatatgggaaaatacaataggcttcccttgtcttgagttgtctaaattatgtttgacacctgaagcaaggatatagctgtctgacatgattctaaatgtgtgtacaggaaacactgtaagatgattatattacaaatggggtaaagagccataaaggaggtaagacttctacacttcactcaaactggttaaatgatgacaacagtagactgtaataaattatgtatatacaattaatagctagagcaaccaccaaaaaagatacacaaagagatacactcaaaaacgaaacacatgaatcaaaatagaattctaacatcgcttgctgggtatggtggctcatgcctgtaatccagcattttgggaggttaaggcaggagtattgcttccgtccaggagtttgagaccagcctgggcaacacagcatgttggcaacatagcaagaccctgtctctacaaaacatttttaaaaattagccagatgagctgggcacgttggcccacgcctgtaatcccagca

SEQ ID NO: 58931 - DNA, 584 bp, Homo sapiens
  misc_feature 28, 65: n = A,T,C or G
cgggcccccccctcggggatcttctagnattaattaacgcgggtcctgggaccaatcccccacanataccgagggatgactgtgtatataaatgaaatcaataggatgagtgagttagaagtgtgggatagaagggaatttggcaaagtaattctaaacttcacttaagagaataatgcaatgaaaacagtgaagacatatttggaaaacgaataaaatttgacctaatgatatgttctataaaactacaactttaacaggatggtactggtgtgaaaatcagaccaaacaattaaacaaataaagagtacagaaaggatgtattttattaaaggacatattttatgtatttataaaaattcagtgtaagataaagttgacatctcaaatcaaaggcctgaattgcagattgtttactaaacattgttggaaaaatgtactatccatttgttaaaaggaatacataccttaaccaaaaataaatttcatattgctgaagagttaccttcaaatattacattgtaaaaagaaaatcagcaatagtcacaatcgtcatctgacagcagaaaaaaaccaagccaata

SEQ ID NO: 58932 - DNA, 423 bp, Homo sapiens
  misc_feature 28: n = A,T,C or G
cgggcccccccgtcggggtacttctagnaattaattaacgcgggatcatggcagaaggcaaaggaggaacaagtacctgcttcacaaggcagcaggagagagagcaagcacacaggggaactaccagttttaaaccatcggatctaatgagaactacctcactatcacgagaatagcatgagagaaccacccccatgatccaatcacctcccaccaggtccctgacacttggggattacaattcgagataagatttgggtggggacacagagccaaaccatatcagaaatgatatagcatggtggctcatgcctgtagttgcagcaatttgggatgctgaggcaggaggattccttgaggccaagagtttaagaccagcctgcgcaacatagtgagaccttgtctctaaaaaaaaaaaaaaaa

SEQ ID NO: 58933 - DNA, 348 bp, Homo sapiens
  misc_feature 39: n = A,T,C or G
aaactgggtaccgggcccccccctcggaatacttctagnattaattaacgcgggtatataataaaattcttttgtacaaaataaaaggaagaaggtgtagtatgttagttatggttctccagagaaacttaatgaggaattgtctcacatgattatggagactgaggagtgccacagtctgccatctgcaagctgcataactggaataagccagtggccacgggtgtaattcagtcagagtccagagacttgagaatcagggagtcaatggtatgaatttcagtccaaaggtagaagaggaaataagctgacccagtgcacgcagtaaaacggaaaaaaaaaaaaaaa

SEQ ID NO: 58934 - DNA, 625 bp, Homo sapiens
cccccctcgagagtcttctagaattaattaacgcgggcaatataacagttcatcatatctgtattctcaatctctctctctctctttctctccatatatatatatatgcacacacacaagaccacacacactttatttttgctataccatttaaaagaaagtgcatatttcgtaatatttcacacctattcatcagctggtatcttctaagaacaaaaaaacatttttcttcataaacaggattctacataacatgattcagtaatatcactgtatcagtttacaaatgatacataaccaatcattcccaaaattcaatagcttaacataaccatcatatatcattgcttacacatcaacgagccagctaggtagttctgtcctagctgggttaactcatatgtctgtggtgaattttgctgatctaggctaagctctctgacaagtttgggggttggcgggatataagatggtctaggatggcctgagctgagacaactgacctttcttctaccaactctttcaccctccaggatagccagggctagatcggacagcaaatgtcatagttcccaagggagtataagcatgcaagaacttgtgcctgtgctccaaacggacacac

SEQ ID NO: 58935 - DNA, 213 bp, Homo sapiens
taattaacgcgggctttaaagatggaggaaggggcccggaatagaaaatagaaaaaattagtgacgagtcaaagttaaataataacctgtatttttctctcataattctggagtccaaaaacctgatgtcatttccactaagctaaaggcaaggtgtgggcaagaccacactctctctggagactctgggggagaatcctttttgccttttgc

SEQ ID NO: 58936 - DNA, 483 bp, Homo sapiens
cggggccccccctcggaagtcttctagaattaattaacgcgggtcggtggtatgctggagccagttcataccagcttgccagagccaattgttaaatttttgggaatcttgtgatccagtagctaaacagtcattattaaaagttaaattattttaacttacaagtaaacacattatattaaaaacaaacgttggccaggtacagtggctcatacttgtaatcccagcactttgggaggccaaggtgggaggattgcttgagctcaggagttcgagaccagcctgagcaacatatggagagcccacctctaaaaaaaattttaaaattttttctgggtgtggtggtgcatgcccgtggttccagctactcagggagctgaggtgggaggatcacttgagcctgagaagtcaagctgtgaatgtaccactgcactccagcctgggtgacagaatcagacctggtctcaaaaaaaaaaaaaaaaa

SEQ ID NO: 58937 - DNA, 289 bp, Homo sapiens
  misc_feature 44: n = A,T,C or G
cgggccccccctcggaagtacttctagaattaattaacgcgggnaagaaactgactcagcggactccgctgagtccacagccccgctcccagatgtaaagaacgcgacttccacaaacctggattttttatgtacaaccctgaccctgaccgtttgctatattcctttttctatgaaataatgtgaatgataataaaacagctttgacttgaaaaaaaaaaaaaaaaaaaaaaaaaaaaaaaaaaaaaaaaaaaaaaaaaaaaaaaaaaaaaaaaaaaaaaaaaaaaaa

SEQ ID NO: 58938 - DNA, 602 bp, Homo sapiens
gggccccccctcggaagtcttctagaattaattaacgcgggggatttcctcaacatggctgcttgcttcatcaagtcagcaagaatagcctgtcatatcagtgtatatcaggctcactcaggataatttccctactgatgagccaaacactaactgattttagagcttaactacatctgcaaaattctgttcaccagaggcaagtcatattcagggaaagagaagtgtacaaagtgagaacaccaaggtgcaaaaatcactggagctaccattataattgtagtaataaaattctcttctaatactaggtctcaaagtttcattgtgaatcaaagttcaattttacaaagtaaaaattacttattttgcatctattgagatgatcatttaagaaaccatttgttacttgtgttgaattgcattacattatttactcttgttaatctaaccttgcatttgtccgataaactgaacttgattgtgataatactttgtttttattcattgctacttttggtatgttgatattctgcttaggactcttttaatctgtcttttcatgtgatgataataaagagaattttcaatacttcaaaaaaaaa

SEQ ID NO: 58939 - DNA, 361 bp, Homo sapiens
taatgaacgcgggcggatgacccggacttactgggaattgctcgagcgtggggattaattgacaatccccgatacccatcaggaatggggtttatcgggttacccccacctgccggaggcgggcaagcacacactgagtcagtcagtgtatcccgcgtgcagtgccctgacatttaaaggcataagaaacatgtgattgctcaatctcaggtggctgaacgccacttgttcatctaagaagttgggggacgcctaacgttcgggggtcgcgtaactagttaggatgccatgatctcgttcgttatcggaattaaccagactaatcgctccaccagactgataacggccatgcaccaccacc

SEQ ID NO: 58940 - DNA, 598 bp, Homo sapiens
cgggcccccccctcgaaagtcttctagaattaattaacgcgggggggagagggatgggggagatgacggttaaaggttacacggtttcctcttgaataacaaaaatacttgagaattgccgtgagggatatataactctgaatatattaaaggcattgaattatacactttaaatgactgaattgtgtagaatgtaaattatatctcaaagaagctgtttaaaaaaagttaatgccctcaacttaaaatggcaaagtaacaggaaagtgacttgttataaaaaaaaatacaataaaagtcaaaattctccttaaaccctataatctctctgctgacagatctgaggacccaccttctctgttaaaaaagggaatgcaaaaatgaactcacttgcacacacactcaaagggatacagtaaaaaaaaaaaaagacagataataacaagtgttgaaaaggatgtggagaaactgtaatcctcgttacattgctggtgagaatataaaatggtgcagcaactttggaaaacagtttggtgcttcctctgtcttaaggatagaattatcttatggtctagcaattcttctttttttttttttt

SEQ ID NO: 58941 - DNA, 308 bp, Homo sapiens
  misc_feature 31: n = A,T,C or G
taccgggcccccccctcggggatcttctagnattaattaacgcagggctcaatacagaggactccctgtaagttgatgtccttgaagagtaccaaaaagataaatctgtaatggaccaaaatcccagtgtagattgaaaagtgtgatgtatagaacccatgacatttattttgtaaaccgacatgaaaagtggctttaataggcaaaagatttctaaagagaaaaacataaaaacaaggatgataatatctgaaatagtaagacaagccccataaaacaaaggctgataacaccaaaaaaaaaaaaaa

SEQ ID NO: 58942 - DNA, 402 bp, Homo sapiens
ccgggccccccctcggaagtcttctagaattaattaacgcggggtacagtgagcacacgtcttacctgctgttgattggaattcgactaaattcttgttagacatccaaatattatttaccttctgggtctcagtttctaacagccttgatcattgccattcataaaatgtgttaaataagaagttaaagacactgcaaaaaaagaaaactatggaccaatattctttatgaacattgataaaatccttaacaaaatactagcaaactgaattcggcagcatattaaaaagattttacaccatgaccaagtaggatttattcccagagtgcaaagataattcagcatacaaaaatttgtcgatgtaacacaccacattaaaaggaaggaaaaaaaaaaaaaa

SEQ ID NO: 58943 - DNA, 576 bp, Homo sapiens
ccccccctcgggaggtactgtctacaattaattaacgcgaggaagaacactacgtaacagggcctattataaagatacagtcacggagacagggcggcattgatgcaaggatggacagactgaccgatggtacagaacagaaagcctaaaattagaactgcatgtaaaatatcatgggacttatgatcaaggtgataatgcagtgcagtgggaaaaggatgaccttgtaaataaatggtacagggttgagtatccgtatcaagggaaatgtgtcttaatccatacctcacatcacatacaaatatcaatttcagatggactggaactctaaatgtcgaaggcaaacaataaaacttttagaagaaaacagtagaggacatcttcatgatcttagagtaagcaaagatttcttaaatagaaaataaaaggtactaaacaaaggaaaaaattgataaattgaattataagattaagaatttctgttcattgaaagacaccactgaaagagtaaaaaggttgcttgatatcgtcataaaaataaataaataaataaataaatctaaagagtaaaaaagg

SEQ ID NO: 58944 - DNA, 587 bp, Homo sapiens
attaattaacgcgggaaatataccaacaagtgtacaatgagtacctccagataaagtcattgataattttgaattctctttttacttctttatattattaaaaattctaaaatgagcatttttacttttgaaacttaaaataattacaggtgtatttatttaaaaaacacatattggatctttactatgtgtcaggcattttcccaggttctgggaataaaacagtgaacaagagagacaacatcagacatcgagagtagaatgatggttacctgaggctgggaagggtagtgggcaagtggggaggaaatggggatcgttaatgggtacaagaagtacagtaaataagatctagtattcaacagcacaacagagtgactatagacaataatgatttaattgtacattttaaaataaatgtataattggattgggtaacacaaaggacaaatgcttgaggtgatgaatattccatttaccctgatgtgattattatgcatcatatgcctgtatcaaaatatctgtcatgtgacccaggaatatatacacctaccacctactatgtaataaaaaaatgggaaatgaac

SEQ ID NO: 58945 - DNA, 615 bp, Homo sapiens
cgggccccccctcggaagtcttctagaattaattaacgcggggctgaataacataatgcttgaaaagaacatatatgtatatatcttatagacattcttataggagtgctggttataattaagtgttatcaacatgtgaggctgaaaatgcagtccatgtaaagcagtagagatatgcttctcagaatctgtctcttcactttgttagtcatccttattaaaaaaaaaaaaaaaaagaggaattgggaaaaaataaatttctaaatcttctcccaaaataagattgttatatctgctgtaataaatctgatagcccttataaaattttggcatgttaaagtggaaaaatatataataaaatgttgtatttgctccaagcacatcttttacattcatctttatttttaaaaacaaactttcaaagtttcattttgtgctatacgttccccatttaagtttgttccagtgctctaaattagttaatgtgaccctacatggtctgtatttttcttttttacagtacagaaaattaatagctagaaactagaagacttaccatgttctagacaaaattctgagtactccacaggcaatttgagtccagagcccccagcc

SEQ ID NO: 58946 - DNA, 542 bp, Homo sapiens
  misc_feature 519: n = A,T,C or G
cgggccccccctcgaaatacttctagaattaattaacgcgggttcactctgatggtagtttcttttgctgtgcagaagctctttagtttaattagatcccatttgtcaattttggcttttgttgccattgctttttgtgttttagacatgaagtccttgcccatgcctatgtcctgaatggtaatgcctaggttttcttctagggtttttatggttttaggtctaacatttaagtctttaatccatcttgaattaattttttgtataaggtgtaaggaagggatccattttcagctttctacatatggctagccagttttcccagcaacatttattaaatagggaaccctttccccattgcttgtttttctcaggtttgtcattgtgcacatctaccctaaaacttaaagtgtaataataataaaattttaaaaatgatatatatatatcccattatatatcatataattatatatatatcccattatatatcgtacaatgatatatgaaaaacaaatntggatcatactctcttaatttct

SEQ ID NO: 58947 - DNA, 549 bp, Homo sapiens
ccgggccccccctcggaagtcttctagaattaattaacgcgggggaggggggataggaggtcccctttcccctaggtggtctcataattccatttgtggagagaacaggagggccagatagataggtcctagcataaggcattgaggtgagggatcattttgggtcatacatcaatgtccctgtcccccctgggtccagccaagctgtgccccatcccccaagcctactgggaggatccagccaaatcttgcgactcctggcacacacctgtctgtaacctgttttgggctctggaagccaatagtcctgagttgaaaatacacataaaacatattatgagcattatcttatatatagcttgaatgtactatattttcttaagcagtgtgcatttctttcatactaaaaatatcgataaataaaatatactaattactcttaaaaaaaaaatttttttccactgaaaatgagatgtttccttaaggcatgtgtgcatcatgtctaaagtacccacttccagatttataaaacctatgaaaaaaaaaaaa

SEQ ID NO: 58948 - DNA, 274 bp, Homo sapiens
  misc_feature 25: n = A,T,C or G
ctgggataccgggcccccccctcgngggtacttctagaattaattaacgcggggagatgggaaaaggcaggttaggggctccgcagcctgagtcatgaaggggcctccgtggagatcatgggctacaaagattttaaatattgttgggaaaactttgtgtacaatgatgatgagccattcaagccttggaaaggactaaaatacaactttctattcctggacagcaagctgcatgagattctcgagtgaggggtctccccggacctgatgggct

SEQ ID NO: 58949 - DNA, 621 bp, Homo sapiens
cgggccccccctcggaagtcttctagaattaattaacgcgggcatggtgacacaggcctttagacccagctactcaggagactgaggcaggagaatcacttgaacccaggaggaagaggttgcagtcagtcgacatcacgccattgcactccagcctggcaacagagcgagacgtgtctttaaaaaaaaaaaaaatcagatagcagtttcatatgactagaggctgtgggctgatcagatcctgaaaaaccgggcatggaccaagctggctaagaccaagtggacccaacatggtgctgaatttgtcctaggtgaccagcaccatgaattccgagaatacctacgtttggtgtaaaaatggatggcatcacaattctaagaaatttccaccctttcccaggaattttcataagtattccaccccttggctaaagaaacacataaaggtagcagccccaaatccccttaggcatggtgctctcttgagtccgcctacactccccctttcttgagtgtgtacttttcccgttgttataaatctctgtacttccactgttgcctgactcatccttgaattccttcttgagacggtgtcaagagcctggacacctgccgggatca

SEQ ID NO: 58950 - DNA, 428 bp, Homo sapiens
  misc_feature 24: n = A,T,C or G
gccccccctcggagtacttctagnattaattaacgcgggggagtactggaaaaaaaaaaaaaaaaaaaaaaaaaaaaaaaaaaaaaaaaaaaaaaaaaaaaaaaaaaaaaaaaaaaaaaaaaataaaaaaaaaaaaaaaaggcggcctcccccaaagttggacccccgcccccccccggggggggcctttttttcccccttttgggcgcgtttttcccccccttttgggggggggatttccctgccgtgccgcatgggaaaaccctggggttcccccctttttttcccttggggcttttcccttttgggcccgttggttttttcctttaaaggcccctgcccatcctctttggcaaagggtacccccccggttgggatttgggaaatttccccgttaattttttggtaaatcccccctttttttttcc

SEQ ID NO: 58951 - DNA, 458 bp, Homo sapiens
  misc_feature 9: n = A,T,C or G
ccccctcgngggtacttctagaattaattaacgcggggtgtaagccgacagggaagaaataataataatttaagattcaaaaaaaaaaaaaaaaaaaaaaaaaaaaaaaaaaaaaaaaaaaaaaaaaaaaaaaaaaaaaaaaaaaaaaaaaaaataaaaaaaaaaaaaaaaaacacacaagaactatttatctttataatggttaaaatttataaataggggcccccccccgggggggcccccccttccccccttttggggggtgtttttcccccccccccggggcgggttttttaccccggggggggggggaaccccgggggctccccctctttttgggcgcggcgccccccccccttttgccggggggggtttttaggggggggccccccccagtcctctttttaatagtgggcccccccgtgggggggggggggaattggcgccccttttttttt

SEQ ID NO: 58952 - DNA, 473 bp, Homo sapiens
  misc_feature 33: n = A,T,C or G
ggtaccgggcccccccctcggaatacttctagnattaattaacgcgggatgggtgcaccacaaatctcagaaatcgccactaaagaacttattcctgtaagcaaacaccacctgtttcccaaaaacctattgaaattaaaaaaaaaacatcatattccccaaaaacctattgaaataaaaaaaattaaccaaaatattaggtattgggtacaagggccttaatgaatgggagcactgcagtcacattacagcaatccactgtgaaacaccatttattctttgcaggtttaagaacaggccaaattctactgctaaacgttgaagcaatgaagattatcaccccttccctaattcatttggttttatataataagttttatttatttgaagtcgtgttgtaatttatgttgaaccatatttgctaatttatcaagatggggaggctaggcacggtgactcacacctgtaatccc

SEQ ID NO: 58953 - DNA, 579 bp, Homo sapiens
ccgggccccccctcgaaagtcttctagaattaattaacgcgggatctacaatatttacagcattttattatatggtatatacaatataaatgccattaaaggtttattggctgatttctatatcttctctgcattctttagaattgttttagtgattctcttaatctgggcagggtgctataacaaagcaccatagactgggtggctcacaaataagggagatttatatctcacagttctggaggtggggaagtccaagatctaggtaccagcagattcagtgtctggtgatggccttttcctggttcatagatgactatcttctcactgtgtcatcacatggtggaagggatgagggagtctccagggtccctttcattaggacactaatcccagggactgaatcaactacaagaggttccacctcctaatgccatcacctagagggttataatttcaacatattaattttgaaggacacaagcattcagtccatagctgtgatggatctacttaattctagaacatgacccatattccccctaactacttaatgtgagcacagtgtgtcgggggggt

SEQ ID NO: 58954 - DNA, 441 bp, Homo sapiens
ccgggccccccctcgaaagtcttctagaattaattaacgcggggtctgaggatgagcaatagagaacatgccttgtgtaacagaggatactctttattatgctccttactgtgatcacagataaattaataatgcactgctctgtagcatttgttgataaacattatatgctcgcttttaaacttgaaatgtatgagcacaatgacacaatcttttaaatcaaaaatgagaaccattataatgttgaggccttgttttgctgtagcaataaaatgaccaattgcattgacttgattgaataaaatcatatgttaaaagttgctgctatgaatattgttggctataaaatcataccctgacttgctttcaataactgttacatagtgcaggagatgtggaaacctagcattccatataaaaaaaatgcgcggtcgactccgg

SEQ ID NO: 58955 - DNA, 554 bp, Homo sapiens
ccgggccccccctcgaaagtcttctagaattaattaacgcgggtacctgaacatatgcaggcttttttcttgtcatcattcccaaaacaatacaacaactatatacgtaatctacaggtgacttaaagtacacaggaggatgtacttaggttatgtgaacccacaagtatctgagacaggtctcaatcaatttagaaaatttactttgccaaggttaaagacacgcccttgacagcctcaggaggtcctgaagtcatgtgcccaacgtggttggggcacagcttggttgtatacattttaggaagacatgagccatcaatcggtctgtgtaagatgtacattggtccagtctaaaaagatgggacatctcaaagagagggcttctaggtcataggtagattagggacaaaaggttgcactcttttgagtttttgatcagcttttcactgaatacgcaatttacatgtgagagtggggtggcggaatagtcacttatggcttagtctggctcagtgaatctgcatttttacatagacaatagggaggaggaagca

SEQ ID NO: 58956 - DNA, 397 bp, Homo sapiens
  misc_feature 34: n = A,T,C or G
ggtaccgggcccccccctcggaaatacttctagnattaattaacgcggggcagacaaccctgctgacactggtcgaacatttccatcatggctaactttctgtcttattagagtaaacttgttgttacacagctataatccttgaaggtagagtcagaaatttggaattcctaatactcatcctttgggccctctcttccttgattggtcttctcttttttccccccttctggttaacactagatggtaaaatcaaatgtctgaaaaacaaacaaacaaaaaacaaaaacaaatgtctgaaccttgatgctgaagaggggctaagggagatccaaaaataaaaggcagagcaaaataaagaacaacaaaaggagaaattaagaaaaaaaaaaaaaaa

SEQ ID NO: 58957 - DNA, 417 bp, Homo sapiens
  misc_feature 21: n = A,T,C or G
ggtaccgcggccccccctcgngggtacttctaccattaattaacgcggggatttttttccaaaaaaaaaaaactactaaattaaataattttttaaaagtcaaaaaaaaaaaaaaaaaaaaaaaaaaaaaaaaaaaggcggccgctttttttttttttttgccaaaatttaatgtacatttattcttaacacgtggaacatatagtataaagatttcatactgaataaatgattttcattaagccaaaaaaggaaaaaaaggaggaatttacatcaagttttagctacattgttgaaatacaaatatgcagattttatcactgaaaaaatctcaattgtgtttcttcatcagaacttcaactgaacctaaaactttttcacacctcgtttggaaagaaaacaaaccaaaacaaaacc

SEQ ID NO: 58958 - DNA, 163 bp, Homo sapiens
cgggccccccctcgaaagtcttctagaattaattaacgcggggtgggtgggagtagaaaattttgtgtatatcagggcagtatttttttatgaactataaatgattgtctttaataaatatgtgataaaatccaaaaaaaaaaaaaaaaaaaaaaaaaaaaaa

SEQ ID NO: 58959 - DNA, 316 bp, Homo sapiens
  misc_feature 24, 37: n = A,T,C or G
ctgggatacccgggccccccctcnaaagtcttctagnaattaattaacgcggggattacaatttttgcatggatgagtcatccatgggtgaaagtggcataagaaaaggaagcttgggaataagccttaaagaattccagtatttaatggtcagctggaggatgattagcagaaagaaagaaagaaagaaagaaaagaaagagagagagagagagagaaagaaagaaacaaagaaagaaagagaggaaagaaaaacaaaagaaagaaagaaagaaaaagaaagggcctgaaagatagaaggaaaaaaaaaaaaaat

SEQ ID NO: 58960 - DNA, 551 bp, Homo sapiens
  misc_feature 27: n = A,T,C or G
cgggccccccctcggaatacttctagnattaattaacgcggggaggaggggtagcattgggagatatgcctagtgctggatgataggttggtgggtgcagtgcagcagcgtggcacatgtatacatgtgtagctagcctgcacaatgtgcacatgtaccctaaaacttaaagtataataataaaagaaaaaaaaaagcacgaaaaagatgttctaaataaattgcgaagaagacaagttatataacagcatgtgcagtctaatcattatttcattttttaaaaaaaaggtacagtatgcacacagaataaagattgcttatacacatcaacgtattatgagcattatctttattttgcttgtatgttctagattttcttaagcaatgtgcatttctttcatactaaaaatatttttaaataaaatatactaattacttttaaaaaaaaaatttttttccactgaaaatgagatgttttcttaaggcatgtgtgcatcatgtctaaagtacccacttccagatttagaaaacctaggaaaaaaaaaaaaaaa

SEQ ID NO: 58961 - DNA, 567 bp, Homo sapiens
ttctagaattaattaacgcgggcaatcactaagaaagtaactcaaattgtatagtaaaaaattaacaaataaatataaatggtacactaaaatatttattgatttaatacaaaagaagacagtaaagaaggaacagaggatcaaaaaataatatgacagtccaaccacgtcaataaccacattaagatgtgaaggtctggcatggtggctcatgcctgtaatcccagaactttgggaggccaaggtgggtggatcacttgagctcagaagttttgagaccagcctgggcaacatagtgaagccccatctctacaagaaatacaaaaattagccaggcatggtggtatgtgtctctagttccagctacttggggaactgaggtgggaggattgattgagcctgggaggtcaaggctgcagtgagccatgttcacaccactaccttgtagcttaacgcggggtgggggacagtgagcttcggcctggccaaggtgggtgggtgggctctcagattcagctctgtgtaaagattctctagcgggctgcgctcccaagttcccctgctctg

SEQ ID NO: 58962 - DNA, 593 bp, Homo sapiens
  misc_feature 28, 44, 65: n = A,T,C or G
cgggcccccccctcggaagtcttctagnattaattaacgcgggnatgggcagctttaatcacaantcactgaaaacgactcaaatgtcctttaactggtaagtggatagataagctctggtgcatctgtacaaactactcagcaagaaagcagcacaaacttccatttcatgtaatagcatggatgaatctcagtgtattatactaagtgaaagaagccagactcgaaaggctacagatattgagtccatttacatgacttacagaataaaatggggattctgatcctaaagtttaagaactatagttatacaggaaaattttctcataatgagaatataaagaaatataaaggaaattataagaacagaaaacagattggtggttgccaggaactgagtgctttggagggactaattaccaaaggtccccaatgcaagggtattttgggggtgaagggatggttctgtgtgttgattgtggttgtagctgcataatgaaattcactggtctcacagccctaccctgcgagaacagtatacccaaaagacttgaatttactctatgtaaaaatgttaaagtgatcttaaagga

SEQ ID NO: 58963 - DNA, 577 bp, Homo sapiens
gggccccccctcgaaagtcttctagaattaattaacgcggggtggtgcagcatgcagatgctgttattcagatgcctctatccaaacagaacaggaggcaaagcatttaagaaagttgattgattgtggtacatcctgagtaactgaactctaaagaatatcctaatggtcttcatctaaagagaattccctggcctactttaatttgcgccagaaagttttaaattgcaatgaaattgacctcactgaatgggaacattaccaactagagaaggcggagggcttattcaagtcgctcctaaaacttgaacaggatcatgtcagccttacaggaaaggaaggccaacacatgggccatatggtgagtgttatttatcttgattcattctcttccacgtaattttctcatcttaaattatatacaactgacgccactcactctgacaatgcatttccccaacaagccaccgtaaatcttctccacatctggccactgggtttccaataagagagtatccttcattgcaagtgtacactacatttttccccacaggaaacattgtaccttcatcctaaa

SEQ ID NO: 58964 - DNA, 334 bp, Homo sapiens
  misc_feature 25, 38: n = A,T,C or G
ctgggatacccgggccccccctcgnaaatacttctagnattaattaacgcggggtgggggtcagacatgcctcattatccctctccagcattaatatcaatgcagactttaagtccggtaagaagcattttataatctcttctctctgaagcctgctacctgaaggcttcctctctgcaaataacaactgtctccacaatcctttttcttaacacagacattcctttctattgatcccaggtctttagataaactcaaccaattgtcaaaatcaggtgtgttttttgcttctttgtttagaggttttttttttcttttttttgagacagtcttt

SEQ ID NO: 58965 - DNA, 403 bp, Homo sapiens
  misc_feature 28: n = A,T,C or G
cgggcccccccctcgaaatacttctagnaattaattaacgcggggtgggtaaagggtattttaacttaggggtagttcctgctgtgagtggttacagctgatcctcgggaagaacaaagctaaagctgccttttgtctgttattttatttttttgaagtttaaataaagtttactaattttaaccaaaaaaaaaaacaaaaaaaaaaaaaaaaaaaaaaaaaaaaaaaaaaaaaaaaaaaaaaaaaaaaaaaaaaaaaaaaaaaaaaaaaaaaaaaaaaaaaaaaaaacaaaaaagaaacccaaaaaaaacccaaaaaaaaactaaataaaaacccccccccccccccccctggggcaaccacttacctcgaaaaaaaagtggtttacccccccccccccccc

SEQ ID NO: 58966 - DNA, 403 bp, Homo sapiens
ccacccacctaaccctcccaaagtgttggaattacaggtgtaacccaccgtgcctgcccaaaaattgattttaaaagatacctaatatattgttttaaaaaatgcaacctttcttaaaacaaatctcgatcccaaaggccattttccagcattaacactgaatattcatttgcttggataaagtgaaatttaacaaaaaaatcacatatgctgatggtatggatccaaattcttttcacttctttaccattctgatggggagggagagagggacagacaaaaagagaggcaaagcgagacgaaaaggacaatttgcatttcagctttcttctcatgccaaaaatgatttatgttaaaacaccactcaaatcaaagcgaccacattataggacaaaaaaaaaca

SEQ ID NO: 58967 - DNA, 601 bp, Homo sapiens
cccccctcggaagtcttctagaattaattaacgcgggaccaatcaaataaagataggtcaaaggcaaaaacagattcacaattattttgagccatcaccaaaatggagccataatggtatatcacccttaaattttatagaatttattctgtattttaaaaatattcatataattattattaaacataattatttaaagcagttttgaaagcttactaattgaatttttaacttttaattctgaaaaacagtcaaaagcagaactagtataatgaatccccatgtatctatcacttatcttcaataattatcaattttgtcaatctttttgcatcccctcccacaaatatattttcctaattttttttaattacagacatcattataatttacccatgaatttcatcactgctagttttccaaaaatatataccaccaaaacatcatctaactataaaatctactttttgattgacctctcagagtttctctctctggccttgctcattaatgtaaatgaatattcatctagaaaaatacatgaaaatattttaaaaacccatttacctacctctggcccaatgaacagggtaaagatgtt

SEQ ID NO: 58968 - DNA, 621 bp, Homo sapiens; identical to SEQ ID NO: 43332

SEQ ID NO: 58969 - DNA, 200 bp, Homo sapiens
cggggccccccctcgaaatacttctagaattaattaacgcgggtcgttctggaagtctctacagaaatatcccagctcccccgcccctttccttcacctcaggtctggccccaatccaatgtattaaggaacgttcgatacttagaataaagaggtttctatttaacacaaaaaaaaaaaaaaaataaaaaaaaaaaaaa

SEQ ID NO: 58970 - DNA, 546 bp, Homo sapiens
gggccccccctcggagtacttctagaattaattaacgcgggatttatcatttttctgtaatgaattgtgtttttagtgtcaagtctgagaattctgtaacaaactataggtcctaaagattttctactaaaaggtttatagttttacattttgcatttaagtctggatccatattgtgttaattttatagagtgtaaagtgtgagacttaagtcagggtttatctttttgcctgtgggtgtacaattactttagctgcatttgtcgaaaatactatccttcttccactcgattggttttacatctttctcaaaaattagttggctctacttgagtaggtctatttctgggttctctattctgatccatagatctatgtgtctgtctctctgccaagaccacaccatcttcactactgtagctatataagtcttaaaagcaggaagagtgattcctcatgctttatttttctttatcaaaattgttttatctattttggttccttttgcctttctgcgtaaattttagaataatcttgtccatatct

SEQ ID NO: 58971 - DNA, 590 bp, Homo sapiens
  misc_feature 461: n = A,T,C or G
ccgggccccccctcggaagtcttctagaattaattaaaagaatggtaacacctccgcctgcttgctgtgagtttattcatttgaattccccatctcccccaatgggaaataacacagaattgcaattatttataaaatcttaaattggcttcttttctctaggaaaatagcccttgattcaattaattccaatcctagaaaagcgcctagatatctgattgaggtattgagggagagaggctgctccccttgattcttttactataatccaattaaagcaacatttatgggccaactccctggccatgggcacagctttgtttagagagttgcaaatccattcccacctccccgcgttaattaacgcggggagcacagaaggtgaaggaggctcaggtgctagtccagtaggggtggccagggaaggcccgtctgatgaagtgggaaagtaggaataattntagtaggtattagtaatgattacttagatgaataaaaatgcagaaacgagtagttaaatttatagaactgcagaagaggctccatatggtctatttgttgaattaaatggggaaccatcaaccaaccaa

SEQ ID NO: 58972 - DNA, 332 bp, Homo sapiens
  misc_feature 28: n = A,T,C or G
cgggcccccccctcggggtacttctagnattaattaacgagggcctactttgtgcttgtaaggccgtatcttggggtagtgacagcccagccatgtgggaataatctgtttatcttgcctatgaaagtgtgaactatctccctggaggcatggtctgagtcacagcctgtgttcagttttaggaccagtgtggcatctcaaaaaatgctatatttacttgaaagatctgagaaaaatagagtaaaaaaacatataaaattatgactatactccaccaaaagaaaatggtatagaatgtaaaactctaaccacatctcaaaaaaaaaaaaaaa

SEQ ID NO: 58973 - DNA, 617 bp, Homo sapiens
  misc_feature 16: n = A,T,C or G
ccgggccccccctcgngggtacttctagaattaattaacgcgggaggtggaggagggaggatcccttgagcccagaagtttgagaccagcctggcaacacagggagacccatctctacaaatcataataaaagatattagccaggcatggtggtgtgcacacctgtagtcccagctacttgggaagctgaaatgggaggatcacctgagcccggtagatcaagccttcaacgagctatgattgtgccactgcgctctagcctgggtgacagagcaagaccctaactcaaagaaaaaaacaccaactatttttaaattttttgaaacagagagagttggcaagatgtcaaaggtgactgaatttaattagtattgaacacatatgggtgttctgttaaagggccagtaatgttggatgagtaagaaaacaaagagcatataaggtataaattatatctttatcctgtaaaatttatttttcttgccttgatttcagcaaaattaataattgtgttgctgtaatcaagtctcacataatttgtattctactgacagtaatgcctaattagacaacctctcctatatctgtgttggggtgttttttgtttgtttttttct

SEQ ID NO: 58974 - DNA, 371 bp, Homo sapiens
ccgggccccccctcgaaagtcttctagaattaattaacgcggggtggtggcggggttggggggcagcttttattcccttatttgtccccgcccagatcctgctgattggtccattttacagagcactgattggcccattttacaaggtgctgattggcgcattttacaaacctctagctagctacagagcactgatcggtgcattttaaaatcctcttgtaagacagaaaagttctccaagtccccacccgacccagaagtccagctggcttcacctctcaatatgatgcgttgagtacactttacatatgtggtattcttccctaaaacacataaccacagtctaatcatcaaaaaaaaaaaaaaaaaaa

SEQ ID NO: 58975 - DNA, 609 bp, Homo sapiens
cgggccccccctcgaaagtcttctagaattaattaacgcggggtggcaattaggaatctaagtggtacagaatcagtttaagcctaaatattctgatgagcaatggtagcagcaaatggacatgaactaaagggtctaacaggtactatataacctcctaacaaatttgacaaggattttttttaatgaaaaatctttgtggctgagaatagtgttattacctaatcgaagttccccacatacctgtaggaagatctgctgcagcctctctatacagttcttataccatggtgttaatacactggtcccatcagtttcgcatcgtactaggtgctcggtcaagatcatgataaaccgctggaaagggagaagaagttaaggtagtactacagacagaatcttatactttggaaaaaaattcatgacaaagaaaccccaaagtattgcctgttccaccctgtctttgtggtgtgtgtgcctagcttccattattcatgaagtcaacctagaagggcagactggtaataacatgagttggtacattcttcctggcaatacataaagacctttaatgtcttaaattacttatcctagtaatattacttcctg

SEQ ID NO: 58976 - DNA, 439 bp, Homo sapiens
  misc_feature 9: n = A,T,C or G
acttctagnattaattaacgcggggcactgcgacacaaacaggtaatgtctggagtggtaacagctctcttcttactccttactgcaacattgattgtctttcccccctccctccaataccataatcttagagacaaaccttaaaacacctgtttttaggctgttccttgtactcttatggtatttaagtcacttgcgtcaaccactaaatactagagaacagtgtattatgatgtaggtgttttaattttgcgttgctaaaaaaagtgcatgatggtgagagcccaagttatctatccctcttcggtgcccttcttctcttctctgcaatgcttctgtagcttctaatgattccaccggcttagcctttactgccgagtgctctgatgcaataatggaaatctcttatatctcctacggcagctggttggatcaatct

SEQ ID NO: 58977 - DNA, 224 bp, Homo sapiens
cgggccccccctcgaaagtcttctagaattaattaacgcggggtatttttaaaaggaaaaaaaattctcttttggctctaagaagtcagctgtatgagcaggcgtgaccatatcataacatgctgatatgatagaaatcaataaatttttacctctcaggaaaaaaaaaaaaaaaaaaaaaaaaaaaaaaaaaaaaaaaaaaaaaaaaagaaaaaaaaaaaaaa

SEQ ID NO: 58978 - DNA, 524 bp, Homo sapiens
  misc_feature 25, 38: n = A,T,C or G
ctggggtaccgggcccccccctcgngggtacttctagnattaattaacgcgggaggctgagacaggagaatcacctgaacccgggagatggaggttgcagtgagccaagattgtgccactacactccagtctgggtgacagagtgagagactccatctcaaaaaaaaaaaaagaaagaaagaaagagaaaaagaaagctgagcttcctgctctgctggccccaaaggccaagatgccaggaggctgagcaaaggggagtggtccatgagcttgcccttcaggcctggcagaggaagtcgcttcacaataagatattccatgtccccagactcaaccatgtcccaggagaggccgctcagtgtcacttgcaggaacacaagccctggtgacctgcccagccacactgcttgcttttcctcttcacaggggtcacaggaccagctcacagatgcctttccctctcactgccaggtcgctcttctcccaaaagatacaaatgaggagtctccccaaagggcagcaat

SEQ ID NO: 58979 - DNA, 368 bp, Homo sapiens
  misc_feature 17, 68: n = A,T,C or G
cgggtccccccctcggngtacttctaggattaattaacgcgggccggatacctattgatgaataaagnaaatttaaagtggaaaaaaaaaaaaaaaaaaaaaaaaaaaaaaaaaaaaaaaaaaaaaaaaaaaaaaaaaaaaaaaaaaaaaaaaaaaaaaaggacacccccccgcgagccgcgtgggatcctccttttcgcgcctttgttttttttttttcttcctccccccccccccccggggggcccccccccccccccttttgggtttttttttccccccctttttggcctggcctttttccccgttttgggggggtaccccctgggccccccccttttttcccttcgcctttttccccctttttc

SEQ ID NO: 58980 - DNA, 327 bp, Homo sapiens
ccgggccccccctcgaaagtcttctagaattaattaacgcgggacttaacattataaaaggcaaaactcactgagaaagtaaggctattaattccaaataggcaaatactactggatgacatttttaaatttataataattataactcaccaggtcaatcacttaaccaaaatgtataacaaaaaataatattcggctgggcatggtggatcacacctgtaatcctagcactttgggaggccgaggcgggaagatcatgaggtcaagagatcgagaccatcctggccaacatggtgaaaccctgtctctactaaaaaaaaaaaaaaa

SEQ ID NO: 58981 - DNA, 484 bp, Homo sapiens
  misc_feature 9: n = A,T,C or G
ccccctcgngagtacttctagaattaattaacgcgggtatcatcaatcacattgaatgtaaaaggtgtaaacatccccattaaaggcatagattataatattggacaaaatttttgaaaaagattaggtatgctgcctataagaagctcactttaaatataaagatatagctaagttaaaagtaaaaggataaaaaaagatataccctactaatactttaaaagaaagctcgagtggctatattactatcaaagtagattttagatcaaagaatattgccaaggataaaaagggacatacactgataaaacagtcacttcatcaagaggatataacaatcctccatgttggcggggcacggtggctcaagcctgtaatcccagcactttgggaggctgaggcaggtggatcacctgaggtcaggagttgaagaccagcctggccaagatagtgaaaccccatctctactaaaaaaaaaaaaaaa

SEQ ID NO: 58982 - DNA, 289 bp, Homo sapiens
gggccccccctcgaaagtcttctagaattaattaacgcggggtatcagttataaaggaaagaaactttagtaaacagaattttccatttatttagtaaataaaatggaaccaatgacaagattctgtattataaaaagaaacaacaggctgggtgcagtggctcatgcttgtaattccagcactttgggaagtcaaggtaggcagatcgcttgaggtcaggagttgaagaccagcctggccaacatggtgaaaacctgtccttactaaaaatacaaaaaaaaaaaaaaa

SEQ ID NO: 58983 - DNA, 493 bp, Homo sapiens
  misc_feature 23, 36: n = A,T,C or G
tgggtaccgggcccccccctcgngaatacttctagnattaattaacgcgggttttagagaagtttcagctctacttctcatcttttctctcctggtcttacttgaatgcatgttggtaatctgtatacattactatgactgtgtctatcacaagtcctacaaaataaaaatggacttaaaagtactctctgctgaggctgtaagttttgttttgtgagaaataggtaaagacattagcatttaatctactggaataagctggttgctgtggcttatacctgtagtcccagatacttgggaggctgaggcaggagaatcacttgagaccagcctgggcaatatagtgagacctcacctctaaaaaagttttttataaatttacttgtctaaagtggggaaagggaaattattctgttttcttattcttgcttcaagactatgacagatttgaaaagagaattctaaagcagaattagagaacctgcttctcttc

SEQ ID NO: 58984 - DNA, 465 bp, Homo sapiens
ctgggtaccgggcccccccctcggaaatacttctagaattaattaacgcggggtgatgcctgtggggggccctctcagccctcctaatgacctccggcctagccatgtgatttcacttgcactcaataacgctccttatactaggcctactaaccaacacactaaccatataccaatgatggcgcgatgtaacacacagaaagcacataccaaggccaccacaccacaccagtgatgaagggccaaaaacacaggatattccaataaactaccaaagaaatagaccacctttccacgatctgggctgacacctattactactatcgcggactcccaaaccgctggatatacaggtaccggcacatataaaaatctgttggaaaaaaaaaaaagaagacggccgctactttttttttatttgaaactacctccccggatcggaagtgggtaatgcgcgcgcctgct

SEQ ID NO: 58985 - DNA, 582 bp, Homo sapiens
cgggccccccctcggggtacttctagaattaattaacgcggggggcaggggcgaagtatatcagatgtcttccagttaagcaaaaatgcaagaacagttccatccaataaacactgttcatgtaagttatctcctcagatggaaaagtcagttaactcaggaagaaaaaggtctaaagttatagtttcctaaaaatgtatgaaatttgttttggttgtaggaaactcatagaacataagaataaatttggtaaagctcaaagatgttcacagttgtttattgtccacctgctgtgtgtcagttttgtgcagagtgcggtggacacaaaaaaatcgtgcagtggtctgtgcctggcctcctcttgcatttctcatagataaaactacaagttcattctcatgacaactgctgtggcaacaaagcaactatttaaattctcatgataccccctttgacttaagagaaactcatccagccttacttcaggtgaatcccaggagctaatctatgacaggcaatagatgccacctctgaaaattggacacagagggcctgtacctttacagtgtcatcttgtcatgt

SEQ ID NO: 58986 - DNA, 585 bp, Homo sapiens
cgggccccccctcggaagtcttctagaattaattaacgcgggactgtagattggactgaaaatcaaaaagtaccacaagataaatgcaaactcttggtgagcagagggagaacatgtactgagtttcttaggtttcatggctaatgcattggcacagctttcagtgtatccctgcagtccttccagatagttcctgccccatgcattgcagatggttgccaaagcccccctctgtcctggcacccagtgttcctccatcctgactccacgtattgcccccttgccactgcctgagtgcaccatagtgtccccatccccccactgcctggagttccccttgtgtacccccttatcagggcacgacctaactgtgccctgctggctgtgacctcctgaagacagacctggcttctccctgcatccagttccccagtatgtgctgtgggcatcctgagaagcctgaaaaagacagggccaggttaggcttgggtgagctgctttctgccttcttggtacacacagtaagcagtggagaggcgtgttacaccgtatctgttctatcctcatctaaatactgagaggcta

SEQ ID NO: 58987 - DNA, 598 bp, Homo sapiens
  misc_feature 31: n = A,T,C or G
taccgggcccccccctcggagatcttctagnattaattaacgcgggggcagagcagcaaacactagctcttattccttctatttaactaatttttgtaaccattaactatcccctcttttccccccgctctctgctacccttcccagcctctggtaaccatcattctacttttattattattattatttgagatagagtctcactctgttgcctagactggagtgcagtggtacagtcatagctcattgcaatcttgacctcctgggtttaagagatccccctaccttggcttctcaaagttctgggattacaagtgtgagccactgcacccagccagccattattctgctctctgtctctcagtttagaattgtttttagctcctacgtataatatcatagactttcccctaatttatcagagattgtaatagtgaaaaattataagcaaccaaagtatccatcaataatggataaatgaattgcagtgtacttatatgatagcctgctatctagtagttaaccagagatgaactatatttacatatatctgatttaagatttttcaacctcagtgctactgacatttttggatctg

SEQ ID NO: 58988 - DNA, 604 bp, Homo sapiens
  misc_feature 27: n = A,T,C or G
cgggccccccctcgaaagtcttctagnaattaattaacgccgggtaagggaaaaagaaataacttaatgggtataatgtacactattcagatgatggctacacccaaagcccagacttcaccactatgcaacatatccatgtatcaaaactgcacgggtacctcctaaatttatatggaaaaaaaagtaccttctgcctaaagactgcctaccccctaacacacagataaagacacttcaaacttgtaacactgaaaatgaaaaatatttatctttgtttttacatttttttgacgttgtttcagatcttagtgtgctgatactttgggacttaaactggcaaattccatagatatttttgtaccctgttttggccctacagatgagccagtatggaccggctaggtaagggagacaactatcctcaggggcttgaaatcatttcttgccctaaactcgccctaaactcaaacggcttcaaagagacaatgaacagtacttgaaaataagcatctaactttacagtcaggctctcagcccactaggtctatttgatttccattaatcagcacagaagaaagccactggccacttcccatccctt

SEQ ID NO: 58989 - DNA, 589 bp, Homo sapiens
  misc_feature 19, 32: n = A,T,C or G
taccgggcccccccctcgngaatacttctagnattaattaacgcgggtgagggataaaaaactacacactgggtccgagcacggtggctcatgcctataatcccagcactttgggaggccaaggcaggtagattatgaggtcgggagttcgaaaccagcctggccaacaaggtgagaccccccccatctctactaaaataattagccgggcctggtggcgcatccctgtaatcccagctactttacttgggaggctgaggcaggagaattgcttgaactcgggaggcggatgttgcagtgagccaatatcgcaccactgcactccagcctgggcaacagagcaagactccgtctcgaaaaaaaaaataaattttaaaaactacacattgggtacaatgtacactcctcgggtgatgggtgcaccaaaatctcaaaaatcactactaaggaacttatccatgtaaccaaacaccacctgttccccaagaactattgaaataagaaaaaaagaaaaaaaaaatcactgattgcaggtcaccctaacagatataataatgaaaaagtctgagatgtggcgagaattaccaaa

SEQ ID NO: 58990 - DNA, 617 bp, Homo sapiens
  misc_feature 569: n = A,T,C or G
cgggccccccctcgaaagtcttctagaattaattaacgcgggctgctatcttaagcatcagcatttcaggatgcattgtcttctttgcatgggtagatcaatgttttgggaaaaggtaattaattcttacttaaaataactggttttaaataattggtggtcatatagcaacctcatatgaagatttattcttgagaagcagtgacaactctgattaaatttttcttcttaatttcatatatacttacatacactcttggaaagtactgaagtcatcgacctgagtgccaaagacaaggtatgccaactgagcatacgctaggaaaataatgaagaacataatagcaaagccaaacaggtctttggcacatcgagacatggttgtcgagagctggctcatggtcctgttaaaattgatgaatttgaagagctgtaagagagagaagacatcaatagatgaatggataaacaaaatggtgtgactgtatataataaaacattatttcatcctgaaaagaaattaaattctgacaggttacaacatggatgaaccttgaaacatcatgcanagtgaaataagcctgacacaaaaggacaaatactgtatgattccactt

SEQ ID NO: 58991 - DNA, 612 bp, Homo sapiens
  misc_feature 28, 111: n = A,T,C or G
cgggcccccccctcggagtacttctagnattaattaacgcgggaccttcgattttgtaactgctgttttcttttaacagcataatgacaaaactggcctcttttttttttnttttttttttactatagtgatgagggagtgcccacctagtgtattgaactgctgtgcagtatttcattgtagggatgtattaccatttattgaaccggctctcaaaggttgggcatttgcattgtttatgtatttttactagtcagatcatgcggcagtaaacatcatttgattcatttgtaattgtttctgtaggacagttactagagttggaattcctcgtgtcaaaggatttgaatatccttaattataatagatatttccaatataatagatatttccaatatccttaattataatagatatttccaaatataacagatatttccttaattataatagatatttcttaattataatagattttccaactattatatataatagatatttccaatagatattataatacatattgccactttaaaaaatttttatgccctgccgggtgcagtggctcacaccggtaatcccagcacttggggaggctgaagcgggtgg

SEQ ID NO: 58992 - DNA, 423 bp, Homo sapiens
  misc_feature 15: n = A,T,C or G
cgggccccccctcgngggtacttctagaattaattaacgcgggcaccctataaataattataatagcaacaactaagatcaccgatcatcaagaggctgatgcaggaggatcacttggactgggaggtggagattaaagtgggctgagatcacaccactgcactctagcctgggtgacagagtggaactctgtctcaaaaaacaaacaaacaaacaaaaaccaaaaaacaaaaaacactgatcacaggtcaccataacagatacaataatatctgttaacatagtatctgttaaataatatctgaaaaaagtatccatttttcaagtagtttgactaactgaaaaagtcaaaatattgtgaaaattaccaaactgcaacccaaagacacaaaatgagtacatgctgttggaaaaaaaaaaaaa

SEQ ID NO: 58993 - DNA, 604 bp, Homo sapiens
  misc_feature 28: n = A,T,C or G
ccgggccccccctcggaagtcttctagnattaattaacgcgggttggtgttcaagtattgatgaactgtcagaagcagaaatatttaggaattggttgattatttttggctaggaaactggttatttgagtgagactatcactgattagttgacttgcagaaatatatttactcagtaaggttaccgctaattggctgacctcagaaataacagattttcactagtggttgcctttctatggcacggttacagaagcaagatttcactttgatatggtttggatgtatgtcccctccaaagctcaagttgaaatgtaatctccagtgttggcagtgggtctgtttgggtcatgggggtgggtccctcagaaatgcttggtgctgtcctcacggtaatgactgagttctcactctattagttcacattagagctggttgtttaaaagatcctggaacctccttctctctcttggtccctctctcaccatgtgacacatctggtcacctttgtcatctgccacaagtaaaagcttctggaggcttcactagaagccaagcagatgttggtaccattgttgtacagcctgcagaactatatgcaaaa

SEQ ID NO: 58994 - DNA, 594 bp, Homo sapiens
  misc_feature 23, 544: n = A,T,C or G
ccccccctcggggtacttctagnattaattaacgcgggttacaagtgtgagtcaccacacttggccactaaaggacattgtttaaaagatatttatttgttttgaaaagatttatttgagaaatatataaaaacgtgacagaacacttcataggccactttgcacagcaaaatacacaataacatatttttgcaagcataaaacaggtatggtaaagagtcatgcaggtataacaattacaagcagacaaactatatttataaagaaataggtcaaaaatggaaatgtaacaaactatagaaatgatccctgaaagtatagtagtagggtggggggagggagagggatagcattaggagatatacctaatgtgaatgacgagtaaatgggtgcagcacaccaacatggcacatgtatacatatgtaacaaacctgcacgttgtgcacacgtatcctagaacttaaagtataataaaaatatatatatataaaatggaaatgtacaaatgtatattactgtggttggtaattgtgtgaccagctntataacatctgtcatctgaaacaccgtgacaaataacctaagtcttttga

SEQ ID NO: 58995 - DNA, 397 bp, Homo sapiens
  misc_feature 27, 38: n = A,T,C or G
ctgggttaccgggcccccccctcggangtacttctagnattaattaacgcggggctcacacaaaaaaaaaaaaaaaaaaaaaaaaaaaaaaaaaaaaaaaaaaaaaaaaaataaaaaaaaaaaaaaggacggaaaaaaaaaaaacgagcctgcaacaacacagtgaaactgtaatacactaaaaattaccgcatcttaaaagatcgccccgccccccccccggggggacccccactcccccttttggggggttttttcccccccccccctggcccctttttttccattgtccgctggggaaaaccctgggtttcccccattttttctcttttgaaaaaattccccttttcccaggggggggatttacaaaaaggcccctcccgattcccctttccca

SEQ ID NO: 58996 - DNA, 573 bp, Homo sapiens
cttctagaattaattaacgcggggctgggctggagtgcagtggtgtgatctcagctcactgcaacctccggctcccatgttcaaataattctcctgcctcagcctcccgaatagctgggactacaggtgcccaccaccacacctggctaattttttgtatttttagtagagacggggtttcaccgtgttagccaggatggtcttggtctcctgacctggtgatccgcccgcctcggcctcccaaagtgctgggattacaggcatgagccactgcgcccggcctaaaaatttttttaaattgtgtacattatggttttttttttttaccacaatttaaaaaattaatttataatatacatgcagaaaaatgcacaaatgacaagtatatatcttgatgaattttcacaaatggaatacatttgtgtaaccagcagcagatcaagaaacagaacattgctagtgccccagaagccacttgtgtgttccctctcagtcactgctcttctcaaggacaaccactcttctgactcctgataccataaactaattttgcctgttcttgctttatatata

SEQ ID NO: 58997 - DNA, 598 bp, Homo sapiens
  misc_feature 15: n = A,T,C or G
cgggccccccctcgngggtacttctagaattaattaatagatataattgattactggtcagaatagcaaaaagaactagaaaacttgaacaacactaaataccaagtatacttcaccagatatctatagaacattccactcagcaacagcagaatccagcagaatatatattcttctgaagtgtatgtggaacattctctgggatagaccatatgttaagtcataaaacgagtttcaataaatttaaaaggactgagatcatacaaagtatgctctctgaccagaatggaatgaaattagaaatcaataacagaagaaaatttgggaaattcacaaatatgtagaaattaaaaaacacactccttaaacaaccagtgggtcagaaaagaaatcacaagggaaactagaaaatactttgagctgaatgaaaatgaaaatgtaatataccaaaacttattgaatgcagctaaagcagtgcttagatggaaattgatagctggcaaatgtctgcattcagaaggaagaatcatctcaaatcagtaacattgccttctaccttaagactctagaaaaagatcaaactaagtccaaaacttag

SEQ ID NO: 58998 - DNA, 503 bp, Homo sapiens
taattaacgcgggtgttcatgagcaggaagcatccagcatgggagaaagatgtaggctgggagtctaggccagtctcatcttttcacatttttctgcctgctttttatattctagcctcacaggcagctgattagattgtgcccacccagatcaagtgtgggtctgcctttcccagcccactgactcaaatgttaatctcctttggcaacactctcacagacatacccgggatcaatactttgtatccttcaatcgaatcaagttgatagtattaaccatcgcatacacacatcaactaatagatttataataaacagtgtcacaagtatgtcatattttcctgattcttccccaattctgatttaaggatcttcttcttgacctatttgttcccctcaaaaaccctatgcttttatcatgtatatgcacttagcacagctatcattttttcacaattttattttattatagaatatatcaggcaaaacaaaaaaaaaaaaaa

SEQ ID NO: 58999 - DNA, 616 bp, Homo sapiens
ccgggccccccctcggaagtcttctagaattaattaacgcggggtgagtgacattttcttcttagtttttcattttttaaagaaaattactccagtttacaaatataatattgaataaagtgattattttttacagcccctttaacttgtttttggagatgacatttctgattttcagaaattaatataaaatctggaagcaagattccataaattgagaattctagatggctgatcagctttacctgtggtgctttgccttttaatagggagtgtgataatacattatttcagatacgtatgtatgactgtttcctgaacaataagatctatgaaaggagcagaaataaataatttttctaattaaaaacaaacaaaatcctggcagttaggaatacaaggaatttccttaatcagataaggaatatctgtaaactttcagcaggtgttacagtcaatggtgatatattgaatggttttcctctggaacaagataaaaacacatgcggtcactgcttccattcacactgtactggaggtcctagccagtgcaataaagaaaaaataagtaagtcataaggattggaaagggagaataaaccgttgttttttgtga

SEQ ID NO: 59000 - DNA, 416 bp, Homo sapiens
  misc_feature 28, 330: n = A,T,C or G
ccgggccccccctcgaaagtcttctagnattaattaacgcgggtacaaaaattagctggaaataatgaataagacccattatttaatagcacacagggtgactataattaataatggcttaattgtacattttaaagtaagtaaagggtgtagttggattgtttgtaacacaaaggataaatgtttgagagatggtatcccgctgttctccatgatgtgattcttctacattgaatgcctgtatcaaagcctctcatgtacctgataaatatatacacttactatgtcctcacaaaaaataaaaattacaaaaaaatgatctgaagcgtntcttccagggaatgaacaggagatgaaacattgactttaccactacattcctaaaaaaaaagcataatcaaagtaatggcaagccg

SEQ ID NO: 59001 - DNA, 528 bp, Homo sapiens
  misc_feature 472: n = A,T,C or G
attaattaacgcgggccctgattagtattccttacaactgtcaaggtcatcgaaaacaagggaagtctgagaaatggtcatggccaagtaaagtctgaagactaaatgtaatgtgatatcctagacggactcctggaacagaaaaaggacaataggtaaaaactaaggaaatccttttttggcacagactttagttgttggtggttggttgcttttaaagtaagatagaaatagtgaatagttaaagagaaccggccaagcatggtggctcacacctataatgccagcatgttgggaggccaagagctcacaagtttgagaccagcctggacaacatggcaaaactccatctctacaaaaaatacaaaatttagatgggcgtggtggagcacacctatagtcccagctactccagatgttggagtggaaggatagcttgagccctggaggcagaggctgcagtgagtatgtntgtgccattgcacttcagcctgggcaacagagccagaccttgtcttaaaaaaaaaa

SEQ ID NO: 59002 - DNA, 587 bp, Homo sapiens
ccgggccccccctcggaagtcttctagaattaattaacgcgggattattatgcagttaaataggaagtatctttttccattatttgagagagttctaaaaaaatggaacatcaaatctctcgtatccttcttccattacatttctaggcggggaattggggctgctgcagagaaacagctcagatctccaagttctagcctgagctcttctgccataaaccatggggtgttgggcacattgtcaacccctggggccttcaggatcttcatttacagactcacttcaattgggatcagattagatgatttctagggtttatttagctaggaatttttaaattctaatttagaaaagcaagactttgtattggagtttcctcagtagtgattagttttatttttttgtttgtttgtttttgttttttttttttttaaagtccttatcttcactttgggaggccaaggcaggcagatcacttgagatcaggagtttgagaccagcctggccaacattgtgaaacaccgtctctattcaaaatacaaaagttagccagaaatcacttgaacccgggaggtggaggttgcag

SEQ ID NO: 59003 - DNA, 329 bp, Homo sapiens
cccccctcggaagtcttctagaattaattaacgcgggggagaggctcacaggagagagcatgctgttgctacacctaggtttcaaaattcgaatcctgcatcctccctcacctcccaccctctgctgcttaaaaaataatgattgacagcctgggcaacatagcaagactctgtctctacaaaaaattaaaaattagccaggtatggtggcatgcacctgtagtcccagctacgtgggaggccaaggccggaggatcacttgagcccaggagttcaagaccagtctgggcaacatagcaagaccctgtcactccaaaaaaaaaaaaaaa

SEQ ID NO: 59004 - DNA, 298 bp, Homo sapiens
  misc_feature 15: n = A,T,C or G
cgggccccccctcgngggtacttctagaattaattaacgcggggagaatttttaaaaaataatgttccatttatttaggaagcctacatttaattagttcattttgcaagcttatttataacatagactcaattggtgatttcttaagttaagattttttttttttacatgggttactctcaagctatctttgcccattccaagctatgtttagataatgcatagtaggtcacattctccaatatcctgggagggcaggatttttttttttttaagctattgaaaaaaaaaaaaaaaa

SEQ ID NO: 59005 - DNA, 554 bp, Homo sapiens
  misc_feature 462: n = A,T,C or G
ccgggccccccctcggggtacttctagaattaattaacgcggggggagttggggacagagtctcactctgtggctcaggctggattgcagtggcgcgatcacggctcactgcagtctcaacctcccaggttcaagcaatcccccaaccttagtttcccaaagtgttaggattacaggcgcgagccactgcacctggctccaaagggaaatttatgtatatttaaatgacaagttttggcaagatgctgtcgtggaattggtaaaattttttgtgagtctattaaatctaaaatactcaacatcaatgaaaagtaactataagactcaaccacacagacaaaaaggaaaagcacatatattaaagaatttggccaggtgcggtggcttgtgcctgtaatcccagcactttgggaggccaagacaggtggatcacttgagcccaggagttcgagaccagcctgngcaacatggcaaaaccctgtctctacaaaaaaatgtaaaaattatccagttgcggtggtacgtgcctgtagtctcagttacctgggaggctg

SEQ ID NO: 59006 - DNA, 592 bp, Homo sapiens [sequence omitted]

SEQ ID NO: 59007 - DNA, 387 bp, Homo sapiens
cgggccccccctcggaagtcttctagaattaattaacgcggggaaggggagtcgaagtacaaaagagtgacactatcaagggtatgtgtgaggaattgattattttgattgatcatggaatttatattggtaagacggggaatggggccatcccagtcttaccactgagctaccagcctctatgacctaggggtcccactcgactctacaagccagcctacagaagtagggtaaccttttctgccttcctagacctttcaaggtctgctggcttgctcagtctaagatccccagaccatgcttaaacccccagactctttcctaaccctgttcaagcaaggtgtgcttcgctgcctgttgctttgtcttagcaaaaaaaaaaaaaaa

SEQ ID NO: 59008 - DNA, 596 bp, Homo sapiens
  misc_feature 587: n = A,T,C or G
cgggccccccctcggaagtcttctagaattaattaaaataactgataaatcagatgtagctttaaatgggattttcaaaattaaaatgtaggagaattatgttaataagctctgcttttaactctatcaagtataggaatgtgttcctttgtgcaatttaaaaccaccatcacctatgccctctagtgcttatgggatgagtttgacaatagaattgtgttctctgtttcctgcttctgccctggttactgctgatattcctggtgtgagagttctcttagtctctctgatcccagcttccctggcattgggaaaagggtggctttgcctattcctccatgtggtcctgctatggggctgtggtgctggagaaacaataagtgcatctgggcaaacacggcagactactggcagtcagctcctggaagccagggcagtttatgccctagcactgcccaggtgtagaatcctgtcctgaggatgtttatctgtagcaagccaaggacattatagttgacccttgagcaacatgggtatgaattgttaaggtctacttatatgtggatttcctcccacctgtgatactnatatgtgga

SEQ ID NO: 59009 - DNA, 300 bp, Homo sapiens
aaggacagaatctagaaacaacctagtattaaggggctatgttccaaatgggacatgggagttaactgacataataaaagctgccagcatgacagatagcctgggtggattattaaggggggctgataggcgaataggaaaatatggggggctgacttgggaaatatgattgattgaagatgccatgctgcggagctggaatgcctgtatattcagcatgggcaggacattgagggcaaggattacaaggagatataccaggatattaacagataagagcttgcgaagaggtaaaatgga

SEQ ID NO: 59010 - DNA, 622 bp, Homo sapiens
cggggccccccctcggggtacttctagaattaattaacgcggggattgaaggtggaatgaaccactaagatgcagtttcatttgtattatgacaaagaaagaagggggagggttcaattccaaacagctgctttatggggagaaataccgacctaagtatgcgattacgtcttcatagataccaatgggcattgctgagtttataagaaggaaatgtaaacgaacgctgacttgcttgcgcaatttagagggaactcttggtgcctggaaaagtgaatctggattatttgctgggtcatcaaagtaatgatggagtcaggactcctaaaccggtctccgagtgattggaacataagcatacaaaaaacaagtctctctatagaatgaatacaatgtttaagaaaagagaaggagaaacggaattgattgcaagaaggatgattttgctcctaggcctggagttagaatttctgccaggattgaattatattgaaatctgctgtctttttaaactcttgtaaaataggtctctagggaaaaccaacagaacattagcctgtgcaaaaccatctgtttggggagcacggtcttacattgtgcttggcacatagatctccctgtg

SEQ ID NO: 59011 - DNA, 610 bp, Homo sapiens
  misc_feature 17: n = A,T,C or G
cggggccccccctcganggtacttctagaattaattaacgcgggcagcactactgcttagtaaagcattgagatgtctaggtgtatgcatatctaaaagacacaggacttaatccttcacattgtgtatgatgcaaaaaccttagctcacgagttggactgctgaccctatccccacagttgattggcgaccctgacacatccctatctttgagcaaacacccactaatgatcaatacatactaaaggaactcagaggctggcggtgatcctacatatgctgaacgctggttccccgggtccccttatttctttctctatacttagtctctgagtcttttgcttttccaaatctctggtcccaccttatgacaaacacccacaggtgtggaggggcaacccacccctacactcagtctaactacagagcagaatatcttaaccactctattcttttgcttccacgacaaatattacattctgaaaaatagctgctattttaatgactgctagtactatagctcatcatcatcatcttcatcaacataaaaagtctagagatggctcagacccactaacacttaagggtgctgagctctcttctgacataa

SEQ ID NO: 59012 - DNA, 599 bp, Homo sapiens
  misc_feature 528: n = A,T,C or G
cgggccccccctcggaagtcttctagaattaattaacgcggggatgctcatttgtcaccacttactattcaccatagtactggaaatactatcaagagtaattagacaagaaaaagaaataaaagatatttaaatcagaaaggaaaaataaaagtatctgtatttgcagatgatatgaacctatgtatagagagccctaaagactccaccaaaaaactgttcaacccaataaattaattcagtgaaattgcaggacataaaatcaacatataaaaatctatggcatttgtatagacaaacaatgactagccaaaaacaaatcaagaaaacaatctcatttatcatagtataaaacataatcaggaataaatttaaccaagttgaaaaactgaaaactataaaatgttaatgaaaaaaagggaacacaaattaatggaaagatatcccattgctcctgaataaaaaagtagtgtcttaaatgttgataatacataaagtaatatatagatccaatgccatgcttatcanaatcccagtggaatcttcacagaaatagataaaacaatccaatattgtgtatgaaaccataaagaccctga

SEQ ID NO: 59013 - DNA, 479 bp, Homo sapiens
cgggccccccctcggaatacttctagaattaattaacgcggggggaaatgaattaatgtagtacacaacaaatgtcaagatactttaataagttttttagctctcacaaaataaaatacaaaactaagtacttagtgaaaaccctacatgatacattatggtaaaaagcattaaaaacaacttgctatctaccttcttccatcccccagtgctgaccatgctgccttgaacagcattgtgtcgttacaggcttcagtgtcatttgaggacgtgactgtggacttcagcaaggaggagtggcagcacttggaccctgcccagagacgcctgtactgggatgtgacactagagaactacagccacctgctctcagtggggtaccaaattcccaagtcagaggctgccttcaagttggggcaaggagaggggccatggatgctggagggggaagccccacattagagctgttcaggtgagtg

SEQ ID NO: 59014 - DNA, 380 bp, Homo sapiens
cgggccccccctcggaagtcttctagaattaattaacgtgggggctgtgggaggaagaaggctagcgggcgttggccgtatgtgggtgtcttgaggcagtttttcagttctttcatttaccaaagtgacatgcacctactaggtgccaggtgtttagacgtacatacaaccctctgcaaaatctttcagtgtagtcctctgtatgaaaagtttccagccaagaattgccactgcacctgagataagggggatcctggccattaaggaaaccttgccttcgaaactgagccgtgaggaactatacaaaatgggaaattgggacaaatcccagtggctcatgacactaagaagtaaaattacgaactaaaaaaaaaaaaaaa

SEQ ID NO: 59015 - DNA, 544 bp, Homo sapiens
  misc_feature 24, 479: n = A,T,C or G
gccccccctcgaaagtcttctagnattaattaacgcgggaaggacatcttccccgacctcttcaaacgggccgccgagcgcctccagtacgtcttcgggtataagctggtggaacttgaacccaagagcaacacttacatcctcatcaacaccctggagcctgtggaggaggatgccgagatgaggggtgaccaaggcacgcccactacgggcctcctgatgatcgtcttagggctcatctttatgaagggcaacaccatcaaggaaactgaagcctgggactttctgcggcgcttaggggtctaccccaccaagaagcatttaattttcggagatccaaagaaactcattactgaggactttgtgcgacagcgttacctggaataccggcggataccccacaccgaccccgtcgactacgaattccagtggggcccgcgaaccaacctggaaaccagcaagatgaaagttcttaagtntgtggccaaggtccataatcaagaccccaaggactggccagcgcagtactgtgaggctttggcag

SEQ ID NO: 59016 - DNA, 586 bp, Homo sapiens
  misc_feature 15, 28: n = A,T,C or G
cgggccccccctcgngggtacttctagnattaattaacgcggggattttcttgtgggagtggtatctgggtgatctaattacaggcaagctttccgtcttcttttcacttgtatcttccataccttttaaaatgtgctatttactaaaataaataattaccttatgtattttattatcaaaataattttaaaacataagcaacaacattaagttttttcttaattttttttttttggtagttgatgttactgggtttttttttcttcttttttaataaatgtttcatttttcactttcccctcatgcacttatttatagcaccttggatctggaggcagagtggtttacaagaaaataacaatgaatgttgcttttgcagacacaaataaaactaaaaagtggataaagataagaattccctaaacaaaacaaatttaaccaccacaggcagacaggccagaagaaaaaaagtaagagtttgtctccttttatttatttatttatttttaacttagctggccagattgggaagaatggctctaatggtttcattaactcaacaaataaaattgcaacacctaaaaa

SEQ ID NO: 59017 - DNA, 580 bp, Homo sapiens
  misc_feature 30, 565: n = A,T,C or G
accggggccccccctcgaggtacttctagnattaattaacgcggggttgcccagtttacttaaactttaatgaaagtagaaagtagattaaacatttaaattttatttctttcctaaatagaaaaaaaaaaggcccatgagtttgagcccttgccccaaagagagttgtttttctgatcaatcttactggagtttcacctgagaagatagatttgtcacataaaaaatgcagcttatttgtagtgttttgaaaggatgtaagaaaggatgagtggcttcagtattgagtcaatcgatatcaaatgaatggatgtgtgagcacatggaaaaatctgctgtcagtcacatttctcataacattgaggtacagtgccgagatcttgcataagaaattgtatggatattagttggcaaaattgaaatgaatgagacacagttgggccctaaagaactaaggagggggattgacaaagaatagaattaaactacttgactcaatatgttaagagagtttatgaaaagatagtcgtgaagggtgaagctaatttgtaaactaatgcctganaaaaacataagcatg

SEQ ID NO: 59018 - DNA, 605 bp, Homo sapiens
cgggccccccctcggaagtcttctagaattaattaacgcgggtattttagctctttaatttgaaaaaacttgtccattaactgtgctatgactcaaaggttaacttttagcacaatcattaaattataggcttgagtgacagacagacttaggacctaggttcgtatcctggctttgccatgtaacaccgagcacattatttaacctctttgagcctcaattttatcctctatagaggaaaataacagcaccaaccatctaggtttgttgcaagaaatcagtgatatctaatttcatgtgaaatgctggcacagtgtctggcatagtaaattttaactgtcattatcagtgttcagacctgagaagaaatactctcctgccatttctctttgagattataaggcaagctctttagagtgggagtggttatacttctacaatatttctgtgatttgaattttaaaaactgtacaaccaaaacataaaaataaagtggataccaaggctgaagttattacagctgtcctctatagtaatatgattttgtttataatctgtgaaagtttaaagtttaaatttattgacattatacgtttataaacaaa

SEQ ID NO: 59019 - DNA, 540 bp, Homo sapiens
cccccctcgagagtcttctagaattaattaacgcgggggggcgtcaaccttctttccctgaagtggctggggttcctgtttccttctttgattgacaacttgtgttaaccctcgcacatctctgggccaatttttgcttgaaaatggcagctcccgagcagccgcttgcgatatcaaggggatgcacgagctcctcctcgctttccccgcctcggggcgaccgaacccttctggtcaggcacctgccggctgagcttactgctgaggagaaagaggacttgctgaagtacttcggggctcagtctgtgcgggtcctgtcagataaggggcgactgaaacatacagcttttgccacattccctaatgaaaaagcagctataaaggcattgacaagactccatcaactgaaacttttaggtcatactttagtcgttgaatttgcaaaagagcaagatcgagttcactccccatgtcccacttcaggttctgaaaaaaaaaaaggtctgatgaccctgtcgaagatgataaaaaaaaaaaaaa

SEQ ID NO: 59020 - DNA, 609 bp, Homo sapiens
cggggccccccctcggaagtcttctagaattaattaacgcgggggtgggcgaaaagggaatggtgatacactggcggtgggaatgagcatgactacaacgctgtatgaaaaacagtatggataagccttaaagagatctaagtaaatctaccatttaatccggcaatcgctactagttgagtactctacgccaaaggaaacaagaactctattctatgtaaaagacgcttgcacacgtatgtttacggcaccacaatttacattagcaaagatgtagaagcaatctaaatgccaattaacttccaagtggataaagaaaatgtggtacatatacactatggaatactactcagttatgaaaaagaacaagatcgtatgttgtgcagcaacttggatggagctagaggacaatattctgaagaaagtcacacaggagtagaaaacctaaaaccaaaaactgtatgtcctcactagtggaagataagctatgagtacgcaaaggcatgcacagtgatataatcgacattagagactcaagaggaggacgatgaaagggggggctagcgataaaaactacgcattaagtgcaatgtacacacagtccgatgg

SEQ ID NO: 59021 - DNA, 380 bp, Homo sapiens
cgggccccccctcgaaatacttctagaattaattaacgcgggctgatgacctgaggaaaagacttcccagtgcacagctcgctcctgaaagagaagcgcccacaatactacataggcggaattccttcctgcgttgaggaccgagcctgtcaatgccactttctagcagatactattatcccttacatgcctggcacgctatatgtctaagcatatctgctcctataaatgggcacttctctcgcacatccaaatatgacttctacttataccacatactgtgtgtctaaactcactagacccgtcagttctatctatcttgaaccttactatcctcacttgctgatcgatcttacctgacgataagactgataaaatcc

SEQ ID NO: 59022 - DNA, 457 bp, Homo sapiens
  misc_feature 16: n = A,T,C or G
ccgggccccccctcgngggtacttctagaattaattaacgcgggcagatatttaagaatgttagcacaggtatttgaataaattttgcttctaagagaagttactgtttattcctaattagatggggaggaaagtctttgaagaggaacctctactttactttttacaaaatgaacctaacagatatctacataataccgcacccctaaaaatatacattattatttgcacaccacacgtaatctaagatcaaccacgtacttggccatgaagcaattctcaacaaattatgaaaaactgaaattattccagttacactcagagcacggcaaaataaaaatagaaatcaacactaagaagatctctcagagccatatatctacatagaaattaaacaatctgctcctgaataacttttgggtaaataataaaattagggcagaaaaaaaaaaaaaaa

SEQ ID NO: 59023 - DNA, 574 bp, Homo sapiens
ccgggccccccctcggggtacttctagaattaattaacgcgggtaaatggtggctattttcacagataacatcattactcccatcccttactatggtttatacaaaagaggctggagaataagtacatttttacagccgggtgtggtggctaacgcctgtaatcctacttagcactttgcgaggccaagacaggaggatctcttgagcccaggagttcgagaccagcctgggcaacacagggagaccctgtctctattgttaaatcaagaaaacctaaaaaacattttcatttacatagcaccaaatataagagcctttttttttttaacctagaaagagtattttggagagagaaactaaggatcagaaggtttaagagtatcaaaaatctgaggccaggtgcctcacatctgtaatcccagcattttgggaggctgaggtgagtagatcacttgagtttaggagttcaagatcagcctggctaacatggtgaaaccctgtctttactaaaaatacaaaaaaatcagctggtatggtggtacatgcctgtaatcccagttacttggaaggctg

SEQ ID NO: 59024 - DNA, 196 bp, Homo sapiens
cggggccccccctcgaaatacttctagaattaattaacgcggggagggggggtgtctaagtttccccttttaaggtttcaacaaatttcattgcactttcctttcaataaagttgttgcattcccaaaaaaaaaaaaaaaaaaaaaaaaaaaaaaaaaaaaaaaaaaaaaaaaaaaaaaattaaaaaaaaaaaaaa

SEQ ID NO: 59025 - DNA, 353 bp, Homo sapiens
cccccctcggaagtcttctagaattaattaacgcggggggagctaaagtggtcgtgattcatgctgtcgcgggaaccccgaagtggggccccacgtaacaagaagatgacccgaagttgctccgcagtgggctgcagcacccgtgacaccgtgctcagccgggagcgcggcctctccttccaccaatttccaactgataccatacagcgctcaaaatggatcagggctgttaatcgtgtggaccccagaagcaaaaagatttggattccaggaccaggtgctatactgtgttccaaacattttcaagaaagtgactttgagtcatatggcataagaagaaaaaaaaaaaaaaa

SEQ ID NO: 59026 - DNA, 611 bp, Homo sapiens
  misc_feature 28: n = A,T,C or G
cgggcccccccctcgaaatacttctagnattaattaacgcggaagaaaaacaaaattctgtgtgtggaaatatattttttcaagttattcttctttcaacctggattcagcctcaggctgctgctgacatcagtgatcctctctggggtgaggctggagggcttgcattgcactggaagggcatgaggcacacctactgccacagcagagaatcaaaggaccataactgtcccttggggggttgaagaattctttaaagtgtgaatatttggggaacacagaccaaggctgtgccctgattttccctttctgaaagtcacactttaactaaaatatttctgttctacaaatttccatatatcaaaaaaaagctgtagaatttaattcatagtgtcttctcaaaaggaagaggaaaacaaaaacagttcttcgtaggagtcttttattttttggtgtcttaaatgtcaatgatcacaaaaacttccgggttctcttcattatagacctgcattgctgaatatgttattgctttgacttctgttccctaaagttggggttagagaaaaaaaaaaaaaaaattatgcaagaaagtaccattttgtcattggaag

SEQ ID NO: 59027 - DNA, 596 bp, Homo sapiens
cgggccccccctcgagatacttctagaattaattaacgcgggggggagaaggaaacgttagcatcatgtttcccatttagggcaggagtgagaggtctctcttcctgatttagatatgcaaaagctggtatgttcagtaggaactgtacatgtgttgggaggcataaagactaattagcaaccataatatggtcactaccctaatagactaaatgaaatcttgcaatttcaaattactctttctccatattagatttacccacagctatatttctgtttaagtactagggtgagggttttctgttactttgttttttaatgttgttccttttgaaagaatcagtcttgcagctgagtgaaaaatctgtggaatgtattgtttgtcctctttacatgaaactactcatacttaagcaaaagtcagtcttatagcaagactgttagccctcaaacttgactctactgatctgaccatttccctctcatcgccagacaactgacgatttccctggttttagtctgcgtctctgctttaaagttattgtgatatccttctagatcatacacaagtctaacagttaattagttaacagttt

SEQ ID NO: 59028 - DNA, 529 bp, Homo sapiens
  misc_feature 24, 36: n = A,T,C or G
ttctagaattaattaacgcggggnaggccctggggngaagaacccattgctcagtgcaaatgggcccctttaatccttgtatccgtccccaggtttggactggcttgaatttcttggctaggggagaaaagttccatcggcccagtgggcgagaagcatccgctcatgggccctgtggggtcctggctactagctgtggttttcccccacccccacctcatggctgttggactttgcatgcagtgaatgtgcccacgtgctcaagctgggagaggagaggggaagggaggtgccctgagcagcacacgcctgccacagtccgtgtgggggtagagatggtacctctaggaacagttggtctgatttgcacctttggcagcctgtagcaaaactcttaacattataaagaaagatataagagccatttcaaacagtgaaggagagaaaaaaataagaagtctggggattttaaccagcccagttagggcagttaagactccatgaagggatacagagctttttacccaca

SEQ ID NO: 59029 - DNA, 603 bp, Homo sapiens
  misc_feature 45: n = A,T,C or G
ccgggccccccctcgaaagtcttctagaattaattaacgcggggnaagaagcagttgaaaccactctactgagatttttttcctgattttttttctaggtcctcttggaggagaataagatgagtgactattcccgaactcaccagaaggtattcatccaaatgagtgcccaccatgcttcctgtagtctgtagaaccataagccaaataaacatcttttctttataaatttataaattacccagtcgcagatatttatagaaagaacagcctaatacaggtgctaaatacatatctgacaataaatggtagttatctcttagaactgttatgaggattaaacgagttacagtgtccatcttaaaaagataattctgaaaaaaatctcataggttcactttgccttgtcaagaatatgattaccattaacttctgtagataggaaaaaaatgtgctgagctccaaaactgacagacattttgctaaaagaatatcaaatctcattaaaatgatgacagttatttcaatagttgacagtagctatcccaatacaacctaacaaggcattttctcttcagaatcactcgatcatatggccatttc

SEQ ID NO: 59030 - DNA, 400 bp, Homo sapiens
  misc_feature 25: n = A,T,C or G
ggccccccctcggaatacttctagnattaattaatattagggagcagtattatctgcatttacttcatgaagatgcataactttcagatcttttaggatgatgtgtttggtttttttcctcctttgtgaggattattaggatattaaccgtccctcttaacacacgggaacctataccatatgtgaaaattaaaagtcaattatttgagcactcaacttaagcagtagttggggaaagaataatgtcaaagaaatacaaacatttggctgggtgcagtgattcacacctgtaatcccagcactttgggggctgaggtgggcagatcacttcaggccaggagttcgagaccaacctgggcaacatacggaaaaccccgtctctactaaaaaaaaaaaaaaa

SEQ ID NO: 59031 - DNA, 604 bp, Homo sapiens
cgggccccccctcggaagtcttctagaattaattaacgcgggacataagattccagggagaaaaatctcatggaaacacagactggataatcttgaggatatgctgatggtgcactattgcttgtcaaccagaaaaaaaaaaaaaagacaattagaaactccagaaaaaaaaatcgaagacagtcataagaagtaacaatgtgacataattctgataaactgatggaagcattaaaaaaattcatttgatttttggtgctagaaacattctcttcaagtaactcatgaatcctgatgataaaacagaggatgagaatgatagtcaaatgcagacccaccatactgatttctatgtgcatgtactgttttgatttttaaaaatgctacttaaaaaaagttctaaaaaattaatttaattttagaaatgttctatatctcaatggatgtatgggttgtagacatgtatacaatttgtcaaaaactaattgaatgacatatttatgatttgtgcatttttctaaatgcatatgtgcctttaaaaagcaatcaaacattcaactctagttaatcatatgcatgtccaagtgtttaggggtgatgtata

SEQ ID NO: 59032 - DNA, 371 bp, Homo sapiens
cgggcccccccctcgaaatacttctagaattaattaacgcggcctgacagacagcttcagcagcaaaccttcccccaaactacaactgagaacctgcccaaaatctgtggatgaattgaatgctgaaaggctttctcggacaacccagttcacaagtactggaataagtctcaaattcaaatgcacaaacatcaacataaagcaaaaaaataaataaataaaacaaagacgtaattcaactaaaataataatctttcagtaggtgatccccaaaaactgaaaatatatgaaatgattgagaagagttcaaaatagttgctttaaggaaactcagcaaacttcaagaacatccccccaaaaaaaaaaaaaaa

SEQ ID NO: 59033 - DNA, 609 bp, Homo sapiens
cccccctcggaagtcttctagaattaattaacgcgggtgcttgaaaaatgctgactcccatggtccgtccttccctcactcttctcagctataaagtgaggagcgaaattcagtatcttttaagattcctctcaggtgtaaaatgctgtgattctaaaagtttaattttgtagttccagagacaatgccaaacacctgtgtgtgcttagtgctttgtaaagagtggtaataacagtgacaccacataggccgtagttttgtagttccagagacaatgccaaacacctgtgtgtacttagtgctttgtaaagagtgaataacagtgacaccacataggccatagttttgtagttccagagacaatgccaaacacctatgtgtacttagtgctttgtaaagagtggtaataacagtgacaccacataggccgtaattttgtttttgcttttgttagggtgttcagcatcttgactccttaaataaggttttcagtcagatttataaagcagcattgaagaagttgtattatatttgagtacagttggaatccatggcagttttatggaggccaaatatatcagatgaataggctaatttccctgagttgct

SEQ ID NO: 59034 - DNA, 397 bp, Homo sapiens
  misc_feature 16: n = A,T,C or G
cgggccccccctcganaagtcttctagaattaattaacgcgggggagagagagagagagagacccaggcttttgtgtaacagccagctcttgaaggaactagtagagcaagaactcactggctatcgtgagaacggtgccaagtcattcatgagggatctgcccaatgactcaaacatctcccatttcactccacattcaacactgaagaatagatttcaacataaagtttggaaggttcgaatatccaaaccatggcatggtccattaagatttaatttttgtatatggtatgatgtgtggataaaagtttatttctatttctatatggatttccagttgttccaatggcatttttattaaaaaaacaaacaaacatatagaaaaaaaaaaaaaaa

SEQ ID NO: 59035 - DNA, 593 bp, Homo sapiens
ggccccccctcgaaagtcttctagaattaattaacgcgggatcttcccagactttacagtggtcaagccaaatttccaaatccaagattgatatttgagtgtagacgctgaatatcaacttactccaggccattccaagtgtaaacggtctgtttcattaagtgtgattggctactctctcctcaattgcaaatacattgccatctgaattctcttccataatgatcaaactgactgctggttacttggggagggatttttaaacgtgttggtttttgtttgtttttttgtttttactttagaactgaaaaatctcaggtaactacaaaatgatagtttctccatttaaaccttaattagaaatgacaaagcttgaaagagaagacaggccacatcagtatgctattaagctgtctttagtccacaatttactaccatcacttcaacttttctttagaactgaaaacagtatatgactgaatgccaccttcttgaattatttggctagaggatggtattaaacagaaagggcatatctccaagtgagttcttatggaggaaaactgccccagagccatggtgtctccctgttc

SEQ ID NO: 59036 - DNA, 325 bp, Homo sapiens
  misc_feature 23: n = A,T,C or G
tgggtaccgggcctcccctcggnatacttctagaattaattaacgcgggggagctgtcttgtcatcttttagagtaaactattctataaacatatgcaaacagccctaaataaatctaaagtctaaagttttattgatgtgaaattaaattcttattggccaaaaaaaaaaaaaaaaaaaaaaaaaaaaaaaaaaaaaaaaaaaaaaaaaaaaaaaaaaaaaaaaaaaaaaaaaaaaaaaaaaaaaaaacaaaaaaaaaaaacaaaaaaaaaaaaaaatcgggcccccccccggggggaccttaaaaacccccttaacggggaaa

SEQ ID NO: 59037 - DNA, 616 bp, Homo sapiens
ccgggccccccctcggggtacttctagaattaattaacgcgggggggcaggtctgtgttgtggttgcatacggattgtactgctgggaaggccgccacacctttcctgttgatgtgtctacttaacagtcattgggaaagtagaattgagctgtcaaatcttaaaattttgtggagagatgcttgtttttggactgattttcttttctggtcagctagtaaactagtagcaactctatgaggttaatgcagccagaaagaagcctttgaacacagtgccgtcaaaaaaaatgtttgtcttctctttccatttgctggtgagtggaaacctcacttggttaaacctactcagtgtttttgcctttgtatctccaggtctccgggctttgggttgtcactggttgctgagaccaccagtggcaccttcctcagtgctgaactggcctccaacccccagggccagggagcagcagtacttccagaggaccttggcaggaactgtgcccggctgctactggaggaaatctacagggtatgtccacagcttcctctgatagaggagtgaccaggaagcagtttgttttctcattctcatctcttggcagctttcgtcctct

SEQ ID NO: 59038 - DNA, 566 bp, Homo sapiens
  misc_feature 31, 535: n = A,T,C or G
taccgggcccccccctcggggatcttctagnattaattaacgcggggtgcgctaccgcggctgcctcctgctgtgcaggtccccgaccctctctctgtcctcattgcgcccagacgggccggcccagagctcccgggtcgtctttcgtgtggccgcgagggttcttgaagcttttgagattaacaatggcaggaaaatcatcactttttaaagtaattctccttggagatggtggagttgggaagagttcacttatgaacagatatgtaactaataagtttgatacccagctcttccatacaataggtgtggaatttttaaataaagatttggaagtggatggacattttgttaccatgcagatttgggacacggcaggtcaggagcgattccgaagcctgaggacaccattttacagaggttctgactgctgcctgcttacttttagtgtcgatgattcacaaagcttccagaacttaagtaactggaagaaagaattcatatattatgcagatgtgaaagagcctgagagctntccttttgtgattctggggtacaagattgac

SEQ ID NO: 59039 - DNA, 318 bp, Homo sapiens
gggccccccctcggaagtcttctagaattaattaacgcggggtacgggggaccctctggggcctgggtgtgtgactgccctaaggaaaggtgcttgtagctcggtaggacttaacgatgggcatcggtgcgtttcccggcaacggtaggaatcgccgtgctcaggaggactcgggagcaagcccggggacaggaggtgcgcaggcgttggggccacacggacgacccaaacacaagactgtgtgccccttagagagccaaagggatccctgtgccatgaattaaagctttctggaaaatgtaaaaaaaaaaaaaaaaa

SEQ ID NO: 59040 - DNA, 435 bp, Homo sapiens
  misc_feature 41: n = A,T,C or G
gccccccctcggggtacttctagaattaattaacgcggggnatcccatattctataatttttgtgttttaaaaaaccaccatatttcatagatatctttccacttaagcacattcggagctccatcatttttttttttttttgagacagagttttgctcttgttgcccaggctggagtgcaatggcgctatctcacctcactgcaacctctgcctcccgggttcaagcaattctcctgcctcggcctcccaagtagctgggattacaggcatgcaccaccatgcccagctaattttgtattcttagtagagacagggtttctccatattggtcaggcttggtctcaaactcccgatctcaggtgatctgcccgcctcagcctcccaaagtgctgggattacaggcaagagcaaaactctgtcccaaaaaaaaaaa

SEQ ID NO: 59041 - DNA, 604 bp, Homo sapiens
cgggccccccctcgaaagtcttctagaattaattaacgcggggggtccagaaggcagactgctatgggttgaactgtggtccccaagaaatgttgtgaagtccttaacacccagtatcttacacagtaaccttatttggaaaaaggatcattgcaaatgtaattaggatgaggtcacatgatggagtagggcaggaccctaatccaatatgactggtctcctaataagaagatagccatatggagacagagacaaaggaagaatggaatgtgaagatagcagcagagattagggtgattaaaaaaaaaaaaacaaaaaaacaaaaactgtcaaccactgacatccatcactagaagctaggaagcatggaacagatttcccttaagagttctcaaaaggatccacccagctgatatcttgatttcagacttgtagcctctttaattgtaagaagaaatttctgctgcttcaagtcacccagtttgtgatattttgttacagcagccctactacagggggtgtatgaaaaattggctatgagctggtcatgtgttagaattgggtgatgaatctacacagggtgtttgttatattattgcttact

SEQ ID NO: 59042 - DNA, 297 bp, Homo sapiens
attaacgcgggggggtcggttattttataagcaaagaagtacagccagtatgattctgaagcaactaggccacagtgagaaaaaagttggagagtgaaatctcaagcaagccaaaaagtgatagatgagttaaaaaaaaaaaaaaaaaaaaaaaaagttgcctggcttggtgcagtggctcatgcctgtactcccagcactttgggaggctgaggtgggcggatcatctgaggtgaggagtttgagaccacactggccaacatgtataaacccgctctctactaaaaatacaacaat

SEQ ID NO: 59043 - DNA, 598 bp, Homo sapiens
ggccccccctcgaaagtcttctagaattaattaattgtggttacttttaagcagtaggattatgggtgatataaattttctactttgtgctcttggcttccccaaattttgacattgtttttaaaataagaaagctatttctttaaaacaaaacaaaaaaagcatagaaaataactagttttaaaggccatgttcactttgcaacagataattagatttgaaagcaaagcagctttgagtccttaagttattccattatagcatccatcagagataatttttaacatagctcacccctattgtacattattgcatgcaagcaaagcttaactttcttttttcttgactacagttttttgtctccagaaaaatcctactttgtaattgtaaaatatgtaatacatattcaagtctataaaaaatatacattccaatgcagcattttaaaaatcaaatttttatgtattagtaatgtgtacttgggccccaaaaaaaaaaaaaaaaagcggccgcttttttttttttttttctttttttttggcataggcattactagggacgtgaatgggagactggtatagaaagtggtgaggagccg

SEQ ID NO: 59044 - DNA, 450 bp, Homo sapiens
  misc_feature 13, 26: n = A,T,C or G
ggccccccctcgngggtacttctagnaattaattaacgcggggaggagggaccacggacagaacctagccctatatcacctgtcgagcgtgcaggtctagccttctttgcttacgtcagaatacctgccactcccgctggcatacctgtggacttacactaaaaagcatgctggttttgggtagggggagcatctgtcgcagtggaaatgctctgctggagtaatggattcgacgagattctgtcttaccggtgccagtcactactccagagatgggaggcacacttagtgattgggcaaactctatcttctatgtcagcctgtcaacccactgccccattttacaagactttcttttacccttgacaaaatgtctcagttaattctaaaagttttctccactacttagtccaaaaaaagctattaaatcttactgaaataaacaaaaaa

SEQ ID NO: 59045 - DNA, 590 bp, Homo sapiens
gggccccccctcgaaagtcttctagaattaattaacgcgggtcctactggagtccatttgctactctgatgagagcctccatgtctctgttcaaagaaatttgggttagatttttcatctgctgatggtggtactgtaggcttgggaattgcaacaagctttggtatagatctgtctcctatgaaatccttcatttcatcgtagtttccaagcatactctgaatacgacttgataacttatcttctttgctagtctacaaaaaaataaaataaaataaaattataaaatgagcataatcagaaataaaatataattctgaactaattttccaaacttcgaatggaaaggggcttttcaaagggaggctttacctcatatcttaacgttaataccttgaagcaaactccaaatatatcatttctgtagtgaaaaaaaaaatcattgaaaagtgcctaaaaataaccatagtaaaatataatccgagcacagtggcacgtgcctgtactcccagctactctgggcagctgaggcaggtttgctcaattccaagattttgaggctccagtgcactatgatttcacctgtgaag

SEQ ID NO: 59046 - DNA, 580 bp, Homo sapiens
cccccctgcgggagtcttctagaattaattaacgcgggggctatattacctaaaataggtattcaacaaaaaaattaaaaaataaagaacacacacagggaaaaaggagcagtaagaaaaactgtctttgagagtacccagatgttggacttaggagacaaagacctcaaacaaatggaaaatctggagtttgaattttatttaaaagactcaaaagctgatttaattgggagaagaaaaaaattagcaaacttaagaagagatcaatagagattacataacctaacggacggttttttccttagattatacaacctaaagaacagcctgaaaaaaatgtgggacaccattaaatttacatatgtatcaataaccagaagaagagaaagggagatagaaactacatttgaaaatctagtgctgaaaacttccaaaatttgattttaaaaaaattatacatacaaaaatctcaacaaactcaaaataagatgaaaacaaagagattcacattaaaaataatgaaagtggctaggagtggtaactcacatctgtaatcccaacactttgagaggctgaagca

SEQ ID NO: 59047 - DNA, 586 bp, Homo sapiens
cgggccccccctcggaagtcttctagaattaattaacgcggggggatggagctaaagcttacagggaaaattatacctttaaatgcttatatagaaaaaaaatctaaaaattaatgagctacgcacattcttaagaagtttgaaagaaagctttaaatatttacgtagaaaaacatctgaaaattaataagctacgcgcattcctaagaagtctaaaagaaaggcaaataaacccaaaagaaacagaaaattagaaagtagaaattacaaagaaaacaaacacaatacaccaaacccaaaagacagttttttgaaaagaataagattgttcacatgcttgtgtaaactatgacaaacaatataaaagtaagctgtggttatccagtagagatgaaacttcaaataaaaagggctgaagtggccggaggagctgctagtttatataggggaggtcagtgaagttctcactgggcagaaaccaaaaggaaggaaggaagccgtaaagacatcttgagggagtgtgttccaggaagaccgatcaccaacggcagaggatgagtggctgggagtacacaggagctagaag

SEQ ID NO: 59048 - DNA, 597 bp, Homo sapiens
cgggccccccctcgaaatacttctagaattaattaacgcgggatccttcaggtagaagtaatgccttcattatgtttggtgtgaaaccagctcatgtcccacctcataaattcccataaattagcctcaaagaaataaaactaaatcactcatatcctttcacaaaatggatttttattgtggtcatacatggtttctcagtgccacagaaaattgctatgtagggacaaaaaatttttggatggctctgtaaagaaacatggtaggttttcagaaatgagttgtgcaggaatgtggttaatgaaaagcagaaagggttaagggaagagaaaggaagccaaggagtgtggtatgtacatcaaatgattactttttaagcccctctaggctctgataaccctttccccaagtcagatcccaacaaaattcatcagtaactgaagtgattgtgctaacagatacataaagactaccggagaaaagtgggttgagatgggctcagacttattgttaggacaactctgggagtcttgtgtctgtgccaaccacgtatccgtgggctacctggagatgagttctaacaaccagcacagaacc

SEQ ID NO: 59049 - DNA, 227 bp, Homo sapiens
ccgggcccccccctcgaaatacttctaaaattaattaacgcgggggaagtgtggggaaaggaaagagaaatcagattgttgctgtgtctgtgtagaaagaagtagacatgggagactccattttgttctgtactaagaaaaattcttctgccttgcaaaaaataaataaataaataaataaataaataaataaaaaaaaaaaaaaaaaaaaaaaaaaaaaaaaaaaa

SEQ ID NO: 59050 - DNA, 517 bp, Homo sapiens
ccgggccccccctcgaaagtcttctagaattaattaacgcgggtagtgtcgtaaaaaaaaggtttttgaatagaaattacattctttgacaccctcagttctttcaaactttcaactctgcattttattgcattttctcatttaactgttagtatatgtttgaatataggctgactttttttctctattgcactttcttctttttttctttttagaaaataagcaattaggggttagatgcaatatgaatataaaatagttctgtaaataccaaatattatttttagttctggaagttaaaaatactctccatagtaacgtgtgttataataataaatatttcttttgtttgacttttttaaaattctacaatggtaaaagctattttaatccatgttagcaatttaattcctattaattcattttactatcataatagcaaagtattcagaataaaagaggtttatatcttctattaaaatgcagtaatactattcaaatcaaaaaaaaaaaaaaa

SEQ ID NO: 59051 - DNA, 603 bp, Homo sapiens
cgggccccccctcggaagtcttctagaattaattaacgcgggggtcttaaataacattttcattgtagttaaatacatataacataaagtttatcatctgaatctttttgaagggtgcagttcagtgtgaagtacattcacattgctgtgccatcgatcttcagaatgctcatcttatgaaacaaaaactctacatcctttaaatattacattttttcttaagcacaatacttattagataacagaataaacacacataattcttcaacataatgctttcacataatctgtttctcaattttttcctgtaatctaaaattccaatttaccatattaatatatccaatagttataaaaatttaattttgctcaattcttaccacaagtaataaaaactaagattcagtctcaaaactatatattcacccaaaacaccatttattttgtgctccagtaaagggtagcgatataactaagaaataggttatgtccctttaaatcaacatttgacattcacattatatttaatcttatcaaaatattgtactacacttctaaatatgacaaaataattattttacacatacatgtaaattcaaagac

SEQ ID NO: 59052 - DNA, 540 bp, Homo sapiens
ccccctcgggggtactgtctataattaattaacggggcaaacacggaagactagtggcagactggctactttttatatctttagtagagacagggatataacaggtagttgtaggaggtgagacagccacaagaagcttgaaaagctctccccaaattggttgactctagacgatacacacacatataagagactggaacacactcaagccactcatacatccttggccatcagaagctgcacatacagagatttcaagagaatctggcagagagcaaaagccagggaagaattgaaaatggcctgaagtaagaatgcacttccagctcacatacagatccattagcagagagctgaaagtttactggctcgaggtgtttaactataatctcttaccaatctgactgatccctaaataatggagacagagaacccaaggaagccaagcttaaaaataaaaataaaaactgaaaagagacatcagcagctgcatactgtagagacttcacagatttagtccaagcaagttactaaacaagc

SEQ ID NO: 59053 - DNA, 581 bp, Homo sapiens
  misc_feature 547: n = A,T,C or G
ccgggccccccctcgaaagtcttctagaattaattaacgcgggggaagagggcaggcgtgagcaaccatggccgggcagcacctcccggtaccccggctggagggcgtttctcgggagcagttcatgcagcacctctacccacagagaaaacctcttgtgttggaagggattgatttggggccatgtacaagcaaatggacagtggattacctaagccaagttggagggaagaaagaagtaaagattcatgttgctgcagttgcacagatggacttcattaaactttaccttttgaccagttggtccagagggcagctgaagagaaacataaagaattctttgtttcagaggatgagaaatactacttacggtcacttggagaagaccctagaaaggatgttgcagatatcagaaagcagtttcctttgttgaaaggagatattaagtttccagaattcttcaaagaggaacagttcttttccagtgtttttcgaattagttcaccaggattacaactatggactcattatgatgtatgctacatanatgagaaatttaaagctacaatagatctttagca

SEQ ID NO: 59054 - DNA, 446 bp, Homo sapiens
  misc_feature 28, 82: n = A,T,C or G
cgggcccccccctcggggtacttctagnaattaattaacgcggggtggtgaagcaggccccttcccttgatagaaggggctngaaatgtcacactgtaagtagtatgcatttagaaagcaatggagaattggctttctaattggcaattagaaagcatggtggctcatgcttgtaatcccagcactttgggaggctgaggtgggcagatcacgaggtcaggagttcgagaccagcctggccaacatagtgaaaccccgtctctactaaaaatacaaaaattagctgggcgtgacggcaggcacctgtaatcccagctactcaggaggctgaggcaggagaatcgcttgaagccaggaggcagagtttgtagtgagccgagattgcaccactgcactccagcctcggctacagagctagactccatcttggaaaaaaaaaaaaaaaa

SEQ ID NO: 59055 - DNA, 586 bp, Homo sapiens
ccccctcgaaagtcttctagaattaattaacgcggggtgttacttgaattgttttcttttgtcttactgttctgtttgtggttttgcatattaagtatttaattacataaacattgaatatgaatgcaaagtttatatgattagctactgaagtaaattgtgtaccattaatttcaatgaaaattaatttctgacttttaagaattcaccttaaggcatccttttttttttcttttaaatacaggggttttttgggaacaaattacccacctgaaatggggaaaaactgtactttatcccgaattaggcaattcatagccagagatgaccctaattgatcatgagaacgagcctctcagatctctgactacaggaaggataatagactgagtgctgcagcagctgcactcaaatccatcactgtgtttgtgtcgaggccagtttctcactagctcctcccagtcactgactgagcatggcaggcctgttcccgggagacacatcatttttccaacaggcacctttcactcaaagactttctgaggccttgcaaactttccttagtattgcactacagtctaagaca

SEQ ID NO: 59056 - DNA, 475 bp, Homo sapiens
cttctagaattaattaacgcgggcaatctcagttgtatgttggaataacctaaggactatgacaagaatcatgtctcagtccagaccctagatattctgaggtaattggtctggggtacaacccaggcttcaagccttttaacagctccccagatgattgtaatgcagagctagggttgagagtcactgcctagaactctagccttaagtctaccaatacaaaagaggcaaagagtttcagaaagtcttttaaaaaagaaaaataaatttttaaaataaaactaatgttataaatctaattaatgacactttattttaccttttctttcttttttttttttttctgttttgagatggagtcttgctctgtcaccaggctggagtgcagtggcacaatctcagctcactgcaatctccacctcccaggttcaagcgattctcctgccctcatctcatttctattaaacgcctttgc

SEQ ID NO: 59057 - DNA, 611 bp, Homo sapiens
  misc_feature 38: n = A,T,C or G
actgggtaccgggcccccccctcggaaatacttctagnattaattaacgcgggggcaataattaaatcagttcttgtttaacaaattgaataaagcaaagtttcataaattaaaaaaaaaaatccttcccacaataacccaagccctgttggtttcactggtggatctataaactaaggatgaaataatatcaaccctactcaagctctaccagaaaataaagcaggaaggaacacctccaaacccattttatggggcctgcgtttctgtgataccaaagtctcaagaaggaaaactatagaccaatattctttatgaaattagacaaaaaaaaaaatcctttaaaaattattggccaggcacagtggcttacacctgtaatcccagaattttgggaggccacagcagaaggtttgcttgagtctaggagttcgagaccatgccaggcaacacagtgagacccccatctctacaaaaaaaaaatatatatatacatatagctgggtgtggtgatgcatgcctgtagtcccagctgcttaggaggctgaggtgggaagattccttgaacccagtaagttgagactgcagtgagccgtgatcacatgccacta

SEQ ID NO: 59058 - DNA, 303 bp, Homo sapiens
cgggccccccctcggaagtcttctagaattaattaacgcgggtatgcggggggcctgccatcagaatcaagaagacatcggagtctgatatgctgccctatataggacagttaaagaaggttcagtggtcctcagtttgcagtgctatagctcctggcggaagtcaagagggaaacatttctattttagttccaatattcctacaggatgattatcacgtagtattattttatgactacagatcacaggctctagttgagacacactaacatgacaggataagctatagaataaaataatata

SEQ ID NO: 59059 - DNA, 601 bp, Homo sapiens
cccccctcgagagtcttctagaattaattaacgcgggggagagagagaaaaaggaaggagggaaggaaggaaggagagaaagaaaagaaaggaaggaagaaagaaagaaagaaaagaaagaaagagaattttcacagatttagttccaagcaacagatgctacctcaggggcagaaagggaatttattgagaggatttggggtcactcacagaatcccaggagtgaactggggaatcaggattggaaagtgagcaggaagaatcctggcaactggccagcaatggtaacccagccacagtgacaccacggaaccggtctgatgaggccatgctggcgatggccactagacactgtagttgtctcgctgcctctgctgccccagaaataggatatggctgctcttcccattagctgttgctggtaataaatcacttcacaacttagccgcaaatgacagcaatcattgcattaagtctcatggttgctgtgggctgggatttgaagaaagaggtggctggtttgttttggctcaggatgcaaacaaacagtgcaatcagtgatgcttgccacagggcggctgggggtgctggacaagtgggc

SEQ ID NO: 59060 - DNA, 350 bp, Homo sapiens
ccccccttcgaaagtcttctagaattaattaacgcggggtgggggctgggtcaggcagtcccgtgctttggctccctaggtgtgagtgcaagcaggagccctgatgggagtcagtgggaaattccctggccactggggtaatgtttcagagaggaatggaaccactttcgctgcctactgctcctttcacagtatccaaagtttctttcactttttctcttgagttcctctgttccttcttagataaaagtgcacagcgtgaatctctacatactattttgctcttttcaaaagggtgacgcacactaacaaagcctctaatctgccatcttcgaaaaaaaaaaaaaaaa

SEQ ID NO: 59061 - DNA, 610 bp, Homo sapiens
cccccctcggaagtcttctagaattaattaacgcgggtgtgatgacttatgcctgtagtcccagctacatgggaggctgaagcaagaggatcatcagagcccaggacgttggaggctgcagtgctctaggatcgtgcctgtgagtagccactgcacttcagcctgggcaacatagtgaaatcccacatctttattttaaaaagaaaaaaagagtcaatgtaatgaaacaaaaagactgaggacctatttcagattaatttcctgattttgttaactgtatcacagtaatgaatgggaaattctttgtttataggtaatacactcaaatatttaggggttaaagaataaactctagtctcaaagcatcttccaacaaatcattgattacgaaaagaaaattggtaactttacaatggaaaagcctggcagaaaatcaccttaaccaagtgattaagacataaaaaaaagtggggaagctaaggcaggaggatcacttaaggccacgagttcgagaccaggctgggcaacatagtgagaccctgtatctacaaaacaacaataacaataacaacaacaattcactgagcgtggtggtgcatgcctgtggtcc

SEQ ID NO: 59062 - DNA, 576 bp, Homo sapiens
  misc_feature 23: n = A,T,C or G
ccccccctcggaagtcttctagnattaattaacgcggggtgccgtggctgtgctgagggtggcggccggatagggacccagaactccatttgacagatgaggaaacggcgaggcagacaggtgacctgacttccccacaatcgctgcaggacaggaagaaagtaaactccagagcccgtgctcttagctactaagctgtactgctcttcattttggtaaatggggcgggtggagtgtatatatacgtaatatatatgtgtgtgtgtaagcgtatgcgtttttatttcttaaaaatatggctcagccgtatttatttacagttattggaatctttctcctccaactgggaaaataactggaggagaaactacaattatttctacacgcttactacacaatgcctggaagacttacaaaaacactaaatagtgcagttccacgtacttggtgtttattccttttttttttttaacctttctcctagattatgaatgagttgaggaaagagatggtacagtcattctaataacgatagtaatgataatataaacaaccatcaccaaaaaaaaaaaaaaa

SEQ ID NO: 59063 - DNA, 378 bp, Homo sapiens
cccccctcgaaatacttctagaattaattaacgcggggcaataatgtttgaagacaataagtggtggtgtatcttgtttctaataagataaacttttttgtctttgctttatcttattaaggagttgtatgtcagtgtataaaacatactgtgtggtataacaagcttaataaattctttaaaaggagaaaaaaaaaaaaaaaaaaaaaaaaaaaaaaaaaaaaaaaaaaaaaaaaaaaaaaaaaaaaaaaaaaaaaaaaaaggaaaaaaaaaaaaaaagccggccccccccgggggggacctccatttccccctatagaaagtcgttttaccccccctaactggccgtgttttaaaaacgtgggaacgggaaaaacc

SEQ ID NO: 59064 - DNA, 334 bp, Homo sapiens
tacttctagaattaataacgcggggtggggagggagaaaatggggaaatataggtcaaaggatacaaagtcggagatatgtaagatgaacaagtctagagatagaatgtataaagtgagttctatagttaataaaagttaattagagatttgtgttaaatgagtagatttcagttgctctcatcacacaccaaaaagtaactacgtgagaggtagatatgttaatttgctttactactgctattatggttaaaataaaaaagtatataaaactatgtggtagttgaatgttgaggaaccgaagacatactcgtacattgcttatggaaaatgct

SEQ ID NO: 59065 - DNA, 586 bp, Homo sapiens
  misc_feature 39, 378: n = A,T,C or G
gactggggtacccgggccccccctcggggtacttctagnattaattaacgcgggtggagaaggtggatgtgatgaagccaataattcaggacttattccttcttgtgttgtgttttttttttgcccttgcaccagagtatgaaatagcttccaggagctccagctataagcttggaagtgtctgtgtgattgtaatcacatggtgacaacactcagaatctaaattggacttctgttgtattctcaccactcaatttgttttttagcagtttaatgggtacattttagagtcttccattttgttggaattagatcctccccttcaaatgctgtaattaacaacacttaaaaaacttgaataaaatattgaaacctcanaaaaaaaaaaaaaaaaaaaaaaaaaaaaaaaaaaaaaaaaaaaaaaattaaaaaaaaaaaaaaaaaggggccgcccccgggggggacctccatttccccctatagggagtcgttttaccccccctcattggccgtgttttaaaaacgtggggacgggaaaaaccctggggttccccaatttaatcgcttggaagaaaatccccttttc

SEQ ID NO: 59066 - DNA, 574 bp, Homo sapiens
  misc_feature 553: n = A,T,C or G
cgggccccccctcggaagtcttctagaattaattaacgcgggtggggaagttggaaaatacttaaccaaatgatgaaagtgaatatcacctacaaatatcatgtacctctggacatcatgccctcggaaggacacaaaattatttgcctagaattctagttaaaaatgtaaaagatgaatctaagtatgacaaatatcaggcaaactcaaatggagggaaattctataaaataacttgcctgaactgtttaaaatgtcaccatcataaaagacaaaggaaaactcatgcctgtaatcccagcactttcaaagcccacggtgggaggatcactcgagcttaggagttcgggaccagcccgggcagcatggtgagacctcatctgtactagaattcaaaaaaaattagccaggcgtggtggtgcacacctgtggtcccagctactccagggctgaggtgggaggatcgcttgagcccgggaggtcgaggtggcagtgagccctcatcgcaccactgtactccagcccaggccacaagagcacgaccctgtctcanaaattataaaaatttaaaagc

SEQ ID NO: 59067 - DNA, 137 bp, Homo sapiens
  misc_feature 36: n = A,T,C or G
ctgggtaccgcggccccccctcggggatcttctagnattaattaacgcgggttacccgcgcctgcacgcgcgctacactgactggctcatcgtgtgcctaccctacgccggctggcgcgggtagacccgcgcaaccc

SEQ ID NO: 59068 - DNA, 527 bp, Homo sapiens
  misc_feature 9, 355, 356, 357, 358, 359, 360, 361, 362, 363, 364, 365,366, 367, 368, 369, 370, 371, 372, 373, 374, 375, 376, 377,378, 379, 380, 381, 382, 383, 384, 385, 386, 387, 388, 389,390, 391, 392, 393, 394, 395, 396, 397, 398, 399, 400: n = A,T,C or G
  misc_feature 401, 402, 403, 404, 405, 406, 407, 408, 409, 410, 411, 412,413, 414, 415, 416, 417, 418, 419, 420, 421, 422, 423, 424,425, 426, 427, 428, 429, 430, 431, 432, 433: n = A,T,C or G
acttctagnattaattaacgcggggaaaaaaaaaaaaaaaaaaaaaaaaaaaaaaaaaaaaaaaaaaaaaaaaaaaaaaaaaaaaaaaaaaaaaaaaaaaaaaaaaaaaaaaaaaaaaaaaatttaaaaaaaaaaaaaaaagggggccccccccggggggggcctccattttccctttttggggtttttttttccccccctttttgggcgtttttttaaaactttggggttggaaaaacccttggtttccccaatttttttctttttgaaaaatttccctttttccccgtttggttttttaaaaaaaggccccccccgtttcccttttcaaaaattttccccccttttttgggannnnnnnnnnnnnnnnnnnnnnnnnnnnnnnnnnnnnnnnnnnnnnnnnnnnnnnnnnnnnnnnnnnnnnnnnnnnnnnggccaatttgggaaattttttttttttttaaaaaatttaccccaattggggtttagtttttttcccttttgaaaaaaaattccttttttaaaaa

SEQ ID NO: 59069 - DNA, 610 bp, Homo sapiens
  misc_feature 11, 45, 46: n = A,T,C or G
cccccctcganaagtcttctagaattaattaacgcgggggacagnncggacaccaggactccaaaatggcgtcagttgtaccagtgaaggacaagaaacttctggaggtcaaactgggggagctgccaagctggatcttgatgcgggacttcagtcctagtggcattttcggagcgtttcaaagaggttactaccggtactacaacaagtacatcaatgtgaagaaggggagcatctcggggattaccatggtgctggcatgctacgtgctctttagctactccttttcctacaagcatctcaagcacgagcggctccgcaaataccactgaagaggacacactctgcacccccccaccccacgaccttggcccgagcccctccgtgaggaacacaatctcaatcgttgctgaatcctttcatatcctaataggaattaacctccaaataaaacatgactggtaaaaaaaaaaaaaaaaaaaaaagatatggctgcccttgagaaggattatgaggaggttggtgtggattctgttgaaggagagggtgaggaagaaggagaggaatactaattatccattccttttggccctgcagcatgtcatgctcc

SEQ ID NO: 59070 - DNA, 594 bp, Homo sapiens
cccccctcggaagtcttctagaattaattaacgcgggctataaaagctatacaacgagatacactaaaaacataatagataactcagaattctgcccaatattcaacccataggaaggcagggaaaagaaaaaaatattaagaacacagagaagaaatagaaatcaaaaaataaaatggcatacttaagcccaaacatatcaataattatataatatataaagggtctaaatataccaattaaagaaccatttggcagagtggattaaaaattatgacccagtgtatggtgtctataaggaactcacttcaaatgtatgaaagttgaaaataaaatgatggaaaaaggcatatcatgtagggccaggtatggtggctcacacctgtaattccagcactctgggaggccaaggtggtggatcagttgaggccaagagttcaagaccagactggccaacatggtgaaacccccccatctctactaaaaatacaaaaattaggtggacttggtggtgggtgcctgtaatctcagctacttgggaggctgaggtgggaggatcacttgaacctgggatgctgagactgcagtgagcca

SEQ ID NO: 59071 - DNA, 449 bp, Homo sapiens
cgggccccccctcggggtacttctagaattaattaacgcgggtgtggacaggcagcagagcagtgagggccagggtctgtgctcacggggcggacgtggtcttggccaacaagatgatttttaaaatcatgacaaagagactatcggccagatggggtggctcatgctgtaatctcagcactttgggaggccaaggcgagcagattgcttgagctcaggagttccgaaatcagcctgggcaacatggcaaaaccctgcctctactaaaaatacaattaactgggcatggtggcgcacgcctgtagtcccagctttttgggagactggggcaccagaaccgcttgaacccagaagacggaggttgcagtgagccaagattgcatcactgcaccccagcctaggtgacagagcaagactatcttaaaaaaaaaaaaaaaaaaaaaaaaaaa

SEQ ID NO: 59072 - DNA, 578 bp, Homo sapiens
ggccccccctcggaagtcttctagaattaattaacgcgggggatcagatagtgactaaagcagcttatgtgctattttaccaacgtcgagatgatgaattttataagacaccttcacttagcagttctggttcctctgatggagggacacgaccaagcagctctcagcagggctttggggatgatgaggcttgcagcatggacaccaactaatgctgactccacgatcctgccaccctgtagcgccagtgtaatcccccaggagaacatctttgacactctgcagactgctagtgttctgtctaaaaaccagacaaggaaatacccttcttttatgagcagaaggaaacaaaaaaaaaaagaagaccgtttacctagaagaagctatgtcaagaggctgaattatttttatttttaaacaggtggtgagaaatttctgtgaaacctgtgaagctgaaaagggggtgggatgggggtactcaatggagtatgtctgatggatcccgaagaatggagaggaacacaggcgctgagtatggagcagcctggagacccaccccacctgcagggctgccctga

SEQ ID NO: 59073 - DNA, 360 bp, Homo sapiens
cgggccccccctcggaagtcttctagaattaattaacgcgggagaataaaaaataggataatttaacctaccagcccttctcccccaataactgtggtctatacagagtcaatatattttttcagagaaagttattcgctcgattttttctgaatcataattaaactttatgataaaataaaaaaaaaaaaaaaaaaaaaaaaaaaaaaaaaaaaaaaaaaaaaaaaaaaaaaaaaaaaaaaaaaaaaaaaaaaaaaaaaaaaaaaaaaaaaaaaaaaaaaaaaaaaacaaaaaaaaaaaaaaaaaaaaaaaaaaaggggcgggccccccccgggggggccccaaattcccccaatgggg

SEQ ID NO: 59074 - DNA, 594 bp, Homo sapiens
cgggccccccctcgaaagtcttctagaattaattaacgcgggggtttttttcagactggaatccaaggttcatattccatctggttattaatgtctctctagcttttcttaagatataatgggcacgtagtaaactgcaccacttgatgattctgacccatacaaacactcatgaaaccatcccgaccgtcacggcagcgagcactcaccccacgcacacactcatgaaaccatcccaaccgtcacggcagcgagcactcaccccacgcacacactcgtgaaaccatcccgaccgtcacggcagcgagcactcaccccacgcacacactcatgaaaccatcccgatcgtcaacggcagcgagcactcaccccacgcgcacactcatgaaaccatccctacagtcacggcggcgagcactcaccccacgcgcacactcatgaaaccatccctacagtcacggcggcgagcactcaccccacgcgcacactcatgaaaccatccctacagtcacggcagcgagcactcacccaacgcgcacactcatgaaaccatcccgaacgtcacggcggggagcactcaccccacgcgcacac

SEQ ID NO: 59075 - DNA, 607 bp, Homo sapiens
cgggcccccccctcggaagtcttctagaattaattaacgcggggtctcactatgttgcccaggctggtctcaaactcctgggctcaagtgtagctcccacccggcccccaaaagatgtcccaaagagaagaagttttgaatgctgatgaaacctgtttatcaattttttttctttcgtggttcatgttttttgagtcctaactaagtcttttttttttttttttttgtgagatggagtctcgttcttgtcacccaggcgggagtgcagtggcgcgatcttggctcgctgcagggtccgcctcccgggttcaggcgattctcgttactcagcctcccgagtggctgggattgcaggcgcccgcggccacgcccagctgatgttagttttctaggtatcaagtgtttggtacttgttacagttgaatgttaacacttaaaatttttcttttctcttggattcctccccaacatataagtagttgaacaaagtgagaaattttgtttattttattaaaatttttttaaatacgagcagtctcctgaacaagaatagtttcagacagactctctgttttagaatagcttctgatggcattggctacctttt

SEQ ID NO: 59076 - DNA, 501 bp, Homo sapiens
ccgggccccccctcggaagtcttctagaattaattaacttcattcaaaagccaagtacattaactttggctttttttgacttgggtaacttagagtgattggtggacatgggtttttaaattttgattctgggggctcttgtacattaccccaacgtcttgcctagatttatgaaacactgattcttagaaacatagatagaaagaaaactggggatagctactatctgcattgttcttggcattaaattaagtgatacttagaggtaggtaattatgtgaagtcatcatcacggggtttatgtgcctgacaatttgtggttttaatcatctcccatttgttaccaaaaagagatggagtcaactttgggggagttggaaacaaagattctgctgaattaaaaatgtggtagaaagaggaacaccttattaagagaattaactgacttttagctttatttccttaagaaaggaaatgctctatttccaaaaaaaaaaaaaa

SEQ ID NO: 59077 - DNA, 613 bp, Homo sapiens
  misc_feature 46, 588: n = A,T,C or G
ccgggccccccctcgaaagtcttctagaattaattaacgcgggggnatgagaaaactaaaacgagtcccactaggcaaaaatcaagatgtcagcagggctgtttcattctggaatctctagagggagaatccattttcttgccttaaccagcttttaaatgttgccctaattcctttgttcatgcttcccactcctccatcctcaacaccagcaatggctaataaagtctttctcaaatagcacttttgggtccctcttccacaatttaaggatgctagtgattaccactgggcaatgtagataatccaaaataatcttattttaaagatacctaattaacaaccttaatgtcatttgttattttaattctcctttggcacgtaaattaatatatccacaaattccaggtattaggacacagacatcttgcagggaggcggattattctgcctactacaagtgagagaatcggaagactggctggttaatagcacgtttcgacagaacaattttcaagcaataagataccaacctagtggaacttaatgcagccctgaagctgacaaagtataactaagaaaactgtnacaaaacacagtccagaaaaggcct

SEQ ID NO: 59078 - DNA, 600 bp, Homo sapiens
cgggcccccccctcgaaagtcttctagaattaattaacgcaggtttgtttaccttacttcaggggccagcacactatgaaccacaggccaaatctgggccactgtctgtttttgcgtggcttgtgaactaaggactgtttctatatttaaggacaccttcagtgttcataaataaaggagacacaatcactctcatttgcttatgtaaatggctttcaccctataacagcagagttgaatatctgcaacagggaccatatggccccaaaatcctaaagtacttactatctggccccttacaaaaaaaattagctggccgggcgcagtggctcacgcctgtaatcccagcaccttgggaggccgaggtgggcagatcacaagatcaggagtttgagaccagcgtgaccaacacggtgaaaccccatctctactaataataacaaaaaattagccgggtgtggtggcgcacacctgcagtcccagctacccgggaggctgaggcaggagaatcacctgaacccaggagtgagccaagatcacactacactccagcctgggcgacacagcgagactttgcctcaaaaaaaaaaaaaaaaaagc

SEQ ID NO: 59079 - DNA, 543 bp, Homo sapiens
  misc_feature 96: n = A,T,C or G
gccccccctcgaaagtcttctagaattaattaacgcgggttggtgaatattttgaagagaattagttgagattaaccataaagagaattacacagngaaaaaaaaaaatctaaaaacgtaaatggaaatcttgtttcttttgttcttccacgacttccttttaagtaattgctaaaagtaactcttcaccatggggcaaagttatttcaatgaaaccttatattgattttcagatacatccattccaaagaaaaacccttcaaatgtcaggagtgtgggaaaggattttgtcagtctagaactctagcagttcacaaaactttacacatgcaggtaagtttgttttcttgtttaaaaacagtggctggttcgtgttatcattactgctttgcaaaaggtgttcaatggcagactctttctcttaaaaggctctatttagattagttctctaggtggggaaaagcaacacttgatttctttaatacataaaattaatcttgtttaacataaagcatttttatattttttttcaaaaaaaaaaaa

SEQ ID NO: 59080 - DNA, 426 bp, Homo sapiens
cgggccccccctcggaagtcttctagaattaattaaccgggggggggtgggggatcaagtgatactaggaatataggtacaagtaagactgtcgttttcattgctttctctttggactgattctgttcattataacagcgttgtgaagtagaggtgggattaggaaccttctgctgtaatcaactcccttgctgcccaaacaccagcctcatacacaacaccaacaggaccagcatggagggaaatattccaaggggtatttactatgctggtgtcaaagaaaaacacacctgtaatctcagccactcaggaggctgcggcagaaggattgcttgaactcagttgttcaagaccagcctggacaatatagcgagacctcatctcaacaacaacaaaaaaaagtaaaagaaaagaaaaaaaaaaaaa

SEQ ID NO: 59081 - DNA, 188 bp, Homo sapiens
tctagaattaattaacgcggggcagtcagctcctcttctgctggcttgcacattgcctcctcacaacatgttttcatactttctttaataaatctgcctttctttacctacaaaaaaaaaaaaaaaaaaaaaaaaaaaaaaaaaaaaaaaaaaaaaaaaaaaaaaaaaaagggaaaaaaaaaaaaaaa

SEQ ID NO: 59082 - DNA, 593 bp, Homo sapiens
  misc_feature 28: n = A,T,C or G
cgggcccccccctcggggtacttctagnattaattaacgcgggtcaatcaaattcaaaatccagctggtcgctgtgtaagtattttgggattggtgttttcagttactgttttgagttattttggtttattcttcttccccagtatgaagtgtgtttactcttggcctaaaaaaaaaaaaattacatcaaaataatcttgacattctgttcctgtttaggtttttaatttagttacatgccatgaagtttaagataaatagattcaggggtattgggatcagggacacagtgtcccagtgtgatctggagcaacaaggtatgttgattatttggtggaaagtcactagtcatcattacaaattataaagtatctgagtttgggaataatccttcaaaaaaaatttaaaaataatgaagtatagctgattgaagagtatccctgtaacagtgttcattttacttacctgtgttataacacttcgttgactggaatgaaagtgattaagttagtgttaactctctgggacttgtgagtagaagagaattttgtgtataaaaactacctatcaggctatctgaatggtcctaatta

SEQ ID NO: 59083 - DNA, 383 bp, Homo sapiens
ccgggccccccctcgaaagtcttctagaattaattaacgcggggatactgtcaacacaaattaaataatatacgttttagagaatcaatcacttatcagctgctatgcacagcttcgcctgtttttttttctttagatatgttgtagatagtggggttcttcaaggacaaatcgtaaaggtagtgttttagacttctgcacacaaatggaaattcaggtagaatatctttctttcttttctagaaccatctatcttactcaaaaaggaacctcaaatgtgtgagaataagagaaatagtttcattttctctatgaaataaaagctagtgactctctggtatgtcctccaaagtagagccatattgggatttaaaaaaaaaaaa

SEQ ID NO: 59084 - DNA, 588 bp, Homo sapiens
  misc_feature 499, 529: n = A,T,C or G
gggtaccgggccccccctcggagtacttctagaattaattaaaaaaaaagaaaagaaatgtgtcttaacatttccaggtatgtgttgtattgaaattgatcagctaaattttacgggtgctggagactggaaaaagcatccagtttggttgctgtggagcaacatgcatattggattagaaaattgtgccaaaaactcccactgatgagaattcataggtgccccacactgtgacaaacacttatatgattctcctctttcctgtttactgcaaattctgccttaaggcttcttttcaagactcagaagccactaattataaaggaaagggcagttaattggcacatttttctcttgtgaaagcagttctttcagataagaattaatgtaaatctgcttttgtaaattgcaactttaaatttcgctgactcaaatttacaacagctttgtataccagaagaggttttggtaagggttgaacatttttacactgcaactntaaaacatcaccaatagattgtggattatntcacgtgcacaaacatacacacacacacacacacacacacacacacacacacacacaca

SEQ ID NO: 59085 - DNA, 363 bp, Homo sapiens
  misc_feature 336: n = A,T,C or G
attaattaacgcggggatacaaacagaagaaaaaaaaagcaatgaaaggacacaaaatgtcactggagaagaaagtgttaagaaaaagcaatagaactaattatgaagcccctcctttatgccagtcaatgtgctctaccccttctatctcacatctcacaataaccctgtaaagttcccctattttttagatggggaaactgaggcttagaagttaaattatttgcctaaggccatacagctaagaagcagcagagttagtatgtaaacaccaatcagcacaactactccaaagcccaagttctcctttaaacttacagtggaagagggaagcanaaaaaaaaaaaaaaaaaaaaaaaaaaa

SEQ ID NO: 59086 - DNA, 551 bp, Homo sapiens
  misc_feature 491: n = A,T,C or G
acttctagaattaattaacgcggggggggtgtgaggctagaggggaaagtgaatggcgaaggactgaagggatcccccccttcgggtccccggccgccctgttcaccctcgttcatcctcctttccgaagctcgctctcgaaggcaggagcgaccggcgcctttggctgaggaggaggagaaggaggaatcgcgccaggcggagcgtcaggtcccgttttcctctccggcaccagccgcctgagtccaccgccgcggccgcttttttttttttttttctttttgaattcttaagcttgttttacaaactttttcattcatcagagctgtagtgaaatatcatcattgtaattgatattctagcactacaaaaggcacaatgaagcttatttagttccagtactggaaatcagaggtaacagcacatccttccttggacatgctttactctgctgtagtggtcatcacagttttgattttctggataagaangtcaccacagcatttgtgcattcatctgatagccatcttccctgaaagacattgcattct

SEQ ID NO: 59087 - DNA, 528 bp, Homo sapiens
  misc_feature 39, 45: n = A,T,C or G
ccgggccccccctcggggtacttctagaattaattaacngcgggnaaacaaaaagaaatctacaattctttgtttttctattatttaaacagtctgcaatgttgttccagaaggtagacaagagactgataaaaccaaccaaaaaaacaagtgaaaggaataaaagcagaatggtatttaattattgagacgggaaaatgtatgtaattagtaagtaaatatacaagttggatctccttaaaaaaataaacttgagaaaattaaaaaaattttgtagtagaaaaaagataatccaaagggtccaacatcacaaaagtagttttaaattataagaatgaaatgaacaatgacaaatgtagcatatattaaaactgcaggatgcatctaaagtagcacttatgggaaatgtatagtcttgaacattataataaagcctaaagattattgggataaggatttcaaggaaactggcacggtgggagggtcaggagagggaggttaaacaaacacaagcaaaaaaaaaaaaaa

SEQ ID NO: 59088 - DNA, 248 bp, Homo sapiens
actgggtaaccggagccccccctcgggggtacttctagaattaattaacgcggggtgatgcctgttaggggccctgtcacccctcctgaagacctgcggcctagccatgtgatttcactggcactccataacgctgctgatactaggcctactaaccaacacactaaccatatacgaatgatggcgcggtgtgacacgaggaaagcacatgccaagggcaccacgcaccacctgtgcaaaaaggcctg

SEQ ID NO: 59089 - DNA, 609 bp, Homo sapiens
gggccccccctcggaagtcttctagaattaattaacgcggggcccatctcttgcatcaacatgacctgtatgtgagcacatgaagtcaaataactgtaaagttttaatgactgccccattggatttcacactggcatgggacctgtagtggcttttctttggcgaatttctccaatttggaataggtgtatttatccaatacctgtaccctcattgtatcttggaagtaactaacttacctttgattttacaggctcataaccaaaagaaacttggcttgtctcagatgagactttggacttggactttagggttaatgctggaatgaatcatgactctgggggactgctggaggggcatgattgtgtttttaaatgtgaggacattagattcgagacgtaccaagggcagaataatatggtaggctctgtgatcccacccaaatctcaccttgaattgtaatttgattgaattttaataatcctgatctgtcaagggcagggccaggtagagataattgaatcatgggggcatgattccccatactgttctcatcatacagaataagtctcatgagatctaatagtcttataaatgggagttcccctg

SEQ ID NO: 59090 - DNA, 590 bp, Homo sapiens
cgggccccccctcggaagtcttctagaattaattaacgcgggcggatcacttgaggttaggagttcgagaccagcctggccaacatggtgaaaccccatctctactaaaaacaaaaattagctgggtgtggtggcacatgcctataatcccagctactgcaaaggctgaggcaggagaatcacttgaacccaggatacagagggtgagtaagccgagatcatgctactgcactccagcctgggcaacaaagtgagattcagactcaaaaaaaaaaaaaaaaaaaaagtgaaaccatgaaagttttaagcaagcctccgcctttttttttttttttttgagcaacacttttaaccaacttgacctaattgacatttatacaccagtccacccaccaagagcagaatacattatttttccctaagagtaactggaagattcaccgaaacagaccatatgctaggcagaaaaataaaagtattgaaataacacagataacattcttgggctacaatattactactttagaaatcaatagaaaccaggtgttgtagctcccatttgtaatcccagtgattcaggagggtgaagc

SEQ ID NO: 59091 - DNA, 514 bp, Homo sapiens
cccccctcgaaatacttctagaattaattaacgcgggagagttctaattcttatataattaggtgttttagaattgtgacttgatcagggccccaagattatccgggatgatgtcatttctaagatgtaatctgatacgaaaatgaatttaaagagtaattttaaattaaataaatttaaagataaaaggaatgatttgaggctagtacacctaggactaggacctttggtcttctgattaatattatgaggcatggtatagtaagtggagctttggctctagcataaacacaggctcaaattccagtcccatcacttacttgctgtgagaccttggacaaatcatttgttctcttagagttaaactttcctgctttgtcaagtgagaataatactgcctaattcttaagattcttgtacaaattaatagaagtaacatatacacagaactgtgaaaataggcacttaccaaacttttctcttccagagatgtcaataagcagtatgcaatgtg

SEQ ID NO: 59092 - DNA, 601 bp, Homo sapiens
  misc_feature 44: n = A,T,C or G
cgggccccccctgcgagagtcttctagaattaattaacgcgggnggaaggaattaaaaaatacaggaaccaacttagtaattcctaatggctacagatggcacaatgtgaacatcaaaaaagaatgatgactgtaactgatcataaattcaatacataaaaaaaacctcaaaataatagacctaggcaataatcatatgacaatggctgttagaaccattaaatgaaaggacaatgtggatctttataacagatggattaatctttcaaaatctaaatcaattactaattttagcatcgccagaaagacattctatacctcctaaaacgatgtaacaggaaggccgctatatcatttaagtattcttgtgaaagaaactggacatggatctgaccaaccctctggatctgtgccgtccaatatggtaggccactagccacatatggtcattgaaatttaatttaaattaaaattaaaacatagtttccgccaggcgcagtggtttttaatagtcaaattaccaactatttgaatagacggaaaggtagttttataatctgagattctcaatccttgtggcacagtaccatcaaggagagct

SEQ ID NO: 59093 - DNA, 594 bp, Homo sapiens
  misc_feature 15: n = A,T,C or G
cgggccccccctcgngaatacttctagaattaattaacgcgggtggggtggggatgataaatcacaaaagtcctgcataaataggatgtctaatcaatttgtctgcctgggattcaagtaaagacagtggtgtgtgggagcttatatggactagcttgtgagagctggctgttaaagttttaggaattttgcaagccagttattaaacacagccattctaaacaattaaattacatgaacttccaattaaacaagttatattttttaaaaggaaaaaatattcaaaactcatcatattctaatccttttgctactgtccatgctcttgaaattatatatattaaacctattttatctttatggtgagaatatatataatggtgcatgttttctgaactcttcaatgagtgacatgacgttaataacttgaacttggccatcgtaggagtatttacatcacagaaacaggcaaacgctataaatcaggttcctctgccctcataaaaccagttgttaagcatttaccagcacatcactaagtgaagggcagaggaattcaagctagatttgaagatataaaattaaaaggtggtt

SEQ ID NO: 59094 - DNA, 617 bp, Homo sapiens
  misc_feature 27: n = A,T,C or G
cgggccccccctcgaaagtcttctagnattaattaacgcggggtctactgaaatcattatggctttgtcctctgttctattaatatggtatattacattgactaatatttgaatattaaaataaatttgcattggtgagataattccacttggtcatgttgtctaacattcttatgtgttgctgaattcagttttctagcgtctttaaagatttctggccgggtgcggtggctcacgcctgtaatcctagcagtttgtgaggccaaggcagtggatcacgaggtcaggagttcaagaccagcctgaccaacatggtgaaaccctgtctctactaaaaaatacaaaaattagctgggcgtggtggtctgtgcctgtaatttcagctactcaggaggctgaggcaggagaatcacctgaacctgggaggcggaggttgcagtgagccgagatcgcaccactatactccagcctgggcgacagagcaagactccatcaccaaaagaaaaaaaaaagatttctgtgtctatatttatgaggaataatggtttctcatttttttctttgatgctttcatctggttttgttttctgggtgatactggcctcaacaaatgaatt

SEQ ID NO: 59095 - DNA, 456 bp, Homo sapiens
acttctagaattaattaacgcgggcagacctctgactccagaggctcaaaaccaaaaacaagcaagcaagtatcaaattatatttaactgataattttgaagccatttctattttagtaacaatttacaactacctttatttactaaatattacatacaagtaacacatatggacacagacacaaagacagaagcagatattatagcttacataaaggattgtcatttgctggcttttgaatagtttttcttttccccattcagactatcattcttccattacctgtttcattgccctaaggagttgttagctaggcaaccttaaatttgcatttctaatgggacaactcttaggtgaaataaggtagaaaatttatatctcaaaagcacaacctaagactttaggcgtacatattgtaccctcatttgctcaaaccaaggaaaaaaaaaaaaaaa

SEQ ID NO: 59096 - DNA, 565 bp, Homo sapiens
cccccctcggaagtcttctagaattaattaacgcgggtgagcgcctggtttgactggggacttggggggatggggttggaagaatgactgccctttcccaccaaaaaagggagaactctttagattcagattgtgggtatgtagacttaataagtgaaacatcacagaagaagcctttattatacaatgacaaccaaacaagtactccggatatgcagtagaggaatcctctaagaaccatagagacttcttttctgtgatttttgttccccacccttgaacaccatctctaggatggagttggcctaagagtgaatgctgcaagatctgtgtttatgcctcttttcctcattcttcctcagtttgttcgtctgcttgaaagttggccaaaaaatcctgctgctcaccgacttcccgtggtcagctgctgtcaagcgttcactttctcttctgtcattcctcatggaatgagggtggttttgtcttcccgcttcccttgacctcaaaatcaggattaaaacctggggtagcctctgtgctcctttcttccaaaaaaaaaaaaaaa

SEQ ID NO: 59097 - DNA, 591 bp, Homo sapiens
cccccctcggaagtcttctagaattaattaacgcgggcagttaaaagaatttgctactaaccttctctaaaaaagaaaattattattataaccctggcaaaggtggctattactgaacactcagcgcttacacatatactctgacataattataaaactcgaaaagactggaacagcacacaagcagcacatttttatattgctgaaattaaactctatgctagcgaaacaagttaatgttattagaaactgggctatcttaaatttacaatagaagttgaagtcccaaaataaccaattctaatataaaactatacaaatttttgtctaaactatccacattctaaaaatacaggccatttagagatctactaaataatcacatattgaaaacaagtaaactctcagagtaagtaatgtcctatcttgtaataactataaatatgacgttcttgcataaaaagtcaaagactggcacaaatgcatccttagataaaaattaatgtatatgatgaatccgaaaggccacacgtaagatgatacaagcttctgagaaaagcatgacaagtgactacagagcactatatatct

SEQ ID NO: 59098 - DNA, 380 bp, Homo sapiens
  misc_feature 338, 346: n = A,T,C or G
ttctagaattaattaacgcggggtggaagtggagcagcagaacacgttgctcaagccccaaagggattaaacttgccactatggcacctgcctgttactaggccgaacagggacacgaagaaaacgttgcaagcacaagacaaactcgccccatatcaccgtgcatccccaggacctgctctgaaagcatgagctgatacatgtccacatggaatcatcagccaaattactgtagctgagctagggttaatgcctaagattcttatttaaatctcaaaatctgacttgttaaggcaactaagataagacagacctaacattggcacgagaggcaagtncatacctnacagctgaaatgggccactgacccagaacacgct

SEQ ID NO: 59099 - DNA, 572 bp, Homo sapiens
cccccctcggaagtcttctagaattaattaacgcggggcctttggcctggggtgcatctcctcccgcccttccatgtgcctttctttgcctctgcagtctcatttctcataattttgcaaattatattttgttgctttcttacctactattggccctaaatagcagaaagaagagaagtgaccgagagaacctcagattcttcattgaggattggtatagccatgatttcagtcatagcaagcttttgctcaacagcatatgggtgggattttgcaaaaatcctattctgatgaatctcaaaatagcatctaaacatcactacttcagaattacagtacagaattattagacctacagctagatcccattatcaaatgcattgaaaaagaacacattaggccgggcacagtggctcacgcctgtaatcccagcactttgggaggccaaggctggcggatcacgaggtcaggagatcgagaccatcctggctaacatggtgaaaccccatctctactaaaaatacaaaaaataagcctggcatggtggcaggtgcctgtagtcccagctactc

SEQ ID NO: 59100 - DNA, 606 bp, Homo sapiens
cgggccccccctcgaaagtcttctagaattaattaatcacatctgcaaggtctcagttaccttataaggtaacatgcacggattccagggattaggacctggatatctttggagtcattatttgtcctaccacaagctaaaatcaatttctgaaattcatgtaaaatctgttgaaggcacagcacatctctgaatataaatggttattttaatagtcttctaaaattttcttttaaacaccaataattgcaatctgcttatttttcatgtagaaaaatatttttttctcctaaaatttgcatttgaatgatacctttttttttgagagagaggggcgagtcttactctgtcacctgagctggagatcagtggctccatcttggctccctgcaacttccgcctacatggttcaagtgattctcctgcctcagacccccacatagctgggattacaggcacgtgccaccacacccggctaatttttgtatttttagtagagacggggtttctccatattggccaggctggtgtcaagctcctgactttgtgatccacctgcctcagcctcccaaagtgctgggattacaggcttgagccacggcgcct

SEQ ID NO: 59101 - DNA, 461 bp, Homo sapiens
  misc_feature 413, 425: n = A,T,C or G
cccccctcgaaagtcttctagaattaattaacgcggggtagagtggaggattaactagtgatgagagaggttatgctaagtaaactaagactaacttaaattcttttattcatcttttatttattaaaaaattttatttctttgaattttcctgtaatttccttaagctcttctataaaatgttatattcatgtgaccatacctcattatccttaacatttactctcaaaaagctttttatttttatttttttgaaagtagtttttctgtgtgtactctgtaacatgattttgctttcaaatcattgttgtgcccccatacaaaatgccttttatttttgagagatcgtggactttttagtatggcatgagtgtgctaaaagccagatatctttccacattcactggtggctntgacacctagtntttaatctcccatcctttacttaaccctgacagtgc

SEQ ID NO: 59102 - DNA, 477 bp, Homo sapiens
  misc_feature 438: n = A,T,C or G
attaattaacgcgggggctgattttagccgtgtctcatctacctgctgtctcccagtgttcttccagctccctgcccctcatcaacccactctcctcagacctcagctggggcttgaacctgataattggtgtagtcatcaggatgaggtgagtgggtcttcagcccctgatgtcttcagctgtacccttcatcacgaatttgatggactgcttgacaatggaactggaagagtaccactttgtggtggacttagctaatgcagtcttctccattgacattgctccagagagccaggagaagtttgtcttcacgtgggaaggatgacaatggactttcaccatgctgccacagggctgtgtgcatagccccaccatttgtcctggtcttgttgccatggatttagctgcctggaaatgcccaaaagggtctgcctgtntcattacattgatgatatgttaccctctgattctctcac

SEQ ID NO: 59103 - DNA, 619 bp, Homo sapiens
  misc_feature 16, 29: n = A,T,C or G
cgggcccccccctcgnaggtacttctagnattaattaacgcgggtccagaaatagacctacacaaataaaccgatctttaacaaaggggcacaggtaagtcaatggagaaaggatcatcaaaatatggagctaaaacaacttgctaactacataagactacatggatctagacacaaaacacatacctttcacaaaaaaattaactaaaatgagttaaaagcctaaatgtaaaacacaaaaccataaaatttatagatgataataaaggagaagtttaggtgactttgggtttgagaatgtctttttagataaaacactagaagtataatccaagaaaaaattgatgttagactttattaaaattataaacatttgctctgtaaaatactttgttgagtaagtgaaaagacaagccacagcctggtagagtatatttacaaaacacatatctcataaaggacttctattaaaaatatacaaagaactcttaaaattcaacaataagaaaataaacaacccaattaaaaatgggcaaaagatctgaataaacacttcaccaaagaagtattcacatggcaaataagcatataaaaaagatactcaacaatgtgtctccct

SEQ ID NO: 59104 - DNA, 533 bp, Homo sapiens
gggccccccctcggaagtcttctagaattaattaaatcacgttcaattgcagcagctgaagaaatgatgtctagaagaaaataaacttgcttaagacaaccagcttttgggtgaagagtgagggaggacattgggctcaacatcaatagtcaattaaaaaataaggcacatgattttgagtgattttccttggttcctgatgaatttacaggatgtttttgacactgtttagttgttttttttaagaattaatgctgagtttgagatgactaaataattagcttccataaaacgttcatgtggaacaattatgtgcagagatgttttcaaagtacagaaaatactaatttcctgaagtgaaatctaagaaatgttacaactgatgctaacatacatgtggagaagaaaaaggcttttggaaaatgttcaaagcttgtgaacatgcagtgtttaaagcctgtgattgttcattgtactatccttcagcaagtactttgcagaaaatagttgaatctttcatatgcattgaacca

SEQ ID NO: 59105 - DNA, 615 bp, Homo sapiens
cgggccccccctcggaagtcttctagaattaattaacgcggggtgggtaaagggggcatgagatctcacactacacttctttgcaacttcctgtaaatctataattatttcaaaataaaaagttttaaaaaattcagccacgtaaaaatgtcaggctcatcccagacttacgcattgagtgttgctataaggcagagacagatgccttctcgagtacggaaattcttgtgtttgaagcctccaagcattctgtcccatacgtactggggattagcagcttgatccatgatctttagcagcagagtttggtcctgctccctcacagagtctttagcatctcctagtctgtctattagacttggcagcactgtgccgatctgcgccttgaaccgatcctgcagccgggtcaccagggcggacaggatgtccatgcccagcagaaccaccttgtaattgctagagttcacccaagaggtagcaagtccatccacaagtttatctaacatggtctggtcatgctcaaggtcagcagacttctgtttgtctgagaaatagtctatcagttcttggccaacctgcaatcgtttccccacatccttctgcaacacctgcgcc

SEQ ID NO: 59106 - DNA, 464 bp, Homo sapiens
  misc_feature 10, 452: n = A,T,C or G
cccccctacngaagtaccttctataattaattaacgcgggggtactctgcatgtcacaaaggaaatccatttaaaaattggttcattattttgactttaaattcccatcaataaagaatgatttattccacacttttattgacatgctgaatttaaaagaaaattaattgtgcatattacagtgcctgtacattgtgataactgatacagttttatcagttttagcagtgaaactttggaaattcacaagtatgaagatacaatatagagaagaaaaaatacttggaaaaccatgtgaagaaattataaataaatactcgtattattgtacttgtttaatagtcttctagcataatagaattttactcaagtacactgattttaaaattaaagccaaagaatcaagcatttcttgcttttaatcaattggtagtatattaaatatttgagtntatactcttctc

SEQ ID NO: 59107 - DNA, 592 bp, Homo sapiens
  misc_feature 28: n = A,T,C or G
ccgggccccccctcggaagtcttctagnattaattaacgcgggtaccaagtatggccatggcagtcttgtgagtttgaatgtttaatgtaaagtgacttctgttggtcatagccacaaataatttcagatgtactaacttgataaacatattccagatgtttggttaaacctaaaaagacctctctggtggatgtagcagtacatcatttcatatgtattaatttcataactttttttttttttgagagggagtctcactctagggtggagtgcagtggttgacagagcaagactctgtcacaaaaacaaaaacaaaaagtaaataaattaccccctaggaggagtatatcccaggaaagtgtaacacctgaaacttaaaagattatctgccctgatgataaacgatagaaaagagacaggccaggccaaagtttgtcaactggtggactgaagataagttttatttagcctctgtgtttttctaaattagaggctaacatctcaaacttgggagaattcactttaaaaatccagtttttacggctgggcatggtggctcacgcttgtgattccaatactttggaagactga

SEQ ID NO: 59108 - DNA, 393 bp, Homo sapiens
cgggccccccctcgaaagtcttctagaattaattaacgcgggtcctgtcccccttcctaatagaattattggcttcccagtagagccctttaggagcagggatcagaaaaaccatgtagtttctagggcctaatcaacttgtgtagctgtcagacaaaagcggattttgagtgggatctatcagcctctaaattctgggattccatcgggtaaaacagaggtttctcccaaaatggaatccactgtgccttttctgttttccccaaaaagtttcaggccaccagacattaccttgggtgcatcaagagtggaaagacacagcggaggacagtaattcagccaacatacaatttcttttcaagaaaaacacattccaaaaacaaaaaaaagcgg

SEQ ID NO: 59109 - DNA, 503 bp, Homo sapiens
cggccctccctcggaagtcttctagaattaattaacgcgggaagtccctcttataatcactctcttcccatgattaaagggctactctgccttcatgttgctacccgctcccctggaaatggagaatcaagcaaggatgcggttttccttccattactacatccatacaagagtaaatcaagaataaaagtccagttaatgaaaagatcactggtcttaatatacttagcaaaattttaaaggcaattaaaagtatatacatagacaatgatcaaaattctaatgaaaagacccggctctcccctaaaagaagaaaaaatcatgtaatgtatatatgcattccataaaaacatacatggggaaaacttcagaagcctaaaaacaaaacatcagtaaaccaagccacacttagaaaaatgaaagctgatttttattttatcatcaacagccattctttagacatgaacatgcatacgtaatattctacgcacacatcacagctt

SEQ ID NO: 59110 - DNA, 506 bp, Homo sapiens
cccccctcggaagtcttctagaattaattaacgcggggcgggtggatcacgaggtcaggagatcgagaccatcttcgctaatgcggtgaaaccccgtctctcctaaaaatacaaaaaaaataagccaagcgtggtggtgggcacctgtagtcccagctactcaggaggctgaggcaggagaatggcgtgaactcagaaggtggagcttgcagtgagctgagatcgtgccactgcactccagcctgggcgacagagcgagactccgcctcaaaaaaaaaaaaaaaaaaaagagagaagcagggttcttttgttttggccttgggttgtccaaacaaatttgtgtgtgtgtgactttcaaccattttctcctttattcaatggattaaccaagaatcactcagctaaaggtttaaaaaaaaaaaaaaaaggaaaaaaaaccaaaaaaccgggtgcagtggcccacgcctatattcccagcactttgggaggccgaggcgggtggatca

SEQ ID NO: 59111 - DNA, 501 bp, Homo sapiens
  misc_feature 29: n = A,T,C or G
cggggccccccctgcgaaatacttctagnaattaattaaccgggcatcacagggtttatactggagagtaactacacaaagataatgtaataagcctttcagtgtaatattcatgattttgtcgtgagagatccactcaataaaaaccaggcaaatgtaaaaaaaaaaaaaaaaaaaaaaaaaaaaaaaaaaaaaaaaaaaaaaaaaaaaaaaaaaaaaaaaaaaaaaaaaaaaaaaaaaaaaaaaaaaaaaaaaaaaaaaaaaaaaaaaaaaaaaaaaaaaaaaaaaaaaggggcccccccccggggggaacaacaaaaacccccttaaagggggtttttttcccccccctctgggctcggggaaaaaacccggtagaggggaaaaaccccgggttccccccatttaaccgggtgaaagaaaaaaggattttgagaaggtggataaaaaagaaaaagccccccccaaaaccccctctccaaattggccccccccgggggg

SEQ ID NO: 59112 - DNA, 581 bp, Homo sapiens
cgggccccccctcgaaagtcttctagaattaattaacgcgggagtcagcaaactttttcaatacaggtctagagagtaaatatttcggtccctaggccacatactgtattctctgtcatagctactcaattctgccactgcagcacaaaagccatacacaattatgtaaacgaatgagtatggctgtgctccaacaaaatcttatttacaaaaaaaaaaagtgggccaaatttggcctgcagactgtttaccaacctttactcaatagcaaaaaaaacaggccaggagtggtagctcacacctgtaatcccagcatcttgggaggctaaggcaagagggttgcttgagcccgggagtttgagaccagcctagccaacatagggagatcccgtctctacaacaaatttaaaaattaggcagatgtggttgcatgtactcgtaatcccagctactcaggagtctgagcggggaggatcacataagcctggaaggttgaggttgcagtgagctgtgaaggtgccactgcattccagcctgggtgacagaagaagatcctgtctcaaaaaaaaaaaaaaaaagcg

SEQ ID NO: 59113 - DNA, 597 bp, Homo sapiens
  misc_feature 414: n = A,T,C or G
cgggccccccctcgaaagtcttctagaattaattaacgcgggaaatccagatgccattgatgctgttaaagttgtttatttttaatttgtattgaggaatgagagcacacttgggattcaattcaaaatataacagaaacaatgtaattgaaattgcctttaatattcatttcttgtttttgtaaggtatgcctgtatttcacggggtttaatacattgtttgatatcctgttatttttctaaattatatttgagttgatttctatccaggttggacttgtatgagaatgttgaaagacgttgacctttgatcacagacattacaatatgaatttttcagtttcaaaatgaatttttattactactaccccagttatctttcacatttctttgtaagtaactttactgtagttnaaaaaaaaaaaaaaaaaaaaaaaaaaaccacccaaaactgtttctcatatggctttaataataaagcataaacttgtttttatgataaaaaagtttactagagatttgctagatgccatttgttattaatctgtgctttgaggactcagtttcataggactcagaatgatgtttataagcctt

SEQ ID NO: 59114 - DNA, 597 bp, Homo sapiens
ggccccccctcgaaagtcttctagaattaattaacgcggggtgggagggcggtggtgagggaagtatctccccaaagaaagaagggtatggaacaggtaaaattaacagatgtttacaaaattgtcttaattattttccccaaaatgcatagccagttttcccaatcctagtttttctctatttacttaaaatgccatctttattatatatcatatagtaaattatctgtcttttcatttgccagtgccacagtgtcttcatttttttaaagctttaaattaaaaaggaaaaatcagagcttattcaactatctggtcaatggaaatttaacagtgatgcagtagttttagaatgtatacaaatttttccagcctgggcaatatggcgaaaccccatctctgcagaaaatacaaaaaattagtcaggtgtgctggtgcatgcctgtggttccagctacttggaaggctgagatgggagaatcacctgagcctgggggttgaggctgaggtgaactgagattgtgccactgcactccagcctgagcaacagaatgagaccctgtctcataaaaaaaaaaaaaaagcggccgccaccga

SEQ ID NO: 59115 - DNA, 388 bp, Homo sapiens
  misc_feature 13: n = A,T,C or G
cccccctcggaantacttctagaattaattaacgcggggggtggcttagaatttactgctagaaaatgaggattgtggattttattttacgtaagagatgtgttgctttctttgcaagagaaaaaatatcttggacccaaagaggacttttctaaagagatagagatggctcagtaaaagcacacctcattactagaaaaacaacccaaaacatgtatattattaagagtgggttaacagtctcatttttacatgtaacaaagcaaaagtaaaattttaactccactgagagagccacttaagtggttgtagtgaccagatgagaacatgtcctggatttaaaaaaaaagttgtagtgaaaaaagttgtagtgaaaaaaaaaaaaaaa

SEQ ID NO: 59116 - DNA, 599 bp, Homo sapiens
  misc_feature 58: n = A,T,C or G
cgggccccccctcgaaagtcttctagaattaattaacgcggggtgggggtgtacaggngcagaatatatatgatacataaatcatatctccaaatctttaatgagtacaactttcacttattcatgttccatcagataagattaaaattttccattaaaaaatttatttcattgaattgtttaaccaatattcattttatgttcaaaggccagtatagctttcacaaagcgacagaagcctgtagcccatatatagatagcatttaatccatatgtgagaattcaggagcattccaggaggcatcccagatttctcccaaatgtgatctggcatgttcaatttacatactcataaaaattcactcatcctcggaaaatgtaaaacacacttaagtatgatgaccagatagatgaatgcttattgttttttttttacatgaaaaataaaagagcacatgatttttaaatgtccagaactctcattacttgggctttggtgtttattttgatgaaagaatcaatattaatagtgtattgggcattagcaagggaaaaaaggtcatgaggattgcagctcagaagctgatctctctgaaatc

SEQ ID NO: 59117 - DNA, 451 bp, Homo sapiens
gggccccccctcgaaagtcttctagaattaattaacgcggggggctcaaaggagaaattacaagagaactttaagaatatgttgatacaaacaaaaatggaaaaaaaacataccaaagcttatgggacgcagcaaaagaaatccaaaaagggatatttgtagcaatacacacacctacattaaaataaaaaaaaatctttaaaaataactttacattacacctcaaggaacaaagtaagcccaaacttagcagaagaaatgcaataacaaagatcagagcagaattaaacaaaatagagctagaaaatatagaaatatagacaatatcaacaaaaactgtgtttttgaaaagaaaaaaccaacaaatctttagctacactaacaaaaagacagcgaacacaaataagcaaaatgtataataagaaggataacattacaactgataccacag

SEQ ID NO: 59118 - DNA, 538 bp, Homo sapiens
cgggccccccctcggaagtcttctagaattaattaacgcgggggggggaaacaaatccctcccaaacaaaagaaaattcaaaagtaaaagtggcagcttctccagatgagaagaaaacaatataagaactctgacacttagaaaaatcagtgttgcgacacccccaaaggatcacattaggtctgtagcagtggatcctaaccaaagtacaattctaaaatgacaacgaattccaaatatgaattgtaaggaagctcaatgagatccaagaaaaccaacacaaagaaataagaaaaatttccacaaatgtggaaaaccaatacaaagaaataagaaaaaatgatttaggatatgaaagatgagatagctgttaaaaaaaagagagtgtctggaaatgaaaaattcactgagggaacttcaaattactttaattgaaagctctaataataaactgtaaaagacaaaagaggttttcagaactggaaggcaaatcttttgaattaacctagtcagataaaaattagaaaaaaaaaaaaaa

SEQ ID NO: 59119 - DNA, 565 bp, Homo sapiens
cccccctcgagagtcttctagaattaattaaaatttgtaaactcacatatgcatattgtatatgtgtagaaatgtaatcacactttgtcttggaattacattaaactgtttgaaatcactgtaaaaaaaaaaaaaaaaaaataaaaaaaaaaaaaaaaaaaaaaaaaaaaaaaaaaaaaaaaaaaaaaaaaaaaaaaaaaaaaaaaaaaaaaaaaaaaaaaaaaaaaaaaaaaaaaagggggcccccccccgggggggaccccaaatccccccaaagggggggggtttacccccccccccggggcggggtttaaaaaccgggggaaggggaaaacccggggggtccccaaaaaaaacccctgggaaaaaaacccccttttcccagggggggtaaaaaaaaaaaggccccccccaaacccccttcccaaaaaggggcccccccggaggggaaagggaaattggaacccttaaattttgggaaaaaaccccggaaaattttgggaaaaaaaaccctttttttaacccaagggcccaaatggggaaaatccccttaaaatcaaaaaaa

SEQ ID NO: 59120 - DNA, 595 bp, Homo sapiens
  misc_feature 6, 39: n = A,T,C or G
actggngtaccgggcccccccctcggaaatacttctagnattaattaacgcggggagttctgtgatttaaatagaaatcacttaagctgacatgacaggaaggtgacaacaaatgccacaaaggaacagtgatggaaaaacatgtcttttgactgtattataacatccatataattcgttagacttgatgggaaggaagtgtcatgttggaatcttatgttgcaagattgagctttaaaggcataaaacaggtccaaggctggataacaaaggtattgaggagtgatctatgacataaatcactcaattcagagactaacctctgagaggcacgtgtgtagtgtagacccaaagaagcatggcaaaagatttgaaaacaactaacatttaaactaattgaccaaagaaggaaggacaatttatagtctgaacccggccatactgtttgcctgctaaaacaataacaaaaagtcaacattctccaaagaattttaataagactacgagtttcatagtataaaatgtattaaaaatgtctgagatagaatctaaaactgctcaacatatgaaaaggcaggaaaacatgactaatcct

SEQ ID NO: 59121 - DNA, 494 bp, Homo sapiens
acttctagaattaattaacgcgggagtctgtctatatttgaattccaagctccacattggcccctttcagccacggctggagcagatgggacacagggcaccaagtccctaggctgcacacggctcagcttggggaccctgggcccagcccatgaaaccacttcttcctcctaggccttcaggctggtgatgggaggggctgctgtgaagatctctgacatgccctggagacatttttgccactgtcttggggattaacatttggctccttgttacttatgcaaatttctgcagctggcttgaatttctcttcaaaaaatgggattttcttttctattgcattgtcaggttgcaaatttttcaaacttttatgctctgtttcccttttaaaactgaattaatagcacctacgtcaccttttgaatgctttgctgcttagaaatgaaattggatatcatcattctcagtaaactatcgccaaaaaaaaaaaaaaa

SEQ ID NO: 59122 - DNA, 585 bp, Homo sapiens
  misc_feature 28: n = A,T,C or G
cgggcccccccctcggaagtcttctagnaattaattaacgcggggggttaggggaccgcggggctactcttgggagcgcccctgtccggctggctgcgcgccggttttaaatagcctctccctaagtcttctccaaacgaccacctcacggattccttatggatcgcagctccaagaggaggcaggtggagcctttggcagcttctctgctggaagctcttgattatgatagttcagatgacagtgattttaaagttggagatgcctcagattctgaagggagtggtaatggaagtgaagatgcttcaaaggacagtggagaaggttcctgtagtgattctgaagaaaatattttagaagaagaactgaatgaagatattaaagtaaaagaagaacaacttaaaaattctgcagaggaagaagtactatcatcagaaaaacaattaattaacgcaggggggccgaaccctttatgcacatcatctgattgaattctcaccgtcattctgtgaggtccgtacttatgggacccccactttgcagatgaggagactgaggctgggagaggtgaggcgaccgccaaag

SEQ ID NO: 59123 - DNA, 507 bp, Homo sapiens
  misc_feature 105, 138: n = A,T,C or G
cccccctcgaaagtcttctagaattaattaacgcggggcgatcatgtagtaaaaagattgtagtaaagattatagtaagggattaaaaaatatattagtatactntgaaaatattagttacaaactaagaatgctagngaaaaaaattatttcagggttacctatgttttaaggactgacagattaaaactctgtaagatataaactttcaggattgacaaattaaaactccttaagatctagactttcaatgacaaatgtgttgaagagtgatactcaaacatacttgaagccttatgataaaagtcaaatgttacttcttcttcaggagctttttgaagctgttgcttctcttctagtaaacccaatgccagaatatgaaaagcctgaaggaggaaaataagagatctttaaaattgcgcttcttcaggtaaatatatttttaatttaattttaatttttttcagagactggtctcactctgtcacaaaaaaaaaaaaaaaaaaa

SEQ ID NO: 59124 - DNA, 451 bp, Homo sapiens
  misc_feature 10, 21: n = A,T,C or G
ccccctcganatacttctagnaattaattaacgcggggaggaatgaggctgacacgcctgatgcatgccaacggggctggggcgagccacaacatcccatataaacgcggggagggctcacccacgtggcctctactttataaataaactgattcactctcctgactaacaatgcccttagttaaaatacatatctgacatatgtaaagcacctaaattttaccaaaactgcatacttgaaaatcttacaacaagcttatgaatatatttaagcaacattctttttaaccttcaaaatctgttctaacatttaattgagataaccataactctcttctgaatatctcatctaaccttggctttacccttactaaccctgcagccaatctcaacacccaatcagaacactttccctttaaaatggacagccctgctgcttttgtctaattaa

SEQ ID NO: 59125 - DNA, 322 bp, Homo sapiens
cccccctcggaagtcttctagaattaattaacgcgggggagtggcggtcatgtgtcttaatttgctcacagatcaagacctggaggtggagccctggagaagtcttacctcaaacacttaggaaatactaacatagataatttataaaatactgcctctacatacaatgattttggactttcctgaagtagttgtctttttttttttttttttctaagagatctcaccttctgtcgcccaggctggagcacaacggctcattataggtcactgtgatcctcctgggcgacagaaggtgagatctctataaaaaaaaaaaaaa

SEQ ID NO: 59126 - DNA, 320 bp, Homo sapiens
cgggccccccctcgaaagtcttctagaattaattaacgcgggcatttaagttctttcatgtgtactatgttttcaaataaagtaatttggtaaccctcctcccccaatgagatgccactgcagacctattaaaatggctaaaattttaaaagctgaccacaccacatgttggcagcaaagtggatctcttacctactgctggtggaaatgtaaaatagcacaaccactttggaaaccagtctgtttggtaaaaagttaaacatataactatcacatgatctatcccttctcttagttacttacccaaaaaaaaaaaaaaa

SEQ ID NO: 59127 - DNA, 613 bp, Homo sapiens
cgggccccccctcggagtacttctagaattaattaaccctgggtggcagagcgagagtctgtctcaaaaaaagaaaaaaaagtaaaaagaaacaagtgaaattgattttaatatcttatacttaacccagtaaattaaaaagttattattttaacatatcaatataaaaattaagatatctttttaattttgtacttgagtctttgaaatctggtgtatattgtgtgttgacagtatatctgaatttgactagccacatttcaagagttcaacagtcatatgtggttagtaactatctattggacagtgtgggtcgaaagtaattaaaaataaattttgaactgcatagacacgtcatctatttacatgaatgtgtgtgtgtgtgtatgtgcgtgtgtgcgtgcgcacgcgcatgtttagcaattcttaaggttaagacaattcatttgataggcctgagttgatgaactcaacggaagttgatgtgaataaaaatgaaaatgagggcttggcgcggtggtccacgcctagtatcccagcactttgggaggccgaagttggggagtcgagaccagcctgccaacatggtgaaaccctgtctctactaaaaaaa

SEQ ID NO: 59128 - DNA, 514 bp, Homo sapiens
cccccctcgagagtcttctagaattaattaacgcgggggttcaagggcacggcaccagtgattgcagcaggctcccctaaggtccaataacgtatatgataagggggtcatctcttctctcccatctcccccaccacagagcactactgcaaaggtgctgaatcacaaaagaggtgctaggctaggagccaatcggccagccattactctccttttttttttttttttggagaccagagtctccttgcgtttcccaggctggagtgcggtggcgcagtctcggctcattgcattctctgcctcctaggcccttttttcttttctctctctcccttttttttttttttttttttttttaataagacaaagtctagctctatcgcccaggccggagtgcaatggtgcaatctgggctcactacaacctccgcctcccgagttcaagtgattctcctgccacagcctctggagtagctgggattacaggcgcacaccaccatacttggctaattttt

SEQ ID NO: 59129 - DNA, 567 bp, Homo sapiens
  misc_feature 22: n = A,T,C or G
cccccctcgaaagtcttctagnattaattaacgcggggactttaaaaaaaaaaaaaaaaaaaaaaaaaaaaaaaaaaaaaaaaaaaaaaaaaaaaaaaaaaaaaaaaaaaaaaaaaaaccaaaaaaaaaaaaaaaaaaaaaaaaaaaaaaaaaaaaaaaatttaaaaaaaaaaaaaaaaaccgggccccccccgggggggaccccaattcccccttttaggggttttttttcccccccttttttgcccttttttttaaacctttggaattgaaaaacccttggtttccccaatttttttccttttgaaaaatttccctttttcccaatttgggtttttacaaaaaagccccccccctttcccttttccaaaattttcccccccttttttggaaatggaaattttaaccctttttttttttttaaaattccccttaaattttttttaaatcaattttttttttaacccattggcccaaattgggaaaattcttttttaattaaaaaaattaccccgatttgggtttgttttttttcccttttggaaaaaaaatcccctttttaaaaac

SEQ ID NO: 59130 - DNA, 476 bp, Homo sapiens
  misc_feature 444: n = A,T,C or G
taattaacgcggggggaggcacagggcatggcatcgtgaggggactgagcgtgctcactcaggtctctctccctcttcctgtaaatccaccagtcccactctcatgataactcattaatccattaacccattaatctattaatagattaatccattcatgaggacagagtcctcgggacccaatcacctcttaaaagtgccacctcttaatactgctgcattagagatcaaattttaacatgagtttcagagaggaccaacattcaaaccatagcacaggttttgaatggtggagcacacctttccttaatcctgaaggaaaaagattaattctctaagagcccgcttggctgatagcatgattttgtaatgcatttgctcactgatataacactctaaggaacattcctaggagtggacagtttgcattggtcatagatgaantttctgctcactctcaacataattggcatgaa

SEQ ID NO: 59131 - DNA, 600 bp, Homo sapiens
  misc_feature 44: n = A,T,C or G
ccgggccccccctcgaaagtcttctagaattaattaacgcgggntcatgacagaaagctgcagggaacaaaactgaaaggaggggacccactggccaaagatgaagcagctccagcatgaagaatgatggacaatgcctgagttcataatgacactaaagagagtcactgatcaacactgaagtcgccggagcgccaaagaatcgattatttatctggtacttcccacccaactgctgatgaagaaaaattcttctttacaagaattatcaactaatgtatgagcagggagagaattagaaaagcataatttgcaacccttaacgaatttgggcaatcaccaattgatagtaaaatgattacacaaagcactgatagggaactttacaagggaagacccagacctgagcctaatgatcaatctcaaaatcagttcaaagcagaacaaccagctatcacagcacagactcagcaccacctacagggtcttcttgcccaacaagctgactgtggaagtaaccaagcccctagagatctaacaccagttcaccaaaaataatcagtcaatagcagaaccaaaaacctacggtccccactaatc

SEQ ID NO: 59132 - DNA, 296 bp, Homo sapiens
  misc_feature 23: n = A,T,C or G
ccccccctcggggtacttctagnattaattaacgcggggggacaggagtggaaatgtatctgtctggttccctcctgactcttgcttcccattggtcaaattttattccacagagatctaatgcttctatacatttggcaacttggtagctactcaagaagccatttcccaagccctgttttgtggcatttcatctaagaccagaagtggaggggagattcagcaggtcagactaccaaccaagagagaaggaggcagctgagggaatgtagaaagcatacaaaaaaaaaaaaaaa

SEQ ID NO: 59133 - DNA, 570 bp, Homo sapiens
  misc_feature 17: n = A,T,C or G
cgggcccccccctcggnagtcttctagaattaattaacgcgggtggctatattatattttgttttataaaatcaagtctttgtatatattatgatgtatgctttcttttcatttattataaatatttttcctgatcagcttttaatatctgtcaaataaaaattgaaattgaagatggtatataagatttcaggaaataaactactctgaatactaaaaaaaaaaaaaaaaaaaaaaaaaaaaaaaaaaaaaaaaaaaaaaaaaaaaaaaaaaaaaaaaaaaaaaaaaaaaaaaaaaaaaaaaaaaaaaaaaaaaaaaaaaaaaaaaaaaaaaaaaaaaaaaaaaaaaaaaaaaaaaagccccccccccccggggggggcccccaccccccccataagggggccaaaaaccccccccccccgggcccggttttaaaacaccggggggggaaaaaaccccggggtgcccccatataaacccctgggaaaaaccccccttttctccagtgggggaaaaaaaaaaaggcccccccccctcccccccccccaaattgggcccccccctgggggg

SEQ ID NO: 59134 - DNA, 250 bp, Homo sapiens
cgggccccccctcgaaagtcttctagaattaattaacgcggggaaaaacagagagctgaattttttgtcattctaagttgtaagtaacactgcagtcaagtcttctgatgaaatttccatatatcaaattgaaaataaagcaaaatatatttattactcataactaaaaaaaaaaaaaaaaaaaaaaaaaaaaaaaaaaaaaaaaaaaaaaaaaaaaaaaaaaaaaaaaaaaattaaaaaaaaaaaaaaa

SEQ ID NO: 59135 - DNA, 463 bp, Homo sapiens
  misc_feature 29: n = A,T,C or G
cgggcccccccctcggaaatacttctagnattaattaacgcggggggggactgttaacatttccaactctacttgtgacattttttctcatttctgtcaggtttcgcttcatgtacactctaaaggtctctttattgattgagaacatttgattattctatcttctggacaaactgactcctttatcataatgaaaggttcttcatctctggttctccttccttgttccgaagtctattttgtctgatattcacagtagctgctctagatctcttatacttagtattcgcatgtctttttccctcttacttccaacttatctgtgcctttatgtttagtttcttgtaagcaacatataactgccttgccttttaaaaaattcactctgaatctttcttttaattggaggattaacctgatttggaagtctaaattctgaaataaagttaatggtaattcttct

SEQ ID NO: 59136 - DNA, 589 bp, Homo sapiens
  misc_feature 9: n = A,T,C or G
acttctagnattaattaacgcgggttgttggctaaattcacttccttgcagttgtaggatgaaggtcccttgctggctgtcagaccagggccactctctgcttagacactggcatcacatgtccccttcctatcttggagacagcaatgcatgaccagtccttctcatgcctccaatctctctgacttctctttccgctaccagcctgagaaaacttctcttttacttccctctctcttccacaagggtcaggcctgcatagatctcttccagttgcagatggaattgttctctaacttgattggggtatggattacttaaacatatatatttgtcaaaacttttcacactgtacacttaagacatgaatttcatcatattccaataaagtatttatttttactggagtataatgctatttttattggagtataatattatactccaatgaaaacaagtaatgctaaaaaaaatgtaaccattactttaaaaaaagaatcctgatcttttagagatgtgcactgaaacagcaacagatgatatgatgtcagggattggctttgaaataatcatgggtggtaggagtggc

SEQ ID NO: 59137 - DNA, 429 bp, Homo sapiens
  misc_feature 23: n = A,T,C or G
ccccccctcggaagtcttctagnattaattaacgcgggtattaacttcttataattttcttttttttctttatgtgtgtgtgtgtgtgtattttttttttttttaatttcaatggcttttggggtacaaatggcttttggtcatatagatgaattctacagtagtgaagtctgagattttactgcaccggtcacctgagtagtgtacattgtacccaatatgtggttttttataccttgcccccctcttaccctccccactttgagtctctagtgtccattatgtcactctgtatacctttttgtacccataagttagctctcacttataagtgagaacacacagtatttggttttccattcctgagttgcttcacttagaataatatcctccagctccatccaaaattgctgcaaaaaaaaaaaaaaa

SEQ ID NO: 59138 - DNA, 347 bp, Homo sapiens
  misc_feature 27: n = A,T,C or G
cgggccccccctcggaagtcttctagnattaattaatggcggggcaaaagctatcaaaacccagtgtagaagccagtgccacctcctgcaagctgtgtgaatttgagaggttcctttgtgtctctgggcctccatctcctcaactggaaaatgcagggttggaccagtcagagttctcaactctgttagacccaaccctccctttctacaataaatatcttattaatgacccattactatcctgaaatgaaattcatagctaatataacctcccctattgaaaaatctttcacagaataatcaaattgtggccataaatataatataaaggaaaaaaaaaaaaaaaa

SEQ ID NO: 59139 - DNA, 489 bp, Homo sapiens
  misc_feature 457, 481: n = A,T,C or G
ttctagaattaattaacgcggggctatcaacagttttatatatatatttgcacaggtatgatagattatcaggttggattatttttaaactataaaaccaaactctatactgtctataagaaatccactttataaaaggagaaaaatattcttttatatttacccagatactacttttgtttttccttcagttgcgaagttctgagattctctctggtatcatttcccttcagacttaagcatttcttttagagtttttatatttacccatatacttccttaagttttaaagttctgactctctctcttatgcatttttttagaacagttttgctgctgataaatcctcttagttttctgtcatctgagaatgtgtttatttcaccatcttcctgaagggtgttttcactggatttatacaaatatacatataggtgtttatacaagtataaatatntatacaagtataagtataaatatntatacaag

SEQ ID NO: 59140 - DNA, 600 bp, Homo sapiens
cggggccccccctcggggtacttctagaattaattaacgcgggtaaaaatcagagtgactccatcttaaatagcagctgggtgagataaggctgagacctactgggctgcattcccaggaggttaggcattctaaccttctatcaggatgagatagaaggccagcataagatataggtcacgaagactctgctgataaaacaggatgtggtttaaataaatgccagccagaacccaccaaaaccaagatggtgatgctcattctcactgctcattatatgccagtataatgcatttgcatgcaaaaagactctaccaccagtgccatgacagcttacagatgccatggcaagatctggaagttaccctgtagcctctaaaatggggaagaaccctcagttctggaaaatttctgcccctttcctgaaaaactcatgaataatctaccctttgtttagcatataatcaagaaacaactataagtatagtcaatcgagcagccaatctcaccgctctgtctatggagtagtcattcttttatttacatctctaataaaattgctttcacttcaaaaaaaaaaaaaaaagcggccgccaccgc

SEQ ID NO: 59141 - DNA, 616 bp, Homo sapiens
  misc_feature 40, 57, 206, 215: n = A,T,C or G
aaactgggtaccgggcccccccctcggaaatacttctagnattaattaacgcggggnaattgacaggaatcaagataaaggaagtagggaacaaagtgtggtaaggaaaaggtgaataaagcaactcagaggaatatgtgtctttatcaaaaaaaacaaagccaggaaggcaagctggagaccatttgtggagagcctcaaacaangaataatgngaaaaacatagggttcttgacgagtagtggctcacatctgtaatcctagcaccttgggaagccagggtgggcgagctacttgagcccagaagtttgggaccagctgggcaatatggccaagaccctgtcactatcaaaaaaacaaaattaactgggcgtagtggcacacaactgtaagcccagctactcaggaggctgaggtaggaggatgacttgagctcaagaggtcaaggctgcagtgagctgtgttcaggccactatactccagcctgggcaacagtgagaccttgtctcaaaacattaaaatataaaataaaaacaagaacaaatccttaaaaaaaaggggagtggggtttctaaagacagggcagagctgggcatggtgattcattcctgtaata

SEQ ID NO: 59142 - DNA, 163 bp, Homo sapiens
  misc_feature 36, 37: n = A,T,C or G
cgggcccccccctcgaaatacttctagaattaattnnaacgcggggtgtctttgaggcattttctaaataaacagtctgagtgtccaaaaaaaagataaaaaacaatagataaaaatgctaataaaaaaaaaaaaaataaaaggaaaacttttatatataaaa

SEQ ID NO: 59143 - DNA, 561 bp, Homo sapiens
attaattaacgcgggactgaagttttgctgatgaagtagaatattattcagcaaataaggtcagagatattaaactaccagcagtgagcagaggacatacagtttccactctagcactccttcctccttccctcaccaagaatctgaaatagcagaggggcttggagggtcacataggtagatggtaaagagaatgaggagaaaaaggagaaaagggaaaagcagaaaggaaaaaaaggaagagagaggaagggagaagggagaggaatgaattgaggaagtgaaagaaggcaaggaggtaggaagagagggaggaggaaaggaaggagagatgcctcaggcttcagaccttacctgggttttcagggcaaacataaatgtaaatacactgatttattctgctactagatcaggttttagggtcctgcaaaaggctagctcggcactacactagggaatttgctcctgttctgtcacttgtcatggtctttcttggtattaaaggccaccatttgcacaaaaaaaaaaaaaaaaagcggccgcctttttttttttttttag

SEQ ID NO: 59144 - DNA, 504 bp, Homo sapiens
  misc_feature 491: n = A,T,C or G
cccccctcgaaagtcttctagaattaattaacgcgggtccaggtgctggggtgattacccttatattctctcctgctaaatcatggaggtttggggagttccctcagacccctaataaacttgttcgtggaggcctggggagtttcctcagatccccagtaaaacttgtttaattctaaacgggtcctgttaagaattcctttgtggccgggctcagtggctcacgcctgtaatcccagcactttgggaggctgaggcgggcagatcacttgaggtcaggagttcgagagcagtctggccaacgtggtaaaaccccgtctctacccagaagtataaaaaattagccggatgtggtggtgtgcgcctgtaatccctgctacttgggatgctgaggcaggagaatctcttgaacccaggaggcaggggttgcagtgagccgagatcgcgccactgcactcccgcctgagcgacagagtgagactccatctcanaaaaaaaaaaaaa

SEQ ID NO: 59145 - DNA, 221 bp, Homo sapiens
  misc_feature 16, 18, 85: n = A,T,C or G
cgggcccccccctcgngnagtcttctagaattaattaacgcggggttgacatgagatttataaggttttaagttgtttgcatgtngaaaatcaaatacatactttggtagtctttgaaaaaaaaaaaaaaaaaaaaaaaaaaaaaaaaaaaaaaaaaaaaaaaaaaaaaaaaaaaaaaaaaaaaaaaaaaaagggcgggcccgcccgggggggggggcccc

SEQ ID NO: 59146 - DNA, 604 bp, Homo sapiens
  misc_feature 53, 158, 557: n = A,T,C or G
ccgggccccccctcggaagtcttctagaattaattaacgcggggggagctagnaaagaaattatttaggcagttagtgaggataaaagagtccttggcaaggtttccgttttaataaaaagcagcccccaaatcatttcttttctaacaaacagcagncctgaaaaatcaagctgcagacatagaaaagccagcagcggtaccaataggaaaaggctacctgggggggcaggcaaactcaacatggaggttccatcttcctttttctttgtcaaccatgggtacagtaaaatagacaacatgattccagccaggtagagaacccagttgcataataaaagattagagtggggtggccatctcctttgcatactatgcaaatggcccacctggtctgaccagcctctagtcccccatgtaaatcagacaccacctcctcatgctcatgtataaaaccccgtgcatttcaccatgtagccagaagacccacttgggagccccgctttctctgcaggagagaaagcttttctctttcttttgcctattaaacctctgctnttaacttcacgccttgtatgcctgcgtcctttactgaattatatttg

SEQ ID NO: 59147 - DNA, 257 bp, Homo sapiens
  misc_feature 6: n = A,T,C or G
actggngtaccgggcccccccctcggaaatacttctagaattaattaacgcgggggtgggaatatctacctatattttttaaattttgataatgatgccatcaagtctgtttgtttgcataactgttttttaaaaaagaattgatattttcagtattttcatataaatatacttgtaatataaaaaaaaaaaaaaaaaaaaaaaaaaaaaaaaaaaaaaaaaaaaaaaaaaaaaaaaaaaaaagaaaaaaaaaaaaa

SEQ ID NO: 59148 - DNA, 225 bp, Homo sapiens
gggccccccctcgaaagtcttctagaattaattaacgcggggggttccaggggaagtcatctttggagtattttggtttttcttatttatgtacaaaaaagtccacatccacaatccaaaataaagttctctgtccatctctgaaaaaaaaaaaaaaaaaaaaaaaaaaaaaaaaaaaaaaaaaaaaaaaaaaaaaaaaaaaaaaattaaaaaaaaaaaaaaagc

SEQ ID NO: 59149 - DNA, 432 bp, Homo sapiens
  misc_feature 28: n = A,T,C or G
cgggcccccccctcggggtacttctagnattaattaacgcggggtgggagaggagaaagcaactccgagagaaccaaagctctgcaggggttcctttcaggtactaggctgaatatagtttccatactttagggcatggttgctcaaacccatagtcccagcactttgggagactgacacaggaggattacttgggcctgggagtttggaaccagcctgggcaacatggtgagaccccgtctcttaaaaaaaaaaattagctgggcatagtgtagtggcagacgtgtgcctgtgggcctagccacgcgggaggctgagttgggaggattgcttgggcccaggaagtcaaggctgcagtgagccatgatcacgctgcagcctgggtgacagagcaacaccctgtcccctgtctcaaaagaaaaaaaaaaaaaa

SEQ ID NO: 59150 - DNA, 116 bp, Homo sapiens
  misc_feature 24, 35: n = A,T,C or G
tgggtaccgggcccccccctcggngtacttctagnattaattaacgcgggggaatgagtccactttaaatcctttaacgaggatccattggagggccagtctggtgccagcagccg

SEQ ID NO: 59151 - DNA, 404 bp, Homo sapiens
cgggcccccccctcggggtacttctagaattaattaacgcgggggagagctgcaagtgctttactttgtctactaaatgtgagatttaggaactgtgtgatctaattgaagtgattgcttctggtatgaattcactagactggtcatatcaaattaagttttatcgactttcaccacatagggatattcactagcctgaataccaacacagtatgtgctcaccacatttttgaaagtgaggcgagagtcaccctgcagtacaaatgagcttgccataatcggcctgttttaatactctgcggtattcaggggctcctttgtacaggatcatactcacttgctctccatctttcttagtattgagtcgcggccttgctttttcttttttggaatttggccaaaaa

SEQ ID NO: 59152 - DNA, 230 bp, Homo sapiens
cccccctcggaagtcttctagaattaattaacgcgggcttataatgtaattatcacacatctatattttgctttggtaaaagaactgtcattttaagaggaaagaagagagacaggaagggagcaggaaggaagacggtgacgaaggaagaataaggagaaggaagaaggagatgaactaagaagaagaaaggaggacgataagaaagaactaaggaaaaaaaaaaaaaa

SEQ ID NO: 59153 - DNA, 625 bp, Homo sapiens
  misc_feature 11, 24, 104, 118, 139, 140, 162, 163, 226, 244, 267, 268,297, 298, 311, 312, 322, 323, 342, 343, 377, 378, 434, 446,447: n = A,T,C or G
gccccccctcnaaagtcttctagnattaattaacgcggggtctcaaaaaaaaaaaaaaaaaaaaaaattacatattgcaccccttaccctttgacctagcaatntctgcttctagggngatttgtcccacagaatacannctcagttgtattgaacattatnngtctgaaccaggagaaatttattggcagcctcgcatatgggtggctaaaagaaccggaaacanccctcacttatctaacangccaggaaagattgggataaatnnaaattaggtggtgttccttcattacactnnggaactctacacnnaaccataaannacaaagtgttgagggaagnnctgatttgggaaagaacttctgagggtacatttnngttaaacagaaaaagcaagggtgcagaaagaatgtcacatgccattgcttgtgcangaaaaaatgggnnggtggggaaagaaaaggaggatatattcttattggcttgtgtgtgcatcaaatgcctttaaaaagataaacagagaaaaacattgtctattgtttttctcttggcaggggaactaactgagtggttgagaaacaaagataggaggcaggccaggactccgtctcaaaaaaaaaaaaaa

SEQ ID NO: 59154 - DNA, 394 bp, Homo sapiens
cccccctcggggtacttctagaattaattaacgcgggggaaaaaaaaaaaaaaaaaaaaaaaaaaaaaaaaaaaaaaaaaaaaaaaaaaaaaaaaaaaaaaaaaaaaaaaaaaaaaaaaaaaaaaaaaaaagaagaaagaaaaaaaaaaaaaaaatacaatttttttttttgggttggataaattaaaatggtggggccccctttttgtggtttttcccccggtcttttttttggggggggcatcccccttttttggggggggggtttttggggggggggcccgggaattttcttttttcctccttttttcctttttgggggggggggggtttttttcccctttttttttttttaaaaaccccccttttttttttgttaaacccgttttttttt

SEQ ID NO: 59155 - DNA, 598 bp, Homo sapiens
cgggccccccctcggaagtcttctagaattaattaacgcgggctgatgttcaggaggaaagcgagggctcagacacagatgacaataaagattcagctgcatttgaggataatgaggtacaagatgagttcctagaaaagctggagacctctgaattttttgagctgacgtcagaggagaagctacagatcttgacagcactgtgccaccggatcctcatgacatactcagtgcaagaccacatggagaccagacagcagatgtctgcagagttgtggaaggaacggcttgctgtgttgaaggaagaaaatgataagaagagagcagagaaacagaaacggaaagaaatggaagccaaaaataaagaaaaaaaaaaaaaaagcggccgcttttttttttttttttatttctgttgtttacgattcgctatagattccttgtttctcacttcgtagcacgagccactctgaccatcaagatcagaaaaacttctcagctgcaagttagaagtggactggccattgaggaggctctcagcggagtcgctcttcacaggagtcttgaacgcggtgtggaatcggcagcgaggaatcctgga

SEQ ID NO: 59156 - DNA, 614 bp, Homo sapiens
  misc_feature 27: n = A,T,C or G
cgggccccccctcgaaagtcttctagnattaattaacgcggggcatggtggcgtgcgcctgtggtcccagctactcgggaggcatcacttgagcctgggaggcagaggttgcagaggtcactgcactccaacctgaatggcagtgagaccccatcaaaaacaaaaacacaaaatatgactttctgacatttagctagctatcctgaacctctttataaaagaaactgacatctgtaagggcatctcccttcctgcactcaagccactataaacttttacaatgaaaaaaacattggcttaaagtttacagagcaaaccttccctttgcttgatgcttttcctggcaattcctgactatcccttttgattcaacaaataatagtgtttagatctaagttctctgcctttgggatgtaagttttcacctgagagtcatgtctttggaagtgaaaatttagggttgcctagcaatctgaattgtttaggggagtggaacagataattaagagactgatagtctaaaggagggggggaattattttcactagcaaatgaaaaatcttataaaactgtaagatctgcttctgttagtgcatctgcatgtctttactttt

SEQ ID NO: 59157 - DNA, 574 bp, Homo sapiens
acttctagaattaattaacgcggggtggggagctccaggaatctgtccctttaccaaaacaacaactgagctggcaagaactatgttaagtagctatggaatattggtgtctagtagaacacttgcagtgtccaagagtgagcttgatgaagaggctgccgaatttcaacattttgggtagtggctgccatcctccattcccaagccctgtgacgggcagcagtgtggatagcagtccacattcctagtgaggattgctggtgccagggtgggcaatagagacctgtcttctaaaactcagggcgcgtattttgattgctgattgctactttagagctccaaggggctagcactaaaactgacagttgttttaactggcattattaaatgccagttaaaaaactctatgggctgaagaggcttccaagcagccctgttgaggggatttaaggaaataatgttttttgtttttctctttttggagatagacacttaaggaaacttttatcaggtcattgactaacttcagagataagaaaacagaaaattcagcactttcacacaacaagaagta

SEQ ID NO: 59158 - DNA, 610 bp, Homo sapiens
  misc_feature 519, 535, 559, 564: n = A,T,C or G
cgggccccccctcggaagtcttctagaattaattaacgcggggggaatatgtaataatagatattatctgataggtaggattttcaggttctgtcagaatttggtaattgttgtaattcaatcaaaagtcaagagcaaagttgcgtcaaaagtaaaacaaaaagattaaataactacttgattgttcttgattggaaacacgaatgttcttaaaatcagttatgtatagtccttgattaatgctgcaatttaaattatttagcattgtgctgctgcatctccatatcccaaaagaaagcaaatatgtgaactgttgctaagaaaaggagcaaacatcaatgaaaagactaaagagtaagtatacatttaatgattaaatatcattgagattttactcttttggaaaatatattcactgtctggctgattttttctctctaagattcttgactcctctgcacgtggcatctgagaaagctcataatgatgttgttgaagtagtggtgaaacatgaagcanaggtatacttcctttntagtaatctttggtatccaatgangtatntttatttagcaggtgaaatacctgacttcctaaactatttactttc

SEQ ID NO: 59159 - DNA, 591 bp, Homo sapiens
ccgggccccccctcggaagtcttctagaattaattaacgcggggagggtaatcaccgcatgctgaggtctgctcaatgagaacctcgctgcacaggaggggtctggacactggagtaacaacagaagtcaccactgtacagtgactcaggaccaacgggacagccaacaaagccagtctttggtttctggattaataactcatgtatatataccaatttaacaaattaaaagcctactgcctgctagtattaaaattcaagcttcctcacttcaccttcaaatccctattcaagtaattcttaccagcctttataactagacagctgctgcctttttgtagcctaagtctgatcctaaacaaagatgggcattttctgaattaggtctgaggttttacttggtaataacttctgaccatgcttcaaaatattcattgtaagaaatatacaagtattgcttgaaacttaccactcgacaaagctcctgaacatcatgttgcatgaagctatctaaagtttcccacctttcaaagataaaacaaacaactccatttaaacgctcaactttcaaatgagcaaattaaaagtaac

SEQ ID NO: 59160 - DNA, 622 bp, Homo sapiens
  misc_feature 511: n = A,T,C or G
cgggccccccctcggaagtcttctagaattaattaacgcggggctaatccctgtactcaaatgtttatttttgtatctaataatgatgctagttacaatttagtgagcacctaatatatgcaagatgctttttgtatacagttttgtttaattcttggtacatacctgtaagataggtattttatatatgttttgtggaggatgaaactgaggtccatacagggtaagtagcttgcccagggtcatatagttttccagaggcttgccaggttttctgacttaaaaactattgcattgtgactttaataacagtcaccacttattgagtactttctattcttcaggcactgtactgagcatttagcatgtgttctttgatataatagtcttcacaaaaaccctatgagataaatattattattctattttagagctaatccctgtgatcctagcactttgggaggctgaggcaggaccatcgcttgagaccaggagtttgagaccagcctgngaaacataccccatctctacaaaagaaaaaaaatatataaatatttatatatttttattacataaaatatatgtgcatagttatgtattattatgttgaaaatatgtaaat

SEQ ID NO: 59161 - DNA, 595 bp, Homo sapiens
  misc_feature 33, 34: n = A,T,C or G
gggccccccctcggaagtcttctagaattaatnntaacgcgggcacatgaacaatggtcatcatttaaatatagtaaagggggccaggtgaggtggctcatgtctgtaatcccagcactttgggaggccgaagcaggtggatcacctgaggtcaagagtttgataccagcctggccaacatgacgaaaccccatctctactaaaaatacaaaattagttggcatggttgcatgtgcctgtaatctcagctacttggaggctgaggcaggagaattgcttgaacccgggaggtggagtttgcagtgagccgagatcacaccactgcactctagcctgggtgaccgagcaagattcattttcaaaataaataaataaataaataaataaataaataaatgaataaaagagaaaaaatatatatatatagtaaaggtaacaattacattctacaatattgtagtagaagtaaatatggtttaattcactggaaacagctctgctctatagaaaattcacaaagattaagaataactacactgtacattaaacctttgagcactggaagctcacctacttattcataggctcacatact

SEQ ID NO: 59162 - DNA, 595 bp, Homo sapiens
  misc_feature 54, 584: n = A,T,C or G
gggccccccctcgaaagtcttctagaattaattaacgcgggcattaacatttanacagaaacacattcatttgctacagggatatttcacaatttggctgaactttgagagaagtgggtgaggaaaaggtagtttcgtaactagtttatatataaacctaaattgtagtgagtactcttgtaagtggagcatcttttctatggtaattataaatggctgttagcccctttgcactaaagctaggtgggtggttttgccacagaggtaaattatctttcgggcggtataaccaaacaaataaaatataaagtgagattcagggcatgttctgaatacagcagttaattaggcagctaagaaaactgtattttagcccctctgactatgtgattggtatttttttaaattaaaaaatggaaaataatatttttaacaggttatgatatgtcagtcatttaatccccacagtaactctgtggggtaggtaggtactgtttctatctcattttacaggtaaggaatcaaaacagtgggtatacccaggttgtatatctagaaagtgatagagctgggattttaaactntataatctgat

SEQ ID NO: 59163 - DNA, 582 bp, Homo sapiens
  misc_feature 27: n = A,T,C or G
cgggccccccctcggaatacttctagnattaattaacgcgggtagcccttgaagtaatgtgtcatgtgttcagctttctgaatcatttgtaatctcacaatgctgcactttttatcacagaagccgctcaacagtgggctgatagtcaaggtattgattaaccctccacactcattaccatcaacaggcatctgatattgaccaaaaatcactaaaaaaaaaagaatccttctgctctcaggaagatggagtggacatcagtattccatttctcctgctaagcacaacaaaaaatcctggacttcatatattttccaacactggaaactccaagaggttgagagaagaagacagatgagctagaaatctcagaacccaaggaatgacatgatgctgagttccctgggcttgctttctgttgtttctttgccccaaacttggagctgaagaagccagcaacccaaaaatgacaacaggcacagacaaaaaaagtctcaacgaaccctgctctctctagtcaaggaccaggaaatgggaagcctagaaagaacagaaaacttttaggcagtaatggctctactt

SEQ ID NO: 59164 - DNA, 617 bp, Homo sapiens
ccgggccccccctcgaaagtcttctagaattaattaacgcggggctggaacatttcagattaagactgaaacattaagtataatgcaagtacagtctatgggctacctaacaacgtttcagtgaacaatgaaccacatatatgatggtggtcccataagcgcggaaaaattcctatggcttagtgacgtcatagctctcctaatgtagggcaatacactactcatgtttgtggtgactgatgtaaacatacctaattcactgtcagtcatatacgatgggggtcctataagattatgatggagctggcctatacagtcgtaccatttttttgtcttttatactgtatttttactgtactttttctgtttagatagacaactatttaccattgtgttacaattgcctacagtatgcagtacagtaacatgctataaacagttggctatactataatatacagcctatgtgtgtagtaggctataccatctacgtttgtgtaagtacacactctatgatgtttgcacaaaatcacctagtgacacacttcttagtacacatccccaagttaaatgacacatgactgtattccaaaacaagaaactgggaacacttcttg

SEQ ID NO: 59165 - DNA, 175 bp, Homo sapiens
cccccctcgaaagtcttctagaattaattaacgcggggccccacatctagaggttctgattcaggtggaggctgatactttgcatttttttgcagtgtttttcttgcatttctaatatataaacagttgttcccaggtgatgctggtgctgctggtctgggctctgcactttgag

SEQ ID NO: 59166 - DNA, 621 bp, Homo sapiens
cggggccccccctcggggtacttctagaattaattaacgcgggttacttgtaacgttattcagaagtggaagattaccttgcaaaatggcagataatgccccaactagatatttcatggcattctaaaactacataaaagcaagatttcttaacattcctctaaataaataatagtgtaataaatatatgaaacaggctatgcatttcctcagtgttcttccattccctccagtgaccacacatgtgtactgcatggtgagcccatgactgaggaatagaaatacagtcatgaggcagctaacagcgtttcaaagatgaagtgcatatacgatagtggtcctgtaaggatagaatatagctagaaaattcctattgcctagtgacattgcaaccgtggtaagatgtacatgttcctcatatgtttgtggggatgctggtgcaaacaaacccgtgctgccagctgtataaaagtacagcacgtacaacagtgcacagtacataatatgtgataatgataataagtgactatgttattggtttatgtatttactatactttttatagttatttaagagtgtacaccttctacttattaaaaaagttaactgtggccaggcgcc

SEQ ID NO: 59167 - DNA, 502 bp, Homo sapiens
  misc_feature 22: n = A,T,C or G
cccccctcggaatacttctagnattaattaacgcggggaataggggaaaatcaaagcaaaaactggtttataaaagattaataaaattgataaacacctaccaaaactgaaaaagaaaatgagggaaaatactaattaccaatttatcaagagtaaagaaagagatatcaccacagacattaagcaggcaaaaagaaaatactgtaaacaactttacatacatgatagtttaagatgaataggtcaaattctagaaaaccataaattgtcaaaactcacccaagacaaaatagataatctgaaaatcctgcaactgttaacataattgaatttataattaaaatccttccaaaaagaactatccaggcaaataaataacactagttttatacagagtcttctagaaaatggatgaggagggaatacttcctaattcatcttatgaggctgctattaccttgatatcaaaattagacaaagacagtacaaaaaaaaaaaaaaa

SEQ ID NO: 59168 - DNA, 370 bp, Homo sapiens
cgggcccccccctcggggtacttctagaattaattaacgcgggactctttcttcgttttggaggttttttttaaataaagtatgttcccttatttattccacatcataaaaatcataaggaaaacaagagagaatgaaaaattctagtgagtaacaatggcaggttagaaagataaggtaagcttactaggggtaggaagatactgcatatgtaacatatgcagtaaatgcatgaaattaagggaaacctgatgctaggctgaataacgcattagagcaggggcatccaatcttttggcttgcctgggccaccctggaagaagaagaatacactaacactaacgacagctgatgagcaaaaaaaaaaaaa

SEQ ID NO: 59169 - DNA, 600 bp, Homo sapiens
  misc_feature 27: n = A,T,C or G
cgggccccccctcgaggtacttctagnattaattaacgcgggatgtgatgcgaccccagcgtgggcttaactgatgctagacaccaggctgtggatccagagaccccgggacacacagaagtccagctctcatccctcatccaatttcactttttttttttttttaaccctcaaaagatccagatgccgttttagggggacaggatgtattgaagatttataaatggagcaatctcctaatcaaaataaacatcatccaatcatgctcacagggtggtggcaaattagtggcagcatattttgttttctttagcagtgatccatgattgatttatggattaaattgtgccctgtgaagtacatatatatctgtgaactgtctccctaagcatttcctgttcacctctgtgccacatgcctggctgaaggagagaattgtttctcctctaggcaggagctgtctgcatagctccttgggctgggatagtgtctgcttagggctgctttcggctttgtcttctgctctgtcctctgagctcagcaaaaggcctataaaaaggaaggccgactctcctacacatccacagggcccccaagctc

SEQ ID NO: 59170 - DNA, 600 bp, Homo sapiens
cccccctcgaaatacttctagaattaattaacgcgggcactaattatatcagcaaactcatgtggtagataggtccttctgaaacggaatgtggaaagcttttgaaagtgacatatacatcagatacttaaatcagaagggaaaacgatagagttaaacttggccattggccacaaaacccattgcatagcaggaaagaattgcagtgattgtctaaaattctttatttaaaattcagagctgaattgccccctaactcagttatcagaaagatcctattctcgaaggcaataatatttaggttcaatgcaggtataaaatcctaatggagccatatctattctgcttcagcagagtcatacatttacctaaaagcaatggttctggtcacaggaaataatttctgtggaggattagatagcattaaacatcacaagcttttaaatataggagcagaatttgctccatacagagattttatgaatgcagtgaaagtggtaaaagcatcagtgataagttattttttatttcatggattcacttcttcacatcctaccatgtcttaaattgtgaagcatcttatgatctggaatgtcatag

SEQ ID NO: 59171 - DNA, 235 bp, Homo sapiens
cgggccccccctcgaaagtcttctagaattaattaacgcggggtattccatatagccaagtaactctacttcccttgatatatttcaacaaagtcggcgcacatattccctgaggcatgttttaaaaactttgagccaggagtggcggctcacacctgtaatcctagcactttgggtggccaaggagggtggatcacttgagcccaggagttcaagatcagcctaagcaacatgc

SEQ ID NO: 59172 - DNA, 319 bp, Homo sapiens
gcgggggagaggggaatagggagatgttgtttaatgggtacagggatttttgtttgtgatgatgaaatagttctgaaaatgaatagtggtgatggctgcattgtgaacatacttaacgccaataattgtacacttaaaatggtttaaaaggtcaattttgttgtgtatattttacaataaaaaaccaaattagaaaaattaatacacattggtggaatcggtggtacagcagtaaaaaaaaaaaaaaagtactttttctgacattaaaatagaaaaggatttaagacacacaacacactaaccaaaaaaaaaaaaaaaa

SEQ ID NO: 59173 - DNA, 465 bp, Homo sapiens
cgggccccccctcgaaagtcttctagaattaattaacgcgtgagccactgcactcgtcctgagcctcagtttctttatctgtaaagtggagagaacaatgccaaccatgtaggctgagttggaaaggtacacagaggtaaacacagatgtaaaactgtggctcgcagtaggcacttagtaaatggggacagtatgcatcagcccccgcctcccatctgtcccctgcatgtgtaggtgtctttgccatggccaagtccctggattctcttatttaaactgcaggcagaataggctttgctgtccttccttaaaatgtctgagtatggccgggcgcggtggctcacgcctgtaatcctagcaccttgggaggccgaggcgggcggattgcctgagctcgggagtttgagaccagcctgggcagcatggtgaaaccccgtctctactaaaatacaaaaaaaaaaaaaa

SEQ ID NO: 59174 - DNA, 483 bp, Homo sapiens
  misc_feature 27: n = A,T,C or G
cgggccccccctcggaagtcttctagnattaattaacgcaggatcaaatgtgctgcagcttttgcagaaaacaactcagaaacacaaaaccccccaacagctcaattattattttttcaatgttttcctacaagagccaagtagcaccatgtacagaagacgcctttttttttggaatattgaaatcgttctgcatgtaaaatatgggataatgacctgtttatattaaaattctgattaaattaaaaaaaaaaaaaaaaaaaaaaaaaaaaaaaaaaaaaaaaaaaaaaaaaaaaaaaaaaaaaaaaaaaaaaaaaaaaaaaaagaaaaaaaaaaaaaaaggggggccccccccgggggggacccccatttccccttttagggggtggtttaccccccccccatgggccgggttttaaaaacgtggggaggggaaaaccctgggggtacccaaattaattggcttggaaaaaattccccttt

SEQ ID NO: 59175 - DNA, 593 bp, Homo sapiens
  misc_feature 545: n = A,T,C or G
cgggccccccctcgaaagtcttctagaattaattaacgcgggggatgaagttaaggcatagagtgtttattagttttttgtttgtttgtttatgtaaacagtgttaagttgttatcagcttaaaataatgggttataagatagtatttgcaaacctcttggtaacctcaaaccaaaaaaacatacaactaatacacaaaacataaaaggcaagacccaagaaaatcaccttcactgaagggaagacaggaaggaaagaagaccacaaaataaccagaaaacaaataacaaaatggcaggagtaagtccttacttaccaataaagaaactgaatgtaagtggactaacctctccaatcaaaagacattgagttgctgaatggatacaaaaaaaagacaagaccctgtgatctgttgcctatgagaaatacacttcacctataaatacaaacatagagtgaaagtaatgggatggaaaaaaaatattccatgccaatggaaaccaaaagagcaggagtggccatacttttatcagacaaaatagatntatagtcaaaaactataagagagacaaaaaaagtcactatgttatgat

SEQ ID NO: 59176 - DNA, 573 bp, Homo sapiens
cccccctcgaaagtcttctagaattaattaacgcgggaggatccaaaagaggaaaagcagaaagagattagaagtagagccgaaattagctttctcttatcagattttaggcaggacaaatataaactaggtctctcattcagtttggttctaaaaccagtttttctaaatgtgtgtgcaaataaagtatttcagacatttcaaagaatctatattttgaatactgattctaatgactattcagggttaggtggcttcattttcctagatattcacaaaaggatgtcccataatgttatacatgaattcatctgattttttttaaagtgtttagattttgaagtttgattttccataattcggaagcttttcaaaagcgattgaggccaggaacgtatttagggttgaggtgtgatgtatcttggactgcctctaactgcgagatggtagcagagtgctcaaggtatctcatattatactcatgcagaagagcaaatgggggcacacttttcagttagaaactaagaggagttggtcacaaatgaaaagctaaatccaaagtttcaagcaata

SEQ ID NO: 59177 - DNA, 573 bp, Homo sapiens
gccccccctcgggagtcttctagaattaattaacgcgggacgggctaagggacaatgaggcagcttaaatttgctttgaatttagtagggatccatattaacaactgtccagtacaggttttcacataaatacttcccctcaaatctatcaacactctaaaatctgtatggatgaatttaccccatacctagaggctgcactctcaaagacagggaaaaataaaaccaaaaacaaaaaagcctagatcagtgtaattttcttcattctaaacatagatttctacttactatgattatttaaaatgccaacattaacaaacacaagggaaaaatcataatgaactatagaaagaatagttcacatcaataaaacctctggaaaggagaatttaaggttcaagacaaccttctataataaaatttgttaatcatttcaaaatatttatgcatctcaaaacatcacattgtatgctgtaaatacataccatttttatttgtccactatatctcaataaagcttgaggaaaaaaaaaacaagaaaagatactccaccaaaaaaaaaaaaaaaaaagc

SEQ ID NO: 59178 - DNA, 592 bp, Homo sapiens
ccgggccccccctcggaagtcttctagaattaattaacgcgggtatgcccattttatagggttgggataatttacttatttattttactttattttattttatttattttattttgagatggaatcttgctctgtcacccaggctagagtgcagtggtacagtctcggctcactgcaaccctccgcctcccaggttcaagtgattttcctttctcagcttcctgagtatctgggattacagacatgtgctgccacacccagctaatttttgtatttttagtagagatggggttttgccatgttagccaggctggtcttgaactcaagtgatccgcctgcctcagcctcctaaagtgttgggattacaggcatgaaccaccacgtctggtctgtaattttaatctagtgatttatagttgtatctttacatttataacattagtgttatatttgtgtcatacctatgatttatttgattttctaacccaggggtcaggaagctatggcctattgttcaacctgcctgtttttctatgtctttcaagttaagaatagattttacaggtgaacatttgtacccaatttcattatg

SEQ ID NO: 59179 - DNA, 618 bp, Homo sapiens
cgggccccccctcggaagtcttctagaattaattaacgcgggatggtgctgaaaccctttccatcacccctaccaacccaaagaaaaacattccaggacagctgtctcaggtaccccttcagaagggaacctgattatgttgatagagtaaaagaataaagacagggaacacaggtgggctggcccgtcttcagaagtgctggcatggctgtcagcacatagaagactgttttataaaagctgtgtataggtagaagtgtctgttctctttgaaacatctttatagaaattactgaataatgatttggcaggggaagttgctattctgataaaacagtgtctagattttctgacatgtaacaaacctccaagaaacatgataaaatataaatgaaagctcaatctatccaaaaagaatattaggccaggtatggtggctcacacctgtaatcccagcacttggggaggccaaggcaggctgatcacttaagatcaggagttcaagaccagactgtccaacatggtgatactaaaaataccaaaaaattagttggacatagtggcatgcacctgtattcccagctacatgggaagctgaggcatgagaatcgcttgaac

SEQ ID NO: 59180 - DNA, 582 bp, Homo sapiens
gggccccccctcgagagtcttctagaattaattaacgcgggtctatttttgggctctctcttttgttccactgatctatttgtctgcccttttgctaataccacactggagctttatggtaagtcttgaaattaggcagtgtgagcctgccaactttattctttttcatatgactattataattttttgtacctcaatataaaatttataatcagtttctagatctctacaaaaagagcttgctgggattttgactgggattacatttaatctgtagatcaaattgcagagaattggtatcttcataatcacaagccttccatctcttcatttatttaagcttctttatcagtgttttgtagtttttgaccttttgattccacacatattagatttatacctaagtattatattatattccatataatacattttcacataacttcaatttcatacatgttaaatgtattatatttttaaaatttcaaattaaaaacattctaaatgtcctaatgctaaatgtttattactactgtagagaaatacagctgacttctggatattgacctgtattgtatcctg

SEQ ID NO: 59181 - DNA, 507 bp, Homo sapiens
cccctcggaagtcttctagaattaattaaaaaataatcagagacgccaacatccaaaagaaaaacaattaaaaaaagaacagtccaaatgttggagttaataaaaatacgttaaaataattataattaatagatcaaaggaaataaacaaagacatagaaaagtagatgacaagatggagaatttcacccagagatatagcatctataggtcgggcgtggtagctcacgcctataatcccagcactttgggaagccgaggtgggtggatcacttgaggtcaggagttcgagaccagcctgtccaacatggtaaaaccccgtctctactaaaaatgcaaaaacatgagccaggcatggtggcacatgccctgtaatcctagctactctggaggctaagttacgagaattgcttgaacccaggaggcagaggttgcactgatctgagattgcgccattgcactccagtctgggtgacagaccctgactcaaaaaaaagaaaaaaaaaaa

SEQ ID NO: 59182 - DNA, 575 bp, Homo sapiens
  misc_feature 28, 45: n = A,T,C or G
cgggcccccccctcggaagtcttctagnattaattaacgcggggnaatcagtgggttgattagaaaaaaatctgttattgcttagatgcattatttagtatcttgtactgtaaggaagagtttgtatatcatggcctgtcagaacagtcccgcaatgtgttttatgaactgaaaattctgaaagaataaggtagtgatttatatgagaatacagggaaagggttacccaaagagtctaatgaatttatgtctaaaccatagagtggaatgtgagagacacacagaactccagagttgtgatgcaaatacactgcacagtggaaggagaagaggaagtttttggtaatagtgtttcatctaatgtagctctgtaatgtatgtgtgccttcattattggaagagtgttcaacagttcacagttgaatagactgaagcatgatgctggaatctgggttcagattctagatccgtatcctacatatcaccaatgcttgtttctcaatttttgtttgtcattactttaagtctctttaatgcattagagtatccaagggtgacagtgaagggactgcatt

SEQ ID NO: 59183 - DNA, 404 bp, Homo sapiens
ccgggccccccctcgaaagtcttctagaattaattaacgcggggtgggggacaaggattgattttactttgtacaaaatctggcataggccaggcgtggtggcttatgggccgggtgcagtggctcacgcctgtaatcccaacacttcgggaggctgaggagggtgtatcacttgaggccaggagtttgagaccagcctaggcaatatggtaaaactctgtctctactaaaaatacaaaaaattgctgggcgtggtggcaggcacctgtaatcctagctacttgggaggctgaggcaggagaatcacttgaacatggaaggcggaggctgcagtgagccaagactgtgccactgcactccaacctgggcaacagagcaagactccatctcaaaaaaaaaaaaaa

SEQ ID NO: 59184 - DNA, 589 bp, Homo sapiens
ccgggccccccctcggaagtcttctagaattaattaacgcgggggcattcgtattgcgccgctagaggtgaaattcttggaccggcgcaagacggaccagagcgaaagcatttgccaagaatgttttcattaatcaagaacgaaagtcggaggttcgaagacgatcaggtctaagcagcagaacatccagcatggccagccgaaccagctctgagatgagttgggtagatctgaacatccctgataccccagaagctcctccctgctatatggatgtcattcctgaagatcaccgattggagagcccaaccactcctctgctagatgacatggatggctctcaagacagccctatctttatgtatgcccctgagttcaagttcatgccaccaccgacttatactgaggtggatccctgcatcctcaacaacaatgtgcagtgagcatgtggaagaaaagaagcagctttacctacttgtttctttttgtctctcttcctggacactcactttttcagagactcaacagtctctgcaatggagtgtgggtccaccttagcctctgacttcctaatgtaggaggtggtcag

SEQ ID NO: 59185 - DNA, 522 bp, Homo sapiens
  misc_feature 435: n = A,T,C or G
acttctagaattaattaacgcgggggaggaggaatctgtcgtaatttattcatcatccttgacttcaataaataattagtactggtaaacattattctataattattagaaagagaagtccctggccaggcatagtggctcatacctgtaatcctttgatttagggtttctacattctatattctatagtgtccatctgtcctctgctcatatgtgtttaagccataaatgaattatcagaaagtcttttattcttgtaaaaccaaaaaaaaaaaaaaaaaagagttggggaggaggaatctgtcgtaatttattcatcatccttgacttcaataaataattagtactggtaaacattattctataattattagaaagagaagtccctggccaggcatagtggctcatagaactttaaaatgatgctttgtctcnaaaaaaaagaagagacaaataattaaataggtgaatttttaaaataaaatgctgcttaaagaataaaaacatcgcaaatgctttgca

SEQ ID NO: 59186 - DNA, 615 bp, Homo sapiens
ccgggccccccctcggaagtcttctagaattaattaacgcgggactgtataaacacatgaaagtttcaataatatgtccctaaatgttcagtgtttcaatgatgaaatcaaaaaagaataaaaaaattgattgaaatcaatgaaagtagaaacaaaacatttcaaaacttatgggatacagcaaaagcagtgctaagggggaagttcatagcaataaaaatgtacatcaaaaaagcagaaataattcaaataagtgaacaattcaccttaagaagctagaaaaggaagaataaaccaaactcaaaattagtacaaggaaagaaacaataaagattagagcagaactaaacaaaatgtagactaacatataatgtgaacaaatcaatgtaacaaaaagttggtttttgaaatatctaaaaaaaagacaaaccgctattttgactaagaaaaaaggagagaagacccaaataaataaaatcagaagtgaaaaaagggacattacaattgatacttcagaaattcaaaggatcattagacactagtgagaacaactatatgccaaaaaattaaaaacccaagagaaaattattttctgtacacgtgaaacctatcaag

SEQ ID NO: 59187 - DNA, 536 bp, Homo sapiens
  misc_feature 177, 535: n = A,T,C or G
ccgggccccccctcggaagtcttctagaattaattaacgcggggggggcaggaggagaggaagcagttacagagaaaagacagattacccagaaagaactggctgacagatggcttatattttaacagcaaaagcagaagccagaagatagcgcaatgatagcctcaaagcgatgangaaaaaaagtcatcaatttagaattctgtactcaggaataccatcattcaagaatgaatgtaggctgggcacagtggctcatgtctgtaatcccagcactttgggaggccgaggcaggcaggtcactcgaggtcaggagtttgaggccagcctgggcaacacggtgaaaccctgtctctactaaaaatacaaaaattagccaggcatgatggcaggtgcctctaatccctgctacttgggaggctgaggcaggagaattgcttgaacccaggaggcggaggttgcagtgagctcagattgggccactgaactccagcctgggtgacagagtgagactctgtctcaaaaaaaaaaaaana

SEQ ID NO: 59188 - DNA, 530 bp, Homo sapiens
tagaattaattaacgcgggggcgggagggcagagtgggcggaggggagcagccgcacccccagcaccgggtgtctgcggtaggaacaagagggctgagagggtctggtcctggcccaggctcccccttgggctcagcacgaaagggctttcaatgaattaagtgaaaactttttccttttttacaaaaatgcaaaaatcaacaaagctccaaacctattggaaataaaatatgaacttgcaaaaaaaaaaaaaaaaaaaaccaaaaaaaaaaaaaaaaaaaaaaaaaaaaaaaaaaaaaaaaaaaaaaaaaaaaaaaaaaaaaaaaaaaaaaaaaaaaaaaaaatttaaaaaaaaaaaaaagggggcccccccccgggggggcccccatttcccccttttgggggtttttttaccccccccccttggccctttttataaaaacgtggagtgggaaaaacccgggcggcccccaatttaattcctttgaaaaaaatcccccttttcccgggggggttaaaaaaaaaaaggc

SEQ ID NO: 59189 - DNA, 372 bp, Homo sapiens
cccccctcgagagtcttctagaattaattaacgcggggggtgttcaaattcccaccatacctcttactagctatgtgaccctagtcaaattacataacttgtgtgtctgttttcccctttatgaaatgggggtcatagtagcatctacctcatggatgaaaggcttaatacgtataaagtccttataacggtgcttgtcatcttttagtctttccagttcttaatcctcccacactgccaagggggtgtcaccagctctttttaacttatttttttcccttagctatgggttatttcaaacaaggtaaggttttatttgggagaaggaattaaatgcaaaaaaactttttccttctcccaaaaaaaaaaaaa

SEQ ID NO: 59190 - DNA, 607 bp, Homo sapiens
  misc_feature 44, 51, 52, 85: n = A,T,C or G
cgggccccccctcggaagtcttctagaattaattaacgcggggnatatatnnggccaaaaaaacaagggagaggggaaaaggggngaaaagcaataaattttaatttaatacaaactatactcatactctcaatgaaacaagcttaagttgttctgaagactaacacaataatggacttctctaaatctgactgtggcttaacattaaggacctcaaatgatggttctagccttttttattttttaagaaaaacaaacgatgtttcagtagcaggctggctcatgagggtagacacaaaacctgactcaaagtttactgaaattcttgaggaaatggggaaattaataacccagataattatacagaacatctggattaagaggagagaggtttataaaagacaaaacaaaaattcccacaccaccaaaaaccctaactaataagactggtttggttttctggaggttttgaaatgcattcctagatcctaacaggcaagtttgtaaaattttaaacaaattttcaagttcagtttacagtaatcaagaggaacatacaaagatctgcgaccaagagagaaatgaaatactgtcaaataagtactcg

SEQ ID NO: 59191 - DNA, 316 bp, Homo sapiens
cgggccccccctcgaaagtcttctagaattaattaacgcggggaaaaaaaaaaaagaattttctttggtatccaagaagatcaaaaaaattaaaactttttttaaaaaataaaaagaaattaatcccaaccttgtacccaagcagaacaaaggatagcaattttcaaaaagggaactaacaggccaggtgcggtgcctcacccctgtaatcttagcactttggagggctgaggctggtggatcatctgaggtcaggagttcaagaccagcctggccaacatggtgaaaccccgtctctactgaaaaaaaaaaaaaa

SEQ ID NO: 59192 - DNA, 383 bp, Homo sapiens
cgggccccccctcgaggtacttctagaattaattaacgcgggggtacgtggggattattacaattcaaggtgagatttggatggggacacagagccaaaccatatcatcctgatacaaaacaggtcattaataaatatttattgaatagaattgagctggagagtttgttatatgcatatttaagttactctgcataccattaatatgtttcctcggtttgtagtcctgaagattaggcttgagttcagtatttatctgcttatgtgtcctgtgctgcaactgtcaccctccttgtccctcattcagccctgctctttcacaataaccaccccaagaagacttttcagatttttttttcatctgcatgtaaaaaaaaaaaaaa

SEQ ID NO: 59193 - DNA, 596 bp, Homo sapiens
cccccctcgaaagtcttctagaattaattaacgcgggggcacacacttgaactaatgttgggtcagtagcttcgtgttactgccctgatcccagtgtaattcaggtggaaaggtatttttatctcacagggatatgtagctatgtattttactaattgtgaaacactggaaattaatgatgcagacaacttggtgtggtctttgaacagctctctgcagtattttttttttcctgttaccataaattgtatttaagtgcttgctttccacttaagttgtactaatagaaccggtaactcccagccctccctgtttgacactccttagcttagattgatgtagttgtttttgttatccctataatgtgacttttatttttaagtcattgtgtactgcatttgtttgtcactagttgggcacgtgccaataatattctctccattccttatctgccatctctgttttgcctgatttctcttcaactgaataatggctttttgcatggaaaaaatagtttttactattagacgtgtaaagggaagagagagctaatgtattggactttgtgagcctacaaggatattttggatccctcc

SEQ ID NO: 59194 - DNA, 585 bp, Homo sapiens
  misc_feature 23: n = A,T,C or G
cccccctcggaaatacttctagnattaattaacgcgggcttggatgctgtagttggagatgaagtaaagttgctcaggtcatcttccgattcattactttcttctccagattcaaggtctagtcccaattcttccaacatttctgaaacatctgatattggacgggatcgatctagtttctcctggcatttgctacactgtttaatgtaatctttgacttgcttcaatatacctacaatgaaaatattaacaagtcaaatttaatactgttaactgaaaacagaatatattatttagtctgtgcacattaacacatttcagtacatatgtgcagacattcatgtcccataaaatatgtagagtttattagaatgtaaaatatacttttttcccaaaaaatataaagttataaatgatgttctcctgctgaggtaattttttttatttattcccagttatttgtttctctaatcataagatgactatatagctccacccattttcatgtgagttgcaatgttttcatgcaagaggaactatatgaaactgccaatattcacctttttttgacctacacaaattaac

SEQ ID NO: 59195 - DNA, 485 bp, Homo sapiens
cgggccccccctcggaagtcttctagattaattaaaagggtgggaagggaaagagggtacttgccacatagtttcctttttaactgcactttctttatataatcgtttgcattttgttacttgctaccctgagtactttcaggaagactgacttaaatattcggggtgagtaagtagttgggtataagatctgaacttttcatctgcagaggcaagaaaaatatttgacattgtgacttgactgtggaagatgatggttgcatgtttctagtttgtatatgtttccatctttgtgataagatgatttaataaatctctttaaatacttaaaaaaaaaaaaaaaaaaaaaaaaaaaaaaaaaaaaaaaaaaaaaaaaaaaaaaaaacaccacacttaaaaaaaaaaaaaaaggggcccccccccgggggggacccccaattccccctatagggagtctattaccccccccccactggccgcctttt

SEQ ID NO: 59196 - DNA, 287 bp, Homo sapiens
cccccctcgaaagtcttctagaattaattaacgcggggtgggggtaacgagtcaagagttggggtttagctatatctgtaatgctttatttaaaaaagaagggctggggggagcaggagtattacatggtatatatcctgtttttggtaggtttgaaatatcacacaatttaaaaatttaaaagtttacaaaattatgggagttgattaaaactatcaaaataaagaatgcatagcaaacaagtgctcttattatgaaaaaaaaaaaaaaaaaaaaaaaaaaaaaaa

SEQ ID NO: 59197 - DNA, 437 bp, Homo sapiens
  misc_feature 27: n = A,T,C or G
cgggccccccctcgaaagtcttctagnattaattaacgcgggggctgcctggaagatccttctgtcctggacaagaggaattggaagagcattttatgttttaagaacaggctgacacgcagcagctacaacaacagctgagatcacttaataaatggtgctaaactaaaaaaaaaaaaaaaaaaaaaaaaaaaaaaaaaaaaaaaaaaaaaaaaaaaaaaaaaaaaaaaaaaaaaaaaaaaaaaaatttcggacaaaaaaaaaaaaggaacaaccaaatttgacaaaaaaaaaaaaggggccccccccggggggggcccccaatttccacctaaagggagtggaaaaaccccccccttcccccctttttttaaaaagcggaaaatggggaaaacccgggggggcccaaaaaaaaaaaaggctcgaaaaaaatcccc

SEQ ID NO: 59198 - DNA, 477 bp, Homo sapiens
  misc_feature 26: n = A,T,C or G
gggccccccctcggaagtcttctagnattaattaacgcggggtgtggtggcaggcacctgtaatcccagctacgtgggaggctgagacaggtgggaggcggaggttgcagtgagccgagatcgcaccattgcactccagcctcaaaaaaaacaactcctaactcaaaaaaaaaaaaaaagaagaagaaaattgagaaagggaaagaatgaagcatttatccttcctttactatttaaagtatacctcagtgtaacaaaaagtgagcagaggaaaagttctttatttcaaaatattttagcaattaaagaagaaattatatttttaaaaaaggatatcaacatctttcaacccttaatggatctaagcaatgaccaccaattgctactaacagacattatgttcctctgatggatatacacaatatcacttgtgaggcaattgcactaaaaaaaaaaaaaattaaaaaaaaaaaaaaa

SEQ ID NO: 59199 - DNA, 146 bp, Homo sapiens
actgggtaccgcggccccccctcaaaatacttctagaattaattaacgcggggagcccggtaatcgcataaaacttaaaactttacagtcagaggttcatttcctcttctaaaaaaaaaaaaaaaaaaaataaaaaaaaaaaaaaa

SEQ ID NO: 59200 - DNA, 492 bp, Homo sapiens
  misc_feature 415, 432: n = A,T,C or G
cgggccccccctggagtctttgaataataaaacaggccatcccttttatattgaacatgcacatacaagtgaatgttgtttttccccttttgcaaatcggaaaaaaggcctgaagattagcactaggattaggaattccaggatagctgttctgtctgcctcggaggcattggggctgacctcatctccctgaccatgtctcctatgcccccaagctgaccgtcctttccgaggagagagcggcgctgctggagctgtgggagctgcgcaggcagcagtacgagcagtgcatggacctgcagctcttctaccgggacactgagcaggtggacaactggatgagcaagcaggaggtaatctgtgagcaaagccttgccagtggtgggagaagaagggcctgtgttttgcctcctcnggtagtgtgcttgtttntgtttaagacatcagtaccatgttagttctgaatccattgaagagggggaattgagcaag

SEQ ID NO: 59201 - DNA, 415 bp, Homo sapiens
  misc_feature 31, 349: n = A,T,C or G
taccgggcccccccctcggaatacttctagnattaattaacgcgggtagatacataacacaaactggtggcattaaatctgcatgctttttgaaaagtgattctggagtgaacaaaaattgcaactttagaagatatacaccaccatgcccagggtttcagtgtcaaactctgaatttgaatgacaatgtcaaactgagaaacaggatgaaatgcacaaaagtaatgtgtaaattgagtagctgacatcagttgacagataaaagtaatgacagtatataagcgtcaggtgaatgttcaaggaataggaaacaacattgtcaggacgtctgtttggaaaaaaacccttnaaagtaaaattacatacatcagattttatctagatattaaactgatgctgctgaggcaggaggatc

SEQ ID NO: 59202 - DNA, 464 bp, Homo sapiens
  misc_feature 370, 406: n = A,T,C or G
cgggccccccctcgagatacttctagaattaattaagcgggctatattatatcataataaatagaaaatttatagaatacaaaatacaatattgtattagtctgctagggggtgccatatcaaaataccataggctggttggataaaataacaaaaattcattttctccctgttctggatgtcagaattctaagatcaacatgctggcagagttgttgtctggtgagacccttgtgtttggcttgcagatagctaccttttttgctgtgtcctcacatgacctttcctctgtgcgggtgttcctggtggttcttccttttcttaaaacactagttctatttgattaggaccccacccttatgaactcatntaatcttaattacttccttaaaggccctttctccanataggtcacactggggggtcaggggcttcaatatatagattttgcaggaagggaaggc

SEQ ID NO: 59203 - DNA, 443 bp, Homo sapiens
cgggcccccccctcgaaatacttctagaattaattaacgcgggtatatcatctgaccttttaatgtttctagaaacttgtgtgaggtctcatacttcatggctaataaagtatttatttttctattcttgatcagttttgttggattttatcaattttgtgaaatctaacacatgactttcctaattttttgtattgtttttgtgttttctatttaatttctttttctcttatccttacgattctcttcctgctatgttttcctagtttaatttggtgggttttcttcttgttgttgttgcttcttggaatacaaataataacagtgctgtatgcctgtaatcccagacaggagaggatgaagtgggaaaattgcttcagcctaggagtttgagaaccacctaggtggcagagacagaccctgtcctgaaaaaaaaaaaaaaa

SEQ ID NO: 59204 - DNA, 484 bp, Homo sapiens
  misc_feature 33: n = A,T,C or G
ggtaccgggcccccccctcggggtacttctagnattaattaacgcgggctgcaaaaaaaaaaaaaaaaaaaaaaaaaaaaaaaaaaaaaaaaaaaaaaaaaaaaaaaaaaaaaaaaaaaaaaaaaaaaaaaaaaaaaaaaaaaaaaaaaaaaggcccccccccggggggggggtgcttttttttttttttttgggggggtccccccccggggggggtgcccctcttttcccctttgggggggttttttggcccccccctcgtggcccccttttttaaacctcttgggggggggaaacccctggggctgccccctttttggggtggggccccccccccttttttgcgggggggggttttccctaattggccccccccgttcccccttcccattttttgcccccccttttgggggaattgtttttgaacccctttttttttttttaaacctgcggctatattttggaaaactccctctttttttta

SEQ ID NO: 59205 - DNA, 559 bp, Homo sapiens
ccccctcggaagtcttctagaattaattaacgcggggaaatgggcctttccacctgagaaaggcgagtgtgtctgcgtttgataatcctttgatatttgcgtatctgttattttcaagaatcacatttcacatagaaagccatgtgacagtttttaaattaaaaaaaaaaaaaaaggtagaaattccagagatcttgtcttaggtatttactgccagctacaaacaaaccccttttgaatttacttaacaaggaatttaataaaagtagctctggcattcagccgcagccctgcccacattcctgttagctgaggtcacctgactctgcttgtcgtttttgcacaggcagacgtgtgcattctggagagcagggagtgagtgtaaagtttaggctgcgtcaggatgctgactcctcagaagtgtaacttcggcactatccagcctgtgggtggaatggcaatagcggagaatgggaacttcctactggagctgtttacggtgacagccccagatttgtgccacacttgcttccttcatatgctggcttcagtttctgat

SEQ ID NO: 59206 - DNA, 489 bp, Homo sapiens
  misc_feature 8, 10, 21: n = A,T,C or G
cccctcgngngtacttctagnattaactaacgcgggcttgtaatgaaggtttttactttttgcaattaaaagtgttggttgataagaaaaaaaaaaaaacaaaaaaaaaaaaaaaaaaaaaaaaaaaaaaaaaaaaaaaaaacaaaaaaacaaaaaaaaaaaaaaaaaaaaaaaaaaaaaaaaccaaaacaaaaaagggcgcccccccccccgcggggccccccgtgccccccctccggcgttttcctcccccccccccctggccggcggttccccccgccggggcccgcaaacccccgccccccccccccctgttccccccccccccccccccccttttcccccgggggggtttggtggaaggccccccccctcccccccctccccgctggggccccgcttggtggggcggggggaaatttgtcccccccccttctccccccaccccccccccccctttttgccccgccccccccctttcgccccccc

SEQ ID NO: 59207 - DNA, 618 bp, Homo sapiens
ccgggccccccctcgaaagtcttctagaattaattaacgcggggtagacccagccacaagaaaggaactttctgcctttgggtaggggaccatccccatgtcctctcttgactgaaagctgtttcactgctcaataaacttctctccgccttcctcactcttcaatgtccagtgtatcctccttcttgggcgcagtacaagagctcgggaactgccaaacacaggtacaagctataacacaggcaggctggggcacactagtgtggctgagtggggcccaggcagggcgttgccagccagaggtccccggtttgcaaggcaaccaagaaaaaaaattcctacaatcaatattaggcaaaatctatatgctaaaatacaactaacatattaattatacataatatttataatcaaagatggcctttcaaggtatctccctaaaaaaatttagtagcagttagtttttttaatgattccttctctttgaaagtaataaaacttttaataagcaaaaataaaaacctagatgggttattcagtttaaatttggtacaattttacctttttaaagtaaactaggcaaatgtatgacataagtaaaggaagaaatatatgaat

SEQ ID NO: 59208 - DNA, 596 bp, Homo sapiens
  misc_feature 23: n = A,T,C or G
ccccccctcggggtacttctagnattaattaacgcgggcctaggagtgcattgctgggttatatggtaagtgcgtgtttcactgtataagaaactgtcaactctttcaaagtagctttaccattttacagttcctcttgatatatattctcaccaacacttagtattgccaggttttttaaaagccattctaggttgggcatggtggctcatgcctgtaatcccagcactttgggaggctgaggcaggcgggtcacgaggtcaggagttccagaccagcctgtccaatatggtgaaaccccatctctactaaaaatagaaaaattagctgggcatagtggcacatgcctgtagtcccagctactcaggaggaggaggcagaagaatcgtttgaacctgggaggcagagcttgcagtgagccgagatcacgccactgcactccagcctgggtgacagagcaagactctgtctcaaaaaaaataaaaaataaatgcattttgacatagaagctaaatagaatactttatagtttagctttatttatgttattcaattgaaatattttctatcttagctgcaactaaagaattttattt

SEQ ID NO: 59209 - DNA, 460 bp, Homo sapiens
  misc_feature 27: n = A,T,C or G
cgggccccccctcggaagtcttctagnaattaattaacgcggggccacgttgttgcaattgtttcagtagaactggtttgatttctaaaatgttcctgtaacatatcttttatgaacaaatctgaacaatttgtgaaataaaacattgaaaaccatcaaaaaaaaaaaaaaaaaaaaaaaaaaaaaaaaaaaaaaaaaaaaaaaaaaaaaaaaaaaaaaaaaaaaaaaaaaaaaaaaaaaaaaaaaaaaaaaaaaaaatttaaaaaaaaaaaaaaggccccccccccccggggggggccccaatttcccccaaagggggatattttacccccccccctgggcccttttttaaaaaccttgggaagggaaaaacccgggggtaacccaaataaatccggttggaaaaaacccccttttttcaagtggggttaaaaaaaaaaaggccccccccaaaccccct

SEQ ID NO: 59210 - DNA, 603 bp, Homo sapiens
  misc_feature 15: n = A,T,C or G
cgggccccccctcgnaggtacttctagaattaattaacgcggggggaaactaactgtacaaaagaaccaagtttaaaagcattttgtggggtacatcatttctataattgtataatgtatttctttgtggttttaaatgataaagacattaagttaacaaacatataagaaatgtatgcactgtttgaaatgtaaattattcttagaacactttcaatgggggttgcattgtccttttagtgccttaatttgagataattattttactgccatgagtaagtatagaaatttcaaaaaatgtattttcaaaaaattatgtgtgtcagtgagtttttcattgataattggtttaatttaaaatatttagaggtttgttggactttcataaattgagtacaatctttgcatcaaactacctgctacaataatgactttataaaactgcaaaaaatgtagaaggttgcaccaacataaaaaggaaatatggcaatacatccatgatgttttccagttaacataggaattaccagataaatactgttaaactcttgtccagtaacaagagttgattcatatggacagtatgatttattgtttattttt

SEQ ID NO: 59211 - DNA, 579 bp, Homo sapiens
  misc_feature 27: n = A,T,C or G
cgggccccccctcggaagtcttctagnaattaattaacgcggggacgagggaggatgcagaataagaaagaaaaggaaagaaagcaggaaacacctttatttccctgctgtgctgagtgaatcttttagcagacttgccgaaacaagaaatgagccaggtttctttgtttttgtttttgttttggagacagagcttcacttttgtttcccaggctgcagtgcagtgtggcgatctcggctcaaaaaaaaaaagagggtttcaatgggaggagcagagaacacaagtatttcatctctttcaaagcaaacaggccttcccaagcccaccccccagacctttcaagtggaagaacctatgagatgttcttggcaaggagcccaaatgactccttagtttaaatattggtaaagggcggggacgagggaggatgcagaataagaaagaaaaggaaagaaagcaggaaacacctttatttccctgctgtgctgagtgaatcttttagcagacttgccgaaacaagaaatgagccaggtttctttgtttttgtttttgttttggagacagagcttcacttttgt

SEQ ID NO: 59212 - DNA, 576 bp, Homo sapiens
cgggccccccctcgaaagtcttctagaattaattaacgcggggtgggtgataatgatatatcaatgtagatttgttgattataacaaatgtgccattgtgctgcagaacatccataaagctggggaggtggtgcatggtaggggacaggaagtagaagggaactctttattttctgctcagttttgccctgaacctaaaacactgctctaaaaagaaagggtattttttaaatttgttttttaaaaaacccacataccaagataccatttattcatctgataaaaatcaaaaagtttgataacagttcatggggaaaaaggcactcttgtatactgttagtctaaaaacaaaacagtacaacctctatgaagagaaatgtggcaatatctaacaaaacacatgcattcacccttcagacctagcaattccaattccaggaatttgttctacagatatacctctgtgtatgtgtatatatatatattggcagcactatatacaatagcaaaacactggaaattctccagtatccaaaagattccatctacacgctgaaatattatgctctgcaatta

SEQ ID NO: 59213 - DNA, 580 bp, Homo sapiens
  misc_feature 27: n = A,T,C or G
cgggccccccctcggaagtcttctagnattaattaacgcggggtatggaaactattttataggtgtaaacactgacattataaaagaaagatctcattaacctaagttgccatctttaagaaactagagaaaaaagaaaataaaacacaaagctagcagaatgaaggagataataaagataagagcagagatacacaaaatggagagcaaaaaaacactagagagaatcaacaaaaccacaagtcttttctttgaaaagaaattgacaaatctttaactagaatgactatgaaaaagaagaaagaaaatgcagtaaaatgagaaatgaaagtggggacattactacaaaccttacagaaatgaaaaggattataagaaaacaccatgaggagggtgaagcaagatggctgaatagatgctttcaccgattgttcccctgctaaccttgcaggaacaccaatttaacaaccatctacacacacaaaaaagcacctacataagaaccaaaaatcaggtaagcaatcacagtacctggttttaacttcatatagctgaaaaagcattgaagacggtaggaaag

SEQ ID NO: 59214 - DNA, 429 bp, Homo sapiens
  misc_feature 37: n = A,T,C or G
ccccctcgaaatacttctagaattaattaacgcgggnatccaaatgagacttcagtgagggtaaaagtggggtctgaattctgattacccaccaggaggtttgcctttgcactgcttgagtgcacacatttgtaaaaggtctcacacccactccgttatttctttgatctcctagggcattctgatggtcatagtaattttgaaggccaggctcttccttcctctgaattgggtcggtgaaccttcttgctgtccccatgaagggtccctgttatgttccttgacagcccagatctggaactcagtccaaacaagcctgtaatcccagcaatttgggaggctgaagcgggtggatcacctgagatcaggagctgaagaccagcctggccaacatggcaaaaccctgtctctaaaaaaaaaaaaaaagcg

SEQ ID NO: 59215 - DNA, 594 bp, Homo sapiens
cgggcccccccctcgaaatacttctagaattaattaacgcggtggctcacgcctgtaatctcagcactttgggaggccaaggcggacggatcaccaggtaaggagtttgagaccagcctggccaatatggtgaaacccccgtctctactaaaatacaaaaaattagccgggcatggtggcgggcacctgtagtctcagcctcccaggtaactgggactacaggtgtgccactgtactgggctaacatatccctatttgtctatgtctatacatataaacttacccatccattaataacagtgcatagtattctgttacatagatgtgccttaacgtatttaaaaaatctttcttctgatggacttttaagtctctacttttttactattacaagcaatatggcagtgaacattaatttcttgcatttgtcccactttggtatttgttcccttagaaaaaaattccaagatctggaatttgaagattaaagaatgaatacttttggctgggtgtggtggctcacacctgtagttccagcactttgagaggctgaggctggtggatcacctgaagttaggagtgcgataccagcct

SEQ ID NO: 59216 - DNA, 463 bp, Homo sapiens
cgggccccccctcggaagtcttctagaattaattaacgcgggcatagtgaaaatgtcatacttgatattagagtgaattattcagtgtacacattatatgtattttaatatgtttctctttaggctgccttctagtaccaaatgttataatcagataattgacctggtgtttgtggtgatctgatattatcaggaaaagcattactctgcctttttaaactcttaaattgatacaactgctggaagaagggaggacagatccaagagatctaatttgtatataatgggagttccagagtgaaatacaagagaaaagccagatttaatagaagtaaatttcctgagctgaataaagccttatatttgcaggttgaaagtgttcactaaattctaggcaggattgatgagaaaaggcatacacctaaacatactctgacagaattcctgaatctcaaagttaaag

SEQ ID NO: 59217 - DNA, 515 bp, Homo sapiens
cgggccccccctcggggtacttctagaattaattaacgcgggcataattccaagcatagtaataattacattaaatgcatgtatattaaaatattctaatcaaaagacaaagcgtgtcagaccgaattttaaaagttccaactatatgctgtccacaagagaaacattttagattcaagatggataggttcaaagtctaatgatgaaaaaagaaggctgggtgctgtggctcacgcctttctttaatcacagcactttgggaggccaaggcaggcacatcacctgaggtcaggagtttgagaccagcctgaccaacatggtgaaaacccatctctactaaaaatacaaaaattaaccaggtgtggtggtaggcacctgtaattccagctacctgggaggccaagggaggagaactggttgaacccgggaggcagaagttgcagtgggccaagattgtgccactgcactccagtctgagtgacagagtgagactttgtctcaaaaaaaaaaaaaaa

SEQ ID NO: 59218 - DNA, 440 bp, Homo sapiens
  misc_feature 28: n = A,T,C or G
taccgggcccccccctagaagagtactntctataattaattaacgcgggggttgcagatgagccgagatcacaccattgcactccagcctggatgacagagcgagactctgtctcaaaaaaaaaaaaaaaaaaaaaaaaaaatcttttaagtatgccatatgaataaaaaacttttaaaaaatccattacctcaagcatttatcccttgtgttatactcttttagttatttttaaatgtacaattaagttgtgaataaaaactttgagagctttagagtttagaatcactatcacatttactgtctcattttatgatcctcacaacaaccctgaaagatagatggggcccattttacagatgagaaaactgagccgcgaacaggtgatgcgactcacccagggccacaagtggcagatccaggactagatcccaggtccc

SEQ ID NO: 59219 - DNA, 611 bp, Homo sapiens
ccgggccccccctcggaagtcttctagaattaattaacgcggggcgctgtaaaaagtgattgaattgtgagggctctgcccttataaatgcattaatctattcatggactaatagattaatcgggtaatgaattaacaggttatcatgggagtgagactagtggctttataagaagaggaaaagagactagagccagcacactcagcctcttgccctgtgacaccctgtgccatactcagggcactctacaggagtccccaccacaaaggaggcccttctcaccagatgtagcccctcaacactggcctactcagcctacataactataatgaaataaattccttttttaaaatacattacccagctttaagtgttctgttgtaagcaacagaaaacagactaatacacagagcttttcctttaagcatctaggagaaacatgtataagggggctaggatgtgccttgagtcaacaagacctcagtcaacaagaccttcactttgatatatccagttcttgagcagagtgagtcatatatggtaagcagggactgatattggttcctttctcttgcctttccgaaagtctttaattttttgacatttaccc

SEQ ID NO: 59220 - DNA, 415 bp, Homo sapiens
  misc_feature 24: n = A,T,C or G
gccccccctcgaaatacttctagnattaattaacgcggggagaggaagttaaagtatagagtttttattagatttctttttgcttgtttgtttgtttatgcaattagtgttaggctgtcatcagtttaacataacgggttatgagatagtatttgcaatcctcatggtaacctgaaatcaaaaaacatgcaacaaatacacaaaaaaataaaaagtaagaaattaaactatgccaccagagaaaatcatcttcactaaaaggaacgcaggaaaggagaaaagaccacaaaacaactagaaaacaactaaatggcaagagtagtccttacctatcaatagtaacattgaatgtaaatggactaaattctccaataaaaagacacagagtggttgaatggattaaaaaaaaaaagaa

SEQ ID NO: 59221 - DNA, 508 bp, Homo sapiens
  misc_feature 16, 29: n = A,T,C or G
cggggccccccctcgngggtacttctagnattaattaacgcggggcagggtgcgcattggtgctctacgaagctatatgatcacagggtatgtgctagttataacattgatatgaatacttgggaatatcgggatagcaaacttaaggtgttctatccgcacataagcgcctaacctgtgttaatgggacctgactgcacattgatatcattgaagactgtcactcctatttcataaaggaacatgcttaactctttgtgactgagtttcacattaactggaactttatttgcttaacacctaaacgttgtccgtttgaaaatatatccactgtgacctcgcgaccgatcctggtcgattaaatactagggttttcttgttattggattcttggtacaccatctatctcgactacaggatacttctctttttacagactgacatatgaactcaaaagtcctggccgcccgtgctttctttttttttttcactccctatggactgtggc

SEQ ID NO: 59222 - DNA, 476 bp, Homo sapiens
cgggccccccctcgaggtacttctagaattaattaacgcgggactgggcattgctctgggtgagtgagtagtgagagaatgtgaaggactgggatattactatatgctactaaagactgtataaacaccgaacatttaggctacactacatttatcttttttaaaaaagtaattgtgtggctgggcgcagtagctcatgcctgtaaccccagcactttgggaggccaaggagggcagatgacctgaggtcaggagttcaagaccagcctggtcaacatggcaaaaccctgtctctaccaaaaaatacaaaaattagttgggcatagtggtgtgtgcctgtaatcccagctacacaagaggctgaggcaggaggatcgcttgaacccaggaggcagaggttgcagtgagccgagatcacaccattgcactccggcctgggcaacaagagtgaaactccgtctcaaaaaaaaaaaaaa

SEQ ID NO: 59223 - DNA, 591 bp, Homo sapiens
  misc_feature 12: n = A,T,C or G
ccgggccccccnctcggggtacttctagaattaattaacgcgggggtggtggttgtcccaattgtgtcttagttttcagagaagtagaagttctgagaccccatttcctcccattgtgggacagcccttgtgccctttttcagtgtgaactctgcctactgactcactggtcagtttgtcctgccagccctgatggagaccagagcagctcttcttcctggcagtcatgtctcaggaaagtgacagggtgcggggtcactccattcactcattccctttctcatctggtaggatgaaaagatccagacccgggaagggaagtccgcagccgacgcccgctacgaagcagcctgcaacaggctggccaacaaggcggtgcagcggggctcggccgacaacgtcactgtgatggtggtgcggatagggcactgaggggtggcgcgcggccaggagcacgcatggtattgacttaaaaggttcattttgtgtgtgtgcatattgtgtgttttgtgtactcctgtgggactcccatggttgtaaataaaggtttctctttttttaaggtttcccggaagctgcggtatccaagcg

SEQ ID NO: 59224 - DNA, 379 bp, Homo sapiens
cgggccccccctcggaagtcttctagaattaattaacgcgggggttgggagaaggaggatcctatttaaaggaacaaacaaaaggatgactgattgctgaactctaatcagaagcaatgtgagtaagaggacagtggagtaacatctgtaaaacactgaaggaaaaaacagctgtcaacctacaattctatatccagcaaaaaattactgaacttgaagacacagtgatagaaaatgaaggcaaagtaaagccattttcagatatacgaaagctgaaagaattcaccaccaacaaacctgcactacaagagatgttcaaaaagtccttggagtcgccacaggtaagcttaaattagaaaaaaaaaaaaaaaaaaaaaaa

SEQ ID NO: 59225 - DNA, 600 bp, Homo sapiens
  misc_feature 28: n = A,T,C or G
cgggcccccccctcggaagtcttctagnattaattaacgcgggtatgcatcaaagtaaaccatatctgaaagcatagctcaggggttgctgggatttacgaagaggataacctaaggttatgatgataaaaacactcacagatggctccacgactggtactgaattaatgagtggaaatgtgcaaggactgataggagacatgtaggagacctaaaggaaaactgtggcaacttccctttcccctgggactctgcttcttttgattgtgcttcatgtagatcgtcttgatcattctgtgtgtaaaaaatgtcttgcggctgggtgcggtggctcacaccagcacttttggaggcccaggcaggtggatcacttgagatcaggagttgaagaccaagcctggccaacatggtgaaacctcatctctactgaatatacaaaaattagccaggtgtggtggtgggtgtctgtgatcccagctacttgggaggctgaggcaggagaaccactgtagcccaggaggcagaggctgccgtgagccgagatggcaccattgcactccagcctgggcgacaagagtaagactccgtctagaaaaaaaa

SEQ ID NO: 59226 - DNA, 573 bp, Homo sapiens
  misc_feature 28: n = A,T,C or G
cgggcccccccctcgaaagtcttctagnattaattaacgcggggctttctgggttccagtgttctaatacagaaatgagaagttgggctggaatcattgtgtcccaaaattggtacactttccgctagtggcatgtgacttgactctaggcggtacgtggatgaggatttttttgtaataggatgtttttgcaatctgtatttatatatgtacagccatggtttaaggtagtgatacaaaattttcttttacaatacttttttgattttaaaaagtcgagttaaaaaaattaactgtagcaaaaagttaatgtactctgtgaatatgggaaaaaaaaaacccatgaagttggcaagttagttactggtgtttgggaaccactgggcttagaaagtagaaatctgaaatcatctgtgattctaagagagattttgcctcgtttgttatgtaacagaatcacgtactggttgcctactggattctaaggtacaaaacttctggaattaacatatcaacaccaaatgagacgtttatttattgccaaaagatattatcagaaatgccacagtctaa

SEQ ID NO: 59227 - DNA, 577 bp, Homo sapiens
  misc_feature 28: n = A,T,C or G
cgggcccccccctcgaaatacttctagnattaattaacgcgggcatgtaaatcttacatgacatgtgagccttcagaagcaaagccccaaagacccaggggaaaactgtatttttatgggcagccatacagaagtataattgaaggacaaaagggtctgatccaaaggtaacaaactgggagaaatgtagtaagacctgtttgttcagtttcttctgtgtgggcacctgccacatgagtgtcttcaggggagaaggaacagaagaggtcggagagtgacgatcctgggttttatggtctgcttcaggggaggaaagcctgagagaaggtcagagacgccttcctacttctgctgttttttcagtttccaaggtgtcagtcatattttggggtatcacacctgaagcctctgcgagaccacaggtctgtgtgcctgtccagtgtctgggacataacaggagcttaaaaagcattctctccacacggggatttaccgtagacatgtttgtgaaaaccaaacaaatccttaattcctctccccctgcaaggtgtccttcctccatttagagctgcccttt

SEQ ID NO: 59228 - DNA, 604 bp, Homo sapiens
  misc_feature 28: n = A,T,C or G
ccgggccccccctcggaagtcttctagnattaattaacgcgggtggctccgggtcttgggaggactgtttctttgcacctctttagagatgaatcatacattcttggttaagtcataaaaggcttattgatttgcattcagaatcacctgatagatgcctttagttttttaaaaaattaaaaacccagaatatgtgctgtttgtccccattgaaatctaataataagaaattgtaaaggattgtttcaaaaagaaaggtctgtggttagaaatggttagaaatcagcttcattaaaagctgacattcagactgcactttttttaagcttctccgttctcttttggatattgttctcccataagaactttttagtcagctagattcccttttctcaaacccctggtaactaaaacttcacaggccttttggaaaacttcatccctccacgctaaactatctcctctacaactcattcttccaactacttttgcccctacttccttttgccaccttcaatactacatgaagagatctagaggagacttctatcaatccttaaaccccttcagaaattaaaaaaaaaaaaaaaaaaaaaaaaaaagc

SEQ ID NO: 59229 - DNA, 608 bp, Homo sapiens
  misc_feature 33: n = A,T,C or G
ggtaccgggcccccccctcggaagtcttctagnaattaattaacccggggactgcggcaatccttttttactgagatctgccctcacacgttctcctacatgtctgtaaatttccactaagctgtttattgctgcatctggaacctggctgtttggatctccaagtaagtggcatatatgtggcacaatcttgcttagtgttaaagtctgtgctccagaggcattgagtgttgctataaggcagagacagatgccttctcgagtacggaaattcttgtgtttgaagcctccaagcattctgtcccatacgtactggggattagcagcttgatccatgatctttagcagcagagttaggtcctgctccctcacagagtctttagcatctcctagtctgtctattagacttggcagcactgtgccgatctgcgccttgaaccgatcctgcagccgggtcaccagggcggacaggatgtccatgcccagcagagccaccttgtaattgctagagttcacccaagaggtagcaagtccatccacaagtttatctaacatggtctggtcatgctcaaggtcagcagacttctgtttgtctgataaatactcta

SEQ ID NO: 59230 - DNA, 505 bp, Homo sapiens
taattaacgcgggtggattatttcaggtcaggagtctgagaccagcctggccaatatggcgaaaccgcatttctacttaaaaaaagaaaaagataaattggccaggcatggtggcaggcgcctgtaatctcagctacttggaacgtgaggttgaacctgggaggcggaggttgcagagagctgggactgcaccactgcactccagcctgggtgacagcagagcaagactccatctccaaaaaaaaaaaaaaaaaaaaaagacattttaaaatatagtttgttagtattctatttgcctttatatgtatctagtatatgaaactgcaggttttagagttaatcccaaagatcattaataagcctgggtgacaagagtgaaactcagtcttattaaaaaaaaaaaaaaaaatagtacatggctagttttatgctccttaagaacagtttgagcagaatgttgctatgagttgtttaaactcataaaacaactaaaaaaaaaaaaaaa

SEQ ID NO: 59231 - DNA, 601 bp, Homo sapiens; identical to SEQ ID NO: 47612

SEQ ID NO: 59232 - DNA, 490 bp, Homo sapiens
cgggcccccccctcgaaatacttctagaattaattaacgcgggtactgatgcgagtgcagaggaggcccgtggttcaggtggtggaccggctgcatggacctggctgcatgcgggtccccatacatcgtggaggggatgcctactccatccatgcccccgtaatggggtagatcgtcgtacctttgcgccatcggcctctctggctcccttcctacttcaacttctaatatatcctctttaaggccagtgtgaaaagaaacaaatattcaaactcccccggaaaaaaaaaaaaaaaaaaaagcacgacgaaaaatcccttaacgtctccagcaacgtgagctactggtcccagatcttcggtctacgggacctgaagcaaagcgcccgagtcactgagcataaaagcgctccgtttccaagacagcagcgggggcaaaaaaaagcagatcttctctcccccaaaaatcagtttaaaaaaaaaaaaaaaaa

SEQ ID NO: 59233 - DNA, 614 bp, Homo sapiens
  misc_feature 562: n = A,T,C or G
cccccctcgagagtcttctagaattaattaacgcgggctgcactgaaggtaacaacagctaaggttgtgaacagtaaagatggcaacctcccctcccactctgggagctcccttccagggtggtgtagagctgctaccagtgggtggctggagttccaagccaggactcttattttggaagcttcaatgaaagcaggacctacagactgtcactgctcaaccttctggattcaacccctttactaagggtatgtgacctcccagtttgctacagttccagccacttttgccaggaagctcaggtgtctaaagcttccagggcttcacatgcagagcctggtgctctgctgagactccacatagatttgtgtgttggactatcatcttcatggagtgggttcacaaggagatctcctgacctaagagttgcaaaaatatgtgggtccctagggtggcacactcacttaccacttctcctggtgagagaggctctcctggctccatgttgctcccaggtgggcagtctggctgccttgcttttttctattctccattggctgangtgtgtttttgaggatcccagtgcatgtacttgaaatgttcagttgaaagta

SEQ ID NO: 59234 - DNA, 560 bp, Homo sapiens
  misc_feature 540: n = A,T,C or G
cgggccccccctcgaaagtcttctagaattaattaacgcgggggtcacctctttttaaacaggaggtgctatgaatttggatgtgttcaccacagttcatgtgttggaaacttaatccccaatgtgatagtgttggaaggcgggacctaatgggaggtgcttaggtcttaaaggctctacccttatataaatgggttgatattatcattggagtagacttgttacaaaagcaagttcaacccattcttgcccttccaccatgggctgacacagttaaaaggctcttgtgagatgtgggcaccatgcttttggactttccagtctccagaaccacaagctaataaataaatatatgttctttgtaaattacccagtctcaggtactctattatagcagcacaaatggactaatcatgattaacccatttatgctggaggttgcaaatgtatttttgtgaaaaatcagaccttggtgatgaccttgaacagtaggatataaataacttgcccaagcttagcattctaataatggaacactangcataaatgggttaaagtca

SEQ ID NO: 59235 - DNA, 445 bp, Homo sapiens
cccccctcgaaagtcttctagaattaattaacgcgggtctctactaaaaatacaaaaattagccaggtgtggtggtgggcacttgtaattccagctactcgggaggctgaggcaggagaatcgcttgaacccgggaggcagaggttgcagtgagctgagatcgtgccactgcactccagcctgggcaacaagagtgagactccatctcaaaaaaaaaaaaaaaaaagaaaggtaatataaaaccaatgttagaaaagcttcatcatctaaggtgagctgttcacaaacgctaaagcaagcaaaaggattttataaagatatcaagatcaaagactcattgtgtgggatcagtgatgtaacaaagtaaaaaaaaaaaagaatggctctatcccattcttcctctttatttttcatcaaataaaatataacccaaaaaaaaaaaaaa

SEQ ID NO: 59236 - DNA, 518 bp, Homo sapiens
ccccccttcggaatacttctagaattaattaacgcgggtaccactacagaaagccatcaaaccacaaggaagaaagcaagagagagagaagtgaacaaaagatttacaaacaactaggaaacaattaacaaattgagaagaataagttcatacctatcaataataaccttgaatgtaaatggattaaatcctccagttaaaagtgtagagtaattgaatggaggttgggcatggtggctaacgcctgtaatcccagtggcttgggaggccaagggaggcatatcacttgaggccaggagtttgagacaagcctggccaacatggtgaaaccccatctctactaaaaatacaaaaattagctgggcgtggtggtgggttcctgtagtctcagctacttgggaggctgaggcagcagaattgcttgaaccctggaggtggaggttgcagtgagctgagatggtgccactgcattccagcctgggtgacagagtgtggctctgtctcaaaaaaaaaaaaaa

SEQ ID NO: 59237 - DNA, 483 bp, Homo sapiens
cccccctcgaaagtcttctagaattaattaacgcggggaagggtgcatagctgttttagctgagggacgtggtgccgacgtccccaaacctagctaggctaagtcaagatcaacattccagggttggtaatgttggatgatgaaacattcatttttaccttgtggatgctagtgctgtagagttcactgttgtacacagtctgttttctatttgttaagaaaaactacagcatcattgcataattcttgatggtaataaatttgaataatcagatttcttacaaaaaaaaaaaaaaaaaaaaaaaaaaaaaaaaaaaaaaaaaaaaaaaaaaaaaaaaaaaaaaaaaaaaaaaaaaaaaaaaaaaatttttaaaaaaaaaaaagggggcccccccccggggggggcccccatttccccttatagggggtctttttcccccccctacttgcccgtttttttaaaactttgggatgggaaaaccc

SEQ ID NO: 59238 - DNA, 452 bp, Homo sapiens
cgggccccccctcgaaagtcttctagaattaattaacgcgggggctctgggaagaatctgcttccaagctcactcaagttgttggtagaatccagttccttgtgattgtattaggttggagcaaaagtaatcgtggtctttgccatttaaaagtaatggcggccaggcgtggtggctcatgcctgtaatcccagcactttgggaggccgaggaggatggatcacctgaggtcaggagttcaagaccagcctggccaacatggcaaaacccgtctctattaaaaatataaaaatcagccgggtgtggtggcatgtgcctgtaatcccagctactcgggaggctgaggcaggagaatcgacttgaacttgggagttgcaggttgcagtgagccaagatcgtgccactgcactccagcctgggcaacagagcgagactccaaaaaaaaaaaaaaa

SEQ ID NO: 59239 - DNA, 628 bp, Homo sapiens
  misc_feature 9, 41: n = A,T,C or G
aagactggngtaccgggcccccccctcggaatacttctagnattaattaacgcgggcagggcatgtacacccctaagatattttgagtcatatcatcctctccccgactgaatattggaaacaatatcacagagggggtacagtccctgcaatattcggggtaatgtcatcctggaccccctggatattagaaacaatatcatacctgcgatattaaatgtaacaaaatccttcccctccctgcttattaggaacaacatctcaggcagagtgtacaccccctgctatattgggagtaatatcagcctctctccccttggatattaggaacaatgtcacaggggtgtgcacaccccgtgcgatattgggggtaatattatcctatcaggttctggatattaggaacaatatcacagagggggtgtacactttcagcgatattgggagtaatatcatcctctccctccttaaatattagggaaaaaaatcacagggggttgtacatctgctgcaatattgggagtaatatcatcctctgaccctctggatattagaaactatatcactgggggactgtacattctttgccatactgggagaatatcattctctcccccaaaaaaaaaaa

SEQ ID NO: 59240 - DNA, 392 bp, Homo sapiens
  misc_feature 28: n = A,T,C or G
ccgggccccccctcggggtacttctagnattaattaacgcgggatagtagaattgagatttgttaatggaattggttctgaggaatatataaatgttcatatgtttttcaagaaatattgattgactagtatgtgttttgcggatatagcagtgaacaagatagacaaaggctttgcattcatagagtttatttgtacagtagtgtcacaggcaaactataaccaaatgaagaagtgaataaggaatacattatcaattccttttatgaagaaaatacaccggctgttgagagtgagaataagtgagggttactttagaccagccactttagaaaggctggttaggagcctggccagtgtggtgaaaccctgtctctaccaaaaaaaaaaaa

SEQ ID NO: 59241 - DNA, 616 bp, Homo sapiens
cgggccccccctcggggtacttctagaattaattaaaaatatttcccatttatagaatgcatatatttgcaatggacttccactttcatcaactttccatctcatcgctttaaacaggaacttgaacaagcactgttagtttagacctaaaggataggaaagcattaaataatactttggatctcctgaggaaaagataagtttgcttgcaatttacacattccatggggaaagaagagccatatttccttaaaaaaaaattaataaagcttgttattgagaaaaattgtagtgaaaagccttaagtaccaaattttaaagcagcagtaacttaatttttatatcagtgtttttgttttgcacaaactaaatgcagtggtaggtgggtttatgagtatattaattgcctttatccatttgtgaagttaagttgatgagggcaaggtttttgtttgtttaatttgtatatgtctaaaggtatttggaactttttacaggaattaaacatatatgcaaatttgtatataaaaatagcatggccatcatttgaatgcttgtaaatgaaaggattatcttttttgagatctatatataaatagaaatagaaaatccagct

SEQ ID NO: 59242 - DNA, 450 bp, Homo sapiens
gggccccccctcggaagtacttctagaattaattaacgccgggctgagtctgacagctctctacatactagcccccattatggcctaaaaccaggcgacctgcgactcctggacgtggacactcgagtactactcccgatggaaccccgcattgatgtaataatcacggcacaagacgtgttgcactcatgagctgtatcccgacactcacgcttaaaatacaaatgcaattcccggacgtagtaaaccacaccacttacaccgttacacgcaccgggggtagtcacttacggagccaatgcggtgaaatctgtggagacataaccacagggatcagtgcccgatcgcctctatgaattaatatcccctaacaagatcttggaaataggggccgtatttaccctatagcacccctctctaccccctctagagcgatacaaaaataataaa

SEQ ID NO: 59243 - DNA, 401 bp, Homo sapiens
  misc_feature 331: n = A,T,C or G
cggggccccccctcggaagtcttctagaattaattaacgcgggtcgcttcgaagattgtttcagaagcgttgggcggcgggcgtccctgagagaaattagaatctggaaactgttcttcaggaagaaacccattagtttggaactggagaattcctttgcatcagatactaaaatgaaagaaccacttttaggtggtgagtgtgacaaggcagtggcatcacagctggggctgctagatgaaattaagacagaacccgacaatgctcaagagtattgtcataggcaacagtccagaactcaggagaatgaactgaaaataaatgccgtgtnttcagagagtgcttcacagttgactgcaggcattcagctttctctggcatcatctggcgtgaataaatgc

SEQ ID NO: 59244 - DNA, 472 bp, Homo sapiens
ccgggccccccctcgaaatacttctagaattaattaacgcgggctaagaaatgataccatatggtaactcatatccataagaacaaaggaaaagaaccacaaatgataagcaaaaaggttaatataacaaactctataaatacatacttgctcttctttcttctctctgattcttgaaagcatgtgtatttatataaagtaatattatcaccatgtattgcttagtttgtaacatatatagatgtaccacgtataacaataatatcataaaaaggggagaaaggaaatacagctatataggaatgacatttcaatatttaactggaattaagttggtataaatctgaagtagatactggtaagttaaaatcgatgtgctaagccctagaacaaccgctcataacacaactttttaaatagaggaaagaaaaacattaaaggattttacatgttgcactagaaaatattcact

SEQ ID NO: 59245 - DNA, 437 bp, Homo sapiens
tgggtaccgggccccccctcggagtacttctagaattaattaacgcgggtgtggtagcacgcacctgtaatcccagctacttgggaggctgaggcagaatcgcttgaacctgggaggaggaggttgtagtgagctgtgatcaggccactgcactctagcttggacaacagagcaagaccctgtcttaaaaaaagaaaaaaaagaataatggagtttaaatatgtaaatgacaagtctaagatttcaaggtcatactttcatgctaaggagccatcacagctacatatatatatagtgtatatatatatagtgtgtatatatatatagtgtatatacatatagtgtatatatatatagtgtatatatatagtgtgtatatatatagcgtgtgtatatatatatatgtgcctatatatatagtgtgtgtatatatatat

SEQ ID NO: 59246 - DNA, 576 bp, Homo sapiens
cgggcccccccctcggaagtcttctagaattaattaacgcgggaggctgaggcagaggatggcctgagcccagaagttcaagggttgcagtgagctatgatcacaccactgcactccagcccaggcaacaaagaaagaccctgtctcttaaaaaaagaaaaagaggaaaaaaggaatgtttatggcaactttttttggtgatagctaaaatctggatacataccttatgttgatgaatacttgaatggataaacaaatcttggtatatccatagaaagaaatatgactcagcattaaaaaggaagccactaccaatacatgcaccatggatgaaattcaaaattatgcagaaagaagccagacaaaatcacacataatataattccaaaaaatacgaactaatctatagtgagagaaaacagatcagcagttgcctggaaacaggggggaaataaaagaggcacaaggaaactttgacgggtaatgagtacgttcacttcctctgttgcactgatggctcctgaggggtactctctaaatacagtcatgcgtcaggtgattctctccctgtatgaa

SEQ ID NO: 59247 - DNA, 606 bp, Homo sapiens
  misc_feature 28, 577: n = A,T,C or G
cgggcccccccctcgaaagtcttctagnaattaattaacgcggggatgcactgcatattcgacaggggcctcgtcagatgatgataccgtgtttttgctgtaactttcctatgcttagatacacaaatccttaccattgtgtgacagttgcctgcaggattcagagcagtgacctgctgtacaggtttatagcccagaagccatagactgtgccacgtggcccgggtgtgtagtgggctgtaccatctaggggtgtgaaatcacctaaggacaccttccttagaacctatcccagtcaagggatgcgaggctgagtaacggggccccttgggagttcagcactcagcatgtttcagtgagtgactgaaataatgaacgttctgatcgggccctctctggctggcacctgtgaaccactcgctttgtacccattatttcttgttcccacagcatcattataaactgctgatctactgtttctttgtcaaacgggaggagataacatgagggtcatgagatatgtttgcagacggagtgaatgccttgaaagtgctgcgaccaggtgctgacacccggnagtctggctgctcaaagtgttagctgaca

SEQ ID NO: 59248 - DNA, 555 bp, Homo sapiens
cccccctcggaagtcttctagaattaattaacgcgggtacaatcctttagctagacagaaaagttctccaagtcccctacctgattagctagacacagagcactgattggtgtgtttacaaaccttcagccttcagatgaaactgcacccctggtgtcaggggtggtcctatgcccaagctggctgaccggaagctgtgtgcggaccaggagtgcagccaccctatctccatggctgtggcccttcaggactacatggcccccgactgccgattcctgaccattcaccggggccaagtggtgtatgtcttctccaagctgaagggccgtgggcggctcttctggggaggcagcgttcagggagattactatggagatctggctgctcgcctgggctatttccccagtagcattgtccgagaggaccagaccctgaaacctggcaaagtcgatgtgaagacagacaaatgggatttctactgccagtgagctcagcctaccgctggccctgccgtttcccctccttgggtttatgcaaatacaatcagcccagtgc

SEQ ID NO: 59249 - DNA, 390 bp, Homo sapiens
  misc_feature 12: n = A,T,C or G
ccgggccccccnctcggaatacttctagaattaattaacgcgggtttacaagaaaaacaaaattacatttaagcagtagcttgatttttttttttttttttttagcattaaatatgaagtctgtgtaatcggttacaatgttaaaaaaatcaaacttcagcctgagtatttagaaaatggaaatgtctgtttggtttgtaggaagagtttgacaaggtataagttggaactgtgttaacactaaaatttgttttgtatcattttttttaaaccccagagtctacatatttagaatttagcttgagttaactagaagactggaattaacctttcctgtttcctgacagggtaagatgataatgcaagataaattggaaaaaaaaaaaaaaa

SEQ ID NO: 59250 - DNA, 583 bp, Homo sapiens
  misc_feature 95: n = A,T,C or G
ccgggccccccctcggaagtcttctagaattaattaacgcgggaaactgaaacacagtgttaagtatttgtgtatctaaacgtatctatacatangaaaaggtacagcaaaaatacggcatgacagattaaaaatggtaaagagcacttacatgaatgcagtctaccaggactgttaagttgctctgcgtgagtcagtgggtgagcagggagtgaatgtgaaggtctaagacatcactgtacactactgtaggctttataagcactgtgcccttaggctacactaaatctattaaaaatattcttctttcttcaataacaaattaaccgtagcatactctttttactttataaacttttaaattgttttaaactttttgactcctttgcaataaaacttagcttaaaacacatattgttggacaaatgtggatactgttgggcggttacaaaaaatattttctttctttgtatctttattctataaactttgttttcttccttttttttgagagtgtcttactctgttatccaggatggagtaagaccttgtctcaaaaaaaaaaaaaaaaaaagcggccgcc

SEQ ID NO: 59251 - DNA, 496 bp, Homo sapiens
  misc_feature 16, 29: n = A,T,C or G
ccgggccccccctcgnaaatacttctagnattaattaacgcgggagataaagtctttttgaataatatagtatgcactgctatttgcttgattatgtaatgtcaaaagtttaactatattccaagtacaaaaacatactggattacattgaggatgttgaatagcattcatgatggctttgttttggtttggggcagctgtcaccagctaaagcaatgttgttaaaattagctcaataaaaatgtctttaaaatgtaaaaaaaaaaaaaaaaaaaaaaaaaaaaaaaaaaaaaaaaaaaaaaaaaaaaaaaaaaaaaaaaaaaaaaaaaaaaaaaaaagggaaaaaaaaaaaaaggggggccccccccgggggggaccccaatttccccttttagggagtgttttaaccccccctaatggcccgttttttaaaaacttcggaatgggaaaaaccttggcttacccaaattaaatggctttgaaacaaatccccttt

SEQ ID NO: 59252 - DNA, 519 bp, Homo sapiens
ccccccctcggggtacttctagaattaattaacgcgggcccccaacagcaacaggcacatctagtgtccagattttggattcaaaataccattctccactaaaaggaatcaggactccttggagaaatggctgattccaggactggggcaggagaggttcgcaatgaatctggagcatctcatcgtgccaaaagcaaggatacacttaagagaatgatggaggctgggcacgggggctcacgtctggaatcccagcactttgggaggctaaggtgagtggatcacttaagcctaggagttcgagaccagcctgggtaacatagcaaaaccctgtttttataaaaaaatttaaaaagtagccaggtgtggtggctggcgcacatctgtaatcccagctacttgggaggctcaagtgggaggattgcttgagcctgagaggcaggttgcagtaaggtatgactgtgccattgccttccagcctgggtgacagagtgagactctctcaaaaaaaaaaaaaaa

SEQ ID NO: 59253 - DNA, 304 bp, Homo sapiens
ccgggcccccccttcgaaatacttctagaattaattaacgcgggggtctggtcctgctcatggtttttattcttcctactctccctcctatgtgactgaggatatggctataaggtggttgcacctgagatccctgacaactggctgcacaaattccaaaagtatagtgtcactccctgtggccttacttggggcttctgtgaccacatgtgctccatctttattaaaagaaccaagggaccctcattttctgatgtgcttggctctgattacatggctttgcactgggttaaatgctgactgt

SEQ ID NO: 59254 - DNA, 533 bp, Homo sapiens
  misc_feature 13, 23, 24: n = A,T,C or G
attaacgcggggnattgaagcannaaaaaaaaaaaaaaaaaaaaaaaaaaaaaaaaaaaaaaaaaaaaaaaaaaaaaaaaaaaaaaaaaaaaaaaaaaaaaaaaaaaaaaaaaaaaaaaaaaaaaaaaaaaaaaaaaaaaaaagggggccccccccgggggggaccccaatttccccttatagggagttttttaaccccccctcatgggccgttttttaaaaacttgggaatgggaaaaaccttgggttacccaaattaaatccctttgaaaaaaatccccttttccccagtggggtaaaaaaaaaaaaggcccccaccaatcccctttccaaaaatttgcccaccttaaagggcaaaggaaaatttaaacctttaattttttttaaaaatcccgttaaaatttttgtaaaaaaaccttttttttaaacaaaaaggccaaaatgggaaaaatcctttttaattaaaaaaaaaaacccgaaaaagggtggagggttttcccatttggaaaaaaaattccctttttaaaaaacgg

SEQ ID NO: 59255 - DNA, 561 bp, Homo sapiens
cgggccccccctcggaagtcttctagaattaattaacgcgggtcctagagcaaagaaaacataagttaaaagtaatttttatagaagttggtgttgaaagctttttatatagctttactcttcaatgtggtagccactaaccatgtgtggcttttaaacttaagattaaataaaatttaaaaattcagtttctcagtcataggagtgccatttcaagtgttcagtagtcacatgttggatactgaaaaaatagaatgttttcatcaccacagctcttccatactgcagtacggtagaggatatgatctctaacacctaaatttgacaaagaaggaactgagaccacagagtagggtaatagtggcaggtccaggattagaatttgagcctggtaattccggtacattgttctttctattaaaccgtggtttcatctgatgttatttttcaactcatctttactttttagaagtgtaattgtctctgtgctttaaaactgtcttcttaaaaaagtattaatgttttttcccatagctccaaagcctgaactgatagctgcag

SEQ ID NO: 59256 - DNA, 582 bp, Homo sapiens
cccccctcgaaagtcttctagaattaattaacgcggggtgggggaagtggggagggatagcattaggacatatacctaatgctaaatgacaagttaatgggtgcagcacaccaacatggcacatgtatacatatgtaacaaacctgcacattgtgcacatgtaccctaaaacttaaagtataataataataaaatttaaaaaaaagaaaagaaaaaaaaagaaaggagtatatagggaataaactttttaaaactttaaaaaaaatagttattggctgtaaagatgagacagaggaagagataggggtagaaagtttattgaatgggataacagagaacttctcaaacttagatatcgctatccaagtacaagaagcttgtagaacaccaagtacatttaacccaaagaagactaccttaaggcatttaataataaaactcccaaaggtcaaggataaagtaacaatcctaaaagcagcaagagaaaataaacaaataacatactatagagcttcaatacatctggcagcagacttttcagtggaaaccttttcaggctaggagacagtggtatgacatctt

SEQ ID NO: 59257 - DNA, 388 bp, Homo sapiens
ccgggccccccctcgaaagtcttctagaattaattaacgcgggctgacattattgttatccatgctttacacttagaaaatgtgggcatacagagatcatttgttcaaggtgatgcactagtaagtggtaaagccagttataaatccaatgtgacttcagaacttgcataaaagctactgtgctatactgataattcctacacacacacacacacacacacacacacacacacacacaccttctctctctcaaagaaacattacaaaactgcagagaacatttctatcctcagtagagaaacttggaaaatcatctatttggaaaaaagtgaagtttgatcatcattttttttccccttcacctcatttgaccaaaaaaaaaaaaaaa

SEQ ID NO: 59258 - DNA, 477 bp, Homo sapiens
  misc_feature 15: n = A,T,C or G
taattaacgcggggnagtcaaaatttatacattcattttcaactgcacgggtgttggcacccataaatcccacattgttcaaggctcaactgtattgttaagtgaataaagtcaaggtatgggagagtatgaataagtatgtcattctctttgcttaaaaatagaggaaaaaagaggccgggtgcagtagctcacgcctgtaatcccagactttgggaggcctaggcgggcggatcacgaggtcaggagattgagaccatcctgtctaacacggtgaaaccccgtctgtactaaaaatacaagaaataagccgggcatggtggcgggcgcctgtagtcccagctactagggaggttgaggcaggagaatggcgtgaacccgggaggcggagcttgcagtgagccgagatggcaccactgcagtctggcctgggagaacgagtgagactccgtctcaaaaaaaaaaaaaaaaaaaaaa

SEQ ID NO: 59259 - DNA, 608 bp, Homo sapiens
cgggccccccctcggaagtcttctagaattaattaacgcgggcgtctgcaatcccagctatttgggaggatgaggcaggagaatcgcttgaaccgggacctgggaggcggaggttgcagtgagctgagatcgtgccactgcactccagcctgggctacagagcgagtctccttctcaaaaaaaaagaaaagaaaagaaaaaaaggccgggcgcggtggctcatgcctgtaatcccagcactttgggaggccgagttgggcagattgcaagttcaggaaatcgagaccatcctggccaacatggtgaaacccatctctactaaaattacaaaaattagccgggtgtggtggcgcatgcctgcaatcccagccacttgggaggccgaggcaggagaatcgcttgaacccaggaggcggaggttgcagtaagccaagatcgcaccattgtactccagcctgggcaacaagagcgaaactctgtctcaaaaaaaaaaagaagaaagaaaccaaaaaagtagaaaatcatattatcatatactttaatagcacaacaaaattacaaattaataattgtgggtattttagaatatatatgaaacagctatttgg

SEQ ID NO: 59260 - DNA, 390 bp, Homo sapiens
cgggccccccctcggaagtcttctagaattaattaacgcggggaagtcctccagacaaccctcagatttgatgatttcctagtagaactcacagaaataaagagctgttatactgtgaaaaaaaaaaaaaaaaaaaaaaaaaaaaaaaaaaaaaaaaaaaaaaaaaaaaaaaaaaaaaaaaaaaaaaaaaaaaaaaaaaaaaaaaaatttaaaaaaaaaaaaaaaaaggggcccccccccgggggggcccccaattccccctttaagggggttttttaccccccccccctggcccgttttttaaaaccgggggggggggaaaacccgggggttccccaatttaattcccttggaaacaaacccccttttcccccgggggtttaaaaacaa

SEQ ID NO: 59261 - DNA, 424 bp, Homo sapiens
acttctagaattaattaacgcggggaggtcattgacagcaacagcgtaagatcctgtcttaaaaaaaaaatggaatattgaagtcaaacagcattacagaagaatatcagttatatcagtttatcaaactctaatttcccatgactatatcaacacacacaaccacaaaaatataaaccaactgctgtaacaacaagctctaagagtatccaaactgaggcagtcagggtgcttccctctctcagttgggcttgttcaacctataaatggaaattctttaaaaaatttcccagccaggtgtggtagctcatgcctgtaatgccagcactttgggaggccgaggcagggggatcacgaggtcaggagatcgagaccatcctggctaacacggtgaaaccccgtttctactaaaaaaaaaaaaaaa

SEQ ID NO: 59262 - DNA, 123 bp, Homo sapiens
  misc_feature 28: n = A,T,C or G
cgggcccccccctcggggtacttctagnattaattaacgcgggggaggaagacgcggtcgtaagggctgaggatttttggtccgcacgctcctgctcctgactcaccgctgttcgctctcgcc

SEQ ID NO: 59263 - DNA, 442 bp, Homo sapiens
  misc_feature 39, 67: n = A,T,C or G
gactgggtaccgggcccccccctcggaggtacttctagnattaattaacgcgggcaggctccacagnagccctgtggtggctcttgtggaggactcactagacagaagagaagagtgggacagacctcgccaccaagatctaaatccaaacaaaacaaagctagagccagaagaggggacaaatctttgttcttcctcatctttacgtatgcgaaagcacctgagacagctggcaatattataaatcaggtaactggaaggaggttaaacacagaaaaaaagaaggcctcaatcaattctctacttatttttccaaatcagataataacccagcaaatagtgataacaaagaaaaccttagctattcacataatgtcttgatttcaataatctaattcttaatcattaagagaccaatacccctttccaaaaaaaaaaaaaa

SEQ ID NO: 59264 - DNA, 570 bp, Homo sapiens
ccgggccccccctcgaaagtcttctagaattaattaacgcggggttctatatcagaaatgactatttaagaaatgcaatgatttaagcttcttaacattagcaaaaatagttactaacaaaattagtaacttatggaaattatataagaagaatgaatatttaatgaggcacttgactaacacctgaataaacatttaatggatgtaaagttgcatttagtaagatgtcaactatttccacatctattcgatcagattcacaatagcactattatttggaacgttagaatgtgattataaaaatttcagagaagaattaaatgtgtgtgactactcaaggaaaaaataaaaatgaaaacaaggatggaggatttaaactcccaggtattattcaacagaggattctgagaatgttagtcatctatttggggaaaaaaaatatgtatttttaaatttggttcttacttttcaccctattccaaaataaatttaaaagagtttcgagaaataaactaagaaatgaaataatggggtagctaggagagaatctggcagttatttctttaatgc

SEQ ID NO: 59265 - DNA, 443 bp, Homo sapiens
cgggccccccctcggaagtcttctagaattaattaacgcgggcagtttttattagaaaatagtttgtggtcttctgagttatgccttacaagcatatttccaactattcagcaaaagttgttcaaagccagaaagagttggtacaaatggcggggcacagtggctcacgcctgtagtctcagcactttgggaggcagagatgggcagatcatgatgtcaggagattgagaccatcctggccaacagggtgaaaccccatctgtactaaaaatacaaaaattagctgtgtgtggtagcgcgtgcctataatcccagctacttaggaggctgaggcaggaaaatcgcttgaacccgggaggcggagattgcagtgagcagagatcaggccactgcactccagcttgggcgagagagtgagactgtgtctggaaaaaaaaaaaaaa

SEQ ID NO: 59266 - DNA, 438 bp, Homo sapiens
  misc_feature 396: n = A,T,C or G
ccgggccccccctcgaaagtcttctagaattaattaacgcgggctatttctaaaagtgtaggtgtgatctattagaaaacagggcttggaaacagagtattttttattttattttattgaacattaaaaattccttttggctgggcatggtggctcatgcctgtaatcccagcactttgggaggccaaggtgggcggatcacgaggtcaggacatggagaccatcctggctaacatggtgaaatcccgtatctactaaaaatacaaaaaattagccaggcgtggtggcagacgcctgtagtcccagctactcgggaggctgaggcaggagaatggcgtgaacctgggaggcagagcttgcagtgagctgagatcttgccagtgcactccagcctgngggacagagtaacactccgtctcaaaaaaaaaaaaaaagcgc

SEQ ID NO: 59267 - DNA, 611 bp, Homo sapiens
  misc_feature 498: n = A,T,C or G
ccgggccccccctcggaagtcttctagaattaattaacgcgggccctgagatttagcttcatttatgctactatatcatatttcattttgtatacctcagtattttttttattttaaaaaaagaagaaaatatctatgttgtctcacagggttttcctgagagtaaattgaaatagtcattgagaaaagtaatttaaaaacaatttaagggtttttttttttttttaatgtatattgacttgaatctaaagattttgaaagccaggcattgtatagtataattatacaatgtgtaaactcttggcttttaggcccagacaagttaccagaaggcagccttatttaaagaatagaagactctggctaggcggggtggctcacacctataaacccatcactttgggagacctaggtgggcggatcacttaaagtcaggagttcaagaccagcctggtcagcatggtgaaaccccgtctctactaaaaatacaaaaattanccaggcgtggtggcgcgtgcctgtaattccagctacttgggaagctgaggcgcaaggattgcttgaaccggggaggcagaggttgcagtgagccaagattatgccactgcact

SEQ ID NO: 59268 - DNA, 611 bp, Homo sapiens
cgggcccccccctcgaggtacttctagaattaattaacgcggggtaagatttgccgagttccttttacttttttttaacctttccttatgagcatgccagcatgaataatttttctttttcttttttttttttttttggtagagacagggtcttgctatgttgcccaggctggtcttgaactcatggcttcaaaggatctcccacctcggcctctcaaagtcctgggactaccggcataagctaccatgcctagctatcagagactactgctaactgctgtgcatgaactggaaagcccagaataaatggatcaattcctggatacatacaatcttccaagattcaatcaggaagaaatagaaaacctgaacagaccaataatgagtaatgagattcaatcagtaataaaatgtctcccatttggtcccaatccaggaccaaatggctttattattgaattctaccatacttacaaagaagaacacccattctcctctaactattccaaaaaattgaagggaattctccctaactcatttcatgaggtgagcattaccctgatacgaaaaacagacaaggatgcaacataagaaacccataagccaatatc

SEQ ID NO: 59269 - DNA, 594 bp, Homo sapiens
cccccctcggaagtcttctagaattaattaacgcggggggccgggatcatgccactgcactccagcctgggcgacagagtgagactccgtctcaaaaaaaaaaaaaaaaaaaaaaaaatcttgtggcaattccatattaatacccagagcttctcaaattgtttttatttgtatgcttttgtttatagctgcatagaattctattgtgtaccaaagtttatttaaccaatctgctttaggcaaatatttgggttatttccaaacctttagcactaaaaacaatgctcaatgaataattacacatggaaacatatacagatgaatctgtggaatacaattctagatatgagattgcagaatcaaaagacaaatgcatttataataatgataaatattgacatattttatagggatttgtcccatttttgcatttctgccagcaacatagaagagcgtcagaacagggcttttctgaatgggttcccactattaacaggagctgtgataatttatacattgacaaaaaaagaacaaaatcagtgtgatatattaaaaacagaatggttttctaatgcaaaagcacaaggcatcagc

SEQ ID NO: 59270 - DNA, 615 bp, Homo sapiens
cccccctcgggagtcttctagaattaattaacgcgggggatagcaaacttatctgcagaggttgtctcactcaagagacttatagccacacaaccaatctctgcttcagactctgggtaaattactactgagtaagagctgggcatttagaaagatgtcatttgcaatagagcagtccattttgtattatgctgaattttcactggacctgtgatgtcatttcactgtgatgtgcacatgttgtctgtttggtgtctttttgtgcacagattatgatgaagattagattgtgttatcactctgcctgtgtatagtcagatagtccatgcgaaggctgtatatattgaacattatttttgttgttctattataaagtgtgtaagttaccagtttcaataaaggattggtgacaaacacagaactcctgctccattgcatttgatttgatggagaagaaaagtcaatttaagttataaaaataaatattaagatattttacattttatatgagagagttttctcccctgaataagagaaaactgaagtgctaagttcagcaaataatttgtttttccaggcttctaaagaaagaaaaataacagtgaattttcttgc

SEQ ID NO: 59271 - DNA, 157 bp, Homo sapiens
  misc_feature 37: n = A,T,C or G
ctggggtaccgggcccccccctcggggtacttctagnattaattaacgcgggtgtgtggattgtgctaacaaaaatacttacttggtaccgatatgttttgaatctgggtcaagcttgggaaagaagagtacacaaactctgaataaaaaaaaaaaa

SEQ ID NO: 59272 - DNA, 611 bp, Homo sapiens
  misc_feature 29: n = A,T,C or G
ccgggcccccccctcggaagtcttctagnattaattaatcagagacttaccttgttagcttctatagtcactattcgattaagaaatttcatcataattgttggtgccacagggttgaaactaagttttataaagaaagatagcagttaaatgattaatttaaaaatataatatgtatgtgacctttataagcagaaatttctttcttacctaatatttgagatagaacactcttcctgaatttctttgggaaacaataacctttgattattatctccactgagactgtccgagattataaatataagaggacatcgaccaatcctcacatacttcctaaaataacaaaatacagcaatgttgaaatttaagccacttctcatttaatttggagttttagaatacttcactgaaacctaccttagaacttcatgtaaagtatgagaatcccgataaaactggttaggtaaatcctattgaaaataaaaaataaataatagtatagttttattccattgcaaatttatttttcaaatttatatttattgaggtaggcaaaaatatatttattcaatgtattttaaacagaactttcacaggaaacatgaaat

SEQ ID NO: 59273 - DNA, 605 bp, Homo sapiens
ccgggccccccctcgaaagtcttctagaattaattaacgcggggatcagggatgcaggtgaaacacaggagcagaattgcagaacaagtggctttcaaaggttgttaggatggcaggagttctatttttataaattataagggactgacatgataggatggctgtggtacctgctaagaccatagaaccgggtcattctaatagatgttataattcctttacagtgtactttttgggaaagtttttttttcctatttaaataaaattctccatgtaatcatgtgaagtcatacgttttcctctaggatagttgtgtttagattataccaaaacagctcttagttgaagtgattcaagtgtttcttttttccctatctgccatcaattggccaagtttttgatactagacaagaattcaatatactaattaaaaagtcatttcagacttggcttaactgaaaagcagaagagaaaaatcctttagagaatggattggcatactttatttctagagtcgatttagataaatactttggaatccgatgtgagtaaatgatatgtttcacatttcttctcacttgccaaacagttatttgagaataaac

SEQ ID NO: 59274 - DNA, 574 bp, Homo sapiens
  misc_feature 10: n = A,T,C or G
cccccctcgngaagtcttctagaattaattaacgcgggtatgtggataaaaataacaaagagaaaacatcaagggtaaaggggattctggctaaaccagctcaccaggattctttcagaagacaagacaaggtgatcagatattgagggtaaggaattaggaatttgatcagataccaaggatgggaaagtcttgataaactgacccagcaggaaccttactaaaactgaactaagggccgggcacggtggctcacagctgtaatcccagcactttgcggggccaaggtgggcagatcacaaggtcaggagttcaagaccagcctggccaatatggtggaaccccgtctctactaaaaatacaaaaattagccaggcgtgatggcgggtgcctgtagtccagctactcaggaggctgaggcaggagaatcgcttgaacccgggaggtggaggttgcagtgagtcgagatcgcgccactccattccagcctggtgacagagcgagacactgtctcaataaaaaataaaataaaataagtaaaaaaaaaaaaaaagcggccgccaccgcggtggag

SEQ ID NO: 59275 - DNA, 212 bp, Homo sapiens
  misc_feature 93, 94: n = A,T,C or G
aattaacgcggggtggggttgagttgggggtattttctaattttttttgtacatttggaacagtgacaataaatgagacccctttaaactgtnnaaaaaaaaaaaaaaaaaaaaaaaaaaaaaaaaaaaaaaaaaaaaaaaaaaaaaaaaaaaaaaaaaaaccaaaaaaaaaaaaaaaaggggccgcaacgggggggaacccaaaatccccc

SEQ ID NO: 59276 - DNA, 585 bp, Homo sapiens
  misc_feature 13: n = A,T,C or G
cggggcccccccntcgaaatacttctagaattaattaacgcggggacggcgtaaagggaaagagaaagggaaagagaaaaaaataatattacagggaagaaagaaaaaacaaaaactcctacatgcacaaaaccaattatagaaaggaaaagtgctagcatctccagatgggaaggaaccaacataaaaatgctggcaccatgaaaaatttgaatgtagtgacaccaacaaagaatcatactcttaagcaatggtccctaaccaaaatggaaactgagaaatgacagacaaaaaaatttgaaaatcaacacaacccaggaaattaaagaagagacaaaaatcttaaaaaaaaaatcagcttcaggaattaaactcacttaaggaatttcaaaacacaattgaaagctttatcaatagactggaaaaaggaagagaaagaatttcagagcttaaagactggtcttttgaagtaatccagccagacaaaaataaagaaaaaataattttataaaatgaacacattttttgaaaaatatagagttatgtaaagataccaaacctatgaattatttgcattcctgagag

SEQ ID NO: 59277 - DNA, 495 bp, Homo sapiens
ccgggccccccctcggaagtcttctagaattaattaaccggggctcacctgaggtgttcttccctttaccagtggtatgtacccagatggtcatataccagttaaacttcacaattttgcctcttagggcacatatgtgagcccacccacccaactcctggaaatttagtgggaagctgctaatccccagtttcaggtgtttcatctattgggagattgactttccctgggactggctgcaacttatttttattttagagagacattaacgactgcctgaccatcacctgatgatcgtctgacattcctgttgtggggggttgggaggtgtgaggggaaccctctcctgctctgcttatggctgactagctgtctgctatatcaatttcttatgtaaacttggagcttaacatttcagaacaaagtaccttgatttagaccatagttgtccttatagaaaatcatcatatattagcactgaaaaaaaaaaaaaaa

SEQ ID NO: 59278 - DNA, 300 bp, Homo sapiens
ccgggccccccctcggaagtcttctagaattaattaacgccggggaaaaaaaaagagaggagaagagagggagggagagaaataggtaaatagagaaggtaggaagggagagggatggaggcaagggaggcaagaaagcaagcaagtgagccttgctaacttagaaaaatatcagtggcctttaactgacagggaatagtgcaaagttaacctttggcccctataaaacattggatactgatttaaaaaacaaaacaaaacaaaaccaaaaaaccaaaacaaaccaaaaaaaaaaaaaaa

SEQ ID NO: 59279 - DNA, 602 bp, Homo sapiens
  misc_feature 28, 563, 565, 566: n = A,T,C or G
cgggcccccccctcggggtacttctagnattaattaacgcgggtacttcttcttcaaaagggtcaccccaaggagcatgactgggattggcttgcaggatttaccaaggacctgaaattaaatccagcaaataatttctgagcatctgtgatgtgtcaggtactatgctaggtaccgcactgattaagatgagtaagcacagggcctgcaccagagacctcagcctcagaaagcagccctatcatggcccaacccaccaccactaaacgtaagttctatggttctatacactcccaatgtcttacaggaccgttatcttttttttttttttttttttaactcacagacctgagggaagaactcttagtccttttcaaatgatatctgagccaaccatcatcccaccctgaggtttcacctgagttgggtagttgacaaactgtagtgctgaattgctggagaccatggcacccagataggagatagaacaggcagcatagagccagctccgggtacgatccaccctggcagtgtcaaaaaactggatcactgggagaagaccnannaaaaaaaaaaggaaatgaaaagaaaaaaaaaaaaaa

SEQ ID NO: 59280 - DNA, 397 bp, Homo sapiens
  misc_feature 34: n = A,T,C or G
taccgggcccccccctacagagataccttctagnattaattaacgcgggtatgttgtttgctaataactgagtagagaatagttgccaatttccacactataatatatgttgcagccgagcacagtggctcactcctgtgatcccagcacttcaagaggctgaggtgggagaccaggagcttaagaccagcctgggcaacatagcgagattcctctccacaaaaaataaaaaaatttcaaaaagagagataatatttcatttgaacttctacagttagaaaaaaaatgctaaattgtccccccccccaaaaaaaatcaagatataatttcagtttctcaaagaaggaacaaatccatatgtattgggctctttgctttttttttggagagacaggat

SEQ ID NO: 59281 - DNA, 600 bp, Homo sapiens
cccccctcgagagtcttctagaattaattaacgcgggttcatacctctcaccattttgcataaagggactttttatctctctcacccaccactgaagacaccaccagagcttctcccatgggagcttggcaagggtgcacctgtagaaggcttttatggaacattctgaggtgacagcatcaccataggaggtgtgccctctgggttcaggattgcatgaggagtggagtcccactccctctatacaagaaacatcagcatttctgcagatggacgaggtccctgtctgatctgaatatccagagtactaggacaagggtgtgacagggagtttgatcactttcctcctggcctggtactggaaataaagtggctgtttccgtccccccactgcaaaggcgtcagtcaatttcaccaggagctcccccagctgcctcatcagggatagggcttttgctcaccaatggggtattgaatatacccacctgcttcagccacagccaattcttacccacaggtgcctcctgctggcctgaaggctaaactgctcaacccagttaaaaaaaaaaaaatggaatgcacaccactggggaacaagat

SEQ ID NO: 59282 - DNA, 347 bp, Homo sapiens
cgggccccccctcggaagtcttctagaattaattaacgcggggcggtgaggctgaaaaacacacatttggcgattaagttagccatcttacaggtgtgattcatgacaccccagaacatttacaaaagtaacatgagcagtaatgcaaaatgtgctaaatcttgcaagaatcaccaaaatgtgacaaatatacatgaactgaacataggctgttggaaaaatggcgcctataaacttgctccatgcaaggtggccacaaactcttcaacttataaaaatcacaattatctgtgaagcacaataaagtgaggtgtgcctttaatatgaaactgtggggtcaatcatag

SEQ ID NO: 59283 - DNA, 453 bp, Homo sapiens
  misc_feature 27: n = A,T,C or G
cgggccccccctcgaaagtcttctagnaattaattaacgcggggcggatattactaccttctgcacttactccccatcacaagatcgagtcttatgcatcacagacaacatgtcaactggcgcctccaggcccccgcccccatgcagtccacgttgctgtgtagtgaggtgcaaacggtcaccctgtggcccgtcctgtgacccatatttaaccgcgtttgggactccgtgtcttcaatggtttgttagttgccattacaactctccctgggtagacttcaagagtccctgcagtgaattatccctctgtctattcacactccgtgttagtggtaactcatgactgctataaatagttacagaacggattcattattcgttaatgctattgtgaagtgagctaaacgagctttctgtattataatgcttcagagcgtcatttctataagtgaa

SEQ ID NO: 59284 - DNA, 596 bp, Homo sapiens
  misc_feature 555: n = A,T,C or G
ccgggccccccctcggaagtcttctagaattaattaacgcgggcaggttaatcaaatataagtaaggtttctgagagggcgcaggtgaatcaaatataagtaaggtttctgagagggtttgaaggcatagcacttagaatatggatgtgttggctttagattggaagagagctactttgtctactcttgtataacaagggaaatgagagatccacagagggtcctcctggagtatttagctgaggactgatcagcacattcatgtgagggagcttcttgaggatgaagaaagaaccatccaaaaggattggaaggaacagtgcctggcaccactgggccagtaatagtgcctactcccactggactggagaaacctcatcattcacaggacaccagggaggactcaaaaggatcttgcctctgtagtgtggaatacatctgtcaaaacataccaaactatacacttcaaatatgtgcattatcatatgtgaattatatctcagtaaagctttttactaaagaacgctgtggctgggtgcagtggctcatgcctgntatcccagcactttgggaggccgagacaggcagatcacttg

SEQ ID NO: 59285 - DNA, 604 bp, Homo sapiens
cccccctcgagaagtcttctagaattaattaatctgaagtacatctgttagaaattagttttgtttctatggaattattctatccttgctattctgtaatacaacttcagttttccttttgtccaattttaataacatacatttttagcaggtctagtaaacgaatttatttgattgtgtctttctagaaggtggacaagaacgttgtcaacaggctatatctgtcttttgttctttataccttgctcaaagagaccaacatttggactgtatctgaaaaatttaatatgcctcgaggatatatacaaaatcttctcactggaactgcctcattctcatcttgtgtgttacatttctgtgaggagcttgaggagttttgggtttacagagcccttttggtagaacttaccaagaagctggcttactgtgtaaaggcagaattaatccctctcatggaagttactggagttttagagggtcgagcaaaacagttatacagtgcaggttacaaaagtctaatgcacttagctaatgcaaatcctgaagtgctcgtaaggacaattgatcatttatcaagacgccaagccaagcaaattgtttcatc

SEQ ID NO: 59286 - DNA, 524 bp, Homo sapiens
ccccccttcgaaagtcttctagaattaattaacgcgggctggccaaatctgttgggacttgacttttttgtgtgtggtcaagaataagctttagtgaccactttggcagcacatatactaaaattaaaatgataggtgatttgcatagctcctgtgagtggataacatgcaaatttgtaaagcattccatattttttattaccactagaccaaccctataagaaatgcctaagtctggccaggcatggtggctgatgccagtaatcccagcactttgtgaggctgaggcaggcggatcacaaggtcaggagatatagagactatcctggctaacacggtgaaaccccgtctctactaaaaatacaaaaaaattagccgggtgtggtggcaggtgcctgtagtcccagctactcgggaggctgaggcaggcaggagaatggcatgaaccttggaggcggagcttgcagtgagtgagccgagatcgcgccactgcactccagacctctgtcttaaaaaaaaaaaaa

SEQ ID NO: 59287 - DNA, 326 bp, Homo sapiens
ccgggccccccctcggagtacttctagaattaattaacgcggggtgggggtgatctgacagtacctagagcagatggtcagtcctccaaccctagctcatgaccgaaacggcctatgcctggggcacacaccctcctgctgctcgactttggccagtggtcatgctgcaccactgatgtcagatcatgcttttaaatgttctgtaccaggcgcagcgattctatgtgggtgcaagataatgcaagaagctacagcaaatctccattctaaagcactcgcctctcaattttctcagagtgaacatgcctcgtctcttgtgtcctatg

SEQ ID NO: 59288 - DNA, 564 bp, Homo sapiens
aattaattaacgcgggaactgtagtaataactgcgtttacttgttcatattgggtttttattgactaaaagcttccagcctctttttcatgcagccaggataacagtgataccaaaacctatcaaagattagaccatcctacccccaaaatataacaataggccaatatctctaaaaaatatgtaacaacagaaaaaaaagctaaataaaatagtagaaatagaatctagcagtgcattagaagaaatatatactttgtccaggtagggtttattccagtaatccacagatggttcagtactaagaatgatatacttacaattaatggatttcatcccatcaacaaatctatatgatcatttccatggatttcctaaaatacgttagacaaaacccaccatccctttaaaattttttttaataaaacagaaatgaagaattccctaactggatgaagtagattgatctcagctcaaaaataaatagtgtgtttaacgtggaaaggatatcattaactccatggttattagcatactaaatattaaatggatttgaattaacctc

SEQ ID NO: 59289 - DNA, 110 bp, Homo sapiens
aaagtttagctgtgcatgggtggcatgtgcctgtacctcccagctgcttgggtgggagcgggggctgcggcggtagaatcacttgagcccagtcaggttcaggctgtcct

SEQ ID NO: 59290 - DNA, 394 bp, Homo sapiens
ccccctcggggtacttctagaattaattaacgcgggtactatgtgtcaggcaatgtgccaaggtgttcctgcattatctcactgatacatcataataaccccatgagataagcactgatattatccccatttaatggatgaagaaggtaggttccagaggtgttaagtaacttctcagggatcacatagctagtgagtgtcagaaccagtcggggtccacgtagatcagactccaaatcccccaccccacactagtgtgccatataacctcttggtgaggcattattaacacaaaggaaagataagcaaattccagaaagacattcttctaagaaacagcaactatgacacagtgttaaatcaaatttaaaaccacgccaaaaaaaaaaaaaaa

SEQ ID NO: 59291 - DNA, 620 bp, Homo sapiens
  misc_feature 26, 39: n = A,T,C or G
gactgggtaccgggcccccccctcgngaatacttctagnattaattaacgcgggggttagatctccatctatctatctttttgcaaccaaccacgtccaggctgtttatttaatacttcctcttgctaatgaaggtactggttggggatgggtcgagctttcccatctcggcataagactgcaagatttgaatgtgccctggtgtcggcttcactgaccacagcaggtaccccaggcaagaatctgagcagttataacagcaagtgcggaggcaagacacatcaaagcagagatgggaagtgaaagagctctcgtactggacagattagcaagcaatgtggcaaaacgaaaaagctcaatgcctcagaaattcattggtgagaagcgccactgctttgatgtcaactataattcaagttacatgtatgagaaagagagtgagctcatacggacccgcatgatggaccaagccatcaataacgccatcagctatcttggcgccgaagccctgcgccccttggtccagacaccgcctgctcccacctcggagatggttccagttatcagcagcatgtatcccatagccctcacccgggctgagatgtcaaacggtgcccctc

SEQ ID NO: 59292 - DNA, 505 bp, Homo sapiens
  misc_feature 10, 475: n = A,T,C or G
cccccctcgngggtacttctagaattaattaacgcggggggaggagacacattcaaaccatagcaggtgtaaaagacaagcatttaatcagactgtttgtcagtcgataatttttccttccctgcaggagacatgtctatgagtggctgggagacctgtttaattctgggatatagaattaagatggccatctgcctgcaagtagagataagctgcattctccgaaatcaactttgttcatgataaaagtaacattctggcctccatatgccatattctttattgttaatttcttaaacagttaacaaattggttagagaagaggcaggctatctattgccccatcctctacttttttttttttaaaactaaatacctaatcgttatattgttattcttttgactattattgctctccttaacacatataaaaatagaccaaactgacatgatcatattttataaaaatacgatntttcttttcttgaaaaggaaacagaaaaaa

SEQ ID NO: 59293 - DNA, 621 bp, Homo sapiens
  misc_feature 28: n = A,T,C or G
cggggccccccctcgaaagtcttctagnaattaattaacgcggggtggcttgagagatcctctgattttcaagaattctgatggactcggaataaagtaagtgttttcagcctggctggatgtagttgcaaaatggcctcgttacacccagggcaataaacagtggtggtattgataacccaaaacaatagtaattgaaaataatttcccactttgttttaaaagtatatgcttttcttttgatacacaagtgtttcatattagaggtaaatgagaaaatatagatgaaccaaaaaaaaaaaaaaacaacaaatttaaatctcctgaaatctaccacccttaggtagatcattaacattttattatgtattcttttttcctgtgcatatgtgtaaatatataatcacctatatttttaaaataatttcaaacctgattgtgaatattactgtgtctggggagtactcagtactttaagaaaaaaaactcacatttactagagcaattgtgttttccatatatacttactggtgtttgtttcatagaatgccggatccagacttcactgtgaatgatgtcaaaatgtgtgtggggagtcgtcgcatggtggatgtcatggac

SEQ ID NO: 59294 - DNA, 503 bp, Homo sapiens
cgggccccccctcggaagtcttctagaattaattaacgcgggtaaacatatatgtgccttagacacagaaattctaattcttggtatttattcagtaaaaataaaaaacattcactataataaccatgtatagaagaatatttatactagtttcattaataattcacagaggaaaagatatacaaagaatatagtgtggaatgatactaagctatcaaaaggaacaaattactaacatacccaatatctaaatgaatatcagagacaatatgctgggtgaaagaagctggattcaaaatatcatatactgtttgattccatttatgtgaagttctagaacaggcaaacataactatatttttaaaaaatttgggctaggcacggtaacacatgactgtaatcccagcactttgggaggttgaggcaagaggaatgcttgagcacaggagtttgagaccagcctgggcagcatagaaagaccccttctctaaaaaaaaaaaaaa

SEQ ID NO: 59295 - DNA, 619 bp, Homo sapiens
cgggccccccctcggaagtcttctagaattaattaacgcgggtggattcatctcacagagtgaaatctttcttttgattcagcaggttggaaacacattttttgtagtacccggtgggatatttgggagcccattgaggcctaaggggataaatagaacattcccagataaaaactagaaagaagttatctgtggaacagttttgtggtgcgtgcatttttctcagagttaacccttcttttgacacaagaggttggaaagtctctttggagtacctgtggatggacagttgggagcccactttgttctactagaaaaaaccgagcatctccagacaaaaactagacagaagctctctgtgaaattgctttgtagcatttcaatgaaaaaatgaaaataaagctacctgtgaaactgctttgtgatgtgttccttaatctcatggagttaagcttttcctttgattcagctgattggagacatctttttggagaatctgtgaagggacattttggagataatttagacctattggaaaaaaaacgaatatcttcagataaaaactagaaagaatctttctgtgaaactgcttggtaatgtgtggattcatcccacagag

SEQ ID NO: 59296 - DNA, 609 bp, Homo sapiens
  misc_feature 571: n = A,T,C or G
cgggcccccccctcggaagtcttctagaattaattaacgcggggggtgtgtgggtggcagggggaagcaaacaaattggaaaggaagaaaaaaaaccatctctattctcagaaaaaattctttctattaaaaattgcagtgtctacattgaaaattaaaaaactattagttaaatttgtatgatttaaggtcaatacacaaaaatgtactatatctatatattaacgatatgcaattggaaactggaataaaaaatacaatttataatatttccaaacaaataaaatacttaggtataactttaacaaaacatatataagatttatatgctgaaaactacaaaagtctggtagaagaaatccaagacctcgtaactgtagagacatattgtgttcatggattaaggcccttaacgtattatagcaaatatttcagttcttctcaagttgacttatagatttaacacaatttcagctaaaattccagtaggattctttttttgtagatatagacaagccaattataatgtttatatgggaaggtaaaggatctagaatacctgaagcaattntgaaaaatatgaataaagttgaaggaatcacctgattt

SEQ ID NO: 59297 - DNA, 601 bp, Homo sapiens
  misc_feature 25: n = A,T,C or G
ggccccccctcgaaagtcttctagnattaattaacgcggggggggtgtacagcttctgcgatattgagagtaacattattttctccccttctgggtgttagaaacaatatcacaagggggggggtacaccccttgcgatattgggagtaatatcatcctctttctgccttaatattaagaacaatatcacagaaggatttacacctcctgagatattgggagtaatatcatttcaactaaaataaaaacaatatcagagggtgagtgtatactccctgcaatattgagattaatatcatcttctcttccccgggatattaggaacagtatcaaaggggaagtgtacaatctctggggtattggaagtaatatcatcctctcctctccctcaatatatattatgaacaatatccaaaaaagggtgtacacaccctgcgataatgggagtaatatcctcctcaacccctggatattaagaaaaatatcactaggaaggtgtaaaccttctgtgatattgaaagtaatataatccttttccatcatttatattagaaacaatatcacggggggggggtgtaaactccctgtgatactttaagta

SEQ ID NO: 59298 - DNA, 591 bp, Homo sapiens
cccccctcggaagtcttctagaattaattaacgcggggaggtgtttaaaagtgtctggcattttagtgcgtagataaatgctacttcctgtgcccattctcttgggagttctccccaaacttcaccctttaaaaaaaaaaaaagaaaaattaagaatatattttacttaacacaaaatttaaaaaaatcatgtaatcgatatagagattattgagatattttacattctttttttttctagtactaaatctttgaaatctagcatgtatttttatacttacagcacattttaattcagatctgccacattttaagtgcttaatgctcctatgtgggtagtggctaccctattgaaacagtgcagatctataagaagagaaaataaaattactttcgccatttttcctttttgttaaaggttagcaataatatatacaatgcttggcacacaataggagcttaacacaggttcactgtgattgttatttgctatcaccattttatttttaaatgggcctcttctcccatctcttatcccttcccccatctcttaccccttccccctcagcagaagggtctcattcatctatc

SEQ ID NO: 59299 - DNA, 599 bp, Homo sapiens
cccccctcgagagtcttctagaattaattaacgcgggcccgcgcgcggactttgcactttgaatccagaggaagatgaatttttaaaatctccatcaaacgtgccttaaagctaaagcattttgacaggagtatttaaacttagtccaggatattttcctttgtgttttataactttacagaggaccaaagcaattcttgttttagtttctttgcgaagcctgctcctccttcccttcataaggactttttttgtctttctttaacgcccaggcttcgtcttatttctactgtttttgtcgcaacttccattgatttatgtcccttccctcccccctaagtacatcagggaacctttccacactataaatgatatgactactgtttggggtttctgggcccccatccgtgtacgtatgtggcatttccaggtatgactgagtgtgagagacatgtcagaggctcttcagtgatttcttgctattgaccgatgcttcactgtgccaaaagagaaaaaaaatgttgggttttgtaattaaattatttatatatttttgaaacccgaattgaaaatgttgcaggcaacgggctacagcttta

SEQ ID NO: 59300 - DNA, 592 bp, Homo sapiens
cgggccccccctcggaagtcttctagaattaattaacgcgggccattccatgaacacgggatgtcctcccatttatttaggtctttttaaaatttctttcaatgatgttgtctagttttcagtgtacacatctttaatatactgattttattaaatttgttcctaagtattttattatttttgatattttaaatgaaatttttttatttcatgtttgaattgctcattgctagtgtatagaaataaaacttatatttatatattgaacttgtatcctagaattttgcttgaacttgtttattaaatctaaaattttctgtggattccataggattttctatgtagaagaaattgagatagttttgttcattccttccaatctaggcacattttattttattttatttttcctaattgtcctagttaggacctccactacaattgaattgaaatagcaaggccgggcgcagtggctcacgcctgtaatcccagcactttgggaggctgaggcgggcagaccacaaggtcaggagatgaagaccatcctggctaacacggtgaaaccccgtctctactaaaaatacaaaaatgt

SEQ ID NO: 59301 - DNA, 452 bp, Homo sapiens
  misc_feature 388: n = A,T,C or G
cccccctcgaaagtcttctagaattaattaacgcgggggaggcgacctcagttgtcctgccctgtggaatgggctcaaggttcctgagacacccgattcctgcccaaacagctgtatttatataagtctgttatttattattaatttattggggtgaccttcttggggactcgggggctggtctgatggaactgtgtatttatttaaaactctggtgataaaaataaagctgtctgaactgttcaaaaaaaaaaaaaaaaaaaaaaaaaaaaaaaaaaaaaaaaaaaaaaaaaaaaaaaaaaaaaaaaaaaaaaaaaaaaaaaaaaaaaaaaaaaaaaaaaaaaaaaaaaaaaaaaaaaaaaccaccaaccgaaaaaaaaaaaaaaanccgggcccccccccgggggggcccccacaaccccccttttttagagtcttttccccccccccct

SEQ ID NO: 59302 - DNA, 502 bp, Homo sapiens
ggccccccctcgaaatacttctagaattaattaacgcggggaggaggggagggggttccaggccgtaagtacgtgaaatcacagttacattcttttgagtttctgatctagcctttccaacgtatgcaatcaaatatgcatttatctcactgaacagagggatgactgaatggaatgggaggcatgtttgtcctaagcattcctctacatgacagagattgtgcgatccaaggtttattttcctttcacatacctggtctaacgaccattctgtgtccaattttactaattgatccctaactgtcttatggacgcggtttataaaaatcatgactgaaacaagactacatatttcatttggcagataaatccctctctctctctctctttctgtttctctgtctctctctctgagataactacatgcttttctattgaaataattaatattggctcctagtttctaaaacataaatcagatactcttgacactttctttctt

SEQ ID NO: 59303 - DNA, 367 bp, Homo sapiens
cccccctcggaagtcttctagaattaattaacgcgggcttgatagctttaacagctttttcatgattttttctctaccagggttctcttccatagcactgacaatcctttccatagagtatcctgcataatgagccttaaaggtcctcacaaccccctgatctagaggatacattaaagatgttgtgtttgagggcaagaagaccagttcagcacctttcatgtcgaactcatatggttctgggtggccaggggcattgtccaatatcgaaagaattttgaaaggcagtaccttattggtaaggtacttcctgacttcaaggaaaacacatcagtggacccaatccagaaaaggggttatcactaaa

SEQ ID NO: 59304 - DNA, 577 bp, Homo sapiens
  misc_feature 523: n = A,T,C or G
cgggccccccctcggaagtcttctagaattaattaacgcggggggtcaattaatcaaaaggacaagacaattcctaaacatttataacctagtaactgatcttcaaattcatgaggcagcaactggttgaaccataaagagaaatagacaaatccaaaatcagagtttatttcaaagtccatttcaattatctatagaagaaagagaaaatcagtaaatgcacagaaggtttgagaaacaatacgaaccaatttgatctaattgacatttatagagcactctgccaacaaaagaaagatctcacaccttcttttcaactgcacatggaacacttacgacatttaccaaaacacatcatattctgagccatgaaatatggttcaataaatttaaaatattcaagtcatacaaaatgtgttctctgaccacaaaggaattagacatcagtaacacaaagaactctggaaaatcccctacatatgtgaaaactaaataaaacacttttatataatccatggctcanagaagaaatcagggaaattaggaagtgtattgaactgaataaaaataaaaacat

SEQ ID NO: 59305 - DNA, 395 bp, Homo sapiens
ccgggccccccctcgaaagtcttctagaattaattaacgcgggagatcacttggatctcagtggggagccacgtatattgcactgcggtctctcaatggaccccaaggctgaggagagcttgggggacagtgcttgagtacttaccttctccagaaggtttagcgcgcataacctgtacctgcccctgaggcagggcctgcatgtgagccatgcatcaccttaatgcatggcgggggatagagcgtattcctatgttttagaaggaaaaaaaattgtatcctataaaggggagggaatgaaacctttaatgatcctgacacatgccacagtcttacttctataattttatgtagctaacaataataagcctatggtgcaactacaatttgaatag

SEQ ID NO: 59306 - DNA, 595 bp, Homo sapiens
cccccctcggaagtcttctagaattaattaacgcggggtgggagagacagatgtgtagtccaagctacaggatagaggtgctgagtggagaggggagaggtgagcaccagcctgcttgggagaatcctggattctgcctacccatcccctgagtccatgcagcttgtttatattgaccagccttgttcttctctttgttcattgttcgcatgctcacttttatctgagacatcttctcttcctggaatgacctgggatcccactttaggcatgttggcagcaataagaaattcagcctgagcctgactttcacagactcatttggtcccagttttctgtgtccaggcaactcacccagtgttttctgccaccctggcaaactggctgccagcacatcacactacgtatgtttgtgggttcatatgtgtccacgtgcagaatctgcccatttcctggatcatcctgggccatctggggaagcctttttaattttttcttttgcctcctgcctttcaagcttctcttttgattcttgtggcttgtagtccaacaagagtagaaggaaagagcttcaggaagtgaggagtttattaaa

SEQ ID NO: 59307 - DNA, 399 bp, Homo sapiens
ccgggccccccctcggaagtcttctagaattaattaacgcggggggtaatcgttacacctacttgcttcctcctgcgctgagtcccttcccttgagtccgttccaccagactttgctaccctgagtgcaagcatatgaacgatgggtaggaagagagcaacgccaagatcccaggatgccacataggagctttgttacagcttctagctgtccttctttggggagagcaaggtgacatcctcctagataactatggctgttgtgcataggacctacaggtgggctggggttggtggttcacgcctgtgagcccagcactttgcgaggctgaggtgggaggatcctttgatcccacgagtttgataccagcttgggcaacatagtgagaccctgtctcta

SEQ ID NO: 59308 - DNA, 329 bp, Homo sapiens
cgggccccccctcgaaagtcttctagaattaattaacgcggggaatgtggtcttgcaagcctactctagaccgagcagctgacctcttcttccacacccccacttgtctctatctcttttgccaaataaatacggagggctgttcaggacccttgtccactacaggcaaggtgccctctgaccccttcttccaaatataatcttttgtcttcgtctttattcccacgttcgcctgcctttgttcagtccaccacggattgagatcggttacaatgccactgctctccagcctaggcgacagtgagactccgtctcaaaaaaaaaaaaaa

SEQ ID NO: 59309 - DNA, 211 bp, Homo sapiens
ccgggccccccctcggaagtcttctagaattaattaacgcggggaatctttttcttccacaaggacacctgtttaccaccttgtttaaatgtaaatgttcccttatgcttttgaaataaatttccttttgtaaaaaaaaaaaaaaaaaaaaaaaaaaaaaaaaaaaaaaaaaaaaaaaaaaaaaaaaaaaaaaagaaaaaaaaaaagaaaa

SEQ ID NO: 59310 - DNA, 547 bp, Homo sapiens
  misc_feature 44: n = A,T,C or G
ccgggccccccctcgaggtacttctagaattaattaacgcgggnaaatgattaaattttttgttttgtatattttgccacaataagaggaaatcaagagagaaaaatttgctatttagaaacaacaatgaggccggttgtggtggctcacgcctgtaatcccagcactttgggaggccgaggcgggcggatcatgagatcaggaagtcaagaccatcctagctaacacggtgaaaccctgtctctactaaaaatacaaaaaattagctgggcgtggtggtgggcacctgtagtcccagctacttgggaggctgaggcaggagaatggtgtgaaccaggaggcggagcttgcagtgagcctagattgagccattgcactccagcctgggagacagagtgagactctgtctcaaaaaaaaaaaaaaacaatgaaattactgtggatcaatatttaaattctggtgctaatttcaatttttaaattcatttattaaaaaagaaaggccaaaagtaaaagaataatttagaaaactaaaaaaaaaaaaaaa

SEQ ID NO: 59311 - DNA, 467 bp, Homo sapiens
cgggcccccccctcggggtacttctagaattaattaatatagatttggtataaatgttagaaaatacaatttttcaaatggaataaaacaaccaaaagaaaaagttcacctgttatctcagcaagcagagatgatcactcatatatatatataattgttgtatggccttccatggtttttctatgcacatagaaatgttctttctatgttcgttgcagcattattcacaatagccaagatatggaaacaatctaagtgcccatggatgtgaatggataagaaacacaggcacatataaaataaaatgttattcaaccttaaaaaagaaggggatcctctcatttgccacaacctggatgaatctggaggacataatggtaagtaaaacaatccagaaacagaaagaaaaatactgcatgatctcatgtatacatggtatctttttttgaaaaaaaaaaaaaaaaaaa

SEQ ID NO: 59312 - DNA, 514 bp, Homo sapiens
cgggccccccctcggaagtcttctagaattaattaacgcggggagatgaacctggaacattctattatggtgccacaaaggaaatctaaaaaaaaaaaaaaaaaaaaaaagtggttggctaggagcagtggcacacgcctgtgattccagcactttgggaggccgaaatgggcaggagttcaagaccagcctggccaacatagtgaaaccctgtctctactaaaaatacaaaaattagccgggtgtggtggcgggcgcctgtaatcccagcttttcaagaggctgaggcagaagaatcgcttgaacccgggagatggaggttgcagtgagctgagatcgtgccactgcactccagcctgggcgttgcagtgagactccgtctcaacaacaacaaaaaggtggatacatgtcaaaagggcacaggagccacttgaaggattatacttgctaaatctgtgtcaattatcaaaataaactggtagcaacgcaaaaaaaaaaaaaaaagcggccgcca

SEQ ID NO: 59313 - DNA, 308 bp, Homo sapiens
actgggtaccgggcccccctggaatcttctaaattattaacgcgggttgtttgttttgttctaatccttctttaaactattccctaagaacttaaaaatacataagaataacaaagaattcaaaaggtagaaaatatccatttacacaaacaaggcagtaatggaggaatagaggaacagaaaagaatgagacatatagaaaataagtagcatgagtcctgccctatcaacaattacattaaatgtcagtgtattaaatacttaaattaaaagttagagaatggcagaatggattagaacaaaacaaa

SEQ ID NO: 59314 - DNA, 618 bp, Homo sapiens
cggggccccccctcggggtacttctagaattaattaacgcgggggaaggtgagacatcggttagtaatttgttagtgtgggccagtgtgactgtccctgggcctcacagatttcctgcttctcctttctcagtattctgagtccatgatgaaaagtcactagtccagacatgctgaaagatagagcttcacttgcttgtggctttgtgcacttagtaaacaagattattttacgaagatttattatcttgcagagttttcatgctttttatttaaattagcaatctaaatgaaacagcacaggatattaattgtatttggacaactgagttccttcccgcccctatcctcccaaccccccaactacacaaatttgatcaaaatcttttagagagggggttagggataaattttcaatgaaagagactgtggaaatcggaataagagatataataaagaatgcagccataacggccaaaagagtttttgtattagagagcctgtccaggattgaagttcagccctgaaacccaggactgcagttgtcatttgaatataaagcggaaagcagtagaaaatacttgggaagggatttgaaagtggaccaagactggtaaag

SEQ ID NO: 59315 - DNA, 619 bp, Homo sapiens
  misc_feature 28: n = A,T,C or G
cgggcccccccctcggaatacttctagnattaattaacgcggggagcaagtgcatcacaatggcaagagtggcagtaagagagagaaggaggtcccagactgttttaaacaaccagatctcacatgaactgagtaagaactcacttatcaccaatgggttggtgttaagccaatcacatttcaacatgatttggaggagaaaaacatccataccatataaaccaataccaaactagctgaaaaagaaaccagaaagcaatcccatttacaatcaccagaaaaataaaataaagtacctagaaataaattaacccattcatggattggaagaattagtactgttaagatggccataccacccaaagtgatctacaggttcaatgcaatctctatcaaaatgccagtggcattctttttgctgttgttcctagccactagacaaccagggaaccagtgatattcttcaaagaaacagaaaaaaaaaaaatcctaaaattcacatgaaaccacaaaagatcccaaataaccaaagcaatactgagcaaaaagaacaaagctgaaagtatcacactacttgacttcaaaatatactataaagctagagctaccaaaggccggg

SEQ ID NO: 59316 - DNA, 514 bp, Homo sapiens
  misc_feature 27, 477: n = A,T,C or G
cgggccccccctcgaaagtcttctagnaattaattaacgcgggggtcagggaatccaaggattaggggcagttgaaaatttgcgtataacttttaactcccccaaaactatactaatagcctcctgttgactgaagccttatcaataatgtaaacagtcaatgaacacatctttctatgttatgtatattatatattgtatactgtattaaagtaagctagagaaaatgttattaagaaaatcataagaggccaggtgcagtgacttattcctataatcccagcattgtggagggccaaggcaggaagatcacattaggccaggagttcaagaccagtctgggcaacatagtaagaccctgccctacaaaaaaaaaaagaaaaaaagaaaatcgtaatacatatttactattctttatgttaaatggttcgtcataaaggtcttcatctttgtcaccttcacattgagtaggctgangagaaagaaggattggtcttgttgctgcatgagtgct

SEQ ID NO: 59317 - DNA, 326 bp, Homo sapiens
cccctcgaaatacttctagaattaattaacgcggggaggtgggcggcgagggtcccggcgggagccaataaagttggtgaaaatcgaaaaaaaaaaaaaaaaaaaaaaaaaaaaaaaaaaaaaaaaaaaaaaaaaaaaaaaaaaaaaaaaaaaaaaaaaaaaaaaaaaaaggaaaaaaaaaaaaagggggccccccccgggggggacctcaatttccccttatagggagtgtttttaccccccctaattggccgtgttttaaaaacgtcgggattggaaaaaccctggggtaaccaaatttaatcgctttgaaaaaaatccccttt

SEQ ID NO: 59318 - DNA, 365 bp, Homo sapiens
ggtaccgggcccccccctcggaagtcttctagaattaattaacgcgggcagtatcactaaggcaggactgcataggtttttattgtagcagcacctcacttccaggtaccagttttctgtattaggataatgaaacactgaatatacagatggacaatggccagatcatatataaaactagaactctgacccatgacctatgtagcaataggcccagtcaggacttggtcagtaattaccagcttccctaatttttgtgccttcttccaattcgggacgactcagagaaagccaaatatgcttcccaaatcaaccacataggataccccgcttccagtgtcgacgaagagtcaaactctgtaaaa

SEQ ID NO: 59319 - DNA, 371 bp, Homo sapiens
agaattaattaacgcggggcgggggatgaggggaacactttcagggagcacgtgtggcaaaggagtgatggaacctcgggctgtgacgacgcgtgtgggttgattcccacgggaaagactaagatgagtggggtcacatttggcacttatttttttattttgatttttaaaaacactttagaaagcaaaacaattgctcctcgcagtcccaagtgcccagccacagaggggttgcccatgagccccaggcagtagattggtaccctcagagcgtagtttgtttatttatttgtttatttgagacggagtcttgccctgggcaaaaaaaaagcaagaccctgtctctacaacaaatttaaaaaaaaaaaaaa

SEQ ID NO: 59320 - DNA, 293 bp, Homo sapiens
ccgggccccccctcgaaagtcttctagaattaattaagctccttcagtttgaaggctgcacactgacataatgtagtgagtgtagactggccatgcaagtggtgtttgtgtcagtctgcagctgtgtatggtattatgtcttataatcctgcatcacttctatcctatccagtcatatctaatgtagaaaattagtttccagtgaaagtaatatgtagtgcttttatgatatttgtgtgcaatatcccctcttccattgaggatatttgatgtaaaggaaaaaaaaaaaaaaa

SEQ ID NO: 59321 - DNA, 562 bp, Homo sapiens
  misc_feature 490, 497, 503: n = A,T,C or G
taattaacgcggggcggggccttaaagggaataaaagctggccaccgccaggctccccaccagcctgcagcgacaacctgcttagtttcctttctgtgctgtggaagctttgttctttcagtcttcacaattaatcttgctgctgctcactttttggtccgcatcacctttattatatgttaacacttgccagtgaaggtccacagcttcattcttgaagtcagtgagaccatgaactcaccggaaggaagaaattccagacacaccatgtttaagagctgtaaaggggggccaggcgcagtggctcactcctgtaatcccagcactttgggaggccgaggcaggtggatcacgaggtcaggagatggagaccatcctggctaacacggtgaaaccccgtctctactaaaaatacaaaaaattagccaggcgtggtggcgggcgcctgtagtcccggctacttgggaggctgaggcaggagaataacttngacctgngaggcngagcttgcagtgagtggcatcgcgccactgcactccagcctgggcgacagggcgagact

SEQ ID NO: 59322 - DNA, 575 bp, Homo sapiens
cgggccccccctcgaaagtcttctagaattaattaacgcggggaaggtttttatgtgcctttttgtttttgtaaaaaagaacacccggaaagactgaaagaatacattttatatctggatttttacaaataaagatggctattataatggaaaaaaaaaaaaaaaaaaaaaaaaaaaaaaaaaaaaaaaaaaaaaaaaaaaaaaaaaaaaaaaaaaaaaaaaaaaaaaaaaaaaaaaaaaaaaaaaaaagcgggccccccccggggggaaccccaaattccccttaaaggaagttaattaaccccccctaattgcccgttttttaaaaacttggaaatggaaaaaacctggggttaaccaaattaaatccctttgaaaaaaatccccttttcccaagtggggtaaaaacaaaaaaggccccaaccaatcccctttccaaaaatttgcccaccctaaagggaaaaggaaaattgaaaccttaaatttttggtaaaaatcccggtaaaatttttgtaaaacaacctattttttaaacaaaaaggccaaaatgggaaaaaccctttttaaataaaaaa

SEQ ID NO: 59323 - DNA, 289 bp, Homo sapiens
  misc_feature 36: n = A,T,C or G
ctgggtacccgggccttccctcggggtacttctagnattaattaacgcggggcggtctcggctgcgtccgggcgatccagtgcttagttccgtcatacccctctccacgacctcggtcgagcatgttcaccagggcccagatgatgtctaccgtagaaaagcctcagaaagacagtatcagagaaggctggaagatgaatgagactgaacttcagcagtcaataaagtcaatatgaatttttaaaaaaaaaaaaaaaaaaaaaaaaaaaccaaaccaaaaaaaaaaaaa

SEQ ID NO: 59324 - DNA, 586 bp, Homo sapiens
ccgggcctcccctcggaagtcttctagaattaattaacgcggggtgggtatacaagtcctagctcctcatttgacattctctgatgacaccttaatagcaggtgggagaagggtctatgtatggagttgttacatccatagcctagactagttgcatcagaattgctggggtgggactcaggcatcagcatgttttaaaactcccttgttgaatccaatgtgtgtggaagcaaggttaagaattagtgctttagaagttcctttagtcaagagactgttggcgataagctctgctttgcttatctggaaatgcttttatttcgaatcacttcttgaataataacttagtaaatatataattattttctcttacttcactttgaagatattatttcaccatactttggtttccatttttgcttatgagacatcaactggcagtcaatttgcaggtagctggtgtttccctgactgctcttaagatcttttgatttcttttggcaatcttcacttttacaaggatgtgtttagttgcttaaaatttcttgtgctttctaaatctgcacatttatgttttccctcaatt

SEQ ID NO: 59325 - DNA, 374 bp, Homo sapiens
  misc_feature 22: n = A,T,C or G
cccccctcggaagtcttctagnattaattaacgcggggggaaagagctgaacattctgatgtgttgagcgagagattcttgcagggcttccagggggagatgcacagggagaccaatatgcgtgtctgcaaatcacaggagagggtggcctggagagagaaacatgtgtgtccaaccacgggagtgacagctgagaacattgtgtgcgaaagattccgtaccctgggagtgcgtagcctgcacacagcctcttaactcaagaactgattctcttccgtgttctgaattttctgagtgccttttgcccttctgcttttagccatctacaatgcggccattggactcttattgggattaggcaaaaaaaaaaaaaa

SEQ ID NO: 59326 - DNA, 599 bp, Homo sapiens
cgggccccccctcgaaagtcttctagaattaattaacgcgggcttatgaccagaatggtatttcctaggttttcttccagggtttacagggtttacatttgagtctttaatccatcttgagttaatttttacatatggtgtaaggaaggggtccagtttcagtcttctgcatgtaactagccagttatcccagcaccatttattgaatagggagtcctttccccattggttgtttctgtcacagaaagttaatatatatttttttaagctgatgaattaagaaatagagatatagaagcaagttatctagcatttcatgtcaaataagccaaagaactagataatagaagcagtcaaaattattggaggtgaattcactttttactttatatctctgtgctactattatttttttagtaagtatgggagacagaataacggttccaaagatgtccatgtcctagtcctaggaacccataaatatgtcaccttacatagtaaaagagattttgtggatgtgattaggctaagattgtgagatggggagattatcctagagtctctggatgggctcaatgcaattacaagggtccttacaa

SEQ ID NO: 59327 - DNA, 482 bp, Homo sapiens
  misc_feature 424: n = A,T,C or G
cccccctcgaaagtcttctagaattaattaacgcggggggggacctttcccggacacctggcctcctcggcgaggcaggtggcagaactggttccacgtctgatcttccttagacaaacctgccttcagaggaaattgtgttcaactggagaaactggaaaatgtactagatattggctgatatgaaggatatatgttttgttaagtatgataattcgattttggctctgtagggaaaggctcttattttaaaaagatgtgcactagagaaaaaggaaacagcatgtagcaaatacatccacggacgtcctcctggtttaattggcaaaaaaaaaaaaaaaaaaaaaaaaaaaaaaaaaaaaaaaaaaaaaaaaaaaaaaaaaaaaaaaaaaaaaaaaaaaaaaaaattaaaaaaaaaaaaaangggggccccccccgggggggacccccatttccccctatagggggtggtttaacccccc

SEQ ID NO: 59328 - DNA, 580 bp, Homo sapiens
  misc_feature 9: n = A,T,C or G
acttctagnattaattaacgcgggccgtagaattctctttggaggagtgggaacacctggaaccagctcagaagaatttgtatcaggatgtgatgttagaaaactacagaaacctggtctctctgggtgaggataacttgccttcggaatatctaataactaagagttttattttcttttcagaatgtcccttgggatcttgtgctttgtatgagttagttttagattcttgttttcaggaaaaaaataggggttttgttgaagtagaaaaaatttcataatgtttgattttgacattcgcctttttatttgaggtgatgtacaagtttcactctagtcgtgattctagaaattggttgacataaactattgttgcttacactttaaaatccaattttttttgtttgtttttgattcagtcagatttgcagaagctcaggatccccagatttaaaatgcttcctaaatattctaaagaagctggtaggaaacaatattttgagaaatacttttcaagaatcttctataatgtcttattttttctactgagcacagtactaagttagaaattaatcctgtc

SEQ ID NO: 59329 - DNA, 444 bp, Homo sapiens
atttttcaaaacatgtttaaagtagatctagtaataattatataatagctcaaaaaaaaatttagcaacagaaaaacattaagactacaattcaacaacgaaaataccaaaaaacccaatttaaaaactggacaaaggactcgaatagacatttctcctaagaagacaacaaatagcccagaggcacatgcaaagatgctcaacatcactagtcactagggaaatgcaaatcacaatcgcgcgagataccactttgtacctaatgggatgctatcatcaaaaaaaaaaaaaacaaacgcaaaacccaaaaattaacaagtgttggcaaggacacgggagaaactggaacccttgtgcaaggctagcgggaatgcaacatggtgtagccactgtggaaatggtttgggggttcctccaaaaattaaacctgaagtaccatataat

SEQ ID NO: 59330 - DNA, 350 bp, Homo sapiens
ccgggccccccctcggggtacttctagaattaattaacgcggggggagggggaaaagaaggattgtgaaagccaatacattggtttttaaattttcaagaaccatcggtaagtgagtaagtaaataaataaaaggatttctcccagaagatggggcagacatattttttaaagtgaaaggagtatttagaagaatagatgatcaattcagaaatgtacaaggttactcaatccagcaaatgacaaagggcaagtagaagaggaaataatctaactaataaaaggaaaatgttttctaaaataacaaacgccctaacctgacagtaaaaaaaaaaaaaaaaaaaaaaaaaa

SEQ ID NO: 59331 - DNA, 554 bp, Homo sapiens
cgggtccccccctcggaagtcttctagaattaattaaaaatgtggattgaaacaatatatatcacaaaataagatgacagatacaaaagtaaacgtgattgataaatttaaataggctaaacttcctggcaataagaaaatatttttatagtagattataacataaaccacaaatcagtgcttgtatagacgagttctgaaaacttcaaactgtgaaagttgaaagtaaggtttaattcaggctagaaagcattagatcaatctctctttgtcttacacacacacacacacgccccattataatgatcaaagttcagtctgcactgaagtttaagtctaattgtaagtatctttatatattaaaaaaatccctgtgttaactgtaagacaaaataaacacatttagtggtatgagactttaaattaaatcagatcttagtccatgacagattaagtgcacaaaaaaataaatgttaataaaactgtagaagccctaaataacataattaacaaactagaacacatatacaaacatttataaagaatataccttc

SEQ ID NO: 59332 - DNA, 522 bp, Homo sapiens
  misc_feature 23: n = A,T,C or G
ccccccctcggaagtcttctagnattaattaacgcggggtaactgccaggatttctaaaaagataatttcttctttagaaaacgactgaaggaaatgtaagaagcggttatactctaaacaaaagaagaaatatgtaaaactaatacagtcaaatactaagagaaatgctgagacctctacatgacacaatcttctagctagtaaaaaatatttacggccaggcgcggtggctcacgcctgtaatcccagcacttcgcggggccgaggcgggtggatcatgaggtcaagagatggcgaccatcctgcccaacatggtgaaatcctgtctctactaaaaatacataaattagctgggcatggtggtccgtgcctgtagtctcagctactcaggaggctgaggcagaagaatcgcttgaacccaggaggtggaggttgcagtgagctgagagtgtgccactgcactccggcctggtgacagagtgagactctgtctcaaaaaaaaaaaaaaaaaaaaaaaaaaa

SEQ ID NO: 59333 - DNA, 391 bp, Homo sapiens
ggggtcggtttaatggagtgtccacgcggagataactgcgatattggaacacctgtgagagagattgttctatagggctggaatattcagagttacattcttggaagtttctgtttttacttgcatcaaacacccctctgttgttctccatcatctttagccttttgtcctccaaagatgagtactagggatcatgtgtttaaaaaaagaaaggctacgatgactgggcaagaagaaagatgggaaactgaataaagcagttgatcagcatcattggaacatggggacgagtgacggcaggaggaccacgaggaaataccctcaaaactaacttgtttacaacaaaataaagtattcactaccaaaaaaaaaaaaaaaaaaaataaaaaaa

SEQ ID NO: 59334 - DNA, 582 bp, Homo sapiens
  misc_feature 42: n = A,T,C or G
gggccccccctcggaagtcttctagaattaattaacgcgggnacctaaggggaaaataaatctggcagaagagtgaatagtagtagaggctgtgtggtcttcttccccaccctcacagacagattctcttgcagagataatcttgtaagttttgggcttttttttttttttgcctgaagtttttcttttaacagactggtgtcagaaatgggatctgaggtagaaccttagtgactcccaggaggaccaagtgaccaaatgaaggtacccaccaggcccaactatgcccattgatctcttgtagcaactgagattgtgattgaattctctttcagatttcaagttccacaaacttgtattttgaactttctgagtttatttggacattttaaaatttggactgggcttggaagtcatgacagaaataggactggtttctgtagggaggcctcaggtgtctgactgggtcagaaagaaactgaactgggttcagtaggtaggtgaggttaccataagacagagaatcataggttcctctggatccaaggagtctagaactcctgcatctggaactccagccaa

SEQ ID NO: 59335 - DNA, 612 bp, Homo sapiens
ccgggccccccctcggaatacttctagaattaattaacgcgggaattgaatttttaaaacatgttaaagtaatctagaataattaagaatagccaaaaaaaaatttagaacagaaaaacattaagactacaattcaacaacgaaaataccaaaaaacccaatttaaaaactggacaaaggactcgaatagacatttctcctaagaagacaacaaatagcccagaggcacatgcaaagatgctcaacatcactagtcactagggaaatgcaaatcacaatcgcgcgagataccactttgtacctaatgggatgctatcatcaaaaaaaaaaaaaaaaaaagcaaaaacaaaaaattaacaagtgttggcaaggacacggagaaactggaacccttgtgcaaggctagcgggaatgtaacatggtgtagccactgtggaaatggtatggtggttcctccaaaaattaaacctgaagttaccatataatccaacaactgcatgtctaggtacagatccaaaagatgtgaaagcaggccgggggtggtggctcgtgcctgtaatcccagcactttgggaggccaaggcaggggatcaccggaggccaggccaggag

SEQ ID NO: 59336 - DNA, 191 bp, Homo sapiens
  misc_feature 34: n = A,T,C or G
gggtaccgggcccccccctcggaagtcttctagnaattaattaacgcggggaggaggaagatactgtggtactgtcataaaaaacagtggagctctgtattagaaagcccctcagaactgggaaggccaggtaactctagttacacagaaactgtgactaaagtctatgaaactgattacaacagactgta

SEQ ID NO: 59337 - DNA, 602 bp, Homo sapiens
  misc_feature 39: n = A,T,C or G
cccccctcggaagtacttctagaattaattaacgcgggnaggggaacaaaacaagagtccctgctctcactcatggagctccagggaaattgtgactcacccagtgttttgattccttcttcctctcttcttttctgtaggacagaataataagctgaatagaatctgaccattggctttcacctggccaggaccttctatgtagctctccttttgtggcccatgtgctgcatcctctgccctcagtgtgcaactggcccccaacgcaatgtgtgtttgtcaaaccatggaagtggggcagtatggcaagaatgcaagtcgggctggagaccggggagtcctcctggagcccttcatccaccaagtaggcggacacagcagcatgatgcgttacgacgatcacactgtgtgcaagcccctcatctcccgggaacagcgcttttacgagtccctccctcccgaaatgaaggagttcacccctgaatacaaaggtcagtcactggccagtttaatgaaagcagcagccttgggcttatagaccccttgccacagttttttcttggtttgtttgccatgatatatcattgtaggtcttttttctc

SEQ ID NO: 59338 - DNA, 612 bp, Homo sapiens
cgggccccccctcgaaagtcttctagaattaattaacgcggggggtcagtatatatattcactaagtaattaatttacatgatacaacattcaaaatgtataaaatatatacagtgaaagatattttcccttccactccaattgcccagtcccatacttccccttcctcagaggcaatcactgttaccactttcttgttgcatttttccagagagattctcaccactcctttacgcacagcacacacacacacacacacacacacaaatatagatatttacatatatatgtatatttcctacaaatggtagcatactgtatttttttttttagatggagtctcgctcttcgcccaggctggagtgcagtggcgcgatctcggctcactgcagtcttcacctcccagattcaagcgattttcagctaatttttgtatttttagtagagatgggatttcaccatgttggccaagctggacttgaactcctgatctcaagtgatctgcccacctcagcctcccaaagtgctggtattacaggtgtgagccaccacacttggcctcatactgtatttttgaaggatttccaataccttttttttccttccaaaaag

SEQ ID NO: 59339 - DNA, 585 bp, Homo sapiens
ccccccctgggtctttagattaataaagggaggcctattagcacttcaatttaatgcccctttcctttctgaatactgaaatcttccttacctttgcaaagagtatctattctaaagcaagagctaacattttatatcagtgtgaaacactggagttccccagaaagtctaaagaaaatcaaagtgctttaaaagcccaatattatcattacttctattgcaacctttacatacatatattgtttttgttttccagagagattagtttataaaacaaagcaaacaaaaccctacagaagggtttgtattctggtcttgtagagcagcaaggaagggggctctcaggagtctgtggcactttgcagcctggtttaagggtaaggaccccggggacagagtgctggaggcagctactctaggtcagtcagatcccaggcagtgcagaggcaaaaaattggggtttctgaacacctccattactcattagtgaatttgtgcagagtaatgcgtacttgtaaagaaatctgttgaactggtgagaggaagccccagcaggagaatttggtgaccaaaactgtccccagc

SEQ ID NO: 59340 - DNA, 598 bp, Homo sapiens
  misc_feature 553, 573: n = A,T,C or G
cccccctcgagagtcttctagaattaattaacgcggggattattgtttatatgtttcagaagctttgctcacttgtttattcattcatttcataaatattccttgaaatgcttactgtaagcaagattatgcagggcatgttattaggtggtaattagggaaagggaaaaatggaaattatattttgcagatacaacaaaggctgaagaggtgtgtgtgtgtgtgtgttttagatacacatctatatgtacacagagacacgatccacagttgtgtaggaataacttcctaaacatctttaggatctacctctttttcctgttcccactgttatttctttgtttcaggcccttaacatctctaatatacactagtatttctgtcttcacactgttttttttctttacacagctcttttcatagcccctccattagcacacagattggaattgtgtctccttgttacccacagaataaaacccaatgttcttaatatgtagtcttaatatagactctataaatagtccctttcttaaactctccttaatttacncagtttgggggtgctatctngttcctgctgggatcctgatggctg

SEQ ID NO: 59341 - DNA, 507 bp, Homo sapiens
  misc_feature 25, 38: n = A,T,C or G
ctggggtaccgggcccccccctcgngggtacttctagnattaattaacgcgggcctatgttcagattagacacacaaaacagcgtaatcaagccactgttacaggaccaccacctgtgtccacttgggtgccaggaccctgctgtcaaagacaggtccacttccttacaacatggcctagaattggctgattataagctgcctgctggccatgttcggtggctcacacctgtaatctcaacatttggggaagccgaggtggaaggattgcttgagccggagagtttgaggccagcccaggcaacatggcgagactctgtctcttcaaaaaattttaaaaaattagctgggcatggtagcatgtatctgtagtcccagctactcaggaggctgaagtgggaggatggcttgagccacagaagttgaggtttcagtgaaccaagatcacaccactgcactccatcctgggtgacacagcaagaccctgtatcagaaaaaaaaaaaaaaa

SEQ ID NO: 59342 - DNA, 423 bp, Homo sapiens
  misc_feature 27: n = A,T,C or G
cgggcccccccctcgaaatacttctanaattaattaacgcgggtaaagaaatgatgcaagggaaattgtaaaaatttgctatgaaacaatgaatggaatgggataatgcaaaacacaatataccaaaacctgtgtaatacagccaaagcagtattaaaagggaagttaacagctataatcatctacatcaataaagttaaaaaaaatcaaagaatataatgatgcttattcaaaaactagaaaagcaagagcgaaccaatcccaaaattagcagaagaaaaaaaataataaagatcacagcagaaataaatgaaattgaaacaaatgaaataatagaaaatattagtgaaatgaaaagtttgttttgtcaaaaaagataaagaagatttacaaacctttagatagactaaaaaaaaaaaaaaa

SEQ ID NO: 59343 - DNA, 444 bp, Homo sapiens
ccgggccccccctcgaggtacttctagaattaattaacgcgggaatggttaaccaattacaccaaaatactttaaaaataatctgcccagtggttctcaaactctttggtttcaggaccccattacactcttaaaatttatttcaggccccagcagcttttgattatatggttaacagttatggatttttaccatattcacaattaaaacaattatttaaaacatctatgattgattttaaaataacaaaaaacatattaatataaataacattttaaatgaaaactgtttttcaaaattaaacagcctaggctgggcgcagtggctcgtgcctgtaattccagcactttgggaggccaaggcaggtggatcatgaggtcaggagatcgagaccatcctggctaacatggtgacaccccgtctctactaaaaaaaaaaaaaaaa

SEQ ID NO: 59344 - DNA, 590 bp, Homo sapiens
cggggcccccccttcggaatacttctagaattaattaacgcgggggagagagagagagagagagagagagagagtgtgtgtgtgtgtgtgtgtgtgtgtacatacacacacccgtgcacgtaaaccctgcatggtttcccttggcctcaggatactcaggtttagaatagaaatgctcagattcacgttcacacctcaagggctggcccttggttttgactagtccttttagagccctgaaataaggaagaggaaggaagagagagttgctagctggttggctgtcttacagcttctggggcagatgatgtgcttaattcctgctgtcacttctcccctcagagactcaccgcactgtgttaaaccagatcctacggcagtccacgacccaccttgctgatgggccttttgctgtcctggtagactacattcgtgtcctcgactttgatgtcaagcgcaaatatttccgccaagagctggagcgtttagatgaggggctccggaaagaagacatggctgtgcatgtccgtcgtgaccatgtgtttgaagactcctatcgtgagctgcatcgcaaatccccccaaaaaaaa

SEQ ID NO: 59345 - DNA, 607 bp, Homo sapiens
cccccctcgagagtcttctagaattaattaacgcgggctgagtcttgatggagcagtactttgcccagtggaaataagaagaaagcatatagaagttctccttatcctttggacttgcaatacacacaaaactttctggggctttctaaggaaattttatttcaagattctgctaggcaataactctccttccttaaattgaagggtaaggactctaagttctgctttttcttttctcactgaatttgcttaggtttttttttcgtttttgtttgttttttttttttcacctttctcactggtattgatcactttctcttccttagtaaagctccatttgcttctctcctaacctggacattataggaagcactgatgctgtattaaaatttagagaaagctcccagtctgtctttcccaacatcccttcagtttcaataagcaaaaaaaaaaaaaaaaaaatagttgttatacaagcatggcagctgccctgctgctttctgtatggtagagcaatatgtcctcatgtttgcatcaggaaatgatgtttcaagttgaggttctgaagtttgattgctcaattctgtcacttgctaaatgtttaatc

SEQ ID NO: 59346 - DNA, 595 bp, Homo sapiens
tgggtaccgggcccccctcggagatctttaattattaacgcgggatcaaaagagagaagggtttttctttccttgaactaggctggactgtgtggctgtcctgactaatagaggatttgagaactgacaatatgcaacttctgaggctaggtcacaaaaacgcctggacccttagaatgtttaatcttgaactctcacaagcaggcgatgaggaagcctaagcaatctgtggacagactcacttaaaaatatagaagcaaattaaatgtttttctatattaaaatgtagaaacaagggcttccaaactggggtttagagtgtatatatgtatacaggcatatatttatatgaatatgtttatatgtatatatatacacacacacataaacaaattctctccatacatacatactctatatatttagagtatccatatacacaatatatagaatacacatataacatgaaaagaaacaatggggccaggcgcggtgactcatgcctgcaatcccaaaactttgggaggccgaggattcagatcacttaaggcaaggagttcgagaccagcctggccagcatggcaaaaccccgtct

SEQ ID NO: 59347 - DNA, 513 bp, Homo sapiens
  misc_feature 209, 411, 477, 500: n = A,T,C or G
tactgattggtagtcagaatgatttggtggatgaagagaaagaaaggagcaaccgtggggccacagcaatagcagaaacattcaaaaatgaaaaacatcaaaaataacaagatgtgacagaagccacttaggcagcaaacataaatgttgcagtgaaaaaagaagctagccttctagctgaaaaacgagtattccccaatgggctccanaagaaacttgattcatcgctgcaaaggaaagaacaaccttaaaacttttaacagataaaacttacagaaacctatgatatagaattcatatagtctattctgttgtgtctaaatctgtaggcattgtgttgttgttctttaggacgtatttatttaacttgcacattttttcagattcttatttctactaccaacaactaantaattgggaaataattctgtattttcagtttctgagtaaaaccagtctgaaataggataaaagccnccaaatattttctttttttccanaattttgttttgc

SEQ ID NO: 59348 - DNA, 377 bp, Homo sapiens
acgcgggggaggctcccagtcttgctgtctttcaatggggcagccactgctcagttgctgccattcagaaatatgaacccagtatcaccagaacttttgatttttcaagagaaaccaagattccagatttgtaggtgatatcttccatttttcagataaaacaaaggaaccagaaccacatccactgatcggatttgcctggggaggaggggtgctctctcctttgatcttctcttctggaagagatggaccaaaagcctctccagcaataatccgaaatgattcttgaagactatctttccagcttgtcacatatgcaaggtgtatttacaggagacagcaatggaaacctggtcagttgagcaggtctgcagttg

SEQ ID NO: 59349 - DNA, 656 bp, Homo sapiens
  misc_feature 630: n = A,T,C or G
gctgattggagctccccgcggtggcggccgaggtaccagcttgccctcattctcttccaattccgcttgcagatcttcttcctgaatgcactgtggaccaacaacaattccagacacaccaccaggtgcataggcagcagcctttcatagacttattttgcagctggacatgcctggctttgcagattcccctgtaggctctgacttttcacccacaccagtgcttctggagagtgattggtgactttccctgatcctttaactccctttttgtagccttatttcctatattctccccctatatttccaataattaatctcttattctatacttgttctacttccttgaatacaagtataaaactggtgcaagtataaagcttgttaaggaaatttgttctaaagggaaagagagaaacatggaacagctggatggtggtgtagattcaatgacaggtctcttcaatttttaaaataagaattattaaggcatatcactatgctaaggggataaacctagaaaaaatgagaaattgattatgagaacagagaggagataattcagaagtaaaatctttgagaaagaagatgggggatccaacaaagtgttggtcttaagtaaagtcagangcagtttatccattatactgaaagaa

SEQ ID NO: 59350 - DNA, 502 bp, Homo sapiens
  misc_feature 389, 425, 437, 447, 451, 461, 481: n = A,T,C or G
acattttcatattctaatttttctgcattttcccagccccttgacgctcaatcaaaatggtctactttttttcagttgtgtctcattcccattttgtctttctgtttcctattatcaatcaaatcagggaaactgagaaagtgcttttaaatttctattgttaagatgtagaaacaacagtctttcagtgtgtcctcacagggacagggtcaactggatttggatgtagcctaaggggaaaagaattctctggtggtttctctccctagttggagaaaaggcgcatgttccctgagactagagatcatcaaagaatgtgaagaaagaagctttgccagtttgcctggcataacaattctgaagacttttttttttgttttttaggaaanatcgagttccaaagtaattagctacttgacatcctntacctaaggcanaatagggaangccntaactcgttntccccaacagccagtcaccnttgaaaactcaaggaaaaatc

SEQ ID NO: 59351 - DNA, 574 bp, Homo sapiens
  misc_feature 452, 460, 479, 482, 492, 515, 530, 531, 532, 544, 558, 563: n = A,T,C or G
cgcggtggcggccgggtacagtgaaccatcattaatgtcttctgaactgccctccttgcttctagaacagcattccccttccttttgaaagcctctccaatccccttttgcaccttgttttcctgctggaaggtttgaatattagtaacatcttgtctggacataggggttgacatcagacccaagctgaaccagttcattccagggtctttccagaatggactaaaggaagagaggtaatcccttttggtgatgcgtgaagctcagagataagaagtgaggagcagtaaactgacctgtttctgaccctctaaacaaggcagtctgaacgaaagaaactggaactccagagagaagacttgagagactgcagagcatcccggtcatgctcattctgatggtaatgagccccacctatttttctttaaatccagctgacacctggcactatncatagcangcttcttggccaaaaaatnctnccttttgctntgcaaggttcaagtgcgtttttntgatttgcagcaaannntgaccttggttngttgatgacttacnaatgntaaaagggctt

SEQ ID NO: 59352 - DNA, 579 bp, Homo sapiens
  misc_feature 77, 540: n = A,T,C or G
tcaggtacgcggggccaatctggcaacacacacaactaactttgaaagacagtagtaaagtgaaattctcccaaggnaactgagctgcaagaagttcacttggttgtgtgcaggaagaaatggctggagatagggatatcacagatgccagaacattagcaaatggtttgattgctttgtcaaagatcttgaaataactagaggataatatttaagaaagtttagagcagaggctggtgggtggaccatgtgaatggatacaaagcacataaatcttaattactaaaatgatggaataatctgttaagggcttaattaagatgccaggtcaaagacaaccccatatagtgttggaaatgcaatcttccattttgttatgttgctgatatgtggttctgtgtgcagaacctaaggggtaatgtggcttttggcctttcaatcatcacttccagtgacacaatttcagaatttatcatctgtgctcctacaattttaaactctgatgaattggaaattctgattactgtggtggtttcacanaacctgaagctgcaaatagtattttgtgatggcaataaa

SEQ ID NO: 59353 - DNA, 592 bp, Homo sapiens
  misc_feature 19, 52, 56, 66, 77: n = A,T,C or G
ctccaccgcggtggcggcncgcccgggtcaggtacaattcttctacaaatgnaggnaacgacatgnaacaaatgggnaagaaaaacataaccataaatatgtgaattaacattttctaaaagttaacatacaactcttttgcccccattctttaatggaaaatgtagcctaaagctaacatgtcattctcacttcactaaaacaacctctacttcacagatatgtaaaattgcattacctgttttacctgcttgagcttctatgggacacttcagaggctactgtccattcctaacacatctcaatcagacagagaggcagattgtggtctgtctctgagacctcactcttggatatgcctattattgttcagagagtttaatgggtttccccaaatcaagatttattgataagattctaggtgcttctaatatatgttaaaaggcattgtggcatgcattgtagtgaccttgcgtttaaagaattgcctcaagtaaaatgcagactgtgtaatggataaatcagtcactgtctagagtctttggaaagtatgactatcaatacagctggagcaatgagtgaactggatttg

SEQ ID NO: 59354 - DNA, 329 bp, Homo sapiens
acttaatatttacttagagatgtttagtagacaaaatttcttgacaaaaagaaaatagcattctcacataatctcagagttgtctctgatgaatgtaagttccccttttgattttcactatttctaggacaaagtttttgttctgtgttctccaaaaggtaagttttttttttttgaaacaactctcgctttgtcccccaaactggggtgcaggggtgtgatctcggctcactgcaagctccgcctcctgggttcacaccactttcctgcctaagcctcccgagtagctgggactacaggccccgggctaattttctgtatttttagtc

SEQ ID NO: 59355 - DNA, 476 bp, Homo sapiens
  misc_feature 309, 312, 382, 457, 459, 462: n = A,T,C or G
acaagttactcaagtttataatatcttcagtgatgttccattactactgataatgtcatttaagtgtgcaaaatgataatttattcttttaaaatttatgaaatcaaaagagatataggaagatggttgtataataagattactatgtccctcgggaaaattctctttagctcctacgaaagcaaaaaggaatgtaatttactttttcacttttggtaatgtataatgtcctatgtattctattttaaaacaaagtaaattttaaaaacctatttcaaaattgtaattcttacaaattactatgattgntgntttctttcttttctttccttctcttttttcttagagaaatttgacaaataaagggggaaaatagactcanagaacaagagctattaataaaagataaagtgaattatttgcaaacaagcatctacatctttttctctgctacagngnctnggaatctcttatcc

SEQ ID NO: 59356 - DNA, 470 bp, Homo sapiens
  misc_feature 315, 352, 372, 373, 383, 402, 438, 445, 447, 448, 455, 463: n = A,T,C or G
cactgtgtctggtgaagtaagttgatggtgtgcactaacccttttggaatagtttatcaaggatttaatgtttgtatcttttaattccacatacatatatatcttaaggaaataactagaaatgcaaacaagaatttgtattcagaaatgttcactatagcatcacatagggtaatcaaaaaattaaaaataacctacatgctctcaaagtaggaggaatggttaaattatagttgattttgctttgtctctcttggtttcaagggagtagaaattctaactagattaagtaaaattggggcttttgttgaaaanggtaaaaaggtgctctaataaccccaaacagcaagancactgaggcctttgggcagnnggggagccanaactacttttcccatttcnccccgttcaagggaccaggctagtcactggcttttntttcctntnnaaaaacntgcttttnttttaaa

SEQ ID NO: 59357 - DNA, 427 bp, Homo sapiens
  misc_feature 334, 339, 357, 368, 373, 385, 396, 423: n = A,T,C or G
accttaactgtgacaaatgaagaaagtgaacttttgaaggctttggtaacttccccaaggccatgtagggagtaaaaggtggaatcaggttctatgacttcttaacccatgtcccagctctcttttgtgtctctttaagtgggttgcagttctccatcgctgtcattaacatgcagccaggacagaatgtccatcatgctttgttacatctatatctcaacatcatgaactcagttctatttctattcagtcttgagatatggaagtaagaatatacaattactttgggtaattatttacagttctgggatttgaaatccctggaacataagtntaaanaaacccctggatcattangataaaattantttcnttggctattaangggattttaanggccttttctcctactgccaaagttanaaaa

SEQ ID NO: 59358 - DNA, 564 bp, Homo sapiens
  misc_feature 121, 223, 496, 563: n = A,T,C or G
ttggaactccaccgcggtggcggcgggtgccatggctcacacctataatcccagcactttggggaggccaaggcggtggatcacctgaggtcaagagtttgagaccagcctgccctgtctntactaaaagtacaaaaaaactagccggacgtggtggtgcacgcctgtaatcccagctactcgggaggcagaggcaggagagttgcttgaacccgggaagcanaggttgcagtgagccgtgatcgtgccactgcactccagcctggacgacagagcgagactgtctcaaaaagaaaaaaaataaaactttttaaatttttgttaatataaaataactattaagcaataataaaggataggacttcttgttaaacacatggtcaaagagttctcacatgtattatggttttctcctcaaactccactaaaatgatactgaaggaatttgaaaaacacaaactaataaaggcagagagaacaggagagggctccacancaaatgggggaactcaacacaatgtttggaagctggataacaaatgaataggtggtaactgatttant

SEQ ID NO: 59359 - DNA, 500 bp, Homo sapiens
  misc_feature 401, 414, 426, 450, 464, 474, 487, 493: n = A,T,C or G
actgggcttgcccacctgcctacctgtttatttttcctcctaatgataccagagctggcccacctttaccgagatcatttcaggcagcatttccccttggggcattgaacacatccttccttctgttgggtgtttctccttgttgaccttgtctttaggattaaaggcaaataataacctagtgtatacttttttaaaaacattttacaaaggtctatgtagaaatccagagcttgactgacatgaaaactcctgtgaattttttctatcattgtatcatgagaaaaatgacctgttactgattcagagtccttaataagggaattcatttttctccctgtcacatgctaaatgggttacttttacatttctttattaaatttgaactgaataatattaanagtgaataaactnttacatcaaggnagttaataaaggaattctgttttncctcatattttaangacactgttnttttttaaagccncttggnaaaaaaa

SEQ ID NO: 59360 - DNA, 467 bp, Homo sapiens
acaacacacatttgtatgatcatgatactttctttccctagacacaaaatatcccaattgctttttgtagccaattaaaaagcagccttgattatctaggcttcctagagacatccctgacataattgaacacattgactcctttcaaattaatcacattttttcaaagcaaaataactgctctgtgatcactttcttctttacctacttcacacatattagtaactagagtcatcaacatcagttgactcatcaagcacattttatgaggataaacttttgataacatagcatcttgtttcaccttatataaggaataggggaaacaaaagaacaaataatcccactaataaaaacaaggaatttcattgaagtgtcagttgtgcaactgatgtcattgaaattttctaatttgcatcaagtttcactgattttttgttgtataagattctgtcacgttagcaaaa

SEQ ID NO: 59361 - DNA, 170 bp, Homo sapiens
acatctgtgaatggaaccatgccctaccttactttattaggtattctgtaattgcggaggtagccaatttttctacttctgtgttatgtctaagctaattattgtttttatgcttgagtaatattgtctggggccatgcattcattcaacacaagagaatgaaattgctc

SEQ ID NO: 59362 - DNA, 719 bp, Homo sapiens
  misc_feature 489, 504, 513, 517, 531, 533, 537, 550, 560, 590, 594, 601,612, 614, 630, 633, 655, 682, 689, 709: n = A,T,C or G
acatgaaggaaagtggacaagattggatatctcttggatactagaggcaaaggaggggtaaaggacaggactgcagcgaaagcctggagccccgattatgtctagcttgctgccaataatctgggtatcttgcacaagcatttattttcttcgcagctcattttccacatccttaaaatacaaaaatattggaatatagcattttttaggttgcttcaattctataactcagattagctgttatttagtattttaaacctctttgtgaaattgatggtaatacacaaaacagagacgaggaaacagctaaaaaatgtcagggaaaataattggttctggaatggatatattgtcttgaaattgctggcatgtttgtgaaactatgtgaaaacttttaaaaaatcgtttattgaccagccagtgtgttccaggccactcagcagacagacatactccttccctacttcaatggaggtcacttcctatacnaaatttacctagagnagaaaagcnagangaaggggcctattntnaccncagagagaaaatnaagggaaaancatttaaaaaatgaatgggccaatttcaancatngcccacnttaagtttcangntattttttaatttaantancatgccccaagaagtggagccngaggattgaaaaggacattttaaatantttctantgccccttattttaaaggtnttcatttttt

SEQ ID NO: 59363 - DNA, 571 bp, Homo sapiens
actcactcaccaccacatttaatctactgcttttctcattgtctaagcattagagtaagtcctttatattctcaggagataaaaatagaatatcttctatatagccacacttgaagttattgccatgcaacagtctctaaaactttcttatgagtcagtttttcttcttttcttttagagcacagagtaagtataatcataatatgccatacctctaccaaattagagattccattctttaatttttctatcatgtgctcatcattttcatgatcaacattaataatggactttctttgggagaatatgtcttaactaaaaaaaactcaattgtgctcactctaaaaagatcaatgtgaatgtaaaaataaatacacttcattgcattatatgagctacataaatagctggttacacaaaactcacgttcacctctcagtaatattccaaatgactataagccataaacatgtgggggcattaaaactgaatgtccaatcccaaactgccgagatatcactgtatctttttttaaaaaaattatactaccgtaatcataaaaggaaaatta

SEQ ID NO: 59364 - DNA, 209 bp, Homo sapiens
ttggagctccccgcggtggcggccgcttcgaactcactatggatacataaatgtgaagacacaagagcctttgcaactggactgtgacctttgtgccatagtgtcaaactcaggtcagatggttggccagaaggtgggaaatgagatagatcgatcctcctgcatttggagaatgaacaatgcccccaccaaaggttatgaagaagatg

SEQ ID NO: 59365 - DNA, 660 bp, Homo sapiens
  misc_feature 521, 570, 583: n = A,T,C or G
acttgtggatctggtgcccggtgatagtgattatgaagtaatttcagatgatattccccttcagttagtgactgacccacctcagttgactgtcaaagatatcagctgtataaatacagaatgtattgatatagaagataagagctgtgacttttttggttctgaagtcagatgtaattgtaaagcctctactccctcaatgacaaaccaatgcaaagagactttcaaaataataaaccggaagaaggactatattattctgggagagccaagttgtcaatcttgtggttctgaaatgaattttaatgttgatgcctctgatcagtccatgacttacgagtcacaaggacctgatgagaaaatggtgaaatatattgattcagaagataagagctgtggatataatggttctaaaggaaaatttaatttggaagacacttctcatcgaacgactcaccgactgcagaaagctcacaaagaagccagccttcggaaggatccaagaaatgctggcctaaaangtaagagctgtcagtctagtgcttctgcagtggattttggtgcctcttncaagtcagcgctncatcgaagggctgataaaaaaaaaacgtttcgaagcttaaacatagagatctagaagtgactgtgaacccggatggt

SEQ ID NO: 59366 - DNA, 294 bp, Homo sapiens
  misc_feature 22: n = A,T,C or G
actgttgcctttgaccaagggnatatgaatagtttttgctggaaataataatagataggtctgtgaaattttgccatcctttagtgtcaaacactgaaggaaatgatatagagatatttatcacaataaatatcattggcaaggagtcaatataataaatatttaattcggtttattttaatcttctaacaacaaccatatgaatttcaatcaaactttgaaagataacgagtgggagaatttctgctttctgggacgatgggagcagagatatttttccttattccaaccatt

SEQ ID NO: 59367 - DNA, 539 bp, Homo sapiens
  misc_feature 370, 493: n = A,T,C or G
actgaagggaacaagccacacaactcctttccctcccacataatccctatgattcactggaattggatgaccttcctgggaactctttactgtggcctctgtgggtgccaaaagcccaagaaagcttgctgagttgttctcattcaaatactgcgcttgctgggttcttattcaggcctctttagacacacttccttcttgctcagcaaaactgctaattggcacagaaaatatcctagctttgtccattttctatagaagttgaaaatacttctacctgactgtgctgacagaattatattttcaatggtatgaatactccagacatttcaatgacaactttgggaacaaaataatacatataatacangttggttggtcttaaacagcctcatgcctcaagtataagtgaccagaagcaaaaatcctccaaaaattaggggcttaagacatgaagcatttgggatattaatcatttacattttgaacaaanggctgcacattagtgcctttctgttttctggggatttttaccctta

SEQ ID NO: 59368 - DNA, 165 bp, Homo sapiens
  misc_feature 21: n = A,T,C or G
acagtgtgagaaccaatattntaagaaataaaacattgtttctatagaaataatgccctatagtaattagaatactcatctgtcccctctcccttttagagaacattacatttgtcatggtaacacccatggaaataaatttttttgtttgtatgtttctttctc

SEQ ID NO: 59369 - DNA, 284 bp, Homo sapiens
acttttgattccatttctccctaatatttcagtgagcttttatttctttacaaaaacatggtagaacctttgctcacctttcatatctttctggatttttcggtgataattgaacaaaacatggtagtaattattacattattgctttcttcttgcctgtgccatttattgtcattgtttttccttttttcttcctttcttccctgcctccactgcaccccggattatcagattatcaccctattatgacggcatttctgagttaaattacccttagcccgcgt

SEQ ID NO: 59370 - DNA, 609 bp, Homo sapiens
  misc_feature 4, 516: n = A,T,C or G
tggnactccaccgcggtggcggccgagtaccagcttgtcctcattctcttccaattccgcttgcaggatcttcttcctgaatgcactgtggaccaacaacaattccagacacaccaccaggtgcataggcagcagcctttcatagacttattttgcagctggacatgcctggctttgcagattcccctgtaggctctgacttttcacccacaccagtgcttctggagagtgattggtgactttccctgatcctttaactccctttttgtagccttatttcctatattctccccctatatttccaataattaatctcttattctatacttgttctacttccttgaatacaagtataaaactggtgcaagtataaagcttgttaaggaaatttgttctaaagggaaagagagaaacatggaacagctggatggtggtgtagattcaatgacaggtctcttcaatttttaaaataagaattattaaggcatatcactatgctaaggggataaacctagnaaaaaatgagaaattgattatgagaacagagaggagataattcagaagtaaaatctttgagaaagaagatgggggatccaacaaagtgttggt

SEQ ID NO: 59371 - DNA, 254 bp, Homo sapiens
  misc_feature 40, 51, 61, 71, 74, 121, 176, 217, 235: n = A,T,C or G
gggttggggccggggccccgggaaggttaacttggttttncccttggtttnggggccccgnaaattggggnaanaaacttgggttggttttcttcaaaaaacccccggggttattggggtnggggttccacccttttttggcttccccagttccaaacggttttaccaaacggggnaagttaaaaaattcttgttcgaaaatgccacccattgaaancctttttggagttgaaanccttctttcccttgggggg

SEQ ID NO: 59372 - DNA, 416 bp, Homo sapiens
  misc_feature 8, 314, 401: n = A,T,C or G
acgcgggnacatgttgagtattacctactgtgtgctgggcactggtaataccgtgataaatcagacatctttcaaggagtttattaggggaaagaggcataaaaataagcaattgaatattcctggagtggtggtagaagtccgtctaaagtgtatggggcacaatagagagtttggtgagttttgcttggcagcaggagcatcaggaaaggaccagtgatgaaagggagcgattatgaaggcctgatggagagcagctgcagcaaagtgataaggcagcagcttgactatagtggctaaagctggaggatganaaggtggaaagagtggctccttttttccccccagggaggtggaatatgaacagaaaataactgggggcagggagttgggattataanaagttgtttgtttta

SEQ ID NO: 59373 - DNA, 626 bp, Homo sapiens
  misc_feature 459, 515, 553, 578, 580, 587, 596, 600, 605, 622: n = A,T,C or G
aaactccaccgcggtggcggccgagtactcttactcagttcttcctgctaaggacacaactcctttctagttttatctttgagggacccatgggggctcacagtagttcctgttcagttttaacaccctttgttttgtggtatggctgctctttttatctttctactctacttcactctcacagtcttcttgacctgggaaaccaaatcctaaataaaagaaattacttatcagctttatttttctctttacttctctacctcattattctaaactgtgtttctttctagacattccacagaaaacctgtgtccaatactgagctagatctaagctttctaatcaaactatagttgtgttgccttttgtgaaggtgatgtttactttgggaaatatgtagttgggtaaagtttaaacgtaacaaatgtcaactctcatcacgttcccatctgagtccangctttacagtttggcaagtatacgtgatgggttgtgggtttgaaggtatgggctgncttggtggatcactgatgaaaaaatttcccctaccggnctttcttttgaaggtttcaatgaantntgaagangaaaggaantagntttcntttttccccattttaangggg

SEQ ID NO: 59374 - DNA, 232 bp, Homo sapiens
actgggattataggcatgagccaccatgcccggcctttgctcttaactactgatgttgtcttcctgatcttttctacaagaagcttttaaactttttggactttaacctacaataagaaatccattttacatgttcacatgtatctataacaacatttatatttctaaaacaaacttttcatgaaacaagatatacctacatatgtcaggcactctgatattttctattcta

SEQ ID NO: 59375 - DNA, 220 bp, Homo sapiens
  misc_feature 14, 70, 178: n = A,T,C or G
tcggagctccccgnggtggcggccgaggtacgcggggtgtcaagccactgagcagagaaacaaacctggnctttgatgacaatgtttgacagctgaatgaaacaaccacaaataatgccctacatctaatttcatgttttgtatcacaaaaatctattgcttaagccactttagttanagccttcagtttcctgcagacaaaagcatcctaaatggtagt

SEQ ID NO: 59376 - DNA, 667 bp, Homo sapiens
  misc_feature 9, 18, 21, 57, 129, 130, 166, 167, 356, 378, 464, 491, 499,509, 533, 549, 562, 568, 590, 592, 604, 610, 634, 645, 654: n = A,T,C or G
ctccaccgnggtggcggncgnccgggcaggtacaaatgttccactaatttctctagncaaattttttccttatgctcaaaatatctatattagactttttccgtctcttcaaaccttcaccatccattnnttattcttcactctcagctgataaggcaagcagagnnaaaaaccttttcctatttattacagtggccaaatttatcagttccactgtatttgtgctcatttccttattctttcagtataatggataaactgcctctgactttacttaagaccaacactttgttggatcccccatcttctttctcaaagattttacttctgaattatctcctctctggtctcatggncaatttctcattttttctaggnttatcccttagcatagggatatgccttaataattcttaattttaaaaaattggaagagacccggcatttgaatctaccccaccatncagctggtcccatgtttcttctctttnccttttanaacaaatttnctttaacaagctttataccttgcnccagtttatacttggnttcaagggaggtngaacanggtttgaataaggagggttaantnttgggaaaatangggggngaatttaggaaaataaggctcccnaaagggggttnaagggtcangggaaaggtcccc

SEQ ID NO: 59377 - DNA, 566 bp, Homo sapiens
  misc_feature 437, 442, 452, 487, 496, 509, 547, 550: n = A,T,C or G
tcgggttttgcatttttagtagaaatggggtttctccacgttggccaggctggtctcgagctcctgacctcaggtgatccgctcaccttggcctcctaaagtgctgggattacaggcatgagtcaccgctctgggccaaattttcttaacctgttggcagatacactttctgtgaaatttcagaaattctttttaaaaatcttgtttgagtcaacagtgcttaccctcactgcttctattttgcattatattacatgaccaagacaccacaataaaggcaaagaagtaaaagtgaattatttgagggtaataagctgatgagttatttgtgggtgttattctatttagataaccccaaatctgtatacaagtttaacagaattctagagtgttaagatcaaatattatgatttcatttcttacctggccagaacagnaaatnttatttaatnaatttttaaaaataagccacttttaataaagtctntaaaaatgngttagaactttgnaaaaatgatcagacttttttcaaagatattggccaagnttnattaaaaaaaaaaaaa

SEQ ID NO: 59378 - DNA, 256 bp, Homo sapiens
  misc_feature 37: n = A,T,C or G
acgcgggccagcgaggaagaagaaaacaaagccagtngaagaatacatacagaggttgttggcagaggaggaagaagaggaaaaaagacaggcagaaaaaaaggcgaagagcgatggaagaacaactgaaaagtgatgaggaactggcaagaaagctaagcattgatattctgatgactatcagccagttcgtctgctcagtaaacctggggaactgagaagagaatatgaagaggaaatagcaaggtggcggcag

SEQ ID NO: 59379 - DNA, 454 bp, Homo sapiens
  misc_feature 17, 23, 24, 32, 34, 36, 41, 51, 54, 56, 57, 62, 63, 64, 84,85, 133, 134, 136, 213, 249, 289, 299, 314, 386, 391, 422,427, 440: n = A,T,C or G
ctcccccgcggcggcgnggcganncggccagntncnaatgntccactaatntcntnnggggnnnagtttttccttatgctcaanntatctatattagactttttccggctcttcaaaccttcaccatccattnntnattcttcactctcagctgataaggcaagcagaataaaaaaccttttcctatttattacagtttccaaatttatcagntccactgtatttggtgctcatttccttattctttcngtataatggataaactgcctctgactttacttaagaccanacactttgtnggatcccccatcttntttctcaaagattttacttctgaattatctcctctctggtctcataatcaattttcttcattttttttctangggtnaatccccttttagccattaggggatattggnccttnaataaatttcttnattttttaaaaaaa

SEQ ID NO: 59380 - DNA, 211 bp, Homo sapiens
  misc_feature 2, 4, 42, 66, 82: n = A,T,C or G
gnanctccaccgcggtggcggccgcttcgaactcactatggnatacataaatgtgaagacacaagnagcctttgcaactggnactgtgacctttgtgccatagtgtcaaactcaggtcagatggttggccagaaggtgggaaatgagatagatcgatcctcctgcatttggagaatgaacaatgcccccaccaaaggttatgaagaagatg

SEQ ID NO: 59381 - DNA, 330 bp, Homo sapiens
  misc_feature 1, 3, 25, 26: n = A,T,C or G
nanctccaccgcggtggcggccgannccctgctcactagacggatgttcttgagggcgcactttgaaaggtcagggcctggggaattctgctgagaaatcattccatgttaataccatctctaggagctacattaagtgttgttagtgaacccatacaaggctccacgattgctggttacctctgtagttactcataaactatttaatagctctttccattttagtttactgtattcattgttgtctattcatgcagaaatcatttttttaagttttctagatttttagatttgtatcatattagtttacctgtacattagaactaaaat

SEQ ID NO: 59382 - DNA, 230 bp, Homo sapiens
  misc_feature 7: n = A,T,C or G
ccgcggnggcggccgaggtacgcggggctcttcccagccagcttgaaagggtttgcgtagccggccttgtgggcccttgaagcgctctgttaaagcgctctgtgggcggcctggccccaactcctctagtctaggcgcacgaagggagttgctcctaggtcttgtccgtgccgggttcgcttttctttccttcccgaagcctggcccttagatctactatcgcagagtct

SEQ ID NO: 59383 - DNA, 526 bp, Homo sapiens
acccacaatggaaagagatcttcctgcattgtgaaggttgttctcatcaaccaagcctgcaatgactagacattctaaagagaagagtgatggcaatggaaagaggacacatccacttgccaggtcacttctatcagttgatgacatgccatatgttatggctaggtcagctttccacaagtatgcacatgcaaaatagaacttgggaaaaaaatctttgatttggccctttaccaagtggatcagtgtgtcagagttcagttgagcaaaggtcagagtttaagttgaatctccagtcactcttttgaagatatttggtgatgccaaatttaatttaggatattatgtaggtaagtattctgtcagttcatttatagtgtgaatttacaggatttagccttagtccgagaaaaactggcccctggcccagactatacaccaggcagttctaaacatatacaattcatgttaaggaaaaaacagatttacaacttacattactcctaaataacatttatttccatgt

SEQ ID NO: 59384 - DNA, 570 bp, Homo sapiens
  misc_feature 351: n = A,T,C or G
caggtacgcgggaaggccacttaaaattgagacacagtatattaagcagtttttgtaaggtgttagaataaaacttcaataatatcagaaacagaaatgtagaggatgcatgaggaacttactggattttatgacttcatcattatgttatttattacttctgataaataggcttgcttcatctgaatgcaaagtaatatataacctggaatttttaaagttttttttgtttttggcacgagagtatcacaggaaattcaaaggtttaactgcgtaagaaacaactgcaaaaccagtggctaaaaacaataaagaattattaggtaatgatgtgggttggaaattttccanggatctgctggaccttgctttgctgctgttgccttgactcacttgtgcagcgccactctgcttggaacttccctgataagctagcagatggcttgggcattcaggaaactgagccatgagtatccaaaagcaatgagaaaggacatctaccaatgagcaatcactgcccaagcctcttcctgtcacatttagaaatctcttattatataagccaaaaca

SEQ ID NO: 59385 - DNA, 547 bp, Homo sapiens
  misc_feature 18, 324, 344, 348, 357, 419, 437, 450, 475, 511: n = A,T,C or G
tcaggtacatacaccatncatagtgcaaaaagcattgcacagtatataagatgtcctagctacaactggaccaggaaagtaagttagttatttggctctttgcttaggaagttactgtttctgtttgtttaatcaaaagacaaaatgtcaccaatatatttcaaatgaaatgtcttagagatgagtaatttggactggactcaattctcacacctcacaaggaccaataaacatctttaatccaaaaagagtgatgccttaggtatccggtttggatgtctatcaaatgatactttattttcttaggaaaaaaaaaaaggcttntgaggctagtttttcggttnttcnttgccaatntttttaaaataaaaatattgccaaccgcatgttgacaagtgctcattcgtaaccaactaatntttccaaagttttaacanaaaagtcatcggncatctaagtttatgtaaatgaatgnggtttcagggacttgaaaaacctgcttaaatcagcntaaacatttggaggtaaaataacctaattttcaaat

SEQ ID NO: 59386 - DNA, 560 bp, Homo sapiens
acttgtggatctggtgcccggtgatagtgattatgaagtaatttcagatgatattccccttcagttagtgactgacccacctcagttgactgtcaaagatatcagctgtataaatacagaatgtattgatatagaagataagagctgtgacttttttggttctgaagtcagatgtaattgtaaagcctctactccctcaatgacaaaccaatgcaaagagactttcaaaataataaaccggaagaaggactatattattctgggagagccaagttgtcaatcttgtggttctgaaatgaattttaatgttgatgcctctgatcagtccatgacttacgagtcacaaggacctgatgagaaaatggtgaaatatattgattcagaagataagagctgtggatataatggttctaaaggaaaatttaatttggaagacacttctcatcgaacgactcaccgactgcagaaagctcacaaagaagccagccttcggaaggatccaagaaatgctggcctaaaaggtaagagctgtcagtctagtgcttctgcagtggattttg

SEQ ID NO: 59387 - DNA, 523 bp, Homo sapiens
acttgcatatacattatttcatttaattattaatatgttaattgttttataagcccagtcatttagtttttacttgagttggaatgtttaaccccagtggtttattaagtgaagaaccaaactgatacatctttaagcaagtgatccattccctgatattaactgaggatgctattaaaagaaagaacagattaggaaaaagacatttcttaatacttaggttttggctttctcttttatgaattactttaaaacctaaggctacctagtttatttttatattttataatttccgttattctggatgaacctagtgggcatttaaatcaatgcattgtcataggagtaatggcatttaaactaaaggattgttttctttatagagaagcagtttaccctttggatggagtaggggacacctacaacttcttctggtattaacaacagtgatggttttttaaatccttaaaacccgactgataacataaactcatttaccaaatcccacatccaaaatgagggt

SEQ ID NO: 59388 - DNA, 548 bp, Homo sapiens
  misc_feature 36, 53: n = A,T,C or G
ccgcggtggcggccgcccgggtcaggtacctcctangttttctgaggctgagnaagctcataataaatagttaagttttctttagatctaaataaaagcattttgacagatgtcttaggtattcagtatcccatttctcttttgtagattaactggtatagttttctcctctgtctttgtttgttaaactggattcatgggaaaaataagactcctattaacttatataattcaaatttttattctattagttgttttatcttaaagtaatacaaaaagagggaatcctccctaactcattttatgaggccagcatcatcctgataccaaagcctagcagagacataacaaaaaaagagaattttagaccaatatccctaattaacaacgatgcaaaaatcctcaataaaataatggcaaaccgaatccagcagcacatcaaaaagcctatccaccatgatcaagtgggcttcatccctgggatgcaagggctggttcaacatatgcaaattaataaacataatccatcatataaacagaaccaaaga

SEQ ID NO: 59389 - DNA, 158 bp, Homo sapiens
tccaccgcggtggcggctctctcatcttgctaaggaacccctcttacagaacattcccctgctttatcagaattcaccttctgagcagggagcactcttcactcttcgtccgccaacctaaaccaagcaagctgagaacaaggctcccatccccgcgt

SEQ ID NO: 59390 - DNA, 311 bp, Homo sapiens
  misc_feature 36: n = A,T,C or G
acatacaccatcatagtgcaaaaagcattgcacagnatataagatgtcctagctacaactggaccaggaaagtaagttagttatttggctctttgcttaggaagttactgtttctgtttgtttaatcaaaagacaaaatgtcaccaatatatttcaaatgaaatgtcttagagatgagtaatttggactggactcaattctcacacctcacaaggaccaataaacatctttaatccaaaaagagtgatgccttaggtatccggtttggatgtctatcaaatgatactttattttcttaggaaaaaaaaaag

SEQ ID NO: 59391 - DNA, 400 bp, Homo sapiens
acagacccctagatgtttggcaaaacagtcatctccttttttgcatatacccatgttcctgagttctactagaggttcagtgcaagtcccataggactttaagtaactgttgcctatcatgagaggatgataccatgaaactgggtatactcaacagcaatccatcatcatgtggaaataatattaaggagaccaggcttgagcagatctaggaggtccaaattagtgtgcatgaacttttggcttgaatgtgtttctcctcgctttcaatctagccatgtggccttctgtggatttccatgtgagcatctgactgaggaataaaaatgtgcgcctttgcagaacagtgaacactcaatgtgatgtagagtgctgcacattatagccctctcaataatgt

SEQ ID NO: 59392 - DNA, 245 bp, Homo sapiens
acggagccccgggaactccccgaatgaacctgagttcgaatttaggtggaatggccacaatcccatccattcaacttttgggacttgaaatgttgcttcatttcttgttgggtccagaagccttgagttttgctaagcaaaataaacttgtgctgagcttagagccattggaacatccgttaatcagcagcccttcctttttttccaaacatgcaaatacacttatcactgctgttcatgatagc

SEQ ID NO: 59393 - DNA, 290 bp, Homo sapiens
acttaaaatcagttgttagttagctggtgagaagcaccttccctgcaggcactggcatttcaaaaaccttccctttcttcctgaaagcagcttatacctgccgtttcttatctgcacacaacagggagactgtttagagccaggggagacagccagtgagcattgctaagcttgaagattcaaaccacatttctgtgtcccggcctattgcatccctatttttaggttctccgctaaaattttatcttcttactttttatctcaaagctcaacctgagctcttcagccta

SEQ ID NO: 59394 - DNA, 238 bp, Homo sapiens
  misc_feature 237: n = A,T,C or G
actgagaaattgggtgagttttcaagaaaatccaaagccatgaatctgtcaattgtgtcataccatcagtagtggtgagttgaatggcaagacccacttagcttctgttcactcaggggtcacaaattggccatctacagggatcatttggcctgtgaatgaatttaatttagaaagaaaaaaaacttcacttaaaacttttttttttacctcaaggtgaaaggcccttttaaaaang

SEQ ID NO: 59395 - DNA, 573 bp, Homo sapiens
actgaaaaactaagctgggttccagaagtttattaatgcttgctttcaaagtgacaagggggatcacaatgtaagattacagtatttgtcatcaccttctcttcatttttctttactctctttcaataagaagttggccttttggttaggcctctccagatggtaatatactagcgtaagattccagtaagaccaacaccacactgcagtttgaggtgtgttccatggctctgccaatgttgtgttttcattttttaattactcaacagtttgctacaacgactgagatctctaccatagaaattgcttcttggattgagatattctttccagaatgtcacagaaaaagttttatattttacctgggttgatttaacttcatcggtgggaagacctgattcttctttttatagagatgtatataactcattgtgattagttccttttatccttgctaccaggaaaacaatggtaaattgaatatataaaaactatatagattataatcaataagtttatatacatgtgtataactgtcccacttttgctatatgagcccgctcatggcttcat

SEQ ID NO: 59396 - DNA, 560 bp, Homo sapiens
  misc_feature 14, 184: n = A,T,C or G
ggctctgggtgagnatcgtcgacgaaatgatggctcgctcgagcggccgcccgggcaggtacataatacgatcacagaagtgacattctgtaacattttttaggttctgttaatcagaaagaagtcacggtttttccctgacactgaaggaattacacaaatatatgaaaaacaagagacaggnaatcattgggagtcatcttagggtctttctgccacagcatttcctgccactaggagtcctttttgaacatagcctacataagaatgaaactgctgtatctattgaaatattaactaaataaatccttcatagtttaatccctttccttaatcctgccaaatagggttttacaaagcaaaattttgcctgtaactgctactctcacctctagtttggaaatatttgagctaggatttcacatcctgtattttccttttggcatattacaatattcatattgacatattggaactaccagtttctccatgttcagtatataaagaaattaaaaatgactgaggactttaatatcacctaaaacaagatgttaaaggaa

SEQ ID NO: 59397 - DNA, 478 bp, Homo sapiens
  misc_feature 1, 3, 22, 59: n = A,T,C or G
nanctccaccgcggtggccgancggccgcccgggcaggtacagagggtaactgaaaagnatatagaattaaaatttctgaattctaatgcgagcctttcactgaggaaaacaaattccacaatggcaaaacaatccacactgggtggcaaagctcttctgacctcatgccttccagttccctcacttagccattcactcaccaagtattcgttcagatcctgctaactgtgggaggcatttttgctccaaagaagggcaaagatttgttgcacacagcctctgtattcaaggagcttattctcaaagagaatttctcaagtcaaacaattctactgcattttctgtgccagaaagtgaacgagacgcagaatagctggagataattaaagttgaggcaaaaccgcaaagccagaggtttggaagttttattcttttcaagcagatgtgaaaacttctaaacactgaatttttggttgg

SEQ ID NO: 59398 - DNA, 296 bp, Homo sapiens
  misc_feature 22: n = A,T,C or G
acagttccataccaaactgagnacttgctttagggttgtctgccactacttaggaactatgtatttaggactctattagcactggagagtttgcataacaccaagctaacatcttcctttcccatctgcctgatttttttcaagtgatgcaccctgctcatccactaaggcatctgctaccacacttggcgctcactggcaattgtctgactggactttaactgactgacagtgtagtgttgtggctaagtgtctactttcaggttatagggcctgactgcttgggtttgccttcc

SEQ ID NO: 59399 - DNA, 452 bp, Homo sapiens
  misc_feature 120: n = A,T,C or G
acatgtgaagaccacccatccactgaaagtgataagtgaagctgaatcaatactagactgaatcaatactgagctgaatcaatactttcccaattttgaggaaatcttggaaaatctcanagaaatgtggtagtaattattttgaagaattggaaaactttatagctgattatgctatgtgtggaagatacaacaggattataagagagagaagacaatatccttgctgtgtccagaaggctttagccggggtgtcctactgagagatgacaaacttaaggtttttctcttcccagacattactggacaactagctatgtaattaggtcttatgccgaaaagactgaaaggaaaacatctcagatctaggaatgtgatcaagaaagaaggctggttaaagaataacatggggaaaatgaatgcagtgaaatggttcacgcacaagttctagg

SEQ ID NO: 59400 - DNA, 397 bp, Homo sapiens
caggtacgcgggtgagggagtggaaggaattaatgttgttcttggccagttggcactgttttcttgtgcctttctgggaagggaacaacaggtgagaaggtttgctttttgtttttgttagtgtataaataaataggttaacttgttttttatttgtgtggaaatgtgagagtccatagtgaagtaacttgccctaatagctcgtgattttttaaaagctcattaaatatatacacaaatttattttaagtgtcttaatgaactaagctactccaaggttgaggatattgtaggcaattactgacgtaaaactacaaatgtaaaaaccatctttggtaagtgtcacttatatcctatatcccaactgctttttctcccttttatcctaattttaaaa

SEQ ID NO: 59401 - DNA, 497 bp, Homo sapiens
actttgacagaacgagttgaaattcttaatttaaatgatgtttaattttcaatcttttattctatggttaacatttttttgcttcctgtttaagaaatctttatctatttcaaggccacaaagacattctctcatgtttccttctagaagttttgtggtttcagctcttatattttgttgttataatccatcttgaatttcacgtttgtgtgtcaggcgacataagattcaagatacacttttcaatgtggatatcaaattgatctcaaatcaaacacttttgtaaaaaccaaattggtgtgatggcattgtcataaaccaggtgactctatttgtcgaagtttgtttctggtatctctattttgtttctcttaatctaattcttcttgccaatactgtagctttatatcaaggctttgtagccaatattttaaatcctccagctatgtttttttctattgcctcagctattctagttccttggagttttcacataa

SEQ ID NO: 59402 - DNA, 323 bp, Homo sapiens
  misc_feature 10, 14, 16, 66: n = A,T,C or G
gtttgcctgntggnanctccaccgcggtggcggccgagtactttcccagttcgtttagcaagaagnaagtaaactaggattcaaagcctggaagttggtcttcagagcttaggagtcaacaaatatacagatctgattaggtcaccccccggctcacctataagttcaatgaacttattctctgggctgggcctctgtgcatgctgttccctctactaggaacatgtattttctgctctctactccctacaacccctttcctcatctttcaggtatcagcactcctgaggtccctagaatggattaaagtctttaacatatac

SEQ ID NO: 59403 - DNA, 606 bp, Homo sapiens
  misc_feature 30, 31, 37, 115: n = A,T,C or G
cctccaccgcgggtggcgtgttaaaactcnntttggnaggcaaatgtcttctcttagggaactaacagtttccctaaaaatgacaaactggtagtgaaggaagcaataactcagnaggaaagagaaggaggaagatggcttttttcagaaatgaagttgccatatagatatacagagtagatgggcaagagagagccaagggttggattaggcatgaatagaagagaagaataagatagaggataagaaagagagagaagaatatattgtggagaattagtcagttaaattggagcaaatttagaagactagctagctttggcatccaccaagactctgttttctaattgctctgacattcccttcttaatgaggaacagtcataaatgataatgaccaggtagtttcatagataattttctaatgggttctggtagctgctttagctcctcaatcaggaacagtcataaatgacaatgaccaggtagtttcatagttgattttctactgggttctggtagctgctttagaactgctaacttctgagggtttctgtgtttgaggctggttgcagaccactgcaactgttacttaccatagtatagt

SEQ ID NO: 59404 - DNA, 278 bp, Homo sapiens
  misc_feature 12, 23, 24, 38, 39, 78, 97, 103, 141: n = A,T,C or G
ttcctgcccccngggggtattcnnttggacaaacaggnnaacgtatccacctgctgcctacacgtgtgtgtatccatngctccaggacttcaatttncacttngcctaacgacacctcttcatgtgtatgatctgcatggngaaatgccattgccccacacctcacttatctcagagtatgacactgccagccattcagctgcccaagccagacacctggacctaatgcttgactttaatacgggtggccatacacatctggtggtttgtgtatttac

SEQ ID NO: 59405 - DNA, 221 bp, Homo sapiens
acccgatttctgagctctgtaaacagttccgtttgcccttcaatgtgaaggtgtctgtcagggatctttccattgaagaggacgtgttggctgccacaccaggactgcagttggaggaggacattacagactcttacctactcataagtgactttgccaaccccacggagtgctgggaaattcctgtgggccgcttgaatatgactgttcagttagttagt

SEQ ID NO: 59406 - DNA, 337 bp, Homo sapiens
  misc_feature 3, 8, 16, 17, 24, 25, 27, 34, 43, 44, 45, 46, 47, 51, 52,60, 61, 62, 63, 64, 65, 66, 69, 70, 77, 78, 79, 83, 84,85, 86, 87, 88, 89, 90, 92, 106, 107, 108, 113, 114, 115,116, 117, 118, 119, 122, 137, 142, 143, 160, 161, 166, 167: n = A,T,C or G
  misc_feature 181, 195, 220, 225, 228, 239, 246, 278, 284, 298: n = A,T,C or G
ttnccccnaccccggnncgggggnntnggggggncccgggggnnnnncccnnccccgggnnnnnnnggnnagggggnnntttnnnnnnnnancccccccccttttnnnttttnnnnnnnccnttttggggggaattnccttnnaccttggggccttgggnngaaannaattggtttttttnccattttttatttnggccattggttccattaaaggtttnggggnagnccaggtttttnccttggnacctttttttgggttttttttttttccccctnggcctnggttttccttaacnaaaaaaaccaaaccttccccttaccccccttttaaaaaa

SEQ ID NO: 59407 - DNA, 234 bp, Homo sapiens
acgcgggcactcctggatgaatcagaaaaacagccacttgagcaatttcgtgttctgtggttcagatgagaatcccagttgagaaagtaagaaaatatgtgtttattcttcagctttaaattgttatatcacaaacttccttcctccttggcaagctttcttttttgacgagaagaatattgtaataaacaacagtatgactaatagatagtcacatggttacttccagtttgc

SEQ ID NO: 59408 - DNA, 238 bp, Homo sapiens
gaacctccaccgcggtggcggccgagtacatgtcaaacagatcttgcccaacggctgaagtaacagatgaaatccaactggtttccacagagtcttatcttttctttctgtgtgtttgttcttatgcaagttctggggcatttatttggttttgaatatcttcctgctgtgtgactgtggttgaaataatgagttgcttgaatcacttgcctattttctctcttaatttttttttttt

SEQ ID NO: 59409 - DNA, 570 bp, Homo sapiens
  misc_feature 169: n = A,T,C or G
acctccaccgcggtggcggccgagtacaactacgttcacttctaaaaaaaattctgagggctttgagaatttactaagttagttacttcattgaaaatcagggaaactatctctatcttatctttgcaataaagaggcttattaatattattaaaataggaatcatggnaaaacatttggggaatgagataggaagactactatctgctttcttttaaaaggggttttgatgagaacataaatacagatttagagaactattaaaactccagctacaaaggaaatgaaaaacttgaattgcctgtattcttgtcatctccacagctatccatctcataatagccttattgcaactagacacggggtgatgaatgcagaaatgtcagacaaagagaaatgtgtaaagataaaaggctatagggtggggaaaaaaacccatacaacaaagaagtgactgcatgttgcttttgttatcattttgtttccaaaagctgcccaggtggcagctaagccagaattccataaagatagacgcaatccacaaaaggcccctgatgtttctgaaaaaaa

SEQ ID NO: 59410 - DNA, 132 bp, Homo sapiens
acaagcaggccatttttcattattcactcagtgctttagactacttaactataagttcactgcaagtcaacctatggactttagaagaaaaatactaaattacctccacaaaacacttctccataacttatc

SEQ ID NO: 59411 - DNA, 176 bp, Homo sapiens
accatttaggccctgcactaaagtgcctttattgaattatacttgggctttgtgtccaatttgactgaacctgggatataactgtgcgactcttgtcaccggagatatggggagatgttgttgtcaatggatcctctttatgaagacacaccagagagatgcctattgggcatcag

SEQ ID NO: 59412 - DNA, 603 bp, Homo sapiens
  misc_feature 522, 570: n = A,T,C or G
acattttacttctactaatgcacctgtttttgcatcttttttaaagtagtcatatcactctactgatacacattgaacttatcacttatgaaaactttgtttttagaaaaatactaccaaatcaggtctttaccattttgtattttcctaactgattttttatttagggatttgtatttgtgaataaaatttatggattcatatttaagtaaatttaggacttcacatttccccatcatattttattttattaaccttggtccttattcctaccaatacacaatgatacatcttctaagcttgacaagcctggacgaattttgtgtgcctgtaactgtcggccttcgtatatgtcttacgcatgtatatctttacaaaatgtagtcaagtggtttctgtcatctctcacagagtaagtagtcatcttgaaaggatcccaagtgaaaagcactgtctctagaagagttttggtcctgtcccaccaaaccaattaagcaaggtcagacttcatgcatgaacttnttcaggttgggtttctctggaggatagttattggccagttgggggtangtatttggaatgtgaaatcaaaggggcccttta

SEQ ID NO: 59413 - DNA, 259 bp, Homo sapiens
accccaagggcctcaggtgacctagaaaaaagcaggatttggatgttgcagatgtcacaggacaactgatatctcattcttctgccagtgtatgttcaaatctcaggagtgaaaggaacttgaaagttcatccatgtctcctcctctacaccaaaatattagccattaagaaaagattagcattccatggtgtcctcagagatctctgaagtggattccatcaactcccttagtaatgcattccaaaggctcatctcac

SEQ ID NO: 59414 - DNA, 292 bp, Homo sapiens
  misc_feature 11: n = A,T,C or G
acatgtgcggnacaaaaaaccaaacaccgcatgttctcactcataggtgggaattgaaccatgagaacacatggacacaggaaggggaattcaatttcttttctctttggccagggaccttgtggagcttctgaggctaccatctgcactgtggttcctgtctttgttttctctattccctggatgcttcttctacccacctctaaggtagctcctgggtgaccttggctctccagcttttttgttctcctgactgccagggtcaaagtgaagccctggtggctgctctgcg

SEQ ID NO: 59415 - DNA, 309 bp, Homo sapiens
  misc_feature 22: n = A,T,C or G
actgttgcctttgaccaagggnatatgaatagtttttgctggaaataataatagataggtctgtgaaattttgccatcctttagtgtcaaacactgaaggaaatgatatagagatatttatcacaataaatatcattggcaaggagtcaatataataaatatttaattcggtttattttaatcttctaacaacaaccatatgaatttcaatcaaactttgaaagataacgagtgggagaatttctgcttctgggacgatggagcagagatatttttccttattccaaccattaggtaacctgggtatta

SEQ ID NO: 59416 - DNA, 328 bp, Homo sapiens
acctccttgactttaatttttctgtcttaattctatttgtatacaatgtttgtggtgtctgattctctgtctcgtattgctgaaactcatggccttgaatttctgggtcactcttaaaaaataggcataacttgattactaatgaaaaagtgactcattttcttccaggcaaaggctgacactgactgtcacagtttgtgacagaagcagactctctaattaggagacatcacctattcttttctaaattttataagaattgatgatagcatcatgagatggggaagtgagtaagataagcgtttatgcttgtagagaggatgcctta

SEQ ID NO: 59417 - DNA, 426 bp, Homo sapiens
  misc_feature 76, 215, 264: n = A,T,C or G
caggtacctctaaacacacatgtgtgttgggtgggggagcaagatgattagttaaaacattgaagttgtcctaacntattagagctgaattttatgtgctttctttgtaagttatgcctatgttgctagcaagatacttgggagtcaccttcatgctttcccttctaccatctcatatctatcataaagccccatagattcttcctttaaatcanctgaaagcttctcttattctctatgtctactgctgtaactatagttcangccgttgttatcacatgaagagagaatgtagcgatcctccctggatttaggttttgttcctttcactaaatttctgccatgcccagacataagttatgtcttcctaaaacatcagtgtcatgataacattttggcccttgaatgccacccccaaaattggga

SEQ ID NO: 59418 - DNA, 477 bp, Homo sapiens
  misc_feature 4, 319, 373, 398, 402, 407, 416, 436, 440: n = A,T,C or G
ccgncggtggcggccgcccggcaggtacgcgggggttacgtaaaatccagaacctggcaatgcagggaagcaaaaaacaaaaatcatgctgaacaggtaaaaatgcaacattttttctttacaagggaaaaatattcttgctctttgttgttgttgtttttttaattgtttgttttgtctgtttgacgagaagagtttcatggggtctaactgaattcccaaatcccccgtagctatcatcccttggaattaaaattttatatctcaaagaaaaatgtctgcattttcctctggtcctcctgtctcttactcctctcanagcatccaaccagggaagatgaagcccagttgagaaaggtttaggcaacaaganaagcctaaaatcatccttaggccanaaanaaatntccccttanatttaggatcattaaattanaaantttttttccttccaaatgggtagcaatcctttgggtt

SEQ ID NO: 59419 - DNA, 460 bp, Homo sapiens
  misc_feature 31: n = A,T,C or G
acagcggtcaatcacaggcctctacctttanagagataatctgtttgacgaagcttagcacatgacagaagcagagagtgcctccttcttacaggcaggaagacctctcttcttaatctttaggactcctgttcttcattgaaattaagtccatctggcatgatctcccttgacttctttcctctctttttgaacatgtgttgatcctcagcccagcagattgtaaactcctcaagggcaggtgccctgttttaatccttgtctgtgtccacataatcaggcataaaaacaaggggaggggaagaatagagaggaagaaggagggagggacagagagaaaaagggaaagggagataacgtaaatagagaaaaatgcaacaacataatggagaaacacacagaaagaaaatcagaaacagaaccccaaggcataaaaaaaaatccctgttatgtcccgcgt

SEQ ID NO: 59420 - DNA, 547 bp, Homo sapiens
acaggtaggttaaaatagatgacacaattatctaaatggaaagaggttgggcatggagacaaaagccatataatcaaaagcaaaaatacattaataaagatagtgcatggggcagtggccaatccgagaagaagagagggtgcattaaggcgagtttaggagtataaaattagagtagaagaaaagtattgaatgtttaaattctggttgattcaaaaagcaaggggaggcaattatagattcttgagaataaattagttgatgattcatatatcaagccaggttgacaagcaaatcgctagccatggaggccatccaattttgggtggcattcaggacaaatgttatcatgacactgatgttttaggaagacataacttatgtctggcatggcagaaattagtgaaggaacaaaactaaatcagggagatcgctacattctctctcatgtgataacaacggcctgaactatagttacagcagtagacatagagaataagagaagctttcagctgatttaaaggaagaatctatggggctttatgat

SEQ ID NO: 59421 - DNA, 524 bp, Homo sapiens
  misc_feature 41, 464: n = A,T,C or G
tcaggtacatggtctcaaaactagttagtgtttgagcaagnaatctgaacccaggtcagtcacacatgatagccataccattgacaatagcatggagaatactgatgacactataaggtctagttcagcagattaagacagccacaagctatagcttataatagtgcaatgaaagaggagcatcattgtaatccgagtgggcagaaaaattagttgagagaatatagcttatttcacaagagagaaaatgaaagtatatatggattggaggggatgggtcggaaagattctagagtgaaggcagcacaaaagagaagcttgggggaaatttagtgcctccttctaaggatattcattagtccccctcttgtcttgaatataaacacttaagattttttcaatgtaagaaaaatgcaatgaaataatagctgcaaatacccactactaacaattgcttggccttnttatatagacctcccgaggttctcatcttttacatttcaggagtagaatcagttaaaaac

SEQ ID NO: 59422 - DNA, 505 bp, Homo sapiens
  misc_feature 32, 36, 46, 53, 54, 56, 62, 76, 86, 93, 110, 119, 129, 132,150, 152, 155, 162, 166, 173, 180, 185, 193, 209, 218, 229,235, 242, 244, 250, 264, 282, 290, 303, 349, 368, 404, 432,464: n = A,T,C or G
ccacgcgccgggtggtcggcgcgcccgggtcnaggnttacgaccgnctttganntncatttncccgtctaggcctnctgactttgnatgcttnctgacaaatattggtgnacccatggnaaaaacgtcnagnctctttacaaaagaatgntnagnccctttnagtnccctagnactggtnctttnatttgggnagggtaaagaagcacnactttgggnaaacaaaggtncttagngcccctnanatgggnaaagtttggaaagnaaaaaaagttaaagaagnattttttnctttaaaaaggtncaaaggtttcaacccaaattttcttaaacaacaacttgcaaacctnccctaacaaattcattatnggggacccccagaaacaaaaacttggaaattgggcncttctggggagacccgttatttttactncactttagtttcctggccctggtggcaacctngaaaaaatgcccctggaaaaggggggcattcttggctttat

SEQ ID NO: 59423 - DNA, 368 bp, Homo sapiens
  misc_feature 352: n = A,T,C or G
acgtatttctatctctaagaaatgagattattctcttccgtataaatataaaaggtaaatgtcaaaatctttatctttgttagctatgaagttgaaataataaatgaaattcaaagaacctgctagggatagacgttggggaaggaaaaactgaggaattagaaaaagctacaaacataagatcagattctaacctatcagcagcgataacatttttattctccagagagaatgggttacatttctctgaaactatttgttgtattaaaatctcagaatattaccattgaaagggctcctagagatcatctagaccaatggttcttaactgatgtgaggttatgagatgctntgtgaatatggtgggg

SEQ ID NO: 59424 - DNA, 126 bp, Homo sapiens
  misc_feature 11, 13, 20, 28, 32, 39, 43, 62, 67, 108: n = A,T,C or G
ccggtggcggnancccccgnattttttnttgnacggggnaaanccggcgaaacgtggcgagnaaagnaagggaaagaaaagcgaaggtaggctctagaaactagtggnatcccccgggctgcagga

SEQ ID NO: 59425 - DNA, 284 bp, Homo sapiens
acacttaaaatccaacatttccaaaattaaattcaacatctttaactttgccatagcttcacatcaaaccctgtgcacctgcttctcctttccaaatatcctggtttggtctgtggaaccacaagtcaccaggtagtttggattttttttattactatgtatacacatcaacatgactgtctctttacattttacatctgacttggaagctcatacatttcttaagcgcggatgaatttttatttatgacaaactaatttccaaaccattgagcttggtcgtag

SEQ ID NO: 59426 - DNA, 391 bp, Homo sapiens
  misc_feature 391: n = A,T,C or G
actccaccgcggtggcggccgagtacattattacttgttgtgattagagtccaggttattcaatcccaacttccagtattcaccaggtttgataacccagctgctgtaagcccaactcctacaaggcaactaacttttaactacctccttcctgtgaatgcttggttgttattaaatccttcagagctctgctgtgattggaccatgggaacaataccacttatagagtcattactagatattcgaaatctggccacatttactttcttttgttttctggggatgttgggagtattcagtatcagatactctggtgattcctccaagactgttttaatggcgctttgtttaatggcattaccatttattcctgcatcgaaccttttttttn

SEQ ID NO: 59427 - DNA, 465 bp, Homo sapiens
acgcgggagcactttggtgcatctttgctttttcttccttttcctctatggacaatcagtcagtgactcctgcagattctttcttggatttatacctttctttttatccatatcactcttcatgcactgatctgacaaacatttatcaaatgtctgctatgacctaggagcagtagggcccagagaggatttcacaataagcgactaattgtttttctttcctcaagtctcacttctctccactcttcctgaataaactgctgctataccacaatgccttttcaattatcactttcctatacaagagtctacatgactttctatttccaaagggtcaagtccctaaattctgcctagattatttctaatgtgttctagtaaatgtctcaccctacctagccaactttattccttgccattgattttcttcaaggatcctcacatgttgaaaaacaaattcttgcc

SEQ ID NO: 59428 - DNA, 378 bp, Homo sapiens
acacgtgaaccatcattaatgtcttctgaactgccctccttgcttctagaacagcattccccttccttttgaaagcctctccaatccccttttgcaccttgttttcctgctggaaggtttgaatattagtaacatcttgtctggacataggggttgacatcagacccaagctgaaccagttcattccagggtctttccagaatggactaaaggaagagaggtaatcccttttggtgatgcgtgaagctcagagataagaagtgaggagcagtaaactgacctgtttctgaccctctaaacaaggcagtctgaacgaaagaaactggaactccagagagaagacttgagagactgcagagcatcccggtcatgctcatt

SEQ ID NO: 59429 - DNA, 586 bp, Homo sapiens
  misc_feature 533: n = A,T,C or G
tacagctttaattgcaaattttgtgcaattattgcattttatttcttaaaataaatgatatatctattgcatatgcaacgaagactgttgcattgcctctgtgtatttgcaattttcatacaaaagtagatttcacccaaatgtaagtgtttttctgtataagagcctatgatctgtgatttgtttttaaaggcctaaaaaagggctgaactggggactttggaatgcaattgctaacttagttaagctctaaagcactgccactctgtggtaactctgaggcatagcagccccctctatatttctattgacaagatgccccagaaagttagttcaaaattcccttccactgttatttagaaagctgaaatatttctgttcagtgaaagagtccagctactctatacttcatcgcttgcacctctctttctatccagttttccaaatctgaagtctagccttagggttctcttccttgagataaccccgagtcaataggaaagtgttaagtctctggcacttatttgtgaagngggccttaagcctcattacttattcctctcttttcatcggccaaaaaaaaaaa

SEQ ID NO: 59430 - DNA, 335 bp, Homo sapiens
acaaaaaagaggttggaaagaggggtcagtcagtttttgcagatcttgtaaacaaataaaaaattagcattttattccaagttgtagcaggaaaggactgcaggatttttagcacagatgtgccatgataccatttatgctttaggaaagattatcaagagcataataaattattgggagcaagagtggaaggggcctgctgggaaggcctaggagtttcagataagagagcagggtttcagcagtgcagagggtgagaaatcatcagctttggggatacatatcaggggttatgccatcctgatttttggatgatgggaggtggataatgggag

SEQ ID NO: 59431 - DNA, 525 bp, Homo sapiens
acaccagatatactcttagacattcgctatatatgatttgattttaaatccaccaccatctgagactggttttatttaagaggaggaaatcaaatctcagagggagtgacttatcaaaggccatgcagcaagttagtcaatgtgagagatggggtttgaacatgtgtcctctttcctcagcccaggattttccaagataacatctacttttcctgttaacagcagggttagctgcacatagaataattttttttgcatgcatgcttcttactatagacattgatcgttcttcaaagtactacaatggatgtaagtttgccagaagcaagatcccaaggaagtttaagctgcttggggatgacccaaaagaggaagagaaactggagtctcatttgcaaaacctgtccactcttatggcaccaacatataagaaacttgcacctgatgcatataataatcagattgaatatgaacacagagcaccagagtgccgtctgggtctgaaggaaggccgcccattctcag

SEQ ID NO: 59432 - DNA, 348 bp, Homo sapiens
acttgtctctctttccaatatagttgacactgctcatgcttctggtctgctgttaacactctagcctgactctgctacttcagttggcaaagaaatgggaagagcctggttattcctacccctgcatctcttgagccatgaagtctggctgactgcacttctagtctctgactatcccttgtcaaaatgcccccttatcttctttgcacctcttttatagaacttgaagtgactggagaatggactttatagcattttctttttccccaccctgatttattctgcctctggtgattgtgaaccacccttttccttctttctttaatcaaaaataaaagttctcattca

SEQ ID NO: 59433 - DNA, 318 bp, Homo sapiens
  misc_feature 1: n = A,T,C or G
nctccaccgcggtggccggccgcccgggcaggtacgcgggttcctgcaattgctgtgctttccagacacaatatgtggccatcttatccactattcagacatgaggcactcttaaactaagatgcagatctgattgcaacaccaataaaatttcaagagtagccaacgacataaagattaatggtatttactgactagaagaaagggaatttttcacgggttgacaaaaccattcagagcaaaactgtgccattccaacaaagaaaaggataggagaaaatgaagccaaagaaaagagtgagtgagaacgaaaaaaaa

SEQ ID NO: 59434 - DNA, 514 bp, Homo sapiens
  misc_feature 20, 173: n = A,T,C or G
tccaccgcggtggcggccgnggtactataactttgtgttcctattgtgctcattaaaatttttattttcaaagtaataaatgtatacagtttttacaaatcaaagaggattttgcttgtagtgatggcagaataacttactgaaaatcagccttcccacacagaaactctggnaaaacatatataaaacatttatttgaagacactggagaaataccaaggcaccaaggtaaagagggccaagatcttgaaatgaaggagtgagtccaatgtttaggattgctttttctctaaaggcatttcctaatttgtaacctattgccaagaagctgagtaaagtttcttgatatctcatggggctaggaagagaaaaagcatagttctgagcccaaaaaaacagaatagccctggtaaacagcaaccctttcagacgggacacacaagggctacaccctcaaaggtaaaatggaaacagaccacacaatttccaatcagctcagttcctgcatttttat

SEQ ID NO: 59435 - DNA, 558 bp, Homo sapiens
actgaatcattgagtttcaaatttcccagttctttgtcttaaagagctatttggcccataggcccagttgggggcacaggtgagcagaagctgaggctacccaatgggacaaggcagacattggggagcagtcaattcccaagccacccatagagctacaggtaaattgctgtcctcacctggagaatgagtgcttgcctcagccttgagaagaagctgtcattacacacagaatggaactaatgaaactttctattctgagctccccaaatcttccttagcatgggaatttttctgcaggtgcagtgtctgatgcagagacactcctctccccaggtgtcaaaagaatcctttgtgcttcaagatgcagggagtgattgatgagaagcccgtgcacagaaaagaaatcactcaactctttcaacagaaattattatctgctgagtgtcaaagatgacagcaggctttatgaaattatggagcatatatatataaaatgcatgtatgtgtgtatatatatgtatacagacatgcatacacacagaagtattggatacc

SEQ ID NO: 59436 - DNA, 310 bp, Homo sapiens
  misc_feature 1: n = A,T,C or G
nactccaccgcggtggcggccgagtacattgcagaaggctttggggatcccccagaagcctaaacgttatcttacctaaaaatcatctacttttcactggcaaatactttcaaagaattaaacccacttacctacttttttgtaaaaactatttggttaatttaaatgtggggatgattaaaaaaaaagttgtctttttttcttcttgctgatattgagccatagagccaagaagattgctaatttcgaagtgtgcttggtcgggctttctactgatgatgttgctattgattcaaacagtcacaagtct

SEQ ID NO: 59437 - DNA, 372 bp, Homo sapiens
  misc_feature 1, 8, 13: n = A,T,C or G
ncatgcantcaangatggtggttttacccatgtgccatgcttcctgcattgtttaaatatggtcattcaggactttttctgcgagcacaaaagcattgagaatatgttagtggctgccaggaaaacttgtcatcattttagtcattcggtcaaggcccgtcagatactgcaagagttccaaaatgatcaccaacttccatggaagaatttgaagcaggacgaaactggccattggatttctactttttatatgttaaaatggctcttggagcattgctactcagttcaccatagtcttggtagagccagtggagttgtgctcacctcccttcagtggactctaatgacttatgtttgtgatattcttaagcc

SEQ ID NO: 59438 - DNA, 291 bp, Homo sapiens
tcaggtacatgttataatttactccatttttcatgacagtggttctggagactggcaacagaggaagctttgacactgtctgcgtaacataactgaggcctctcctctgaagccctcatatcttttaaagatctatactgttttgaatacaaatccaacatcatcttcatctaaagaaatttatagcaaacaaagaaagttcctctaaagagaagatgttgaggtgtgacctagggactagtatttttaccaatgtcatttttcattatagtttagtgacctaatccagac

SEQ ID NO: 59439 - DNA, 570 bp, Homo sapiens
ccgcggtggcggccgagtactaaggcctattacttcctttattgaaaaatcccaatttttagactgtatagttagtgtgaaatacaccacaaaactcattttgcctgtttacaaaataatgttagattcataagttgtgtgccgtaagtaattaagtctaattataggtaggtttcttaatgatttttattttcaggcttagatttaattcttcattgatttttccaacttccatcttttctctatgcagatgaatcctatgtgtatgaaagaggtctaaatcaaaaaagtattaaataaatttctctttttgtttgtttgtattttttgtttttgagatgaggtcccactcagtcacccaggctggagtgcagtggggcgatctcagttcactgtaacctctacctcccaggctcaagcaatcctctcacttcagcctccttagtaactgggaccacaggcccatgccaccatgcctggctcatttttttatatttttggtagaggacagggttttaccatgttgcccaggatggcctcgaacacctgagctcaagcattctgcctgcc

SEQ ID NO: 59440 - DNA, 199 bp, Homo sapiens
acatccaaaatcatttcagcatataacctgtaaagactgcatcatcccagctactttcctgctgacttccacttgggtttactcaatgggtgacactcacaggacataagagattagaaagagggataaggatttttatatatctgctccctccttacttaaagccatggttttagcagaggcccaaggtcccccgcgt

SEQ ID NO: 59441 - DNA, 325 bp, Homo sapiens
  misc_feature 2, 3: n = A,T,C or G
gnnctccaccgcggtggcggccgagtacacaagcacacatctcttatgtaatggccctaagtcttgggcaaactccatcttatccatcaaagagaaatataattattcaacacttatttcattcccaagtggacacttacctcagtggtcactaccttaaagagaaatctgagaagagccaaagtggcacttcaccttgctgtggcccaaggatgacttttgttgattatacaacccgctgctctcatttaattgagaaaccaggagggctgaggtgtgaaggaaatccccctaacatcctgaaaaaggtcacactacccatcac

SEQ ID NO: 59442 - DNA, 559 bp, Homo sapiens
accagtcgcttttctggggcgtgctagctagcaaaagtattttcacaggtctctgagggaatgcttatgggtttggggaaataaccctctaatgtcaaagacagtatttatttttgtttcctttgtatttttgtagaagtcttagctatttcatcccactcatctcttctcacttcactattctgttcattcattcaggttttactttctgttaggtgataggcagtatacatcacgatattatccgtccccttccccgctcgccttccctttagtttgttcattcaccttgcccaattatacattaataatacattaatgattaacaatactttgaaaataatctgaaaatatttcaaaacttatttttttccttttctgatggtaattcaccttttttctgttatatttgaagcgagttaattaaatcatgtttgtagaaatgcttcatgcagttcgtcccacaaagtcgatgtaagataaatgacaatttctgccatttctttatagcatagaggtaattccattaaataaagatcaaaaaacttaatactgtagt

SEQ ID NO: 59443 - DNA, 452 bp, Homo sapiens
  misc_feature 442: n = A,T,C or G
gcccgggcaggtacattattacttgttgtgattagagtccaggttattcaatcccaacttccagtattcaccaggtttgataacccagctgctgtaagcccaactcctacaaggcaactaacttttaactacctccttcctgtgaatgcttggttgttattaaatccttcagagccctgctgtgattggaccatgggaacaataccacttatagagtcattactagatattcgaaatctggccacatttactttcttttgttttctggggatgttgggagtattcagtatcagatactctggtgattcctccaagactgttttaatggcgctttgtttaatggcattaccatttattcctgcatcgaacctttttttttcagttgggatttgtttggttgccgagcgagtattatatgttccccagcatggggggttctgtntttttgggag

SEQ ID NO: 59444 - DNA, 584 bp, Homo sapiens
  misc_feature 1, 5, 29, 391, 526, 534, 544, 547, 556: n = A,T,C or G
ncagnataaaggggaagttgctcacaagnaaggtggcaggctgagtaggtccccagcttaacagaagagatacaactgaaataagttaaagaagaatagattctcttagcagttggtatgtgaattccatttagagaaatgagtcctgcctttacttttaagctcatatcccaaaccccatagaaatgcactgaacgaggcaagggaagagctttgtggttgtgtgacacggaattggcatggtgctggaatgctattaaatgagaaaggtgaatcctttccttatgtcactttgtcccaaactatacttcctagtttatcatcttcatcttttgtgatctgatctctggctggatccttagcttcaacatctaccacttatatcccttancttctattgctgaagccacgctgaagtatttgtcattacttaaatacctggtcctgttttatatctctttgatatatgctacaatgctgtctcaatgctctctaactgaaatcctacttgttcttcaaatttcantataaatnttgtttcctntanggtattttncctgaatctgattttgatacctttttgc

SEQ ID NO: 59445 - DNA, 381 bp, Homo sapiens
  misc_feature 34: n = A,T,C or G
acagaaggattgatcagtcacaaactgaacaggnaatatgagaagcataacttacatcaaaatcacctaatttatagctcttatcttccaggtaaatatggtcttccttccaaagatttatttctttgacaggtttttgaagctcatctgctgctgcctgaaaagagtcattggaatcagaactttcttcaggactataagaattactgctcttatcttccagactggcatgctcctcttccaaaatgtgtggttgttttatcactgactgaagagggatatttgaaacataaattatttcagaatcactgggcacatagcccttatcatccagacaaacatgttcctccctcaaaagattatttctttattcgcccctgg

SEQ ID NO: 59446 - DNA, 288 bp, Homo sapiens
  misc_feature 5, 11, 250: n = A,T,C or G
acagnaccagnattaatgaattgtgaggaagaaaggaatactgtttatataagcatatatggctatttctgcttatttcgtatttctgctatattatggtgaggcattaagtttgtttttctttggttggttggttggttggttggttggttggttggttgagtggttggaattagagatgggttcataatctggctccagattaagctgtgtgactttgggaagttacttaacctctctgagcccttantttccttatttgataagtggaaacgatacatctcttgt

SEQ ID NO: 59447 - DNA, 415 bp, Homo sapiens
  misc_feature 27, 63: n = A,T,C or G
actcacgtagtgataaatgagattacntcaggaagaagaacgcattccctttactgcctgggngaaaatgtatacggataaccctctgtgccagtgctgtctttttctggatcctattgatcatcgcttcagttattgggatcattgtctataggctctcggtgttcattgtattttctgcaaaacttcccaagaacattaatggaacagacccaatccagaaatacctgactccacagacagccacgtccatcacggcctccatcatcagctttataattatcatgattctgaacaccatatatgaaaaagtggcaattatgattactaacttcgaactcccaaggacccagactgattatgagaacagcctcaccatgaagatgttcttatttcagtttgtcaactactactc

SEQ ID NO: 59448 - DNA, 466 bp, Homo sapiens
  misc_feature 14, 17, 284, 299, 313, 342, 346, 364, 365, 368, 372, 379,380, 381, 394, 416, 424, 428, 443, 445, 448: n = A,T,C or G
gcggtggcggccgngtncagttttagaaaactcctgtttttcttacatggcactacatttagtatcacaatctaattgtgcaagccagataggtaggagtcatctttattcctgttatttaatttttctcatctactatatccagttcatcacatcaacagcgcctgttgtttctacctcctaaatatttctttagtctaactactacttgtccctagtgccaccaccatctatcagctggaatattgctatagctgccttacaggtttcccttctttcctgtnctcttctagtttttngaatttagtcagcncgaaatttaaaacccaaaaaaaatgggtntttncccggttaaaaccttttnngantttngggggcnnnaaaaaaaaaaacntttttttccaaaggggtaaaanccctcccnggangggggttttttaaangnttnttggcccccccccttttt

SEQ ID NO: 59449 - DNA, 559 bp, Homo sapiens
  misc_feature 498: n = A,T,C or G
acatacactaaagcataaagtttgatctgtatttgggagatcattctggaggatgaaatcaagagcgcaaaagaatagaggttgtagggtaaaggactgtgataagaagagtgaaatataactggtaaattttctagcggtagaaattaagatgcagaatgtggccacctgagaagttagataagtgaaaagaattgctaaagaatttaagaatttatgatatacagaatatatgatatgtggtgaatagtttataagcatagccatttttgttacctcccattgtggcaaaaatgactgggtgtcagtggatggtgaacaaaatggttgaaaaatgtgggatagatgaccagaggaggatgagttattaaaggaagctttcagaagaatgggctggaaattggcaacggggatccaggagaatgctggatctgataaatggggtgtggagaaaatgagaatccttttagaaggatgtgaggaaggcgatattatcanaaatatgtcaagaagtggacagagaattttagcagatggttacacctgtagagggatttct

SEQ ID NO: 59450 - DNA, 236 bp, Homo sapiens
  misc_feature 2, 90: n = A,T,C or G
anctccaccgcggtggcggccgcagaactctgcgatagtagatctaagggccaggcttcgggaaggaaagaaaagcgaacccggcacggnacaagacctaggagcaactcccttcgtgcgcctagactagaggagttggggccaggccgcccacagagcgctttaacagagcgcttcaagggcccacaaggccggctacgcaaaccctttcaagctggctgggaagagccccgcgt

SEQ ID NO: 59451 - DNA, 282 bp, Homo sapiens
acagctccaatagctgttatccactgagtgaatgttgagtcccttggtgcatggagttgacatctattcatttttctagcagtataatgaatccaaatgatccttcataaaataattctcctaggctttcagtcactggaaagcactcatttaaagtatattaaaagtatgtgtgtcctatgtcctcaagaagttatagtcactgtatttgtttatctgccatttcctctgtgcctttgtagagaacagggaaaggagttctgatcacattatcagatgata

SEQ ID NO: 59452 - DNA, 601 bp, Homo sapiens
  misc_feature 598: n = A,T,C or G
acgcggggaagttaaataactgtctttgttttagctactctattttaatgtagtttattatatagaaatagctaacaacccatgaagttttaaaaaagagtatacctactgcagtagatttaagaaaaataaaattatagtccttataaagagataaaacacagctaacagaaacataaaaacagaggatcaagtgtatcacttatttcagaaagtaataaataggctaaatcctgttcctcaggtaaaaggaaaatactgtcattcagttcaaaataaatttcagccatatgtggttaacaacatttctaaaatgatatgatagagaaatgtcaataaaagtgtgggcagataagtattagcaaatagaagcaaaaaaaagaaaggcagtgattacattattataaaattaaagactcaaaagcttcaaaggtattaatggtctatttatttttaaatagataaggggttaagtcaataatacataacaattataaatcattacttagtatcataaaaatatgtaaacattatgagttcaagagaaaaatgacaaatatttacaaattaaatttgaattaagattgatttattttanatt

SEQ ID NO: 59453 - DNA, 488 bp, Homo sapiens
acttgtctctctttccaatatagttgacactgctcatgcttctggtctgctgttaacactctagcctgactctgctacttcagttggcaaagaaatgggaagagcctggttattcctacccctgcatctcttgagccatgaagtctggctgactgcacttctagtctctgactatcccttgtcaaaatgcccccttatcttctttgcacctcttttatagaacttgaagtgactggagaatggactttatagcattttctttttccccaccctgatttattctgcctctggtgattgtgaaccacccttttccttctttctttaatcaaaaataaaagttctcattcatacagactcatgcaaaacaacaacaacaaacaactgggagatatcactgaccctacatatctaatcttcgtttgtagctgaaggaacccacaatgcatctcaatcctggcaaaaattttacaaggtaggtgctattgttc

SEQ ID NO: 59454 - DNA, 311 bp, Homo sapiens
acttaatatgttttgttaaagttttaagagtctgttcagaaaagagatgaaaaatatcaaagacaatagaaataaaattatgagactatacccttacactgaaattctggactcagtatttatatgtgtgtgtgtgtgtatatatatacacacacatatatatatacacatatacacatacatatatatgtaattgaaattattaaatctttcattcattcattcaacaagtatttattgtccgccatgtggtagacactgtctcaggtgatggacatatgatggtgacccacacggctcctgtcttcatg

SEQ ID NO: 59455 - DNA, 560 bp, Homo sapiens
  misc_feature 21, 36, 47, 58: n = A,T,C or G
ctccaccgcggtggcggccgnggtacaataacaaanataattgaagnactgcactggnagggagcctaacagtataataaatacttggctgtgattcacatgccaatcagaaactgagacacgacgagttctgaagcagatcttgtctgatttgaacagtggccttattatttatttatttcaaatttggcttaaagggctacatcagagttaaaagtttttttgagggaggaactaattagactctgtgaatttaatgtaagctctcaccatgtcttaaatttactttgctgctttctctgtaataaaaatattgcttttataatttttaatagcagaaagtaataaaaatcaaagcaaccaaattgttgaagttttccactcacagaataggctgccaacattttctaataatggaatcttactagttgtgtgcccttgagctcagttttatctatatttcatgtatgctgctgtaaaacctgaacaatagcacctaccttgtaaaatttttgccaggattgagatgcattgtgggttccttcagctacaaacgaaga

SEQ ID NO: 59456 - DNA, 475 bp, Homo sapiens
  misc_feature 3, 6, 16, 22, 25, 32, 36, 47, 49, 52, 60, 77, 108, 124, 129,130, 131, 132, 143, 157, 162, 168, 173, 215, 220, 246, 252,254, 265, 271, 273, 311, 336, 341, 373, 375, 384, 399, 400,402, 405, 427, 428, 436, 441, 467: n = A,T,C or G
ctnctncttggggggncctttnctnatttttncggnaccccggccgnantgnaattgttnggggccttctttggggnaaaagggccggttggaagcccccaccttttnccttttttcccccggncccgnnnnaaaaaattttnggggcccccggaanggaanaaaaancccgnccggaagggggctttaccgaaaacccgtttctttcccttggnaaagnaatggccaaaaaaaccccaagccggnttgggncngggccccggcnttcttnanaaaaacttaaaggttggggaattcccccccccgggggnccttggcaaagggaaaattttcccnaattnttttccaaaaggcctttttatttcggaatttnanccccggttncggaaaacccttttnnanagnggggggggggggggcccccccnnggggttanccccncaaaactcttttttttttggggtttnccccccct

SEQ ID NO: 59457 - DNA, 406 bp, Homo sapiens
  misc_feature 7, 376: n = A,T,C or G
accaganataagatttcagtttccacagctgactggagtgcttacccttgctttttttattcataattgtatcatcacactcttgaagaacaacaagaaacaagaaaacaatgtgagggacttgtgcattgcttatatgctggtgacattaacttatctctatattggagtcctggtttttgcttcatttccttcaccaccattatccaaagattgtattgagcagaattttttagacaacttccctagcagtgacaccctgtccttcattgcaaggatattcctgctgttccagatgatgactgtatacccactcttaggctacctggctcgtgtccagcttttgggccatatctttcggtgacatttatcctancattttccatgtgctgattcttaatctaaa

SEQ ID NO: 59458 - DNA, 561 bp, Homo sapiens
  misc_feature 15: n = A,T,C or G
cgcggtggcggccgngtactgattggtagtcagaatgatttggtggatgaagagaaagaaaggagcaaccgtggggccacagcagtagcagaaacattcaaaaatgaaaaacatcaaaaataacaagatgtgacagaagccacttaggcagcaaacataaatgttgcagtgaaaaaagaagctagccttctagctgaaaaacgagtattccccaatggactccagaagaaacttgattcatcgctgcaaaggaaagaacaaccttaaaacttttaacagataaaacttacagaaaactatgatatagaattcatatagtctattctgttgtgtctaaatctgtaggcattgtgtttgttgttctttaggacgtatttatttaacttgcacattttttcagattcttatttctactaccaacaactaagtaattgggaaataattctgtattttcagtttctgagtaaaaccagtctgaaataggataaaagccaccaaatattttcttttttttccagaatttgttttgccattttttagtgctatcatcattcctaacaa

SEQ ID NO: 59459 - DNA, 358 bp, Homo sapiens
ccaccgcggtggcggccgaggtaccttttgaagtgcttcaaaaaagaggaaccgtcttgagatatttcagatatacagaagatgattagaataatagaagtgtttaacagtcccccaggagtgggggcaccttaaaattctgtccttatcatgaactaaaaaattcataagaaattgaatgtattctggttactctttcagggcttgcaaaaattcttaaaggcagcagcttgcaagcaaggctcctggcaacattctactgatttcttaagtgttcaattctgaaaaaaaaatgcaaatgtgaaatacatcttctgatcccggctgctgaaacacagtagttatcattagcgctgat

SEQ ID NO: 59460 - DNA, 328 bp, Homo sapiens
  misc_feature 25, 61: n = A,T,C or G
aaactccaccgcggtggcggccgangtacaataacaaatataattgaagcactgcactggnaagggagcctaacagtataataaatacttggctgtgattcacatgccaatcagaaactgagacacgacgagttctgaagcagatcttgtctgatttgaacagtggccttattatttatttatttcaaatttggcttaaagggctacatcagagttaaaagtttttttgagggaggaactaattagactctgtgaatttaatgtaagctctcaccatgtcttaaatttactttgctgctttctctgtaataaaaatatttgcttttat

SEQ ID NO: 59461 - DNA, 483 bp, Homo sapiens
  misc_feature 413: n = A,T,C or G
accaaaataccctaatatgtattaaactttatcttaaatttcaaaaaagaaaactgtattctgcagttttctctacacatgaattaagttatttttgttaatccaattgtttaatctatatccttacttatttttgtctatttattttatctgttgctatgacagaggtattaaaatctccagttgtgattatggctgtgtctatgtctccttttagttgtcaagttttgctttaaagcaagctcatttgtgtagtccaatttggaattgttacatatttctagaaattgacccttttgtcattataaaatactccttttcaatcttcagtaatgctctttgcatttatcttatgttaatatagctagacttgattagtgtttgccttatacaaagtttccatctcttgattnttctttctgtgaatctctatttaacatgtgtcatttgctaatttgtgtatagtcacacatgtaatcccag

SEQ ID NO: 59462 - DNA, 318 bp, Homo sapiens
  misc_feature 53: n = A,T,C or G
actccaccgcggtggcggccgggtacaatgtttattagacacatctcctgggnacatactgcctaaccttttggagccttagtctcccagactgaaaaaggaagaggatggtattacatcagctccattgtttgagccaagaatctaagtcatccctgactccagtgtctttgtcaccaggccctttggactctacctcagaaatatttcttggaccttccacttctcctccaactccttgaccaccatcctgtatccaaccatcaccacctctaacctgaatcctaccttaagatcagaacagttgtcctcactttt

SEQ ID NO: 59463 - DNA, 231 bp, Homo sapiens
  misc_feature 47, 48, 110: n = A,T,C or G
aaaaaatgggccctggggaaaaaaaattaaaagggggggggggttgnnaaaaatttaaatgggggggaaggttaattattttaaaaagaaagggggaagggtttattttntttgtttttttaaaaagagggttaaatggggggggggggttggattaaggtttaaaagggttttttgttgggggttttaaaaattgggggggggaaaaatttttttttgggggaagaaaaa

SEQ ID NO: 59464 - DNA, 623 bp, Homo sapiens
  misc_feature 24, 26, 34, 39, 47, 50, 54, 61, 99, 594: n = A,T,C or G
tcctatagggagtcgacgcggaanangtgtgttngcganccggagcnccnccgnggtggcngccgaggtacatgtgatgtttgtctttctatgcatggnttatttcccttaacataatggcttcctgttctatccatgttgtggcaaatgacagaatctcattcttcttacagctgaatagtaagtacttaaatattttaccaatttttaaaaagtcttaatccaatgcttataccagtgactgtttttataatacttgaagtaactttaagaactgaaacaaccctggaaaactctacatagctagatagtaacaatacttgtataagaaaccaagtttccttattcccagcctggtgtctgtatcgtgacacactactctgtgtatgcttggttttagactaggaggagagtcctgggaagggcaatattacagaagttttcttccacatgaggagaatgcttagtttcaaatttaaatacatgtgtcagatggaaccctgcctaactcacttctacaaataacttccccaaaatcttagaaggttttttagaacatgatataagctttgtgacaaaaacaaatgccattgngtcccttatttagtcataaaaccttaggg

SEQ ID NO: 59465 - DNA, 280 bp, Homo sapiens
acgcggggagttgtgagggggaaggtagactctttccagcacctttgataaaggggctgctcaaaaaagccacgaccttgggcctctgctaaaaccatggctttaagtaaggagggagcagatatataaaaatccttatccctctttctaatctcttatgtcctgtgagtgtcacccattgagtaaacccaagtggaagtcagcaggaaagtagctggaatgatgcagtctttacaggctatgatgtaaggaagcatgagattaatgagggcagaggggg

SEQ ID NO: 59466 - DNA, 240 bp, Homo sapiens
  misc_feature 216: n = A,T,C or G
acagtttttagctttgcaattttataaacgttttccctcttccacttcaaagtattttgatcttgagaaatagacaaatctttttactagaatgtgactttacacatttattatgaaactgggtcgggtaagagaatagatttacaattgtcatttacactgggccttcaattttcatgattaaatctactcaaacaccataatacagatcagaanactttctggtgagcatacatttaa

SEQ ID NO: 59467 - DNA, 456 bp, Homo sapiens
  misc_feature 7, 440, 443, 444, 445, 446, 447: n = A,T,C or G
ccgcggnggcggccgaggtacttttgtttctctgcagaggcacttctctaagccaactctaggtctgtgaaggctttttatggttgcagactgctgtagtcagcaggattgtgaaaaacaggctggaatttaccatacagtcatgatggaaaacatcagaagtaatgcagagctgcaggcttgtcaagaacctggtgtgcctaaagtcagaaagaaaggttgctagtgtcagaatatccaaaagatcatccctaggtcctctctctgggtagtctgccccaggatcatcttgtcccaagtgaaaactgttctttcctcggtgggtaaagtgaaacttgaatccagcatgtgaaggctgaagcggttggctagttgatatttcacacgataatgtgaacagcaataaaaaagactaagtaaactttctcaactctaatcanatnnnnnaaaaaaaaa

SEQ ID NO: 59468 - DNA, 215 bp, Homo sapiens
  misc_feature 5: n = A,T,C or G
acggnaaatagaattctcttgaccctctaggaagaaattcagtcctgccaacatgacttctaatagacagaactgatgttgaagactcacagaaccacactggtgagccggttggagatgactacaagaaaatgggaacactttttggtgaactgaacaaaaaccttatcaacatgggcttcacaaggatgtattttggagaacgaatagtggaa

SEQ ID NO: 59469 - DNA, 296 bp, Homo sapiens
  misc_feature 21: n = A,T,C or G
ctccaccgcggtggcggccgngtacatttggtcattcccttattgcctgtttttaacttggtgaatgtgacatgtcctaacaacaaacgcctttgtcaataagataataatttgagttaataagtttgagttttttgtatgctaacaagtctccagctgccacataaatgtatccagttagagcattacacaaagctgtccagctgagggtcagtagtggctaaaatccagctcccactctgtaagccacagaacacccctggttggggatgcatgtgcctagaggaaagggaagt

SEQ ID NO: 59470 - DNA, 267 bp, Homo sapiens
  misc_feature 29: n = A,T,C or G
acccttgctcatctaccacccagctcagnatccttctgggaagtgtgttggtgccaacaatcaagtcttggatggtatcaaggcagaagaaactactccaaaccagggggccactggctaacttgaataatccagaaggcttggaatatctatccatcaaatttgggcattaaaataaataccaagagtccatcctccagggagtgaagctgacaaggccgacagtataacaaaggaggtggactttctgtagcaatgtatatatgt

SEQ ID NO: 59471 - DNA, 598 bp, Homo sapiens
  misc_feature 2, 8, 29, 176, 587: n = A,T,C or G
antggaanctccccgcggtggcggccgangtacaactacgttcacttctagaaaaaaattctgagggctttgagaatttactaagttagttacttcattgaaaatcagggaaactatctctatcttatctttgcaataaagaggcttattaatattattaaaataggaatcatggnaaaacatttggggaatgagataggaagactactatctgctttcttttaaaaggggttttgatgagaacataaatacagatttagagaactattaaaactccagctacaaaggaaatgaaaaacttgaattgcctgtattcttgtcatctccacagctatccatctcataatagccttattgcaactagacacggggtgatgaatgcagaaatgtcagacaaagagaaatgtgtaaagataaaaggctatagggtggggaaaaaaacccatacaacaaagaagtgactgcatgttgcttttgttatcattttgtttccaaaagctgcccaggtggcagctaagccagaattccataaagatagacgcaatccacaaaaggcccctgatgtttctgaaaaaaattataatatntaaaaagatgg

SEQ ID NO: 59472 - DNA, 301 bp, Homo sapiens
  misc_feature 5: n = A,T,C or G
ttggnactccaccgcggtggcggccgagtactgaagggaacaagccacacaactcctttccctcccacataatccctatgattcactggaattggatgaccttcctgggaactctttactgtggcctctgtgggtgccaaaagcccaagaaagcttgctgagttgttctcattcaaatactgcgcttgctgggttcttattcaggcctctttagacacacttccttcttgctcagcaaaactgctaattggcacagaaaatatcctagctttgtccattttctatagaagttgaaaatact

SEQ ID NO: 59473 - DNA, 564 bp, Homo sapiens
  misc_feature 35: n = A,T,C or G
actttgagtttaccaaaaagggcttcaccacaggnataatctagttgggctactttgctagggaagctatattgttatctttaggtcaaaacttttacgctggtcagattcttagaaaagaccccagcaacctcctgtcctgaggattaaagtttgttggccagagtttggaagttggggaatagtggtgggatagggtcatgtgaggctcagtagctagtttgcttgcttccctaatccctcctctgtattcagtgtgatactttgatttcaattgtatctggtgactactcctctaccctcaagaccagacacccacgatttttttctctatagaggtccagtgtggggaggaaatagagagatttgattgtttcttaaattgacatataactcatcttccttatacactctccacccccaactctccattccaggaggtatccagaactgctacaatgttatataattatgatgtagatctagttttgagcttccctaactgatagtttaggatctgggtttctcagatttactaactcacttagcacttgaccattttgt

SEQ ID NO: 59474 - DNA, 271 bp, Homo sapiens
actccaccgcggtggcggccgagtacgcgggtcctctgaaaaagttaccctgcaactggctctctctcattgattgagccctctgcagccacaaccctaatctctgtttttccctagacccccgtcttcaactcaaccatacccatctatctacctttctgcaattctccactctatgaaaaaagaaatgtgatgtttgcaataaagttatatttttccctccgaaacaaaacagtaacattcaattaggtatctcctaagaagtatgtct

SEQ ID NO: 59475 - DNA, 285 bp, Homo sapiens
acttttgattccatttctccctaaatatttcagtgagcttttatttctttacaaaaacatggtagaacctttgctcacctttcatatctttctggatttttcggtgataattgaacaaaacatggtagtaattattacattattgctttcttcttgcctgtgccatttattgtcattgtttttccttttttcttcctttcttccctgcctccactgcaccccggattatcagattatcaccctattatgacggcatttctgagttaaattacccttagcccgcgt

SEQ ID NO: 59476 - DNA, 389 bp, Homo sapiens
tccaccgcggtggccgagcggccgcccgggcaggtacttattatccagccattcacagaaaagtgtgtggttcccagagttatttattatgattttaaaataaatcaatgaaagttttaaaattgtctgctgtaaattccaagatggtaaacatcaagagatataactggatatattctctggcattctcactttttttaagaccatataacagccccagagatgcaaagatcgaaaaccactgacgtaaacaacttacttttctggaacataattcggtatactcagtagccatcagctttctttccaaaactatttaaaagtctttagactgactatcctttgaaagaaacccactactcctctctaggtggcctaacataactgtc

SEQ ID NO: 59477 - DNA, 287 bp, Homo sapiens
actcatcttgaatgttctggcacctcctttttctgaagatttcccccagagagccccatttgaaatttctttatgagttctatgatttcattcctcctagcctggagagtaactcatttgagcagctgggtgatttcctgtcttcatgttcagcatggcggcacttcatcctaaatcatactgactccaccctcttcaatttaaagctcatgtttcctgacagagaataaaaaggcaaaatatgttaaagcagttttacttctactctgtcattaagttaggctggt

SEQ ID NO: 59478 - DNA, 529 bp, Homo sapiens
acaggtgcatgttattgtgcccagttagtttttaaatttttgataaagacagggtctcgctgtgttgccaagactggtctctaactcctggcctcaagtgatcctcttgcctttgcctctcaaagtgctgggattggattgcagacatgagctaccacgcctggctagcatttctaaatatagttgtaaaccatcttttctttatatttctcttttattatctttggttctctctgagtgtctcacaagcaatatgtcttggagagaatatgatttgctgggtttcttactaacatcagacactcatattgtataggattcccagactatctctcttcataagccatttctctcctatatagttcagtgtatggatggctgcctttgttagaatgcttatctatgggtctcaacaaaaaacgaatggatactcatgaaccaattcctggtttagacagcttccctcacaagagggctatggacctgtcaggcactgatgtcttcacagcctttatagctcgcatcaagt

SEQ ID NO: 59479 - DNA, 117 bp, Homo sapiens
  misc_feature 2: n = A,T,C or G
gnggactcttgaaacatccctcagacacatctgtctgccattagtcttacctcctctgatcgcacctcacatcacccccaaaatcacccttttaaaactactcaggaaactctaatg

SEQ ID NO: 59480 - DNA, 259 bp, Homo sapiens
ccggcagcctcctcgtacctgaccttctacattaggcccacttccgaggggatgaacttccggtcccctccccgtggacagaatactctagcttttcctgaggcacactgactaacaaattggctaagtgttacaaatcctgctactctactttgcatactgcgaaaatgcattaacgcaacccgttgcatcttgtgatgacacacgacctggtcactctatgatgatgacagcgctgccttacaaactttttactgat

SEQ ID NO: 59481 - DNA, 520 bp, Homo sapiens
  misc_feature 35, 315, 335, 351, 377, 388, 410, 466, 475, 512: n = A,T,C or G
acatacaccatcatagtgcaaaagcattgcacagnatataagatgtcctagctacaactggaccaggaaagtaagttagttatttggctctttgcttaggaagttactgtttctgtttgtttaatcaaaagacaaaatgtcaccaatatatttcaaatgaaatgtcttagagatgagtaatttggactggactcaattctcacacctcacaaggaccaataaacatctttaatccaaaaagagtgatgccttaggtatccggtttggatgtctatcaaatgatactttattttcttaggaaaaaaaaaaggcttntgaggctagtttttcggttnttcattgccaatcttnttaaaataaaaatattgccaaccgcntgctgacaagngctcattcgtaaccaactaatntttccaaagttttaacaaaaaagtcatcggtcatctaagtttatgtaaatgaatgnggtttcagngacttgaaaaaactgctaaaatcagcataaacaattngaagtaaa

SEQ ID NO: 59482 - DNA, 480 bp, Homo sapiens
actgtttcttctttttctatgatggaaaaagggtatcttactggggccctccttttcggttattaagaaaaggtctccttgttgggaggcaggaaagggattggctaaaccccctaattttatgcggggccctttgaatatatgggggatggaaatggtttttaggatgcacgaagagatagccctctttggacaaagaactccctccctcaacccctcccgccgggcccccaaacttgggggggtgagtagggggacccccctttcttgaagagcgagggtcccttatcgggaaggggatcccccagaagtcccaaaaaagggggccccggggggccaaacccggggctttaaaaaccaaaagggcccggttaaattttttttcccgggccctgggaatttttatgggcttgggggttttcccccccctattttaaggggggcttttgaagccccggaaaaaaaccccgcccctttaaa

SEQ ID NO: 59483 - DNA, 325 bp, Homo sapiens
actaagaatggttgaattcagggcataattttgaagggagagccaacaggatttgcagatagacaaaaatttaaagtgagcctgtcagcatgcttgtgtgtttttcctgcagctctgatctgaggttgggtccaggcagagcaggtggagcatttgatttaaccaaggctggtttttccaggtaggtatgatgaagggagagggtgcaaggttattgaggatgtgtgcaaaggagggattgtcaatcactatggaccatgtaaactaagctgggaaagtcaacagattggcatttgacacaggggtgtaatatttttgtaagtag

SEQ ID NO: 59484 - DNA, 239 bp, Homo sapiens
actccccaccaccaagttcaatttcagtgcaatttcaattatctaccataaattacacactgtgcttttaggatactacctgacttctgaggatctagatgtcttgcagtgtgtaaatacttgtgaatgggttttaaattacaccatttctactagcaagcctcctcttgccaattcatatccaacacttaaccaggtcacaatgaagtttatttagaaaacacacggagcatctcata

SEQ ID NO: 59485 - DNA, 259 bp, Homo sapiens
accctgcagagccacccaggtggagaaaaagacccaaaaatcccggccaggtcaggcttccttgttcttccctcttagcctttgctgcccccgtgtggtgcaccacgtgaggtgcagcggggcttggtgcaggagctttacctgcttggcactctcaggtgtaagaagggatggcaaattttgttggccacaacactgcgaggcgtttgtgcttgttcagttgagactgttgactcatccggccccctcgtctctttct

SEQ ID NO: 59486 - DNA, 442 bp, Homo sapiens
  misc_feature 34: n = A,T,C or G
aacctccccgcggtggcggccgagtacgcggggnacttaaaattgagacacagtatattaagcagtttttgtaaggtgttagaataaaacttcaataatatcagaaacagaaatgtagaggatgcatgaggaacttactggattttatgacttcatcattatgttatttattacttctgataaataggcttgcttcatctgaatgcaaagtaatatataacctggaatttttaaagttttttttgtttttggcacgagagtatcacaggaaattcaaaggtttaactgcgtaagaaacaactgcaaaaccagtggctaaaaacaataaagaattattaggtaatgatgtgggttggaaattttcctgggatctgctggaccttgctttgctgctgttgccttgactcacttgtgcagcgccactctgcttgggaacttccct

SEQ ID NO: 59487 - DNA, 529 bp, Homo sapiens
actttatctgaactcaaagagcttattcttaattcttaccaggagttgagactatataataaaacaaacaaaatttataaaactgtaaaaggctagatcaaggtcaagagccctatattaagtcctactgctgcccccagtctcagtcactattatggtgccagaactatttagaagaccaagaaagaactacatgttttaattaaataacacatggcagaaagcacaagataccagcttgggtttatcaggcagaacaggagctatccttgtgctaaacagacaggcaccaaggaaaagagagaacccgagagacaagtctaaaaaagcttgggagctatttaatacaagatcctaggacaaaatctaacgctccccgtcgacgcgaggggagccacatttaaggaaggcagcctggtgtagaataacgatggagtaaagtaaatgacacggaactatgacaaattcaaaacccaactggaaaattaggaaagagaatgaagtgtccgtgtctaatgacacccctgac

SEQ ID NO: 59488 - DNA, 272 bp, Homo sapiens
catacaacctatttaaatataaagcatgtttttgagactcgctcacccccccccacccaaccactcccaaataataattgggatgccattttttttccttttggatgaggtaaataattttaaggttcacaattttgtcttttactgcaatttaaggaaacatttggatgtcagtcaatatgttcataattttggctgtgtgcgaatttctgctggcattatctatgaattttcttcctacttattttttttcagtatatgaacaatcatgt

SEQ ID NO: 59489 - DNA, 535 bp, Homo sapiens
  misc_feature 7: n = A,T,C or G
accgaanaatgaaaaatcaaaattaaacttagatttagacccctttgctctttatcatcatcagttattggtcagaggtatgtattccttcctcctgtatcttttagaaactcccttaatgaatttcctttgcttgcttatcagtttaatttactatcactgtttaaagatgacgaaaaatgtaagacagtttaagactggagggtgaaaaatcaggtgaagactttatggtaacatttttctgccttgatgtttctaaagggaattaaggatattttctgatgtttttaaatttcttaaaacaatcaagattttttaaccataaatgacagaaggaaaataaacatgtcactgtaggagtttcatttcaatggcagtttttttctaggtgacttagaagtggggtcagtttgagcagtatatatggttaggaaagaggatagtgatggccataaatttatcctgtcagcttagcagctataaattacattagatttgtgtaaattacgttagatttgtgtagatacctctaatt

SEQ ID NO: 59490 - DNA, 419 bp, Homo sapiens
  misc_feature 9, 14, 110, 124, 150, 347, 379: n = A,T,C or G
caccgcggnggctntcttgctctaatctacttcaacccctaggagaacaagttatcatttgggtcaagcagaaaacttgatgtcaaggaactaaggtatccagtttttanatgctaattatcancattaaatgtgctttcctccatgtancctgctttctctttacattttttattttggtatcctgcttcaaaagtgtttaattctcttttgaattacaaattccctgaaatcagtgtgcaaggaccctgaaatcggtgtgcaaggagaaaaaagctgtctgcagcttggaagaaatctttatcttggggatgcttacagatgaaatcaatgggtttagtcatctntttggtaagttttggagaaaatctattatttnacttgtctcttttctcctttaggtttttattccttgcctc

SEQ ID NO: 59491 - DNA, 295 bp, Homo sapiens
  misc_feature 7: n = A,T,C or G
acatggnaacaatttagttgaagaacaatatattacccagaataaattaaagcagttattctctctcttgggcttaatagtttacttatatgtagagacaaaaaagttcttcactaaaattatttggttattgtattgataggtgtgtgtgtgtatgtgtgaaattttgcacagtttatagcttttaagctagatagctatttttaaatgcttctaaatattttcatcaaatatatacatataggaatttaaaattgaaatccattcataaatgctaatatcaaatccttatgaa

SEQ ID NO: 59492 - DNA, 213 bp, Homo sapiens
  misc_feature 3, 10, 11, 22, 64, 102: n = A,T,C or G
acnactctgnnatatgtaaatntaagggccaggcttcgggaaggaaagaaaagcgaacccggcncggacaagacctaggagcaactcccttcgtgcgcctanactagaggagttggggccaggccgcccacagagcgctttaacagagcgcttcaagggcccacaaggccggctacgcaaaccctttcaagctggctgggaagagccccgcgt

SEQ ID NO: 59493 - DNA, 262 bp, Homo sapiens
acagtgctatcactgatacctctcacctgccaccaggctctgccccttccctaccaatacctcgcacaaattcattgtcctgaagcacagctttcttgctcaagaaccagtgttgatttttcatttcttattgaaacatacacaaattgtttacctgaaattgaaaatcttcatgctgtagttttgctttgcccattcacatttatttctctttgttactcattcccctctacgttactttagtgaaatcatcctgtttttt

SEQ ID NO: 59494 - DNA, 155 bp, Homo sapiens
actaagcagcggactttgcacattgctaacctaggaacctacctctgtctaacttgcataattgcatgagcctacactgaagcccctgttggtcagcactgggcaaagctggtctttaataccttttccctaagtctaaatacctgtgacttctc

SEQ ID NO: 59495 - DNA, 434 bp, Homo sapiens
  misc_feature 11, 387: n = A,T,C or G
acatacacagnatatggaaattcaagtatggctagtgaaagaattaaaaatcagtttctggaattctagctaactctaaagacacttagattgcctttacactggttaaacaagacaagaaaaactggaaaagaaaatcacattagacataaaaatctgaaaatatactggctactttagacaagtaggtctgaagaagtaacacatatatgcacaatgcaaccactaactgaaaaatctaaaactgaaaacgcaaccactaactgaaaaatggtaaaaatttttccacaggcaagttcagaaggtttctgttaactgggaggcaagttaagggtaacagcactgtctgaagcttaatcaaattggtaagatgtcaaagtatatcanaaaaagaaaaaaaaagatatttcaaatgaagagcacatactgctgat

SEQ ID NO: 59496 - DNA, 364 bp, Homo sapiens
  misc_feature 283: n = A,T,C or G
accaagacagaaaaaaaaggtcaatgataatgtaagacagcaaagtgactatgaatgggagtatcagagacctctatgatatatccagaacaggtaataaaagatggaaaatagacaagtaatagaaaggtataaaatagtaaataccaactaacactctgtccaggtcagggctacatgtcagactgttggcagggtctagggcaaattggaaatgacatgccccaactataaaagatggttgctgcaaaacagaaaagcagatccatggctgccagatctngcttttcaaaagcagcctgaatccacatttttacacaaaatctcctttttaatgttgacaactaattaaatgtacctgccg

SEQ ID NO: 59497 - DNA, 475 bp, Homo sapiens
tccaccgcggtggcgagcggccgcccgggcaggtacttttagtagagacagggtttcaccatgttggccaggctggtcttgagctcctgacctcagggtatctgtccacctcagcctcccaaagtgctgggattacaggcattagccactgcccctgtgcaattcagtttaactctaagtctaagtcaattggaaagatattcatttacctatgtattcctcacaactcttagtctctcgaggtgctttgcgaaagtatttttgggtttaagaagtttagaaaacactgtatactctatttctatttagagattcagaacgtatattagcctttaaggatatgacaagtattcaggatatctgtttaactttaatccagcattttcccttttttctccatcccctccctcttttgtgtaaccaattattcattaatatcccttataacacacccgtgtattatcattgctatcta

SEQ ID NO: 59498 - DNA, 299 bp, Homo sapiens
acagtgctatcactgatacctctcacctgccaccaggctctgccccttccctaccaataccttgcacaaattcattgtcctgaagcacagctttcttgctcaagaaccagtgttgatttttcatttcttattgaaacatacacaaattgtttacctgaaattgaaaatcttcatgctgtagttttgctttgcccattcacatttatttctctttgttactcattcccctctacgttactttagtgaaatcatcctgttttttagttgtctaacagcagattgagttcagttaccaattt

SEQ ID NO: 59499 - DNA, 210 bp, Homo sapiens
ctccacccggtggcggccgcccgggcggtacgcgggctgggggccaatcttcttagactgcaacttctccaaatccaatattataatattcaaaggggaagattccatttaaatttcagttgattaaccaagtccttgttcattaaaatctgctcatcatagacccttctcattttacaaaaaactctgttagaatgggtgaatgaatgg

SEQ ID NO: 59500 - DNA, 291 bp, Homo sapiens
actccagcctgggcgacagagcgagactccatctcaaaaaaaaaaaaaatacttggtcttagggccccccccctttatcccaaactttgggaaacctcaggcaaaaggatcctttggaaagggatttaattttgtagaaaataaaatatccctgcccttttttgctaagggccaccaccttggtaaaatgagaatttttaaaatttacctcccgggaaaaaaaaggggaaaaaaaacccaaaaaaaaccccattttttcccgttttaaaatttttctcctatttggggaaa

SEQ ID NO: 59501 - DNA, 196 bp, Homo sapiens
acgcgggaagcagtggtaacaacccagactacgcgggcatattcttttttatttctagatagaagacagttttcattgtcattgccaacatgattttggatttccaccctaaaatcttggcgatcttgagatgttaaatcttgaaatgttaaattaatattctcctttatttcatcttgacatgtaaaaattgcaa

SEQ ID NO: 59502 - DNA, 382 bp, Homo sapiens
acataaaattttcttggacagtgggaaaaaaggcgggatagtcacacatcatccaataaaactttttttttaaaaacacttgtgatgtatgtctttatctttctcagaatcaggcatttccgcttgccccctttgttctcttaccataccctgtgagaagaaaacacccatgtaattgttgctacttagcctggatccagctgtagcctgaaacagccgtgcccagccaacgtgcagaccccgagcacaaagtcaacctgcagacctgaaagctagaaataaatgtttgcagtgacaggacactaagttcctgggttattttggcagcaactgactcatgcaataacctataaacttaaaaattggtctgaatatgaatatg

SEQ ID NO: 59503 - DNA, 399 bp, Homo sapiens
tccaccgcggtggcggccgcagcgctatgtacctacttggtgtcctatgtggggcgaactcaggatggcttccttctcaactgtgacacagtgcaggtaagatcctgtaccatctaaatttatttactggggggcatggaattagggtttcttacaagataggagaaaacctgaaagtattctttcccgtgtatgttaatgtaaatgattccttagtgctccttgactcgaattctgtggactatgtgagaattgttgacaacagggaatgagagattgatgttaaagctattgaattcgatatgaaatttaatgtcctggaaacatttggtacgtgggagggagggggtagcatatgcagagacacttggcccatgtgtgctatgatgtgatgcatgc

SEQ ID NO: 59504 - DNA, 105 bp, Homo sapiens
gtccaaacacccttgaattcggccttgatggagaagaagaaaggcattattgtttctgactgggcttccatgaattaccgaatgccttttggaatgattgcccaa

SEQ ID NO: 59505 - DNA, 152 bp, Homo sapiens
acagagagagagaaccttggggaaaacagttcttggcccttggtagattcagtggaaaactgcattctggtgttaattagttcagcttggtggtgtatgcatgttatccagtaactgggctctagttggccaaatgagtcataaaagcagct

SEQ ID NO: 59506 - DNA, 300 bp, Homo sapiens
acagaagtggcttttgaatggctgatttttacatacaaatttacctgtagtttaagacatctgacagactgctagcccactgattctggttcctagttctgtctatatcgctgggcaaatacaagagtgatatgtattctcccagttaaaaataagaatctgagccctttgatacaactcttaatggctgagcctcttgtcaatcttacattttcattgtcatctttggtagttcaatgataaccactggaatattcactggaataacatggggagcatttaaaacttgtcagaaacctc

SEQ ID NO: 59507 - DNA, 312 bp, Homo sapiens
tccaccgcggtggcggccgagtactacttatatattgctctcctctatcgagttacactaacttattccaagaaaactaaagcccaaagtgtattcattttcagcagaaaataccaaggatgacacaggacaagttatttttgcctttcagtgaggttaccttcctctaatttactccttgacccttacctggtttcctctttcaaatgcatagtttgatctactgaattccagaacttcagcttcctccttacctcctgacttccagaaactacagcagatggactttggtttgttgatgttggaactttg

SEQ ID NO: 59508 - DNA, 290 bp, Homo sapiens
  misc_feature 232: n = A,T,C or G
acaaaataaatttgctcattgggttagagtatggttattgattagggggctaagcatttagttactgcatggggcagccaataataaaatcacagccctgtgtatttacctccacagtgtgtgctgataagtgcaaaaggtttgtgcaaattcttttgaagttatattgtaaccatggtatatgtattgaaaacttggccattttaccccattcctatgaatgaaaactatntggtgaatcagaggatagtctgaattggggtatgaaagccagtataagtgtcagttag

SEQ ID NO: 59509 - DNA, 298 bp, Homo sapiens
acccactccctcaattttctctaaagatctcatttcagacatttaaatgaatattatgctacacaacagggaaactcagatgtccatcccctccttattcattcaaacatttccactgccataatatggcagctgcaacgccaagaaagaagaaaggaaaaaagactaaaagaggtgaagaatgaaaaagacctcaaagaaatttttttttttaagaggctgggtcttactctgtcacctagggtggagtccagtggtaggatcatagttcattgtaaccttgaactcttgggctcag

SEQ ID NO: 59510 - DNA, 174 bp, Homo sapiens
accttagtagattctacccctaactttcctaccttgtctggaaccagggtcttttaaggtaatcctccttttccatttgagagagaactgcctaattccaacaggcattaaggcaagggagggaaagagactgttaaaagagggatagctcaccttatgccagagggagggatg

SEQ ID NO: 59511 - DNA, 301 bp, Homo sapiens
acaaagtatattaactttaaagttaaagtgtgtgctttaaaaaacagttcaaggcaacaatagaagagacttcataaagcagtgcatgactaactgcccaatggtataacaatttgctcttctcctacttggtaattatcctagaaggcatgagccaggtctgctttgggcaagatacccagtggtttctgtttgagctgaagcagatctactgcaagagggaagagcagaagaagcttataagatgttctgatgaacaatttccaggaatgcaatattgatgaggatgtcatacactgct

SEQ ID NO: 59512 - DNA, 313 bp, Homo sapiens
ctccccgcggtggcggccgaggtacctagcttatctagcctgatcaaaaatgagaagcagaggtattcataaggttgcctgatctggggaggagaactgagtggctataagacatgttaggacaaaggtttaaatttcattgcacacactttttgcaatatttgaattttaaaatacacattttaccagttgaaaaaataataatgtgcacttaggaaaatatgtctcttacattagtaaaaacttcttagataagctgagttagctctgtatgtggacaacttgttgattgtttagccaatagctattctca

SEQ ID NO: 59513 - DNA, 253 bp, Homo sapiens
  misc_feature 187, 204: n = A,T,C or G
acaaaataaatttgctcattgggttagagtatggttattgattagggggctaagcatttagttactgcatggggcagccaataataaaatcacagccctgtgtatttacctccacagtgtgtgctgataagtgcaaaaggtttgtgcaaattcttttgaagttatattgtaaccatggtatatgtanttgaaacttggccattntaccccattcctatgaatgaaaactatttggtgaatcagaagatagtct

SEQ ID NO: 59514 - DNA, 195 bp, Homo sapiens
ccaccgcggtggcgagccgaggtacttaaaggcatatgaaaaccaagggaagttgccagattcaagaggaactactctgtgttctatccaagctgaacattccatttttacaaggactcctttgttgtcatgtttatacacagactaataaatgcttgaccttttttagtgatgaaggaacagtctgtgcctcag

SEQ ID NO: 59515 - DNA, 314 bp, Homo sapiens
tccaccgcggtggccggccgcccgggcaggtacaaaataaatttgctcattgggttagagtatggttattgattagggggctaagcatttagttactgcatggggcagccaataataaaatcacagccctgtgtatttacctccacagtgtgtgctgataagtgcaaaaggtttgtgcaaattcttttgaagttatattgtaaccatggtatatgtattgaaaacttggccattttaccccattcctatgaatgaaaactatttggtgaatcagaggatagtctgaattgggatatgaaggccagtataagtgt

SEQ ID NO: 59516 - DNA, 242 bp, Homo sapiens
acagtttcacacaacctgcagttagcagagccacttagttattgggatgggaatggcacccatatctcttgagattttgattttttaaaaactgtgctaaaccgtattctccaaaggagagaagaaagaattttgcagttttcgttctgttttttcttttgggaagcgtctactttggagaatttaacccttttctaaagtaactgcagttgtcttttattcccctttttgaatacctgtga

SEQ ID NO: 59517 - DNA, 297 bp, Homo sapiens
actcgggacaccttatagctttcttttatccttttttagtaaccaaccaccttttaccagttaacaattccatttcactgtttaaaaaaccagtgtagtttctgtctcccaagcagagcatgacttggcattacaaagggtatcacctctctctgtctgagtttgccaccatatggtgtatgcactttgtgacttaactctttttggtgctgttctattatccttctcagatctacagcccagtggtaaagtcatatgcatagcacctggccaaactcctagatccaagtctggctg

SEQ ID NO: 59518 - DNA, 436 bp, Homo sapiens
acctatagttatcaatactatattgcacacttaaaaaattgttgaaagtagatctcatattaaatgttttacaacaataaaataacataaaaaataaaatgacaaagaagcatgctgtaatggctattccaggttatcttccagtaggctttgctaattgatttcctccaacctcagcctagagctcccaggcaaagcaactccttatgacctacacagttgttcaacactcatactcagacatggattaatcacacttaagtgggaacccctacacaggaggattaaggtaaggtatcagggcactcagtatatcagcttaattatgtcagaagatttgtgatgatgaactgtgacagacaaggctagtcaaataagatgagtcctgttgcagatgggtaattaattaccaatttcgggcatgtattgagccctg

SEQ ID NO: 59519 - DNA, 514 bp, Homo sapiens
accaatgactgatcagacataagagtcaccctggatggctaccaccactatcagatcgtctgctgatgcaaggcaccttcagtcattctcagactgggaaatggagtcccctgaggacaggccctgctgctgattgatgtccagtgtgggcagctctcttggctgctcaacattcagagaggctctccttgtttcagtgctaaatgattgacagtcagggtgagtatttcaggaggaagagtcccccgcccactccagccatgtggcaaaggtatttgcttccttgggaaggaagtgatttatctgtgggagaacactgtttgggcaaagttgcgtaggaacagcgtctgtctctgcaagcatgtgtgtatgtgagtgtgggcataaagcagcaagagtggaaggtaaagacaacgtgaacgtcataaaagaacacttctttttacaaatgcttgaaaacattcgatgctgaaagacttcagaccacataaatgaatttgcacctaattcaaca

SEQ ID NO: 59520 - DNA, 306 bp, Homo sapiens
acatatttgcttgcctagcactatgccatagggatcaaaaggaaatgtaggaaatgatgcctgcatcgtttaagttgcccagtctgattttataacctcttattcatagttgaaaagcaatatgatgtgaatttaattaggttttcacttaacaaggcagtctactccgtttttttcattcattctgttttctcgtgttagatggcatttctgatatttatagtctttggtcattcccctacccaggttttccaattttataaggtgtcatttctggagcaaggtataatttaacccttacctacc

SEQ ID NO: 59521 - DNA, 295 bp, Homo sapiens
acataacaaagcaaaggctcaagttgagggctgcctgactctaaacttcccctgatgttgacccacttggtgcctcccagtgtgttctcccggcctgctgtgcctctctctagtgtcacacttgccagaccttattgaagtgagcttttcacttgtttttctatccagctcgtctgaaatatttgtctttggatcctaaacctagcacatgtaggagttagataagtttaccaacataaattaaattaatgaacaaataaactggagggtcggcaatataaaagagtgctgagtc

SEQ ID NO: 59522 - DNA, 278 bp, Homo sapiens
  misc_feature 20: n = A,T,C or G
acgcgggttacctgtgtgtntgaaaagcaaaggtctagtaatgacttaattattctcttcttttctctggtggagtttgtgttttgtagatgtagaaaaaagagccttgactatttctggcttctctgcccagggaagggaagaattggctaaaaaaatacacattcctagtagacatttcttattgacagtgtacggtattctgtgagctggggaagacagatacccttttattgggggcagggggaggatgtagcaaaggaccaattttcctggag

SEQ ID NO: 59523 - DNA, 510 bp, Homo sapiens
acgcgggtgcctgtaatctcagcactttgggaggccgaggcaggtggatcacttgaggtcaggagttcaagaccggcctggctaacatgttgaaaacccatctctactaaaaataaaaatattagccaggcatggtggcgcacacctgtaatcccagatactcaagaggctgaggcaggagaatcgcttgaacccaggaggtggaggttgcagtgagctgagatggcaccactgcattccagcctgtgtgctagagcaagactccatctcaaaaaaaaaaaaaaaaacttttttatttttaacataatttttttaaaccttaaaattcccaccaaataaccctttttatttaaccttgggggccggggcccccacccaaacccaaaaaacctaataggccacctgtttttttggagaaccaacttgttggcggtcttccccacaaaagttttttttgaagggatggaggacccccccctttttggggaattgtgtccaggatcccccctt

SEQ ID NO: 59524 - DNA, 395 bp, Homo sapiens
acgggggggactctgtgtttttgcagctttcccaggtgtctttgatgcgtgccatatttgggaatcacaaatatggatgattcccaagagcctttccaaccagagcacacagagtctgtccatttacatggagaatacaccaaggcccagtccccatcttcagatgttgcaatagtaggtatgcagctgaaggaatacacccctttgttggagtcaagagaatagagttaagacaaaaggaggtttgcttagggagtgttcatataaagggctgctttttttgggaggggaggataatatgatgagctttctatcactagagttacaagttgacaggcaaccaagatgagatgcaggtccttgttacggggaacaaaacaccttcagaaggagtt

SEQ ID NO: 59525 - DNA, 542 bp, Homo sapiens
  misc_feature 513: n = A,T,C or G
tccaccgcggtggcggccgccgggcaggtacatgtatatgcacaaaacactattgttactactgttattattattattatgggaaagcaaatcactgtgtccagataaatgtcccgattttccaaaacatggcacaaattgtttagaaagaacactttctttcttgttatacataaagatttacattttactcagttttcatatagtttcatttaaagtggtatttattaggccagacatggtgactcacacctgtaatgccagcagtttaggaggccaaggcgggtggatcacatgaagccaggagtttgagacaagcctggccgacatggtgaaacccattctctactaaaatacaaaaattagccgggcgtggtggtgcacgcctgtaattccagctacttggaaggctgaggcatgagaattacttgaacccaggaggcagaggttgcagtgagccaagatctcatcactgcactccagtctaagtgacagagtgagactctgtctcanaaaaaaaaaaaaaaaaaaaaaaaaacccc

SEQ ID NO: 59526 - DNA, 168 bp, Homo sapiens
acaaaacaaatgtaaagaactactggtttaaaaaatccaaggagtttttcagagaacagaaagtatgtaatcagaatatagtggtggccatggcctcatattagagattgagcatgaacatgagtgttctgtgaactttccactgtgtgatttcgggtaagttatttg

SEQ ID NO: 59527 - DNA, 279 bp, Homo sapiens
acaactgtttacctaaatattcttatagttgctttggcagacaccgtaggttggctcaacaaacccaacccctttatccctttcctgattactatagagaaagtgaaaatcaagtatcaattttccagctttccttatagcaagaagtggtcatctgactggcctggagttatgggcgaaagtctgctggcacagtcgctttcccctcttacgccttgaatggaggcatgatggttgaagttgtagctgctgtctgagaaaataaggaagacaattgtt

SEQ ID NO: 59528 - DNA, 323 bp, Homo sapiens
  misc_feature 261: n = A,T,C or G
tccaccgcggtggcggccgccgggcaggtacaaaataaatttgctcattgggttagagtatggttattgattagggggctaagcatttagttactgcatgggacagccaataataaaatcacagccctgtgtatttacctccacagtgtgtgctgataagtgcaaaaggtttgtgcaaattcttttgaagttatattgtaaccatggtatatgtattgaaaacttggccattttaccccattcctatgaatgaaaactatntggtgaatcagaggatagtctgaattgggatatgaaggccagtataagtgtcagttagcaaa

SEQ ID NO: 59529 - DNA, 330 bp, Homo sapiens
actgaatgcaagagtgagtcttaaactaaaatagtaactgttgttttccggcatttcaggtggaaatgcttaaagaatgtgtctagggataagactattgactggactacatgatttttataatctctactaaaattctgtaacttaacagttttgtgctccatagcttgtaatattatggttccagcatgcttccactgcatggctctgctgaccataacttgtgactttataaacaagatttatgttagttaaaagtagaaggctgggtgcaatgactcatgcctgtaatcccagcgctttgggaggccgaggcaggcagatcacctg

SEQ ID NO: 59530 - DNA, 302 bp, Homo sapiens
actgctgttagtggctgctagtaggttattcagccgacctcttctgattctgctttgctgcctgatttcaaaagagttgccctatactggctttcagtcacagcttgatgtaaccactgcttgtttgcatgcatccccatcattttcatatgggctctttttttttcttcttcaagttaggaagcaaaagaatcaggagcatttttatatgataaaagatttatataaggccagctagaatcaagccaaatgaaattcagctggaagggatggtaaaaaggctcacagaacttgtggctgcc

SEQ ID NO: 59531 - DNA, 462 bp, Homo sapiens
acataaataagacagcggtagcagatgccagaggaggggagatgatgaagagggatggtaggcagagccaccaacagagcaaactgagtttagaatagtaggtccatagacttctaatcctggggaataaaaagttttaaaaatgcaataatccaaataaatgtcatgcattaaggtgtttatatttgctattcgttcattgaagaatacaattttattgaataagtgattggtcaataagcaattataaggcaaccaagttagaagctgtggagatagaaattagtaaaacacaatccctcccctccaagactgaaaaagacattgtctctgccctttagaagctcacggtttaattgggaagatagaaataggagtgttatgttggagataagggcaaaatgctatggtcacccaggcaggagagtaataaactctaagtgggttgccatttgagcagag

SEQ ID NO: 59532 - DNA, 444 bp, Homo sapiens
tccaccgcggctggcggcgcgagatacagtgctatcactgatacctctcacctgccaccaggctgtgccccttccctaccaaaaccgttgcacaaattcattgacctgaagcacagctttcttgctcaagaaccagtgttgatttttcatttcttattgaaacatacacaaattggttacctgaaattgaaaatcttcatgctgtagttttgctttgcccattcacatttatttctctttgttactcattcccctctacgttactttagtgaaatcatcctgttttttagttgtctaacagcagattgagttcagttaccaatttttaaattcagttctaattccatttcacattgtagttgttttgactagtttttttctacttctattaaaagctctagttgttctctgctctcctcacttatctgactctgaaatcttcta

SEQ ID NO: 59533 - DNA, 427 bp, Homo sapiens
acaactaccataaaatttctacgttatgaagtccttgtggcttaggggagggcgaacagccaaatatctttattttccagactttccctctttgagacaacctctccccaccttccctctaaacaaatgtgatttttctttttcatagaatgccaacttcccaggtgttaaagtgaggctacggttataaggcgaaaaggtgtcacaattagagaaacaactttgaacacggtaatactgatttttaaaaatctcgaatgggctctgtggttctgatactctggctgttgaaataattcacctactgcagatttagtagaaagaaaaataattagcatgattatacctagtagccatttctaccctcttgagagtctgggcttggctccccgcacgtctgctttcctcagccgcagggctcccgcgt

SEQ ID NO: 59534 - DNA, 251 bp, Homo sapiens
acattatattaaatgtgccataaaacataacaccaaagagtatttggaaattgttaagtgcatgcgaataaaactaaaaagaatctcaaaataaaaaatataaataagcccgagattgaaatataaatattgggaacattggcacaaaatagcaaatagaactctagacataaatgtgcttatgtggggagagaatatagatctctaagaaaaaaagcaaagatgagtctttcagaatttcactattttat

SEQ ID NO: 59535 - DNA, 288 bp, Homo sapiens
acctcttttttttccgtggctttatgaagtaaaattcccttccatgattttaaaatcacctaatgtaactctgactcttatttacaattactcttctatacaattccattgcatactcttactcttctatactcttactcttctatacaattccattactcttactcgtctatacaatcccattattccttttttctctctcaaccctgacagagaacttctatatactgagcaaggtttatttcaggggaggatggagcgaacctggtgaaatgatgtcaggcatga

SEQ ID NO: 59536 - DNA, 267 bp, Homo sapiens
acttcagcatgttaacataacttaaaaagctaggtttaggatgcaggctgaccatagttgcagttaaaacatggacaagcaatttctacattcagttcctcagcaaccccattggtgtttccatctaagtccatataaaatccaaattctcatcttggccactactgtggtccaagccccgcagttgtctggattgctgcagtggcctcctaactgggcttgctgctgaagccctcacctctcttcaggtgatgctccacactgtag

SEQ ID NO: 59537 - DNA, 548 bp, Homo sapiens
  misc_feature 514: n = A,T,C or G
tccaccgcggtggcagcggccgcccgggcaggtacctttctgacctctgctgctttcctcacttgatatatttatctattattcatttgtttggtttcagcctgccactcaatccgatcacacaataatgtagtcagtggatgtggtgtctctgtagagctcatggtctccattccttttgaacatctgtgagaagcctgctgctaaaacatacccgatttagaaaggcaaacacttctcttccccatccttcccacttagatttggtttcaattttataatgaaaaggcatctgcaataattaaatttaataatttaatctcagaattaaaatacgtatgttcaaatcaggttattagttaatgtagaccctttcaccgattttaaaacagtctttcatggctattgatttgaccacttttaaccttcctaaacattgagttctgtttctctggacttaagattgcccccttggtcctgtaacataaaacacccataaatctggcctatattnattattcaacctatttaaggagaattttttaaag

SEQ ID NO: 59538 - DNA, 400 bp, Homo sapiens
actgagaacaattgctggcaggaggcgttttctccagcacattcagaactctacattcctgctctcctggatgtaaaatcttttcaatgtcttggcttcagaaagagactgggcacattttgtaggaattttcttccacggtgcacgttgcttattatcactttgatacgcctgaagaaggtagtaaccttaaaggttcttgccttttgttccgctctccccacagggagccagccaaaggtaagaacattttgtttgtcaccattttcaatataggttctgaaaaatgcaaatgtaaaagcagtaacaggatgtgatttgaaacctcagcatcaggtggcaggcagaaaagctgtgaatcacaggtaggccacataggtggtgactgactgcccccccg

SEQ ID NO: 59539 - DNA, 328 bp, Homo sapiens
ctccaccgcggtggcggccgccgccccggcaagtacctttttgacctctgctccttacctcactggatataggtatctattattcatttggtgggtttcaacctgccactcagtccgatcacacaatagtgtagacagtggatgtggtgtctctgtagagcttatggtctccataccttttgaacatctcgtaaaaaccctgctgctaaaacatacccgatttataaaggcaaacacttatcttccctatccttcacacttagatttggtttcaattatattatgaaaaggcctctgcaatactgaaatataataatttagtctcaga

SEQ ID NO: 59540 - DNA, 243 bp, Homo sapiens
  misc_feature 205: n = A,T,C or G
acattagttcagtcattgtggaagacagtgtggcaattcctcaaagacctaaattcagaaatcccattagactcagcaatcccattactgggtatctacccaaaggagcaaccattgctttatattcagcaatcagaaagcacaaataaccatatttttgtttagaataatgcatgtcaccaattcacatgaataatggtgactntgtgaccatattagattccagaatgtcttctggacaac

SEQ ID NO: 59541 - DNA, 329 bp, Homo sapiens
actgggattataggtgtgagccaccgcagcaggacacccagccaatttttaaactttcttgtagaggtagagtctcatttatgttgtgtagggtagtttagatctcctagtctcaagtgatcctcccacttcagcctcccaaagtgctcccaattacaggtgtaaactacttcatcgggccaatgtctatttttgcttaagaatgtttactgggcgatcatctgtgaacaaaatatggcctaaaaaggcattctagactatatataaaagataagctataaatgagttatgtctacaacttatcacatatacttaaaatcatctgaaag

SEQ ID NO: 59542 - DNA, 294 bp, Homo sapiens
acctgaggaaggcgctgttgtttctgttgggagtccatcctgtggtatgttcttagtattactaggaccatgtattaatatctttatctctcatctatctcagaggactatttgatgcttcaatacctaagtgtaaaacatattacaaaagtgctagccaaaaactatttaagagaaagtgttcattttattcaatagggaggttcctctgtgaattttgaatttttatatattaggaaagtctctctcaggttttccccccatgttatccctaacagaagagggggatgaaag

SEQ ID NO: 59543 - DNA, 465 bp, Homo sapiens
accacattttctttatctagtctatcattgatgggcatttgagtgggttgattccatgtttttcctactgcgaatagttcagctgtgtatttttaaaaagttctccaggtgattccaaagtgaagttggaagtaaacctgaagatcatcctcaaacatctgatgtgactccagatatccaagttgtttttcttcattggtaactaaattggattctgttttctatcagttcaaactaattaaaaggtttggctcacacacacaattgtcttcacctggtatgctaccaactcagggccataccaaactgctccagactttaacgtgatatgattgacctggggtcttgtaaaaatgaagcttctgactcattaggtctgttctttctgccgtgatactgagcaacagacctgtgtggctatagccactcaaggtggatgtcctacctcagcttggcactaaatct

SEQ ID NO: 59544 - DNA, 234 bp, Homo sapiens
actttaggctgagaaataaatagaagggtgagaaaaaagaacagtctttatagtcagtaagagtggaaagagaaagatggtagttggggaaagacagatggggagaaaggttggctggttgttaataaaacagtagaggatgagcatgtattataaatgctggtgggaagaaaccttgtggcaaggagggtggtagtgttggagaagaaagagaggatatagtagaaagttaaa

SEQ ID NO: 59545 - DNA, 294 bp, Homo sapiens
acgcggattcttgtccttaaccactgcactgttgcattgtagggaataatttagggctggtaataggagatgcaaagtagagaggacaattaagaagttgtttaaatagtctagatgagagttgatttccaacttcaaaaaggtagttttaaaaacgatgaagagaagtaagtggatataagactgtaaaggaagtagaactgacataatttggtgtctggattgatggtgctgccaaccactcataaggatggctgggaaagagcacctttgagggtgaaaggacttggattg

SEQ ID NO: 59546 - DNA, 299 bp, Homo sapiens
actaacagcaaaatccaaagcctatcttgattggatttattatactccaattggagagtagggaagaattttaatgaaatctcacgaagtttttctacattaagcttaacttgaatgacttgaaaaaggaagtagctatagtggctattttacttcctggcaatcctaatcaacccaaagacaatgcaaggaagccatgcagaattggatggttagagaactcatttgagactaccagtaatctaacacaaaatctgtagaaaagtttctttcaaaaaggaattagagctgaatatcag

SEQ ID NO: 59547 - DNA, 286 bp, Homo sapiens
acaggaatattaatgtttcatagcaaataaatagagaagctgagatttcaacacatacctgcctgaatttgaagtctggcctttaaacaaggtgtgccaatgcacaacttcagatagaggtaatggttctggatgggaggtttggaggctaagaacaggttcgctaaattagggcttcatgtgactgcttaggattcctgcaaacattgactttgaagcagcatcatcacatcatattcaaactttgcaacttgcttactgtgtgaccttgcctaccttattcatt

SEQ ID NO: 59548 - DNA, 362 bp, Homo sapiens
  misc_feature 101, 176, 206, 258, 263, 308, 330, 337, 350, 351: n = A,T,C or G
acgctccagcattacctctaagcaaaccttcaaatatggctactgtagaagcacttctctcagcagcacccctcactctttcctcaatgagaaaagaagtngaggccccaattgcatcctctttactgatccacccaaaacaaactccctgcaggaaagtagagggataagatttncaaaggagatgctgaagagtaaaaagcaantccacttcaaaataggaccttacaaataattaacaacagctccagatccatnctgtnctcttctctagaaccactagaaactctcagatctgaaactgtatnatagattacacacctacatatnccactcnatgatacacatgnntgaacttccta

SEQ ID NO: 59549 - DNA, 291 bp, Homo sapiens
accttctgatttttaaaaataattaacatatcttatgcaactaaaaatatactgtcaaacctatttaaaacatcttattctacccagcctgcccagcttttgatgtaattggggaagaaggttcagtaacagatgattttaacataacaggttgggctatgattgatatgttaattgagtgctcttcagagaaagggtgatccataaattcaatctagatttttaggaaaggtttcttggaggaaacaggggctgaattgactcttaagtaataattaccaaagagaggtg

SEQ ID NO: 59550 - DNA, 329 bp, Homo sapiens
tccaccgcggtggcggccgagtaccttataattcataagacatttaaaatggtattgaatcccaataacctatgcgtagggttggatcttgttgttatccctgttttttaatggaaaatctgaggcctgaagatggtaggccatgtatatgcctgccccgccgttgagcctggctcctgctgttggagaaactttcccagtctgtaaagagaggatgtggtcctggcaagcctggctcctgcctgattctgtatcttctggtaacacacagccgtcatttaaaaaaaaaaaaacaaggtctttccctctgacaaactaaaagctgaatc

SEQ ID NO: 59551 - DNA, 502 bp, Homo sapiens
acctggcttggacttgaatgataatgagagagcaactatccgcagtagaaggctgagcatttcaaatccctgtgaaacctagggttttgaaaacagtatgtttcggcaacagcaagtggttcagtgtgattggagccttaaggggacagtggaagatgaggctgatcatttagggaggtgccagattgccccaaaggcagtgttctcaatactaaactaatgttcttccaccataaatgagctccccctggcaacttctcatttctatcaatggaactttcgttcttcatatgtccaaaccctgaagtgccatcttcaggtctgcctcagcatttgtgatcagtgctcaagttttgtatcatttctatattcaaaacattcttctgtgcatcctattttgtttccactatctacacactacttatcacctaattagtagataatttcaaaactgtaaatatttgggtttcttcttgctctctctctcccttttttttttcct

SEQ ID NO: 59552 - DNA, 261 bp, Homo sapiens
actattggagaaaaataataggctcaccaaatacttagaaaacatctgaaacctcacttgtatcaattatttatcttgaacaaatttaacctactttttggtttaccacaaggagagaaaaacaccaaatcaattttacagcctttatacgactttttttaaaaccacagagggaggacgctactttcctgattctaactttccttttgctatttctatctcctcaaacgtcttttttatatcttactgaaatgttattca

SEQ ID NO: 59553 - DNA, 241 bp, Homo sapiens
  misc_feature 230: n = A,T,C or G
ctccaccgcgtggcggccgcccgggcaggtaccacaaaagtggttcttaggattaactcaataaataccttttgaacatctagtgtgctagaatgtcttctgggtgttatgcagcagtagacaaggcagattttatattatattgaggagagagagacagtaaaaaaccaaataaatgaaaaaataccagatagtgatattgttatgtggtgattaatacagtgacctantttggatggtc

SEQ ID NO: 59554 - DNA, 423 bp, Homo sapiens
tccaccgcggtggcggccgacgtacagtgaaccttgatcaacaaaatgaaacctgatagatggcaaagacaggaatcacagctgattttgctggttactacaagcttgaaagatgggtctggggccggggggtattgttttccaccctcatgctaaattttcaaggatcccctaatattgcctccacttttaataatgaaaatattattagattagagactttcaccaaatatacccaaatctttagcctataatgcaatatataactaaaaagctaataccttataagtattctgtcatcccaactctgctagcatggatggtgttattttttggtgtaactttataatcattctacttaaatggatattcattagctgatgccgtaactctgccatgctacatatcgtatctctagacctc

SEQ ID NO: 59555 - DNA, 288 bp, Homo sapiens
ttggtactggacatgatgggagacactggaaagtcccaaacctagtttagggtgttaggggacttcctggaatcggggacatctaagctgagccctaaagtaggagacagtcagatgggagagagtaaagaagaagacatttcaggccaaatgcctgaataccataccctggagtggtcaggttggttctctggtgggaacacgaagattctcctgatcttctcctccctactctcaacactctcaacattcgtagtttttacctccactaaatactctttcctatat

SEQ ID NO: 59556 - DNA, 300 bp, Homo sapiens
ggtggcgggcccgcccgggtcttgtacaaggaagactggctgaagaagaagctgagaacaaagcaggtctacagaggaagaagcagtgactagcctggtccctgaaccgggtgaaatgggaaagtagctctggctccccactgccaaaaggcctcagtgatcttgctgtttggggttattagagcaccttttacccttttcaacaaagcccaattttacttaatctagttagaatttctactccttgaaaccaagagagacaaagcaaaatcaactataatttaaccattcctcctactt

SEQ ID NO: 59557 - DNA, 277 bp, Homo sapiens
actgataaatgtgagctacagaatccccaaggatgaacaaaatcgactttgtctaaaatgtgtggaattttatgaagacccctgagttaactcttctgttgagttggctttacccttgtagaactgtctctgggtgccatctccctccccttctggtccacagatgttctccaccacctcatcatgatgttggggatttgtgccgtgttataggagttagccaggcagctgccgctccttcacccacaatagtcctcagcgaatgacaaacacattt

SEQ ID NO: 59558 - DNA, 223 bp, Homo sapiens
acctggcttggacttgaaggagaaatgagagagcaactatccgcagtagaaggctgagcatttcaaatccctgtgaaacctagggttttgaaaacagtatgtttcggcaacagcgagtggttcagtgtgattggagccttaaggggacagtggaagatgaggctgagcatttagggaggtgccagattgccccaaagcagtgttctcaatactaaactaatgt

SEQ ID NO: 59559 - DNA, 505 bp, Homo sapiens
actgaatatccatcagtaacaataaacattatggttgtgtgtgttgttgttgttgttgttgttttgtcttacaaactggcacccaagaggtccatgcacatggttttcagaaagcttgctggacattttcattggtcattggttccattctccaaaaatttcacacaaatacggtcactggtgaaaatctctcccactttttaaattaacccatttctcacactgctatgttactctttttgttcaactcccctaccacccccctcccccgagaaccatatatggactaaatgacagtcatctatgactgggagaagtccctgacatttaataataatttgaacttacttggagggaatgtgtggagtctactgtaaagtctaactcctttattggttcgttttcctaaccataatgtcattttttaaaatgcatgttccacttcactttgtttgtcttatttccaagaggcacaggagtagagaagataaccacgaccattgta

SEQ ID NO: 59560 - DNA, 340 bp, Homo sapiens
tccaccgcggtggtcgagcggccgcccgggcaggtactggttctcatagcacattccctgccacttggtaattagaaagtggaaggcttggtctcctgcagaagtaagaaaatatatttttctttttttttctatagagatgggctctcactgtgttttggccagggtgatctcaaactcctggcttcaaggaatactcctacctcagcctctcaaagctctgggattatagacatgagccaccacacctggacagaatgttttcttgatgaatgtagtgtcttgtcaccaactcaaagacttagagcaaactcttctcatcataggagagaatggtggc

SEQ ID NO: 59561 - DNA, 514 bp, Homo sapiens
acttggaagcaacatctacatcttttccagcaatctagatgctggggacacaaggtccaccttccaggaatatggccatgacaccagaaatcacaaacatgatgagaatggaatgactggggaagaagtgccagatgcttcacttgtaaatgaagacccagcctctggggatgcagataccacctccctgaagaagctgaatatctgcagataagtggagttcaccaatgatgaggagcgggatggagaaaggaggtagggagagtcatccaaggaacatgagcaacatgttaaaagccaagtggtttaatttctggagatggtgaacccaagaggctctgctgggagacaacaaaaataatgaagaattgaaccagagtccggtgaatatcagcactgggaccagttagcagaggaaaaggaaagaataaaagcgaaaagaatgaagagtcatatgattaccaacttttcctttttcatataaattgagtgtatatgggtctggaacaacctg

SEQ ID NO: 59562 - DNA, 337 bp, Homo sapiens
ctccccgcggtggcggccgaggtactgaaatttagatttttaaaatatgaactaaaattccagatatattaaataattacatagaaacaataagccaaaaaattaattgtgtatttattgaatttatgcaaaggaacagctaagttcagaattagcagaagaatttaaaaggagattgttggcagattggaccacataaaaatcttttatatcatctaaaaatatagcccaaatgaaatttaaaaaattgtagcagactggaggaaatatttgtagcaaatttccagggttttaatattcttgtatatcgagcggccgcccgggcaggtaccctgtg

SEQ ID NO: 59563 - DNA, 296 bp, Homo sapiens
  misc_feature 240: n = A,T,C or G
acacttcttttgcaatgatgccttaaatgacaatgtattggcggcgggggcggtttgaaaagctaacttgtttcccacaagtctaattgtcccactgggcaattaggatctcatattaacttcctaggttgaaaggacctaggaaggcccacaaccaattccactctcccaatacccagcagaattagtctccaatgaaaaggcaaaagattcatgataaaaggataatccacaagaaanatcaccttgctcaactgcaaaaggcagttcactgaagtcatgaagatgaaaacaga

SEQ ID NO: 59564 - DNA, 444 bp, Homo sapiens
actggattttggtgttagcctttggtttgaaattcagtctctaacacttcctagcactttcttcccatgaagtatactttacagggctgtgcttttaccatagtgcctggcgctgaaatcaattttagagatgagctgtcttaaagcagaaaaacattgcgaaaattttctcaattctgtcaccgtgtgttagaattagcacaacttagcgtgcttttcctttaagaaactcaagtatttccttctacaactttcctaaggtttagctcaacaggaacaggactccaattcccaaacccatgttcacgagtgcacctccgcactggcctctgactcaacaaagggtcaaagtttcttcttacctgaagagttttccctgaaggtcttctataccagtcatggcaatagttcctccctgccagcagacggagataatataattga

SEQ ID NO: 59565 - DNA, 300 bp, Homo sapiens
acaataacatttaatcaagtgcaaacagccctgcagagttcaggagtgctgctggagctaggatgatgggtctaatactctagggaccaagaacaatgaagctgacatgtgggttcacctccgccattgctcaaggaagcatccgtggccttttgctgtgtttaattacagtggcaaaatctcagtcactgtttacacaggcttattgctcaggtgtggaaatgcactctaggctcacttttggcatttgctttgtatcggggagttcttagtctcttgaattaaaatacattcattcca

SEQ ID NO: 59566 - DNA, 271 bp, Homo sapiens
accttcttttaaaagacacttgtaaactttgagactattatactcctcaaagaaaggaatgatcctctaatttgaaatcaatctcctgaggtttatcctccatacgaaagtatttcataggagagatctgtctcacaaaaccaaatctatttcctgcacttgcaagtaaagtcagaagcctaaaaaatgatggagaggaatgaactctaacatgagttcttggccaagtggaaaacttctctggttcagaacttcctaaggcaccctgcag

SEQ ID NO: 59567 - DNA, 394 bp, Homo sapiens
acttcaagccatcacactgtaaagacctccccaccatcatcagtaaccaaagattgtgataaatgattttatttctatgcactaggaacacagaggaggaaatgatgatttatcccaacttggaggaatctggaaagtcggtagataccaaatcgattctacactggacttagaaagacagagagaaaattcatacacggagggaaacatttcagatgaagagattagtcaacaaaattgggaaatctataaagaatatttccctagaaaatttctgtgtaattttagaacataaggaaaatttctacattccaatttttgccacctatctgtcatccccagggagcagctaaccctttagaaatggtgaaatctcccttttctggggcagcaa

SEQ ID NO: 59568 - DNA, 575 bp, Homo sapiens
  misc_feature 506: n = A,T,C or G
acgcgggtaagaagtcacttctgagtgaatttagagtttataatgacactgtgattacttgaaaatgaaggattggtcatgcatattcaatgtagtaaatacagtaataagttttctaactcattttcttctccgacaatggaagctgcaacatgtgcttgacccaggctagttgtttagctcagagattaaagattgcacacaacttggtaaagtgctgataaaacagcaacaggctgggcaccgtggcatgcacctgtagtcccagttactcgggaggcttaggtggaaagattgcttgaacctaggagttcaaagccagcctgagcaacatagtaagactccatctctaaaaacaaaacaaaataaaaactcagcaatatttcaactcagagctaaaggcagtaatctggaaggagcagtaatccccctcttagaacaggaaaaaaagccaaagaaacagaaaactcctttgggagatctgaaatagcatggaaaacaacagnctgaaatatgaagagagatagacgtgtcaggaagaagcaggacttggacatttgcttacatggggaaca

SEQ ID NO: 59569 - DNA, 539 bp, Homo sapiens
acagtgaaccttgagcaacaaaatgaaacctgaatagatggcaaagacaggaatcacagcagattttgctggttactacaagcttgaaagatgggtctggggccggggggtattgttttccagcctcatgctaaattttcaaggatcccctaatattgcctccacttttaataatgaaaatattattagattagtgactttcagcaaatagacccaaatctttagcctataatgcaatatataactaaaaagcaaatacctcataagtattctgtcatcccaactctgcaagcatggatggtgttattttttggtgtaactttataatcatttcacttcaatggatattcatcagctgatgccgtaactctgccatgctacatattgtatctctagacctcagaattagaagtgggttgaaatggttcaaagttcagtgttccttaatcccaaaacagaaccccaaatcatttttgaaagtttagaacatttgagtggctatgaattcctgttttattaactacacatacagccttatg

SEQ ID NO: 59570 - DNA, 296 bp, Homo sapiens
acaaggaagactggctgaagaagaagctgagaacaaagcaggtctacagaggaagaagcagtgactagcctggtccctgaacgggtgaaatgggaaagtagctctggctccccactgccaaaaggcctcagtgatcttgctgtttggggttattagagcaccttttacccttttcaacaaagcccaattttacttaatctagttagaatttctactccttgaaaccaagagagacaaagcaaaattaactataatttaaccattcctcctactttgagagcatgtaggttattttt

SEQ ID NO: 59571 - DNA, 314 bp, Homo sapiens
ctgtactacccattgtgctcgtgaataaatcagtaggtcaacttgcgaatgaacctaacgataattgacttcttgaagatgcacattgcatgcaacacattttggctgtttaacgtacggtgactgtgaaaacatgaatgcttctgatagtagaaacgactgaatgcatcatatacaacactgcactgctaggagccttcctgcttgactccatggtcctcttttcttaaaaaactaagctcacgactgggtgtagtggctcgtgtctgtcctcccagcactttgggaggctgaggctataggatcacctgagc

SEQ ID NO: 59572 - DNA, 458 bp, Homo sapiens
tccaccgcggtggcggcgcgaggtacacatttgattgtgtcactcaactgttttaagagtagccagtgattgatttctctgctgcttccaggatcaagttcaaactgtaacctgaaagacctgtaagcagcaaagtttaaaggccatatcaccttccactgttccctactttcacctttcactgtctagctctttttaagcctaatcccctccttcataaactatatcccctgcaaacacataaagcattttcaggactccagccttttgtttatatagtgctctcagcctggattgtctcctctatccgatgagattctgaaaaactaaatgctgtgtcagtcatctctgtatatccaatgggtccttgcccaatgcctggcataaaatagggacttagtaaatgttgaatgattaattcccacttcaaggaagactcagctctcaaatgttatttc

SEQ ID NO: 59573 - DNA, 455 bp, Homo sapiens
acagaattcttaaagcgaggaaatgcttactcagattcctccaaatatggaacaaaccacttggggaagcaacacattttaactttactggttcttttcaaaataagatcaccaaacttcttgaataggacactaatacaacagacacacaaacaaaaccaaagacaatgaagagactctatgttgatacatgtgtggctacttagtcatgagggttagataactcaggagtctgtaaaaactagactagaaaagaccaggagaggcgtgagggtgggagatggccggtagcttcctaagttcatatgttgtttaagaccaagggtaatataaacactatcacacaacaagctttactttgttaaaagaatcagtgtgaagcattcatagcttttactaaacttttgtgttaactgggtttcattcccgctgcttacctctgggctgagttcctc

SEQ ID NO: 59574 - DNA, 263 bp, Homo sapiens
actctgagctgcattgtatgcgccagtgcacgtgcttgcactgatgtggcaggccgctctctgggaaactcgaacttaatgttatatctgtttgaaagtagatattaatactacttcctatataataatgtctatacgcatctataattttgctaaccgataattcgttaactaattaaaactagctataattatttaggatacaatcttaagacttaaaatatgttcgtgaagaaagatcagatttcatgtttttaaaacat

SEQ ID NO: 59575 - DNA, 474 bp, Homo sapiens
tccaccgcggtggcgagcggccgcccgggcaggtacacctgtaaataattcaattcaattcacaactaacagcttgttatattaataagtttctcacccattctgctattactggacaggattttatgaaaaccatgacagtgttttcactccagggagtcttcttttagaaagatgttgtgggtactatgaatgatggggccattgttcctgggcacagagatgattccagtgacaaaattactgtttactatgtgaaagccatggtatctgaaagcctaacaaatagagttgatcataggttgttcccgctccttttgctatattaaaaaaccattccaactaaggcaatatgataattaacttgacttctatttgtttctttgtatcaaagtgattgaatccaaacactatccatccaaatcactggcctaagtcaatggttgctaaatgaggtgctaagaccctgctgag

SEQ ID NO: 59576 - DNA, 332 bp, Homo sapiens
ttggactccacccggtggcggccgaggtacaccagagggggacaggaatcttggagccacgttcctacaggggaacttccacgttcattacatgttatacaatcacatttttctcattcattaaacattatacaatcacattttctcatcacttttgctattttttcatgggttagacttttttctctactgggaaagcttcacacagagagtaaataaacatttttgtttatatttatcccaattcagaacattcctgcatgataataaactctgaagctaattatcctctactacacttctcagtaacaatgatattaagtcattcccca

SEQ ID NO: 59577 - DNA, 446 bp, Homo sapiens
  misc_feature 397: n = A,T,C or G
acgcgggggtagtagctgggactacaggtgcccgccaccatgcctggctaattttttgtattttttagtagagacggtgtttcgccgtgttggtcaggatggtctcgatcttctgacatcgtgatccacccgcctcggcctcccaaagtgctgggattacaggcgtgagtcactgcactcagtcaggttttcaggtgctggttccatggctcttcctgagccgaaaataaggaaactccatagaccttgtccactggaactcgttcccatctaccctccactctatccaggtaagaaaccaaccatctcaggaaaggaaccaggcaggagtcagaggggaagatgggcactgaaggtatcaaaatacccaaaagatgcaaattgctaaaggaaacantaatcagattaggtgtggtgaaagaccctagaaaaaaaaaaaaaaaaaa

SEQ ID NO: 59578 - DNA, 350 bp, Homo sapiens
ccaccgcggtggcggccgaggtacgcgggtctatcaagggttccaatttagactgagtgttgaaggaccatggatcagaggttgagacatttaggctgagacttatcatttggagatagtcaacaaagaggcggaagagaaagtttccaggtggaaagaacatcacttgctaaggcctgggacaagtgggaatgggagaatgtattgagcagaatgtttgctatggttatgtcattgtgtgtagtgaggggtagaggcagagggaaggaccagagatgccgatgaagagtgaccaggatcacatcaccagagcctattcaaccacagcattccagttgggcttttgagtg

SEQ ID NO: 59579 - DNA, 253 bp, Homo sapiens
gagaaaaaacactgtctttatagtcagtaacagtgaaaagagaaagatggtagttggggaaagacagatggggagaaaggttggctggttgttaataaaacattaaggatgatcatgtattataaatgctggtgggaagaaaccttgtggcaaggagggtggtagtgttggagaagaaagagaggatatagtagaaagttaaagaggaactggaggcaggtgggatccaggacataggaaggggaagagcctt

SEQ ID NO: 59580 - DNA, 147 bp, Homo sapiens
acgcgggagctagttaaacttttgtgctctttacttcaaaggaatacggtgaggatctataggtcagcaggtcaaaagtgaaaaatgaatgtagcaattgtcaaaaattataaatttatattaacaatggcttttatagacatcttc

SEQ ID NO: 59581 - DNA, 300 bp, Homo sapiens
acagatgagtccattcaagagaaatttgcagtcaacagagttgactgactgatgcacagctgactccagatacacaatgaaggcaaactgagacaggaggagtcattctgctgatacacaaactcaagagtaataacgtgtgttgttttaggcaattacctttgaggtggtttgttaggcagcatttgctaacttgtataaatatacaatgaagatcttcaaatatagcaatttttcttgtgactttatgaaagaaagtttttaaaaaactcacccagcatgagtttatcaataataaaa

SEQ ID NO: 59582 - DNA, 314 bp, Homo sapiens
acgctccagcattacctctaagcaaaccttcaaatatggctactgtagaagcacttctctcagcagcacccctcactctttcctcaatgagaaaagaagttgaggccccaattgcatcctctttactgatccacccaaaacaaactccctgcaggaaagtagagggataagatttccaaaggagatgctgaagagtaaaaagcaatcacacttcaaaataggactttacaaataattaacaacagctccagatccatcctgttctcttctctagaaccactagaaactctcagatctgaaactgtatcatagat

SEQ ID NO: 59583 - DNA, 529 bp, Homo sapiens
tccacccggtggcggccgaggtacgcgggatggtcagctcttaattcactgttgtcacacgactatagaacaggaagcacaacttaacacctgtgctcatgagaattttgttccttatgaccaagctaaagaaagagcttagacaggatgtgtggctataaatgtagattaatggttccttggctctttggtttgagccttctcagcagagcaccccacggagtgttttccatggggccacgagcaagaagaatccacttccctcctcctcaatgtcagaaaatagagaatattgtctttcaggatagaattaaaaagtcatagaggctgcaacttgttttcctatattaggggtttaaaattctgtttttccttcctctcctgggtcagatcattgtgtggatggaccttgatttcattgtggtatctgtatgtggaccctgaagaccatggacttctaacattccttaagtaccttagcccattcctacaggtcacaagctcatttacttacaggatggttgatttg

SEQ ID NO: 59584 - DNA, 455 bp, Homo sapiens
acaagaacatttcaccaaatattaacaacactgtattttagtggtctttcttcaaacgcttgtcaaaaaccaataaatttcagaagacaaggcaggatagtgaatcaaggagaaggttcccctttgaagtatagtttctacagagtttattaagtctttaaagaacttgtgacctgtagagttttgtccgggtattatttaagcttgtaaagcaaagcatcctatattcaggtgagaacacgtggttaacttatttctctctttgaaccaacaatgagatttctagtcttagcaattctacccacaaaattcccttaaccaatgaagtctcccttattagtaactgggaaagaaataatttctcctatttcatagtaaggcccatattccaaagaatatcaagtatgtgtttactatagtattactactataatgactccttttttttttttttt

SEQ ID NO: 59585 - DNA, 277 bp, Homo sapiens
acttttttttttttggcccataattttccctggcccatttaaaaccgggggagtctttttaattttgcggggactttgggggctgccaatttgaaaggtgtttttttctttgcccggggcccccttaaatttttttaaaggtggttttttaaacacagtgggttaaacttgcccaatttcccacatttgggtggacttattttccccgagtggatttccttattttggggccgattgtccattgagcgggcttgccattggggcccttttttttata

SEQ ID NO: 59586 - DNA, 285 bp, Homo sapiens
actaatagcctgggaatacacccagaatcggcgtgggagggagaaggggtgtcagagaccagaagaaaaagtgaaagctgtctgctgaaatcagtaatcagcccccatcccagaatgcttacagccacgctcttacctgccaggattcctctttggggaaaccagcccaacaagaaaaatatatatatttaacagaatattttttaagaagttggtctcatggaaaacagggcagaaaagaaaatcacagtagctatgaagttgtcatacatccaaccaccagga

SEQ ID NO: 59587 - DNA, 218 bp, Homo sapiens
  misc_feature 209: n = A,T,C or G
accaccaggtcacctaactgtggattttattttctctggctcattcaaggtgatagcatttacatttgagagagaaagatgacaaaaacagttacttattatttatttagctaaatggttaactttgagtgaaaccaaacatcagcatgttcttcaaatatttgtcctgcatacctattaaaagtaaaagctttatgcatacatattanaagtaaaag

SEQ ID NO: 59588 - DNA, 326 bp, Homo sapiens
tccaccgcggtggcggccgacgcgaccaggtacatttttatgggttttgatgagcaaaaagttttttcatcaccacggcacaaaaaaaacccccctttaaaatttcctgatgtaatcaatgattttgtactcagccctcttataactccaactcaatatactctctaacttgggcaaccactgatctgctccccatctctatgttttggctttttcataattaaagatacattgaattatatatcttaaatatgcagtcatttgggcttcccttctttcacttagcaagatacactaaaacgttcatccatgatatgcataaatca

SEQ ID NO: 59589 - DNA, 280 bp, Homo sapiens
  misc_feature 31: n = A,T,C or G
acgggacttgtctccaggagacatgtctggngaagaagagctagactggagaaacatgagcatgttcaggtgaaaacatgtgagtggataagagcaagagggtgagaacacagaccaaggggctaagggacagactgtgttcagtatttgggtatggaacttgtttttgctacttgctagttctaagaccaggctcagactctaacttctctgtaatgtgggaataatgacagcacttaccttataagattttacaaagattaaaatatcatatataaca

SEQ ID NO: 59590 - DNA, 279 bp, Homo sapiens
  misc_feature 89: n = A,T,C or G
acattaaatgagcactgcacagccaggcggcagggttgggtagttcatcatacaaaccctatcctcacaggggattcaagactccaggngaagaaaagtggcaaaaccctggagaagagagtggtttggaaactacacattcacttatgcatgtcagacaaacacatacttacagctacatagggcattatgcaacaaaggctctgtgtatccatagtaataccagcatttacagtttctctggcaatttaccacaactgtcagttttctaagtatata

SEQ ID NO: 59591 - DNA, 311 bp, Homo sapiens
actccatttagttgaaagacgagtttcaactcttccatgcaggagaatgagccagcaacctgccacagaagtcaagtaacaaaaggcccccttcagaggctgtcaatttccagcccccgatgttctgtgaccagataagtcggttcctggtgcacctgggtcctcctgggttgccagcaagggttgtcagcataacatatcagggaaccagccactgtatttacattttaataagtattttgttttccttactttttcttgtttgttcccaggggttctaagaaagggaaagacagtaataaccaattcat

SEQ ID NO: 59592 - DNA, 324 bp, Homo sapiens
accttctctgctgtttgctacttgtgaatttggccttctgtgttataatgttttaattcaaatacttcccttttctcaagtcttacctccagaagaggtcggctgtgttttcccctgatagcatgtgttttggtcatggctgagtttaggctgcttggcatccatcctcaatgttcagctgtcagtgggcggcctctggactttttattcataaggaaggttagaaatcaggagccttccatgcgactaattggtagccaactgccattctcaagaattctgataatctttaacacccagagattagacctttctttggatagt

SEQ ID NO: 59593 - DNA, 269 bp, Homo sapiens
acctcactctcgctttcctgtaattggacctataaataatcatcagcactaatccttgcctttgttttctagggaactcaggtgaagacaagagttccttattacacatatctggtattctttctcaaggcgtgaggctttaattgctattttaattttaagaaacagaaaagggacaaacacaaaactacaaatgtgatactctttgtatgaattaggattaaatttagttgtaagcagcaccaaacgacaaatacaaacctaagtga

SEQ ID NO: 59594 - DNA, 484 bp, Homo sapiens
  misc_feature 63, 64, 65, 66, 67, 68, 69, 70, 71, 72, 73, 74, 75, 76, 77,78, 79, 80, 81, 82, 83, 84, 85, 86, 87, 88, 89, 90, 91,92, 93, 94, 95, 96, 97, 98, 99, 100, 101, 102, 103, 104,105, 106, 107, 108, 109, 110, 111, 112, 113, 114, 115, 116: n = A,T,C or G
  misc_feature 117, 118, 119, 120, 121, 122, 123, 124, 125, 126, 127, 128,129, 130, 131, 132, 133, 134, 135, 136, 137, 138, 139, 140,141, 142, 143, 144, 145, 146, 147, 148, 149, 150, 151, 152,153, 154, 155, 156, 157, 158, 159, 160, 161, 162, 163: n = A,T,C or G
  misc_feature 164, 165, 166, 167, 168, 169, 170, 171, 172, 173, 174, 175,176, 177, 178, 179, 180, 181: n = A,T,C or G
ctccaccgcggtggcggcgcgcagcgaccatgtacttttttttttttttattggtgcaggggnnnnnnnnnnnnnnnnnnnnnnnnnnnnnnnnnnnnnnnnnnnnnnnnnnnnnnnnnnnnnnnnnnnnnnnnnnnnnnnnnnnnnnnnnnnnnnnnnnnnnnnnnnnnnnnnnnnnnnnaacggtaaaaaaaaaaggggttttacgggggtttgggggcaaaattttattaaaaaccaaaatttttttttgttacaaaaaaaaaccccccgtaaaatggtttcccccccccacctttaaaaataacccatttttttgtaaaaaaaccggggttttttttaaaaaacttttacaattacccggggtatacgggggggctaaaaaatttttcccttaaaaggtttttaaaaaccgtttttctccccaaaaaaaatttggggcccccccccccttttttaaaaaaaaatataatttttttttttt

SEQ ID NO: 59595 - DNA, 306 bp, Homo sapiens
acaaatcagtaaaactagctagcacagtattgtctcataagttgaaacttttctccatcaggtcaagtaagacatacaggtctggctactagtaatagaagaatacatgttatcaaactaagcccccaacagatatcaactgtaaactccagaattaatataaagacagctatctaaaaccacggagaacaaccaaaagcaagccaacactggaggagagcgcactcttggaggaaaggaatttccctgtaagtttccaatttcaaggaattttgccgaaaggcatcctcagtagtggctgaaaag

SEQ ID NO: 59596 - DNA, 275 bp, Homo sapiens
accggtccaggtctgggggttggtgacccttggtctaaataacagtataagtggtatctaatgacaaagcaggatgacggcacactgcactcatctaaagttggaaacactacaccattgtcaccaacaagagagccacagagcaggacaagagtttgaatacatagcctctccaaaaagctctttggccaaatgcattcagcaagcactacctgccaaataaaaccattctaaattgaagatgcttactcaaatttgtgttgttaaatatttct

SEQ ID NO: 59597 - DNA, 394 bp, Homo sapiens
acctagggtagaaatggcaactgtatgcttcaattttaaagaaaccaaactaggtataacaatccacatgccatcacacaatacatactgcccccacactttaaaaagaccaaggccttcacatgtgcattcagagactcagctcaaattaactgcatgatcaagtctcatcctaccaaataccaaagtagaagtgctacatactacagttccctacaggaagatctgtcaaattcatcttgtagtgaaagtttaaaatcctagacatctctgaatcactaaattttaattctggaaggaaactaagatcctctaacttaatccccttattttatgtataactaagatctaaagttacaaagctactggggtgagctgaaccttccccatgttt

SEQ ID NO: 59598 - DNA, 439 bp, Homo sapiens
tccaccgcggctggcgggccgaggtactttcagtagaataggggtcttcaccaggttggccaggctggtctcgaactcctgatctcaggtgatctgcctgcctcggcctcccaagcgccgggattacaggtatgagtcactgcacccagccttctacttttaactaacataaatcttgtttataaagtcacaagttatgggtcagcagagccatgcagtggaagcatgctggaaccataatattacaagctatggagcacaaaactgttaagttacagaattttattagagattataaaaatcatgtagtccagtcaatagtcttatccctagacacattcattaagccatttccacctgaaataccggaaaacaacagttactattttagtttaagactcactcttgcatttcagtacctgcccgggcgggcgctcga

SEQ ID NO: 59599 - DNA, 286 bp, Homo sapiens
acgcgggtgaaatgaatagtaaagactggttagaaggcttaaggagtatggcaaagtttacaaaagaaacaggtgagagaagtgactaaagaaaagtagaattgataaagactgatgagagctcaagtgagatgtcaaaccaagaatttatgtagggatacagttctgtgcattatagaggttttgtttgcttctttttcttttcttgcacctttcagcttctgtgacacaggattagggaatgagatagccatgtgacctgttttattatttgttcattttagag

SEQ ID NO: 59600 - DNA, 532 bp, Homo sapiens
acacatccctgacctccagagcagacttagctgtcccttcctggcaccctctcggaaacactctcttctcttggcctctgtgattcttctatctccctaaccagtttttgtctctcttttgggacttctcttctaccagctctgaaagaaagttctgtccttgcttcaggtttctatcttcggcctgtcgtccttcaacacactccccataagggaccccattctctccaagccttcattcatcacccagatgctaatgagccctaacctttatcctgtcttctgtgaactctggatccgtttccagtgtcctacaggatttctccacctgaatgtcctcatgacacttccatctcagaatatacaacttgaactcattacttatacctgccacaccaaaccctttcccagtttcagttgatcccctttcccagtttcagttgaaagcgttacccagacacctcagtcatcctcaacaattccttctgcctcaccctccacagacaattggtcaccatggcctgatgcatgt

SEQ ID NO: 59601 - DNA, 514 bp, Homo sapiens
  misc_feature 177: n = A,T,C or G
tccaccgcggtggcggccctctagacctgttcaatgcactgaggtgcctgactattatctccctgctagttatgctctgcaaactcatgaggaggtcgcatgtacctaatttacgtaacttttacacaggcatactcgttcactctgtatataaacaccaatctttgcactctctgnaacacttctattcagtggaaatagaatggaaaaagctaaatagccccaggtcccaaatttaaaatatctatcttttggcatagaaaagactattgcactgggttcggttccattcaatactgttgctatagcctttctccgtagaatagagtgtgctaaagcaggactaaaattggatagggtggatttatcctagcaatccaacctgctcttaacagaggatatcgggggaaatgcatgaaggctagatgttcacaccgtcccacttctccagcctttcagaaatcaagagttgattgtctcgcattgtggaagagtatcatcagtgtccccgcgt

SEQ ID NO: 59602 - DNA, 585 bp, Homo sapiens
tccaccgcggtggctcgagcggccgcccgggcaggtaccttagcattgcggtgacttataataggtgctcagtcaatgtttgtttccattcttcttggacatatatgagaagggccatataagattattaactatttatttatttatttttttgagtagtgaaactctaaagactcacagtctgaggactcatggagttgttcacatccatgaacaacaatgttatgaatcttttagttataaagcaaacctttctctggagcatgtttgtgttttctcatttaggtttataaattgctctgagactagcaggattgctgtttaagagtcttgtgaggtaggctgcctgattattttaggtgcttccagtaagagcagatatttttttactggtgaataagagaccacattataatttgtcctttttactgagagtgcatagtatattgtatactgtaaacttgtatagtatgtgaaaactttttacatgggaatcttggaacaaagtcttagatgtctaactcgtttgctaactctgaggatgtggaggatggatatggacataggaagttcaacatgtgtatc

SEQ ID NO: 59603 - DNA, 375 bp, Homo sapiens
ccaccgcggtgggcggcgcgaggtacagccgggcggctaatctgtggagccagtgcctgatttcaaatcctaaccccgccacttttacttgctagtcacacaatcttagtttcttagcctccccgggtctcagtttcatcatctgtaaatgagaacagtagtagcactggcctcacagggctgctgcatgtgtgtatgccctgagacgaggacgtgatctccaggcacagtaataaaaacatgaaaaggccactagcaaacaagagccaggaagccctatttacatttcacagaaacaggaacaattcttagctgtcttgcaattcagttagaatttgtggaatatctgtcttagctctaagagaatacttttaa

SEQ ID NO: 59604 - DNA, 583 bp, Homo sapiens
  misc_feature 450: n = A,T,C or G
acacaccagatgtattcaacaaccataaaaaagaacaattaggactcaagtagtatgtcagagtgtagtcactgatgatatataattctccactaccaagaagatggaagcacactgttgagtagctacatcctacatatgttggccagaatttaggaatacacatgtgatctatacattttgaggtattgtctgacccctagaaaatcctggtgaagtttttctggtgtcagtttggtcttaatgtttaggaaatgcccacagactactcctgctttctgcttattcacatagtaaacgcaaagcacaggactagtttgtcatctggatcaaggagaaatgagttagcagatataaaataaatcagaaaggaggtagttctcaaatatttactccatgaatagttgctggatgttcattaactctatagcatttgttactacttattgnggatcctggaaagaaaatatattgtctatatccactgttcactgaggccctctccctacccagaaactccctgtctccatcactcactctccacattcattgacccaggggaacagttcatggatgagtgaac

SEQ ID NO: 59605 - DNA, 301 bp, Homo sapiens
acacacggccagctatcatggtacgtagctgttttctgggccataaaaagaagccaaggaggagattggagctatgggaggtgtttgaaaagccttgaggcatgctttaagatctcttctttttagtggccattctttctttgcatgctgactctaccttccccattcaaatacagacactttggccctgacttaggctcctactttctcaaagaaaagggtctggaaacctcatttgtatgaagttgatagtgatttaagattgtaaattacagtgtcagagtcatactgttggcatctt

SEQ ID NO: 59606 - DNA, 237 bp, Homo sapiens
acgcggccctcggcctcccaaatgctgggattacaggtgtaaaccactgtgcctggcctaaaatatttctcctggctggcatttgatctgacctgtctgttctctgcggctgtcttcctaccatgccaatacatggaagcagaggtggaaatcctaccactgccggacaggaaggcaggtgaggctaagtagcctgtcagcaccgagcccttctccataggcagctgctataatggt

SEQ ID NO: 59607 - DNA, 294 bp, Homo sapiens
acgcggggacataacagggattttttttatgccttggggttctgtttctgattttctttctgtgtgtttctccattatgttgttgcatttttctctatttacgttatctccctttccctttttctctctgtccctccctccttcttcctctctattcttcccctccccttgtttttatgcctgattatgtggacacagacaaggattaaaacagggcacctgcccttgaggagtttacaatctgctgggctgaggatcaacacatgttcaaaaagagaggaaagaagtcaaggg

SEQ ID NO: 59608 - DNA, 545 bp, Homo sapiens
  misc_feature 517: n = A,T,C or G
accataaccttatgccgttcattaggtgataataatcattccattcagtattatcgttgtaagttaaatccacttttccaagtttataacttttgggcacttggcttaattttctgttactcttttaatgcttaaatgtgtaatcctccaaaaacaatgtatgctttttaaacctttaattgatgctttatttgatcaagagaatctcagctattttaagtggagtcaaaaaataacaatgtgtaattgtaagagccaggcatggtgacatgcctgtagtcccagctactcgagaggctgaggctagaggattgcttgagtctcggagttggatactataatatgtgatgatcacatctgtgaatagccattatactccagcccagacaacactgcaacatcccatcttaaaaaaaaacagaaaaaaaacacgaaaagaaccttgctggctatgtatagattttatgctaatcttttccatgtcactgtgattgttagagctctaattttattgttntaataatcttgtgatcaatagttgaatg

SEQ ID NO: 59609 - DNA, 317 bp, Homo sapiens
tccaccgccggtggtcggcgcgaggtacaatgatgagagcttatggaatttcctttctggtttttcaaattttttcttaaaaataggaaagagggcatcagctgagatttggaggtctgagaagagaggagaaagaatgaaattgtcctctggagagacagaggatgatgatttcagaaaacagcatgattgccaagcagcatgcatgggctgatttgatgttagcaaatgtgatgttagagtgagacctgtgcacatcactgtgtattttccagcgttcaggaaggccaggaaattccactcatcaaaaaaaggca

SEQ ID NO: 59610 - DNA, 304 bp, Homo sapiens
  misc_feature 276: n = A,T,C or G
acgcgggtaagcccaaaccctgcatcatcctaaattctactttattctcaacagctggtcctgggatcgctgctgccttcatctctcatctgtgagagaatttcctatattataattatttgattcatgtctatttctttcattagaatctttatgtcccaggcacctacaatttttatagtattaagtgttcaactaatacttttatatgtaaaaatgaatttatcagcaatcactaattcccaaggaattaatagcattaccctgttgtcttanaaaatgccaaaaccatagaaattgattt

SEQ ID NO: 59611 - DNA, 244 bp, Homo sapiens
acgggacttgtctccagagacatgtctgggaagaagagctagactggagaaacatgagcatgttcaggtgaaaacatgtgagtggataagagcaagagggtgagaacacagaccaaggggctaagggacagactgtgttcagtatttgggtatggaacttgtttttgctacttgctagttctaagaccaggctcagactctaacttctctgtaatgtgggaataatgacagcacttaccttata

SEQ ID NO: 59612 - DNA, 392 bp, Homo sapiens
  misc_feature 318: n = A,T,C or G
acaaccacacatacacaagcaatgttttgggtttcaaggactctacattttttcatcttaccctcatctctttccactttcttttgcagatgttttctttgaaaaacatggtgagaaattcctccactgcattttcttcagcaggatattgatggtatcagataggagatgatgcagtctgagccaacacagctgcctgtctttgagtccagagatgcttttttgtggatagctcagggcttttgaaataattagtaggttataataaggggctgatttggaacagacaatgggattgtttctggatatgatgagttntagggggcaagtagggcatcaggaagaaactctggatttgtccaatcagtcattgtcattgtcattactgctct

SEQ ID NO: 59613 - DNA, 517 bp, Homo sapiens
  misc_feature 108, 486: n = A,T,C or G
tccaccgcggtggcggccgagggtacttgctttacagggaagtcatgatgactaaatgtaaaaattgatgtaaaaaatatgtagatgagtaaactagttaagtgtcanttgaaaatgcaaggcggcattatttctaaatggcttataatatttgagtcctaattattgcagtcatatgtttgcagttcttttctttgaaagtgtaattaagttgcttcttcatcaaaacatataaaatgaatttatgtatcaaagcttcatcctatatttgcggagaggaagctttctatttaaagcattgtgaattgtgagtaaagataattttattgaaaaacaagtgcttttttttttactcaaaaatgtgtttctaatagatggtagggtttaggtaggaatattctccttttttgtgtgtgcctaaagctctgaacacagtgcagttactcaataagtgatggttgatatggaatttgtggggtgaatcanaaggaaaggaaattgacaactcagcccaatc

SEQ ID NO: 59614 - DNA, 329 bp, Homo sapiens
tccaccgcggtggcgcggccgcccgggcaggtacatagaacactaaaagccccagtttgcttccttagttctaatttatcctaaattagcaagacagcaacagttaacactagacttttacaactccatgaaataatttttaattaagatttcccaatatatagatatagctatgaccattcaattagaagaaaatactgttgaaataggggctttaaaatgtttacctgcttccctttggctttcaaggatcttgaatcacctgggtccctctttgcttacccaactttattatctaattcttttcaataagagaacttttgtttcag

SEQ ID NO: 59615 - DNA, 277 bp, Homo sapiens
actcttagaagataaaacagcatacctggaaaataagagaaatccttgaggacaaacataaatagaaagataaaaattaggggtgtaaaacaaaacctcagaaatgctttctgggggctttggtttctaagggtttctctgaaaaaagaggtaaggactgcacctgtgcaaggtcgagctaagactgaaaaaattgtctaaagttaggacttcaaagtgttacatattcagtgataggatggcccttaaaaggtcctcatcaggaaaaaataaataa

SEQ ID NO: 59616 - DNA, 244 bp, Homo sapiens
actctagtttagtttttttttttttctttaaaggcgtaccattactaaaagtttacctttggaaaccttgtaccatcttaaaaacttttaaagggttgacagcttttggcaaattgactaatccagaaaactaaactttggttcatgtattcaatgtctaaatgaaaaatgggaaaataaaaaacctaaaaatgaaatgtgatttcatgtgcttctcctttttacctcttataataaattgaac

SEQ ID NO: 59617 - DNA, 423 bp, Homo sapiens
accatttagaagatttcagagtcagataagtgaggagagcagagaacaactagagcttttaatagagtagaaaaaaactagtcaaaacaactacaatgtgaaatggaattagaactgaatttaaaaattggtaactgaactcaatctgctgttagacaactaaaaaacaggatgatttcactaaagtaacgtagaggggaatgagtaacaaagagaaataaatgtgaatgggcaaagcaaaactacagcatgaagattttcaatttcaggtaaacaatttgtgtatgtttcaataagaaatgaaaaatcaacactggttcttgagcaagaaagctgtgcttcaggacaatgaatttgtgcaaggtattggtagggaaggggcagagcctggtggcaggtgagaggtatcagtgatagcactgt

SEQ ID NO: 59618 - DNA, 301 bp, Homo sapiens
acttcctattaacattaaactatcaaagaaatttattaacaaaattaaaaatgcagagcctttaaaaagtttagctagtataggaggacaacatcagattgtgataaccctacatacagaatcctacgtggaaaaaacccaccaccaagattttagatcttttagagagttgaagttgagggtatttataatcgtgatcaaattcaggtgatacatcttggtcttggttctcgtctctttagctcatgatagatgaacgtgtgtcagctacagacttcttatactgagattccgaggttta

SEQ ID NO: 59619 - DNA, 301 bp, Homo sapiens
acagctgaacagaaaactaactgcagatgctaatgagaatagttttccttttacgatataaaggatgctaaagaaaggggccgcctgcacagtttcttagcatgaatctcagttcagagagaactctacaaccaaagaaacctcaggttccattcatccaggtttctagagtttagaaaccagtataatctctctcaactgttaacaaatttcctaatctaataaaataatctaactgcttctgtagctacattctaatccctttgggagtcttcacaggatgacggccatgttttcagta

SEQ ID NO: 59620 - DNA, 582 bp, Homo sapiens
tccccgcggtggcggcgcgggtactgtttatattcaccctacaagtgttctaaaggcaccagtgatccctaaaagccggggtttgacaaaactacccccactctggacctccagttactctgctgctgtaattatggccaaaagcacaaatgttattctaggtggtactcaacattgggtcaaataatgcttctttgttttttcctgctatacttcgccctttattatttcttccctacttccctgtcttagcatgccattatccccaattcatttcatacttattattcataattcaatcttcataaaatgacttctatgattctatgacactgtgattctatgacattaactcagctgacatttctaatcctgacaacctaactcatcctccaggttaacaacatcagtgcttgcagtaaagctcaccccttttccttaagcctggaaaccaccttgtttattcctttttacagtaggctgagctaaattgatccttgtgagtaaatcaccctaggtcttcatttctccaattacattgccatattgccctttcccacacaaaccttgaataccaagttc

SEQ ID NO: 59621 - DNA, 567 bp, Homo sapiens
acatcatacggattgaccgcatagaatgcacagccgatgaatctatatactccggcattctattaggggacgccctgctctcaccttctgaatcatagaagaaaggtcacaccttcactagaattcttactacggaggattgcaggctgctatcttctctgtctcttttccccattccaaaactctgtgtcccaagctccagcagcttctagtcagggaaatgagtggtaagccatggatttattagtggctgtgtcattcttctcatatcttaccacttccacagtcgggttaaaaactgaatccaggcttaaaatccatttattgaactgaatatccctgactacagcattttaatagccacattacagctgtggaattggtctgcagcccagtgattgaaccttacccatctagcaattagccccaatgattaatttcagaggattctggttccactgcctgggcacggtgatggtgcagagattcttcaagccatttgtaagcagtccatcttagaatgaattgggccccacatttgggattgaatttgtttccttctcttca

SEQ ID NO: 59622 - DNA, 425 bp, Homo sapiens
tccaccgcggtggcggccgacgtactgggatcacaggcgcacagccaccatgcccggctcccacaggattcttagttagaaggggctagagcgagggcagagcaggaacgtgcggctaacggacacttatcaaaccccccaccatgcatgagtatgtctgaatggaggatattgaattttcaaaaacatttctatattaacttctcttcatgatcactatgtatagttttataaaaacactatggccatttttcatttaacactatgactgcagagaataacatctgatgttacagaccagccctgagaatgatctataggaaagagttcgttcctaaacagaatttatcgtgagatccaatattactactttctaaaaatcactacagtatcacatactgctgagaggcacgggctgagtacct

SEQ ID NO: 59623 - DNA, 302 bp, Homo sapiens
actactggatagttttgttgccactcattcttttcaaaatggtgtatttataagtgacaatttgtcccaattatttcaagatagactaaaaaaaaaaaatctaacactaaatggcaaaactttccaaacattaaatcataaaaacaggcagagtgtgatgacaagaataaaaaagaagggccgggtgcagtggctcatgcctgtaatcccagcactttgggaggctgaggcaggcaaatcacctgaggtcagaagttcgagaccagcctggccaacatggtgaaaccctgtctctactaaaa

SEQ ID NO: 59624 - DNA, 265 bp, Homo sapiens
tttctgtgtgtttcagcttttttattttcagtattgcacttggatattcctgtatctttaaatcagcccttttgttcctattggctgtcagcaatgtgttgcatgaagttattggactgggagcagggtgagggtagccgtagagccacctggcactagaatttagccagattttggagaccaaagatcttttgaactttaaacctggaatggacatgagtgatgttctagtccaacttttccattttatggttgacaaagcctg

SEQ ID NO: 59625 - DNA, 299 bp, Homo sapiens
acacaggacagctaccataatgaaccccacttcataacaagaaattgtccattccacaacatcggtagtgccacagttgaaaaagagagaactcaagaatcatctgggtgttaggtttctgtgctccaggttggctaactgagaggtgagagagcagagagaagagggcacaggccgtgttttgaacagcatttggtggctgtgtagaagacggcaaattttctaacaacattgaggaggagcaattactaatttaggaggaaaaccaggagtgttaagtcacggaaaccagaaaccaa

SEQ ID NO: 59626 - DNA, 289 bp, Homo sapiens
acatttgaacaataaatcttgactgaccagatctactcattgccaaagtgaatgaggcaactaatgtaattatttgggtaatttatgttaaagatttccagttcagataattcaaatgtaagcacagaaaagagtgtaggctgggtgcagtgactcacacctgcaatctcagcattttgggaggctgaggtggaaggattgcttgatccaggagctcaagaccagcctgggcaacatagcaagatccccaactccattaaaaaaaaaattttaagacttagtggtgatt

SEQ ID NO: 59627 - DNA, 291 bp, Homo sapiens
acataaaggagtaaagtaagtccgttgacttcaagatgcttacagtctaatagaaaccttgaaatttccactgggcaaggttttcttgggattgctccaaccaaatgaatgagcaggcgtctaagtaaatgaaaatcactctcatcactttccttcacattatgttaactggtgacaggtcatggcgcatgggaattgcttatgtttctgagctttagtcttgtaaaaataagtttagatagtccatcatgttcttcacattagacactcattacataaaaggttttatat

SEQ ID NO: 59628 - DNA, 281 bp, Homo sapiens
actttcattatatagctaaagaatacaggcacaaagagaaaactttcccaaggtcacagagttcaatggaggagctaaaatttgaatccacagtccatcactagactatgctgcctaacattttaaagaaaatacatagactagtttttcatagcttataaggaacaagtcattcccaattttataatttttgtttgtttaaaaaaatagaaatggggtctcacgatgttgcccaggccggtcttgaactctggggctcaagagatcctcccacctcagtc

SEQ ID NO: 59629 - DNA, 299 bp, Homo sapiens
acttttatcactgaccccgcgcaattctagcccacggtgcgatccctatcctggaaactacacttcttctgagttggcccaaagctactgcccctgctctgctcctccaaaggctagtccacttcaaagagttttcacctccactcccgcccccacctctctcaatgcaagactcgactataatctttgaggaaaggctgggcgtgtgccttcattttcatagttttcatcatgatcacaggcctttcattactatggattcccaaacactcatatttaaatatggtaatgatatgtat

SEQ ID NO: 59630 - DNA, 456 bp, Homo sapiens
acgcgggattgtattctttagttaagtcacacttttcttcatgtctcattttaattccatattgcttttgaagtttttgtgtctttaaatcacaaacgaggccgggcgcagtggctcacacctgtaatcccagcactttgggaggccgaggcaggcggatcacgaggtcaggagatcgagaccatcctggctaacacagtgaaactccatctctactaaaaaaatacaaaaaattcactgggcgtggtggcgggcgcctgcagtcccagctactcaggaggctgaggcaggagaatggcgtgaacctgggaggcagagtttgcagtgagccgagatggcgccactgcaccccagcctgggggacagagcgagactccatcccaaaaaaaaaaaaaaaaaaaaaaaaaaatcccccccccggggggcctttttaaaaattggggaccccccgggggg

SEQ ID NO: 59631 - DNA, 497 bp, Homo sapiens
  misc_feature 420, 461, 466: n = A,T,C or G
acgctccagcattacctctaagcaaatcttcaaatatggctactgtagaagcacttctctcagcagcacccctcactctttcctcaatgagaaaagaagttgaggccccaattgcatcctctttactgatccacccaaaacaaactccctgcaggaaagtagagggataagatttccaaaggagatgctgaagagtaaaaagcaatcacacttcaaaataggactttacaaataattaacaacagctccagatccatcctgttctcttctctagaaccactagaaactctcagatctgaaactgtatcatagattacacacctacatatcccactccatgatacacatgttgaacttcctatgtccatatccatcctccacatcctcagagttagcaaacgagttagacatctaagactntgttccaagattcccatgtaaaaagttttcacatactatancagtntacagtatacaatatactatgcactctcagt

SEQ ID NO: 59632 - DNA, 442 bp, Homo sapiens
  misc_feature 399: n = A,T,C or G
acttggccagcactttgagaaccctttcttgcccctcccaatcattgttcattcaccttctattctgacttctgatacaatagtttgacctgttttaaactttatatgaatggaatacttaatgtgctcttttgtgctcaacttcttttgcacaatactgtctttaggagattcatctacacagttgtatgtagtgacaattcgttcattttcattgttatattgtattccattgtggaatatactgcagcttatttatgtattcttgtatttatgaccaattgtgttgcatggaagcaacgcagcattggggctattataaatgctatgcatacttttatacgtgtgttttcattttatgcacacagttatttagaacattcttaggagctgcattgntgggtcataaagtggtgtatatcagcgtttattaggtaatatt

SEQ ID NO: 59633 - DNA, 567 bp, Homo sapiens
accaatgactgagcagacataaaagtcagcctggatggctaccaccactaatcagatttgtctgctgatgcaaggcccttcagtcattccagaactggtaaatggagtcaccctgaggacaggccctgctgctgattgatgtccagtgtgggcagctctcttggctgctcaacattcagagaggctctccttgtttcagtgctaaatgattgacagtcagggtgagtatttcaggaggaagagtcccccgcccactccagccgtgtggcaaaggtatttgcttccttgggaaggaagtgatttatctgtgggagaacactgtttgggcaaagttgcgtaggaacagcgtctgtctctgcaagcatgtgtgtatgtgagtgtgggcataaagcagcaagagtggaaggtaaagacaacgtgaacgtcataaaagaacacttctttttacaaatgcttgaaaacattcgatgctgaaagacttcagaccacataaatgaatttgcacctaattcaacatagctatacttctttctttttcagaattaatgagcctgccttatcattagt

SEQ ID NO: 59634 - DNA, 389 bp, Homo sapiens
acagtgctatcactgatacctctcacctgccaccaggctctgccccttccctaccaataccttgcacaaattcattgtcttgaagcacagctttcttgctcaagaaccagtgttgatttttcatttcttattgaaacatacacaaattgtttacctgaaattgaaaatcttcatgctgtagttttgctttgcccattcacatttatttctctttgttactcattcccctctacgttactttagtgaaatcatcctgttttttagttgtctaacagcagattgagttcagttaccaatttttaaattcagttctaattccatttcacattgtagttgttttgactagttttttttctactctattaaaagcttctattggttctctgctc

SEQ ID NO: 59635 - DNA, 515 bp, Homo sapiens
  misc_feature 7, 22: n = A,T,C or G
acgcggngtaaatagggaacanttcccacagggaagaacaatcacatctaatggggtagaggtgggaggtggtcaggggaagcagggaagaaataacatttgagagctgagtcttccttgaagtgggaattaatcattcaaaatttactaagtccctattttatgccaggcattgggcaaggacccattggatatacagagatgactgacacagcatttagtttttcagaatctcatcggatagaggagacaatccaggctgagagcactatataaacaaaaggctggagtcctgaaaatgctttatgtgtttgcaggggatatagtttatgaaggaggggattaggcttaaaaagagctagacagtgaaaggtgaaagtagggaacagtggaaggtgatatggcctttaaactttgctgcttacaggtctttcaggttacagtttgaacttgatcctggaagcagcagagaaatcaatcactggctactcttaaaacagctgagtgacacaatc

SEQ ID NO: 59636 - DNA, 284 bp, Homo sapiens
actttattatttttttttttttctttaaggcgtcctttcctaaaatttaccttgggaacccttgtaccatttaaaaaactttaaaggggttgacagctttggccaaattgcctaatccaaaaacctaaccttgggtccatgtttccaatgcctaaataaaaaaggggaaaataaaaaacctaaaaatgaaaggggattccatggccttccccttttaacctcttataataaatggaccaaatttgatttttggggaaaatcccctcaggcaaagtgccaaaggc

SEQ ID NO: 59637 - DNA, 306 bp, Homo sapiens
acctagcccattacctaaattgtaactgtcaaaagctgttcttaaattgcaaggtcttaagatcagtctttaatttgtatggtgcatgtatgagattttttttctccctatacattgaagttcccttatcgataatataatatttataaaagtaaaattatattttccatcatcttttatgctaaaggaatcttcatacatctaagtccagttaccagtctctatcctatgaagaattatagaacttttgctaataaattgttataccacaattgggagataacagaatacttacaaattttaata

SEQ ID NO: 59638 - DNA, 217 bp, Homo sapiens
  misc_feature 188: n = A,T,C or G
acgcggggttggggcttgtaacaatggtgggagatgggcagtgctttgggaatgtagctgaccactgcatgggtgctaactagcccagggatcttaaagaatttgtgtaggccatgaggatccactccagccactgaatagtcatagaattgaatctaggacatcaccgtatgctactaccatgcagntttatcccttctaagaatccaaatgccct

SEQ ID NO: 59639 - DNA, 355 bp, Homo sapiens
  misc_feature 315, 337: n = A,T,C or G
gtacaagataaatatgctcattgggttagagtatggttattgattagggggctaagtatttagttactgcatggggcagccaataataaaatcacagccctgtgtatttacctccacagtgtgtgctgataagtgcaaaaggtttgtgcaaattcttttgaagttatattgtaaccatggtatatgtattgaaaacttggccattttaccccattcctatgaatgaaaactatttggtgaatcagaggatagtctgaattgggatatgaaggccagtataagtgtcagttagcaaagtcagctctagtttagttnttttttttttctttaaaggcgnagctttactaaaagtata

SEQ ID NO: 59640 - DNA, 496 bp, Homo sapiens
  misc_feature 468, 471: n = A,T,C or G
tccaccgcggtggcggccgacgcgccaggtacttactataacttattctgttagtcacaatagatatgcacatgaatgacaccagtctctgctccaaaagacaaataggatctcaggatgccacagacgcaccaaggtggtagggggttagggatcaaggaggacttcctggaggtggatgctgagtcttggtaaacagagttagcatacaagagaccaaacttttttgggcttctcatccagtgttcagctctagagtgaggcagtaagaagctaccaaagatccaccatgctgaggatggccactaggttctagatgtttctagaaaccatttcctttgaaaaaggaatttataaatagcctcagtaggaaaagggagatagagaacaaatataaataaacccccccgaaaatggtatctatctaccatgtatttggctcctacagtgtctcctgctttggtgctntanatctatcatggttactccttaaaat

SEQ ID NO: 59641 - DNA, 585 bp, Homo sapiens
  misc_feature 25: n = A,T,C or G
acaatggaatactgttcagcaacanaaagggaacaatatatccatggtgctatataggtgatccttaaaacattattttgtgaaggcagatttgtaattttcgctaatattagaagagttcccttcacatgtaaaagagtttttaaccagtttcccagatttgctggataccccagcaccaatatttctaactgaaactgttagtatttgtattatggttccaagatcctgagcatttgtgcaagaggaagttaaagaagatgtggtgtgaccatgttcttatgttgtcctttcctgtctctaataaaggacggcgaagtgttcttgtggtatttggtttgtggaagcagtaagttaccatatcacatactctgtcttgaaccattataaatattcactggtaaaatatagaaagttgtgtttatttatagctgagtatgagtttactatgcagagaacctgagtcatgggctgactagtgaatgtatcaaaaagcggaatgtgggaatgtaaaagggtgcaacaactttggaaaacagtttggcaatttcttaaaaagttaagcatcaacttaccatatgacct

SEQ ID NO: 59642 - DNA, 527 bp, Homo sapiens
acaacatattaactaaaatgaatagctctatgtgaactgatacaagctgtgtctccaagacatattttaaatgttacttatttaatccacacaaactatacaatttcacattcaatataaaaatacatagcaaaatgactgaaaggaaatacaaactattaacagcagctccagggaaaggtatcaaatgggggttaaactaaactttcacataacacggtgataatactggaaacacaacttgatgtaaaagggataatatatatgtgacaatattttaaagtaatggttgtcaaaatatctgacatgcctgctgcagatttcttacaaatctcttccccgccaaatacacacacagtctacatttctcttcctaatagtttccccaagagtttcttggctaaaagtgccactactccgagtataaacacagctccctacctacaaactcatgcccagaacccagcagtgaatcgggccctgttctcacatcttgcagttaaaatgttttaacataccccgcgtac

SEQ ID NO: 59643 - DNA, 467 bp, Homo sapiens
  misc_feature 431: n = A,T,C or G
acttggaagcaacatctacatcttttccagcaatctagatgctggggacacaaggtccaccttccaggaatatggccatgacaccagaaatcacaaacatgatgagaatggaatgactggggaagaagtgccagatgcttcacttgtaaatgaagacccagcctctggggatgcagataccacctccctgaagaagctgaatatctgcagataagtggagttcaccaatgatgaggagcgggatggagaaaggaggtagggagagtcatccaaggaacatgagcaacatgttaaaagccaagtggtttaatttctggagatggtgaacccaagaggctctgctgggagacaacaaaaataatgaagaattgaaccagagtccggtgaatatcagcactgggaccagttagcagaggaaaaggaaagaatanagcgaaagaatgaagagtcatatgattaccaacttt

SEQ ID NO: 59644 - DNA, 537 bp, Homo sapiens
acatggtgccatgggacagataagaagggagtacctggcttggacttgaaggagaaatgagagagcaactatccgcagtagaaggctgagcatttcaaatccctgtgaaacctagggttttgaaaacagtatgtttcggcaacagcaagtggttcagtgtgattggagccttaaggggacagtggaagatgaggctgagcatttagggaggtgccagattgccccaaaggcagtgttctcaatactaaactaatgttcttccaccataaatgagctccccctggcaacttctcatttctatcaatggaactttcgttcttcatatgtccaaaccctgaagtgccatcttcaggtctgcctcagcatttgtgatcagtgctcaagttttgtatcatttctatattcaaaacattcttctgtgcatcctattctgtttccactatctacacactacttatcacctaattagtagataatttcaaaactgtaaatatttgtgtttcttcttgctctctctctcccttttttttttccggg

SEQ ID NO: 59645 - DNA, 515 bp, Homo sapiens
accagaggacaattatgttgattgcacatgatattttggatcaaggatagagccaggtcagatctcaacattcatgctgatggcataaggaacagtataaacaatctgaaagccatttctgtctcaatttatatagtttcataaatgacatttaactacaattgtttttttcccagtatttaaaattaataccttggctataaactcattccttaaggataaatgattgtggaggaggaaaaatactcagacacataagtgacccgggaaggcatgttggtcatgagaaatccacatgttgtctggacatgagcatttgcttgcatctaaaggaaacatgacattgattcttccagtttcaggatttaatgttgcctataacttttaaaattgtttagacagtgtggaaattataaaaatatgagatgaaaagtttcttggagataatctaaacataacttattttccaaatgaacaaatcacagccaagagagtttaggtaagttacaaagagt

SEQ ID NO: 59646 - DNA, 486 bp, Homo sapiens
acaagaaacagaaatcaatgaggcttacttaagcaggaaaggaatctattggaagaatgtccaacagaattgatggggagcccgcagacacaaaatctcatatacgataaaaacttgcagacagggctacttctatcatcaaatgtgttttctaactttataacacgtgtgaatagccaaccttaggccaagcctggagggtaggtatataaaaggagtaaaggtcctgacagtaggaaaatggattgaattaaaattaaagtccgggtgtggtggctcatgcctataatccctgcactgtggaaggccaaggtgggtggatcacctgaggtcaggagttcgagaccagcctggctgacatggtgaaaccctgtctctagcaaaaaaaaaaaaaaaaagtcccctggcccgtttaaaaattagggaacccccgggccggaagaattccaatttaacctttttgaatcccgccaccctagggggggg

SEQ ID NO: 59647 - DNA, 274 bp, Homo sapiens
acgcgggtagccagaacattttcccttccaaaacaactcaaatgctgaataaagtaaatttttaaaaatttttaaaaatgttttgtgagcttatatggaagtaagaaatcctctgagtgccaaacaaactgaaacaaagaaccctgggaggtaaacgaataccaaatcttgctttcagcctggaaatttccacccagtgccagagccttgggcttctgttttggagatcgtatagggataggagacagagttgaatccagagcttaaccagagt

SEQ ID NO: 59648 - DNA, 298 bp, Homo sapiens
acaaaataaatttgctcattgggttagagtatggttattgattagggggctaagcatttagttactgcatggggcagccaataataaaatcacagccctgtgtatttacctccacagtgtgtgctgataagtgcaaaaggtttgtgcaaattcttttgaagttatattgtaaccatggtatatgtattgaaaacttggccattttaccccattcctatgaatgaaaactatttggtgaatcagaggatagtctgaattgggatatgaaggccagtataagtgtcagttagcaaagtca

SEQ ID NO: 59649 - DNA, 372 bp, Homo sapiens
acttggatctcatcctacaggcaatgaggaggcatgagagggccttagaatggggaatgatctgcgcagttctgaattcaagacaggtcactctggctgaagtcccaaacagtttaaaaggtattagatttaatcccagactttgccaaagcagagaaagaaagatgagaatgcagttagcagtcaagccaatgcttttcagttctcatatatgtcagaccaaaaatatacttaatttctgttaaggtaaatacacatttcacattcataacgaaaaccattaagaaaataaaacacaaatgaatatgctcctttggttaaaatatttgcacatttgtttaactaaatatccaaaacacacaggtgatttgt

SEQ ID NO: 59650 - DNA, 562 bp, Homo sapiens
actcgtctcaggagaggaaggagaaaatttgcctatcaacagacatagctactgggaaagaaagggacatcaatctaactcagtccctgcactcaggatttgagatggtcagactgggggtcattgatagaaaagggcatgagacactgcaaagaggatcttgccatgatatagaggaacatcttaaagccggggctgagaagttcatggacaatgcctgagactggaaaccccttcaagcctctttgcctcatcatttaggtataaaacaagtgttctatacataaatgtgactttcaaatgctgtaatctggatgccaagtatgacaaccactctagtagaggaatgtgatctagcaaagattttaaaactaaacagaaaacagtagtccttgccatatggaaaggaacaaattgtaatagcaacactctggtggaagcagaggcaagggcaatcctaaaccaagaaactacagcaaaccaatcagaatgtcccactattcatcacctgatctttagaagaagcttcaacaaccttggacctgagtacctgcccgggcgg

SEQ ID NO: 59651 - DNA, 517 bp, Homo sapiens
  misc_feature 434, 486: n = A,T,C or G
accacatcttgtttattcattcatcatggatgggacaccgccttttacaatctcttcctcttactcctccttctccccttcctattcccactcctgtctccaagcaactgaactgctttctttcacaatagattagtttgcattttctagaatgttatataaatggaatcatgtttttctttggttgacttctgctcagaataattacatgaccccgggattacagggggtggctgacgcctgtaatcccaacaccttgggaggccaaggcgggtggatcacttgaggtcaggagttcaagaccagcctggccaacatagtggaacctcatctccactaaaacacaaaagttagccaggcatggtggagggcacctgtaatctcagctactcaggaggctgaggcacgagaattgtttaaacctggcaggggtnggaggttgcagtgagccaagatcacaccactgcactacagcctgggtgacanagtaaaactctgtctcaaaaaaaaaaaaaaa

SEQ ID NO: 59652 - DNA, 331 bp, Homo sapiens
tccaccgcggtggccggccgcccgggcaggtacataaaggagtaaagtaagtccgttgacttcaagatgcttacagtctaatagaaaccttgaaatttccactgggcaaggttttcttgggattgctccaaccaaatgaatgagcaggcgtctaagtaaatgaaaatcactctcatcactttccttcacattatgttaactggtgacaggtcatgacgcatgggaattgcttatgtttctgagctttagtcttgtaaaaataagtttagatagtccatcatgttcttcacattagacactcattacataaaaggttttatatgtattgtag

SEQ ID NO: 59653 - DNA, 282 bp, Homo sapiens
actaaatattaaaaaaaacacttactgtgtaagaggatgaatgtcttacctctataaaatgctaggctatgatagcctatgctgagcttctatggtttgaaataatataaaatgcacttatgcaaattaaatacatatttaaaaaatatcaatagaaagcatataatttctacttagaaagcagagatacaaaattttgaaaatccttgtcataaaactttggctagttataaatgttaactgtataattcctcactccaaaatataagcgtcaatggatga

SEQ ID NO: 59654 - DNA, 571 bp, Homo sapiens
actccagtctgggcaacacagtgagaccctgtctcaaaaaaagacttgagaattgaattgaagattgtttttagatacatgaagatcattaatagctttgacatgcagtttgaataggggagtgatcgggattaaaccctaattggaagtagtttaagagagaattgaaattttatagaactggtctaacaatatttttattaggcctgttctaatatttttactaacttattagtaaatgagagagaatggaaggagagttggagaagggaactatacaactctttagaggaggtttgtttggagaggaacagaaaaatgaagtagtggctctagagttatatggacttcagaggatttataagattcataagagaaattatatctattttatatgcagatggaaacgatccactagatgaggaaaaataataacggtgcttattgtgtgctaggcaacgccaaagcactaggaatacagcagtgacaaaagtcctctgtcctcatggaacttaccttcgatcagtggtgctaagataactggattatccatataggaaaaaaggcagaa

SEQ ID NO: 59655 - DNA, 302 bp, Homo sapiens
  misc_feature 61: n = A,T,C or G
ttatatgcttcgataacaggagatgagctgcacggtgtgctatgatacatatacattcatntcaatgttcaggtgtcagaaaccgggtatcaggagtccaaattaagacatatagagaggctgaacactaactcagtgatacatgttctgcttttcaaagtctccactacctttctgtaggggaacaccttggcttctatgtcacatagaaagtgtagccatatcggagagtataacataataagaactattattctagatttctgatacaaaaatatctataatttgtaagtaaaattctc

SEQ ID NO: 59656 - DNA, 540 bp, Homo sapiens
acctggcttggacttgaaggagaaatgagagagcaactatccgcagtagaaggctgagcatttcaaatccctgtgaaacctagggttttgaaaacagtatgtttcggcaacagcaagtggttcagtgtgattggagccttaaggggacagtggaagatgaggctgagcatttagggaggtgccagattgccccaaaggcagtgttctcaatactaaactaatgttcttccaccataaatgagctccccctggcaacttctcatttctatcaatggaactttcgttcttcatatgtccaaaccctgaagtgccatcttcaggtctgcctcagcatttgtgatcagtgctcaagttttgtatcatttctatattcaaaacattcttctgtgcatcctattctgtttccactatctacacactacttatcacctaattagtagataatttcaaaactgtaaatatttgtgtttcttcttgctctctctctcccttttttttttcctggaagttaatttctaaaattcctcattttaccatgtc

SEQ ID NO: 59657 - DNA, 306 bp, Homo sapiens
actttaggctgagaaataaatagaagggtgagaaaaaagaacagtctttatagtcagtaagagtgaaaagggaaagatggtagttggggaaagacagatggggagaaaggttggctggttgttaataaaacagtagaggatgagcatgtattataaatgctggtgggaagaaaccttgtggcaaggagggtggtagtgttggagaagaaagagaggatatagtagaaagttaaagaggaactggaagcaggtgggatccaggacataggaaggggaagagccttgggcagaggtgagacatctgca

SEQ ID NO: 59658 - DNA, 317 bp, Homo sapiens
tccaccgcggtggcggccgccccgggcaggtactttaggctgagaaataaatagaagggtgagaaaaaagaacagtctttatagtcagtaagagtgaaaagagaaagatggtagttggggaaagacagatggggagaaaggttggctggttgttaataaaacagtagaggatgagcatgtattataaatgctggtgggaagaaaccttgtggcaaggagggtggtagtgttggagaagaaagagaggatatagtagaaagttaaagaggaactggaagcaggtgggatccaggacataggaaggggaagagccttgg

SEQ ID NO: 59659 - DNA, 327 bp, Homo sapiens
ccgcggtggcggcgcgagtaccctcttctctcaattttctctaaagactcatttcagactttaaatgaatattatgctactcaacagggaaactcagatgtccatcccctccttattcattcaaacatttccactgccataatatggcagctgcaacgccaagaaagaagaaaggaaaatattactaaaagaggtgaagaatgaaaaagaccccaaagaaattttttttttaagagactgggtcttactctgtcacctagggtggagtccagtggtaggatcatagttcattgtaaccttgaactcttgggctcaggcaatcctcta

SEQ ID NO: 59660 - DNA, 329 bp, Homo sapiens
caccgcggtggcggccgaggtacaggctctaattaaaacctccatcaaggaggtgaggcctggtctaaaggaccccaggaaggccacattgggccaaggagccagttaagtttaaggaagctcgggggtgagtttgatgccaggaaacagagataagcttgaatgagcagccctaaagggttctcttaagaaacattctccaaagtccatttggcttctgtaattctgaggttctttatcctagaaatacatcaagccctctgctaagtgctttacctacaggtgttttttaatctgtaaaataactccatgacacgtgttctgtaatt

SEQ ID NO: 59661 - DNA, 327 bp, Homo sapiens
caccgcggtggcggccgaggtactttattgctgagaaataaatagaaggtcgagaaaaaaagaacagtctttatagtcagtaagagtgaaaagagaaagatggtagttggggaaagacagatggggagaaaggttggctggttgttaataaaacagtagaggatgagcatgtattataaatgctggtgggaagaaaccttgtggcaaggagggtggtagtgttggagaagaaagagaggatatagtagaaagttaaagaggaactggaagcaggtgggatccaggacataggaaggggaagagccttgggcagaggtgagacatctg

SEQ ID NO: 59662 - DNA, 326 bp, Homo sapiens
tccaccgcggtggctggccgaggtaccagggaacgctgccatttcagcaaagtgaggagacttgcccagagagtgaaaagacctcggctaagtaggagatgtagctcagaggatgaggactctggagccctgagactccatacttttgtgttatccctctactacaggatgagaatgagatgtcatccacaaacaaccccacactgggccaagaacagacacagtccccacttcctctccctgagtttgcctcattcattcatccattcaccaaacatttactcctgacccactatatgccagggatatgcttggaacaaaatggc

SEQ ID NO: 59663 - DNA, 316 bp, Homo sapiens
  misc_feature 274, 280: n = A,T,C or G
ttgggagctccaccgcggctggtcggcgcgaggtacaatcattagaagtatgttgagaagattctggatcagagtttgtccagggtggcatctcttttgtatctcacagagaagctaagacgtgtaacatgaaactgcacttgttatctgataactacttctattttctcgcttatataaaacctgctgaatcatattccaaatttacaagacctcattcttattcttcccatagagtttgggtgggggaaggggaagaagggaggaggagcangagtanacatgctgttaggttcctggtctcatgctacctact

SEQ ID NO: 59664 - DNA, 417 bp, Homo sapiens
acgcgggtgaataatttattctttattttttctgtagagtttaagaaatagatgtatgtaatgattacagtcatttatagtattctgaggttgtcctaattttaggtaactgtcttcagaaaggtaacttgttaaatagatgactaaatgtaattaaaattcatacttttatacttttttctttttctttttttttttggaaacaaatttttactccaccctggccagttaaagtaaaccattgtctcaccaccaaaaaaaaaaaaggtaaatttggctggaacctctgttttggcctttcaggaccccttttaaaaaaaatgaggtttttttaaaaggagggaggtttattcttgaggacttcctttgaaaggccaaattttgctgccccgtaaaaaaattgtattaaaaattttt

SEQ ID NO: 59665 - DNA, 443 bp, Homo sapiens
acttttagtttttttttttttttctttaaaggcgtacctttcctaaaatttacctttggaaaccttgtacctttttaaaaacttttaaagggttgacagtttttggcaatttgcctattccaaaaaactaacctttggttcatgttttcaatgtctaaataaaaaaggggaaaataaaaaacctaaaaagaaaaggggattccatggccttccccttttaacctcttataataaatggaacaaatttgatttttggggtaaaccccctcaggcaaagtgacaaaggcttggttgccatttaccctttagggtcttaggggagttaatgaaaactgcaaagggccatcaagtcttggggcttcatggaaaaccaacccttttacagggagggggtaaccttaggggttttggttttcctgcggggccttggttcacttagggaa

SEQ ID NO: 59666 - DNA, 257 bp, Homo sapiens
  misc_feature 244: n = A,T,C or G
acgggacttgtctccaggagacatgtctgggaagaagagctagactggagaaacatgagcatgttcaggtgaaaacatgtgagtggataagagcaagagggtgagaacacagaccaaggggctaagggacagactgtgttcagtatttgggtatggaacttgtttttgctacttgctagttctaagaccaggctcagactctaacttctctgtaatgtgggaataatgacagcacttaccttantagaattttacaa

SEQ ID NO: 59667 - DNA, 480 bp, Homo sapiens
acagagatgaaggtaataaatggtaaaggaatataaaacggtccccaccaaaattaactaaaatataatataacaaaaaattatatagactcatcttatttccttgaaccacctagaaagtgagaaattgtttcatttgcagcaaaaaatcctgtcatatactccttaaattatttttacaattattttaatacatttccatttaaagctactctattatataggtcaattttaaccaagccacattacatagagagacacatacccatctgaaataagacagaagtgactattctattttagtcattaattcctcaaataccactccacagccactaacatctgtgaatcacatgccgagtgactgacatctacagatattaggtcataaaccttaaaggagagaaactagcaggaacatggacaatgaaaaaagagtggggaaatgtaggacacagtaggtatgtgtgtagggtattt

SEQ ID NO: 59668 - DNA, 307 bp, Homo sapiens
acgcgggtaatgagcctgtccatatgaagcttcaagcacctttaaagaaaaggcctttaaaccaaagcaaaaatggttgcatgaattgaaaaccagggcttctaataatgtgttcattaagtgtttcctggtcctctttaactacaaatgaacagatgtcctagggacaggggacttcacagtttgtgaatgccattgtgcaatgtcacaggatgttgacaggaacatagagaatagtgtaaataaagaaggtttcaaaggtgccctaggctatatatgtggcagccattttagcagagagatcaag

SEQ ID NO: 59669 - DNA, 283 bp, Homo sapiens
acctggcttggacttgaaggagaaatgagagagcaactatccgcagtagaaggctgagcatttcaaatccctgtgaaacctagggttttgaaaacagcatgtttcggcaacagcaagtggttcagtgtgattggagccttaaggggacagtggaagatgaggctgagcatttagggaggtgccagattgccccaaaggcagtgttctcaatactaaactaatgttcttccaccataaatgagctccccctggcaacttctcatttctatcaatggaactttcg

SEQ ID NO: 59670 - DNA, 308 bp, Homo sapiens
tccaccgcggtggccggccgcccgggcaggtacccgaaattctatcaatagatgttctgaatctttaggccataaaatgaagtcaaggaggagattggagctatgggaggtgtttgaaaagccttgaggcatgctttaagatctcttctttttagtggccattctttctttgcatgctgactctaccttccccattcaaatacagacactttggccctgacttaggctcctactttctcaaagaaaagggtctggaaacctcatttgtatgaagttgatagtgatttaagattgtaaattacagtgtc

SEQ ID NO: 59671 - DNA, 270 bp, Homo sapiens
acgcagagacacgatccacagttgtgtaggaataacttcctaaacatctttaggatctacctctttttcctgttcccactgttatttctttgtttcaggcccttaacatctctaatatacactagtatttctgtcttcacactgttttttttcttttacacagctcttttcatagcccctccattagcacacagattggaattgtgtctccttgttacccacagaataaaacccaatgttcttaatatgtagtcttaatatagactctat

SEQ ID NO: 59672 - DNA, 317 bp, Homo sapiens
tccaccgcggtggctggccgaggtaccttatgcggacttttcctgtggatctaaatctctaagaagtgaagtctgttaaaaacgtgatttggtgaatcagtatagggggatacatgattgctaactttgagagagggaaacagaaagagtgagtgatagtgtgtatatatgtgttcgtcttcgatattctgaagttattcaaattatgtgtttagatttagcggccaactttagagtttttgctttggcatataacactttgatggatcaaccccttgactatcatctgtagtggtgtcttggcatttgctatgctt

SEQ ID NO: 59673 - DNA, 588 bp, Homo sapiens
acgcggggtatgatcctgtgagtgaaagagagaaagaaatcaatggctagggattgaatgtcttgtggaattttatgacaagaagacatctagggaaaaccatggaaatgtccagtctgaagatcaaacagttcataaaagtgattcagaagacactaagagcaggtgaaagggaaaaacagaactttacaaagcaaagttgctttcttggcttgctttcttcagagctgcttaggaccagacagctctatgtgcctgagagttcctgaaggaatcttagcattaaaatacaatttaccatgaaatactatgcagccataaaaaaaggatgagttcatgtcctttgcagggacatggataaagctggaaaccaccattctcagcaaactaacacaagaacagaaaaccaaacacgacatgttttcactcataaatggcagttgaacaatgagaacacatgggcacagggaggggaccatcacacaacagcacctctcgggggtagggggctaggagaagggtagcattaggagaaatacctaatgtagatgaccagttgatgggtgcaacaaaccaccatggcacgtg

SEQ ID NO: 59674 - DNA, 123 bp, Homo sapiens
acattctgacctgtaataatttatgaaaattattgctacttaagtttgtctggaacaatttctggctgttagaagggtaaataatttatttgaagatgatagcaaggtcatattaaatacttc

SEQ ID NO: 59675 - DNA, 305 bp, Homo sapiens
acactggctgtcagcctctaaaagttgagggtgcactgttctttgaattcttgcctgttaacacttttcataacatctctgtgaatcacactcaaatatactgtacagtgctatcactgatacctctcacctgccaccaggctctgccccttccctaccaataccttgcacaaattcattgtcctgaagcacagctttcttgctcaagaaccagtgttgatttttcatttcttattgaaacatacacaaattgtttacctgaaattgaaaatcttcatgctgtagttttgctttgcccattcaca

SEQ ID NO: 59676 - DNA, 304 bp, Homo sapiens
acattaagtctttctaagtggacatttgttttcaatttagaaaaaaaagtctatgttccagttcttcgaacaaatatttttgaagttttttagaaactttttaagagttgctgttttcagccaatagagcataatcacatttctggaatgagatatatcagacaaagccaatgtccttgactaaattgaatcttttctaaattgatgtccaacagaactaacgtagatgttataatctgcatatccaaagggtttttctttatcttggctggaaacttggagcatctgcaagcttggtgtcttc

SEQ ID NO: 59677 - DNA, 318 bp, Homo sapiens
acagtgatgtttgaagggattgatgctccatggtaagcagacttcgccctactgggaacatgaaaaggaacctctctgatttgtggctgtaatcctcaagccctcgtttaaatagccagggcagtttcatttaatcaacaagcatgtgttgagtgcctgctgtaaaccaaacgctgagacactgaggagagaggatgaaaaagactcaacaggtctctgatcttgtggagtttacattgtgatggaggggtgggacactgggaagatacagactataactaagaaatagattaagaatagagaaaaacagtagacatt

SEQ ID NO: 59678 - DNA, 137 bp, Homo sapiens
actaggtttctaatagggatttttttttgtcattgttggtcatggtagttaatgaaacagaaatttaagtcatctctctatatttgaaggattctatgaacaggcagtatatctgcctttaagcctgagtgttggta

SEQ ID NO: 59679 - DNA, 316 bp, Homo sapiens
acaaagactctgagtcagaaattcaaatgacatactcaaaaggaccagaagacagggctggcaagtccaaaccagggagatggtctcaacctgttgtcgatatatagtttatggctccctcttctttacctcaggggtcagtattccaggaggcacagagaagcactaactacccaaaaggcacttgcacaaagcaaacaggaggccacctgcccttccatgaggaattctgctaagatgactactgtatcttagcatggcataaggctcacatctcctcccagggatgttgatctgttagaactttccattctct

SEQ ID NO: 59680 - DNA, 234 bp, Homo sapiens
accatgaaatttattagtcacaagtggctctgtgttctctcaaatgcatctttatacctctcttaagtcatccttaagagctaatttgacacaaagacttatatatacagtgtctcattgaaggttttcctttcctgcctgtttggtaaatactagacagttttcataaaaaagcattttattttaaatatttactgatttagaagctgttccttctgcttctatttgacttct

SEQ ID NO: 59681 - DNA, 379 bp, Homo sapiens
accttctctgtggatggaagtaagagggctcctaggcaaggtgcctgcaaagttatgccagtttctttgagaatatagagaatattctcaggatatagaatggaaaattgaagtcagatctaggacaaaaattccaggacgtaagattgaatttcagggctctaagcaacaagatgcttcatcttctatatgccgtgaatactaccattctctaccagtaatagaaaagacattgtcagcatctgcacccatctctttctgtattttttgagttatctggcatttccatattttgctgacaggccaaggtgaaagtccccatcgtttcatacctggacatccctacattgtaactctgcatgctcctccattccccagg

SEQ ID NO: 59682 - DNA, 174 bp, Homo sapiens
ccgcggtggcggccgaggtaccttctttctgtgggttttcccttgactagaatacccttgccctagcttcttgtcccaccttgcctggatatgtggactactcattcttcacttccaggatgctcctacccaataaactgacagcagttgtgcctgttaaaccctctcacagca

SEQ ID NO: 59683 - DNA, 554 bp, Homo sapiens
acataatcaaatcatattttaaatgcattcagggagcttcttacttaaaagacatcttattcaaaatctttttaggaagtgaaaatgaggataattgttcccaaattaatcctttgtgtaaacctggattgccctatattgtgcttgcttagcatgtgagagatctgtagagttgacactcttacctattgttcagcccagatttctgcctccaatttgcagcagaggctgcaattggtagacatagatcctcacatccccacataaacctaatatggctaatttcaatgaacactcaaaccacaagttctttattaagaggccgatagtcaggcaaacataatagtaaggaattcagtggttctgcatcaacaaagcatcactcttgaacacattatcttagtttcacatatatcatgccttttaagtcagcatgcatctcttagcttgattatgctccctcgcacatcctttactccacctctgtaaagacaatcatccgttagatgaagaaaatactttccactaagggttcttctaggtaactgttcttt

SEQ ID NO: 59684 - DNA, 308 bp, Homo sapiens
acgcgggctggtttcctggttttcagaggaacctcttctaaatataatttccacatgagaaccagttaaatatgtaaatgtcaactttttaaaaagtcttgaaataacttccacagaaaattttaataaaatccaaattccttaccgcagactaatggtcctctatagccctataatctacccttgcttctctctctggactacaaatagtttgttcagcatttgctggaaataccatcatttcctgttttcctcaaacatgtcaaacatttttctattgagaataattgtgattgtttctctctacc

SEQ ID NO: 59685 - DNA, 295 bp, Homo sapiens
actctaactgagggggctgtgaaaagactgtgtaaagaaaaaacagtgtgaagacagaatacacggcaaggccagaggcaagaaataccagtgtatatgagagatgttaagggcctgaaacaaagaaataacggggggaccaggtaaaaagaggtagattctaaaggtgtttgagatgctctatcacaataaaaacattttttgtttcttgaaattatgcctataacttacccgaaatcatccatactatccttttccttgtaattaatcataaatttatctgaaaaagtcctac

SEQ ID NO: 59686 - DNA, 441 bp, Homo sapiens
  misc_feature 250: n = A,T,C or G
actttggcttttgtttctagaacaccaatgagtatatgctcattaagatagtttgatgcaataaatccttattttacttgcctctattactgcattgaaaactgttgtctactttgtcttcttgaaatcctacacctcccccagcccccacatttggcctatggaacattactttatcctgattttccccctaaccttctggcaatgcctctcagactccttccagaactacttttctctgttttccttntaatgatgacagtttatgcaattgtgtcttcaaacttataacgacccagacaatagtaataacagtcagcatttactgaattcttacttgtgttaagtgctgttatatatgatattttaatctttgtaaaatcttataaggtaagtgctggcattattcccacatacagagaagttagagtctgagcctgg

SEQ ID NO: 59687 - DNA, 298 bp, Homo sapiens
acatgttcagaagttttctgggactgtattatccaggagaagaggttttagcatcataggacctgagcattctcattctcactaactttgctcttcaaaaaggctgcaccagttcacacttccttcagtggtgcttgagggggtcccattttcccacatccttatcagcacaaaattttacccaactttttccatttttggtaagctgaagattaagttgcctctacccattcttttctttgttgttttcaaaggagttctttttcatattgtttatattccagttataaatgcatta

SEQ ID NO: 59688 - DNA, 171 bp, Homo sapiens
actctagtccagttttttttttttttgtttaagggcgtccctttcctaaaatttgccttgggaacccttgagacatttaaaaaactttaaaggggtggacagctttgggcaattgccctaacacagaaacctaaccttgggtcgatgtttccaaggtctaattaaaaaagg

SEQ ID NO: 59689 - DNA, 282 bp, Homo sapiens
acgcgggtacaccatattagactagatcttaatttcatcactatgcagattcctaaacatctggtagagtgtctgttttagataaaatatgccataaggcatttttcattttgcttgtacatatgtgcttggattgagaatgtagggatttgaaatcaaacaagctgattgcttattacaatttcagaaggagactgagaaattctttcatttttgtttgcttctagtatctctcctgtcctttcccatctcttaaaaggattaggttctaaagtcaaagtg

SEQ ID NO: 59690 - DNA, 145 bp, Homo sapiens
acttttgaactttataagtctagattccaaggtctaacgttatagttaatttacacaaattcaaatatgtgcacccgaccaaagaggaaggagagaagaggggttggagggttgcaggaatggggaagaggggttggaaaattgc

SEQ ID NO: 59691 - DNA, 480 bp, Homo sapiens
acgctccagcattacctctaagcaaaccttcaaatatggctactgtagaagcacttctctcagcagcacccctcactctttcctcaatgagaaaagaagttgaggccccaattgcatcctctttactgatccacccaaaacaaactccctgcaggaaagtagagggataagatttccaaaggagatgctgaagagtaaaaagcaatcacacttcaaaataggactttacaaataattaacaacagctccagatccatcctgttctcttctctagaaccactagaaactctcagatctgaaactgtatcatagattacacacctacatatcccactccgtgatacacatgttgaactttctatgtccatatccatccctcacatcctcagagttagcaaacgagttagacatctaaaactttgttccaagattccccatgtaaaagtttcacctacttacaagtttaccgtatcaatatag

SEQ ID NO: 59692 - DNA, 285 bp, Homo sapiens
acctaaaagactctcaggccgtgaaaatgattttgtaaattctcaaatgggctttgcaagccaacagatccaaatcacaactgtggtcaaggcattctgcagagtctcaatgctaggtgaagaaggcatcttgggaaccagcagactgccactctctcaacattgaaaagatatctccattcttcgaaagtcactttcagccacccaaaaagttacctggagaaaagtatggtgaatgaaactgtttagagtttgagaaggagcaggtctttcctatgtaaaaat

SEQ ID NO: 59693 - DNA, 297 bp, Homo sapiens
acaatggaatactgttcagcaacaaaaaggaacaatatatccatggtgctatataggtgatccttaaaacattattttgtgaaggcagatttgtaattttcgctaatattagaagagttcccttcacatgtaaaagagtttttaaccagtttcccagatttgctggataccccagcaccaatatttctaactgaaactgttagtatttgtattatggttccaagatcctgagcatttgtgcaagaggaagttaaagaggatgtggtgtgaccatgttcttatgttgtcctttcctgt

SEQ ID NO: 59694 - DNA, 553 bp, Homo sapiens
actttggcttttgtttctagaacaccaatgagtatatgctcattaagatagtttgatgcaataaatccttattttacttgcctctattactgcattgtaaactgttgtctactttgtcttcttgaaatcctacacctcccccagcccccacatttggcctatggaacattactttatcctgattttccccctaaccttctggcaatgcctctcagactccttccagaactacttttctctgttttccttttaatgatgacagtttatgcaattgtgtcttcaaacttataacgacccagacaatagtaataacagtcaacatttactgaattcttacttgtgttaagtgctgttatatatgatattttaatctttgtaaaatcttataaggtaagtgctgtcattattcccacattacagagaagttagagtctgagcctggtcttagaactagcaagtagcaaaaacaagttccatacccaaatactgaacacagtctgtcccttaagcccttggtctgtgttctcaccctcttgctcttatccactcacat

SEQ ID NO: 59695 - DNA, 385 bp, Homo sapiens
acttgcaagggagatgtggtttgacttctgttttattggcttgttacatttaatcaaggtggcgacatgtgagaagtggtttagctcttaactctgatcactgcctgtaaatgataaggctcacgtccatgcctgtggaatagagtgctgtcaggtttacatttaattctgcatagtcagctctcttacagtaattagagataggataggcggaagttcaggaaattaaatccataatctggaatttccattttatcctaaaatatctactaatgcttttaccaaacctgggatgtgagttgggtgagttttattgtcttacatcttttttatcggtttatcctacttcaacggaatgtccaaaaccaaacaaaaaaatatatag

SEQ ID NO: 59696 - DNA, 300 bp, Homo sapiens
acgctccagcattacctctaagcaaaccttcaatatggctactgtagaagcacttctctcagcagcacccctcactctttcctcaatgagaaaagaagttgaggccccaattgcatcctctttactgatccacccaaaacaaactccctgcaggaaagtagagggataagatttccaaaggagatgctgaagagtaaaaagcaatcacacttcaaaataggactttacaaataattaacaacagctccagatccatcctgttctcttctctagaaccactagaaactctcagatctgaaa

SEQ ID NO: 59697 - DNA, 320 bp, Homo sapiens
ccaccgcggtggcggccgaggtacgggttctgtattttgaaggcatcgttgaactttctttttctgaaatgattttgtctgtgtttcatctaagtcttttactcctctgcaatttttttcatggaatcttttaggattctcttcctctacgttccacacgcactgggtgacattcatactgggtaatctgtcagatatttttctacttacatctaatttgaaagtgtgtatatgtgtgtgtgttcatgttctgtctctagtaatggagaatgcaaaggtaatgtgtggtttggtttgctctgcttgttgattttcttttg

SEQ ID NO: 59698 - DNA, 615 bp, Homo sapiens
  misc_feature 39: n = A,T,C or G
taccgcgataatggtacatatctgttgtgcctagatggnagctccaccgcggtggcggccgcccgggcaggtaccatcttgctcatcccttctccctctgagccaatcagacacagaaacgaatagccagttgggtcttaagatgggcctttaacatatcttcttattctggcaagcacagagcgctttctgcttaaagcagtatcagctggaaatgaagttattattttaaattacaagagttctgtcataaaagcatctctgacatgtgggaatacctgtgtgggaaagaaaatacaggaataaatatggcatggaacaattattctaacagagtggagtctggtgtttagtattgtagtatagagattcagttcagatcaaccaaaactagcataaaaacaataaacaacctgaaacatgacaagagacctgctcagttctgttattctgtctctaactttttctttttaaggtaatttatttggaatttttggaagttgcttattcagtgctttaatttatgcttcaaaatataagaatgtagtcacttaaattgccaaagtcattgaattcatttgaatcttatattttaaatgtattccattcctgaaa

SEQ ID NO: 59699 - DNA, 501 bp, Homo sapiens
ccaccgcggtggcggccgaggtacgcgggtccaaaaacaatgtatgctttttaaacctttaattgatgctttatttgatcaagagaatctcagctattttaagtggagtcaaaaaataacaatgtgtaattgtaagagccaggcatggtgacatgcctgtagtcccagctactcgagaggctgaggctagaggatcgcttgagtctcggagttggatactataatatgtgatgatcacatctgtgaatagccattatactccagcccagacaacactgcaacatcccatcttaaaaaaaaacagaaaaaaaacacgaaaagaaccttgctggctatgtatagattttatgctaatcttttccatgtcactgtgattgttagagctctaattttattgttttaataatcttgtgatcaatagttgaatgttatagcaatatgattctagcatactttatacataggatatcattttataatttattggatctgtatgtatgt

SEQ ID NO: 59700 - DNA, 506 bp, Homo sapiens
  misc_feature 438: n = A,T,C or G
tccccgcggtggcggccgaggtacgccacccattaacagttaggcattccagaagatgctccttttggaatggtcataaaggtgtgttttcttcttttgatgaactataagtagccctagaagatttggcactccttcattcttgcgtagtatatgggccgtctttaatagtatattgtctatttttaatcatggaggaatagaatggctaattgagacaagtggctgtgttagcagctgtgaaccgggcctatctatgtcagtctggaatactttgtccctggttctggaactttacagggtgtgggaatgcttgatgaattatcttaggttacacaacatgcagttctttggaatgcatatacatgtatattatacatactttggatagacacttgtatttgaatactgagttgtatataaatgatgaagtcattntagagtttgactgtcaggcagttaacatttgttgctttgtggttttgtcataatatgatccttactaa

SEQ ID NO: 59701 - DNA, 297 bp, Homo sapiens
acttgggaagtcttgcttgttttaaatgcccatcttggctgactgggcattcagatgtgtttgtctctcaccatggagactgagcaatggctcctctccttgcttctaacatgaaccttagggttccaggatatcccaaaccttttatttcacaggccctgtttaaacacaagagacactaagttaagcaactcttttctagtagcaaatgagttttaaagtatgaatgtataagtctcttatatatcacattattctggtgaaaataattatggacttccttctttgcccatcatg

SEQ ID NO: 59702 - DNA, 299 bp, Homo sapiens
acgcggggatattatccctgccttgccgttcattgtgaagactccagatgcgcacaccatatataattaacaatagaagatatatctgttctcaatacgtctttgtctcccttcatcattttgccttgtctgttttcttttgccaaaaagcccatgctacaattaaatgtctttagaataacacagtgagagtatttcagtgtaaaggaacactgggggaaattttagctagaaacgtgaagcttactgtgggggtagagggaaaaaaggcagagtgcagctttgacttgagggaaagg

SEQ ID NO: 59703 - DNA, 517 bp, Homo sapiens
acagatttgaatggctttgacttttggcagctgcacagtgctaggactggaccatgaaatatctctgggctctgacaattacatttgggttaatctaagcctgatcccatgtgttcctggaagagaagccccatgacattcaaagtccttgacaatctgacaccagcttttctaaccctataaggcccttccatccagcaaacttcctgcagaattattctctatccctcacatgttcatacccatgctcgacgcatttgctctctctgcctagaatcttactcttgtctgcctttctgcctggttaaatcccacatacgccaagatccaacactgctaaacccctttccttgagttgggatcatcttgttatgcagggccgggatacctgcaagggaatggaattaaaaaggttaagagattgagcagttgaaccttttcttgggaggtttgaggacaagccatagtgaaaggatttacctacagagagcacctcattattagatttgtggaaagt

SEQ ID NO: 59704 - DNA, 190 bp, Homo sapiens
  misc_feature 157: n = A,T,C or G
acctaaaaactctcagccgtgaaatgattttgtaaattctcaaatgggctttgcaagccaacagatccaaatcacaactgtggtcaaggcattctgcagagtctcaatgctaggtgaagaaggcatcttgggaaccagcagactgccactctctcanacattgaaagatatctccattctttgaaagtca

SEQ ID NO: 59705 - DNA, 249 bp, Homo sapiens
  misc_feature 89, 101, 102: n = A,T,C or G
tccaccgcggtggcggccgagtccctatcaaagaaaatggggcttctttctacttgagaaaactcccgattccccaaaaaacaatatgncccacttatagnngtcaactcagattaaacaagaaggttaatgcactctacatccaatgctccatattttactatcaactaagttgttattagcctcttgcatgaattttgagccttgtttctgtcctctcagaacaggtatcaagaaatacatctgcta

SEQ ID NO: 59706 - DNA, 285 bp, Homo sapiens
acgtaaataatagaattataaggaatccagtgtttactttctgagtagcagtgaagaggctaagtgttttccttctgggttggcttctcagatgtgtttctcaataaattctctagagatatatgtgtcaagtcagcttgttaaaaaacaaagaaacatgaaggcatgtagccctcacagttggatgcttttaaacactgcagctgtttgaaaggccggagcgaacgaattcaattatgactgagaaacctatcatctctccctgttagtgcttgtcatgaacat

SEQ ID NO: 59707 - DNA, 342 bp, Homo sapiens
acctacttctgaattgcccttcagacaatttgtattcatttatactcttctagcagtatatgtagttttctacttcccacagccctaggaaacactgtgtattgtttttaaacacggcctctgcttctttgagaattagaaaaaagtgcctcttcctctgggcaggcagatgcacccactagggtatatggctttgcaaaaggactgccagctgggttctagctcccccaagtctgctgggctgggcgccctcttgcaggcctcaacccacacagctatactcagtggccttactgaaagtcatgtgtttttctttttttctgaacaatgctaaagttcaca

SEQ ID NO: 59708 - DNA, 300 bp, Homo sapiens
acgcgggatgtaaaagacacttcagtttacaaatgcaaatatcacctctggaaataaacctaaaggacaggaagtcattgaagaagtggcaccatggattgccaggatgatgatgttgcaggagagttatatttaaggagacggcaaataaaaaaatgataataaggacattagatactaatttcaatgttattttgtgttttgtcttatgattattttagtgtttatgcattatttaacatttattaataaattataaatactctggctcaattcattctgttagcttggtttaaacat

SEQ ID NO: 59709 - DNA, 590 bp, Homo sapiens
acattttacttctactaatgcacctgtttttgcatcttttttaaagtagtcatatcactctactgatacacattgaacttatcacttatgaaaactttgtttttagaaaaatactaccaaatcaggtctttaccattttgtattttcctaactgattttttatttagggatttgtatttgtgaataaaatttatggattcatatttaagtaaatttaggacttcacatttccccatcatattttattttattaaccttggtccttattcctaccaatacacaatgatacatcttctaagcttgacaagcctggacgaattttgtgtgcctgtaactgtcggccttcgtatatgtcttacgcatgtatatctttacaaaatgtagtcaagtggtttctgtcatctctcacagagtaagtagtcatcttgaaaggatcccaagtgaaaagcactagaaatttaaaaggggagaacaggtcattttcataagagcctcaatccgtggagggtgcagaaactcagagaggcagggtatgtgaatgcctgaagcaggtttatgctggagagtacatgattatccaacgggggcca

SEQ ID NO: 59710 - DNA, 351 bp, Homo sapiens
acctaaggaggcaacatctaaactggccttgaggaacagccgaagatggcgaacgggacagttcctgaaaagggaatgtgagatttggcaatcaggatagctgtagcctttactacggaaaagtcagtggtggagacagcagacagattcagcgggctgaagagtaagcagaaggtgaggatgggtaggcaggagatagaaaccattattttttgaagtttgatactaaagagaaggaaaggctaatacttgaagggggaagttttctaaatgggtgggacttgagcatgtttactagcaaaaggagagggaggtgagaggccgaacgtaagagaggcagtagtgggtgaa

SEQ ID NO: 59711 - DNA, 285 bp, Homo sapiens
acgcgggcattccctggagagtaagtggggaagcgtcacagtccagtggacattgacctactctagctgctcttaggggttgtcagtaggttgacaggtttgctttgatatcttagccagaaggctggccccctctgcttccctgcaagttatactgagaaatgcttcagaagctagaggtgcaagttggctatacccaaactgagtggtctgcaagtgtcttcccaaccttgaagctgatgagaagggcatctggattgtgcctctccagaattctctgcaacc

SEQ ID NO: 59712 - DNA, 302 bp, Homo sapiens
  misc_feature 13: n = A,T,C or G
tccaccgcggtgngcggccgaggtacacagagacacgatccacagttgtgtaggaataacttcctaaacatctttaggatctacctctttttcctgttcccactgttatttctttgtttcaggcccttaacatctctaatatacactagtatttctgtcttcacactgttttttttctttacacagctcttttcatagcccctccattagcacacagattggaattgtgtctccttgttacccacagaataaaacccaatgttcttaatatgtagtcttaatatagactctataaatagccc

SEQ ID NO: 59713 - DNA, 305 bp, Homo sapiens
accctcagagtaaacctaagccacaagtcaccagctccactccctccacccgcaggacaccatgggggtctgttgccttggtgctgagtaaagtaggggaaaagcatccctgaaaagaccccctcatcatccctggtggatttcagcctatattcatatcaccaacgtgatccaggaaacctcaaaccaagtatttagtttaaaataacatcagaaatatcaaaaactttagggaggaaaatgaaactttatccagtggcattaaaggaaatcaaagtaaatggagaactctgttacgttcatag

SEQ ID NO: 59714 - DNA, 310 bp, Homo sapiens
accgatgacatgaaaagaggaagaatacaaatgtcctccttagctattttctgggagagcctgcaaacattctgtcttcagcgtcctgagatatgattggttggattggttatcttaaatgcctggaggaaaacacaacacaacacaacacaacacacttctttctccatctttgagcatctgagatggatctcttttcacccctgagccaggccaactacaattttttgtcagtctccacctcttgcttgcaccgggcccacagatccaccaagtccatcttttctgaggaaaagttgcactttgtttt

SEQ ID NO: 59715 - DNA, 287 bp, Homo sapiens
acgctccagcattacctctaagcaaaccttcaatatggctactgtagaagcacttctctcagcagcacccctcactctttcctcaatgagaaaagaagttgaggccccaattgcatcctctttactgatccacccaaaacaaactccctgcaggaaagtagagggataagatttccaaaggagatgctgaagagtaaaaagcaatcacacttcaaaataggactttacaataattaacaacagctccagatccatcctgttctcttctctagaaccactagaaactc

SEQ ID NO: 59716 - DNA, 335 bp, Homo sapiens
acacaaaggaaccgaggctttccttctcccaccctcctgtcagactcccttacaccaaagatggtctctgattgccagtcatgagaactttcttcaggggagatgggttataggaaggtaaagacttagaataaattattctttggcaatatatacagacttagacttaaaaattttcagcacctagccatgattctcggtgacctatggccaataatttaactaaaaatgtaaaggctcttatttatggtgaggcacctgacctgaagattgaaataaaatgaggtggtatccttgacccagtttttgtgggtttatgttttttttttgtcccc

SEQ ID NO: 59717 - DNA, 501 bp, Homo sapiens
acacagatctggtaagtgtgaggattgaaatttaactcaggctgtcttgtcctagtactcccacctccacatgaacctcttagcactgccacaataatcaaagcacagctgtcagagatggcaacccagggcaagatgatttttttattctacattttgtatattgaacctttagagtattaaacagtaaatgccagagcccaacttataaggtctatgaaaaggtcaaagtctccttttacttcatcaccactggagaaaaacctaaacaataatagtaaccaaggtccatgtcttcttttagaagaccaaaattttgagttcctctattatgagtctttgatggagacctgcttaattttctttctggggatttacaacaaatctatttttttttaattcttcattctctgtttttgtaatggttttaagggataattactattttttaaaaaaaacttaatgagttacagaacagtgatctctacttaaaattttggt

SEQ ID NO: 59718 - DNA, 321 bp, Homo sapiens
acagtaacagcaaatctaaaaagatctatttccaagctccaatctacctacccaagagagtcttcaaaactattctctaatagtaagcactttcttaaaatgtgggctatttcattaatgtatgatggttattgtaaatgtctggatcctggaacccagtatcacccagagccttcagaaagcatccacgtgcctgcctgtttaactgtcttagaacggttctattcagatccaacccctaactcatagactcaaccctgaggagccaggatactcaacgcagggactcatgagttgggcagacctaggttcaaatactgt

SEQ ID NO: 59719 - DNA, 308 bp, Homo sapiens
ctccccgcggtggcggccgcccgggcttgtacctcttaaaatttttttttaatctgttttctaggggaggtcatgcttggttaattgttgctaagtaaatggattttacctttgattattatttttctgcctttatacaatgtgttttaggcttcttttagacaaatagacattttcccatttcaaaggacactatcagttcttcagtatggaatttctgcaagagtcaagaaaacacacatcggatcttcctacctttctgtgggggtgtttgaggagagtgctgtagtaatgattctgttgtaaaa

SEQ ID NO: 59720 - DNA, 286 bp, Homo sapiens
gcatgaaaagctgtcttttcccagctgtttcctgtggcttatctccctgcactcttgaggtcttttcatctcttcctggaatgaccagtaacagtaaagcagtagagaaggggatttgggtgatcagctgtttggacatagattgcccattttgttaagaaacaaacaaataaaaaattaagttgccctattaaattaccaatttttttcttctctctcactgtcctgtgcctcagaataggatttctgcctactttaaatttgacccactgtagtgaaattcttc

SEQ ID NO: 59721 - DNA, 324 bp, Homo sapiens
tccaccgcggtggcggccgccgctgcccggtgcctctttttttggtttctttttttactgagtgttgaaggaccatggcatcacacgttgatacatttaggctgagacttatcatttggagatagtcaacaatagaggcgcgaagagaaagtttccaggtggaaagaacatcacttgctaaggcctgggacaagtgggaatgggagaatgtgttgagcagaatgtttgctatggttatgtcattgtgcgcagtgaggggtttaggcagagggaatgaccacagatgccgatgaagagtgaccaggatcacataaccagagccta

SEQ ID NO: 59722 - DNA, 456 bp, Homo sapiens
  misc_feature 52: n = A,T,C or G
actagggagactaaaaggaaagaaaaactgaaatgtggaagcgggagtaaantcagaaaaaatgttcataagaaagcaatatttatttaagctagcccttgaaagtcaaaatttcagtggtggtggtagggtgagggaagaggcaaaattgaaacaaagtatcagggacgggcaggagttcagtggtattagcagagacaaggagaggacagctgggcctgcaaacaagttagggtccagatcacagagattcttgaaagctaagaataaaacagggacagttactactcttatctgtccttatatcaggtatgatgctttcagctgcaagtaacaaaaatacctaactctaagtgacttaaattgtggtatcaaagcttttttgatcacgcaggactatcagttaaaaaaaaaaaaaaaaaaagtccctcggccgttttaaaactagggaatccc

SEQ ID NO: 59723 - DNA, 423 bp, Homo sapiens
  misc_feature 25, 396: n = A,T,C or G
actgggacatgatgggagacactgngaaagtcccaaacctagtttagggtgttaggggacttcctggaatcggggacatctaagctgagccctaaagtaggagacagtcagatgggagagagtaaagaagaagacatttcaggccaaatgcctgaataccataccctggagtggtcaggttggttctctggtgggaacacgaagattctcctgatcttctcctccctactctcaacactctcaacattcgtagtttttacctccactaaatactctttcctatattatagtgatgttacccctttatctactggaaacttctgaagagaagagactggtcttatttttgaatctcctaaagtatccagcacagagctcagcacacggttaatgctntaaaaatattttttgataagaaatctc

SEQ ID NO: 59724 - DNA, 510 bp, Homo sapiens
acatgtataggtatattcctaggacagattcctcaaagccgaatttatggctgagggatgtggacatttgtgatttgacaaatattgtcaagttgtcctacattgtgtttgaccatgttatgctcccaatggcaactgtgatggtattacacatgtttctgtaagccatctcaaatcctttctttaaaatgttgaggaatagatatctgattgaggtaagtaattaaaatgaaaattcagtttggttttaggcacagtaagatttaaaaattagtgaagcttctccatgattgtgttgatggagaaatatataagctaagtgaaggatccggtaactgccagcataccactgtagttttaactttgaatggataactgcaatggatatatggatggatggatgggtggagggatggattggatggatggatggatagatggattaatacagatagatagataggatccctgatatatgattcacaggagatccgacagcattttcccagt

SEQ ID NO: 59725 - DNA, 210 bp, Homo sapiens
actgcaaatctcatgatgatattttgttttatactgtttttctttatccatcacatcctgaaagcatctgttattttcattcataagcatttggcagagactgcttaataattttcctcttcctatggagcagcaactaaactatattttctgccctcctttgagtcatatatgaccatgtgactgagatctgaacagtagaacgtgaac

SEQ ID NO: 59726 - DNA, 511 bp, Homo sapiens
actccagcctgggcgacagagcgagactccatctcaaaaaaaaaaatagctggtcataggggcacacacctatagtccaaacttttgggaagctcaggcaaaaggatcacttgaccccaaaaattcaaggctacggggagccatgattatgccactgcactccaacatgggtgcaaagcaagactcccaactccaaaaaaagaaaaaggattatgggtttaaaacacttggaaaggatgtaagtttgtaggaaataaaatatcactgtccttttttgctcagggtcagcaacatggtaaaatgaggaattttaaaaattaacttccaggaaaaaaaggggagagagagagcaagaaaaaacccaattttttacagttttgaaattatctactaattaggtgataagtagtgtgtaaatagtggaaacagaataggatgcacaaaaaaatgttttgaatataaaaatgatacaaaacttgaccactgatcacaaatgctgaggcaaacctga

SEQ ID NO: 59727 - DNA, 311 bp, Homo sapiens
actgctgcacctggccaacagtgaactctaagaggcatttatcctaagtgtctgcatgaagtagaaggggtgacagtccataaaagttgtagaaaaacttttcagtcatcaagaaaaccagctaagctaccatgaggtctagtcttgtaaggttttcagtgggcaggccgagcagtggagtccacatgtgagtaacacttggccaataggacttgctagggaaggtagagtataattgctgggagaccttccttgtgcagatgactggccctagccagtgttgtgtgtggacagcaaggctgtgcaggcat

SEQ ID NO: 59728 - DNA, 315 bp, Homo sapiens
tccaccgcggtggcggccgagtacttgtcatggtctgaacagctatgaaatggggagggggatttcatgggattttagatgggcaatttcacctagaaaggaatgtggatgagatcagcaattataaacatcactaaatagctagggactagaaatcatttcctgaggaagatctgaagacttaaaatttagtttggctgactataaaaagagaaaaaaggaagagaaagcaacttttcaagtatctatatgcccaacatatggtaggttacatttacacattttcaccttgtttcatccttacaatcatcctac

SEQ ID NO: 59729 - DNA, 711 bp, Homo sapiens
  misc_feature 343, 365, 398: n = A,T,C or G
gaattcgtgatactggtactagctgtttcctgatgagactccccgcggtggcgggcgcccgggcatgtactatgaaattctaaaagtgaggttccaatggagatggcatttcatgaggcctccaaacaccttcaggcaccgatgcttcaggcgcatgtaacaaagcgaaagagcactgttgtggaagacactgaggaaagagggaagagagaatctagtttatgcccttggggaatcacaaatggggtcgtgcgacacgcaatgagatgaggagaaagcctccaggcgagagtggtggcgacacgaggtggctgtggcagcactggaaagctggtagataggnctctgagaagggagaggtcccnaagctggagtagatagtgtgactgtgagggggntcgggggccagaggcagcgaaggtgtggggtgtgagagagagactgtgtgggccgggggcgcgggggggatgacgctgtggggaggagggggggcgtggagggagctggctgggaccgcgggggggggagggggccaaggagggggagggtgaggtgggggggggggaaggagggggagtgtgagagggcgagggggtggtgatggggggggcagatgggtgggggagggaggggcgggggggggaggcggagggggagggcgggggctgggggcggagagggatgagggaaaaagaaaaaggctggggagag

SEQ ID NO: 59730 - DNA, 274 bp, Homo sapiens
actatggctcttgagagccaatgttaaatcttcaggaagaactggtttaagagttgccactaatactttgccagcaaagaccaaaactggcatttgcatggtttaattcaggatataagaaaagggaattttattaattaagctataagctccttgaagattcatgaataaaattatcaccttgaattgacctctacagaaagggcatttggctgctggtttcatagtaactagattgttaaacaaatggcatgagttttctttccttcacagg

SEQ ID NO: 59731 - DNA, 240 bp, Homo sapiens
acagcggtcaatcacaggcctctacctttagagagataatctgtttgacgaagcttagcacatgacagaagcagagagtgcctccttcttacaggcaggaagaccctgttcttcattgaaattaagtccatctggcatgatctcccttgacttctttcctctctttttgaacatgtgttgatcctcagcccagcagattgtaaactcctcaagggcaggtgccctgtttaatccttgtct

SEQ ID NO: 59732 - DNA, 506 bp, Homo sapiens
accctgaagagttaaggggagcagaatacaggcacttcttgagcagtggccatgcctgctcattgggcaaattatcaggcaataataacaaagagctttacctccccaggtccttcaaatggatgagggcagatgaagggaaaatatgtcagcagttcattttatcttagagagtaggtggcaaaccaaaagtgtatatgggttcttgtctttgttctggttcctttttttttttcctctttttggccgaaaacagggtcttgctttgtcaccttggctggagcacaggggggcaatcacggtttactgtaccctccaactcctgggcttacaaaaccctcctacctaagcctcctgagtagctgggactacaggcaaaccccaccacacccagctaatggattccatttgtatctgccctatccaggcccttctttctagtttatgtcttttacacagcaaatagtttacctccacccccaaacccccacaagtttttttcccta

SEQ ID NO: 59733 - DNA, 370 bp, Homo sapiens
actgaataacagctgggttttgtttattagtttctaacatttctcccaaaacatctatgcaagtcatctttcctataccatataaaaattgtctttatccatatataatctgtaaattttccccaaaactttttcctacttgcaaatgttatgcagaattctgactacgtattcccaggaattagctacttcttttctatataacttaatgacagctgcaaacctaatgtgaacagtctctaagcaatgtctctgatgagcatagaaacaatagaacagacccaaatatgctgtgttgctaataaaatgtttggtgggttcttcccgtcaaatgtcaaaaattaatgatattcctcttctactaaatatc

SEQ ID NO: 59734 - DNA, 170 bp, Homo sapiens
  misc_feature 24, 25: n = A,T,C or G
acagaacgtggaggtagcactgtnngcaggaataaaaaaggaacacaaatgcagtccttgagctccacaaagggtggggctttggaaatgccaggggcacgtggccgaagacaacagcatacctagctcaggtatatgctgtgtgtgtccaggtcggctgctgctgggag

SEQ ID NO: 59735 - DNA, 429 bp, Homo sapiens
actatttataatatttcatattcttataagagaggagagcatataacaactacagcttttaatttagtagaaaaaaactagtctaaacaactacaatgttgaaatggaattagaactgagtttaaaaattggtaactgaactcaatctgctgaaacacaactaaaaaacaggatgatttcactaaagtaacgtaaaggggaatgagtaacaaagagaaataaatgtgaatgggcaaagcaaaactacagcatgaaggttttcaatttcaggtaaacaatttgtgtatgtttcaataagaaatgaaaaatcaacactggttcttgagcaagaaagctgtgcttcaggacaatgaatttgtgcaaggtattggtagggaaggggcacaccctggtggcaggtgagaggtatcactgatagcactgtacctg

SEQ ID NO: 59736 - DNA, 293 bp, Homo sapiens
acataggggtgtatgatacagccagttgtgggaatttctaggctggcttctgagctaatgattaagtatctcagctctcatcctaaattcaaaccaagcatccataaactctagcaggatgagacatacgaagatattcaaataccaaagtaactatggaaatgggaggaacaaagaagaattcttgaaagtctctgggcaaagataaaaggaaaacagagtggagaagatctcacagcaggggcctgtgacagatcttcaaatcacgaagtcagagaagacgaagtgaagca

SEQ ID NO: 59737 - DNA, 495 bp, Homo sapiens
actctccagcatgaacctgcttcaggcattcacattacctgcctctctgagtttctgcaccctccacggattgaggctcttatgaaaatgacctgttctccccttttaaatttctagtgcttttcacttgggatcctttcaagatgactacttactctgtgagagatgacagaaaccacttgactacattttgtaaagatatacatgcgtaagacatatacgaaggccgacagttacaggcacacaaaattcgtccaggcttgtcaagcttagaagatgtatcattgtgtattggtaggaataaggaccaaggttaataaaataaaatatgatggggaaatgtgaagtcctaaatttacttaaatatgaatccataaattttattcacaaatacaaatccctaaataaaaaatcagttaggaaaatacaaaatggtaaagacctgatttggtagtatttttctaaaacaaagttttcataagtgataagttcaat

SEQ ID NO: 59738 - DNA, 471 bp, Homo sapiens
  misc_feature 63, 85: n = A,T,C or G
gccgcccgggcaggtacactcatcttcactacattggcaatgcaatctaatcccacacatggnaaatcacaattatacaacatgngctgccactcccactgaaaaactagctctggggattgcagatctgtttattactgtagtctcattgctttacttctatttcttatcatccttttctttattcctgtgtctaactgaatgctgaacctaagactttgtgtctcactctttacccatactcaccctgggaacagctttctgcttttgatctcttaaagtcttatctatgatagtgtttctgatgccactgcatttgctcctggcaactccatgtaaccaccactggggaatgaaaacccaatattttcctcaaatctcactgtccgacattcacagcaaatttctgccttccctaacctcagcaactcaccaccttttcttttccatctcacacacaccaccctaaaa

SEQ ID NO: 59739 - DNA, 266 bp, Homo sapiens
accttagcattgcggtgacttataataggtgctcagtcaatgtttgtttccattcttcttggacatatatgagaagggccatataagattattaactatttatttatttatttttttgagtagtgaaactctaaagactcacagtctgaggactcatggagttgttcacatccatgaacaacaatgttatgaatcttttagttataaagcaaacctttctctggagcatgtttgtgttttctcatttaggtttataaattgctctg

SEQ ID NO: 59740 - DNA, 449 bp, Homo sapiens
acatttttctgtaacaagacaacctaaaacattcctttgtttggcttgaattctatcaatccagtgtggtaagacatgtccttggaggctgacctgaagctctgaatggtagttgtgtgtctttcattagaaacacacttggggcgtggtgtggtggctcatgcctgtaatcccagcactttgggaggcagaggcaggcggatcacctgaggtcaggagtttgagaccagcctggccaacatggtgaaaccccatctctactaaaaaaaatacaaaattagccgggtgtggtggtgcatacctgtaatcccagctactagggagactgaggcaggagaatcacttgaacccgggaggcggaggttgcagtaagctgagatcacaccactgtactccagcctgggcaacaagagtgaaactccatctcgaaaaaaaaaaaaaaaaaaaaa

SEQ ID NO: 59741 - DNA, 282 bp, Homo sapiens
acttttagtagagacgggggtttcaccatattggtcaggctggtctcaaactcctgacctcatgtgattcacctgcctaggcttcccaaagtcctgggattacaggagtgagccaccgcgcccagcctccactaactcctattttcttaataccaaatagtcatgaaactgtcaaaatctgccatggtcaaattagatgttagctgccctaattttataacttgtgaattaaatttttgcttgggatttttacaatgataagcacatacctcattaaaggtg

SEQ ID NO: 59742 - DNA, 289 bp, Homo sapiens
acaaaagaaatatcataaaccccaaaggggagatgacatttggaaaggcagctcaaagtttttttgttcatttttttatatgcttgatattatatttttgaaatagtcttttatttagaatagttttagatttacataaaaattgtgaagataatactggaagttcccataggaccccacacccactttcccctattattaatatcttacattaatatggtatatttgtcacaagtaatgaatcaatattgatacattattaaagtccatgttttattcaaatttcttg

SEQ ID NO: 59743 - DNA, 306 bp, Homo sapiens
actgcattctccagtcctagacctaaaagcaagtgaatacaaaacctgggtggaacagggaactagtattacacagaagttttactctttctgcctagctagaaagaaatactgacgaagagctaagacgtgggctgaccaaggcagcctcattcaaacgtgtatactacagtaaactccttttgcagcagggaagagagaatacaacatcagctaaaaacattttgataaagaacaatgatgccgggggatggtggtgaagacctgccctccagatattaaaattctgaaatggcaataattaaa

SEQ ID NO: 59744 - DNA, 161 bp, Homo sapiens
acgagttctttactggctaagtggcaagattttatcggggtggagccagatgacttgaaaacttgtctgaaaacggcaatcgttgtttaaaaccatggtttggggctttcctcatcagatctgtaattcataatgaaacagcggttatttatcaaatcctt

SEQ ID NO: 59745 - DNA, 295 bp, Homo sapiens
acgcgggtattataattgatgctttttaaaatgcaataggcatatggatattaaggtttctgcttcagttattttttcttggggaaaataacacctattgatttaagatccttagtcccagattctaaattgattttcttatttcattgtcaacataattggggatttgtctttcaacaaaagaaaagcaaagcatagtcgtcatcttggtagacatttatgtatataggaaggtcataggtgatttctgaggaagtttggtgattaaagaaagagataccctgtagtcccagct

SEQ ID NO: 59746 - DNA, 215 bp, Homo sapiens
acaaaataaatttgctcattgggttagagtatggttattgattagggggctaagcatttagttactgcatggggcagccaataataaaatcacagccctgtgtatttacccccacagtgtgtgctgataagtgcaaaaggtttgtgcaaattcttttgaagttatattgtaaccatggtatatgtattgaaaacttggccattttaccccattcc

SEQ ID NO: 59747 - DNA, 361 bp, Homo sapiens
  misc_feature 1, 43: n = A,T,C or G
nggacccgcgtactgcgtacttactctgttgtgcctgattggnagctccaccgcggtggcggccgaggtactatgcttgttgctggggatacagcactgaacatggttcttgtcctcttggaggttaaagttttaggaaggagatagacaacaagtaaataaattgaacaactgtaagtgtaattcacagagaggtaggtgatatgagggaaaagaatgaactcttctgctggaaaaatcactggatttggtggccaaggactgagacagttaaaccaagagctgagagttgagaaggtgcttgtctcacggagagtgagatggagggcgcttcagacagacagaggggatgtgcagagac

SEQ ID NO: 59748 - DNA, 378 bp, Homo sapiens
actcacagtttctaataataaatgtgtgggtttttttttaattgggccagtgaatcacactgactataaaagtttgcatacattatcttatttaggtttcatataatcccatttttggcttcagaaacatttaatcagtatatcttggataggtatcattaacccctgtatctgtcaggccagctcatgtttttgcatctatgcattaccttcattcctcctgcaatagctacttcgttaatgaactcaagcaaaatctgagatggttgtgtaagaaaggctaattgatatcagtaaagtggtttattttgttgattactgaccatatcctcagcagctggatgaacactcagataggacaaagtttctcccagactg

SEQ ID NO: 59749 - DNA, 557 bp, Homo sapiens
tccaccgcggtggcggccgagggtaccatgaaatttattagtcacaagtggctctgtgttctctcaaatgcatctttatacctctcttaagtcatccttaagagctaatttgacacaaagacttatatatacagtgtctcattgaaggttttcctttcctgctgttttggtaaatactagacagttttcataaaaaagcattttattttaaatatttactgatttagaagctgttccttctgcttctatttgacttctgacagtgtagttataagtcagcatttataactggtattatgtatgaagcatttaaaatatatggtcagtcataacatgataaaatgttgtattaaattaaagaaactgaaaaagatctaccatttgcgaggcatctgtgggctatgaaaaagagtaaacgtggtctctgcttttactcaggaactcccagtcctaaagtagagtgtcatgaaatcactgagagcctagctctaagatatgtctcccaaggagttttggtgttttcccaggcaagccataaaaatttagattgcagcagc

SEQ ID NO: 59750 - DNA, 430 bp, Homo sapiens
acttggcactcagtaaataactgttaaaaaatgaaagtgccattcttaaaagaccacgctaagatttcagttaaaggatcagcctatttgttaacaaacatatgtatgttaatttaaggccaatatcctgtaaaagcttttgttgtagtgctttgatgtttactaatttccacctaccttggtcaagcttactttgatacttttgcaatacctgcattaaatccctttccttagacaggtgtggtggcttacactcccagcactgtgggaggccaagacaggcagatcacttgagctgaggagttcgagaacagcctgaccaacatggcaaaaccccatctttacaaaaaatacaaaaattagccagacacggtggcgtgcacttgtagtcccagctacctgggaagctgaggtgagaggatcacttgag

SEQ ID NO: 59751 - DNA, 306 bp, Homo sapiens
actggttttataaaaatattcaaaattattacatttaaaaatagatatttcagtgtgtatcagttaacagtgcattaacaggttagctgaaattaatgaaaacccaactaacagaggtttaaaccacaagagaacttaatgtttacttgcacaatttatggatggagccagttatagagttgatctagctgagctacaatatcagggttctggatcagtgtttttctaatgcccttagcctcactcttgtgaacactagattactgctcggcttcttataatctcacctgaagttcaaaggaggaa

SEQ ID NO: 59752 - DNA, 297 bp, Homo sapiens
tccaccgcggtggccgagcggccgcccgggcaggtacatccctccaccccccacacaaactattgtggagaacaacacaaagcgtgaggaaagaagatcacagaggctcattgggatgtggtgattcatcctgggctctcagaagcacaggtcacccactgaagcctggagtttaaggatgcttttgctttggaacaaaagagaaagtaagagcaaaggaccatccagtcatcaagctaatgacaaattgggaaagggacgtggtcacctagggacaaggtcagagtatcgtgaaaa

SEQ ID NO: 59753 - DNA, 310 bp, Homo sapiens
  misc_feature 130: n = A,T,C or G
tccaccgcggtggcggccgagtacgccccttggtgagcactgtgctctctgcaccccaataagcccaacaggctctccaaggaggcaaaattctgatgatacatttctgtttagtggaaaatgggtaggngaaaattatgtcttagaatcaattaaccaaacataaaatcctccaagggcttggtaggatgcctagggaagagccacgagataaaaactccaggctggaagggcattgttgcagcactgtcattctccagtttctcttggagttgtcaccaccctctcctttgttctcactgctgacatc

SEQ ID NO: 59754 - DNA, 240 bp, Homo sapiens
  misc_feature 23: n = A,T,C or G
acgcgggcacaggcagactggtngaaaagaaacattgaaattgtgctgttaagtgtgaggagaaagatgaacaaatgatgctaggtaagagataaagaaggagatatttggtttgtctcaaaggacctgggaagtggtcctttacaaattctgttatactaaggtgtttttcctctccctgtatttcaaggaaacaggtggacagaaggtaattttgagggaagagtggagggggtgaca

SEQ ID NO: 59755 - DNA, 419 bp, Homo sapiens
  misc_feature 133: n = A,T,C or G
acgggcttgctctggttattagtcctgtcccaattagatggcctgttatttcaatagtagataaatgtagataaactatgactttctaataaagtatttaaaactctgtaaagtcagtcaaaaatacataccntgaaaaaaataatttgttcattttatgagtaaggactaagctgctgcaatctaaatttttatggcttgcctgggaaaacaccaaactccttgggagacatatcttagagctaggctctcagtgatttcatgacactctactttaggactgggagttcctgagtaaaagcagagaccacgtttactctttttcatagcccacagatgcctcgcaaatggtagatctttttcagtttctttaatttaatacaacattttatcatgttatgactgaccatatattttaa

SEQ ID NO: 59756 - DNA, 300 bp, Homo sapiens
  misc_feature 240: n = A,T,C or G
ctccaccgcggtggccgagcggccgcccgggcaggtactttatttgatgtccttattagaagacatctagaggagtcaagacctagactcagttcagtttgagctaggcttgaattccatttgcaacatgggatgggcccactgctccaataaatgtgatgttttacatgtgaaaggtgcttgatgttttgctctatgcaattcctaggctagaacctgttctgtctgttattgcactgngtattgcagtctgttggtcatcagcaggtgactgcctattgccaaaagagacgatgagat

SEQ ID NO: 59757 - DNA, 300 bp, Homo sapiens
acccattccaccctctctccccttcctcactgccgtttcataggggttctcagattcctgtgaataaagcaaaccgatgtgcagatatgtgtgcttacacatgtggacgtatttgaggaggtaagagggacctgcacaaggctttagtgagtaagcagagaagttatttatatatagtgagacccagtaaacggcgatgtcgcaggtgaggcagttgatctggtcagaatatgcctccagagacatcactggtgaggcctgcatgcatgttgaaaagagtgtatcttacatctaggcttg

SEQ ID NO: 59758 - DNA, 448 bp, Homo sapiens
  misc_feature 436, 438: n = A,T,C or G
tccccgcggtggcggccgaggtaccatggattcaggagtggtctgaataccagagcaggcaagccaagtgagcaaggggagggagacgagaggtgccaggaaaaccctgtctcatgagaagatgatgatcctagaaggcttagaagagtgtccaccccaggccaggtgcggtggctcacacctgtaatcccagcactttgggaggccgaggggggtggatcatgaggtcaggagctcctggctaacacggtgaaaccccatctctactaaaaatacaaaaacaaaattaaccagacatggtggcgggcacctgtagtcccagctactcggtggctgaggtgggagaatggcatgaagccgggaggtggagcttgcagtgagccaagatcgtgccactgcagtccagcctgggcgacagagtgaggctctgtctcananaaaaaaaaaa

SEQ ID NO: 59759 - DNA, 121 bp, Homo sapiens
accaagaatatattttccagtataatttcccatgcttgaaaagttcattaagggaaagcaaaatcaattcctcaaaaaaacttcctttgagcaagccatctacctgctaaggaaatgtcca

SEQ ID NO: 59760 - DNA, 305 bp, Homo sapiens
acaagttctttactggctaagtggcaagattttatcggggtggagccagatgacttgaaaacttgtctgaaaacggcaatcgttgtttaaaaccatggtttggggctttcctcatcagatctgtaattcataatgaaacagcggttatttatcaaatcctttaagtcaggcagagccggtggggaggtttttgaatgtaaattccagtgaacagcttctgctttagagtgacgtgacttgtaaggctgattttactttagaagcagtgttttgttgttgttgttggaatctcaatatttattgaa

SEQ ID NO: 59761 - DNA, 324 bp, Homo sapiens
acgcgggctgaggtgggaggattgcctgagccctggagtttgaggctgcagtgagccaccactgcactacagcccaggcaacagagtaaaccctatctcaaaaacaaaattttttttaatgaaaatgcagataaccttacacatgctttctggataaaacttgttattaggggtgtcaaccattcagatattctcagtgagaagtttcattaacaatagagcgattaagaaacatctatcctcaaacacaattccttattcacttgttttcaaacattaaaactatataagtaacaccataaaaaaattaacactttgggatgc

SEQ ID NO: 59762 - DNA, 310 bp, Homo sapiens
ctccccgggtggcggccgcccggcagtctaccacagatacactgtctttgcaaatctgttattagcaatctctgcttccaggttttcaggtgctggttccatggctcttcctgagccgaaaataaggaaactccatagaccttgtccactggaactcgttcccatctaccctccactctatccaggtaagaaaccaaccatctcaggaaaggaaccaggcaggagtcagaggggaagatgggcactgaaggtatcaaaatacccaaaagatgcaaattgctaaaggaaacaataatcagattaggtgtgg

SEQ ID NO: 59763 - DNA, 296 bp, Homo sapiens
actttggcttttgtttctagaacaccaatgagtatatgctcattaagatagtttgatgcaataaatccttattttactcgcctctattactgcattgaaaactgttgtctactttgtcttcttgaaatcctacacctcccccagcccccacatttggcctatggaacattactttatcctgattttccccctaaccttctggcaatgcctctcagactccttccagaactacttttctctgttttccttttaatgatgacagtttatgcaattgtgtcttcaaacttataacgacc

SEQ ID NO: 59764 - DNA, 291 bp, Homo sapiens
actcatttcattttttaaattatgaataaatcttgtatacttacataatattctatttttaaaatagcattaagtataaggcaattattatttgatcataacttaatttgtatttcacattttataatttttccatcagttatatggtttctttaacataatttatagtttagtagagcagtaaaattacaataggaaagactataagaactgtaaatgagaccatatttatttcacatatagagataaacacatatgtgtctgaaaaacaagattgacttagacatccag

SEQ ID NO: 59765 - DNA, 301 bp, Homo sapiens
accgtgtgcatccttaccagagtggagcattagtgctccaacccctgctactcggatcagccaggcaggttattatggccaataaaaaagaaaactaagttccccgaggtaattttcttccctctggggaaagctacttttctgaaattactagagaaatctaaagcttactttcttctgcagttgtgtgttttagaagtgctaactcctcaaacatcacgtaagaacctatcttcatctggtaggtggctggaagaaggactttgcaaagctgactttgtgggagagtgacttctgatat

SEQ ID NO: 59766 - DNA, 285 bp, Homo sapiens
acaaaattgcccaccctgcaccccgaccccgtcaactgtaagtagatcagggcggtatttcccaggcacttcatgacatcttttgtcagtatcttcagcatgatttcaatggcttgagtgcctttgccacccgcttgtttggccatggtatttattaacttgcacatcgttatgctttagcacctctcatactggtgctccagtgaggggagggtttagtgttttattaatgcctcattcatttgtggcccatgccttccttgccctcactgctgttacgttata

SEQ ID NO: 59767 - DNA, 157 bp, Homo sapiens
tacgcgggtgaaagatgtaactatgccttacactgctcaccacacggaacaaggcccattgcttggtgggacactttggattttggtggcaatgtgttgggatgtgcttctctggtgtgttaaccagatggcagtggcccgtgggactgtgggggtt

SEQ ID NO: 59768 - DNA, 582 bp, Homo sapiens; identical to SEQ ID NO: 39561
  misc_feature 524, 557: n = A,T,C or G

SEQ ID NO: 59769 - DNA, 615 bp, Homo sapiens
  misc_feature 34, 548: n = A,T,C or G
ctcataatggtacatacttgttggcctagatggnagctccaccgcggtggcggccgcccgggcaggtacagagatgaaggtaatggggtggtaaaggaatataaaacggtccccaccaaaattaactaaaatataatataacaaaaaaattatatagactcatcttatttccttgaaccacctagaaagtgagaaattgtttcatttgcagcaaaaaatcctgtcatatactccttaaattatttgggggattattttaatacatttccatttaaagctactctattatataggtcaattttaaccaagccacattacatagagagacacatacccatctgaaataagacagaagtgactattctattttagtcattaattcctcaaataccactccacagccactaacatctgtgaatcacatgccgagtgactgacatctacagatattaggtcataaaccttaaaggagagaaactagcaggaacatggacaatgaaaaaagagtggggaaatgtaggccacagtaggtatgtgtgtagggtatntagaacttgttatcatgtgtgtcttctgtttctggaagaatcttgcaaaaaaacgaatctagaaaat

SEQ ID NO: 59770 - DNA, 608 bp, Homo sapiens
gcgatactgcgtactcactatgaggccgaattgggagctccaccgcggtggcggccgcccgggcaggtacagtgctatcactgatacctctcacctgccaccaggctctgccccttccctaccaataccttgcacaaattcattgtcctgaagcacagctttcttgctcaagaaccagtgttgatttttcatttcttattgaaacatacacaaattgtttacctgaaattgaaaaccttcatgccgtagttttgctttgcccattcacatttatttctctttgttactcattcccctctacgttactttagtgaaatcatcctgttttttagttgtctaacagcagattgagttcagttaccaatttttaaattcagttctaattccatttcacattgtagttgttttgactagtttttttctactctattaaaagctctagttgttctctgctctcctcacttatctgactctgaaatcttctaaatggtacctcggccgctctagaactagtggatcccccgggctgcaggaattcgatatcaagcttatcgataccgtcgacctcgaggggggcccggtacccagcttttgttcctttagtgagg

SEQ ID NO: 59771 - DNA, 298 bp, Homo sapiens
actctagtttagttttttttttttcttttaaggcgtaccattactaaaagtatagctttgggaaccttgtaccatcttaaaaacttttaaagggttgacagcttttggcaaattgactaatacagaaaactaaactttggttcatgtattcaatgtctaaatgaaaaatgggaaaataaaaaagctaaaaatgaaatgtgatttcatgtgcttctcctttttagctcttataataaattgaacaaatttgatatttgtggtaaatccactcaggcaaagtgacaaaggcttggttgtc

SEQ ID NO: 59772 - DNA, 307 bp, Homo sapiens
tccaccgcggtggcggccgacgtacccgggggtagctgggtactacaggtgcccgccaccatgcctggctaatcttttgtatggatgagtatagacagagggggaccgcgtaccccacgatggccttgatcttatgacataccgatccacccgcctttgcctcccaaagtgctaagattacaggcgtgagtcactgatctcactcctgtttgcaagggctggttccatggctcttcctgagccgaaggtaacgaaacttcctagaccttgtccactggaactgattcccatctaccctccactctat

SEQ ID NO: 59773 - DNA, 483 bp, Homo sapiens
  misc_feature 398: n = A,T,C or G
actttccgcataaactctttgttctagatcttcagattccagccttctcccatgtccacctccttccatattcctattctttctctctaaatcctcagtgctctttaaggctcattctgtattcactggtgttcatgaatccttcctgagtccgtagtgctctattgcttttccaaatttctaacgcgcttcaagtctttgtcccacaacctggcatgtgaattacaaactatgatattgttcttggaacactaggggcttatgtgcatcctgctgcctatatgcagtgatcagttctttgaggttaaggccaataatttctcattctttgcctgttccagagctgtcggtttaattttaggagacatttaaattcttataaatctgacttagcaganacaaaaacattgaaataattattgtctagacaagcttttagatacttcagtttaagaatatgaagaaaataaaggatactaagag

SEQ ID NO: 59774 - DNA, 260 bp, Homo sapiens
  misc_feature 228: n = A,T,C or G
acacagagacacgatccacagttgtgtaggaataacttcctaaacatctttaggatctacctctttttcctgttcccactgttatttctttgtttcaggcccttaacatctctaatatacactagtatttctgtcttcacactgttttttttctttacacagctcttttcatagcccctccattagcacacagattggaattgtgtctccttgttacccacagaatanaacccaatgttcttaatatgtagtcttaatat

SEQ ID NO: 59775 - DNA, 580 bp, Homo sapiens
ctcaccgcggtggcggccgaggtacctgtttgtggtgtattcaggttagtgcttgttgtttggagaaaatatggaatacatcttcggtctaattactggaaagataatgtgagccttaaagaagaaaggaatattatattgtggtatataaggtaggtcattctcatttctggatacttgtttggtgtccatttatgaaatggtttgtttgctccaaagtatctgtatatagcctctaactggtatacaactaagtcacagattgtgaccctaatggcctgagcaccccttaggcttcatctctccctgatttcacttctgcgcatacctaaagacttgatgttatcaacatatcactttatctttccatttaggctatccctgagtaatgagaaggaatgtgagaagaaattaaattggaggctttcctagtgaaaggagagacactcagaggtggccagcctaggattttaagaagtctagaaagattgagcagggctcccgagaagaatattttaatgaaagtaggaggttagaaaaatcctacctgactctgtgcccgttttggtaaaaacagaac

SEQ ID NO: 59776 - DNA, 302 bp, Homo sapiens
acatatatagcatatatgttttatatgagtgtgtgttttatcatttgatgtcaggtgctgataaaaataataaaaaataataaagcattgcgagcagagggagaactatggagactgtattttagaaataatggtcaaacagtgattctctgatgaggtgacaagtgaacagaaccctggctaaaacagatattgagcattatctgcagagagacaagcaagtgcaaaaaccccacagtgagaacatactttacatcaaataacctggtgcagctggattggagggcatgagggtagagctg

SEQ ID NO: 59777 - DNA, 293 bp, Homo sapiens
acttgttttcttgcctcatagtaattatttgcacttgtggtttcatttcaggatattaaggtttcatgagcctgactttttcagtgacacatttaaagatgcggaagggccttcttggtcttcctcacctttatatgaaatggtggagatgtctttctatccttccactggttaatgtgtctcgtctgttatgtcccctgcagcccctggcactctattctttcatagtagtaacataattagcacatattaagtgaatatcattaagtggcatgcaagagggaagctctggt

SEQ ID NO: 59778 - DNA, 541 bp, Homo sapiens
acacattttgttaagtatatgtctaaggagttcattttattggagtgaatgtaaatactttaaattaagatttcctcattatcattcctaatatctagaaatgtatctgatttctgtgtgttcatctagtatcctaagaccttgctgaagtcacttactatttttagaagttgttttgtagatttattaggattttctaggaaacaattatgtcatctataaataaggacagttttatttctcccttcccaatctatatatcttttatttgtttttcttgccttattgcagtggccagaatttcaactactatgttgaatgactgataagagcagaattcttgccttgttgtcaatcataggaaaaggaattcagtctttcatcatcaattatattagctgtaggattttggagatgcactttgtcaagttctaactattcctatccttaacttgttgaaactttttaaaattttatttaatcacgactgggtgttgaattacatcaaacatctttattaattaatatcatcatatttttc

SEQ ID NO: 59779 - DNA, 320 bp, Homo sapiens
  misc_feature 40: n = A,T,C or G
tccaccgcggtggtcgagcggccgcccgggcaggtaccgngaatcattgttgccactccctgtggatgaccaacaagatgctttaggcagcgagctgccagagagtttgcagcaaacagttgtgctgcaggatcccaaaagccagataagagcctttagagaccctctacaggatgacactggattatatgttactgaggaagtcacctcctctgaagataaacgaaagacttattctttggcctttaagcaggaattaaaagatgtgatcctctgtatctccccagtaatcacattccgagaaccctttcttttaactg

SEQ ID NO: 59780 - DNA, 170 bp, Homo sapiens
  misc_feature 16: n = A,T,C or G
ccaccgcggtggcggnccgcccggccaggtacttatcttttttgtttttatttatatttctgggctgcggaggggaaagaataccaattttatacagtggcactggtcatttaaattaaagtgtgggtgaaataaatttttgtgataaacaagaatttggagatacatta

SEQ ID NO: 59781 - DNA, 577 bp, Homo sapiens
  misc_feature 141, 527: n = A,T,C or G
acatacatacagatacaataaattataaaatgatatcctatgtataaagtatgctagaatcatattgctataacattcaactattgatcacaagattattaaaacaataaaattagagctctaacaatcacagtgacatgngaaaagattagcataaaatctatacatagccagcaaggttcttttcgtgttttttttctgtttttttttaagatgggatgttgcagtgttgtctgggctggagtataatggctattcacagatgtgatcatcacatattatagtatccaactccgagactcaagcaatcctctagcctcagcctctcgagtagctgggactacaggcatgtcaccatgcctggctcttacaattacacattgttattttttgactccacttaaaatagctgagattctcttgatcaaataaagcatcaattaaaggtttaaaaagcatacattgtttttggaggattacacatttaagcattaaaagagtaacagaaaattaagccaagtgcccanaagttataaacttggaaaagtggatttaactttacacgataatacccgcg

SEQ ID NO: 59782 - DNA, 125 bp, Homo sapiens
  misc_feature 7: n = A,T,C or G
aaaaaantttccctttttacccaagggggttttaaaccccaaaccttaaagggcccccctttttggcccccctttgggtggggatttaagggggaaaaaaattccccgggcccgaccataatttt

SEQ ID NO: 59783 - DNA, 290 bp, Homo sapiens
acaatcattagaagtatggttgagaagattctggatcagagtttgtccagggtggcatctcttttgtatctcacagagaagctaagacgtgtaacatgaaactgcacttgttatctgataactacttctattttctcgcttatataaaacctgctgaatcatattccaaatttacaagacctcattcttattcttcccatagagtttgggtgggggaaggggaagagggaggaggaggcaggagtagacatgctgttaggttcctggtctcatgctacctacttctcaaa

SEQ ID NO: 59784 - DNA, 529 bp, Homo sapiens
tccaccgcggtggcggccgagtacactaggaaatgcaggaagaaattatttgcccagatactgcaaagattttctagctatgtgagaaatgaaaatgcattttcgccatatttggtaaactgaatgttattaagaggacaaacctcatgtaaaaaggagataagcagaaactgatttgaatattattgcagagcaaagtaaataatcatgatgcattcaacctttataaatgtgcaaaaacagattaattttcccaattacaagccttaataatattaaatgactttaaacacatgaagtagggtaagaaatagatagcaatgataatacacgagtgtgttataagggatattaatgaataattggttacacaaaagagggaggggatggagaaaaaagggaaaatgctggattaaagttaaacagatatcctgaatagttgtcatatccttaaaggctaatatacgttctgaatctctaaatagaaatagagtatacagtgttttctaaacttcttaaacccaaaata

SEQ ID NO: 59785 - DNA, 229 bp, Homo sapiens
actgagttagagattatttcaaattcagtgctttgtctgaaaacattttcattagcatttgtagttaggactatggaaaaattggagtatatgctatcaaagagcaattatattttccaactgttaactagcattagaaagggcaacatctttaattactcattaaaactgtcttttgaaagagtgatcatctaaaatcagatactaaaacattatattgccagaattt

SEQ ID NO: 59786 - DNA, 240 bp, Homo sapiens
actgtggacattgaaagaagaaaacaataggagatatttagaaaattttccaggcagctgtcaggacctggttattgttgaaactggtcagactatcagtctatgggttaattttctccagcattatttagtagctccagaaggagaatggataaagtaggcattgaaataggcttaaactttggttctgctggtggattcaagaaaagggaaaaattggaagagttgagagaatgggca

SEQ ID NO: 59787 - DNA, 262 bp, Homo sapiens
acaaaataaatttgctcattgggttagagtatggttattgattagggggctaagcatttagttactgcatggggcagccaataataaaatcacagccctgtgtatttacctccacagtgtgtgctgataagtgcaaaaggtttgtgcaaattcttttgaagttatattgtaaccatggtatatgtattgaaaacttggccattttaccccattcctatgaatgaaaactatttggtgaatcagaagatagtctgaattggga

SEQ ID NO: 59788 - DNA, 313 bp, Homo sapiens
acacacatgcacacacatgcatgcacacacaaatgggaatctgagtggtagtagtatgagaaattttgcaactcatttataactctgatattgtgtcacaataaaaagttacaattaaaagtatatattgttgaatgaattagtggctggataaaggagtgagaaaacatgaattaagcattatcagaagaaagaataaaatcaattagacatttggtatacttaatcttctataaaactcttagaattcttaaaggacactaagacataaaatatttgtaagtaaagaatacagaaaaaacattgagttttt

SEQ ID NO: 59789 - DNA, 160 bp, Homo sapiens
  misc_feature 16: n = A,T,C or G
tccaccgcggtggcgngccgaggtacaaaataaatttgctcattgggttagagtatggttattgattagggggctaagcatttagttactgcatggggcagccaataataaaatcacagccctgtgtatttacctccacagtgtgtgctgataagtgcaa

SEQ ID NO: 59790 - DNA, 168 bp, Homo sapiens
acctgagtttagtttttttttttttcttttaaaggcctacctttcctaaaagtttaccttgggaaaccttgaaccattttaaaaactttaaaggggttaacagttttggccaaattgcctaatccaaaaacctaaccttgggcccatgtttccactgtttaaaaaaaa

SEQ ID NO: 59791 - DNA, 233 bp, Homo sapiens
actgagttagagattatttcaaattcagtgctttgtctgaaaacattttcattagcatttgtagttaggactatggaaaaattggagtatatgctatcaaagagcaattatattttccaactgttaactagcattagaaagggcaacatctttaattactcattaaaactatcttttgaaagagtgatcatctaaaatcagatactaaaacattatattgccagaatttaacc

SEQ ID NO: 59792 - DNA, 287 bp, Homo sapiens
actttaggctgagaaataaatagaagggtgagaaaaaagaacagtctttatagtcagtaagagtgaaaagagaaagatggtagttggggaaagacagatggggagaaaggttggctggttgttaataaaacagtagaggatgagcatgtattataaatgctggtgggaagaaaccttgtggcaaggagggtggtagtgttggagaagaaagagaggatatagtagaaagttaaagaggaactggaagcaggtgggatccaggacataggaaggggaagagccttggg

SEQ ID NO: 59793 - DNA, 527 bp, Homo sapiens
  misc_feature 31: n = A,T,C or G
actgaacatttgcctcctgaattattgtttnacttgaaaaagagctgattatattaagtatttaaatgtaactgagacttttatcaggacagaagtgcttttgctgttacccatatttaatccagctacctggctagagttacataattatatatgtattagaccaatatttatgtggcacttcttaccactgagtagccatatcgatagatcctaacaattatatttccagggtaagaaattaacattgtaactggttcgataaaggaggttaggtaaatacaaaatattgagatcccctgtttgcttcttctgaggaattctcagagcacaggttgcaaggtgcgtattttccaggcaagaaattggaagtctttcggggtaatctaatcatttagggagaaaaagcttataaaaactgctgccaggtttttccaaggaaacaaactccctggccatgtcaccctagaggaaaatatcataatccgtaaagcccgatcggtggagctttcaatggctttttaaat

SEQ ID NO: 59794 - DNA, 264 bp, Homo sapiens
tccaccgcggtggcggccgccgcggcacaggtacctgctttctgggggttttccctcgactagaataccctcgccctatctctttgtcccaccttgcctggcatatgtggactacacacttcctcacttccaggatgctcctacccaataaactgacagcctacgagcctgctaaacccaatcacagaacatgaacctggatttcaaagcctgtataccaattatgaaatagtcattttggcctatcatacactagagctaagc

SEQ ID NO: 59795 - DNA, 302 bp, Homo sapiens
accagcagggaagcagccagatctttctgtgtgtttcagcttttttattttcagtattgcacttggatattcctgtatctttaaatcagcccttttgttcctattggctgtcagcaatgtgttgcatgaagttattggactgggagcagggtgagggtagccgtagagccacctggcactagaatttagccagattttggagaccaaagatcttttgaactttaaacctggaatggacatgagtgatgttctagtccaacttttccattttatggttgacaaagcttgaatccagaaaggtt

SEQ ID NO: 59796 - DNA, 202 bp, Homo sapiens
  misc_feature 170: n = A,T,C or G
acattttatatttactggattttgtttagtccttatttttagttgttacttttgacttttctagatagtttatcctgtgaatcttcttcattgtctttactttgttattacatttaatagactttccttccaattttacatatagcagtgataggcatcatttcctcttnacagtagttcactgatgttaagtatgtatcac

SEQ ID NO: 59797 - DNA, 159 bp, Homo sapiens
  misc_feature 150: n = A,T,C or G
actttctgtctcttcccaggtcctagtagcaagagtggatgtgatcagaaattttcccagcacacccattccttccttcctcacctcagctcttgtcttttacccacagtttgctcacatacataggtaattatgttacttccatctctntggagtcag

SEQ ID NO: 59798 - DNA, 544 bp, Homo sapiens
acaaccataataatattctcctagggctgtgcctcaccattgaacaccattggaatattcaaacaactacctatagatgtttgctgatctaacatgaataaattacagaagaatttgtttaataccctctggagctaaagatctgtatttctggactcagatagtgtgtaagttaggttctttgatagaaagcagtgaaaatcaactcaggtgaacctaggcaaagctgttagttagcccacagatttcagaacaatgcagagacaggcttggaaaagccacaggaataaagaaaactctagggctcttttggcaggaattagtatttaggattttaagatgccaccactgaaatgagtcgattccagctgttttccatccttgcatccatctgcttgagattcgaagatttgggagagagtgtccacttggccaatgggtcatgtgtgcacatcttggtgattggagaactaggcaccttgccttgcagttccacaaagtcaatggagatttctccccaagaggactctggaatgttattact

SEQ ID NO: 59799 - DNA, 124 bp, Homo sapiens
tccaccgcggtggccgagcggccgcccgggcaggtacaaataattacagtcagagtccttatcatatgagaagggtcatctcagaaagtaaatggtgatgctgaaagaatgggcctcaccaccg

SEQ ID NO: 59800 - DNA, 535 bp, Homo sapiens
  misc_feature 503: n = A,T,C or G
acgcgggatgatagcagataaagtagctccaggtcagctttaggaagatttacttgttctcagtaagtgtgatgaactggaagacaaagagttgaaagcaaacaatcctgttagaaatttgattcaggtagtggcagatgaaacgctgaggatatgagaggggaaatataacaggtgaagataaagtgaaactggaatttggaaggtgtgtgagaaaaaggaattgaaggtcatgctgtgatgtgaggctggttttcccagccagtggtagtataggtaatggaaagacccaacagaagagcacagttcattgaaggagttagtaagttccacatcagacattgcttttgtgaaactctggggatatgtgggtgggtggtctctaaaaattgcctgatagctgggcttggtggctcatgcctgtaatctcagcactttgggaggccttggcaggcggattacttgaggccagggagttgagaccgggcctgagcacatggcgnaaaacccatctctatgggaaaatgcaaaaatt

SEQ ID NO: 59801 - DNA, 546 bp, Homo sapiens
  misc_feature 456, 513: n = A,T,C or G
acaatcaaataagatcttcagagaatatacaaaagatggacctacaaagcataaatgtaactggtgtttaaattgccactgcagtattctgacctcttgacaagaaggatgtgtaaaaaggggcattgacattttctggatgatggctttgcagagaagtgcctttttagagttattcctgggaaattatactttgaacttatgccccgactagctggatcatgcatgatatatttgccctcagcccagaatccctttctcctcccataaccatcttaagcctctacataccagacaaaatcttattcatatttcaaaactcaactcaggtgtcatttttgtaattctttgtccctccacctttacctgcaccccccaaaaaaataaatcagttctcaaaactatttctattacatacccatgttcctgtcattgtatttattacctgtattctanatttatttgtttacatgcctgtcttcttttgacttagttactttatggactggactntaataaagttctctatcccaagtttccagcccc

SEQ ID NO: 59802 - DNA, 549 bp, Homo sapiens
tcctggaataaaaacccatccgtgaaggttaatttaatgcaacccacgctgttatctggaatagtatatgtcgccaattcaatccattaagtaattactaaattctcaggagggctcccagaagtcaaatgtggttattccaggttcattgcttctggtctcccaaaggaccatttaggccaacagctgggagagccaactacaaaggttcccaggcataactaaccatttcatgcaaacaggtaaatgagtctaaacgagaaataagagttatcaagtgcctgtcctaagagaaacaccaagggaagcagaagagaagcacaaaaggggaggaataaaaaaggaaagaaaaggcataagtttggtaagtaaaaaagatctgttctctctaaaagtgaagtcagagaaatctggagattgcaagatctggcttaaaggacacaacctttcagcagtttctttagagaggatttttcaatcatttataatgaaacatttaattgtgcaccccaaatgccaccccttttgtgttgctgaaactcaaagttt

SEQ ID NO: 59803 - DNA, 308 bp, Homo sapiens
accatctctgctatttagcccccactgttaaatttgactggcttaaaaaaaataccatctctgaagataactacttagaagttggtcatatgtttttccagacttcccaatgtttatttatatataaacataaataattttaggccaggcgtggtggctcacgcctgtaatcccaagactttgggaggctgaggcagggggttcatgaggtcaggagatcaagaccatcctggctaacacggtgaaaccccgtctctactaaaaatacaaaaaattagctgggcgtggtggcgggcgccagtagtccc

SEQ ID NO: 59804 - DNA, 662 bp, Homo sapiens
  misc_feature 42, 56, 57: n = A,T,C or G
ggatttcgcatacatggtacatacctgttgtgcctgaatggnagctccaccgcggnntggcggccgaggggtacttttagctaccatgacacgattctcatgtggagccgaattgtttaaataatgcattaatcgaatgtctttttattctcgcaaataagcatacgcattgcagtacacttaatcatgtccttcaataactatgtattgagctcttttttgtgccaggtcctctgccaccccactggggaataaagcggacacagcccctgtcctcttgaggcggacggcctagcggagtggaaagaccaaaaaatgtgtaaacataaaagaatgacttatgctgaaaccaaaagaaaaaggacgatgtggtatggagagtaactggaagtggggatggctactttagttacggtggccctaaccgatccaggaaaatcgaggtggcagcttttaaggcagggactgaaaatgagaagtcagttaacaaaagatatgggaaacagggcttcaggtgacagagtagtaattattacataccggggagcaggaaaaatcatttcatgttccaggagcagaaagtcttgtgtggccagagagatggggagggggcgagggggggttgagatttggtgagaggcggaagcaattacctgtcatga

SEQ ID NO: 59805 - DNA, 535 bp, Homo sapiens
acagaaatactggaaaagtgtgttcagagttggaaggacaattgatgaattctccctgtcttccagtcttataccacaaaagaggacatttgtgcaactctctaccttgttaattaacccttgctaaagaagaatgtctaacctgactggagtttgatctcttgtaaaatttgatcagtttttactaagtagatttaaaaaaaggatgcactttcactttttatcacctccttcactcaatattctctttattttgctttcccctcctgggctgggcacaatcttccttctgttgatcacagcattctagaggcacagcctggcaggactggtccactattttctaaggagacttggtaatttgaatacaaaatatatggtgtgatttcaggcaaaataagaggtttaatctgcctcatcccactgattttcaagcaaagtgttcttcatgtaagtttacatagtttataaatggattaataaaggtaatgattgttttccgcttgaaatatatgcgcttcattaacaaattttt

SEQ ID NO: 59806 - DNA, 468 bp, Homo sapiens
  misc_feature 409, 414, 449: n = A,T,C or G
actgtaatttgggaaccatagatctatccactgtagtttgggaaccataggcctatcctctgcagtttgggaagcttggatttatctactttcttatcatctactcaccccatctccttgaatgactgacgttgcttgctgagtgtcactaggaaccacattactgcccagcctgatggctttcttaatctattagcctctgcagtttctgcagagtctgacccagtggaaactctccatttccggaaagctccatcctgaggctcttttgcttcatctctcttgcttccactggttctttttctccttcccaacccctaaatgttgttctctcaggcttttcccttaaccctcttttctcatctagtctttcctcaatctaagccaattgcatccattctaagatgtncactntcatttctaggcaaacgacttccacatccccagtntaatccctctgactgctga

SEQ ID NO: 59807 - DNA, 131 bp, Homo sapiens
accctgcctacagaagctattattaccaccctagaacatctcctcacctactcattttatgatgacaccgacctcgctgtatacctctatctgacggacactcaataccatcaaaaaccttatggccatta

SEQ ID NO: 59808 - DNA, 300 bp, Homo sapiens
acgcgggtaggcaggctggagagggttgacaaagataataggagataaagaattggagatactggtgcagacagcaattacatgaaatgtgtattcttttaaagatgtgaggtgttatagcctatttgtcagtaggaattatctagttgagagacagagacaaagttgctacagtgggaataactgaaggaacaaatgtgttgagaaagtaaagtccacgtttggagaaactgacttcaggggaccgcagggtcacattctctgctgcaaaaaggagaaacaagaagaaatgagatacag

SEQ ID NO: 59809 - DNA, 419 bp, Homo sapiens
  misc_feature 354: n = A,T,C or G
acattttacaacttaattcaagactttacttatttattttggccaggtcctgttttcagcacagcgctaaagttccttttgctgggcatgctgtgccttatatatttttcaaatccaagatttttcccttgaccatgacagtagaataaaaagctcaaattcaagacagatactaatctaggacaccaacaatcgttccactgaggtgagatttttaaaaatgcaggaataaaaattctattataacattcactttatacatattcttcaatctacatgattacctaaaaagcaaatcatacatacattctttataatacatcaagaggaaatctatgagttaaaatggatatntagaaaagaaaataattacctttgatgcaaggttgtctactagaagcatcatagaatcttaacag

SEQ ID NO: 59810 - DNA, 311 bp, Homo sapiens
ccaccgcggtggcggccgaggtactttactcaaaaggaaaccagaagccacatttcaggtagaagagtcaacgtgaacatacgtgcaaggaacaaagacaagatcctggaaagagaagggtcaaggagaagtgcaaagggttgaagtcaagatatggctaaaaaataaagactggaattgtttcttccttaaaatcctaaagtctcaggccaggtgttcttggatttttttttcacttttgtatcctgaagattagattccattttttctgtatggagaatcagaatttgaaaataaagtcatactatagt

SEQ ID NO: 59811 - DNA, 549 bp, Homo sapiens
  misc_feature 6, 498, 515: n = A,T,C or G
accatngaaatttattagtcacaagcggctctgtgttctctcaaatgcatctttatacctctcttaagtcatccttaagagctaatttgacacaaagacttatatatacagtgtctcattgaaggttttcctttcctgctgttttggtaaatactagacagttttcataaaaaagcattttattttaaatatttactgatttagaagctgttccttctgcttctatttgacttctgacagtgtagttataagtcagcatttataactggtattatgtatgaagcatttaaaatatatggtcagtcataacatgataaaatgttgtattaaattaaagaaactgaaaaagatctaccatttgcgaggcatctgtgggctatgaaaaagagtaaacgtggtctctgcttttactcaggaactcccagtcctaaagtagagtgtcatgaaatcactgagagcctagctctaagatatgtctcccaaggagtttggtggttntcccaggcaagccatanaaatttagattgcagcagcttagtccttactcat

SEQ ID NO: 59812 - DNA, 435 bp, Homo sapiens
accaccacgcccggctaatttttgtattttttgtagagaggggttttgccatgttgcctagattgttctcaaactcctgggctcaagtgatctgcatgccttggtctccaaaagtgctgggattacggtgtgagtgaccaagcctggcccagattaatttatttaatccttataataaccctgtgaggtaggcattttacagttggggaaactgagtcacagagttttcttttttagttagcctgcctaaagtcacatgtaagtggcagaactaagattggaaccaaggcagcccatgctcctagccactctgctatggagtgggaatttagtatgaatagccatcctttccctcaaatctgcatctttactctaaataaacccctttttttctcaccacatgaccaaacgttgctgattaccctgataacaaac

SEQ ID NO: 59813 - DNA, 239 bp, Homo sapiens
actgtggacattgaaagaagaaaacaataggagatatttagaaaattttccaggcagctgtcaggacctggttattgttgaaactggtcagactatcagtctatgggttaattttctccagcattatttagtagctccagaaggagaatggataaagtaggcattgaaataggcttaaactttggttctgctggtggattcaagaaaagggaaaaattggaagagttgagagaatgggc

SEQ ID NO: 59814 - DNA, 509 bp, Homo sapiens
ctccaccgcggtggccccgctctcgacctagtcgagatccaccggactgaatgatatctcattcttgctaaaccttaccgaacaacctaaatggaggaggccaacctcccaggtgatctcacctccagtgatgcataattgctcgctcgtcattatcataggcataaaatgccacctgcagaggagtgtatttaatgcacaagtataggagagagaaaaacaatgagattttgtgactgacttgataggagatgtgaattaaagttatagggttaagctcacttccaggtttccagcttaagccacaaatcgacattaacccaaatagagaaatggaggtttgtaaggcatgataataaattctgtttggaacctgttcagtttgagatagctgtgagacatctggatatagaattaaaatatggatctgagactcagaaagctgtctgggctcgggtaaagttgattaagaagttactggatgagtctgggcatggtggctcatgact

SEQ ID NO: 59815 - DNA, 263 bp, Homo sapiens
  misc_feature 23: n = A,T,C or G
acttacacgtgtaagtttcacanactccagacaataatgaggaagacaaatcaaagtatttaacttagattctgcccatgctgggcagaatgctttgctacccatacttttcctttttaaaaaacagaccaaatctaatgttttttaaatctgatggttacttttttaaaaaaccagctttctagatttaatattagtttctgaattatccactactttgtttttaacttattattttctcttttgatttgatggagtttccc

SEQ ID NO: 59816 - DNA, 432 bp, Homo sapiens
acgcgggattcagagctgtatttttgagactcaaatgaacataaagatccacggtcttatgagaacttagatcggctgctagaagagcattggagaaccatggagttttgtctttggagggctttccggatgacattgttccacagctctctggaaatagggcaactgtgcttggcctgcaggcagttgaatttgatataacagacgaataagaagcagaaaatcctgctggatccttttttctccctctctcctaacttcctaagaatgacttattcatttaatgaattttttttcagttcctacacagtggtagatgtatgccaagtgccctgctaggcactggggttacagtggtggaatgtaggcactgggtaggcaccaggattacagtggtgggatgtaggcaccagggttacggtggtgggatgt

SEQ ID NO: 59817 - DNA, 286 bp, Homo sapiens
acttagtttttttttttttttttaagggcgtacctttcctaaaagtttaccttgggaacccttgtaccatttaaaaaactttaaaagggttgacagttttgggcaatttgcctattccaaaaacctaaccttgggttcatgtttccaatgtctaaatgaaaaaggggaaaataaaaaacctaaaaatgaaaggggattccatggccttctccttttaacctcttataataaatggaacaaatttgatttttggggaaaatccactcaggcaaagtgacaaaggctt

SEQ ID NO: 59818 - DNA, 139 bp, Homo sapiens
  misc_feature 79, 80: n = A,T,C or G
aggtaaaaccatgctaattttcctccttgcctatacaaactcaaatgaaaaaaaagtcatgttttcagaaaaaaaatgnngtatttaaaatgttaggttggtggtagtaaaattaagatgacattttacatcaaaactg

SEQ ID NO: 59819 - DNA, 289 bp, Homo sapiens
acgcggggttccttgttaggcagcaatatgggtagctcttcataaggagcaatttagggacctagttttctgcatcttgtggctccgttctcctcctgattttcatgttttctctgtttagctagtatgtgggaaaagaaggctggagggttatggatgagaggattttatgggccttgcttagaaatggtatgccaaacttctgttcacgttctactgttcagatctcagtcacatggtcatatatgactcaaaggagggcagaaaatatagtttagttgctgctccc

SEQ ID NO: 59820 - DNA, 116 bp, Homo sapiens
acaccccatctgtgcttcacgggaacccaaagctaatggggatcgaaatgagggtgcaaacaagatagaagggaatgagtatggttggggcgaagcactgaagtaactctcaagcc

SEQ ID NO: 59821 - DNA, 296 bp, Homo sapiens
  misc_feature 21: n = A,T,C or G
acgcggagattcaaacatggnaagtatatacagtagaaaataagttttctccctgatttgatttgtattagtaccatctctgctatttagcccccactgttaaatttgactggcttaaaaaaaaataccatctctgaagataactacttagaagttggtcatatgtttttccagacttcccaatgtttatttatatataaacataaataattttaggccaggcgtggtggctcacgcctgtggtcccaagactttgggaggctgaggcagggggttcatgaggtcaggagatcaag

SEQ ID NO: 59822 - DNA, 130 bp, Homo sapiens
  misc_feature 19: n = A,T,C or G
acacatccctgacctccanagcagacttagctgtcccttcctggcaccctctcggaaacactctcttctcttggcctccgtgattcttctatctccctaaccagtttttgtctctcttttgggacttctc

SEQ ID NO: 59823 - DNA, 305 bp, Homo sapiens
acttctttacagttccatacagcagtgtaagaaaccttcttatgcatataactttttgtgtcatttggattatttttttaaaaaagagtaacaggaatggaattgttaggtcacaggacattcaacatttttgtaactaaatagggcattaaaattaaaatgtctagaattctaaatacattatcgccaaattgccagctaggaagtctgaatctactagcggggtatttttaaaccctacccgccccctgtcattgttgctgctcattgataggagagaatgagaaaaggtaggtagaagttac

SEQ ID NO: 59824 - DNA, 260 bp, Homo sapiens
tccaccgcggtggcgagcggccgcccgggcaggtacgcgggagtacatgtttggtgtatctaatggtgatgagtgctttcaagaaaaaatgaagcaggataactgggaaagatgagtaccgggatggagagtagaattattttacatagggtggttaagggaagcttcactcataggattttatttgactaaaaactggaagaggccagggccagtggctcacgccctgtatcccagcactttgggaggctgaggcatgt

SEQ ID NO: 59825 - DNA, 310 bp, Homo sapiens
tccaccgcggtggcggccgagggtaccatgaaatttattagtcacaagtggctctgtgttctctcaaatgcatctttatacctctcttaagtcatccttaagagctaatttgacacaaagacttatatatacagtgtctcattgaaggttttcctttcctgctgttttggtaaatactagacagttttcataaaaaagcattttattttaaatatttactgatttagaagctgttccttctgcttctatttgacttctgacagtgtagttataagtcagcatttataactggtattatgtatgaagcatt

SEQ ID NO: 59826 - DNA, 293 bp, Homo sapiens
tgtacttttcgtatattatttaatctctaataaccttgaaaagtaagcagaattctatttggccactgaagacaggctcagagagattgagtagtttgcaagagttttcactgtggtggtatggacaaaaagcaataattttatataaaggactgttttaactaaatgaacttaactggaataataattcatttctgtcagtcatgaaataatgtattatgtttaggaatctgttttcttcctatggttatatttttttcattttaatttttcaaatttaggcttccttcctc

SEQ ID NO: 59827 - DNA, 259 bp, Homo sapiens
  misc_feature 210: n = A,T,C or G
gggactccaccgcggtggcggcgcgagtacagtattccattaaggggcttttggacctaacatttcacatattgatttgtttctaaaagagaccttgcgtctactttgccattcatacgtgacgttgtccctttacacacagccctgctttgctgtcacctaccaaaatccatttcatctcagcttcacctaaacaccacccttccgcanaatcgtatcataattttgccctttcttggtgatacagtcccatggttct

SEQ ID NO: 59828 - DNA, 563 bp, Homo sapiens
tccaccgcggtggtcgagcggccgcccgggcaggtacatactgtaaaaactgtgatgatcacatgaaaagtgtgtattaaaagactttgaaagcagtaagatatatcatatgtatggtttctaagatcgatctggaagctgacttccttcgaacaaaatgagaacaaatcttttacagcttcgactggatatataaaatcatttagtgtgaaatggctccacaattctttatctcatttctcttagttttccatattttaatcccatagagtgtaatctatctccctgtcccagctgagaagcagttaactaacactgctgatttgtaatttgagttgctgtatctgagttgctggtgtggctctgggtcttttttcaagccctagcttaccgaaagaacaaatgaaaactattcacagacctgccttctcattctcttgtatctgctataatacttagcctcccttcttagaattgctatttttttagaaatatgtcttcgtcagggaaggcaaaaacctggaattcatgttgccattttttcttccttctctccctcatct

SEQ ID NO: 59829 - DNA, 512 bp, Homo sapiens
actggcaataaaaatgttcaatagcttctgtcctttctctccagcaaactgcaaaatactctgacatccacagtgttattatcaattaataagaactgtcccatctttataacttagactatattttgttgtctttttaataagcagttatgattttacatcctgtcaagcaatttcaaaaattattccaaagccagtggtgtatccttaagcaagtctacattaaatagatcaaatcagctcgactaattcatagggaatagatcagatgcaaccacactattattttactgatgatcttgacttctagcaacaacctttagtaagactgagcttttaaatatcaagaaagtagctggtatctaaacaagatactcaactggaatccttccagtagaaatatgagctatatagtctttcctctaattgctactttctcaacacttaagaattataacataaatagaacacccattgctttgcactgcccagcaagttaagtttggaagagt

SEQ ID NO: 59830 - DNA, 166 bp, Homo sapiens
acttttatttctgtaggatagattcttaaaagtcagacttttgaattccagtttttgttcaagtgatatctgtattttttatttccctaaatattgccagattcttttctaaaaggttgcagcaattcatactccgcggtaatgcatgaaaattactttaatcaca

SEQ ID NO: 59831 - DNA, 613 bp, Homo sapiens
  misc_feature 11: n = A,T,C or G
ggattcgcgtnatggtacttacttgttggcctaattgggagctccaccgcggtggccgagcggccgcccgggcaggtacctggcttggactgtgaggagaaatgagagagcaactatccgcagtagaaggctgagcatttcaaatccctgtgaaacctagggttttgaaaacagtatgtttcggcaacagcaagtggttcagtgtgattggagccttaaggggacagtggaagatgaggctgagcattgggggaggtgccagattgccccaaaggcagtgttctcaatactaaactaatgttcttccaccataaatgagctccccctggcaacttctcatttctatcaatggaactttcgttcttcatatgtccaaaccctgaagtgccatcttcaggtctgcctcagcatttgtgatcagtgctcaagttttgtatcatttctatattcaaaacattcttctgtgcatcctattctgtttccactatctacacactacttatcacctaattagtagataatttcaaaactgtaaatatttgtgtttcttcttgctctctctctccctttttttttttccctggaattaaatttttaaaatcccttatttaac

SEQ ID NO: 59832 - DNA, 322 bp, Homo sapiens
  misc_feature 268: n = A,T,C or G
acgcgggattcttggtagatttatattctcttcttagaattctactgccgccctctctgtctgggagactggagatgtcatttaaacattgcttattaggattccattatttgtctctcctatacagtcagctaaatcaaaaagtcagacagtgtttttaaattgcaaatttaaatgacaatttttaggccaggtctactggaaattttctgtccttggcatccatcattgcttgtgagtatatagttttatattctctctctctttntctctctatccttttctctttatcttcttgagagcacagcacacatatccatca

SEQ ID NO: 59833 - DNA, 318 bp, Homo sapiens
tccaccgcggtggcggccgccgggcaggtacaacagccacagactataaatacaactcccagacttcttttccaagcatctcactgatattttgaagttttcactgatactttggagttttctgctacatgcagccgaatctgattctaactgataacctgagcatgccctccttttactcgcctccacagcacatgacggcagtaaggaaaggcaccgtgtgccatcccacaaacagcatgccttcggggaaagcagacctggcaggaagacctggctctgccttttgactgtggcatgcccataaataatgctctg

SEQ ID NO: 59834 - DNA, 288 bp, Homo sapiens
acgcgggtaattagaattaatttctcattgtcattttatggtaatgaagcttctgccacttatcacaagcatcctgcaggcacagtgttaccacacaaatatgtgactcctcactcttcacacactggtttatggtccctggttaaagtggtaacagtaggacctggcctgattccagtttaaatgtatgccatattagatgaaagattgtgggtagtcatgctggtattcttgccccttgtggatggcattctatgtgcaactcagttctccttaagcaacacaaga

SEQ ID NO: 59835 - DNA, 482 bp, Homo sapiens
accaccttaggaaagtccttttaatttatgcttatgaaaataaattttgcattcctatacatttatgtataatcaatattataaaatagccattttagaccccatagtccttacttttaactttacagacctccatccccactgcaatttcaattttgctttactgtggataataatatattgaaagctttttccttatgtctgattctttatctaaatatcaattgccattctgatttcacgaccaagttgtctcccatccctcggactcaaaaatgtttgagatgaaaaagcttcctgaaattttttattatttagctcactgcagcttttattgaggttaagctctacctataaattgctctgtgtcaccacagaaaatggtgggaagggagcgacagtgacgtatctataactacagcttttaaactgccagaggcaacaagagtaatgagatgaggggagtgggagggacacaaacc

SEQ ID NO: 59836 - DNA, 119 bp, Homo sapiens
  misc_feature 99: n = A,T,C or G
ggagaatttagatggcatcttatgcttatattattctgtgtcttatccagagtccagcctagggctgggcatgaaatgtaagctgaggaacactggctntgattgacagtcaccaatga

SEQ ID NO: 59837 - DNA, 224 bp, Homo sapiens
acgattgacaaaaacatggacaaattattaactctaaatgtgcaaaaaaagagcatcaagaagagatacttcccctcagaggagggaaagaaaaacacagaaatgtggagtaaggaatgaggtgactgatgtcagttggcaaagctgtgaaaatcttaaccaaggagagtcaaaatgctgcagcagaattactaaattgtttggaaaaagtagaggatagtaaa

SEQ ID NO: 59838 - DNA, 497 bp, Homo sapiens
  misc_feature 451: n = A,T,C or G
acctgcataacaaaccccttaccccagcatatctaggatgccaacaactgtaaggcacaccacaagagaaaatgtatgctgccaataaatgctgacgtgttatctattgtaaagaagcatgcaggccctggcagtgttgaaatgtgaaaatatgcacatccagcaatcaaaacacctcatgcatactacaatattaacagagattgttttagaattatgaaatcagggccggtgctttggctcatctgtattttctaaactttctatggtgaacgatattactgccaatatttgaaaaatggtaaataaacattattttaaacaaaaaaaatgaaatgagccaaccagaactaccatgaacctaatgaaactaaagctttgtggccttccaaaggcccctggaagaagccctagtttgtttatatttgtattttttgttatttgtcataanacaacccctcaaactacacatgcttcaaggcccataaagctttgag

SEQ ID NO: 59839 - DNA, 618 bp, Homo sapiens
  misc_feature 618: n = A,T,C or G
atccgcgttctacgtactcactttgaggcctaattgggagctccaccgccgcggcggagcgagcacgctggatttatcttgcttaatgacgcgcgctacccgatatgactcacatagacctaacacgcaacgtggatggctccatgcttgcttagtcagtcaaaaatccgagaaacacttctttcaggaaaaagggataatgactgggagtgatgatgaagcagtgaaataaagagagggaagaggaagttgccttgagaagtaatgatcataactaggtgttattgggataggaaatgtaattaaattaggggcaaggggttgcagagctgagttaactgcagtgattaagaaaaaaaatctaggccaggcccggtggctcacatctgtaatcccaacactttgggaggccaaggcaggcggatcacgaggttaggagtttgagaccagcctggccaacacggtgaaaccccgtctctactaaaaataccaaaattagctgggcgtggtggtgcacacttatagtcccagctactcaggaggctgaggcagaagaatcgcttgacccccggaagcggaggttgcagtgagccgagattgtgccactgtaactctacn

SEQ ID NO: 59840 - DNA, 305 bp, Homo sapiens
acccctactgactcactttatgaacctcactgaatccccaactccatgcttgcaaaatgaagaaaacacgacgtaagtattaaattgttggaagtattaaatgagacatgtgtgtgaaatgtttggcagagttgctgcacgtgtaagttgcacattgactatctccacaatttaaatggtatgccttggagttgtgccatgtgaaacctgcacaaccatacacagcagccctttttttttttcattcaacagttcattcattaaaacattcacatgctatgtttccaagcactgtattcaacttt

SEQ ID NO: 59841 - DNA, 303 bp, Homo sapiens
acagatgagtccattcaagagaaatttgcagtcaacagagttgactgactgatgcacagctgactccagatacacaatgaaggcaaactgagacaggaggagtcattctgctgatacacaaactcaagagtaataacgtgtgttgttttaggcaattacctttgaggtggtttgttaggcagcatttgctaacttgtataaatatacaatgaagatcttcaaatatagcaatttttcttgtgactttatgaaagaaagtttttaaaaaactcacccagcatgagtttatcaataataaagttt

SEQ ID NO: 59842 - DNA, 239 bp, Homo sapiens
actctagtttagttttttttttttttttttaaaggcgtacctttcctaaaagtttacctttggaacccttgtaccttttaaaaaactttaaaagggttaccaccttttgccaaattgcctaatccaaaaacctaaccttgggttcatgtttccaaggtctaaataaaaaatggaaaaataaaaggccggggaataaaaggggattccatggccccccccttttaacctcttaaaaaaaa

SEQ ID NO: 59843 - DNA, 299 bp, Homo sapiens
acgggacttgtctccagagacatgtctgggaagaagagctagactggagaaacatgagcatgttcaggtgaaaacatgtgagtggataagagcaagagggtgagaacacagaccaaggggctaagggacagactgtgttcagtatttgggtatggaacttgtttttgctacttgctagttctaagaccaggctcagactctaacttctctgtaatgtgggaataatgacagcacttaccttataagattttacaaagattaaaatatcatatataacagcacttaacacaagtaagaat

SEQ ID NO: 59844 - DNA, 234 bp, Homo sapiens
acttcaatatttgagccaactttgattaggtaacttttgatttctgagaatttgtttattgggattatcactatatatttatccctcacttagaaaaaaaaattttttgtcacatcttttaaggaccattttgccacaaggatatagtctatgagagcacacactagggtgagatctccgactcagactgagtaggaaatgcagagttcagtgaggctctcacaatgggtcagt

SEQ ID NO: 59845 - DNA, 299 bp, Homo sapiens
tccaccgcggtggcggccgagtacaatcttagaagttgttgagaagattctggatcagagtttgtccagggtggcatctcttttgtatctcacagagaagctaagacgtgtaacatgaaactgcacttgttatctgataactacttctattttctcgcttatataaaacctgctgaatcatattccaaatttacaagacctcattcttattcttcccatagagtttgggtgggggaaggggaagagggaggaggaggcaggagtagacatgctgttaggttcctggtctcatgctacct

SEQ ID NO: 59846 - DNA, 297 bp, Homo sapiens
acataagaatggaagatagtgcaggcagagaaagggagggactgagtcaacaggaatgagattaacagaatattttcccaaagtgaattatgaaccaggttccaaagaaacagaaaagcacaagaagaaaaaattcataaataaacttatacatgttgggtataaaggttatccaattttttttcatttttaatccaacttctaagaaaagagtccacataaaggggatttgccttaccctgtttcacattctttctcatttctgattaaaagattttatcatcatgaaccctaatc

SEQ ID NO: 59847 - DNA, 481 bp, Homo sapiens
  misc_feature 444: n = A,T,C or G
gcggtggcggccgaggtactcagtatgactttcctctttattaccataaataatctctgcagactgttcatggtcacaaaatggcattgtgtttgggcttgcttcattgacagaaattcagaagatgttttaattagcatacaaaagtcttgtatatggacagcaaatagaatgctataccatgcagagcaactattatttataaagccagaatattaacttctatccaataacttatcaagaaatctgggagagcatttttaatggcttccattactccggacatcttccttaaatgcttctatttgctcttctgttccaaggatagggaaccaaattcaagaaattcatctctgctaggtttcatgttcagcatctctaagtgttggtgaatttctctttcctccagattttccaaatctggtatggttcttggcaatccangaagtgaccttctgtacctgcccgggcggccgctcga

SEQ ID NO: 59848 - DNA, 291 bp, Homo sapiens
  misc_feature 278: n = A,T,C or G
accaatgactgagcagacataaaagtcagcctggatggctaccaccactaatcagatttgtctgctgatgcaaggcccttcagtcattccagaactggtaaatggagtcaccctgaggacaggccctgctgctgattgatgtccagtgtgggcagttctcttggctgctcaacattcagagaggctctccttgtttcagtgctaaatgattgacagtcagggtgagtatttcaggaggaagagtcccccgcccactccagccatgtggcaaaggtatntgcttccttggga

SEQ ID NO: 59849 - DNA, 301 bp, Homo sapiens
actggtccttgcagcactctccacactgacttgaagtttcttacttgtctcttcaagtgttggaaatgagttctggagaagagagcccaggttgtttacctttgcagcacagttgcagaataatccctgccccaggagtggctcagtaaaggtttattgaagagatcatccaggaaaagggaatggcatggcagagctcagaggcacaaactgcctggcatagagatttgcagcgtggcttgcgctggagtccgtttcgtctgcctctccacggcctttgcttcacccactactgcctcta

SEQ ID NO: 59850 - DNA, 528 bp, Homo sapiens
ctcgcactccctcaattttctctaaagatctcatttcagacatttaaatgaatattatgctacgcaacagggaaactcagatgtccatcccctccttattcattcaaacatttccactgccataatatggcagctgcaacgccaagaaagaagaaaggaaaaaagactaaaagaggtgaagaatgaaaaagacctcaaagaaatttttttttaagagactgggtcttactctgtcacctagggtggagtccagtggtaggatcatagttcattgtaaccttgaactcttgggctcaggcaatcctctcacctcagcctcccaagtagttgtgactacaggcctgtgctaccattcctggctaattttttctttttttttggtagggacagagtctcactatgtttcctaggctggtctcaaactcctggactcaagcaatcctcctgcctcggcctcccaaagtgctgggattacacatataaaccaccatgcccagccaccacagaacttttaataaaagagggaaa

SEQ ID NO: 59851 - DNA, 326 bp, Homo sapiens
  misc_feature 10, 11: n = A,T,C or G
tccaccgcgnngtggcggcgcgaggtacatacatacagatacaataaattataaaatgatatcctatgtataaagtatgctagaatcatattgctataacattcaactattgatcacaagattattaaaacaataaaattagagctctaacaatcacagtgacatggaaaagattagcataaaatctatacatagccagcaaggttcttttcgtgttttttttctgtttttttttaagatgggatgttgcagtgttgtctgggctggagtataatggctattcacagatgtgatcatcacatattatagtatccaactccgagact

SEQ ID NO: 59852 - DNA, 383 bp, Homo sapiens
acgcgggcaatctaacagttatataaatcctacctctgcaaaatcagaagcctcttctgggcaaaggccatgacaggattctatggagtctgcacactgcaccgcacttgctacacccatggcaagagcttagtatatgcttgttgtcctgttgttaacctctgacctccatgttgggataaatcaaagtgtcctttctgatgcactaaaggcaaactaaggtgactccaagagagccttaaactatatcttggaactaatgaagaagattaaaaaatgcataagatatagttattattatgaagtggctagaaatcttctatcaacctatgaccaaattccatggcccagattatgacttctatattgaaaattgtccacat

SEQ ID NO: 59853 - DNA, 127 bp, Homo sapiens
atcctatgggcttgctgtctaactgctggtatttatgaagggcctgacatctagtgtttccatatagaactaagcatccagggatcatatctgctcatttttctatatccctcaaggctcgtggcat

SEQ ID NO: 59854 - DNA, 272 bp, Homo sapiens
actctagtttagttttttttttttttttttaagaggcgtaccttccctaaaatttacctttggaacccttgtcccatttaaaaacactttaaagagggttcacacttttgggcaattgccctattccagaaacctaaccttgggtccatgtttcaaaggccaaaagaaaaaaggggaaaataaaaaacctaaaaatgaaaggggattccatggccttccccttttaacctctaataaaaaatggaccaaatttgattttgggggaaaacccc

SEQ ID NO: 59855 - DNA, 245 bp, Homo sapiens
actgtttggaattgttaccttgtatacataaataaataaatgctttcgtaagatttgggatttttattgagagaagatattatagtaattctagaactatacagaatatgaagatcagcatcttactcattcaacaaactgagtgcctatcacatctaaggcaccgcaatgcagacacaatgcatatagtccttttcctcaaagaaaaaggtcacagcacctttcctcaaggagtaccttgcccg

SEQ ID NO: 59856 - DNA, 516 bp, Homo sapiens
  misc_feature 434, 451: n = A,T,C or G
actgagagcaaactatgcttcccgagtgaacagccgcagcctgtcctccttaggaaagaatgaccttattaagagcagccaccaatgatgacaacaggtataggtggagttttagcttcagtttgagggggtggggtggagaacttattctccaggcatctctggctttgcagctaggattcctaactcagattcctaactccttattcaccattatgggaagtcgcacttttgttgcagcttgcttcgttcattgttttctttcatgctttaaaattttttcccgcttgaaataagccttcttttggtttcctaatagtcgtttgcattttctcttcctctgaaatatagcagaacagagaagtcaggcaaaatggccagcagactgattagagacaactggcacatagtggtcctcaaggcagctggctcancaggcagattggattanaacaagccttcacacccccacaggggcttgccagaagcaagtgctggaggagtcacctacacagc

SEQ ID NO: 59857 - DNA, 319 bp, Homo sapiens
ttggagctccccgcggtggcggccgaggtactttaggctgagaaataaatagaagggtgagaaaaaagaacagtctttatagtcagtaagagtgaaaagagaaagatggtagttggggaaagacagatggggagaaaggttggctggttgttaataaaacagtagaggatgagcatgtattataaatgctggtgggaagaaaccttgtggcaaggagggtggtagtgttggagaagaaagagaggatatagtagaaagttaaagaggaactggaagcaggtgggatccaggacataggaagggggaagagccttgggca

SEQ ID NO: 59858 - DNA, 281 bp, Homo sapiens
acgcgggcatcaaggtagatttctcctttttttcagagggatatgttagattttcacatgtgtacatgcatacagcaaagagaactctggacgcctatagagaagaaataattcatcttccatggatcaaagaaggagaagattttaaaatcaacatgatgcttattgtgaaagagaagagaaaggacagacatcacaaggaggaacatctgtagaatgaaagcaccacccctcctgatgagccctggagagtctcgatggatgtctgctattctaactca

SEQ ID NO: 59859 - DNA, 184 bp, Homo sapiens
  misc_feature 121: n = A,T,C or G
acctaaagttcttatcaaacaaattaaataatcttaatttttaaaaaaattgtttcatgtgtccagtaaagaaaattcattgacagtaaaaatcatgacatatttttctacttcatgtgancacaagcacaatttcaaacacatagtgaataacacaagggcaactaattttgtgggctgtaaa

SEQ ID NO: 59860 - DNA, 290 bp, Homo sapiens
acatacgccatatgatctcaatcacaacttccattattaccacaaatcactttcccaaatcaatactctgagtcctaatttctctttggggcttaagacagcacataatgcatgtcagtcatcccacctgttccctagctgggtgaagtcattatctgtaattcaatacattaaaacagattttttttttaaactctacctccagtcagttcttcctgtgttcactcttttttgccgaatggcccttccatctacccagtgacaaaggccagaaaccaagagtcattcta

SEQ ID NO: 59861 - DNA, 302 bp, Homo sapiens
accttctgatttttaaaaataattaacatatcttatgcaactaaaaatatactgtcaaacctatttaaaacatcttattctacccagcctgcccagcttttgatgtaattggggaagaaggttcagtaacagatgattttaacataacaggttgggctatgattgatatgttaattgagtgctcttcagagaaagggtgatccataaattcaatctagatttttaggaaaggtttcttggaggaaacaggggctgaattgactcttaagtagtaattaccaaagagaggtgtggagctgatt

SEQ ID NO: 59862 - DNA, 316 bp, Homo sapiens
actctctccatttgacagataagaaatagattgaaagaagctaagtcacacacccaagttcacgcagcaagaaggcccagatgatttttcttaaactttattcaattctaacacaaccagtaaaatgacagatcaagaaatgaaaaacaggtctgtaatgctttaagcctacgctctttctagaaccactcaatattgtctccagggctgactcaattcctagaaagtgaattgggcttctgaagagactacaagtaaggtttaggggaaataaacatagttgagccatttgggtcctgcacaaagatgcccagct

SEQ ID NO: 59863 - DNA, 162 bp, Homo sapiens
acaattatgttgattgcacatgatattttggatcaaggatagagccaggtcagatctcaacattcatgctgatgacataaggaacagtataaacaatctgaaagccatttctgtctcaatttatatagtttcataaatgacatttaactacaattgtttttt

SEQ ID NO: 59864 - DNA, 287 bp, Homo sapiens
actggttgctttactcttgccaaaagaaaaatatcctgtaaggagaaacattaaaacccaagctttctccaggaaagacctcacaggcagaggatattaattcctcccctgatagagttcaacaaaactcttcctgcaccccggaatgcaatgattaatcaactaatctggacccaagctttgtttatatgttccaaccctaaacattaattgaaatatttccattgcaacaaaaacactttggttaggatttaaacaccactgcataacaacatgcaagtgtgcta

SEQ ID NO: 59865 - DNA, 305 bp, Homo sapiens
ggagctccaccggggtggccggccgcccgggcaggtaccgtaaattctatcaatagatgttctgaatctttaggccataaactgaagtcaaggaggagattggagctatgggaggtgtttgaaaggccttgaggcatgctttaagatctcttcttttaagtggccattctttctttgcagtgctgactctaccttccccattcaaatacagacactttggccctgacgtgaggctcctactttctcaaagaaaagggtctggaaacctcatttgtatgaagttgatagtgatttaagattgtgaa

SEQ ID NO: 59866 - DNA, 136 bp, Homo sapiens
  misc_feature 127: n = A,T,C or G
acaaaataaatttgctcattgggttagagtatggttattgattagggggctaagcatttagttactgcatggggcagccaataataaaatcacagccctgtgtatttacctccacagtgtgtgctgnatagtgcaa

SEQ ID NO: 59867 - DNA, 108 bp, Homo sapiens
  misc_feature 85, 94, 95: n = A,T,C or G
acttcaagccatcacactgtaaagacctccccaccatcatcagtaaccaaagattgtgataaatgattttatttctatgcactangaacacagnnagagaaatgatga

SEQ ID NO: 59868 - DNA, 478 bp, Homo sapiens
acatacttcagaggctagttggcaggagtcactaagttaatccatgcacagtgttcagcccagtgcctggcacacagtgggtgctcaaacaacagcttctctccctgcatgttggtcattagggtcacaggctctgaagtcaggctcctagggtaatatcctgtccctatcactttcaattgtaggaagatgggcaaattacatacccccataagctttaattttcttactataaaacagagataataattgtatctaccttatgggttattgcaagcagcacatacagtcacccaaataaagtatataagagtatcttgtaagttcccagtaagtgctcactcctatgatattgatgttccccatttgaattcctgtggtattatgcaatcatctgtgcaataggaaccggattagcagagggtcctgggattctggcagaaaaagaccagagcttagtggcccatcagaaattggc

SEQ ID NO: 59869 - DNA, 206 bp, Homo sapiens
acacagagacacgatccacagttgtgtaggaataacttcctaaacatctttaggatctacctctttttcctgttcccactgttatttctttgtttcaggcccttaacatctctaatatacactagtatttctgtcttcacactgtttttttctttacacagctcttttcatagcccctccattagcacacagattggaattgtgtc

SEQ ID NO: 59870 - DNA, 312 bp, Homo sapiens
acttgtgacagaaatctaattgtaagcatttacaattgctattgtaataatagcattacagtctttttttacaacttggggtcaactcagactttactagactgaacactaatctcaacagtgcattgagtctgctcccatgagccaatcttccacccctctctccatcttatttatcttgcccttgccttgttttggcattggcacatctttgagactcagactcaaacctcctatacctcctatacctacacttctattagtgtcttttgatgagaactgtatgagaaagttctgttgtaaatagttcta

SEQ ID NO: 59871 - DNA, 235 bp, Homo sapiens
ctccaccgcggtggcggccgagtactactgaattacccaaagcaaaaatgttccctttgatgctttgttttctaactactgttctctaactagtaggcaaatgctgactttttggtgtttaaatgtgcacactccctgtgaccaaactgccttaggcaggttgacttgaatattcatgggcaagactaatattgtgcgatgtatcactgtgggcagaatggaggagaaagaactt

SEQ ID NO: 59872 - DNA, 136 bp, Homo sapiens
acgtgcccagattccctgcctctgacctcaccacaccctcttctgtgtggcggtctctcaaattgtttaggacaattatcatgacttctctaaatctccctttttccaggctcaaattccctatgcttcagtagtt

SEQ ID NO: 59873 - DNA, 315 bp, Homo sapiens
tccaccgcggtggcggccgagggtaccatgaaatttattagtcacaagtggctctgtgttctctcaaatgcatctttatacctctcttaagtcatccttaagagctaatttgacacaaagacttatatatacagtgtctcattgaaggttttcctttcctgctgttttggtaaatactagacagttttcataaaaaagcattttattttaaatatttactgatttagaagctgttccttctgcttctatttgacttctgacagtgtagttataagtcagcatttataactggtattatgtatgaagcatttaaaa

SEQ ID NO: 59874 - DNA, 155 bp, Homo sapiens
acgcgggtaaaacagcatattctatctaccacaaattaggtagtggctttacttagtatttactgatgtatggtttcatatattatcttttcagtaaaagatttatataatgttatttcaaatacctggatgtttgtgttgaatcgaaaacctgt

SEQ ID NO: 59875 - DNA, 322 bp, Homo sapiens
ccaccgcggtggcggccgaggtacgggacttgtgtccaggagactgtctgggaagaagagctagactggagaatcatgagcatgttcaggtgaaaacatgtgagtggataagagcaagagggtgagaacacagaccaaggggctaagggacagactgtgttcagtatttgggtatggaacttgtttttgctacttgctagttctaagaccaggctcagactctaacttctctgtaatgtgggaataatgacagcacttaccttataagattttacaaagattaaaatatcatatataacagcacttaacacaagtaagaatt

SEQ ID NO: 59876 - DNA, 188 bp, Homo sapiens
  misc_feature 178: n = A,T,C or G
ggtgagttttcccacaacagtaaacagcctgagagcatttgtgtcctcaagattcattatgtcttctactagagggccttaatctttttcaacaagctggcgagagttataggagactgccagaagaatcggtgttcagaggtgcaagaggttggtgacatggtggtttggggtttantttttttttc

SEQ ID NO: 59877 - DNA, 297 bp, Homo sapiens
acaaggaagactggctgaagaagaagctgagaacaaagcaggtctacagaggaagaagcagtgactagcctggtccctgaaccgggtgaaatgggaaagtagctctggctccccactgccaaaaggcctcagtgatcttgctgtttggggttattagagcaccttttacccttttcaacaaagcccaattttacttaatctagttagaatttctactccttgaaaccaagagagacaaagcaaaatcaactataatttaaccattcctcctactttgagagcatgtaggttattttt

SEQ ID NO: 59878 - DNA, 537 bp, Homo sapiens
acacataaagatcaataaaaattatttttcatggtcaagctatttcttttcttcatgcagtgctgctgaacaagtgctatctagggcagattatcactgtgtaaagaaaactttaacaagtagagattcttttggatctctgtgaaaatttaatctacagatctaatatatagctagtgccttggccctgtctttctgtgaccacttgcactatgtgcttaatttctaaggtttttctcctcaactttttgtttaatgtgcatatcttggcctttctcaacaccaaactatgcagcttgtttgttggatgttgtatatgtgtatcccaggcaacagatgcaatacaccctattgtcttggcagcaaacacactttaagaacaatactgcttctcataaccctggtaaggtagtttaatttggcactgactgacagtagttgcaataccgtataaagatgcctattggcactggtttggttttgcagtcagagaaggcaaagagatactatttttcagcactttgtgctggggttgtt

SEQ ID NO: 59879 - DNA, 199 bp, Homo sapiens
acttttttttttttttaaaaaaaagctttccccctttctcctggggttaaaaaactgtttttgcttggcgttggggaaagctggtctgcaaagcaaaacaatgtgaatccttctccccaaatcaatgaaaatggggctgccctctaaaaaattaggttggacccacatcaacgtcagggcctgaaacggaataaacccc

SEQ ID NO: 59880 - DNA, 171 bp, Homo sapiens
tccaccgcggtggccgagcggccgcccgggcaggtacacatagaacggtttaaggaagttcccttagaactttaagtaacagtcttaataatgggctagttccttgacagttgctttctttagtaactctacggttatggtctggcctggtgggagccaaagttagactta

SEQ ID NO: 59881 - DNA, 311 bp, Homo sapiens
  misc_feature 20: n = A,T,C or G
acttctagaaatgccacagnaaatcaccacattcgccccaaatcaccaaatctcttaattcagattatacatgtccagaatatccagttctcctagaaacaaaatgacacttttatgtttccctaagtttgaaatatttttgaagtattaaaataagcagagccatagtcccacactgtatttttctactgagaatacaacaccagaagctaatctcatgaaattagcccatgtgaagaacaggttgttaactactgttgtgatggtaagtccagaagccctgtgcaaaatgtgctcctggaaccagctgg

SEQ ID NO: 59882 - DNA, 278 bp, Homo sapiens
accttagcattgcggtgacttataataggtgctcagtcaatgtttgtttccattcttcttggacatatatgagaagggccatataagattattaactatttatttatttttttttgagtagtgaaactctaaagactcacagtctgaggactcatggagttgttcacatccatgaacaacaatgttatgaatcttttagttataaagcaaacctttctctggagcatgtttgtgttttctcatttaggtttataaattgctctgagactagcaggatt

SEQ ID NO: 59883 - DNA, 245 bp, Homo sapiens
  misc_feature 199: n = A,T,C or G
tccaccgcggtggcggccgaccagtcttctttttgaagacaattgaaatgttggataaaatatatagaacattaccttagtagctttgaagaactgggaagaaaagggaatctgttaagccaaattctggaagaaagcctaaagcaggaagttaacagactatctggcgaactgaagccacttttgctttcaatatgtntgccaatatcaagaaatttaggtttctgttcatcagtcttatgggg

SEQ ID NO: 59884 - DNA, 525 bp, Homo sapiens
  misc_feature 58: n = A,T,C or G
acaaagtttcatgggtcttgtccatctcccatctgatatatgccatgggcaaactagngaaaaacgcattcctcccagctggcaatcactcacatgggataaacagtcagagcattttgctgccctaggcaaactctgcctgagaggaccagctggctttgcatagaaataagcaaggtagagtgggtatacattgagcaggtagagatttttttttaaatgaaaagaaaaaaaaaaaagatggcccttctaatttaaccctgttgaaaaacttgacatatctgaccatctattttaggaaaacctacattgcgttatttgaacgtctgctatccagtgtaggaagggagctggggctctgtctgggggcatcactgatgacataatacaattattttgatgtgtccagttgggcaaagatgtgactagttcaaaccatgttgattatacagcgtgatgttgtcatggaaatctgatgacactgatagagaataaatagttaaatgagggccaggttataaaggt

SEQ ID NO: 59885 - DNA, 206 bp, Homo sapiens
acttccagtttttgtggtgatctgtttttattgagattcaagttagggggcagtggggttattttttagctcttgtagaacggggagctttcaatttgaacctgagccttttggtttagctcacgtcacataggaagacgagtcagaggggcctgcacaaagagaaacaggttgacaagtcagggtaactaatgggagcctgttac

SEQ ID NO: 59886 - DNA, 292 bp, Homo sapiens
actttaggctgagaaataaatagaaggtgagtaaaaaagaacagtctttatagtcagtaagagtgaaaagagaaagatggtagttgggggaagacagatggggagaaaggttggctggttgttaataaaacagtagaggatgagcatgtattataaatgctggtgggaagaaaccttgtggcaaggagggtggtagtgttggagaagaaagagaggatatagtagaaagttaaagaggaactggaagcaggtgggatccaggacataggaaggggaagagccttgggcagag

SEQ ID NO: 59887 - DNA, 309 bp, Homo sapiens
gagtactggtttatcataaggagggaggaattcagagccattgttctccacatttgctattcccctgggtcatcaaagacagcaaaacattgccatcaaacattgccttcaatatgcactgtcattctccaggtggcatagtttaatgttcacaggtattttagaatctcagtagcaaaagtgcccttgtgcaccactgcacaataagaaattttttttaattttattattattatactttaagttttagggtacatgtgcacaacgcgcaggtttgtcacacatgtatacatgtgccacgccggtgtg

SEQ ID NO: 59888 - DNA, 346 bp, Homo sapiens
  misc_feature 219, 221: n = A,T,C or G
acaggaactctcacctaagctggcaagatgcatgagtctttatacaagaaacatcttggctgctctgtggcatggattctttctgggatctaaaaacaagaatattcgatccaggagtcttgaactgcaagacggcagtgagctatgatcaagacttcagtgagctatgatcgtgccactgcactctagcctgggtgacagagcaagaccctatcccananaaaaaaaaaaaaaaaaaaaaagtccctgcccgggggggcctttaaaaaattggggaccccccggggcgggggaatttaatttaaatttttttaaaccccgcaccccggggggggggcccggcccc

SEQ ID NO: 59889 - DNA, 286 bp, Homo sapiens
acccatctagaccaaggactgacttcctctatcaaatcaggaaaaactggctactggttatttatacttgaataagccttgaaatggctatttaaagctgctagaagcagtggctgctgcctaagggtatcaatctgtatccaatcacaaatcctagaagactccactgggaatccccatctaccacaccactgctaaacctactgacatttacaaactatttcttccccttgcctccctatatgccaccaacattcgagaataacctttcagaaatatataacag

SEQ ID NO: 59890 - DNA, 289 bp, Homo sapiens
  misc_feature 5: n = A,T,C or G
acccnactgacaacgactctgtatgtcctccctccagcccgtgcaaccaccattccatttcctaaacttccttgaactgactcctcctctcctgtttgattttctctaactcatttcaaaacctgccttccgccttacctccatacacaatgtctttctagttcccatcatagatcccagttcagatcttcactcacatccttctcattgcctggggtgctctcccatgaccccttgtgtgattattttcttcctttttttaatttaattttttaaaattatactttaa

SEQ ID NO: 59891 - DNA, 231 bp, Homo sapiens
acgctccagcattacctttaatccaaccttcagatatggctactgtagaagcacttctctcaccagcaccccccactctttcctcaatgagaaaagaagttgaggccccaattgcatcctctttactgatccacccaaaacaagactccctgcaggaaagtagagggataagatttccaaaggagatgctgaagagtaaaaagcaatcacacttcaaaataggactttaca

SEQ ID NO: 59892 - DNA, 300 bp, Homo sapiens
accatgaaaccttagattcctacctcattttgtgatggtgtagaaggcacattggccaccagcaacccttgtaaatatttgcggatttgaatttcacaaattgaaacccagactgctgagggctttgctgctaacgtcaaagagctggggcaactaccacaaaaccacatgtgggagactttttagatgaggagataggaaattcctaataagaaaagtttttttgtaaaatactttctaatgctggctctttagagaagcacattttacatgtgcaatggtgcaaagtcctagcactaa

SEQ ID NO: 59893 - DNA, 312 bp, Homo sapiens
tccaccgcggtggcggcgcgagtacgcggggataacagggatttttttttatgccttggggttcagtcactgattttctatctgtgtgtttctccattatgctgcagcatttttctctatttacgttatctccctttccctttttctctctgaccctccctccttcttcctctctattcttcccctccccttgtttttatgcctgattatgtggacacagacaaggattaaaacagggcacctgcccttgaggagtttacaatctgctgggctgaggatcaacacatgttcaaaaagagaggaaagaagtca

SEQ ID NO: 59894 - DNA, 305 bp, Homo sapiens
accaacacacaaggcttcagttttaattccatgaaaacccagttggctttgagccattcctaaagatttctttccccattcagtctattttctttcttaaccaaattaacaacaacaaaaagcaaagtaattcattgtgatactggaaaatccccaaagaagggagataaaggaggagaaagattcatatcacaccgaagctgtagcctggaaaaaacagtaaagttaactacaactgaattcattagcagcctgccactcaaacccaaagctacctcaaaaacaagaaaactactcaaaaagag

SEQ ID NO: 59895 - DNA, 320 bp, Homo sapiens
tccaccgcggtggccggccgcccgggcaggtacacagagacacgatccacagttgtgtaggaataacttcctaaacatctttaggatctacctctttttcctgttcccactgttatttctttgtttcaggcccttaacatctctaatatacactagtatttctgtcttcacactgttttttttctttacacagctcttttcatagcccctccattagcacacagattggaattgtgtctccttgttacccacagaataaaacccaatgttcttaatatgtagtcttaatatagactctataaatagcccctttgttaatc

SEQ ID NO: 59896 - DNA, 315 bp, Homo sapiens
actttaggctgagaaataaatagaagggtgagaaaaaagaacagtctttatagtcagtaagagtgaaaagagaaagatggtagttggggaaagacagatggggagaaaggttggctggttgttaataaaacagtagaggatgagcatgtattataaatgctggtgggaagaaaccttgtggcaaggagggtggtagtgttggagaagaaagagaggatatagtagaaagttaaagaggaactggaagcaggtgggatccaggacataggaaggggaagagccttgggcagaggtgagacatctgcaggagggaag

SEQ ID NO: 59897 - DNA, 330 bp, Homo sapiens
accaagaataagttgtaagagaggaccaaagataaaatcatttaaaattttaaatgaaataaatggcgtgacattataaacatatgtaaacattatatacattttttaaaggtcaagagcctagattaattgtaattagcctgtgtgagttatttttatcatggtggctcaccctgagcaatatgaacttcctgcccagagttcaggagaattttctcactccatcactagatagaatattgaagatgatcattcagactgagagcactcacaggaagatgatgcagaccatctgtaagatggtgccttcaactggccacaacttaccct

SEQ ID NO: 59898 - DNA, 147 bp, Homo sapiens
  misc_feature 5: n = A,T,C or G
aaganctgtccttgcttcaagtttctatcttcggcctgttgtccttcaacacactccccataagggaccccattctctccaagccttcgttcatcacccagatgctaatgagccctaacctttatcctgtcttctgtgaactctgga

SEQ ID NO: 59899 - DNA, 320 bp, Homo sapiens
tccccgcggtggtcgagcggccgcccgggcaggtacctggcttggacttgaaggagaaatgagagagcaactatccgcagtagaaggctgagcatttcaaatccctgtgaaacctagggttttgaaaacagtatgtttcggcaacagcaagtggttcagtgtgattggagccttaaggggacagtggaagatgaggctgagcatttagggaggtgccagattgccccaaaggcagtgttctcaatactaagctaatgttcttccaccataaatgagctccccctggcaacttctcatttctatcaatggaactttcgttc

SEQ ID NO: 59900 - DNA, 287 bp, Homo sapiens
acccgccaccatgcccagctaatttttgtatttttagtagagatggggtttcaccatcgagcggccgcccgggcaggtaccagtcattttgtcccaagagtccttatttcttttctctgttggtgaatccctacttatccttagggattcagatccagagacacctttcctgtgagactcccctgcttcactttaggtagaggtctttcccctacagcccttggattcacatttctattgtagtgcttagtaatatgcattttgagtatttatttaccagtctgtgt

SEQ ID NO: 59901 - DNA, 289 bp, Homo sapiens
acgcgggtttgcccattttctgcataagaaaactgaatttcagtaaaattaaattgtttttcccaggcaacccagccaggaatcactagtccccctctctcaaaatccagcatttgctcactagaccagagctgctttaaatgacaatagtgtatggaattcattatagtagaatccattctaaacacattgttaatggtttgatcaaacatctttagtagcaccttttcattcatgttttattatgtatgtgtgctacccactttctgtgcagaaatttcaaggaaaa

SEQ ID NO: 59902 - DNA, 288 bp, Homo sapiens
  misc_feature 133: n = A,T,C or G
acaaagtgtggagaaatgcaaacatttaaatagatacttgatgttaactttgacatttactgaagattaaggcaaaagtgaaagagttccctttcttcgtttatcaaatcaagtcaaaacccttttcctttcnacctgaaagattatatctctaaatctctttcatcatttctcaaatgactacccttgtcaaacactgtttcttattacttgagctggcaaaattcattttcatactccctttttttaaattgaggtataatttacataccataacattcatccatt

SEQ ID NO: 59903 - DNA, 279 bp, Homo sapiens
acaggtgtagccaatctgtcacttttggtcagaagccctgagagagctcttttgaaatcagctatctcaggatactgacttaaggactaaattagtatttctcaaagtccgatcacagacttgcattagaatccacaaggacgcttgtccacacagcagtctgggtgatttttgcttttgctgttacatggaaatcagattaagtcactcccccacttaaaacttcctaataagcagcttctcactccacttaaaagccaaggtctttcaaagcctaaa

SEQ ID NO: 59904 - DNA, 300 bp, Homo sapiens
actttaagttactaaaaaaaatactaggagatgtttaatttgtaacactgtcaaatcattttacctgctaaggtgaaagtttagaatcttttcactttttcaccttttcagtcacaactgaaaagaaaattatatttgtggaaattgcgttttctgactttttgccttttccatttttacatattcttttaaatgtatttttatcttttaaaagtatcttttgtatataactagctagttgttcatcaagttggccctattctatgtgtccaattcttttcttcccattctctcgtaagc

SEQ ID NO: 59905 - DNA, 282 bp, Homo sapiens
  misc_feature 240: n = A,T,C or G
acaaaagaataatctgcctttctcagatgggtgtctagagacaacggattgtgtagctatgatccttgccctataagagttagccacttaatgcagagggcagaacaaacatacaaaaaagcctctattatccatgcactaggaagaaagtagcttaactggcacacatggaagaagctatatgtctacccctacatctatatctctgtgcatgtttattaatttaatacacctatgcanacatacctgactaataggattagtctggaatgtttcccaaaa

SEQ ID NO: 59906 - DNA, 285 bp, Homo sapiens
acctggcttggacttgaaggagaaatgagagagcaactatccgcagtagaaggctgagcatttcaaatccctgtgaaacctagggttttgaaaacagtatgtttcggcaacagcaagtggtccagtgtgattggagccttaaggggacagtggaagatgaggctgagcatttagggaggtgccagattgccccaaaggcagtgttctcaatactaaactaatgttcttccaccataaatgagctccccctggcaacttctcatttctatcaatggaactttcgtt

SEQ ID NO: 59907 - DNA, 136 bp, Homo sapiens
actttaataaatgtggaacgcatttataggagtcagcagtatgactttcctgtttccataataagcatctatgtaggtcacttcatatcgtgcatattaacttaatataatcaccctggtaataatctgttatttg

SEQ ID NO: 59908 - DNA, 314 bp, Homo sapiens
acaaaataaatttgctcattgggttagagtatggttattgattagggggctaagcatttagttactgcatggggcagccaataataaaatcacagccctgtgtatttacctccacagtgtgtgctgataagtgcaaaaggtttgtgcaaattcttttgaagttatattgtaaccatggtatatgtattgaaaacttggccattttaccccattcctatgaatgaaaactatttggtgaatcagaggatagtctgaattgggatatgaaggccagtataagtgtcagttagcaaagtcagctctagtttagtttt

SEQ ID NO: 59909 - DNA, 435 bp, Homo sapiens
actgcatacttcttctatctcaaaagcttgggaggcagacaaaacacagctcaatacactagcccaatcaattgtgcacctcttgtgccacccactttgttccttctggctgcttctggaacctgacaaatcactccaattccctgcacagcaccatcaactctttttttctacattggcactgaagggaagattataaatgaatcctgtattcatatgacagccccatgctcaggcctgtgcattttccgggactaattgctttgggaaagccaatactctagcataagtctcattccagtccacatggtgattatatgttaatgccttttgaaattaattcagtaaccctcttactagcatggaagtaaagggcaaagaagctgagatttaatcatattgtcttttaggggcttaatgtaaaatttcttttgt

SEQ ID NO: 59910 - DNA, 225 bp, Homo sapiens
  misc_feature 183, 197, 218: n = A,T,C or G
acagtcaccacctatgtggcctacctgtgattcacagcttttctgcctgccacctgatgctgaggtttcaaatcacatcctgttactgcttttacatttgcatttttcagaacctatattgaaaatggtgacaaacaaaatgttcttacctttggctggctccctgtggggagagcggaacanaaggcaagaacctntaagggtactaccttcttcangcgtatc

SEQ ID NO: 59911 - DNA, 292 bp, Homo sapiens
acccagcagcacaggcctgtcatccctctgcctctgcctttcttcagcatgtgcaggaagagtttccttaggctgaagccgtcaagtaaggactttaaaagtcatcccacagaaccaggcccggggcacagagtttaataataaaacctctctgatgttacgaggccacttcggggactgcacatttctctgttttgtgggattactactgttaaaaggattttctgtgatggggtcagtagagttgggtgctggagatgagggcatcttctgtatttgcaggagcttaaat

SEQ ID NO: 59912 - DNA, 317 bp, Homo sapiens
tccaccgcggtggccgagcggccgcccgggcaggtacatgcatcaggccatggtgaccaattgtctgtggagggtgaggcagaaggaattgttgaggatgactgaggtgtctgggtaacgctttcaactgaaactgggaaaggggatcaattgaaactgggaaagggtttggtgtggcaggtataagtaatgagttcaagttgtatattctgagatggaagtgtcatgaggacattcaggtggagaaatcctgtaggacactggaaacggatccagagttcacagaagacaggataaaggttagggctcattagcat

SEQ ID NO: 59913 - DNA, 283 bp, Homo sapiens
acttttgaaattcctccatgtttgcctgtgtcccttcttattgccgagcagtaatccactgtattcctactgtggattatgttccaccgttgtttatccgtccaccagatgatgaccgttgggttgtttccagtttttggctgccatgagtcaagttgctataaacgtgagagtgcaagtctgtgtgtgaatacacattttcatttctcttgggtgcatgtaacagtggggttgttaggtccaatggtaactgtatgcttaataagaaactacctgattcgct

SEQ ID NO: 59914 - DNA, 466 bp, Homo sapiens
  misc_feature 430, 442, 446: n = A,T,C or G
acgcgggtcgcatacagtatttttttctgctcaatgcttaaaaggtcagggaggtcttgcttggggatgtagctttggtagtaaagaagttcacaagaaaaaaaggactttccaggctgatggaacaatgtgaatgaaggggcatatacagtgtatgacaacctgactgttcaaatcagaggattagagctttctttgtttgcaatgctgcttggaacttgagcactactactgaccatgccactacaagcaacgtattccagagaaaaaaggtcaaaattgagaagtaaatttcatcttgccaatgaagaataaagaatgccttactaccacctgctgatttcttacacttttgttcgatgcttatttctaatacaaaacatttacaaaaatgtttaatacaagactatttacaaaaatataacctaanaatgtgacatanactntaaaataatcaagtttcttc

SEQ ID NO: 59915 - DNA, 240 bp, Homo sapiens
  misc_feature 203, 210: n = A,T,C or G
accccaaataaactaaattggcaaatttaatttcttttctcttagttgaaagaataccaatttgatacagtaacactggtcatttaaattaaagtatggttgttataaatttttgtgataagcaaaatctggagatacattattattatttaacaaatttatatgttgttttgttttttacaacgcctttgaaacacacacanaaggttnaaataccaagaaaactttgtggtaaactga

SEQ ID NO: 59916 - DNA, 315 bp, Homo sapiens
acatacatacagatacaataaattataaaatgatatcctatgtataaagtatgctagaatcatattgctataacattcaactattgatcacaagattattaaaacaataaaattagagctctaacaatcacagcgacatggaaaagattagcataaaatctatacatagccagcaaggttcttttcgtgttttttttctgtttttttttaagatgggatgttgcagtgttgtctgggctggagtataatggctattcacagatgtgatcatcacatattatagtatccaactccgagactcaagcaatcctccag

SEQ ID NO: 59917 - DNA, 353 bp, Homo sapiens
tccaccgcggtggcggccgagggtaccgaattccaataagcaatattttttaaggacaaaaaaagaaaagcaggacaaacagaaggtcaggataggagtcaacaatatggggggaggaaaagaaaaagacacaagaagacaaagtaaaccaaacacagcatgcaaaggcctgggaagtgatctttctggcaccctctgtgtcagtcagtcccataggaaagactgtattccattttggtccacttatttctaagagaccaaggagaaactggagagagggaaggcacattctcaaaggaatattaaacagctcttattctaataggtccaagtaattgaagttattcaatcta

SEQ ID NO: 59918 - DNA, 293 bp, Homo sapiens
acctctggtagaattcggctgtgaatccatctggtcctagaatttttttggttggtaataagctcttatatttttaatgcatattagtccttttaaaaatgcccttcacctcctactttttgtggtaaacaccatcatattcttaaagacccctcccaaatctcgcattctttataaggccttctctgtgggttgcaggtggtttttcaacctgtcccatatattcccatataatcacccctataagggagccatcaccctacaagataattatttgtttatgtgcctggctc

SEQ ID NO: 59919 - DNA, 304 bp, Homo sapiens
acacctttcagtgtccattgctggacagcagctatgttcatcaccacatacgacctctgggaattaggccaggattgatgttacacttaatacagagaagaaatttggatcaaagaggtaaagcaactagttcaagtttacatttagtaagggggctgcattcacttttttttttttcttttttaaatcgggaaacaagtcaattggggatctgccacatcctaatggggcaactttaggcaggtcacacatcctgttccagtctctactgttttcatcaatgtgggataataaatgcctactt

SEQ ID NO: 59920 - DNA, 145 bp, Homo sapiens
acccctactgactcactttatgaacctcactgaatccccagctccatgcttgcaaaatgaagaaaacacgacgtaagtattaaattgttggaagtattaaatgagacgtgtgtgtgaaatgtttggcagagttgctgcacgtgta

SEQ ID NO: 59921 - DNA, 243 bp, Homo sapiens
gggactccccgcggtggcggcgcgagcacaggaactctcacctaagctggcaagatgcatgagtctttaacaagaaacatcttggctgctctgtggcatggattctttctgggatctaaaaacaagaatattcgatccaggagtcttgaactgcaagacggcagtgagctatgatcaagacttcagtgagctatgatcgtgccactgcactctagcctgggtgacagagcaagaccctatccc

SEQ ID NO: 59922 - DNA, 412 bp, Homo sapiens
  misc_feature 344: n = A,T,C or G
acagtatatttgagtgtgattcacagagatgttatgaaaagtgttaacaggcaagaattcaaagaacagtgcaccctcaacttttagagacacctacattctggtcacttagcttacagtcaccatctctctgtggctggcatggttttattataaaaagttcttcgttatcttttcttttttattttaaaattaggataaaagggagaaaaagcagttgggatataggatataagtgacacttaccaaagatggtttttacatttgtagttttacgtcagtaattgcctacaatatcctcaaccttggagtagcttagttcattaagacacttaaaataaatntgtgtatatatttaatgagcttttaaaaaatcacgagctattaggggcaagtacttcactatggactc

SEQ ID NO: 59923 - DNA, 293 bp, Homo sapiens
acccctagatatttaacaaacatggatagccccttgttcctagggccctaaaactacatcattatacattgtttgttttagatttaatcaactacacctatggtaaaacctaaaagattggatcatgaggccttgaaatctacattttcaattccctgttcatagcatcctcaaagtgtagatgagctgactctagagaaataaatacataacactgataatcttgcaatatttccttatgaactcaaaaacctgaaccataaacatgtaaagacccttatgcacattaaatt

SEQ ID NO: 59924 - DNA, 294 bp, Homo sapiens
accaggcatattgcctcattagtgtagatgtgccatgtttgaatatctatttttatccacaactagggcataaaggggacatcttgggagataaaaagagattagattttaaatattgactacaagcacatttctgaatcctttaggcacttacatatggtggacaaagtctttgtgggtcattgttttgcatctagtcaagtttatattcagtcagcgttctcaagctcatttatgccttgcttctcactagtgtctggaaaatgtctggcagggtcttgagaagggaagtaa

SEQ ID NO: 59925 - DNA, 217 bp, Homo sapiens
  misc_feature 168, 199: n = A,T,C or G
actgatttaccatatgaccccaaaatctcacttgtagaaatttatacaggaaaaatgaaaacatatgctcacagaaagcttgtatacacatgcttatggcaataaatttatttatagttgcctatcaacaagtgatgaacaaatatattttagtatcttgatactacnttctagctagaaaaggaatactactaagcanaatagaggatgaagtagt

SEQ ID NO: 59926 - DNA, 330 bp, Homo sapiens
ttgggagctccaccgcggctggcggcgcgaggtacattgtaaaggctagggcataactagcacttggtaaacagtagcattactgttgttactgttcttggcactgagcatcaacacttctcagattttcaaggatggtctcaatataagcccttctgttagctgattacaacgatgctaggcagcatttctgtgatgtttcctacgagccagacactatgtgtaacgtcttacagctcatcccatgagtgtgcatgatcattctttaagtgctcttatatttctcatctgacagatgaagtaactgaggtttagtcaggttgactaact

SEQ ID NO: 59927 - DNA, 308 bp, Homo sapiens
acaaggaagactggctgaagaagaagctgagaacaaagcaggtctacagaggaagaagcagtgactagcctggtccctgaacgggtgaaatgggaaagtagctctggctccccactgccaaaaggcctcagtgatcttgctgtttggggttattagagcaccttttacccttttcaacaaagcccaattttacttaatctagttagaatttctactccttgaaaccaagagagacaaagtaaaatcaactataatttaaccattcctcctactttgagagcatgtaggttatttttaattttttgatt

SEQ ID NO: 59928 - DNA, 254 bp, Homo sapiens
  misc_feature 198: n = A,T,C or G
accctgttagttaagcatcgagtgtgtgggtatacatacagaacagggctaaataagcaggattggtcttcctagactaaataattgctaaagctaacagacagctgttggtaactactctcccagctgtaacagccataaaacacacaaggcatcattgcattaacctttgcacttcaagcaaatgaattatagctnagacttctaagacattccatttagcctacatgctaatgagttagactcattctgct

SEQ ID NO: 59929 - DNA, 301 bp, Homo sapiens
acgcggggtatagctttgggaaccttgtagcatcttaaagacttttaaagggttgacagctattggcaaattgactaatacagagaactaaactttggttcatgtattcaatgtctaaatgaaaaatgggaagataaaagagctaagaatgaaatgtgatttcatgtgcttctcctttttagctcttataatagattgaacagatttgatatttgtggtaaatccactcaggcagagtgacagaggcttggttgtcatttagcctttagggtcttagtggagttaatgagaactgcaaatg

SEQ ID NO: 59930 - DNA, 435 bp, Homo sapiens
actttaatttttcttcagttacagctaccactgtgaaaataattctctgcttatcaagtttacaactttagaatttcctgttttaaagttttctcatttacttatcacacagtcatcttctttttgccaaacgctatagtagcacattaaaaggagactgatgtggaatcaactctgtgcaaaaagtattgggtgctttggtagaagtctatacagaagacactggagacacaaaaatgaattttgtccaggtgagttgatgtcagaaaaggcttaataatggagatgaggccgggcatggtggttcacacctgtaatcccacctgtttgggaggctgaggcaggtagatcacttgagaccaggagtttgagaccagcccagccaacatggagaatcctgtctccactaaaaaaaaaaaaaaaaaaaaaaaaaaa

SEQ ID NO: 59931 - DNA, 303 bp, Homo sapiens
actggtgtttctcttttattatttcaaaggtttaattgtagactctacctgaatatgttttctcatatcaaccgtagaggaattcccttgaaactatggtgtttggaattggtattctttgccatattcatctgcgtattctacatttattcagtaaagatttgaaatctcactctgtgttgtatgttgctgggtgaataaaactgacatggttcttgcctccattggaattctgtaattctatgcagtagagggacaatttaaaaagtaaacttttttctatttataaggaattacagtggc

SEQ ID NO: 59932 - DNA, 318 bp, Homo sapiens
tccaccgcggtggcggccgagtacctgaaaaatgacctcaacttctttgcttattttggtgtctgtgtcttcctaactacaaaataaactccattcagcactgtgtcactgacgcgcataactccagtgcccgccacagtgcctggcatgaagcaagccctttatcaagatgtgttaaatgaattcaacacactacagtcatcagagggagctgggggagatgcttttagcccaattatggacacactttgagcttaaagatctctacggtctctaggagacaggctggtaaatatctgcactcagtgctgatgacat

SEQ ID NO: 59933 - DNA, 378 bp, Homo sapiens
tccaccgcggtggcggccgatgctactagctattatacacatgtgtctgctggatattctagatataactaataggataccgtttacctttaaggggggcccgaggacaccaactgttgccatctttattgagggtaatactgcgcgcttgtcgtattcatggaacacagctgttccctaggcctgagttttattttgttgacacagaaataaattagaaggccaagcgtggtggcatgtgcctgtagtcctagttgctgaggtaagaggattgcttgagcccaggagttcaaggctgcagcaagctttgattgcgccactgcactccagccttggcgacagactaagacgctgtcccaaaaaaaaaaaaaaaaaaaa

SEQ ID NO: 59934 - DNA, 225 bp, Homo sapiens
tattgctataacattcaactattgatcacaagattattaaaacaataaaattagagctctaacaatcacagtgacatggaaaagattagcataaaatctatacatagccagcaaggttcttttcgtgtttttttttctgtttttttttaagatgggatgttgcagtgttgtctgggctggagtataatggctattcacagatgtgatcatcacatattatagtat

SEQ ID NO: 59935 - DNA, 302 bp, Homo sapiens
actaagcaatcctccaattagctggctgttgcctctcttgatggctaccttggggaggagatgggggttgtgaactttgaagtggattattaattattcatgcctccttcgccctgatggaggtaacctgcatctcaggagccaggtccagtattcattatcttcctgtctgtgtttgcaataaaataacactgaatattaatcctttcaccttcattcttaactccctcttcccccttctctagtctctagacagattatgcagaatcatgcctctcctttaattcttctcatccctcgtc

SEQ ID NO: 59936 - DNA, 160 bp, Homo sapiens
cgcccgggcaggtactgttagctgccggacaggctaaatgctctataacggcgggataatgagctgctcaagacccaagtctgtgcatgtgctgatctgagagcctctattcagcccacggaaggcttactgggtgttaaccatgttctctgctaaatac

SEQ ID NO: 59937 - DNA, 524 bp, Homo sapiens
acgcgggtgttggctcttgcctgtaatcccaacactttgggtcgccaaggtggaaggatcacttgagtccaggcatttgaggttacagtgagctttgatggcaccggtgcactccagcctggggaacagagcaagaccctgtctctaaaaaaaattttaaaaacctctgatctatctggaatgtattttctaaattaccccaacactgtttattgggaagtctgtcctttattctatatgaaatcccatttttgccatacacctagtagcccttctgttgggtgccaggataagcaccctggccttgagtgtgctgtgaactctttattatgggttgtgatcttcctgcacattctagcactggtaccacattgtttggatcgccatagctttgggctaaacttccccattaaactttttcaaaacttgcctagtatattgtgcaggccgggcacggtggctcgcgcctgtaatcccagcactttgggaggccaaggtggatggatcgcctgagatcgggagtt

SEQ ID NO: 59938 - DNA, 300 bp, Homo sapiens
actgggattacaggtgtgagccactgtgcccggcctgcttctacaattcatttcctttaataggtgttcaatgagcattcatttataaactcagagtaaagcttgatagtttaaggaaaaatttatactgattttgaacgttaatcaccttttgcaaaacccagttttcctggtttcatttcccatcctctttagatgttagaatggacagtagatacttagcctgacccagaaattataggcattccccagtcattcttctaatctttacagtatctgttagagaaaacactgacagtt

SEQ ID NO: 59939 - DNA, 319 bp, Homo sapiens
tccaccgcggctggcggcgcgaggtacatcagagtgctcctccccccaccccttcctcacactggcactaagttgccatatctcttcctcttttccaggctcagcaactcaactctttcatttattactttccctgattttacatcattttattctttttttattatagcctattctcatttaattttacatgttgacaaacttggatataataatttaaaggttctaaccattattaagtataataaaaaaattgtttcttagcatttaaataatgtagcattcaatacactactgtggtatacttatttttgaaaat

SEQ ID NO: 59940 - DNA, 265 bp, Homo sapiens
acagttcaaaagctccctgctctgtggatactctcttccagctgctctggcaatcctggactccgtctccaggctccttgcactgagattacggctttctgcttgagttctcgatgctcctagcttgtctagactagagaataccttatgggaaacaccgtataaagttggatctaaatccaactttagattggttccttttttttaaagattgaattctctagaagtttattttttttttctattagtcactctctggtctctg

SEQ ID NO: 59941 - DNA, 294 bp, Homo sapiens
actaacgctatcctacttggcctaaacaagtccaagacatgcctctcttctagtaatgactctacttgcaaaaactcagttctgtctacataccgggcaaagtaatgctctgcaatgagaggatattaaattatgcagattattcttgtggagggcaaggctggttaataaaacaatcctgtaccggcaggcagatgttttcaactatttaattagatgacaaacttagtttgaagatactcctctgtgcaatctctcccccagccaaaaaagaaaaaaaaaaaaaaaagtccc

SEQ ID NO: 59942 - DNA, 326 bp, Homo sapiens
tccaccgcggctggcggcgcgaggtacacagcaaacacgatccacagttgtgtaggaataacttcctaaacatctttaggatctacctctttttcctgttcccactgttatttctttgtttcaggcccttaacatctctaatatacactagtatttctgtcttcacactgttttttttctttacacagctcttttcatagcccctccattagcacacagattggaattgtgtctccttgttacccacagaataaaacccaatgttcttaatatgtagtcttaatatagactctataaatagcccctttgttaatctatcttgaatt

SEQ ID NO: 59943 - DNA, 191 bp, Homo sapiens
  misc_feature 156: n = A,T,C or G
acgggcttgctctggttattagtcctgtcccaattagatggcctgttatttcaatagtagataaatgtagataaactatgactttctaataaagtatttaaaactctgtaaagtcagtcaaaaatacattacctgaaaaaaataatttgttcattntatgagtaaggactaagctgctgcaatctaaattt

SEQ ID NO: 59944 - DNA, 299 bp, Homo sapiens
accttataattcataagacatttaaaatggtattgaatcccaataacctatgcgtagggttggatcttgttgttatccctgttttttaatggaaaatctgaggcctgaagatggtaggccatgtatatgcctgccccgccgttgagcctggctcctgctgttggagaaactttcccagtctgtagagagaggatgtggtcctggcaagcctggctcctgtctgattctgtatcttctggtaacacacagccgtcatttaaaaaaaaaagacaaggtctttccctctgacagactaaaag

SEQ ID NO: 59945 - DNA, 295 bp, Homo sapiens
acctggcttggacttgaaggagaaatgagagagcaactatccgcagtagaaggctgagcatttcaaatccctgtgaaacctagggttttgaaaacagtatgtttcggcaacagcaagtggttcagtgtgattggagccttaaggggacagtggaagatgaggctgagcatttagggaggtgccagattgccccaaaggcagtgttctcaatactaaactaatgttcttccaccataaatgagctccccctggcaacttctcatttctatcaatggaactttcgtccttcatatgt

SEQ ID NO: 59946 - DNA, 157 bp, Homo sapiens
tccaccgcggtggcggccgagtactgggctgcatggggactgacttgtccttttacttctatcaatattcggatgacctcaaagcactgtgtgtcttccatatgtcagcttgtctggcatttgttctacaaaggaaggatgaaatagcagctactga

SEQ ID NO: 59947 - DNA, 330 bp, Homo sapiens
  misc_feature 310: n = A,T,C or G
actgcaagcctcaggcatcaacgtctcaagtgtctcctaatctctcctcgcacagccgtccgtctggcggtgggaaaagcagcagctctggatgtttgaatccaggatttagtgtgccaggccaaagtcttgttaccctttccacttgtaagctgtgaacaaatgagagaaagacagagacagactgtggatatacctaaactagtttttacactctaactgtgagcctaattgggttttcaataccatttaggcacaacctgaaaattatttcttctgaatgtaacatcttcttttgtaatattactgnaaatattttcttcttctttt

SEQ ID NO: 59948 - DNA, 391 bp, Homo sapiens
acattcatttgctagacttttgatatcaggccaaagttctgtctttgggatgcatctgccaattggcgtcctgttcatcttccttgcacaaaccactcccataatatcccatagttctgttttctttaaaattcattggaaacttaaaggtgcttatgaagcagtctcagtgtagtagcctaaattgttacgatttttgtctgatcttttgcaatgactttgctcacatgtaatttgattgctattctttaactgactaccgtttataaaacctttgcaaagcacttagaacttaaagtaattttcttagaaacaacactcatctttttagccgtcatatttcattggtttatataatacgtgattaggttatgccgttacagtgacaagt

SEQ ID NO: 59949 - DNA, 160 bp, Homo sapiens
gtactgatgagcatgttctacgttcttgaaagttcagaccttttagaagctgcattgagtgccccttccaggaatccctcttctcaacccctgtgctgtttaagctcagttgttcacagatagtcttgcacagacctggcttttggactgagagcaggca

SEQ ID NO: 59950 - DNA, 134 bp, Homo sapiens
accctgtgtttcttatagttctagacatttctagaaatgtgatttctttaaaaagcctccccttcctaaacattcagtatttaagtatatttattagctgcattagttataaaaatggcagagttaatttactg

SEQ ID NO: 59951 - DNA, 303 bp, Homo sapiens
acagtagtctcagagagcttttctaataaggagacacttatgcagatctaaaggttgtgaagaagcaaattgtgtaactatatggggagaacagcattccaggcagccagtataaaatccctgaggtggggacaatgttggtgcatttgcaaaaaagcaaggaagatttttacagatagaacagagtgatcaagcaggggatggtgtgtcaagagaggtaggcaggtagaggtagatgtggcactgagagcatgtggaaattatctgctgcttgcttctgtttcctcagcaagagggaggatg

SEQ ID NO: 59952 - DNA, 291 bp, Homo sapiens
actgggcttgcccacctgcctacctgtttatttttcctcctaatgataccagagctggcccacctttaccgagatcatttcaggcagcatttccccttggggcattgaacacatccttccttctgttgggtgtttctccttgttgaccttgtctttaggattaaaggcaaataataacctagtgtatactttttaaaaacattttacaaaggtctatgtagaaatccagagcttgactgacatgaaaactcctgtgaattttttctatcattgtatcatgagaaaaatgac

SEQ ID NO: 59953 - DNA, 352 bp, Homo sapiens
acagtcctgttttgtctacacttgtctatctgaaatcctatgttattaggctgtctgttagaagaggcaacttggcagtgtggaaagagcattagaactggaatcaggggacagtgagtaaaaagtgagaggactgatcactagataatctgcagcttcaaagaaaaagttaatacattaatttctataaaatatcatatctacctacctcatagaaccttcataagcattgaatgcaagtgaaaaatcgtaaaagcataaggcattattatatagcccttactgtaataaaagatgcctaaaacatgctttttaaatgacaaaagatataatgacatacactactaattgg

SEQ ID NO: 59954 - DNA, 272 bp, Homo sapiens
actttttttttttttttttggggggggtttttttggtttttggttggtgggttttaaaaaaaaaacaaggtttatttttttcccccaggttatttttaacccccggacccaaactaaccttttaccccaaccccccaaaagggcgggaataaaaaaaataaccctttccccccacccctaactttattttttaaaaaaaaaaaaacatggggttcaaccttaagggcccctaaaaaaaaccccttttttaataaaaacctttttttataaaa

SEQ ID NO: 59955 - DNA, 264 bp, Homo sapiens
acctggcttggacttgaaggagaaatgagagagcaactatccgcagtagaaggctgagcatttcaaatccctgtgaaacctagggttttgaaaacagtatgtttcggcaacagcaagtggttcagtgtgattggagccttaaggggacagtggaagatgaggctgagcatttagggaggtgccagattgccccaaaggcagtgttctcaatactaaactaatgttcttccaccataaatgagctcccccctggcaacttctcat

SEQ ID NO: 59956 - DNA, 296 bp, Homo sapiens
acgcggggtagtattccagagcagatgataccatacatggccaattaagagttttacacaacactggtcaagattgctgtataaggttaaagcttatttgattagtcaacaggcttcctcaggttgcccctaggagagctgggatgggatctgtagaaactaacttgaacctcagaaacttcattcccaggttcttttcactgattcatggaagtggtcagttcttggcattcatttctttatttcttcgtgataatttcattcattaacattttacttctccatgacttttggtg

SEQ ID NO: 59957 - DNA, 137 bp, Homo sapiens
acattcatcagggtgcctctaccccaggtagtaagcagtctttaggtaaaaggcatcctaaaaccagatcattcttgagtaaagctagactggccagaagttagattctgagggtgccttcctgcggcagtgaattc

SEQ ID NO: 59958 - DNA, 369 bp, Homo sapiens
  misc_feature 344, 345: n = A,T,C or G
acacagagacacgatccacagttgtgtaggaataacttcctaaacatctttaggatctacctctttttcctgttcccactgttatttctttgtttcaggcccttaacatctctaatatacactagtatttctgtcttcacactgttttttttctttacacagctcttttcatagcccctccattagcacacagattggaattgtgtctccttgttacccacagaataaaacccaatgttcttaatatgtagtcttaatatagactctataaatagcccctttgttaatctatcttgaattactcacttttaggtttcagctccctactgagaacccaactgctnntaccttctgtccctcctggttctg

SEQ ID NO: 59959 - DNA, 321 bp, Homo sapiens
  misc_feature 295: n = A,T,C or G
tccacgcggtggcggccgaggtacatacatatttttaagtagtattctacattttcttctattttagaatttttattgctctttgtcatttagatttcctttgattttttttagcctatgaggcagaaaacatttttaaaaaatggataaccaatagtcctagcaccatacattgaacaagccactttctccaatagtctacaatattattttttaccacatattcgtagttttccaccttgctggctaaatgaacttaaaagttatcgtatctctgtttcaatttcttcactanaaagtagagataatagttcacttcat

SEQ ID NO: 59960 - DNA, 318 bp, Homo sapiens
tccaccgcggtggccggccgcccgggcaggtacgcggggggaaaagaatgaggcttttttgagaggaaggaggattaatcatgaggacatgctttggaaggccagagtttgctgtcccgtaaagagattgtggtagagattttattttcagttggattaagtctagaatcacattgatagtgatttacattgcctgaagtagggaatttgctctttaggttggtcaattaattaggtccgtattctagatttgctagaaaaaggagcaactcacttgaagagctttgtggtggttgctcttatttatatcctcacatg

SEQ ID NO: 59961 - DNA, 293 bp, Homo sapiens
acagcaaggagggcagcgtggtggagcccagcgagcagagggttgggtgggaggagatgtagttggaggagtggctgtaagtcctatctctaatgctttaagaggaggaatcaacatattccaaatttattttggtaacttagccactgttacctgtttctcactgacaccagtcaccgattactgctgccattccccgtagctgcctcttcactagttctacctcagctccatgtgggtcacatccattccctactatagacatacatctcctcaagcttctgattagagcc

SEQ ID NO: 59962 - DNA, 223 bp, Homo sapiens
gcctggggcaaccattaataaaatgacacccctgtgtatggacctccacactctgggctgataaatgcaaaaagttggtgcaaattcttttgaagttatattgtaaccatggtatatgtattgaaaacttggccattttaccccattcctatgaatgaaaactatttggtgaatcagaggatagtctgaattgggatatgaaggccagtataagtgtcagtta

SEQ ID NO: 59963 - DNA, 274 bp, Homo sapiens
acatatactaggacaggtgtgacaaagatttacttaggtgctggagtagcccttgcacagtatgaatttttctgtgggtgtcccagcatgagtctctccagtgaagtctattgaataaataaattcaataaggagaatgtggcaggaacccaattacctggaaattctgcccagtggatggagttgcctttgttcccttctttatcatggaaaatttagggataaaatctcttttgtaaattaaaccttaactgcctcccacccgcttttctgt

SEQ ID NO: 59964 - DNA, 292 bp, Homo sapiens
acgcgggggacacttattgtcagagaagtttgtaatgctcagtgcttgcactcacccttacccacataactgattctcattttctgtctactatcagatgagccaatatttctaattaataatgcttatttccagtgctgaactttctttggaggaattcaattaaagggaccttgattcacattcaaataactacccacaactggcaataactatcctccagagaaacccaacctgaagaagttcatgcatgaagtctgaccttgcttaattggtttggtgggacaggacc

SEQ ID NO: 59965 - DNA, 303 bp, Homo sapiens
  misc_feature 287: n = A,T,C or G
acaaggaagactggctgaagaagaagctgagaacaaagcaggtctacagaggaagaagcagtgactagcctggtccctgaacgggtgaaatgggaaagtagctctggctccccactgccaaaaggcctcagtgatcttgctgtttggggttattagagcaccttttacccttttcaacaaagcccaattttacttaatctagttagaatttctactccttgaaaccaagagagacaaagcaaaatcaactataatttaaccattcctcctactttgagagcatgtangttatttttaattttt

SEQ ID NO: 59966 - DNA, 175 bp, Homo sapiens
actttttttttttttttttttttttttggagaggggggggcccaatttttcgcccgcgggggttaaaatatggggaataaaaaatattcctccttttggcgctcaaaaagggggatagcggggttagcccccctttcggggcctgccgaaaatttttttttcataattttaaaaa

SEQ ID NO: 59967 - DNA, 243 bp, Homo sapiens
gccgattcagttggtctgaagtgggaccctggaatccagtttttaagtttcccgggtagtctggtgatgaaccaggtgtgggaacccctgctatgatagaactactcttgatcaatatttttagcgtcttccctttatcctttacctcacctgggaaagccctagccctgcataagtccagaaacttacgtgttttattttcttgggccactgagactattggaaaagtcctacgactggtgc

SEQ ID NO: 59968 - DNA, 314 bp, Homo sapiens
tccccgcggtggcggccgaggtactaatagccaggcagaatttgtctctttttattaagtgggtttcaaaaagttaaattagtctgtgttttgtaaaaggaaagcaaaattcacaaatgtattaagatcgagcagaaaaatacagctttcacttaccaaatatattttaaaataagcttttctaaaccaaatttctaacattttatacaaaaaattctagcataaaccaaaacatttttttttcaatgttgaataatcaaacactaacaggacaaattactatacttacatgtggaagaaggtgtaaaaaagca

SEQ ID NO: 59969 - DNA, 437 bp, Homo sapiens
  misc_feature 110, 384: n = A,T,C or G
actagactgtcttagtatttgaagcttgaacagatacacagaaaagacagggaagccacctacaatgcattctagaaagatcatgctgctgaggatcatggaagcacctntagttcccattgtcaagcttagttgttcagctcttccttaagttatataaactatcccagaattcttctaaattctccaacccctttaatttggtttaaattagccaaattacgttaatgttgcatataaccaaaacttaagggatataaattggttgggagaatgtgttgtaaccagtagtctgtcaggaaactgttgcatttttaggtagttttatcaagctgagaaggggtgaaatgagtgagacttacctgactttcaagacatctattnttcaaaccatttgttttcacttctttactgtgttatcaccatcctcccaggac

SEQ ID NO: 59970 - DNA, 301 bp, Homo sapiens
acaggtaagggggaagttccaaagctgttagtcaccttgtcttcatgctgatcacccaaccagatctaatgtttgatgttctaagaactttaatgttttggaggaaatatcttgtggccttcaaaaaaatcattctgtgaaatagttgtttctacctacattcgtctcattaatttttctacatacagcagaattctgcatatattagaggtaactcagtcagggtgtcatggaggaaggtgacccatggttcaccatcttgccaatagaaaaaccaataggaagtcatctaaccatcatt

SEQ ID NO: 59971 - DNA, 302 bp, Homo sapiens
acttaaaaagccttgttctcataaacaaacagacaacttattttatggaatcttggggtgagccaacccttcacagggcagaggtcacctacaaggggagaggcttatagggttattggggaccagaatgaggaagtggtgactttaggtgtgtgtatcagaactgttttggtgcagcaactggctggcagagaattgtattaccaggaaataataactcactccaggttttcataaaggccaggggttgcccttgggttgtatccctaagtatataatagtatataatgatcagctttaac

SEQ ID NO: 59972 - DNA, 469 bp, Homo sapiens
actttaggggggtgattgttcacaacctatccaagtcaatcctcttgctcaaagtctgttaacataatacatgctaggtcaggcgtggtggctcacgcctgtaatcccagcactttgggaagccgaggcgggtgaattgcctgaggtcaggagctcaagaccagcctggctaacatggagaaacccccgtctctactaaaaatacaaaaactagccgggcgtggtagtgtgcacctgtaagcccagctacttggggggctgaggcaggagaatcgcttgaacccgggaggtgggggttgcagtgagctaaaatcgcgcggcagcactcaagcctgggtgacagagcgagactccgtctcaaaaaaaaaaaaaaaaaaaaagcccctggcccctttaaaaattagggatcccccgggccggagaaatttaattttaacctttttaaaccccgcccccctgggggggggcc

SEQ ID NO: 59973 - DNA, 301 bp, Homo sapiens
acccatgactcatcattacaccccttcagggccaccccagccctttgctgcacctgccctcaattgtattcaccagcttaaggcttaatctttctcctctccagagatccctcagctctgcacctgcagtgacccagaggcacagggctgcagagaaaggggactgctttatagccccctctaatcccaagccaccaacactttcttgctcctctaagaaatagtggaagaggccaggtgcggtggttcacatctgtaatcctagcactttgggaggctgaggtcaggagcttgaaaccag

SEQ ID NO: 59974 - DNA, 294 bp, Homo sapiens
acgcgggtgtccaggattatctcattcagtgctctagtttgtcgaggttattttgttctgcgagtccaaccatccgaccaggcagcctccgtttctaattgccttagaattgctcatatggtgaaacaactttatatctaatttaaaattcaaaggtctgtttttgtttgcattagatctcaatttactgcataggctgtatctggtcttaccatccatccctcctgtaacacaggtcctctccagagtagcagaattttcagtggtgtgtgggtgatgcccaagatcattgag

SEQ ID NO: 59975 - DNA, 293 bp, Homo sapiens
  misc_feature 28: n = A,T,C or G
acgcgagttcccaccagaccagatgggngaaagagtcaaagaggcggagacacagtcattgaaggcaaagtccaagggagattcagagacagttctggggtgcaggcaccccaaagagaggcagaaacctaggagacagggacagagcctcggagcgaagggggcagaaacccagagtgagagaaacagaggccctgaggaagacagagatgtggaggagggacagaggccccagagggagattcggagaaagggagaaaaagacagtgagaaaggggaaactacatctacaa

SEQ ID NO: 59976 - DNA, 479 bp, Homo sapiens
  misc_feature 38: n = A,T,C or G
accaagaatatattttccagtataatttcccatgcttngaaaagttcattaagggaaagcaaaatcaattcctcaaaaaaacttcctttgagcaagccatctacctgctaaggaaatgtccaaatacacaaaaatataaaaatcaaactaagaaaccacagatcacacttttaacaccttaactttaagaaacctacgaatcagattctaggcataaaatcctggaatccagaagagtaattttgattgaactactgacaagctgactgcggtctggaaaaaaaaaccaccaccatgtttcacaggtgcttttgttgttgtctacctttgcctaccaactttgtatgctcagcacttaatgctcacagcaaagtgtagaactaagtccatactaagtcattgtcaaccaatgatgaaacagccaatgtctaagagttttaagcaaacatttcagatcaattattctggctgacagcagc

SEQ ID NO: 59977 - DNA, 236 bp, Homo sapiens
acagaaacatagtggatatgataaaaggattgcatttctgagaagagaaaatgactttattgcttcatcttgaattgctaagtattgatcttgttttgttttcctaaagcagcaattcagtgcagggtggtttgataaaaaggtaaaacattagtagaatagcctttcatgtttatcagttcctttttttaaaaaatcagcagcatggtttaatgctttttctgtcaggctttctc

SEQ ID NO: 59978 - DNA, 275 bp, Homo sapiens
  misc_feature 18: n = A,T,C or G
acttctagaatgccacanaaatcaccacattcgccccaaatcaccaaatctcttaattcagattatacatgtccagaatatccagttctcctagaaacaaaatgacacttttatgtttccctaagtttgaaatatttttgaagtattaaaataagcagagccatagtcccacactgtatttttctactgagaatacaacaccagaagctaatctcatgaaattagcccatgtgaagaacaggctgttaactactgttgtgatggtaagtccagaa

SEQ ID NO: 59979 - DNA, 291 bp, Homo sapiens
acgcgggtctaataaaggacggcgaagtgttcttgtggtatttggtttgtggaagcagtaagttaccatatcacatactctgtcttgaaccattataaatattcactggtaaaatatagaaagttgtgtttatttatagctgagtatgagtttactatgcagagaacctgagtcatgggctgactagtgaatgtatcaaaaagcggaatgtgggaatgtaaaagggtgcaacaactttggaaaacagtttggcaatttcttaaaaagttaagcatcaacttaccatatgaa

SEQ ID NO: 59980 - DNA, 431 bp, Homo sapiens
acgcgggcatcaaggtagatttctcctttttttcagagggatatgtttgattttcacatgtatacatgcatacagcaaagagaactctggacgcctaaggagaagaaataattcatcttccatggatcaaagaaggagaagattttaaaatcaacatgatgcttattgtgaaagagaagagaaaggacagacaacacaaggaggaacatctgtagaaggaaagcaccacccctcctgatgagccctggaaagtctcgatggatgtctgctattctaactcaaccgaacttcccccttccactctcaaaaaggtctttgttagatgatgaattatattttcacagaacaagtaatctggaaatctaattgctagttcttaagtggaccctaactattcttccccttcagcagtcactgaggctctttgtaaa

SEQ ID NO: 59981 - DNA, 340 bp, Homo sapiens
acacagagacacgatccacagttgtgtaggaataacttcctaaacatctttaggatctacctctttttcctgttcccactgttatttctttgtttcaggcccttaacatctctaatatacactagtatctctgtcttcacactgttttttttctttacacagctcttttcatagcccctccattagcacacagattggaattgtgtctccttgttacccacagaataaaacccaatgttcttaatatgtagtcttaatatagactctataaatagcccccttgttaatctatcttgaattactcacttttaggtttcagctcctactgagacccaactgg

SEQ ID NO: 59982 - DNA, 416 bp, Homo sapiens
acgcgggggaaatttagtgagatgcttctttgagccacccactgtgctaggcaacttgggaagacaaaggtaaccctacatgatccttatcctcaagagcatcgtttgttggggaagtagatgtgcaaacaattagagggcaaagttaaatttgccagattggtggtgtgcacctgcaaggaaatcccagaataaggcattccatgagccaaggtctgcatgcagttagccacttggtccccggggggttttagttgttctaaagtcatagtatttgatttttctttttagttaccaacaatgaacactggagattttagataaaaatacagatttctgtcttaccttgaaaaaatgaaagaattgacaataattagcccctatttcaccatggtaacagtgagggatggctgatc

SEQ ID NO: 59983 - DNA, 270 bp, Homo sapiens
  misc_feature 226: n = A,T,C or G
gataatctttgcaacccctttgataggactttttgggtgagaatttttatgaaaagtaatatatacttctactatagatctgcctctagtttcaacctctagttttagcactgattttttccccttaatttccagaagcatgatataatatctttttcaaagaaagtgggaagaatgtccacaggtgttaggagaagacaattatgtaggaaaaatattttctcanattaaaatttaaaacaaaagtttgcagggaatggagtggggttc

SEQ ID NO: 59984 - DNA, 309 bp, Homo sapiens
tccaccgcggtggcggcgcgaggtacagcaactttgctgatcttgttttcctccagtaacattagcaaattgcaatggtatgttttgtatagcatttatgtaaacctgtaggcaacgttaaaacaattctttcattagttttataggttccattttaaaatgttagttatgttttgtatgatctagcaggtgaaaacaccacagcagaattgggagaagaaaatattgaaggcaagttacagatgttatttcaaggacaatattagaaagggcatcgtcttgttaagagctgaattcagtgtttctact

SEQ ID NO: 59985 - DNA, 156 bp, Homo sapiens
tccaccgcggctggcggcgcgaggtacatttctgttatgtgttgaaaaataaagtttctgaaattataatatgtttgagcatgtaacaatctgttctgtatgggcacactgtccattcttattaaggcagataaacaggtttttgcatggcccctt

SEQ ID NO: 59986 - DNA, 295 bp, Homo sapiens
actttgaagcccaacaaaattgagttgtttgagctataaaagcaagagcaggcagaaatgcagaatctccacaggaaatgttttgccttcagggtcctgtcattcaaactagagattgaaaataccaatattctagctaatgtctaaggctgcttatttctatggctgaaggcacagggccaattagaggccaaagcagtgggtcctatcaccaggtaagccatttagttttactctcttttgtggcctcagctttcgctcttggtcttacctcatcatactacctgcttttgag

SEQ ID NO: 59987 - DNA, 468 bp, Homo sapiens
acatgttgtggaataagaataaggctcacagctgttactagttaataacgtattcaccattggtagaaaactcagaacttgtggttaaagtggattttgttctcttgcccaagactgttaaccatcatcaacacaacagctaaaatcagcctgttacgctcacctgctgtttaatatctagattcataaagatgagagaatggaaaaactgcaaaagtggtgaaaacaaattctgataataggttaatcagaattatctaggaaacagttattagatgaaaggggctaggtaggtcacaaaggtaagttctcttccatcaaggaactcttgaagtggatgccattagacctttacaaacaacggatataccgtgtgctgtattagaggtatggaaccgaaagtaaaggacagatgcgcccttgtcttgtcaacagtaagagcctcttgtccatcaagagaattcatgt

SEQ ID NO: 59988 - DNA, 283 bp, Homo sapiens
actttttcttaaatatttttcatctacttgctttctctccctctacctctcgcctcttccctttgttctcttattcccccatcccccgctctcccctccaattccagactgagaaactgcttgttctggatggataattaacatggtgctgtggagcaacaggtcccactagtagcgactaaatctgaagtaaatgttaatgtcgtgcaggttcacatgtattaataggcgagggagatgagtgaggttagactcagatcaaccacactggtatatgacttga

SEQ ID NO: 59989 - DNA, 301 bp, Homo sapiens
tccaccgcggtggcggccgcagtaccaattaagaatgtgtatcctaagcgctggcaaattttgataaaaggatgttttctttactcggagacaaaaatcaaaaggccacaagcagagggacctcaacaacctatatctcccaagcaatgctgctgatgaggctaagccattgaagggatcaaatggaacaatcacagagaaatgccagcctcagagggaataaacagaatcttcaacttctacagctaggctgaaaacacagcatctcagctggattttatgcaagtcatttccataaaag

SEQ ID NO: 59990 - DNA, 292 bp, Homo sapiens
accctttaccatagaccctcttgaacccaaagttatatttgcaagatggcatccctatcagatgaggtctttggtgatagagctgaaaaaaattaactgtttcctataggaatcttatctctgattagacaacaggtctagaactaatagaaaaaactaaatgtctgtgttcctcaaataaagaaacatcttaaaaatatcataggtattcaagatcgcatgtctactgactccaatttgaaaaatgctgatttataaagctaaagtattattctaagaaactgcttttttg

SEQ ID NO: 59991 - DNA, 219 bp, Homo sapiens
actctagtttagtttttttttttcttttaaggcgtaccattactaaaagtattgctttgggaaccttgtaccatcttaaaaacttttaaagggttgacagctattggcaaattgactaatacagaaaactaaactttggttcatgtattcaatgtctaaatgaaaaatgggaagataaaagagctaaaaatgaaatgtgattccatgtgcttctccttt

SEQ ID NO: 59992 - DNA, 291 bp, Homo sapiens
actggcaaacctcagcaagagtccttttaagagccaaaaatattggcctgaccccattgtgcgtcctgttatatacaactgagggaataaaacacacccagggattctggaaacaaaacagtatgaacactgcagctcatgagccctagtagataaagcactgagtaacactgtgaggtaaaagtaagttatgtccattagaggaccggcaggtaggcctccttccaagggccagttctgattcattcatggcggctgtctggagcacttctttgggaatgatgcctaggc

SEQ ID NO: 59993 - DNA, 173 bp, Homo sapiens
actatataaaaatatcaaaacacagctcccttttgttcattatattgccatttagtttttttctcatttttttgctatttcaacaaaaagctgctatgaatgtgtatgtgtgtatatatatattaaatgtgtatatatatgaatgtatatatatatatacacatttatatgtc

SEQ ID NO: 59994 - DNA, 300 bp, Homo sapiens
acctagaaatctagtctttaagagatatttatctcagaagaaggtgaaaaggactgtgtgacagacatagatatcagaagtctgagttttaattcatacatgatgtatcttagttttattttttaagatctccagaaactaaaaggatatatcctataactcaaactcattttaacagcaatattatgttctatagtcttcacacttgcagcttcagattagtcctggaacataagacttttttttgttttaattgtagaaaaagcttatcttccccaaactccaccttaaggaaaagtc

SEQ ID NO: 59995 - DNA, 377 bp, Homo sapiens
  misc_feature 351: n = A,T,C or G
actcaggtgatagcaatggtgacagagagtataaaatggtatgaagtataaaatagtatagatgatgttgatggatttggataaggaaaaggaaatgatataaatgctgacacttttcttgtttgttattttcagcctctttaattgtgtagttgccatgaactgagatgagaatgaagagaccatgtatagggtaaagattataagcctgagtttggtctgttgaatgagagatcccatggaaagatccaattagtgatatcaagtaggccgttaaatataagactgagtatatacacgtgtgagtcattgttttataagagtaactggagcccaagaaaagtgtggatntaattatgcagagagggagttagagt

SEQ ID NO: 59996 - DNA, 532 bp, Homo sapiens
acatgcatcaggcaatggtgaccaattgtctgtggagggtgaggcagaaggaattgttgaggatgactgaggtgtctgggtaacgctttcaactgaaactgggaaaggggatcaactgaaactgggaaagggtttggtgtggcaggtataagtaatgagttcaagttgtatattctgagatggaagtgtcatgaggacattcaggtggagaaatcctgtaggacactggaaacggatccagagttcacagaagacaggataaaggttagggctcattagcatctgggtgatgaacgaaggcttggagagaatggggtcccttatggggagtgtgttgaaggacaacaggccgaagatagaaacctgaagcaaggacagaactttctttcagagctggtagaagagaagtcccaaaagagagacaaaaactggttagggagatagaagaatcacagaggccaagagaagagagtgtttccgagagggtgccaggaagggacagctaagtctgctctggaggtcagggatgtgt

SEQ ID NO: 59997 - DNA, 331 bp, Homo sapiens
  misc_feature 13: n = A,T,C or G
tccaccgcggtgngcggccgaggtacacagagacacgatccacagttgtgtaggaataacttcctaaacatctttaggatctacctctttttcctgttcccactgttatttctttgtttcaggcccttaacatctctaatatacactagtatttctgtcttcacactgttttttttctttacacagctcttttcatagcccctccattagcacacagattggaattgtgtctccttgttacccacagaataaaacccaatgttcttaatatgtagtcttaatatagactctataaatagcccctttgttaatctatcttgaattactcact

SEQ ID NO: 59998 - DNA, 317 bp, Homo sapiens
  misc_feature 7, 16, 23: n = A,T,C or G
acatagnaattccagnttctggnaaaagctgtcatttgaatggcattctcttttcctgcaatatcaagaagatccacagacgctgatttctgggctatggagctgggttagatggaagatgctctggaagggcttccctttggtggatttttcactttctgaaattcatcattttcattagctttatactgtttttgtctttatcatttcaggtgtgaattacaattttttttttatcttatgctgtcatcatttgcattactgttgtgatgtagtggctgattacggctctgtatgaagaagtgttttgaggctgt

SEQ ID NO: 59999 - DNA, 322 bp, Homo sapiens
ctccaccgcggtggcggcgcgaggtactttttattgtctacaaataatacttgcagcaggccaaatgatccactataaaaataaagattcttatataagagaaaaaacttaaataagctttacgttttgggagcctattggagtctcaagaaactacaaataacctaaatgtctaacacctggggacagccgtggccctttcactccatggaatgctacaaagccagaaagatgaattccctggctacagagccacatggaataatgctcatgatgcagtgtgaaaggaaggcaaactggaaagctgttcccacactaccat

SEQ ID NO: 60000 - DNA, 495 bp, Homo sapiens
acaaaacaaaaaagcacatatgcttattttcgtaagcaaaattaaatcagacttcaaggggtggggacacttaatcctaattaactggaggctcccacacaccccgaagatctctggaaaataccaaattcttacacagagaaactagggaatgggaatgttgttttggtctttgattatcactggtccttgctgtgagcttctgtctgtgaccatgccaagcttcgacattgtggttcgactattgttgtccctttccttctttacggggctgaattaagaatggtagatggtcccagcattgagaatattataattaacataagagtcatactaagctttccaaacctagtatatcaatgttgagttctgttggatttcaggtagtgatgcataatacgtatgttgatatgaaaatagcttccttctatagtttttttaaatgcaaagttcttgaaaaagttattaaaaccaaacctggatttgtgtgtacct

SEQ ID NO: 60001 - DNA, 298 bp, Homo sapiens
acctcacaatgcaatagtgtttattttgagccagttttatacagtgtggattctaacactccagtctcagtatcttttgtttgggattattgggtttatcctaaaaaaaatcctataatctccagcttttggaactatctgcatggctacagtcattctcaggtaaaataagaggacagggaaccccacctttcagtgtgtagaatatgatatattcatcatgttttcatttctaaactttaccttagaattgagatgccctgcgtctcaatttctctagctcactatttcacaggtt

SEQ ID NO: 60002 - DNA, 397 bp, Homo sapiens
  misc_feature 361, 375, 383, 390, 391: n = A,T,C or G
acacagatctggtaagtgtgaggattgaaatttaactcaggctgtcttgtcctagtactcccacctccacatgaacctcttagcactgccacaataatcaaagcacagctgtcagagatggcaacccagggcaagatgatttttttattctacattttgtatattgaacctttagagcattaaacagtaaatgccagagcccaacttataaggtctatgaaaaggtcaaagtctccttttacttcatcaccactggagaaaaacctaaacaataatagtaaccaaagtccatgtcttcttttagaagaccaaaattttgagttcctctattatgagtctttgatggagacctgcttaattntctttctggggatntacaacanatctatnntttttt

SEQ ID NO: 60003 - DNA, 296 bp, Homo sapiens
actcactcactgaatggtcacctatgcccagcactcattgcactgaaattataggtagcttctgatggatttggagataagagggcctttggaattatcatctaaatgtctttcaaacttgtaatatcactactacttggcaacgcaaagggcttgtccatgtgaaagctcaccttccaatatgaactgctggagactggaaacaccgttacagagtgtctgcaagtccatgcaagaaacatacagcgcattcatattgcagcatggatttttcaggttaatttttaacctctgag

SEQ ID NO: 60004 - DNA, 305 bp, Homo sapiens
ctccccgcggtggcggcgcgagtacaggctgattatcatatatgtcatttaccaaggctagcatgtaattacttgacaataacgtctgggcaggacataacccaaggctcaatatcaaccaatatgaaatgaccattggcagcacctgttctgctgccttgattaaacagttttcttgactatattagaatgagatgaggacatggaggttttctatgcttcttgttgtttacacttaattattaatttccagttttattgtgttatgtggctcaaatcaagagtttatatatggctaataaggt

SEQ ID NO: 60005 - DNA, 309 bp, Homo sapiens
actttgttcttttactactcaatgagactgagagcctgctggattcactaagaccaggtgaacccagagggctctcggtctcattgactcaattgggtttgaatctcaattctgcaacctacgtggctttgggcaggtttcctcattttcaaaattatacaataatatttaccttttaaacttattgaaggattggaaagctgtaacacctagcatgctgtcgtggcataaggtgggggttaagtaaaaagtagctactattaacatttttgaaaagtgctccttcattttccctgctccctttcatac

SEQ ID NO: 60006 - DNA, 302 bp, Homo sapiens
actgggctgcatggggactgacttgtccttttacttctatcaatattcggatgacctcaaagcactgtgtgtcttccatatgtcagcttgtctggcatttgttctacaaaggagggatgaaatagcagctactgacatttgctttggactaaaagaaggaagagtaaggatcttgttatctgaattcaatcttgtagcctgtgtgtttgcaggaggctttcctggtttctgtttcaaaaccaaatctgtattttgttttcaattttaacacatttccatcaaaaataacacataaatggttt

SEQ ID NO: 60007 - DNA, 226 bp, Homo sapiens
accaatgactgagcagacataaaagtcagcctggatggctaccaccactaatcagatttgtctgctgatgcaaggcccttcagtcattccagaactggtaaatggagtcaccctgaggacaggccctgctgctgattgatgtccagtgtgggcagctctcttggctgctcaacattcagagaagctctccttgtttcagtgctaaatgattgacagtcagggtgag

SEQ ID NO: 60008 - DNA, 293 bp, Homo sapiens
actctttagctacaaagggcttggagtagactataaagaattcatagaaatctaagttattaccaaggcagtttttccatttatgcttaaatccggaattgatctgaagttcaattttctctgaggataaaatttaattgaaccatttaatgttgtaatggaagaatattagggtttatctagacaatcatatatctgaatatatgatgcccaatcccctaaaaatctaacattttttccctaattttaactattagctactatttaaagagaatacataaacatttggtatt

SEQ ID NO: 60009 - DNA, 330 bp, Homo sapiens
tccaccgcggtggcggccgtagtacatctattgtattccccttgcagcaggagataaaaaacaaactgatccattccgtctaacctgaaagggtaggccccctttcgcaattttttgaaccaccttattcacgggcctgagtcacttgtcgtaacacagaaataactgtaaaggcgaaccgggggggcttgtccctgtagccctatttgctgaggaaaaaggattgtttgaccccaggatttaaaggttgcaccaagctttaatggccccattgcactccacccttggcaacaaactaaaaccctgtttaaaaaaaaaccaaaaccaaca

SEQ ID NO: 60010 - DNA, 417 bp, Homo sapiens
  misc_feature 361, 375, 383, 390: n = A,T,C or G
acacagatctggtaagtgtgaggattgaaatttaactcaggctgtcttgtcctagtactcccacctccacatgaacctcttagcactgccacaataatcaaagcacagctgtcagagatggcaacccagggcaagatgatttttttattctacattttgtatattgaacctttagagcattaaacagtaaatgccagagcccaacttataaggtctatgaaaaggtcaaagtctccttttacttcatcaccactggagaaaaacctaaacaataatagtaaccaaagtccatgtcttcttttagaagaccaaaattttgagttcctctattatgagtctttgatggagacctgcttaattntctttctggggatntacaacanatctatntttttttaattcttcattctctggttt

SEQ ID NO: 60011 - DNA, 605 bp, Homo sapiens
tccaccgcggtggcggccgagtacttttgtagattaatcttgatgtttattccataacatactctcatttgggcccatgcttggcttgtatttcaatagctctattgagataaaactcatatacattcacatggagaaacagccctgtggagggaaagaaattgatatgcagtaaactacacatactcatttacaacttgaaaagtttgccatatgtatacacaatgaaaccatcaacactttcaaggtaataacatatctcagtttccttgtgtctttatgttattcttccctccttccatctgatctgctttgtgtcactgcattttctagaattttatgtaaattaaatcatatagcatgtgctcttttttttgtctggcttctttcatgcagcacaattattttgccattcatatcagtttttgtgtgtatcaatagttcattctgtattattacaaattagcattcaattacatgaatacattgcaatttattcatttgtgaatggacattgcattatttccagttttggctgtgacaaagattcatgtggaaagtctgtatagggacatatgctttcatttctcttgggtaaatgtctt

SEQ ID NO: 60012 - DNA, 463 bp, Homo sapiens
tccaccgcggtggcggccgccgggcacgggaccctaagggatctaccagtgtgggacaactgtaaattaatttgtcaccttagataggtagtaaaccttgcacttaaagcatctgagatggaggcctatgattatactactcatcattacacaagggcatagctttcaaatgtctgaactttatgcaggaggtcttaattcctgctgcctacctctcccagtcccatagcattgtttcctgtccttggattcctgcaaaagttcaagaccctgattactaaatttctaaacacacccagccagtcttagcttcactgtagagtaaatgactgactttcaggtctttttaatttagttatttaattaattaattaactcattttttcagagacaaggttttgctatattgcccaagttggagtgcagtgctattattcataggcgcattcattatacactacag

SEQ ID NO: 60013 - DNA, 291 bp, Homo sapiens
acttgattccacttagggatatgccaaggggccccgtcccattggattgagtgttagactgaagtttactagtcctcgttagtcttttgatttaatcatttatgctgctgatatgattggattaataaagcaaatctgaggaggtgatgtcagcgcagctgccaggacacttttttcctttcctctcagctacggatttctaggcttgttttgaaaattccaggtgctatcatctttttgataatactgatatttttcagtgttgataatttatctcacttttgaacatct

SEQ ID NO: 60014 - DNA, 321 bp, Homo sapiens
accttagcatagcttatgcactgtagtcacttgacctctagcacctatgcagtcttccagtcttatttacacattcctttgcacatgctgtttccccgtgtggggcaacttttttcttgcctgtctgcctgcctaagccaacttaaataaacatcatttctgtaacttctgtgaagccttttccaatctctccactccaagacgaaggtgtttctataggcatgacttctggaatggcagatcaaggatctggtggaccctctactcagtgaaaacaccgtttaactagtaaaaatgatcaatcaaccatttaaaatcttc

SEQ ID NO: 60015 - DNA, 298 bp, Homo sapiens
actttagaaagtgatttaaaattgtctcttccttctgtattattctgaaagaatttaccttttagcaagggagtcttcttgttcagtgtttttacaaagggggtgggtggtgggcaaggtgttacagttgcctgcaaaggagtgacgcacagtgtatcgttcgtttcatccaccgcttgtcccttgtttcctttttgactgtagttttactgttaggtaaagtggctttggtgatttggagtatttttgtatgaggtcatgaattttcctttataaccaaggaaacttatgatctttc

SEQ ID NO: 60016 - DNA, 406 bp, Homo sapiens
acagagaagaatggcagtcagaataaaaagcccaaacccttcatctccctaccatccttttgcagaaagcacccgtaattgtgcaagatttgagagtccgcactcaacgaatggccgtggggcatcaggcagagactatgtcaatggggcacaggcactaagtgaactcaagttcttcttaaatcacttaaagcactttgggaggtcaaggcaggcagatcacttgaggtcaagagttcgagaccagcctggccaacatggtgaaaccccatctgtaccaaaaaaaaaaaaaaaaaaaaaatccccgggcccttttaaaaataggggaccccccgggctggggaaatttattttaaacttttttaaaccccgccccccggggggggggcccggcccccactttttt

SEQ ID NO: 60017 - DNA, 294 bp, Homo sapiens
acgcgggtacaccatattagactagatcttaatttcaccactatgcagattcctaaacatctggtagagtgtctgttttagataaaatatgccataaggcatttttcattttgcttgtacatatgtgcttggattgagaatgtagggatttgaaatcaaacaagctgattgcttattacaatttcagaaggagactgagaaattctttcatttttgtttgcttctagtatctctcctgtcctttcccatctcttaaaaggattaggttctaaagtcaaagtgtgaggcactcag

SEQ ID NO: 60018 - DNA, 322 bp, Homo sapiens
accatctctgctatttagcccccactgttaaatttgactggcttaaaaaaataccatctctgaagataactacttataagttggtcatatgtttttccagacttcccaatgtttatttatatataaacataaataattttaggccgggcgtggtggctcacgcctgtgatcccaggactttgggaggctgaggcggggggttcatgaggtcatgagatcgataccatcctggctaacacggtgaaaccccgtctctactaagaatacaaaaaattggctgggcatggtggcaggcgccagtagtcccagctactcgggaggc

SEQ ID NO: 60019 - DNA, 283 bp, Homo sapiens
actgggaggcagaggttgcggtgagctgagattgcgccactgcactccagcctgggcagctagagtgaagcaatgtctcaacaacaaaaaagaaaaaagtagatattgctggtagctctgtttttgcctttcaggagcacttctgaagagaatgaggctttttttgagaggaaggaggattaatcatgaggacatgctttggaaggccagagtttgctgtcccgtaaagagattgtggtagagattttattttcagttggattaagtctagaatcacattgat

SEQ ID NO: 60020 - DNA, 307 bp, Homo sapiens
  misc_feature 9, 21: n = A,T,C or G
actattagnagccaatgtagnaatcacaatagaatcaagttaataagttctgccacatgttcctttctctctcacctaggaccttcatattttaaccaaagataccatcttaagaattactttttcaaaataaatattttagtgatttgttttgactttaaaccttaggcaagagattgattggagattttagttttcatataatagcaaatgaggtgtttccttcttaaaaacattcttcaggaaaggaaaaatctcttttcattaattcatctctaaacccacagtgcaaaatgtaaatttccct

SEQ ID NO: 60021 - DNA, 294 bp, Homo sapiens
acataattaatgctgttttaatgggaatgacttggtattttgcttttctctcatgttaattttcccattctgcactggaatgatcagtttcaagaactagatttcttctataattttaacactattacacagaagataaataagtttaagtggaatggcttatttaaaataattttgttgtcattgcctgtttgggtagaataaaacaattggaaggcagtgccgtgtgtcctcaccttgtgtctttcaggggagtagacaaagcagaatgctccatgtgtgaactcagtcata

SEQ ID NO: 60022 - DNA, 489 bp, Homo sapiens
acttttccctcacttactagctaacttaaggctatgaaagaacaaaatcacttaaaaccagaggaaatgagacctttccaagccctaatcatgcaggctgtgcaggcaccaggtagagagaaccgctacagcaccaagcacaatgaaaaattctagagcagacagatgcctcattcctgttaccaccatagtcaaggtcatataaggaaaactgccagatgatggaagaaaacaaacattctcaagaaaaaaagccttcatcatgcctgtttacaacaaaatcatcaaatctgagaggaaatgtttaagaaagtaatagatacaaaattcagtaatgggaggcgcacattttatttgcttacttctaggacccaccactgacttagaagccactcccctaggtctctccaataaaagcttatctttaccaaaaggaaaagctttggcactactacaaagaataacattagtaaccaccatagggaggac

SEQ ID NO: 60023 - DNA, 269 bp, Homo sapiens
actttccaaaaaaattctccacccccatcatttcctcacaattttaaacaggttattatgaataacagtaatagagttattactgttttatgtagtagatgctgtgttatgaggcaggcactattcacaattttcactttatctatgaggaaatgagactcagatagggtaagcggtttgtctaagtcccaaggggaataggggaggcaaacggaagttaatttccaaaatctacaccgttaacataatatattgcctacagctttact

SEQ ID NO: 60024 - DNA, 305 bp, Homo sapiens
actgtgcattatccattggctttcagccaacacctataatgaaaggaaattttttccagatctcctgtttcctaaccccgacagccacatatttttaaaagagaaggagcagaaggtagtgacattttgatagtatttcactgacaaaccacaacatccaactcagaaatatcattatagatagatttttttcagccaagtaaaattacagataaaaaagacagtgtcaccatcatcactaagtaaatgtcgagaatggaggcaagttatctagcgtaaaaaaaattcttattgataaggctaca

SEQ ID NO: 60025 - DNA, 293 bp, Homo sapiens; identical to SEQ ID NO: 60008

SEQ ID NO: 60026 - DNA, 297 bp, Homo sapiens
  misc_feature 93: n = A,T,C or G
acagtattgttttaatcttcagctctctctgcttcctctctgttcccttcctcccttcctcttctccttgtctaccacacagaacagatgtgngaaaaagccaggcctttaggaacatctgctgagacaccagctgccttcctcctgggctaaggaaactgtgacccctctgattattgggtttcatccaaggacctcagttctttggccagaatatttgcatcgaagtcagcaaggtcttctagctatttaagagaatttgctaaatccctgaagatctgtacctgcccgggcggc

SEQ ID NO: 60027 - DNA, 338 bp, Homo sapiens
tccaccgcggtggcgagcggccgcccgggcaggtacaatggaggatttttttgtagatgttgtttatcaaatcagttactttttaagaagacataacgcctaagaagctatgaattcaggtgagggatattatttatagacattaattccagttaatttttccgaaatcattcctgttatcatttacttcaatttagaagttatggttttagtaaaaatagatcttgatttacttatatgtggaaatattagcaaaaacaaacaaaacaaccagggaactggaggttgaaaaaaataaaagtaaaactggcaacaaactagtggtatcaactttggaa

SEQ ID NO: 60028 - DNA, 294 bp, Homo sapiens
  misc_feature 131: n = A,T,C or G
acgggcttgctctggttattagtcctgtcccaattagatggcctgttatttcaatagtagataaatgtagataaactatgactttctaataaagtatttaaaactctgtaaagtcagtcaaaaatacatancctgaaaaaaataatttgttcattttatgagtaaggactaagctgctgcaatctaaatttttatggcttgcctgggaaaacaccaaactccttgggagacatatcttagagctaggctctcagtgatttcatgacactctactttaggactgggagttcctga

SEQ ID NO: 60029 - DNA, 327 bp, Homo sapiens
cgcgaacatggtacatacctgttggcctagatgggagctccaccgcggtggcggccgaggtacctatcacataattgcatgattatttgattaatattggctgcacccatttcactgtaagctccatcggggcaaggtccaaatctgctttacttaccatgtatcttcaccgcctaacataaggcttggcacaaaataggttcttaataagtattaatgattgactgaataaatgcatgttataaaagcctctagttgggtaaggaatgggattagatgaatcctaagtgttatctaaaacactgagctgtgtgtttcctgcttaac

SEQ ID NO: 60030 - DNA, 307 bp, Homo sapiens
ccaccgcggtggcggcgcgagtacgcgggattatagttgattttgctttgtctctcttggtttcaaggagtagaaattctaactagattaagtaaaattgggctttgttgaaaagggtaaaaggtgctctaataaccccaaacagcaagatcactgaggccttttggcagtggggagccagagctactttcccatttcacccggttcagggaccaggctagtcactgcttcttcctctgtagacctgctttgttctcagcttcttcttcagccagtcttccttgtacctgccccggcggccggctct

SEQ ID NO: 60031 - DNA, 309 bp, Homo sapiens
actctagtttagtttttttttttttttttaaggcgtacctttactaaaagtttacctttggaaaccttgtaccatcttaaaaacttttaaagggttgacagcttttggcaaattgactaatacaaaaaactaacctttggttcatgttttcaatgtctaaatgaaaaaggggaaaataaaaaacctaaaaatgaaatgggatttcatgtccttctccttttaacctcttataataaatggaacaaatttgatttttggggtaaatccactcaggcaaagtgacaaaggcttggttgtcatttacccttt

SEQ ID NO: 60032 - DNA, 284 bp, Homo sapiens
acagaattgaaagccacgctcctaaacccatcacaaacaatctggctctgacagattcagtgtgaacactgtgtattaacccttggagtctctggctttcattaaagcattggcgcttcaggccaattaattccacggttctctctttggattgtcacatgtttgcttgtgcttctcaatttttctgcatatattcaagggccttcctgtctaaccctctagaaatagttaattctacttaactttctaattaggatagaaaggcttgcccagaggagagttac

SEQ ID NO: 60033 - DNA, 294 bp, Homo sapiens
accttttctagaatgtggtcaaagagctgcctgcatccatcacattggggcttgttaccatagaagtgccctgggctcccctccagaacctgcaacttgaatctctataacgtgaagtatggggatcttcatttgtagcagccttgtccaaaaattaatctgcacactaacgcataagaaccactgcatactctctgcagggactgccttaaatattaggttaaaatcctagtgttaaagttgtttgattaacaacattgacaatatcacacaatttgtttataaaatcctaat

SEQ ID NO: 60034 - DNA, 140 bp, Homo sapiens
  misc_feature 46, 60, 62: n = A,T,C or G
actcttgttactacatatttaaccactttaaaatgaaaaagggctntaagagagaaggtntnatggttaagttttggccattaacagccagcatggttagtaaaggtaggtttcacattggggcatttgtgacctccaag

SEQ ID NO: 60035 - DNA, 267 bp, Homo sapiens
acgcggggtagtgtaagatagtaagtgaatagaaagtggcaactctccagactcactaacacacatatttattatgttctatatttaagttactgagtgtaacaatgactgctgaacttcttttaacagtgttaagtaatccctaagagaagactgaagaaagaaccaaaccgaggcaggcagatcacttgaggtcaggagttcgagaccagccaggctaacattgtgaaaccccatctctactaaaaatagaaaaacttagccagg

SEQ ID NO: 60036 - DNA, 185 bp, Homo sapiens
ccatgcatcaagcctggtgaccaattgcctgtggagggtgaggcaacatagcattgatgcacgatgactgaggtgtctggctaacgctttctactgaaactgagacaggggatcaactgacactgccaaacgatctggcgcggaacgtctaagtaatcactccaagttgtatattctgatatgga

SEQ ID NO: 60037 - DNA, 266 bp, Homo sapiens
acttttattttttttttttttgtttttttttaagaaaaaaagggtttcaccttgtgggccaggcgggtctcaaactcttaacctcggaatctgccagcttttgcctccaaaagggctagaattgcaggcgtaacccactgccccgggccaataaatttttgtcaaaatttggggccctggtccaaaggatacaaaaagggtaaaggtaccctttgccctaaaagttgctgacccacccttaaaaagttaaagtccagcgtgataaa

SEQ ID NO: 60038 - DNA, 564 bp, Homo sapiens
gcggtggtcggcgcgaggtactagctagaaactggtgaccacaaaactatattagttcattaggagttaattaaaagactaagaacctcaaagcaggaaacacaaataggacataataaagatgatacctttgattctacattgcttactctacttggtcgatcttagaatatcttatggttatggataaaatgtatttgatgggttgaactctcaacccaaacatcccatatggagatgctcacagactactggatgtctggatctgatccacattctgctttatcactggtttgatgccgagttcctcccctgccattttttgatctattttttccctttcttcatcatactctgttggatttcagagctggagagtttcattttgtctcgcaaaccatttgacctctagtgctttttatagcaccttcttgcttcttttttaaacattcacatagatgaccttcagaaagatctacaatacatataaaaccttttatgtaatgagtgtctaatgtgaagaacatgatggactatctaaacttatttttacaagactaaagc

SEQ ID NO: 60039 - DNA, 300 bp, Homo sapiens
acgcgggatagtgaaaagcacagacaatggttagggacccaggacaaaaatggtttgagtataagatataacagggtgctcagaatgtcttccagcctagcttcaggaaaaaacttctgcattattagaaatgatgttaggaagaaagaaaaatacttaaagagttaaacaacagtatgcattgtgtcccagatccacataagaaactgagtgaagaaggaggtgagaatggataatgtcgggatgggatgaacattttcccacattgactgaatgaaagttggcacaaggtgccaccgt

SEQ ID NO: 60040 - DNA, 130 bp, Homo sapiens
accttctctaaaatgtggtcaaagagctgcctgcatgcatcacattggggcttgttaccataggaaggccctgggctcccgtgcagaacctgcggctggaatgtgtagtgcgggaagggtggggatcttc

SEQ ID NO: 60041 - DNA, 483 bp, Homo sapiens
acaaggaagactggctgtaacaagaagctgagaacaaagcaggtctacagaggaagaagcagtgactagcctggtccctgaacgggtgaaatgggaaagtagctctggctccccactgccaaaaggcctcagtgatcttgctgtttggggttattagagcaccttttacccttttcaacaaagcccaattttacttaatctagttagaatttctactccttgaaaccaagagagacaaagcaaaatcaactataatttaaccattcctcctactttgagagcatgtaggttatttttaattttttgattaccctatgtgatgctatagtgaacatttctgaatacaaattcttgtttgcatttctagttatttccttaagatatatatgtatgtggaattaaaagatacaaacattaaatccttgataaactattccaaaagggttagtgcacaccatcaacttacttcaccagacacagtgt

SEQ ID NO: 60042 - DNA, 301 bp, Homo sapiens
  misc_feature 12: n = A,T,C or G
acagcattagtntggctggaaattcaatggcgattaatctggaaataggaggctccttccttcagaaattttaaagcccagggagaggagacagaccaatacaacaaagcataaagaatgccataatggaggaagtataaggttctatggggacacataaaaagggaacttggaccagtcttgagcaatgaaagaatgattctgagaaaaagtgatatctttgccaaagctagaataagaatttactacatgccagggtaaggaataaggaagagggaggaaggctccatgcagatggaaa

SEQ ID NO: 60043 - DNA, 560 bp, Homo sapiens
accttagcattgcggtgacttataataggtgctcagtcaatgtttgtttccattcttcttggacatatatgagaagggccatataagattattaactatttatttatttttttttgagtagtgaaactctaaagactcacagtctgaggactcatggagttgttcacatccatgaacaacaatgttatgaatcttttagttataaagcaaacctttctctggagcatgtttgtgttttctcatttaggtttataaattgctctgagactagcaggattgctgtttaagagtcttgtgaggtaggctgcctgattattttaggtgcttccagtaagagcagatatttttttactggtgaataagagaccacattataatttgtcctttttactgagagtgcatagtatattgtatactgtaaacttgtatagtatgtgaaaactttttacatgggaatcttggaacaaagtcttagatgtctaactcgtttgctaactctgaggatgtggaggatggatatggacataggaagttcaacatgtgtatcatggagtgggata

SEQ ID NO: 60044 - DNA, 389 bp, Homo sapiens
accattttacattcctaccagcagtgtatgagagttctagtttctccatatccttgccaacacttactgattttcttcttttttaaaaaaattataaccattctactgcgtgtaaagtggcatctcattgtggtttcaacttatattttgttgatgactttttgtctgtgtatccatatatctactatatatataaggaaatgttacttcttatatcaggagttggtaggtggtaactttccataattttggagaacccttattttataatagagagaaagaggggtagaaagtttgaggtgattgacatgacttctgaagctggttggaagttgggaatgagattgaacaggtgtgcttgtgtgatcaaaacagcagctgttgaggga

SEQ ID NO: 60045 - DNA, 296 bp, Homo sapiens
acacccagagccgatttcagaatgcaccttaacctcaccatccagagtttagcccctcttggcagctgacatgttctagaaccttaaagaaattccagaagtatttacttcttttccattgcttagagtctatgaaactggctcggcaattaatttactgtcaggtctctcccatctgattgttatgacattaccctgccttttagataaatttaatttgactttcttaaatcaagaagtttcccaactctaatcatatgtataaatacccctcaaggctgagagtctgagagtta

SEQ ID NO: 60046 - DNA, 278 bp, Homo sapiens
acatgcatcaggccatggtgaccaattgtctgtggagggtgaggcagaaggaattgttgaggatgactgaggtgtctgggtaacgctttcaactgaaactgggaaaggggatcaactgaaactgggaaagggtttggtgtggcaggtataagtaatgagttcaagttgtatattctgagatggaagtgtcatgaggacattcaggtggagaaatcctgtaggacactggaaacggatccagagttcacagaagacaggatagaggttagggctcatta

SEQ ID NO: 60047 - DNA, 273 bp, Homo sapiens
gcgctccagcagtacctctaagcagaccttcatatatgggtgctgtgcaagcacttctgtcaccagcacccctcactctttcctcagtgagaaaagaagttgaggccccctttgcatcctctttactgatgccacccaaaacaaactccctgcaggaaagtagagggataagatttccaaaggagatgctgaaaagtaaaaagcagtctcacttcagaatcggactgtacagataattaacaacagctccagatccatcctgtgctcttctct

SEQ ID NO: 60048 - DNA, 304 bp, Homo sapiens
acaacatattaactaaaatgaatagctctatgtgaactgatacaagctgtgtctccaagacatattttaaatgttacttatttaatccacacaaactatacaatttcacattcaatataaaaatacatagcaaaatgactgaaaggaaatacaaactattaacagtagctccagggaaaggtatcaaatgggggttaaactaaactttcacataacacggtgataatactggaaacacaacttgatgtaaaagggataatatatatgtgacaatattttaaagtaatggttgtcaaaatatctg

SEQ ID NO: 60049 - DNA, 486 bp, Homo sapiens
accacatggagaaacacttcttgccctctagggaacttaaaatcattcctctcatggtctccttctggctttaactagataccattaaatagttgcctcattctcctgctgcaaaaacatttcttcagtgctggctcttcattaaggggtggctaatgaagctcatgtagatcacccaatttggtagaaactctgatggctttagcccttcatctctcctaaatgctgcaccttatgaagtttggcacagcctctcacaactccctatctgccatgtttaaaggagttttgcatttgtttgtttttgattctatgtatttaaaactaccagtattttcaacaagaagagcaaatctaagatgcagataaattacgttactttgaatattaactattatatagattgacaaatattgctattttatctccagagaaactttaatatagagtcatcttgtagcactagggcaaaaaaaaaaaaaaaaa

SEQ ID NO: 60050 - DNA, 581 bp, Homo sapiens
  misc_feature 464: n = A,T,C or G
actttggcttttgtttctagaacaccaatgagtatatgctcattaagatagtttgatgcaataaatccttattttacttgcctctattactgcattgtaaactgttgtctactttgtcttcttgaaatcctacacctcccccagcccccacatttggcctatggaacattactttatcctgattttccccctaaccttctggcaatgcctctcagactccttccagaactacttttctctgttttccttttaatgatgacagtttatgcaattgtgtcttcaaacttataacgacccagacaatagtaataacagtcaacatttactgaattcttacttgtgttaagtgctgttatatatgatattttaatctttgtaaaatcttataaggtaagtgctgtcattattcccacattacagagaagttagagtctgagcctggtcttagaactagcaagtagcanaaacaagttccatacccaaatactgagcacagtctgtcccttagccccttggtctgtgttctcaccctcttgctcttatccactcacatgttttcacctgaacatgctcatgattct

SEQ ID NO: 60051 - DNA, 545 bp, Homo sapiens
accactgaaatttattagtcacaagtggctctgtgttctctcaaatgcatctttatacctctcttaagtcatccttaagagctaatttgacacaaagacttatatatacagtgtctcattgaaggttttcctttcctgctgttttggtaaatactagacagttttcataaaaaagcattttattttaaatatttactgatttagaagctgttccttctgcttctatttgacttctgacagtgtagttataagtcagcatttataactggtattatgtatgaagcatttaaaatatatggtcagtcataacatgataaaatgttgtattaaattaaagaaactgaaaaagatctaccatttgcgaggcatctgtgggctatgaaaaagagtaaacgtggtctctgcttttactcaggaactcccagtcctaaagtagagtgtcatgaaatcactgagagcctagctctaagatatgtctcccaaggagtttggtgttttcccaggcaagccataaaaatttagattgcagcagcttagtccttact

SEQ ID NO: 60052 - DNA, 305 bp, Homo sapiens
acaaatattctacccttcacacaactactacctctttgaaattgctcaggaaagtttaatacacatacacactacctttcagcatgtttccttttgattctctgtggctctcaccctgtccaatatttagcagtcatgtttgattaaggtcacatttttcagaggtgaaaaagcgatgagaagatttcaggattaagttcaggattaagttcagttaggttaggaaggaaaatctttcctccttgtaagccagagaatgcctgacatagacaaagcttcttacagtgtttcgttgttgggactgg

SEQ ID NO: 60053 - DNA, 257 bp, Homo sapiens
cagataagtgaggtaaaggcagaaaacaactagagcttttaatagagtagaaaaaactagtcaaaacaactacaatgtgaaatggaattagaactgaatttaaaaattggtaactgaactcaatctgctgttagacaactaaaaaacaggatgatttcactaaagtaacgtagaggggaatgagtaacaaagagaaataaatgtgaatgggcaaagcaaaactacagcatgaaggttttcaatttcaggtaaacaat

SEQ ID NO: 60054 - DNA, 273 bp, Homo sapiens
accaagtcttggtagcctgaatgtttaaatgtgctataataaaagataaattatgataaaaagtattcatagaatagtgacagtttgcctgtcattagactttgatcagatttctcatcaccagtagtagacaccagaagacgacaacgggcattctccaaatggtagagaaagtaactttcagcctaggttttcatacacagcaaaactatcattcaaacctgaatgagaagggttttttttcagagagaatttttgaaaggactactaaag

SEQ ID NO: 60055 - DNA, 301 bp, Homo sapiens
acatatggtaattatatatcaatgtatgccagtctaggcagagctatcaaaatatcccctttgatactaggagaatcatataccaccttgcgaataaacatgagtaggtttcaactcatctctttgctttatcgctctttagaagggatccttcttaactggcttttattatatttttctatataagagaaaacagtttaaagtaaaaagactatgacaactagaatggaattttttcatgtttctgggagagcaagaccttgcctaccattctgagataattttgtttaattcaatgcct

SEQ ID NO: 60056 - DNA, 280 bp, Homo sapiens
acaattgattgtaaagatctattgaatgagaaaattcagagatgctataaactcaggtcacagactgatggaaaatcataggatgttttactattgaacatgaacttcccacataaaaataaggctgcataaaaaggcaaaaaaggagggagttcattttgtcctttgtgttaccttgtatggataatttatctaacactaaaacagacattgggagtgctctattatttcatagaatattaagttaaagtgctatctaatagccaaacacttgccttct

SEQ ID NO: 60057 - DNA, 291 bp, Homo sapiens
accttagcattgcggtgacttataataggtgctcagtcaatgtttgtttccattcttcttggacatatatgagaagggccatataagattattaactatttatttattaatttttttgagtagtgaaactctaaagactcacaagtctggggactcatggagttgttcacatccatgaacaacaatgttatgaatcttttagttataaagcaaacctttctctggagcatgtttgtgttttctcatttaggtttataaattgctctgagactaccaggattggctgttaag

SEQ ID NO: 60058 - DNA, 298 bp, Homo sapiens
  misc_feature 19: n = A,T,C or G
acacatccctgacctccanagcagacttagctgtcccttcctggcaccctctcggaaacactctcttctcttggcctctgtgattcttctatctccctaaccagtttttgtctctcttttgggacttctcttctaccagctctgaaagaaagttctgtccttgcttcaggtttctatcttcggcctgttgtccttcaacacactccccataagggaccccattctctccaagccttcgttcatcacccagatgctaatgagccctaacctttatcctgtcttctgtgaactctggatc

SEQ ID NO: 60059 - DNA, 294 bp, Homo sapiens
acttgcttacttgcttatctgacacactagtttgtatgctccttgagggtaggactatctgaccgggtctattccatcatccatggcatcataacgtgatgtctggcacatgctcaatacatgtttactgagtgagggaactggaaaagcactgagtgttaattctctaaagtgaaacagctagttgacgtcagttgatcttgttagaaatagttttgacttttagaagcatttttgtaagagagaaataataaaagcagggctgtcagtgggaatgaggccccctagaattat

SEQ ID NO: 60060 - DNA, 360 bp, Homo sapiens
acttgagaattgcatccaagtcctacacattttaacattgcttgcttggattttcaatcccagaatgaatactggattggaaaagctcaaagaagcttcagagtctgttgcagccttgagtaaagaactggaagcgaaagaaaaggagctacaagtggccaacgataaagccgacatggtgggtgggcatttacacatgtgccacattccttttgaattctcagttcacaagtgttaatgatctatgcatattcactggctataactagtgaagtatacattaacttccattggaataaaatactcttaattttatgtataaaaaactgggtaagtgcaggaggcggagcttgcagtgag

SEQ ID NO: 60061 - DNA, 302 bp, Homo sapiens
acatgcatcaggccatggtgaccaattgtctgtggagggtgaggcagaaggaattgttgaggatgactgaggtgtctgggtaacgctttcaactgaaactgggaaaggggatcaactgaaactgggaaagggtttggtgcggcaggtataagtaatgagttcaagttgtatattctgagatggaagtgtcatgaggacattcaggtggagaaatcctgtaggacactggaaacggatccagagttcacagaagacaggataaaggttagggctcattagcatctgggtgatgaacgaaggct

SEQ ID NO: 60062 - DNA, 251 bp, Homo sapiens
cggcggcgcgcccgggcaggtacttgtatacgtgttcaaaatgggcttttactagacagggtaagtgtccatttgatattttgtttttgttttgtgtgtttcttttgtggggagaaggggatggttgtggggtccagcaaagaggagaagtagggaaaatttaatagaggtttcagctggaacagatccttagaggatgcctggagtttttcaaatgaagaaggcagagaccgagtgcagaggcagagtgt

SEQ ID NO: 60063 - DNA, 377 bp, Homo sapiens
  misc_feature 35, 377: n = A,T,C or G
gcgattctgcgtactcacttgttggcctaattggnagctccaccgcggtggcggccgaggtactttggcttttgtttctagaacaccaatgagtatatgctcattaagatagtttgatgcaataaatccttattttacttgcctctattactgcattgaaaactgttgtctactttgtcttcttgaaatcctacacctcccccagcccccacatttggcctatggaacattactttatcctgattttccccctaaccttctggcaatgcctctcagactccttccagaactacttttctctgttttccttttaatgatgacagtttatgcaattgtgtcttcaaacttataacgacccagacaatagtaataacagn

SEQ ID NO: 60064 - DNA, 490 bp, Homo sapiens
actgcaactattgttataagaaagaaatgttacattgtccattttgatattgatatttacttttaaagcagtgtttctaatcttttttttaaccccttgggaacctcctggctattatgattgagtccctagaaaaatacagttacacacagttttgcttacaattttgagggattcaggcaatctctgtacatatatttattttaaatgaatataaacagctatatcctttgcactaaatttttacaggaattttaaaagagaatgaaaggctccttccattgcatgttagacatgaaaaaaagataaagaatcttaggattcttcactgagatttgtatattttagttcttatgaatggctatggcaacacatccctaaaattagagctgaaatagatgggaaaacattatttgaaatgaaaatacttttacaaacatcatgtctaagacaagaaataatactgttgcagcgtaataagaaatatatg

SEQ ID NO: 60065 - DNA, 292 bp, Homo sapiens
acatgcatcaggccatggtgaccaattgtctgtggagggtgaggcagaaggaattgttgaggatgactgaggtgtctgggtaacgctttcaactgaaactgggaaaggggatcaactgaaactgggaaagggtttggtgtggcaggtataagtaatgagttcaagttgtatattctgagatggaagtgtcatgaggacattcaggtggagaaatcctgtaggacactggaaacggatccagagttcacagaagacaggataaaggttagggctcattagcatctgggtgatg

SEQ ID NO: 60066 - DNA, 392 bp, Homo sapiens
actgcattctccagtcctagacctaaaagcaagtgaatacaaaacctgggtgtgaacaggcgaactagtattacacagaagttttactctttctgcctagctagaaagaaatactgacgaagagctaagacgtgggctgaccaaggcagcctcattcaaacgtgtatactacagtaaactccttttgcagcagggaagagagaatacaacatcagctaaaaacattttgataaagaacaatgatgtcgggggatggtggtgaagacctgccctccagatattaaaattctgaaatggcaataattaaaagtttggcaccagtgtgcatcagagacaggttaaagaagcaaagctcagcaacgggcacaaatatatgtaagaattcagtacct

SEQ ID NO: 60067 - DNA, 463 bp, Homo sapiens
actattagagccaatgtagaatcacaatagaatcaagttaataagttctgccacatgttcctttctctctcacctaggaccttcatattttaaccaaagataccatcttaagaattactttttcaaaataaatattttagtgatttgttttgactttaaaccttaggcaagagattgattggagattttagttttcatataatagcaaatgaggtgtttccttcttaaaaacattcttcaggaaaggaaaaatctcttttcattaattcatctctaaacccacagtgcaaaatgtaaatttcccttacagattgaaacatatcaggtaatccctgcatgtccttatttttcttagagagataactactgaagccttttgcttctctccagactgatcatccggactgggccagcagcatgtgtgtcggtgatcctttgggttcctatcactttcatcctggga

SEQ ID NO: 60068 - DNA, 297 bp, Homo sapiens
acacagagacacgatccacagttgtgtaggaataacttcctaaacatctttaggatctacctctttttcctgttcccactgttatttctttgtttcaggcccttaacatctctaatatacactagtatttctgtcttcacactgttttttttctttacacagctcttttcatagcccctccattagcacacagattggaattgtgtctccttgttacccacagaataaaacccaatgttcttaatatgtagtcttaatatagactctataaatagcccctttgttaatctatcttga

SEQ ID NO: 60069 - DNA, 564 bp, Homo sapiens
  misc_feature 522, 537, 538, 542: n = A,T,C or G
tccaccgcggtggtcgggccgcgccggcgcatggtactgcgggctgaatctcaagggcctcggtagaaatcaaaagtgacctttggtatttgagacaaccaatagcaaaatatagctcccacttccaacagcccatattggtgggggagggatttgcttcatacgtggtctgtgttgggccattctccttctccatgttttctctgttcttacagcaccatctttttgcctcatttctttgctctactctattcctcccccatcatcgtctggtgactcacactgtaatcctagcactttcggaggatcacctgaagtcaggagtttgaggccagcctggccaacatggcaaaaccccgtctctactaaaaatacaaaaattagctgggcgtggtaatgggcgcctgtaatcccagctactcgggaggttggggtgggagaatcacgtgaacctgggaccgggaggctgcagtgagccaagatggtgccactgcactccagcctgggcacagagcgagactncgtctcaaaaaacannacanaaccaaaaaaaaaaaaaaaaaa

SEQ ID NO: 60070 - DNA, 330 bp, Homo sapiens
tccaccgcggtggcggccgagtacaggggacctctttgtgctagttttcaacttccagtaaatctataaaaggatcaataaaggcctttaaacaatatagtctccttaccatccatgacccttttcaaaactgaaattattgttagactacttcccagaaatgtatttctagttagtagggatgggtagacaaaggaaaaatcttagaacctgtcaatggttttataggatcatttcactatgggaaagatcatcaaagattgttaagtagacaaacgaccaatggagttattaatataatgcactgatttcaagttaaaattaaaataa

SEQ ID NO: 60071 - DNA, 348 bp, Homo sapiens
  misc_feature 314, 335: n = A,T,C or G
tccaccgcggtggcgcccgtcgtacaactatcacaatggcaaaactctgcatgattatcctgtcaatcggataaagaccggtctcctggtgggggggcccggctccacacattctgtgacctaacacaatggtctatctgcccccccaacctgatcatacacggtcttagtgcatattcggatacatttctttatggaccttgaaatcagactgtttggcagagaacatagtccacattattttggaaagccagctgtatcaccggagtctacttttatttaatcttttacagccaagaaatctatggcatgtntttgccagtctccctgatatntacatggatgatg

SEQ ID NO: 60072 - DNA, 296 bp, Homo sapiens
acaacatattaactaaaatgaatagctctatgtgaactgatacaagctgtgtctccaagacatattttaaatgttacttatttaatccacacaaactatacaatttcacattcaatataaaaatacatagcaaaatgactgaaaggaaatacaaactattaacagcagctccagggaaaggtatcaaatgggggttaaactaaactttcacataacacggtgataatactggaaacacaacttgatgtaaaagggataatatatatgtgacaatattttaaagtaatggttgtcaa

SEQ ID NO: 60073 - DNA, 294 bp, Homo sapiens
acaacttgcacctttatacaaggccctgtatagatcaaattagatcaacaaccccagcacaaagtgctgaaaaatagtatctctttgccttctctgactgcaaaaccaaaccagtgccaataggcatctttatatggtattgcaactactgtcagtcagtgccaaattaaactaccttaccagggttatgagaagcagtattgttcttaaagtgtgtttgctgccaagacaatagggtgtattgcatctgttgcctgggatacacatatacaacatccaacaaacaagctgcat

SEQ ID NO: 60074 - DNA, 560 bp, Homo sapiens
acatgtgctgtgaagatgtacagagattgggagaagtttaaagggggcagaaaaagagagaaggtaaagtttgtgtttctcttctgtttattgtttgatgtgaggttgcataggaagattagtaggagagaagaaacattaagttttggaaaatggaattttaaatggatctccacaatcacccactgagactttttatagtttaagaactaggaatatcataaatacaaagtcatttagaggatggaagaggcatggaaactgtttccatacctttacagtgaggttgtcatgaattattgacacctgtgtgttagtaggtttcaataactgatttaaacacatccaacctcattccctcatcacaaatgcttccagataataatgggattacaggcatggccactgcgcctggcctgggtggggttttttaaaaataactttttaatcttgaaatagtttcaggattacagaaaagttgcaagaatagcacaaacaactctcatgtgctctttgcctagattccctaattgcaacattttgtctcatttattttatcg

SEQ ID NO: 60075 - DNA, 236 bp, Homo sapiens
ctccccgcggtggcggccgaggtactccaccctggcacaccaaagattggttccaccagtagctgaatggaagctagaatggcaagtaggcattagctaggtggagggggtggggtcattgtgtagagcatgtcaagaggtttgaaataggtatgaggagtaggtgagatgaggcttaagctaaaatttaattgttgtgttttaaaaatgtatagtaagattgactcatttagtgt

SEQ ID NO: 60076 - DNA, 289 bp, Homo sapiens
actcttacttggcatgcagacatgtctgactccagagttgctgcttggagaataggagaaaacagtcccttgaagattaaacttgataatttgagtcatgtctcatctttgaactaaatgcttaggtttctggggtcaaaaagaagtgaagacagggaaatgattacttttccagattttgggcttcaagtcatgaactctgtaagacccttgccctgttttctgttactagaacaacaccatactcttagctcttcttcctcatttcttcaagagaagaatggatcat

SEQ ID NO: 60077 - DNA, 322 bp, Homo sapiens
tccaccgcggtggccgagcggccgcccgggcaggtaccttagcattgcggtgacttataataggtgctcagtcaatgtttgtttccattcttcttggacatatatgagaagggccatataagattattaactatttatttattaatttttttgagtagtgaaactctaaagactcacagtctgaggactcatggagttgttcacatccatgaacaacaatgttatgaatcttttagttataaagcaaacctttctctggagcatgtttgtgttttctcatttaggtttataaattgctctgagactagcaggattgctgttt

SEQ ID NO: 60078 - DNA, 224 bp, Homo sapiens
actttgtgatggaactcccctgcctggagatggcaggattaaagttcctctttgtctgtctaccattgacaagagtgaaatcatggcacagaaagagttgggaagactcagatttgagctgcagagacgtgacttttcgagcaagttactgaacctgtctgagaatcattatctctgtgtgagcacgagagtttttgtgaaagtagaaacgctgtgtattaagt

SEQ ID NO: 60079 - DNA, 375 bp, Homo sapiens
actttaagttactaaaaaaaaaatactaggagatgtttaatttgtaacactgtcaaatcattttacctgctaaggtgaaagtttagaatcttttcactttttcaccttttcagtcacaactgaaaaagaaaattatatttgtggaaattgcgttttctgactttttgccttttccatttttacatattcttttaaatgtatttttatcttttaaaagtatcttttgtatataactagctagttgttcatcaagttggccctattctatgtgtccaattcttttcttcccattctctcgtaagccaattgtatcttactttttccctggactgttccaccaaaactcttctcataaaagtcattactgacctccat

SEQ ID NO: 60080 - DNA, 448 bp, Homo sapiens
accatatagctgattgcgttgccttcatgaaatcctggttcggaatgagttaggaaccaaatactaagacaaagcttatatttagtaattatattctaacttttacctgctactactctaccctgtcttttgcttcatttattcactgccctctcgacatattaaaggatgacttaattcttctctccctctcaccattaataccccaaacctcaccttcattataatggccgtactagcacagagaccggctcatcataagcagccaatgaatgcatttacatacttgggtaaatatactcgcaacattttattatttacttgccttcaaactattatcttcctccctttaagatcattctgaaatcatctgggctgtgcattgatattccaacctgctccgatgcaaaaactacctcccctacacttgtcccttacccctttcaga

SEQ ID NO: 60081 - DNA, 308 bp, Homo sapiens
tccaccgcggctggcggcgcgaggtacacagggaaagcttgaccctatgtatctacaaggatatgtggagtatccttatagatatgctggatatctacagctgggccttggctgattcataatcatattatttttgtagaataggtaatgttttaataaagctgctggagaaagctgagtcatttaagacaacaacactgcgggccacgcggtaacatcagcagcctatgcctctcacctcaacagaaagggagaagatacacatcagcatttataagttgaattataggaatatgcaaactggcagg

SEQ ID NO: 60082 - DNA, 278 bp, Homo sapiens
acttggatatacttggaggcccaagtttcagttggcctccgttgtcagatgccgcatcagcctagaccccaagaaagaagattccaatattcatttgtatggatcagttttacctgtctctagaagagttttggtcctgtcccaccaaaccaattaagcaaggtcagacttcatgcatgaacttcttcaggttgggtttctctggaggatagttattgccagttgtgggtagttatttgaatgtgaatcaaggtccctttaattgaattcctccaaag

SEQ ID NO: 60083 - DNA, 314 bp, Homo sapiens
tccaccgcggtggcggccgcaatgcacgcttgatatattctgttgtattctattttaaaaagagattgagactcactgaattgattttatagcctagtaactaataaaaggttgtaatccacagtctgaaaaacacagataaaggatgtttttagatgagtcactgtttagtatgttgctgcactgtgtcttgctagttcttggccttagttctatcccagcttgcctgtgaaatatgaaataatgaaacacatctgtcagtaatgatgcctttctcaaaagattgggccgtgctcccccggcagaatctatga

SEQ ID NO: 60084 - DNA, 307 bp, Homo sapiens
accatttagaagatttcagagtcagataagtgaggagagcagagaacaactagagcttttaatagagtagaaaaaaactagtcaaaacaactacaatgtgaaatggaattagaactgaatttaaaaattggtaactgaactcaatctgctgttagacaactaaaaaacaggatgatttcactaaagtaacgtagaggggaatgagtaacaaagagaaataaatgtgaatgggcaaagcaaaactacagcatgaaggttttcaatttcaggtaaacaatttgtgtatgtttcaataagaaatgaaaaa

SEQ ID NO: 60085 - DNA, 128 bp, Homo sapiens
acacgtaatatatagtgattagatcagggtgataagcattaaatgtcttgatgcacctagatgacaaagtcaaaatatatacttgctttcacaactaaaactttttttttttttttggaaagggagtt

SEQ ID NO: 60086 - DNA, 271 bp, Homo sapiens
acataatagtgatttaacataaataaatttcttattaaaacacactcatgtgttaaaagcaaaaataatttaaattaccttttttaataccatgttacagtttcatttctcatttttaaatattagttggaaattaagcaattttatgagaaactctgatgtacatttattttcctgcctgaagtcctccagcttacctctgagatgactagaagggaatatctttcttccactatgaattaactcagctattacacagtttgggaatcac

SEQ ID NO: 60087 - DNA, 310 bp, Homo sapiens
acgagtgagtcaacgagaattgtggtgggaagaatgctcaagtcagtggcaaaagaaaatgctatgcgatcattttgaaaaacagcaagtaggctgtgaggcagaagtgaagtgtaacttaataactgtggcagaagatgagctcagagagggagctggaagtgagacaaacaagctttctgccctacgataggcatttattctcactgatgtataacgctactggtggattttgatcagaataggaatgtgaactaaattattccatcaagttcattttacctgcattatggagaactgattatacgta

SEQ ID NO: 60088 - DNA, 306 bp, Homo sapiens
actgtgcacactcttgtttgtggtagtttgtgaacatttctcatggtaagcagacttttaccagtttggccattcctgaaaacgagacccatgacaattctttcaaaaatttctcttagaagagccttcctgtgtttagtctcatggaaagaaatgctggttggaagaaaagtcctttaaggaagaaaaacatgatacaaatagcaagttttttaaagcaacccaattctccactctatgaagtagaaaacaagctttcttggaaaccggtggcagaaagtgtttctagattgagagaagaatggg

SEQ ID NO: 60089 - DNA, 546 bp, Homo sapiens
tccaccgcggtggccggccgcccgggcaggtacaatgctgtgatattggctcattgcaacctctgcctcctgggctcaagtgatccttccacctcagcctcctgagtagctgggaccacaggcacatgccaccatgcccagctaatttttttttttttggttggttgggggaaaaatagggtttcatcacttttcccaggcttgtcttgaactcctgagctcaagtaatctgcccaccttagcctcccaaagtattgggattacaggtgtgagccaacgcacccagcctaataaaatctttttaccactttaactatctggctctgattttctgtaacatccctccaattttaacatcttatcccccctccacgctttcagctgacaatggctctggttcacacataatggaaaagacagtacccatcagtgtagaacagggtctgcaaattatagttttaacaattggggaaaaattattttgcaacacatgaaaattcaaatttcaatgtctataaaatagtttttggaacacagctacatact

SEQ ID NO: 60090 - DNA, 290 bp, Homo sapiens
acagtgctatcactgatacctctcacctgccaccaggctctgccccttccctaccaataccttgcacaaattcattgtcctgaagcacagctttcttgctcaagaaccagtgttgatttttcatttcttattgaaacatacacaaattgtttacctgaaattgaaaatcttcatgctgtagttttgctttgcccattcacatttatttctctttgttactcattcccctctacgttactttagtgaaatcatcctgttttttagttgtctaacagcagattgagttcagt

SEQ ID NO: 60091 - DNA, 172 bp, Homo sapiens
acacagagacacgatccacagttgtgtaggaataacttcctaaacatctttaggatctacctctttttcctgttcccactgttatttctttgtttcaggcccttaacatctctaatatacactagtatttctgtcttcacactgttttttttctttacacagctcttttcat

SEQ ID NO: 60092 - DNA, 456 bp, Homo sapiens
accaccacgcccggctgatttgtattttagtagagacggagtttcaccatgttggccaggctggtcttgaactcctgacctcaaatgatccacctgccttggcctcccaaaatgcttggattacaggtgtgagccattgcacctggcctggtggcattgctcttaacaaatcataacactgtcacattttgtttataggatgggaccaagcacagttttcactccttttcatttacatgaactataatttgagattttctgtcataaacaggtcactgagtcagtatttattaatcacttgttacttataccatacactgggacagaagcaatgtgggatgcagagaggggagagaaagaaagagacagcgagagagagagaaagaaagaaagggaagaggagagaagagagagagagattggccctatcctcaagaagcttgccacctaattggt

SEQ ID NO: 60093 - DNA, 547 bp, Homo sapiens
acacatcaagtatctcctgcttctattaagaagcaatgctacttcaattaaggaataggtttatgtcaaaattttaatattaatatttctttttaaacctcaacttcaaactttctgtcattaacatgtcataagtttgagtcagaactagttattctgaatcaatttctactctgattttgggttataaagtctcttccacccacatagcctattataaattctggtatccagacacaaataaacccacttcaacttaactactttctttagtctgtaaattgacaatgaatcactaaaagttttttttttttattttagtctttgaaagttgcttgaaattgtctgaaaaataaaatgagtgtgactatgaatttcactaactcatcttattcactcttatttcaaatgaaatcaagcaccctcaggacaatatgtctgtaaacctattcattcttacttcacagcagggtaaaacgtaaaccattccaaacaggaaagagaatttcactgttttaaaatatgttcagtcaaagagttaaatgtc

SEQ ID NO: 60094 - DNA, 297 bp, Homo sapiens
acattcagaaaagattccaagcattaaagcttggactgatgagccaagtttgtttaaagtgtattccctcacaccacacacaaaatcaattccagatggattgcagatctaaatatgaaaggtaaataccgtgtagggagaaaaaaatatttcagactttgggatgagaaaaccgagggaagtatgttgtttcccagaagaatgcgtgaaaaaagttggatattttctcccttgaattatacagaacactccagtgaaatcatctgggcctagatgattgactgattcaagttatta

SEQ ID NO: 60095 - DNA, 479 bp, Homo sapiens
acaggaaacaagcaagagagaagtttctcacagtagtttctgttcctttcaatttcaaatatattactattaaaaattcaaatatcgcatgctaggaattggtttataggactaggcacattaatatcctgagctctaggaactaccttttggaatttgggcatccccctaaaatacggcctaccagttatgtaaaaaaaattttttttgaagtaggttatttccacaaatgactcatttgtcacctacattttttttttttacatgttaaaaaaaacttatccttcagctttgaggtcaaattttgctgttaccttatgtatggattttatttccctccctgtattttgtaaataaaatgttggtgacagttgcctaatctaacatcaaattgagctatgaagtatttgttataaatttattctagtagccaagctcatctaattaactctttctctgcatattcctaacaatgcatt

SEQ ID NO: 60096 - DNA, 299 bp, Homo sapiens
actgcgttctccagtcctatacctaaaagcaagtgaatacaaaacctgggtggaacagggaactagtattacacagaagttttactctttctgcctatctagaaagaaatactgacgaagagctaagacgtgggctgaccaaggcagcctcattcaaacgtgtatactacagtaaactccttttgcagcagggaagagagaatacaacatcagctaaaaacattttgataaagaacaatgatgtcgggggatggtggtgaagacctgccctccagatattaaaattctgaaatggcaat

SEQ ID NO: 60097 - DNA, 319 bp, Homo sapiens
tccccgcggtggcggccgaggtactttttatactgcagagctggattttcactcacctagactggctgtccacagtcatgctactaggcaattctaattgttgttctcatgtggaaccaatgaggatagaggcatcatgatagtgagtgccaggccaagtcacaaagcagcttggtagtctgcacacgaaaatgagaattcctattggtgtaaaatgttgctgcactgaaaggcactccatttctgagatgttctttatagacatcattgccgggacactacctttgtccttgaaaaagtgtttttttccaggagcacc

SEQ ID NO: 60098 - DNA, 602 bp, Homo sapiens
tccaccgcggtggctggccgaggtactctccagcatgaacctgcttcaggcattcacattacctgcctctctgagtttctgcaccctccacggattgaggctcttatgaaaatgacctgttctccccttttaaatttctagtgcttttcacttgggatcctttcaagatgactacttactctgtgagagatgacagaaaccacttgactacattttgtaaagatatacatgcgtaagacatatacgaaggccgacagttacaggcacacaaaattcgtccaagcttgtcaagcttagaagatgtatcattgtgtattggtaggaataaggaccaaggttaataaaataaaatatgatggggaaatgtgaagtcctaaatttacttaaatatgaatccataaattttattcacaaatacaaatccctaaataaaaaatcagttaggaaaatacaaaatggtaaagacctgatttggtagtatttttctaaaaacaaagttttcataagtgataagttcaatgtgtatcagtagagtgatatgactactttaaaaaagatgcaaaaacaggtgcattagtagaagtaaaatgtacctgcccggg

SEQ ID NO: 60099 - DNA, 288 bp, Homo sapiens
actgcattctccagtcctagacctaaaagcaagtgaatacaaaacctgggtggaacagggaactagtattacacagaagttttactctttctgcctagctagaaagaaatactgacgaagagctaagacgtgggctgaccaaggcagcctcattcaaacgtgtatactacagtaaactccttttgcagcagggaagagagaatacaacatcagctaaaaacattttgataaagaacaatgatgtcgggggatggtggtgaagacctgccctccagatattaaaattct

SEQ ID NO: 60100 - DNA, 278 bp, Homo sapiens
acttttccctgtgcttctccttgagtatgagaagatgatgttgcaggtagcatacaccaagtaggaactgcatgcctgtataaacatcagcttcgtggaaaacctgttttggtggctagggctgaaacaatgatttttattctccaagccttgtttccttttcctctatgcgattagctagattatattgcccatgctcacttaccattacatggggccacgtaactgggtccccagataaacgtgggcagaagtagtgttggctacattcagatctt

SEQ ID NO: 60101 - DNA, 315 bp, Homo sapiens
caccgcggtggcggcgcgggtactgtgcgaggattgatttaagaagcctacctaggggccagctcctcagaccctaggcagaatgaagacatctcctacaataagggagccagtaatctttgaactgaagccttgaattcttgtcgtgaggacgatcatgggagaggcagaaaatgttcttgaacagtcacaatgcaacatcacaaaaccaaagagagcagagtgagctataggagatagcaggacatcttatcttttcttgggatgatccagcctcttatctaagggaaaaagccaggggaagagctgagtgga

SEQ ID NO: 60102 - DNA, 296 bp, Homo sapiens
actctgccctctctctagacaaactctggtccaaaatcgttaaagctaacatttatccctgcccaactggaattgtcatgttatgacaaatggctctgtggtctcagatgcccagcagacccattagtggaattctatgtgccacagacctgggcaaaatgccagagccttatacacccatcacatttcgtctggcaaaggtcttcaacaaagagaagtaattacagcaatgaaaagcaacaggtccagcaacaccataagaacaaaataattaatttccctaaaatagaagaaac

SEQ ID NO: 60103 - DNA, 497 bp, Homo sapiens
acgcgggtgcattaaacatgttatataatatttttaattgaaattactggcaatttttgaataaatgtcatgaaataatgtgctttgctattggttaaaatatttttgggcagggtcagtggcttacacctgtaatcccaacactttggtaggctgaggtgggcagatcacttgaggtcaggagtttgagaccagcctggcaaacatggtgaaaccccatctctactaaaaatacaaaaattatctgagtgtggtggcatgtgcctgtaatcccagctactagggaggctgaggtgtgagaattgcttgaactaggcaagcagaggttgcagtgagccaagatcatgccattgcactccagcctgggaaacagagtaaggttctgccaaaaaaaaaaaaaaaattccttgccgggggggccgttttaaaattagggaaccccccggcctgaagaatttcaatttaagctttatcaatcccgtcaacctgaggggggg

SEQ ID NO: 60104 - DNA, 296 bp, Homo sapiens
acataatcaaatcatattttaaatgcattcagggagcttcttacttaaaagacatcttattcaaaatctttttaggaagtgaaaatgaggataattgttcccaaattaatcctttgtgtaaacctggattgccctatattgtgcttgcttagcatgtgagagatctgtagagttgacactcttacctattgttcagcccagatttctgcctccaatttgcagcagaggctgcaattggtagacatagatcctcacatccccacataaacctaatatggctaatttcaatgaacact

SEQ ID NO: 60105 - DNA, 119 bp, Homo sapiens
  misc_feature 4, 23, 25, 26, 27, 28, 29, 32, 33: n = A,T,C or G
gctnaaaaactgacatagcaggngnnnnnatnnaatatttcacacatagcaaaacctcacattctcttgagtgaggatagtgtctgaaatgacatcaatgaggtccttcaggaaaacag

SEQ ID NO: 60106 - DNA, 185 bp, Homo sapiens
ctaattactaactgaagggatgcatacatgaataaatgagtgacaagtaggagtgacctgtcttctctctttcttcacgatggggactagtgtgtgtatataaggggataatttttgtgtcacataaaatataaccttacttagaaggcaagacttgcaaaatggtggaataagaaccacccccc

SEQ ID NO: 60107 - DNA, 302 bp, Homo sapiens
accttcttttaaagagacacttgtaaactttgagactatatatactccatcaaagagaaaggaaatgatcctctaatttgaaatcaatctcctgaggtttatcctccatacgaaagtatttcataggagagatctgtctcacaaaaccaaatctatttcctgcacttgcaagtaaagtcagaagcctaaaaaatgatggagaggaatgaactctaacatgagttcttggccaagtggaaaacttctctggttcagaacttcctaaggcaccctgcagcagggattctgtagagctacaagga

SEQ ID NO: 60108 - DNA, 180 bp, Homo sapiens
  misc_feature 158: n = A,T,C or G
actgcttcacaaaagctcttccattctcaaagaagatggataaagtcccatttcatttcagctgtgtttccatgggacccctctcattcattagccttgggcttacactgagttctccacatgaaactgatgacttgtccagaacaactgcccagcanaagctaagactcattcaacttg

SEQ ID NO: 60109 - DNA, 303 bp, Homo sapiens
acatgttctcttctcggctcctcacaattgggcaaggtaggaagtatttgcagttgacctataaggaagctggctcacagaggctagggacagatgaacctcttcgataaaattaagagagaagtgaaaccttgaattgtaagtttcagaggctgcttaaaggggaccaggagaatggagtagagagcatagcctcagtgtaaaagccagagttctctagaaggaaaggctggcactgaagttttctaggaccttgtctgcttcagatatgcaaaggaagtgggggtgaatgaggaaacacca

SEQ ID NO: 60110 - DNA, 226 bp, Homo sapiens
actttgtgatggaactcccctgcctggagatggcaggattaaagttcctctttgtctgtctaccattgacaagagtgaaatcatggcacagaaagagttgggaagactcagatttgagctgcagagacatgtgacttttcgagcaagttactgaacctgtctgagaatcattatctctgtgtgagcacgagagtttttgtgaaagtagaaacgctgtgtattaagt

SEQ ID NO: 60111 - DNA, 405 bp, Homo sapiens
acttttttttttttttttttagggcgtacctttcctaaaagtttaccttgggaaaccttgtaccatcttaaaacactttaaaggggttgacagctttgggcaaattgcctaatccaaaaaactaaccttgggtccatgtttccaaggtcaaaagaaaaaaggggaaaataaaaaacctaaaaaggaaaggggattccatggccttccccttttaaccttttataataaatggaccaaattggatttttggggaaaaccccctcagccaaagggacaaaggctgggtggccattaagcctttagggcctaaggggagttaatgaaacctgcaaagggccatcaagtctgggggcttcatggaaaaccaccccttttacagggagggtgtaacctaaggggttttgg

SEQ ID NO: 60112 - DNA, 292 bp, Homo sapiens
acaattattaccccattttataactgagacagagaaaagctcagtagcattgctgttgagtggtaggtagagcttgaatttgttgcaagctggctgactccaaggccaaaagatcatggggaatatgtatattgtttccaagaagacaaagtttccaagagcatcctacaaggtgctgttcattcttgccccaaattctccagatgtcatgagatatagaagagaaacatctttcgatgttgttctagtcagaggagacttctaataggcagagaacaagttatggaagctg

SEQ ID NO: 60113 - DNA, 487 bp, Homo sapiens
tccaccgcggtggcggcgcgaggtacgaattgcccactatgcacttcaaagcttaattggaaattctgtccaaaaaaataatctccttgtggaaaaccagcatggaatacattttaatcactttgctaaatatgaactactttagtctcacttcaaaagatacgtttcaaaggagaagcagtttcattaatgaatctctgaaataatacgtgaacatcttaagagccaatttaggtatgaacagggttatgatttttaagctttataaaatgtagtccttgatagttcactctagtcggagagtttcaccataacatcacttttatatatttgtagtataaaagccatattgtaaatatagaactacacagtttaatcaatcttacaatggatttgttttcttttagtttaggataaaagatctcctagcataaaatgaccacgtgatgcagaaagttttattttgagagattcttctctatcacta

SEQ ID NO: 60114 - DNA, 180 bp, Homo sapiens
tccaccgcggtggcgctcaaacctaattttctagaggacagcacaattctcattgatttggggagatgtattcacatcgtcttgctttgcagaccagctttcccagacgccatgcaaaaacagtctctaaacaccagtgagaagggtgaaagctctctcttaaaaaaaaaaaaaaaagtc

SEQ ID NO: 60115 - DNA, 326 bp, Homo sapiens
actgttgcttgttttcccacctttggccatagaaacttagttctaacatgctacaatttttgcagttctttctcttagaaaaagaccacattgtctgaaatttcatccatttaagtaatcaagccttaaagttgaaggatcttggtcatgattaatctagacctacaaagtagtatcttaatggcactccttttagaaagttaggttccaggacacacatagctgcagtgtccacattttgtaagctccttcgttgtcacagccactctcttctctgtggctgatattctaaaactgggcacacatcctgatggtaaaagcttggt

SEQ ID NO: 60116 - DNA, 287 bp, Homo sapiens
actaaggcagaaataaagatgagtgtgtcagagtccctaccctgggtaggtcatgtccactgagtatttgttattgttcaattataacatgctatgcacaaggcattccttgttatgtatcttagaactcacctcttgtttgtgggtatacagagttgaagatctaaccccttccatttctattaagggtcccaccttttctttaatctggctcataagttagttactttgtgcatatactttgtagttgtgtgttttgaagccatgtctgtgccccatcctttcca

SEQ ID NO: 60117 - DNA, 465 bp, Homo sapiens
  misc_feature 400, 404: n = A,T,C or G
tccaccgcggctggcggcgcgaggtactgaatactcaatgtggaaaataattcatctctaaatgacaattccttttagcttttcatctgttccctcttttcctactcgtttttgtcatttacccaatgtggtagctccctggaacagtctgggatcaggactctagaggcaatggcgagagccctgagtcaatacgtagtatagaaaccatgcagagaggggtggaataagcctttcaacccctctcactgcacttcttaaaacgatcagttcccttggggcttttgcatagcatccttagggcagaattttgttcctgcaaacccttcctgctccactaagtattttagaaggcttacccattcctttttacatgaaaagtgccaagaaagaaaagaanaaanacacacagcccttttactgccatgatctggttccttgagctgcttctagaacacctcagta

SEQ ID NO: 60118 - DNA, 161 bp, Homo sapiens
actgggtagaggcaggaggagtgttcctgtcactcctcaaacatcactggcccacgtgacctgcacgggtagtttaacctttctggattcaagctttgtcaaccataaaatggaaaagttggactagaacatcactcatgtccattccaggtttaaagttc

SEQ ID NO: 60119 - DNA, 309 bp, Homo sapiens
accttagcattgcggtgacttataataggtgctcagtcaatgtttgtttccattcttcttggacatatatgagaagggccatataagattattaactatttatttatttatttttttgagtagtgaaactctaaagactcacagtctgaggactcatggagttgttcacatccatgaacaacaatgttatgaatcttttagttataaagcaaacctttctctggagcatgtttgtgttttctcatttaggtttataaattgctctgagactagcaggattgctgtttaagagtcttgtgaggtaggctg

SEQ ID NO: 60120 - DNA, 302 bp, Homo sapiens
actaccccagagagtagggagggctcccaggccatggagaatccccttccccaaacaagagagtccatttcacctctggctgtgatagaggctcagagaggaggcaagggcaagggaataagttgttctcaaggcggttgcatgctttttcagccctcgctgtggatggaacagaatgtggggatggcggagggagaacacgttggagaggagtggaaactgaggcctgggtcctcgtttctctgcagtctgggcttgccactttctactaatgttatcaccatcaccctaacctttattga

SEQ ID NO: 60121 - DNA, 311 bp, Homo sapiens
tccccgcggtggcggccgaggtaccttgatggaggtaaaataaacaggtttttcagacagaaactgccagaatgtgttgcctacaaacttgcactaaaaatataaagcaattaaaattctagagctgtgctatataaaaaccttgtaagttatcaatgcttagaacaacacaaaatctgaacatactaaaaatcaatgactttctttatcagataattgaaatcacagggcaaaccaccaccttaaaattaggaaagagatgtgaatacagaggcgcacctgagatctgcttacctagagctgttggagcc

SEQ ID NO: 60122 - DNA, 261 bp, Homo sapiens
ccgcggtggcggcgcgcccgggcaggtacgcgggcagggtgaatgagtatgatattccagggatccctgccataactgccctgccaaacaagatcccagcgactatgcctttaacccagttcaagtcctttgaccacggattcttgatatcttgctagatctttcctaagatttaactatccctacaagacaaatatacccaaatgggaaaaccaggctcaaattccaaaattgtataatagttctttgtgcactacaaaa

SEQ ID NO: 60123 - DNA, 295 bp, Homo sapiens
acacatataactttatttaatctccttgaaaatgtgggtatattgtctagttcatgaataaagaagttataacctcagagagatatttcatcttgatcatgattacataaccaattaaatagtagaagtagaatttgaactcagctcttccatggctgaaggccatgttcttaacactatacacaaaattagattagtataagtgtttcaactagtgtctatcagtgtgaaattcacatcagcaggctcaagggagctggcaatggggttttcatgctgacagttatatctggag

SEQ ID NO: 60124 - DNA, 215 bp, Homo sapiens
acgcgggtgggctcaagtcatcctcccatctcagcctcctgagtaggtgggactacaggtgcccacttttgtgtctttaaacaacatacaaggggctttttataggacttcccttgaagatactaggtccagttttagtggcccagaatggctttgtccttggcttacccagtccattaaatggtcagcagagagtaatataagtgtttgtaagt

SEQ ID NO: 60125 - DNA, 238 bp, Homo sapiens
  misc_feature 14: n = A,T,C or G
acaacccatctgtngaatcaaggggaacccaaaggcagatggggttggaatgagggtgaaacagagagaagggaatgggagggttggggggaggcactggggtaactctcaggccgagaattgggcagcaagggctcaaggcttctgcaagaaacaggtaaaaggggagctcatttgaaagcaaggttgagttcaaatgctttgaatagtttatgtcaaaggcaagggtggggggttc

SEQ ID NO: 60126 - DNA, 340 bp, Homo sapiens
acaggaacttgataatcattgttgttgtctttatcattaccatcatctccattagcatcatcagcatcacagttgcagtatggggatcacattaagtgatgcggcaagatcaggaaaaccattatcaagacaatgtccagtttggatgtgtaaatattatcctgtgcttcttggcccatttagcaaacactttcttttcagtgataaacctatgacccccatatggggcatgttcatgaagaaaatattcatcacactcatctcttccttgttcataataatggtaggggacttttctatacccttctgtcttgcagtaggtgtcatttatcatccccgt

SEQ ID NO: 60127 - DNA, 566 bp, Homo sapiens
accagcttttgcactttcctcactgtaaagatgttgtatgggttacttaaccagttggggtttaatttccttggctgtatagtggacttagtgtcacatgcctacctcacgatttctgtgacaattaaatatgatgttttaaggcttctaacttactggatctaaataaattattcctggaaaaaaaaagtttgctgtgtaataaagcacctaaacaggaatgaaaaagcaggtatagaacttcaggtgttttgtcaccctccctcccccagtggtgtgtgtaggaaaactttgcttctttctgtaaatctgatgtctaatctcttctgactttacgttcaatcagttgattattttcattcagcagatgtgatcggtttgcagggttctcagtcaagtaggatagagaaaacatgaagatacacaactaaataaaatgctatatataaaatgatgttttatgcaataattatagctatgctatgttaattcagcaattattgctgctttggggaaatgagaaggctttgaggaggaggtagtatttcaaaatgatgaggtttgaa

SEQ ID NO: 60128 - DNA, 365 bp, Homo sapiens
acatatgctaaaatgttttatttatcttctctattttctaccaaaatttctattataaaatttaatattcatttaaaaaaatttcatgcatgttatctaggtcttgttccctttcactaataagaaacatcccaaaaccccctcagaaatgactttcagtaagtaactgatggattgaggcacttggctatagccatcaattctctctctgtgtctctttttttttggaaacaaggtctcattctgtcacccaggctgaagtgcaatggcgcgatcttgactcactgcaatctccacctcctaggttcaagggattctgctacctcagcctcccgagtagctgggactacaggcacgtacctgcc

SEQ ID NO: 60129 - DNA, 231 bp, Homo sapiens
  misc_feature 10: n = A,T,C or G
actccagggnaagccaaaaaattggacactgctgcatctaaactctttttcaaacattgtgacatatgttaaactcaaattgtttttaaagttgtgtgagcacaatgttgttttaaagtatttgacattgcatcattttttatttatttattaagcacacattatttgctgtaatacaatgctaggagctgcaaataccagtgcaaaaaagatcagctctccataccagtg

SEQ ID NO: 60130 - DNA, 461 bp, Homo sapiens
tcctggcttggacttgaaggagaaatgagagagcaactatccgcagtagaaggctgagcatttcaaatccctgtgaaacctagggttttgaaaacagtatgtttcggcaacagcaagtggttcagtgtgattggagccttaaggggacagtggaagatgaggctgagcatttagggaggtgccagattaccccaaaggcagtgttctcaatactaaactaatgttcttccaccataaatgagctccccctggcaacttctcatttctatcaatggaactttcgttcttcatatgtccaaaccctgaagtgccatcttcaggtctgcctcagcatttgtgatcagtgctcaagttttgtatcatttctatattcaaaacattcttctgtgcatcctattctgtttccactatctacacactacttatcacctaattagtagataatttcaaaactgtaaata

SEQ ID NO: 60131 - DNA, 339 bp, Homo sapiens
acttttttttttcttttaaggcgtaccattactaaaatatagctttggaaaccttgtaccatcttaaaaacttttaaagggttgacagctattggcaaattgactaatacaaaaaactaaactttggttcatgtattcaatgtctaaatgaaaaatgggaaaataaaaaacctaaaaatgaaatgtgatttcatgtgcttctcctttttagctcttataataaattgaacaaatttgatatttgtggtaaatccactcaggcaaagtgacaaaggcttggttgtcatttaccctttagggtcttagtggagttaatgaaaactgcaaatggtcatcaag

SEQ ID NO: 60132 - DNA, 445 bp, Homo sapiens
  misc_feature 16: n = A,T,C or G
tccaccgcggtggcgngaggggaaggcaagaggagggtttaattaggatcctctgaatgcagggctgggcagggaatattgttgctcaagtctaagggcagtatggtttagaagtaaattctatgggagtataagaattttaaggaatagtctttctaccagactatttcactgattgtgtttctacaacaatcatctttccttagctactctgcttcagtagctattttataggaatgctactcatgttcctgccttttcttgctttgaaactcactctgaatctctaacaagtccaaggtcttgaggtgcttgttcattgttctgtgcatctcactctagctgttggataaaagaaaatattacctaaaccgtattcactgtggttgctgttagtgtgtggatttaaataactcttccagctactattaaacataccccgcgt

SEQ ID NO: 60133 - DNA, 291 bp, Homo sapiens
acgcgggtattataattgatgctttttaaaatgcaataggcatatggatattaaggtttctgcttcagttatttttcttgggaaaataacacctattgatttaagatccttagtcccagattctaaattgattttcttatttcattgtcaacataattggggatttgtctttcaacaaaagaaaagcaaagcatagtcgtcatcttggtagacatttatgtatataggaaggtcataggtgatttctgaggaagtttggtgattaaagaaagagataccctgtagtcccag

SEQ ID NO: 60134 - DNA, 541 bp, Homo sapiens
ccaccgcggtggcggccgacgtaccccagaactaattgggagtggatccagccttagaattcaaacctcacgctttccagcccagtcatgtttccatagaagatacttccaacattaatcataacttggctttgaagagaatatctggccctgcatttgaattacactcaggcagacaaaaattctgaattataaccaacactttagattgccagctgggtaagattcaccaagacgcccaattgccatttatatggtaagagatgtaaaagaggccaagaaggctcaaaaatgcttactttcgtcattatcaatgggttggcatagctcacaagtggccaattctattctctagcagaattaaactttgcaggttcactgggtaatacaattgttttctaatttggtttgataaacaaaatacaaagtaaatgatataaaactattttaaaagagtatcccatgaaattcaatgtagctaatctaatccaagctgctgtctgccctcagtgagcagtttgtagtgttcatgattggatga

SEQ ID NO: 60135 - DNA, 289 bp, Homo sapiens
acgcgggtttcatgacatatcatgaatatggatattattattttttttttgtatttcaccctattcagtattactttgatctcaaattatcccattttaggccaggggggagcatctttaaataggcttgtttttttaaattgactgtgttattattctttgataaaaaggaaacttccttgctttctggcacagtttttttccaggtttctattccaaagtaggaactaggcatttcttcaatgagccttggcccttctttttccccccttaaaaaataggttcttgc

SEQ ID NO: 60136 - DNA, 296 bp, Homo sapiens
acatacttcagaggctagttggcaggagtcactaagttaatccatgcacagtgttcagcccagtgcctggcacacagtgggtgctcaaacaacagcttctctccctgcatgttggtcattagggtcacaggctctgaagtcaggctcctagggtaatatcctgtccctatcactttcaattgtaggaagatgggcacattacatacccccataagctttaattttcttactataaaacagagataataattgtatctaccttatgggttattgcaagcagcacatacagtcaccca

SEQ ID NO: 60137 - DNA, 431 bp, Homo sapiens
acctttaaagaaaagagaaatatcccaacttttctgctaccattactaacctaagtaaaacaattgccttttaaagttactcctaagaatgttgtgccaaaactttgaggtttcttgtcaattatttggctggcatttattctcccctcctgaagccgtaaagaatggcttcagcttgtatctagtctgttttaccagcttacaggagagtgccttctggcacaaatagtttctgcctcagtgcctccctactcctaaccaggtcatgacctgacccagaaggacccataggatatctagtgcatgaacttcctgaggaaatcaagttggcacaccaggatgcacaaatctgaactgaggcatcatgccttgggctcacaagtgaactgcatgggtcagaggctttgggactaaaatatctcattacatgt

SEQ ID NO: 60138 - DNA, 549 bp, Homo sapiens
acagagactgaggaatgtgagtttatgctcaagtcattaacaagacagaattcttaggctgttctgtgtgatgacttcagattttaaaacaaattataagatgtataagcgcaacaagggccacatacttgttgtttgaccaacaaaacttagtattttggtgaaattagttctgtgttgagtttctgttatttcttatttcaaacccagtttttaagattatttcatgttcatggaatgggatcaaatttggcataacacataaaatagcaatgcagcctcacttagtggtaacacttttgggtctagtgggctgatctttcctggtgtccacatttctgctactcacatctggagttacgttaaaacatgcactccgccgggtgcagtggctcacgcctgtgatcccaacactttgggaggccaaggtgggtggatctcttgaggtcaggagtttgagactagcctggccaacatgggtgaaaccccgtctctactaaaaatacaaaaattagttgggggtggtggtacctgcccgggcggccgctc

SEQ ID NO: 60139 - DNA, 302 bp, Homo sapiens
acttaatgctattgaactatatacttaaaaatggctaatatggtaaatttaatgctatataatgttttaccacaataaagaaaaacctatggtctaatattagaaagaaattgtgtaatgaagtaaaccatctcaagaaagcagctgcatgcctattgtggaaatgacaagcacaggcacatgttatctcacttgagggtaagatactctgcaacctctaacttagtgaacagattgcgcctgattcacagaccgagacaaattcttcctttaactcaatagcaaactcaaatgcctccctc

SEQ ID NO: 60140 - DNA, 295 bp, Homo sapiens
tgtacagctgttcgctttctttctcttcccttttaagatggcaaaggtcacaatcagtagtaaaccggccacgtgatttttatatgtcaaaagcaaggagataactgaggtaaagggtactgggagagacagctgatttttttcaattgtactttctcctggccacttatcgggaaactatttagggcttccatggtatttgaagctataacttaataacttctttgccaaaaaacattctgtttacatggaactagggttagaagtgatataagcacatttagaaagggacaaa

SEQ ID NO: 60141 - DNA, 309 bp, Homo sapiens
actaaataagaaaaaagcgggaaggagacagatggcttattggtggagtagcctttaaattttagaggaaagccttttgaagagaatagatgtgagagggagctgagtgactgtttggaggaagagaatttcggatgggggaagaagtgaaaaagtcccaaggcaggagggtgcctggtatttataggaggagcctaatgtgtctggaatagagtggacaacctggacagcagttagagaggaggtctgggaggtaatgagtgtgaatgtgaggggcagagcttgtgggtcctggtaagtccatactga

SEQ ID NO: 60142 - DNA, 294 bp, Homo sapiens
acttacaaattgtgactaagattacatcctgttcctcaggggttacccatatatggcaattacctgggtcattataggtgagcgaacctaagtcataaagcataatgttctgtttcctccactgttgaactttcccatctttaatttggaatttttttctgttctgattttctgtatttttttaaatcataattcctttcttgattgcctggtttttagtttcattatgagttaaaaactccacatttaaagttttctacaaatgtctagtcgattcagtatcctgggtccata

SEQ ID NO: 60143 - DNA, 468 bp, Homo sapiens
actttaggctgagaaataaatagaaggtgagaaaaaaagaacagtctttatagtcagtaagagtgaaaagagaaagatggtagttggggaaagacagatggggagaaaggttggctggttgttaataaaacagtagaggatgagcatgtattataaatgctggtgggaagaaaccttgtggcaaggagggtggtagtgttggagaagaaggagaggatatagtagaaagttaaagaggaactggaagcaggtgggatccaggacataggaaggggaagagccttgggtagaggtgagacatctgcaggagggaaggaactgagagaagggaaggtgtgcaaatgtggcaggaggagtttgagtaaggttccatctgatatcctctattttctctgtaaatcattctgaatgaagtatgagacaaagagatcaaaggcttgagaaaaaagaaaatttgaaaaaaaaagt

SEQ ID NO: 60144 - DNA, 189 bp, Homo sapiens
  misc_feature 137: n = A,T,C or G
acctaaatacttttttgtggggtcccagtctctgttatatgcagatctccacctcccaccccaagtaaaacaaaatatatcagatttttcaataattcattcctatgcaaaccagtcattgtcttgacaattgattntgacttcaacaatggtatatatataaagagagagagagagcagaaagcaatg

SEQ ID NO: 60145 - DNA, 303 bp, Homo sapiens
acccctactgactcactttatgaacctcactgaatccccaactccatgcttgcaaaatgaagaaaacacgacgtaagtattaaattgttggaagtattaaatgagacgtgtgtgtgaaatgtttggcagagttgctgcacgtgtaagttgcacattgactatctccacaatttaaatggtatgccttggagttgtgccatgtgaaacctgcacaaccatacacagcagcccttttttttttttctttcaacagttctttctttaaaactttcacttgctttgtttccaacccctgttttcaat

SEQ ID NO: 60146 - DNA, 532 bp, Homo sapiens
acacatccctgacctccagagcagacttagctgtcccttcctggcaccctctcggaaacactctcttctcttggcctctgtgattcttctatctccctaaccagtttttgtctctcttttgggacttctcttctaccagctctgaaagaaagttctgtccttgcttcaggtttctatcttcggcctgttgtccttcaacacactccccataagggaccccattctctccaagccttcgttcatcacccagatgctaatgagccctaacctttatcctgtcttctgtgaactctggatccgtttccagtgtcctacaggatttctccacctgaatgtcctcatgacacttccatctcaggatatacaacttgaactcattacttatacctgccacaccaaaccctttcccagtttcagttgatcccctttcccagtttcagttgaaagcgttacccagacacctcagtcatcctcaacaattccttctgcctcaccctccacagacaattggtcaccatggcctgatgcatgt

SEQ ID NO: 60147 - DNA, 281 bp, Homo sapiens
accttttgctcctaggtggtgctgtgtgcttcctgttgtgtggcactgggaggccctcagtggtcgtcccatgtttagtgaaaagtaggtgcaggtggtgacggcggatctttccatcataaacttgtccatcatgaaagcagtggcgcccccactctctggatggagaagactggagagaagtcagggaattaaaagccccaacttgcaccttgcctttcaagttcctatttgacatccacagggaaaaataaactacacagttggatctgagtctggaa

SEQ ID NO: 60148 - DNA, 415 bp, Homo sapiens
acagtgctatcactgatacctctcacctgccaccaggctctgccccttccctaccaataccttgcacaaattcattgtcctgaagcacagctttcttgctcaagaaccagtgttgatttttcatttcttattgaaacatacacaaattgtttacctgaaattgaaaatcttcatgctgtagttttgctttgcccattcacatttatttctctttgttactcattcccctctacgttactttagtgaaatcatcctgttttttagttgtctaacagcagattgagttcagttaccaatttttaaattcagttctaattccatttcacattgtagttgttttgactagtttttttctactctattaaaagctctagttgttctctgctctcctcacttatctgactctgaaatcttc

SEQ ID NO: 60149 - DNA, 275 bp, Homo sapiens
acgcgggtatatataaattaagaattctgacagtttaaacattcaaaaagttttccaaacaactagtaaagaaccacccaaaacattttaatagcattttatcatttgtttaatgttggtatgctctaagtctctaaatatattaagttgctttatttttctgtaataaaacattctgctttaccatcacaaatattgccctgaaaatttgttttcatgaataaaactatgaatagtcttgttataatgggaatgatgagaaacaatttattttt

SEQ ID NO: 60150 - DNA, 294 bp, Homo sapiens
acccactccctcaattttctctaaagatctcatttcagacatttaaatgaatattatgctacacaacagggaaactcagatgtccatcccctccttattcattcaaacatttccactgccataatatggcagctgcaacgccaagaaagaagaaaggaaaaaagactaaaagaggtgaagaatgaaaaagacctcaaagaaattttttttttaaaaggctgggtcttactctgtcacctagggtggagtccagtggtaggatcatagttcattgtaaccttgaactcttgggct

SEQ ID NO: 60151 - DNA, 430 bp, Homo sapiens
actatataaaaatatcaaaacacagctcccttttgttcattatattgccatttagtttttttctcatttttttgctatttcaacaaaaagctgctatgaatgtgtatgtgtgtatatatatattaaatgtgtatatatatgaatgtatatatatatatacacatttatatgtcagagtttctctaggatataaacccaggaacaaaatttaaaaatcatagggtgtattggatcttacatcactgcagaccctctcagcattaccccttgttccagtcagagccttggttactatttttatgtagactttggtcagtttcataaagatggaagtgatagtatgtggcttcagaccagagcaagaattcactttctgctgtgggatttctcacacaatgttgtgtggattgttgtaggcattttgcttggt

SEQ ID NO: 60152 - DNA, 186 bp, Homo sapiens
  misc_feature 155: n = A,T,C or G
accttctgatttttaaaaataattaacatatcttatgcaactaaaaatatactgtcaaacctatttaaaacatcttattctacccagcctgcccagcttttgatgtaattggggaagaaggttcagtaacagatgattttaacataacaggttgngctatgattgatatgttaattgagtgctctt

SEQ ID NO: 60153 - DNA, 501 bp, Homo sapiens
acaattctattccatgcctgacagctgattctcataagacctctggcatgccaaacatgatccatgacagctgatcttagctaacagcaatcactgcagacaaacaattctttttgaccagttatctgaaataagcaggaatgaatcattttatatttgatttgactatgtatagaaatagtctttcattagttccacatctgggatgatcaggaaaatgttcactttgtaaattggcatgttacttacgaaatacagaaaaaacaattcgatgatttacatttcaatatcagcattcaggttttttttcatcccttgccagtagccattgtttaggcaaagggaattttggctaacattcaggattccaggtcaaaaagcttaagagtcttattcaataacttggaggtagcccaggagtctgtgttttattgagcaccttaagggattagaaagcagggcagctgcaaactatatttttagatacattttctaatctct

SEQ ID NO: 60154 - DNA, 313 bp, Homo sapiens
acaaatactacattttaaaagctcattagtggaggaggcagtcaatgagcttgtaaatatgttgctggatgtggaagttttatctgaagaagaaggtgaaaaaatatccaatgagaatagtgttaattacaaaaatgaaagttcagcaaaaagagaagaaggaaattttgacaccttgacatcatctattaatgccagggccaatgccctgcttttgacgacagtcacgaggaaaaagaaagaaactgagatgttaggggaagaagcccgcgagttactctctcatttcaaccatcagaacatggatgctctt

SEQ ID NO: 60155 - DNA, 315 bp, Homo sapiens
acttgggaagtcttgcttgttttaaatgcccaccttggctgactgggcattcagatgtgtttgtctctcaccatggagactgagcaatggctcctctccttgcttctaacatgaaccttagggttccaggatatcccaaaccttttatttcacaggccctgtttaaacacaagagacactaagttaagcaactcttttctagtagcaaatgagttttaaagtatgaatgtataagtctcttatatatcacattattctggtgaaaataattatggacttccttctttgcccatcatgtaaaggaaagaaaaccct

SEQ ID NO: 60156 - DNA, 448 bp, Homo sapiens
actgcagcctggacaacagggtgagactccatctcaaaaaaaaaaaaaaaaggaaaaaaaaaggatgattttttttcccctttgtgaaatttacctttggggtaaaaaccatttcctgtttgccaaaatttcatgacctaacctttccaaatacccgaattccccaggggtttgttccctacctacccccccctgccattttgtttaaagaaaatttctcaccgggctagaaaatttggagtccaaaaggggtttttattaaatccggccttggcccagccaaaaaaaaaaagggctttatggaaaaagcctttaggggtagtttttcccggggggttcctctggggaaatatagttaacccactgtttcctacccacccccctcccttttttccggcctggcccctcctccctgccaacccaggggttttgggttttcttaaaaggg

SEQ ID NO: 60157 - DNA, 330 bp, Homo sapiens
  misc_feature 270, 272, 288: n = A,T,C or G
acttcatttaagagtcctggcttccagaaatcctttttttcatgtcttatcttctaattatgctttgtagtccagttaaattacatctcttgacattttggaatgttcccatctttacacctgtcttcaaattgtttattccacatggaatattcttttccccttatctccaattagagtatatggagtttggggaagaatcatgtcgttcactgtggcaggagggacagagtgagaaggtggacaggagccagataattggagagactntntacataatgctaattntaggagtttgcaattaacactgtggatttgatgaaaacagtg

SEQ ID NO: 60158 - DNA, 306 bp, Homo sapiens
acaatttaataaaagcctggaacaacaacagccattgctcatcccttttctccttctccatctgatcaaattttcagttatttaggttaaaatgaggtaacattggtgtggaaaaatagagaccttatgctatacgaatgaggtccaacctcagtttagcctcacatggtagtagtgctgtatggaaataatttatgctacataagcttgtcgcaagctttctgcaagctgatttattgctcagcacatgccttgcatccaattccccagatttctctcctcttaggaaaaaagaaaaaaacaaat

SEQ ID NO: 60159 - DNA, 284 bp, Homo sapiens
aaaacacaggccagcatatatgttgtcgctaaagctgtgccagccttctgcaaagggtagtgtttaaaaattccagaaaactgagacccaatttgcatagaattttgcatgcatgttagctagtgaggagaaatgaaaaataagtatttggaactggcacaaagttcagtgaacttttccctcgaaattatcagcatgcttctattatacacagaacaatagaaaagtcctcattaaactaatagaaacagatcatattcccactacttgcattccaagctcat

SEQ ID NO: 60160 - DNA, 270 bp, Homo sapiens
  misc_feature 17: n = A,T,C or G
actgtgcattcacacantctcatgggaagaagttaattccatgaaatgagtccctaccatccaggtgctcccatggcttagacgtgggattggggtcctggaagacagttattaaatggccagccctactcgtctttgcaagagttgcattttcggttattgagattttggcatgctaaaatatttggattttcgttaatttcacagcagcttaattttgtagcagcagggaccttctttgtcggagccagcattctcctttatgaggct

SEQ ID NO: 60161 - DNA, 280 bp, Homo sapiens
acgcgggtcccgctctttaagtattcatttaatgaaggagacacatgtaagcaagaagaggtaacatgtccaatgtcacggggttggacagtctaggtaataaaagaagtgtcttatgtttggaatattgggtatgtatgaaattgaatatcaggaaaagaagctgaggtgctacattaaaatacgattgtgcctttttaagtttattctctatgggtttggaatgtgtttctttttttaatatatagatgttctgatcaagatatattcaaatggcagt

SEQ ID NO: 60162 - DNA, 313 bp, Homo sapiens
acatgcatcaggccatggtgaccaattgtctgtggagggtgaggcagaaggaattgttgaggatgactgaggtgtctgggtaacgctttcaactgaaactgggaaaggggatcaactgaaactgggaaagggtttggtgtggcaggtataagtaatgagttcaagttgtatattctgagatggaagtgtcatgaggacattcaggtggagaaatcctgtaggacactggaaacggatccagagttcacagaagacaggataaaggttagggctcattagcatctgggtgatgaacgaaggcttggagagaatg

SEQ ID NO: 60163 - DNA, 303 bp, Homo sapiens
acttcactactcactactgaacagcaaagagacttaacaagttccctcgataggtcacctctctatttaaccaagctccccatcaacctgatgggttttccactaagtgaccaacctttttaaaataaaatctttcctaacatatacatcagatcatgtcacatcaggataggctgagctacctatggggtagatactgctgttccattttctgggtaaagaaacttgctcccaggttacacacctagcaagtggtgcaaccaagatagtcttaccataagatccagcagtcatactcttaag

SEQ ID NO: 60164 - DNA, 216 bp, Homo sapiens
accttctgatttttaaaaataattaacatatcttatgcaactaaaaatatactgtcaaacctatttaaaacatcttattctacccagcctgcccagcttttgatgtaattggggaagaaggttcagtaacagatgattttaacataacaggttgggctatgattgatatgttaattgagtgctcttcagagaaagggtgatccataaattcaatct

SEQ ID NO: 60165 - DNA, 287 bp, Homo sapiens
actgtaaacttctccccctcctggatctttgctcactaaatcagccctaaccctttctcttcagtctctttctcttgactttcccctagatcttgcccctagaccatcactcagctggttcctcttcattgcctccatcttagttcaaatgtttcttctttggacagtttggagttttgctccccctcttccctgccattctatagtaggttttttttttcttaaaatagtgcatatcatctgggtgcggtggctcatgcctataatcccagcactttgggaggctg

SEQ ID NO: 60166 - DNA, 544 bp, Homo sapiens
acaatcaaataagatcttcagagaatatacaaaagatggacctacaaagcataaatgtaactggtgtttaaattgccactgcagtattctgacctcttgacaagaaggatgtgtaaaaaggggcattgacattttctggatgatggctttgcagagaagtgcctttttagagttattcctgggaaattatactttgaacttatgccccgactagctggatcatgcatgatatatttgccctcagcccagaatccctttctcctcccataaccatcttaagcctctacataccaggcaaaatcttattcatatttcaaaactcaactcaggtgtcatttttgtaattctttgtccctccacctttacctgcaccccccaaaaaataaatcagttctcaaaactatttctattacatacccatgttcctgtcattgtatttattacctgtattctaatttatttgtttacatgcctgtcttcttttgacttagttactttatggactggactttaataagttctctatcccaagtttccagcccag

SEQ ID NO: 60167 - DNA, 260 bp, Homo sapiens
acaagggaaaggttctgggaaacacagtttctgatcttagaagatacaggtggtgataatgccaagttggcaatgaccaatccagcacttaatgaaactcataaaacaggtttttatttggggaggtgggtgggggaagtacaattaaagttatatatttatggtcttatttttatttctattccaattatacctaaatgaccatgtaaaatgtttctgtgaaaaaaaatgataaacacctattttctgagcctgtgttc

SEQ ID NO: 60168 - DNA, 309 bp, Homo sapiens
  misc_feature 287: n = A,T,C or G
acgcgggcaaaacatctttgtgtattgctatttgtaatatgtgggatcttctcagtcttcggctccagagtaaagatttctctttcccaggtgtgagggcaggactggtcaaccatatcatgcagattatccagaaaatgactcagttgtcaggggtccactgacttactctgacctttggacactccacttaacacctcaggaatgttttctcctttctgtataatcattttagcaatgaaaaagaatctctacctctatcatgagaacatatacaaggtcagttntaataccttgagattgcttcat

SEQ ID NO: 60169 - DNA, 169 bp, Homo sapiens
  misc_feature 133: n = A,T,C or G
acaacatattaactaaaatgaatagctctatgtgaactgatacaagctgtgtctccaggacatattttaaatgttacttatttaatccacacaaactatacaatttcacattcaatataaaaatacatagcanaatgactgaaaggaaatacaaactattaacagcagc

SEQ ID NO: 60170 - DNA, 554 bp, Homo sapiens
ctccccgcggtggcggcgcgagtacttccctgcacacagtttctcctaagctgaataactaaaatataagtaaccagttatggtgggatgtatttcttagaaaaagaagtatccccttaaactaaatgctagatttttctcattttactcccataaaagtagctataatcaaattagaattatatgaatatattaatacttatacctcttagaacataataaaatcctggaccccttcaccttcaaaatactgagctgcagcccattagaaaaaaatctaccagacaaaaaggcaaaatgaactcagatacataagctgaaaaaacaaacaactaggttattattcttagccaatttggaggcaaaatagagagagaaaagccagccagtcctacagcagaacaaggctactgagtttactgagacactaaagttttgtaagtcatatatctaggaaaggcaagtaacaagacaggtggccagaagagaaataaggggtgatatgctgcactgccaagcactcaaggaggaaaatcttaccttgctccttccct

SEQ ID NO: 60171 - DNA, 246 bp, Homo sapiens
  misc_feature 207: n = A,T,C or G
acgcgggtatatcatattttacgtaaccattttcttcttgatgaacatttgagttattttcaagttttcaataccacaatgtttgtgtttcagtatttttgtagatatacaaagctagaagtatcagtgggtcactgatatgcatattgacagtgcaggctttacttatctatactcctgcagacaaaatatatgacagtgcttcanactcttgccgacagtgtttattttcaactttaaaaactt

SEQ ID NO: 60172 - DNA, 202 bp, Homo sapiens
acactgtgtctggtgaagtaagttggtggtgtgcactaacccttttggaatagtttatcaaggatttaatgtttgtatcttttaattccacatacatatatatcttaaggaaataactagaaatgcaaacaagaatttgtattcagaaatgttcactatagcatcacataggggtaatcaaaaaattaaaaatacctacatg

SEQ ID NO: 60173 - DNA, 337 bp, Homo sapiens
ccaccgcggtggcggcgcgggtgcttccctgcagacagttgctcctaacctgaataactagggagtataagtaaccagttatggggggatgtatttcttgagaaaaagaagtatccccttatactaagtgctagatttgtctcatttgactcccataaaagtagcgtataatcaaattagaattatatgaatatattaatacttatacctgttagaacataataaaatcctggaccccttgaccttgaaaatactgagctgcgacccattagaaaaaaatctaccagacaaaaaggcaaaatgaactcagatacataagctgaaaaaacagacaact

SEQ ID NO: 60174 - DNA, 379 bp, Homo sapiens
  misc_feature 273: n = A,T,C or G
acagtatatttgagtgtgattcacagagatgttatgaaaagtgttaacaggcaagaattcaaagaacagtgcatcctcaacttttagaggcacctacattctggtcacttagcttacagtcaccatctctctgtggctgacatggttttattataaaaagttcttcgttatcttttcttttttattttaaaattaggataaaagggagaaaaagcagttgggatataggatataagtgacacttaccaaagatggtttttacatttgtagttntacgtcagtaattgcctacaatatcctcaaccttggagtagcttagttcattaagacacttaaaataaatttgtgtatatatttaatgagcttttaaaaatcacga

SEQ ID NO: 60175 - DNA, 515 bp, Homo sapiens
  misc_feature 312: n = A,T,C or G
tccaccgcggtggggcggccgaggtacacattttgttaagtatatgtctaaggagttcattttattggagtgaatgtaaatactttaaattaagatttcctcattatcattcctaatatctagaaatgtatctgatttctgtgtgttcatctagtatcctaagaccttgctgaagtcacttactatttttagaagttgttttgtagatttattaggattttctaggaaacaattatgtcatctataaataaggacagttttatttctcccttcccaatctatatatcttttatttgtttttcttgccttatngcagtggccagaatttcaactactatgttgaatgactgataagagcagaattcttgccttgttgtcaatcataggaaaaggaattcagtctttcatcatcaattatattagctgtaggattttggagatgcactttgtcaagttctaactattcctatccttaactagttgaaactttttaaattttatttaatcacgactgg

SEQ ID NO: 60176 - DNA, 570 bp, Homo sapiens
acacttctagcatctttccactgatgtctcttcgcctccctcaaatgatccatctgtatctcaaggggttccctgaaaaacactcactcactcttagttttgagaaatgctggacaaacaggcaaccccattcaggaaacctctattaactctgtcaatagaacaattaccagccctaatctctcagcctttggattacttaagtttaacatcttcactgtgtccttgacatcaggagacacatgtcagttctccaagcagtcacaccaaagctgctctctctaggtttgattcgacggtcatctgcagcactttcaaagaggtttcctctcaatccccacacccctaactacttcaacttcaagccctttctaacttttagtagatgacgtgccaagtttccaagccagtatttaaccaatacacatgctagtctttttgggtggttatattttaaaatgtggggataattgttttacattctgttcaacaacaacaacaacaaaatgagactgaaaatcttccacctgaaaaatctcttttgtattaggctatcttcataaagctcgg

SEQ ID NO: 60177 - DNA, 300 bp, Homo sapiens
accactctggccccacataggtagtgccctgtgaccttctggaagcagcactccccttgtgggcactggtgtcctcatactggctggtgatacaggtgaggcttcttcaagcagtcttttgggcagggagctagtgagaccaccacatggtaaccagcactgagaaagtcatttaaggacccctgggacatccctttggggactcccaataatatcccagggaaatacgtgttattactggctaatcactatttagcctgcaaacaggtgaattgcatggatatttcagattatgcctat

SEQ ID NO: 60178 - DNA, 276 bp, Homo sapiens
acttattttttttttttttttaatttttggaaaaaacaggggtctcactgtttggcccaggggggttaaaaactccttgcctaaagcagccctcctgccttgcccttccaaagggcggggattacaggagggaccccctgccccgggactaaatttttaaccagttggcctttttaaaaaaagtaaagcggggggcaattttttttgttaacggggaaaattcgggaattaaacttccgttggcccccccttttcccctggggacttaaacaaacg

SEQ ID NO: 60179 - DNA, 519 bp, Homo sapiens
actacaagctcccccacaaaaatgttgctattgttcctttctgattaacaaacttggacaggtgaaccagttcaattacttttccccatattttgattctatcatttaattctagttttgagagtttatactacaggttaaaaatcactgcatgataatagtcaaaaataactcgatagactataaagcaataaaaaagaaaatatactattcagagaatttgtcagaagagctttaatgcaaaaaaggaatgaatgtagccaactgtttccattgcctttggctatttggaaagagatttgtgttttaatattaggaaagagatttgtgtgtttaacaagggtttccctcattgcacccctcgaccctctcagcctttttgcaagattccaccaggaaaaatatagcgggtctttggcactcaagaaggtttatgctttctcaaatccagcattagagctatttgatcctacaatggggaacagaaagcaaagccttttaggaaacaaactgctttga

SEQ ID NO: 60180 - DNA, 313 bp, Homo sapiens
ctccaccgcgtggcggccgcccgggcaggtacttacaaggaaatatttagccttttcttggtagagagaaaagagagaatgcagggcagaaaagatcaaattactaaactgcttgtaatatctaaaacacctcacttatttatgtcttacttttaactaatgacaaatcactttcagaagatcttctttgaatttcttatctaggttaatggctcttctcacaaaactctgggcatggtgctaccatgaaattttaaattttctaacactccatgctccattagattattgttagtttcaccaggacctcgtc

SEQ ID NO: 60181 - DNA, 246 bp, Homo sapiens
  misc_feature 220, 235: n = A,T,C or G
accttatttcatatttataacttttcagctgccatacctttgaacatgttaccccctctattagctctattatctaattttatgctgaattagcatttcaggagaagtataaaagaatgaatgatatggacctcttgaatctgtttttcttggctcttaatttttatgtcttctatctctgtgtttttgacttgtgttctttaaaattctgtcaacatantttttagattacatntatctatgtct

SEQ ID NO: 60182 - DNA, 436 bp, Homo sapiens
  misc_feature 397: n = A,T,C or G
accatttagaagatttcagagtcagataagtgaggagagcagagaacaactagagcttttaatagagtagaaaaaaactagtcaaaacaactacaatgtgaaatggaattagaactgaatttaaaaattggtaactgaactcaatctgctgttagacaactaaaaaacaggatgatttcactaaagtaacgtagaggggaatgagtaacaaagagaaataaatgtgaatgggcaaagcaaaactacagcatgaagattttcaatttcaggtaaacaatttgtgtatgtttcaataagaaatgaaaaatcaacactggttcttgagcaagaaagctgtgcttcaggacaatgatattgtgcaaggtattggtagggaaggggcagagcctggtggcangtgagaggtatcagtgatagcactgtacctgcccgggcg

SEQ ID NO: 60183 - DNA, 337 bp, Homo sapiens
  misc_feature 20, 21, 41, 42, 63, 64: n = A,T,C or G
tccaccgcggtgggcgggcnncgcccgggcagggtacgggnnacttgtctccagggaaacatnngtctgggaagaagagctagactggagaatcatgagcatgttcaggtgaaaacatgtgagtggataagagcaagagggtgagaacacagaccaaggggctaagggacagactgtgttcagtatttgggtatggaacttgtttttgctacttgctagttctaagaccaggctcagactctaacttctctgtaatgtgggaataatgacagcacttaccttataagattttacaaagattaaaatatcatatataacagcacttaacacaagtaag

SEQ ID NO: 60184 - DNA, 310 bp, Homo sapiens
acctctcgtttgggattccaaaaaaagtcctctcactttaaaaaattaattaattaattaaaaaggcccagcctagaaactggaaggaaagaattctcatgtaatgtgtgtctatgatatgccaagcatagcagtgctctatttatatcatttatttaactcttatagtaaacccctgttttacagatgcaggggacgtaacttagtaggaagttacttatgcacagtataagtgggaaccaggaagagatggaacggaaattcaaattcaggtcagcctggcactaaaattcccatgtccttttctagt

SEQ ID NO: 60185 - DNA, 395 bp, Homo sapiens
cgtaccttgttcttttttttttttattttttgaaaggggaaataacagctgttgggactgttttatgattgattctagatgatagaaatattgtgagataaggtaatatggggtaatatggacgttgaatgatttttgtaatatattgagagggagaagaatagtcttcggtcttaaagaatactgggattattggtgtatgaaatattttcataagagtctcttattttttctgaaattcccctacctcgagacattgttgttttcaaacaaggaatcctattgggattacccaaaaacccatgagaaacttttctgtgttcatttgcatatacctaaaggatagatgccttaactatatacccatttttacatagcattgcggaagcttaact

SEQ ID NO: 60186 - DNA, 300 bp, Homo sapiens
acatgtttaatgagtggcaagttcgtagggtggaggccaccaaaacgctatggaataaagtattgtctagttgcacgtgggcaggagaggctccatggaggtgatgacaagtaagagaagccagaaagatgggagttattggggtggtgacaaagcgagtggagatagggagggcattccaagcaaagagagaaacatgagcagagggaacggtgcttattgaggaagaagagagaaatatgattgacattgtcttcaggaaaatcagccatgcagtcatatttgcaatgaagttcggca

SEQ ID NO: 60187 - DNA, 297 bp, Homo sapiens
actatttgctgaggatagcagaggatcataaggcaatcgaataatgtatataaacagtgtttcaatcacaactgtgtatagtattcaacatttaatgtatttcccattcaaacattagaatccttaaacagaaagaccttagaaatcacccaattaaccacaccaagtagacagacagacatactctcatcaccacacacatgcacactgaagccacagtcaattgggcctaaacatgatgaataagtattagcatcttcaggtctagcattttactggtgctgattaattatttga

SEQ ID NO: 60188 - DNA, 295 bp, Homo sapiens
acacagagacacgatccacagttgtgtaggaataacttcctaaacatctttaggatctacctctttttcctgttcccactgttatttctttgtttcaggcccttaacatctctaatatacactagtatttctgtcttcacactgttttttttctttacacagctcttttcatagcccctccattagcacacagattggaattgtgtctccttgttacccacagaataaaacccaatgttcttaatatgtagtcttaatatagactctataaatagcccctttgttaatctatctt

SEQ ID NO: 60189 - DNA, 243 bp, Homo sapiens
acatatttgcttgcctagcactatgccatagggatcaaaaggaaatgtaggaaatgatgcctgcatcgtttaagttgcccagtctgattttataacctcttattcatagttgaaaagcaatatgatgtgaatttaattaggttttcacttaacaaggcagtctactccgtttttttcattcattctgttttctcgtgttagatggcatttctgatatttatagtctttggtcattcccctacc

SEQ ID NO: 60190 - DNA, 301 bp, Homo sapiens
acatacatacagatacaataaattataaaatgatatcctatgtataaagtatgctagaatcatattgctataacattcaactattgatcacaagattattaaaacaataaaattagagctctaacaatcacagtgacatggaaaagattagcataaaatctatacatagccagcaaggttcttttcgtgttttttttctgtttttttttaagatgggatgttgcagtgttgtctgggctggagtataatggctattcacagatgtgatcatcacatattatagtatccaactccgagactc

SEQ ID NO: 60191 - DNA, 501 bp, Homo sapiens
acagtgtttaaaacagaaagttagaaagggagcaaacaaggacttctcccctagaaccctatctcttttactggggaggaaaatatttcctgaagcctcccaatggactttgctttctatctttttggccagaaatgagtcttcacccttagacaaattgctggcaaaggggactgttattgccatgactggcttgggctgaccaggactgtttccctgggaactgcaaggaagaaggaacattgctgttagataagcactcaccacacaattctaaggccaggggttcatcagactccatgaccaccattgctagaataccttggagaagggagaagtcaacatttattcatcgattcagacagcttgcttgtttagtacctcggccgcgaccacgtcgagcggccgcccgggcaggtactgttatatgctgcaacatgaatgaaccctgaaaacccgctaagtgaaatcagacagacccaaaaagacaaatactgtatg

SEQ ID NO: 60192 - DNA, 263 bp, Homo sapiens
accttagcattgcggtgacttataataggtgctcagtcaatgtttgtttccattcttcttggacatatatgagaagggccatataagattattaactatttatttattttttttgagtagtgaaactctaaagactcacagtctgaggactcatggagttgttcacatccatgaacaacaatgttatgaatcttttagttataaagcaaacctttctctggagcatgtttgtgttttctcatttaggtttataaattgctctg

SEQ ID NO: 60193 - DNA, 341 bp, Homo sapiens
  misc_feature 9, 10, 17, 18, 27, 28, 38, 39, 49, 57, 58, 70, 71: n = A,T,C or G
ccaccgcgnngtggcgnngccgcccgnnggcaggtacnntgagtctggnaatggctnnagtatacttacnnatccattgaaaagaagggaattcaagaggtaaagagagaactgagagagtgaagcatcaggaaatcaagaagggaaaaagggacaggttcagaaaatattcataatgagcaatatcgcatttcccaaagaagacaggttttttagagctggccttggtaatataaggatgaaagttttggttatttatgaaagagttttactaaaattggggatagaggtgagtattgcagggaactaagcagtaaatagttaatgaacgagtgaaagat

SEQ ID NO: 60194 - DNA, 278 bp, Homo sapiens
acgcgggaaatattgctgtatcttccaaaaaagaaatagtaattcactatgattgatttttttttttcctctctgcgttttcccacgttccttgcctttctctcaaaaatagaattgtcacatgacttttgagtctggtctcttgggaaaggaatatggtttgtctcaacagccttctggccaggaatggtagctcacacctgtagtcctagcactctgtgaggctgaggcgagtaaatcacttgatgtcaggagtttgagaccagccaggccaacat

SEQ ID NO: 60195 - DNA, 269 bp, Homo sapiens
acgcgggttactagaagtatagctttgggaaccttgtagcatcttaaagacttttaaagggttgacagctattggcaaattgactaatacagagaactaaactttggttcatgtattcaatgtctaaatgaaaaatgggaagataaaagagctaagaatgaaatgtgatttcatgtgcttctcctttttagctcttataatagattgaacagatttgatatttgtggtaaatccactcaggcagagtgacagaggcttggttgtcattt

SEQ ID NO: 60196 - DNA, 312 bp, Homo sapiens
actatggatacacagataagcatattaataaatcaaaggaaaatacctatgaacaatgggtatactcatgaaatgtatggcctaaagaagggaacaaatattaatcaaataatcatacaaactgagaaagtgccatagaggaaaaatacatactgtgtaatagaggatgggagattcatttgaacatgtttacaaaaaaagtgtataaagttgctcactatagtattgtgttttagcagcaaaaactggggaacaatccaaatgtctacaaattggggaaaaaattttaaattatagtatactcaaactatg

SEQ ID NO: 60197 - DNA, 151 bp, Homo sapiens
actttcaatagaatcaggaaccaccaaccctgacaaagctaccatctattggctctaagttagaactaaaaggtggttgtggagaattgcttcccacagagaactgaattcatcctgagggaaatctcaaggccctctccttacctcttac

SEQ ID NO: 60198 - DNA, 449 bp, Homo sapiens
acaacagtgattagacaatgcagaacaattaatccttctcagttatatgacccgctgtccttacccttctgtgtcatctattttccccaacaaacttccatgcctcccatttacttcttcttggtttaaatttttctatttagaaattacacatataagaaattattttaaaatatgtgtagtgtgaagaacaagacaaacaccagttaaatcacctcctatgttaggaaagaaagcagaaaccaactctgacaaaagcccctagaatgtgcccatcctggtggcactcacccccacagctggttaccactgtccttaattttgtgttcaccatttccccttctgtgtcttcacgctattggcccctatgtatgcctatcccttaaaaacatgctgtgcagtgttgtctgtttttgaaagtttacagaaatggaatcatactgcatgta

SEQ ID NO: 60199 - DNA, 277 bp, Homo sapiens
acagctaaactccaccgcagagcaagcaaacccaatctggcacacagcttttgggggtttcctctcctactatggcccctagccctgtgcccaggacatagtgaagggtcagtaaatgtttggctacattgatctgcagaatcctcactaacacccctccagcacaagcacaggtctgttgaacaaacatccccatagaacccaacggatctgccctaaagcccaaagagccttggcccctcacctattgggaacatctttccaaaaataccaccac

SEQ ID NO: 60200 - DNA, 307 bp, Homo sapiens
actggcaatactgacaatattatcttgtatatgtataggtttttacaaatttaaaagcctttcatatatctcaaggaaatatcctaagaacctgtttctactcaacattaaagacctaagtgaaatctgagactttcaatgcctttggatatgtaattagacaggagtttagccttttgtaacacatatgatgatgaaaatttccgattttaagctgactgttgggcatcaagatgaccatctttacaaatgaagtagcactcatgtgctcaagtatacatagaatgtatgcaaagtgaaagtctcc

SEQ ID NO: 60201 - DNA, 308 bp, Homo sapiens
acgcgggcatcaaggtagatttctcctttttttcagagggatatgtttgattttcacatgtatacatgcatacagcaaagagaactctggacgcctaaggagaagaaataattcatcttccatggatcaaagaaggagaagattttaaaatcaacatgatgcttattgtgaaagagaagagaaaggacagacaacacaaggaggaacatctgtagaaggaaagcaccacccctcctgatgagccctggaaagtctcgatggatgtctgctattctaactcaaccgaacttcccccttccactctcaaa

SEQ ID NO: 60202 - DNA, 423 bp, Homo sapiens
ctccaccgcggtggcggcgcgcccggcaggtacgcgggatcctgggcatcacagcaagactccatctctacaaaaactttaaaaaaattaccctgtgatggcacatgccatggctgagggaggaggatggcttgagctcacacgttcaagcctgctggtagccatgatcaaaccgttgcattccagtctgggcaacagagagagatcctgtctcaataaataataaataaatagtccaggtggtctttcccctgccccccccccacaatggaaataaactactatttcagaaatcagtggaaattacttcataataatgtatttcatggctcatatgtatttcattttagaacaatttggttggttggttggttgatttactgatatttgaagaatagtcatttcccttatcttttcatcttt

SEQ ID NO: 60203 - DNA, 438 bp, Homo sapiens
tccaccgcggtggcgagccgaggtacagagatgaaggtaataaatggtaaaggaatataaaacggtccccaccaaaattaactaaaatataatataacaaaaaattatatagactcatcttatttccttgaaccacctagaaagtgagaaattgtttcatttgcagcaaaaaatcctgtcatatactccttgaattatttttacaattattttaatacatttccatttaaagctactctattatataggtcaattttaaccaagccacattacatagagagacacatacccatctgaaataagacagaagtgactattctattttagtcattaattcctcaaataccactccacagccactaacatctgtgaatcacatgccgagtgactgacatctacagatattaggtcataaaccttaaaggagaagaactagca

SEQ ID NO: 60204 - DNA, 307 bp, Homo sapiens
acttttactagagactggctttcaccatgttgttcaggctggtcttgaactcctgacctcaggtgatccacccgcctcggcctctcagagtgctgggattacaggagtgagccaccacactcggcctctccttatttttttaagttttatcaaattaaacctggagttgcctacagcaaaccccgtcacctaacagccattcctgaaccaatgtggaaaaagtttcctcgaatgggaaaaaatgaggtcaatgtagaaagagaaataacaagaaaacagatgagctctttcaacataatctgagttc

SEQ ID NO: 60205 - DNA, 303 bp, Homo sapiens
tccacccggtggcggccgaggtaccatgagggggtggaaggaattaatgttgttcttggccagttggcactgttttcttgtgcctttctgggaagggaacaacaggtgagaaggtttgctttttgtttttgttagtgtataaataaataggttaacttgttttttatttgtgtggaaatgtgagagtccatagtgaagtaacttgccctaatagctcgtgattttttaaaagctcattaaatatatacacaaatttattttaagtgtcttaatgaactaagctactccaaggttgaggatatt

SEQ ID NO: 60206 - DNA, 168 bp, Homo sapiens
  misc_feature 10, 11: n = A,T,C or G
tccaccgcgnngtggcggccgaggtacacagagacacgatccacagttgtgtaggaataacttcctaaacatctttaggatctacctctttttcctgttcccactgttatttctttgtttcaggcccttaacatctctaatatacactagtatttctgtcttcacact

SEQ ID NO: 60207 - DNA, 235 bp, Homo sapiens
ctccaccgcggtggctgcctccttaaagccctttctatttctcttctcctcctctttcctgacctttttgtaacaactggccatgatggaactaaaataattatttcattacttgatactcattgaatcaagattgttctctctttaatggacaagttcaatattttatattcttcagaagccaagcctaataaaacctttttcaatggattatgcatttgcataaccctaaaat

SEQ ID NO: 60208 - DNA, 232 bp, Homo sapiens
acctgtctccaaaggtgtatgaggatcgggtgaggtagtgcagtgaagtgcacatagtaaccctaaccgtgacccgaatcaatagaacacttagaattatcacaaacaataataacagataatactcatgtagcatttactatgctgcagacactgttttaagctctccaactatatttactctccctgcaactctgtgaagtaggtattgtaattattctcactttacaag

SEQ ID NO: 60209 - DNA, 282 bp, Homo sapiens
  misc_feature 32: n = A,T,C or G
acgggccttgtctccaggagcactgtctgggnaaaaagaagctagactggagaatcatgagcatgttcaggtgaaaacatgtgagtggataagagcaagagggtgagaacacagaccaaggggctaagggacagactgtgttcagtatttgggtatggaacttgtttttgctacttgctagttctaagaccaggctcagactctaacttctctgtaatgtgggaataatgacagcacttaccttataagattttacaaagattaaaatatcatatataacag

SEQ ID NO: 60210 - DNA, 108 bp, Homo sapiens
actgtttgaatacaaagaattccagacataagcactgcccctgactagaaagttgaaacatacagatgtgaaaagattgaagaacccaaggatgttatcacagtggtc

SEQ ID NO: 60211 - DNA, 525 bp, Homo sapiens
actctccagcatgaacctgcttcaggcattcacattacctgcctctctgagtttctgcaccctccacggattgaggctcttatgaaaatgacctgttctccccttttaaatttctagtgcttttcacttgggatcctttcaagatgactacttactctgtgagagatgacagaaaccacttgactacattttgtaaagatatacatgcgtaagacatatacgaaggccgacagttacaggcacacaaaattcgtccaggcttgtcaagcttagaagatgtatcattgtgtattggtaggaataaggaccaaggttaataaaataaaatatgatggggaaatgtgaagtcctaaatttacttaaatatgaatccataaattttattcacaaatacaaatccctaaataaaaaatcagttaggaaaatacaaaatggtaaagacctgatttggtagtatttttctaaaaacaaagttttcataagtgacaagttcaatgtgtatcagtagagtgatatgactacttt

SEQ ID NO: 60212 - DNA, 183 bp, Homo sapiens
acgcgggccattttaatcacttcaggcaaaaagagtttctcacaatcttattatttatctgaccgagctcaactattctatttaaattgaaagtaaagaacacaatagcatgggtaaaaatgttcatgctggcattccccaaaatagggctcttaatatatttttaaagtttatttgtatttg

SEQ ID NO: 60213 - DNA, 546 bp, Homo sapiens
ggactccaccgcggtggcggccgagtacagaaaggaagtttgagaaactggaaaggtagaagtcactgtggtcaaactcttcaagaaccattatgggggttgtattacaattcctttggtcacaaattatataaatctaaaccatatagaagggggatttattggcttacatggctaaagtgtgggagaagtgaggtagttctcagggaagccagaacggggaactccacaccacctacactttctgtcttatatctctgtgcctcttttttttgtgtcagttttctccacattttggggtgtggctgcagcaagccagagatcacccagaaagaatgtctgaccttcttcccttcatttaaattttcaaaatccccggaatggttctggttggcctaacttgtgagatgtccccatccttttggccagggacacagattaccaggtaactggcagccccatctagaattacatcgttggtctgggaaagatgaacattttcttttaaaaaggattctaccattcttagaaaaaggaggagtgctg

SEQ ID NO: 60214 - DNA, 346 bp, Homo sapiens
acttctttttttttttttttgtaagaaaaaaagggggtgcctcatatagttaaataaccggcctatggccttacagctagcaggttacctcccctttttactctatatggacgtggttttaagttacaaaacaatgcctcctctatacataggaattgtaagacaaatacttgacccctaaacaaaggaaaaatctgctcccttctctgctggctaccaacaaactatactttactatcttgactgctgccccgcctttgtaaactgaaatctatgcgatgatccacgctacacccaggagatacgtggtggagagtattcgcgggaaatcatacaaaccatgctc

SEQ ID NO: 60215 - DNA, 421 bp, Homo sapiens
acaaaataaatttgctcattgggttagagtatggttattgattagggggctaagcatttagttactgcatggggcagccaataataaaatcacagccctgtgtatttacctccacagtgtgtgctgataagtgcaaaaggtttgtgcaaattcttttgaagttatattgtaaccatggtatatgtattgaaaacttggccattttaccccattcctatgaatgaaaactatttggtgaatcagaggatagtctgaattgggatatgaaggccagtataagtgtcagttagcaaagtcagctctagtttagttttttttttttcttttaaggcgtaccattactaaaagtttagctttggaaaccttgtaccatcttaaaaacttttaaagggttgacagctatgggcaaattgactaatac

SEQ ID NO: 60216 - DNA, 149 bp, Homo sapiens
actattataataattatttgtataatacagtttaaagcttggcttttacatttatttcaatgtttgacatatttcatgttttattagaaacagcataattatctctctagacaatataaagaggggatagtaattgttaggctaatgtc

SEQ ID NO: 60217 - DNA, 233 bp, Homo sapiens
actgttagaaaattttatcagggcaagttacacacacaaacaagcaggcattaagtaagcagtaactaatgccattcactgggtggtttataatttacacacttatgagggaatcagtagttattattagttattaaatttatttgtgtgtttgtttattgattgattgtgataagttactaaataccaaaaatgtcaggaatatataagtgacaattcatttaattcatttt

SEQ ID NO: 60218 - DNA, 425 bp, Homo sapiens
acctgtggtctcagctacttgagaggctgaggcagggggattgcttgaggctaggaagttgaggctgcagtgacccatgatcatgcaactgcactccagcctgggtgacagagcacagccctatctaaaaacaaataaaattaaaattaaaataatgtgtggattacttacctttccccagatatgacgcaaatgaaaaaaacagatacaaattaatgtttcatgaacataatgagacttcttctgttttacctattgggtccagtggattcttagcttccttctcattgatttttgtgattattttgctgcctgcaggtccaaagaattgtgttcctgttagatgaattgccattatctcattttttgatgtgaagaagctcacggggatagaatccctttgagtaatctgttgaagtgtagtg

SEQ ID NO: 60219 - DNA, 201 bp, Homo sapiens
actaccattaagctgcaggatgacaagcccttctgggactgatacagaaaatagtttctagtcctcaaagagagattattgtaagaaccttacttttaactccttcctttgctgggaggaaaagtaaaaagtaaaaattttttttctctgaagagacccttaacaggtcacatggacctgcacggttttatcatgtgcatc

SEQ ID NO: 60220 - DNA, 587 bp, Homo sapiens
  misc_feature 500: n = A,T,C or G
acgggacttgtctccaggagacatgtctgggaagaagagctagactggagaatcatgagcatgttcaggtgaaaacatgtgagtggataagagcaagagggtgagaacacagaccaaggggctaagggacagactgtgttcagtatttgggtatggaacttgtttttgctacttgctagttctaagaccaggctcagactctaacttctctgtaatgtgggaataatgacagcacttaccttataagattttacaaagattaaaatatcatatataacagcacttaacacaagtaagaattcagtaaatgttgactgttattactattgtctgggtcgttataagtttgaagacacaattgcataaactgtcatcattaaaaggaaaacagagaaaagtagttctggaaggagtctgagaggcattgccagaaagttagggggaaaatcaggataaagtaatgttccataggccaaatgtgggggctgggggaggtgtangatttcaagaagacaaagtagacaacagtttacaatgcagtaatagagggcaagtaaataaggaattattgcatcaaactatcttaa

SEQ ID NO: 60221 - DNA, 292 bp, Homo sapiens
acccatcagtcttggctaaaatgtctgttgacaaagatgaaagtcctgccatcccctcaagacttagccttatccgcaggtagaaggcctagagaggctatgtcccaaatcctacctcaatgctgaattagactgggctcttgcttgtgctagtctgtattgaagagattagtcaagttaagaaccaaagggttcttaaactgctaggagaagaatagtggtcaaaagaatggcttctttctatcttgaactgaagccctggacttcacgggcctctgatgaggattccgct

SEQ ID NO: 60222 - DNA, 293 bp, Homo sapiens
actagtaagtaatcctgatttcagatactttattaatttgtttcttcccttagttcagaaaggctctttaattcatacttcttgagttctcatataggaaacacttaaaattatatatgaaccatagtggcaaaattggagattctccagtagtctggctcactagttcctctgaatgatttaccatagatctgcctttgcagttcatatatttccaggtcattcagtggaattctattgttaaaaaaaaaaagccttcctacagacaaacactcaaactacttcaatgtgat

SEQ ID NO: 60223 - DNA, 300 bp, Homo sapiens
acatttccatatctaaagccagcttctcaacagggctgtgtttttttttgtgaatgatcagctctctaattagccaattatcattgcaaagagcgaaagggacaaaaatcacaaactgttagtaacttaaaatagttatctacatcactacatatgaacggagagtttaagtagaataaaaggttggggatcagaatgaaactgtttctaaccctttgccgagataaaaataacattttacaatatggtgtcacttgtctctgtttgataatgagagtaattttttacatctgcatgact

SEQ ID NO: 60224 - DNA, 544 bp, Homo sapiens
  misc_feature 160, 185: n = A,T,C or G
gcggccgcccgggcaggtttgtgattatggaatataaaaaattccagattgaaaggatgacatggaaaacaggttgaatttatcaagaatcaaagaaataatagccagaaagatgaacagagaaacagagaggtgtaggtgctaaggagatggaagtccnggatggttaacattgtggttcaatnggggagaaggttttgagaaaaagacagtataaatttagtgttaagattttgtcaggagtgtttcagactgattgatggagacagtaatcagaagtttttaaaagattgtagctgcccactcccaaaataataagaaacaaggaatttgtaaagagataggagagcaggagaagttgtaggtgtagccagcatcattggtggggtacgtgggtgaagggttactcttacgattacatgctttgaatatgtcagaaatgatttgactgtccttgattataataggagctaggagaaggagaagcattaagtgagactcaacagagggttagatgggccatgtgactcatgccccaaaaatc

SEQ ID NO: 60225 - DNA, 288 bp, Homo sapiens
  misc_feature 37: n = A,T,C or G
actgagaacagagtattttgcatgtaaatgttgcttngaaaagtattttcaaatgaatctgaagcctatgttatacattatatttttagttattttccatactttcatatgggtgtagagtggtaattgtaattcattattactgttaatgatgctttgtaatatataggccctcaagtgccacttgacaatcctttcatacattgcttggtgattctttattacattgttcctggcgaatcagattctttatacagtgttttctttctcagtaaatggcactgtcag

SEQ ID NO: 60226 - DNA, 284 bp, Homo sapiens
acctgtggtctcagctacttgagaggctgaggcagggggattgcttgaggctaggaagttgaggctgcagtgacccatgatcatgcaactgcactccagcctgggtgacagagcacagccctatctaaaaacaaataaaattaaaattaaaataatgtgtggattacttacctttctccagatatgacgcaaatgaaaaaaacagatacaaattaatgtttcatgaacataatgagacttcttctgttttacctattgggtccagtggattcttagcttccttc

SEQ ID NO: 60227 - DNA, 296 bp, Homo sapiens
  misc_feature 280: n = A,T,C or G
acctcacctccccatgccaatcaagaataaggaataaacttttcacgttaagctactgagaaccacgagattttgttacaaccgctagcattgattaccctgtatggagtaatccattgaaatggagtgctgttataaccaaaccaaaaatgtgtgcatcggcttagcagtcaggtagcagatgatagtgaagctgctaccagaggctggaaaggtggcaattcatgttatgcagcatcaacagatgcaataacctggaaggaagatcttattatacctnctgggcctgtggctct

SEQ ID NO: 60228 - DNA, 391 bp, Homo sapiens
caatcagtcatagaaggctgaaaatgcaattagccattctcagggcaaatagaatctctgaaaggcatcaaaggaagctccttcctgcgtcttcctttccttgtccttcttcttttactctatcttctctccctccccactcatagatatataaaactggaaaggattaagaaatcctgtcacttaaaactaatatttgacagatgaggttagagaagatgggcagattgggattctaagtccttgattgtcttcttaaaaatgataccactgagaccccttatgacttttacttgtgtggatagggttaggccctgccaccacttccatttatcttatttcctgaactggctgcttggccttgtcttggagaggcaacacgtccactggt

SEQ ID NO: 60229 - DNA, 103 bp, Homo sapiens
actacatagacactattccatgtgctttatgtagtaactcaattctcagaacaaccctattgagattattattaactgcatttatacattaggaaagtgagga

SEQ ID NO: 60230 - DNA, 279 bp, Homo sapiens
actgcctgtctttaatggcatggagactggactgtggagagtgtattgagggacggagagggcctggctgctgtggaggatgtgtgcatgtccattgtgggaggtaaatggaacaagcgaggttaggctcagatatagatggttttgcatgactggattaggaatttggacttaattcacaggcactgtaaattcctgaatgagcagtggagtgctgaaggaacaattgagggaggaaggagatttgaattgagaggctaattggatagttatgtgtgt

SEQ ID NO: 60231 - DNA, 445 bp, Homo sapiens
actgtccttttggccatcatctctcagtttgcttctgtgtctgtgctggcatcattctggattcactggaaattgctttctttttgtggctgaaccccagctgtcaccactctttgcattcctattgcttcagaccctcaaagatagacttaaagctttggtgctgagtccaaaatctgtgaaatgatcagatttgtattttaaagtcatcttgagtggggggaataaaccattatttttgttgcaaaattgagaatgggttggaagaaaccagaatgaatgactgtagatgtgttggactgtaacaacaattgaggtgagagaaagtagcagcttgggctaggtggtggtgctggagatggagagaggtagatgcactagagagggatttaagaggcaaaaaatacatgggatttggtcatgggttgggtatggaaggtgaatg

SEQ ID NO: 60232 - DNA, 232 bp, Homo sapiens
taccagaattgttaggtctacaggatttaggtgattagaataatcattctttccccaatctcatggaattttaactcacatatgcacagatcagtagtcagccacagagactcaaggagacccctcagcagatctctagctctttctcttcatacaatttccttctcctctttactctgcctcacaaattctagttgcctctacctttctatctccatctcttcaattagca

SEQ ID NO: 60233 - DNA, 283 bp, Homo sapiens
acatataaatgtttcttccagttctttcaacatgtgtcatttgaaaaaggagaactctgaagccctctaggaagttggagctacaatactggaggccagtttcctgaattgctccctggtaaaagccacccagacaagaaatgcctttatttgaatgttattaatgagaaacacattttaaactttcagccactttaactttgaggattgtttgttaaaacagctggtgttacccaaactgttataggagtctactaaatatcatttcatttttttcccttct

SEQ ID NO: 60234 - DNA, 186 bp, Homo sapiens
tccaccgcggtggcggccgacgggccaggtacataatattttcttggacagctgggaaaaaaagcaggatagtcacacataatccaataaaactttttttttaacaacactcgtgatgtatgtctttatctttctcagaatcaggcatttccgctggccccctttgttctcttaccataccctgtt

SEQ ID NO: 60235 - DNA, 287 bp, Homo sapiens
acatattatgatcaataataaacagaaaaactaaacaaaataaagtgagtttcatttttcatttaacaattggccaccttgaatatcatttgtcatcacaaaaattgcttaatcctgtgttaccacgacacatggcaagaccttctgctgccacatctttcatctaatagactctgctagatgctgctggtggtgatcattatcatttatatttgtcatgagatataaaccatccagcccaaagatgaatatatctactcaaagctcaaaatgtctagtagatattt

SEQ ID NO: 60236 - DNA, 142 bp, Homo sapiens
tccaccgcggtggcggccgagtacgatagtataggagaatattctttacatgtttcttgtattcctacatgttttagaacagagatacttattccctttgtcctcttctatctccttacagatggagacggtgtctcccgtc

SEQ ID NO: 60237 - DNA, 595 bp, Homo sapiens
  misc_feature 187: n = A,T,C or G
gggagctccaccgcggtgggcggcgcgaggtactgtaaacagaagtataaagtagctacctgtgtaaatagctctcactacttgtgacatgaagacaaataacagaaaattaaatccaaaaacagaagtcaggaagtaaaaagaagtaatataaaaacagaaatatgattaccagacagtaactggngaaaataatgacaactttgaataggatggtcaagcaaagggaataacagtttttttgtgtttttgttgttgttgttgttgttgtttagttagttggttggttattttagagacagggtttcactgtgtttcccaggcttgtgtcaaactgcaggccccaagcaattctcctgcctcagtctcccaaagagctgagattacaagcataatccaccaaacccaacctgggaacacttataataccatttgtattgaactgacacaaataattgtattgaacacataaatagaagggcattgcagttgaagtggagaaatacagttggagagtgaaatgcaataaggttgaatatgtaggtaggaagcagatgtcatgggtcattagagacagggcaaccatgcagtgcag

SEQ ID NO: 60238 - DNA, 231 bp, Homo sapiens
  misc_feature 129: n = A,T,C or G
acttccttaccatacagtatgttgggcttgtcatttaatctgctgagtctgaattactgtgtcagaaaggctggtttgcatcatttctatttggttcaagtgcatgacagctcagtgttcacccttttnaggggaaaaatgacagtagttgaagttgctactggaagggaagtgtgatgatgtagaagaggagagcctgctggctgcctacacaggtgggcttcaaggtgc

SEQ ID NO: 60239 - DNA, 183 bp, Homo sapiens
accttttttttttttttttttaagggcgtacctttcctaaaattttaccttgggaacccttgtaccttttaaaaacactttaaaggggttaacagctttggccaatttgcctattccaaaaacctaaccttgggttcatgtttccaatgtctaaataaaaattggaaaaataaaaaacctaaa

SEQ ID NO: 60240 - DNA, 295 bp, Homo sapiens
acgcggggaggcattgaggcagccagcgcaggggcttctgctgagggggcaggcggagcttgaggaaaccgcagataagttttttctctttgaaagatagagattaatacaactacttaaaaaatatagtcaataggttactaagatattgcttagcgttaagtttttaacgtaattttaatagcttaagattttaagagaaaatatgaagacttagaagagtagcatgaggaaggaaaagataaaaggtttctaaaacatgacggaggttgagatgaagcttcttcatggagta

SEQ ID NO: 60241 - DNA, 289 bp, Homo sapiens
actgccagttatatatttgagagcccctttgaagaggcctctgccttacagcatagggttgattacttacaagtgttcactccaattcccttcctcctcaaggctccacagtcagaagctacagccatgggaagctttgagtatttctcctttcatgtccgtcccccacaccccacctcttgaacctgtccactggataatggttaagtgtttccaccagtgttataaggtaaatcctgatttataaaattgaattagctgatgaataactgattttttaaaaacgcaa

SEQ ID NO: 60242 - DNA, 367 bp, Homo sapiens
acgcgggattcttcattccatcaagaatgagctagatatatgacctacccaaagcaagtcattcaaatttccaaaatgctgcattagcaggcttctcacaggtgcaggttgatgatcatagggcccttggggcaagcggcagaaacaactggctgtcacaagcaagaaaggaaattaccggtagaataaaaagtccgcacattggtgggaggtagttctggaaaatgtgtgaggcccaaagggattctggaagttaggtattatgaacattctcgccaagacactaacattccacacaacagttggatgctcattaccagagcataccacatcttcattcaaaactctaccatcatgagctctgtct

SEQ ID NO: 60243 - DNA, 619 bp, Homo sapiens
attcgcgtactggtacttacttgttggcctaattgggagctccaccgcggctggcggcgcgaggtacacttaatgagtatacttaaaataaaggtattttattgtatgtaaattttacctcaaaaaagttcttttttaaaaagactaaacttactaaaagtaaatagactgcaccccccaaaaaagcaatgtattccaagactaagctttaatattttttatgttaaattaccttctttaaaggtattaaaacagatgttaaagttttagctaaaacttaaaactgaagaacattatctacaaatgtactgttgacacagcacccattagccacatacatgtggctatgtaaagttaaattaagattaaccaaaattttaaaatcagttcctcggtccggcatggtggctcacgcctgtaatcccagcactttgggaggccgagacgggcggatcacgaggtcaggagatcgaaaccatcctggctaacatggtgaaaccctgtctctactaaaaaatacaaaaaaattagccatgcatggtggtgggtgcctgtagtcccagctactctggaggctgaggcaggagaatggcatgaacccgggaagcgtagcttgcag

SEQ ID NO: 60244 - DNA, 525 bp, Homo sapiens
tccaccgcggtggcggccgtagtactttggccacaatagaacttttattaacactgctccgtctttgcttgtttggaaaattaaacacttaccattaccagtggaagcatttgtgcattgcataatatcatggagcttttagggcagggaggatcttgcttgtcatctagtcaaatcatcctaccagttccttacatcatttatggctttctgcctaatacagcgtagtgactttgtgtctgcagcacagtaagataccttgcaacttccatagtgtaaggaaaatgaaagttttgagtcaaaatagtttgaagtcaaaatagttggccatagcctggtgcaaatcaagacaaaatgttactatattgacctcatattattaagacacaaattctcctctcctgatacctatgattttatatcctctaagagacaagtgaaactggctttttaagatcttactttatattatcagaaaatttgagacaaacacagatcctattttgcagctgaacataatcaagt

SEQ ID NO: 60245 - DNA, 232 bp, Homo sapiens
acgggacttgtctccagagactgtctgggaagaagagctagactggagaatcatgagcatgttcaggtgaaaacatgtgagtggataagagcaagagggtgagaacacagaccaaggggctaagggacagactgtgttcagtatttgggtatggaacttgtttttgctacttgctagttctaagaccaggctcagactctaacttctctgtaatgtggggataatgacagca

SEQ ID NO: 60246 - DNA, 148 bp, Homo sapiens
actcggggcttctgctacctgggtctaccctgtataccttctgcgtgatgtattacctacccataactacgcatgcgtgagtcgcattagctcttatcctgaggacccctgaacgagcgtccctttcacaccgcatcagagagcacac

SEQ ID NO: 60247 - DNA, 505 bp, Homo sapiens
  misc_feature 390: n = A,T,C or G
acatggtatgtttgaggtccttataaaaatttattggagacaagtagcagttggaatatgagtttaaagcatggtatagatgtgagggctgaagatataaatgggaaagtcatcataaagtagttggcatttgtggccatttagagtcatctccagatgactattatcaaaggatagcagagttctaaggacagcattaaacagagggaaaaactcatagaactagaagaaatttaagaggccaatattgtcattggtaaggattctttaacagaaaacccacctacttttaatatttcataccctgtatattcaaaattgagaaaattgggtggttataggattaattaaagaagactttgttttctcacattgtcagtgtgttgactntcaaccttagacttactcccatggccacaagatggctacagagtctcgaagttttgtgtcctcacattataatacatagaagcaagcctatgaaagtggtccctgtctgtgtgtg

SEQ ID NO: 60248 - DNA, 317 bp, Homo sapiens
accatctctgctatttagcccccactgttaaatttgactggcttaaaaaaaataccatctctgaagataactacttagaagttggtcatatgtttttccagacttcccaatgtttatttatatataaacataaataattttaggccaggcgtggtggctcacgcctgtaatcccaagactttgggaggctgaggcagggggttcatgaggtcaggagatcaagaccatcctggctaacacggtgaaaccccgtctctactaaaaatacaaaaaattagctgggcgtggtggcgggcgccggtagtcccagctactcg

SEQ ID NO: 60249 - DNA, 185 bp, Homo sapiens
acagaattatttcatcagcccgaagataaataaatgaataatgtgtgtttcagtgggactgtgtgcactggcacaaacaggtgtgggagtgtgttcctcttgaatgggagagaacatcgatgagcacaaaaacacatcctgggaactcgaaaattcaaatgcaaatgtgaaaagcacgcgttctc

SEQ ID NO: 60250 - DNA, 293 bp, Homo sapiens
ccaccgcggtggcggcgcgagtactttatctctacaccttaatgctttcttaatttgtaatatgtataattcgttgcattaaaatgaaatgataggatggagggagatagtattttgtatccattttgctataaaacaagtgatactgacttgctaaaagcataaaataaataagagtataaaacaagtccttatcacatatataagcatccttaaaagacaatgcttttatgaaatggctttttcttggggcatatgaggtatatgaggtgttagggattacacttggtgcc

SEQ ID NO: 60251 - DNA, 294 bp, Homo sapiens
tccaccgcggctggcggcgcgaggtacagacaggggttttgccatgttgcccgggctggtctcaagttcctggcctcaagtgatctgcccacctgggcctcccaagatgctgggattataggtgtgagccactgtgcccagtctacactgtctattatatcatatattctatctcagacagaatacaatgattaatatagtaaagaaactagataatccacctctgactaaagctatacacaccaatattctttaaatataagggacatatgttgatgaagctacagcagcaac

SEQ ID NO: 60252 - DNA, 307 bp, Homo sapiens
acaacacataaccatgaatagaacaattacttgtcactatgcatcaggttgctatagccctattggtgatttccattttctgtagcttacatcaccaacaaacatgccaagacagctggagtggtagtagcaaaagtgttttttaacagcgtatcccactgacaatacaaatctgtccttttctcctggaatcactctcataaatggggctggatagacaaatccttattacagtcatgtccttgcatttcccaagccacatctgctgtcttctgtgagccaatttttttttccaatggctttctag

SEQ ID NO: 60253 - DNA, 297 bp, Homo sapiens
acttttctagttctagctattacccatcacatttgcaggcttagggtaaacactccctgcattaaaacagatgaccaacgttttttggaccacataaatatgtaagttacgtatacattacttaactttagttgctttaaaaaataactaagccaacatatggaccatgaccattgtgtgcctgctacacagcagccacagtcactctttccatttctacctgctcttgccccagtcctgagacaggatcctatttcatgcatttttaagactactctttttagagcagttttaggg

SEQ ID NO: 60254 - DNA, 418 bp, Homo sapiens
caccgcggctggcggcgcgaggtacgacttttctctctggctgcttgtaaggttgtcattatgtttttggtattcatctatttcaagacaatgtgtccggggttgaatttctttttatttatcctgctttgcatgcctgtgtttcttatatttgtgattcatgtttctcacaggatttaacaattatcagaaattataactttaaataatacacattttctgttctccctgcttctagcatgcaaatagatacaaacttagatactcatattctcctctcaacatccttaaatctgtttatatttcccatctcctcaaatcaataagcattctgagctcttcttcagtctgtgttctgttctgcacactagttctgccttctcctgtgcttaacccattcctcagcctccctccgctg

SEQ ID NO: 60255 - DNA, 390 bp, Homo sapiens
actgctgttagtggctgctagtaggttattcagccgacctcttctgattctgctttgctgcctgatttcaaaagagttgccctatactggctttcagtcacagcttgatgtaaccactgcttgtttgcatgcatccccatcattttcatatgggctctttttttttttcttcttcaagttaggaagcaaaaaaatcaggaccatttttatatgataaaaaatttatataaggccagctagaatcaagccaaatgaaattcagctggaagggatggtaaaaaggctcacagaacttgtggctgccaaaaaagtcagtgttctttaaattaaaaagggttcagctagcagcagcaactctgactttgcattcatattgaagcaagctctcca

SEQ ID NO: 60256 - DNA, 346 bp, Homo sapiens
tccaccgcggtggcagcggccgcccgggcaggtaccagaggacaattatgttgattgcacatgatattttggatcaaggatagagccaggtcagatctcaacattcatgctgatggcataaggaacagtataaacaatctgaaagccatttctgtctcaatttatatagtttcataaatgacatttaactacaattgtttttttcccagtatttaaaattaataccttggctataaactcattccttaaggataaatgattgtggaggaggaaaaatactcagacacataagtgacccgggaagcatgttggtcatgagaaaccacatgttgtctggacatgagca

SEQ ID NO: 60257 - DNA, 287 bp, Homo sapiens
acaacatattaactaaaatgaatagctctatgtgaactgatacaagctgtgtctccaagacatattttaaatgttacttatttaatccacacaaactatacaatttcacattcaatataaaaatacatagcaaaatgactgaaaggaaatacaaactattaacagcagctccagggaaaggtatcaaatgggggttaaactaaactttcacataacacggtgataatactggaaacacaacttgatgtaaaagggataatatatatgtgacaatattttaaagtaat

SEQ ID NO: 60258 - DNA, 274 bp, Homo sapiens
acaaagaacaaaaagtctttattaccaaatttagcttagctcaatccttctacgctgaagagcttttggagccagcatctacagggcctaatcaataatggtccctttttccatagtctctttgtttgaacagattttctgaaccttcctcttacagtaatggatttgatcatctccaaaagccacgggaaagcggtcttaagtctccttcaaaaattctccaatgatttgagaagtagaaaagaatcagaaatgtgtgtgtttcccacaagag

SEQ ID NO: 60259 - DNA, 283 bp, Homo sapiens
actggatgcatttggggaacctgcttttgatagaattgcctataagagcaaaaggagttgctgaccatgtaagagtgttaacaaaaacatcccaggcagagttaatagcgtgggcaaatgtctggagacaagaaagaggctgagatgcttgaggaaatttttaaaaagttgaagaaggctgggtgcggtggctcaggcctgtaatcccagcactttgggaggccaaggtgggcggatcacctgaggtcaggatttctagaccagcctggccaacatggtgaaa

SEQ ID NO: 60260 - DNA, 186 bp, Homo sapiens
ctccaccgcggtggcggccgagtacttttttttttttttttttttttttccccaaccccccccccggggggggggggggtaatttgcccccccggcccctttcttggaggggggaaccgtttttaaagccccctttcggaaaaaaaaccctttttcccccccccccgggggccccaggggggggcc

SEQ ID NO: 60261 - DNA, 224 bp, Homo sapiens
actttttttttttttttttttttccgaaccacccccccgggggggggaaggggtaatttgcccccccggctcctttcttggaatggggaacccttttttaaggccccttttcggaaataaaaccttattcccccttccccgggggcccccttggggggccgggaaattcccttaaaaggttaatggggcaaactttcaaaggggtctccccccccagggggggg

SEQ ID NO: 60262 - DNA, 407 bp, Homo sapiens
aaaaagggaaaaggggcatactggggtttttttccccccgggggttttttttttccctcaaaaggggcaaattaaaaaggaaattttccccttttttttaagggtaaccccccgggccccccaattttaaaccctttttaggccccaaaacctttttaatggaccccccaaaaattttcaaaccctttttttttttttaaaatttaaaaagggggtttgggtccgggcttaaaggggcaacaaaagttttttacccccccccaaaaacggtttccggggaaaatgggaaaaatttaaaatttgaaagccctaaaaaacccaaggggctttgtttcccaaaaaaaaattattgggggggggggggtttttaaaccaaaattctttttttttgcccaaaggggggtttt

SEQ ID NO: 60263 - DNA, 395 bp, Homo sapiens
gacaaaaagggggattggcggggggttaattctggggaaaaaacccattttttggaaaaaaaaaaagggccaagggggggattttttttaaaattttggggtaaagaaatgagggctaagggctttaaaaacccctaaaaaaaaaaacccgggggttttaatttttaagaaaaggggaatttttttttaaaagggggatccgggaaaaatttttttaaaaaaaaaaaacccccaaaaaaggtttcccccccccgggtttaaagggggttaaaagggggggggtttttttttttaattttaaaaagggggggaaaacaaggccccccttttgggggaaaaaaaattttttaggtttttaacccccttttcggggggggcccaaaaaaaaaaaaaaa

SEQ ID NO: 60264 - DNA, 226 bp, Homo sapiens
acttttttttttttttttttttttgggcaccccccccccggggggggggggggaaatttgcccccccggccccttttttgggggggggacccgtttttaaggccccctttcggaaaaaaaaccttttttccccgtcccccggggccccctgggggggcccgggcatcccctttaaaagtttttggggccacccttcaaaggggccccccccccccggggggggggg

SEQ ID NO: 60265 - DNA, 313 bp, Homo sapiens
acttttttttttttttttttttttttttcgcaaatacccccccggggggggaaggggtaatttgcccccccggttccttttttggatagggggaaccctttttaaagcccccttttcgaaaaaaaacccttatatccccctcccccgggggccccatgggggggccgggaaacccccttaaaagtttaatggggaaaactttaaatggggtcccccccccccgggggggcgtcaaatcgccccaggttttttaaaattaaaaaaacccccgggcccccccccccgggcgttttaaaattaagggatcccccgg

SEQ ID NO: 60266 - DNA, 285 bp, Homo sapiens
acttttttttttttttttttttttttttttccgaaatacccccccggggggggaaggggtaatttgcccccccggcgcctttcttggaatggggaaccctttttaaaggctccttttcgaaaataaaaccttatatccccctccccccggggcaccatgggggggccgggaaattcccttaaaaggttaatggggaaaactttaaaagggttcccccccccccggggggggcttcaaaccccccaaggttttttaaaataaaaaaaaccccggggcccccccccc

SEQ ID NO: 60267 - DNA, 588 bp, Homo sapiens
  misc_feature 30, 31, 33, 34, 43, 48, 51, 56, 70, 74, 79, 87, 93, 104,114, 140, 150, 151, 191, 197, 198, 209, 211, 212, 224, 250,256, 265, 300, 310, 336, 379, 399, 405, 418, 432, 438, 482,491, 500, 510, 512, 523, 535, 542, 548, 556, 573, 577: n = A,T,C or G
ctttttaaaattttttagggggggcttttnncnnccttttaancccgnaantttcntttttgaatggggngggnggggncccccccngggggnaattttaattngggggggggngggggaaaccctttttccccccccanccccccgggnnccgggggggtttggggggggcccccggggggccccccccngggggnngggggtttttnannccccaaggtttnggggaaaaaaaaaaaaccttgggggncccggnaaaaatttnggggggggccctttcccctttttttttaaaaaaanttttcccccnagttttttttttttttggggggggtnttttttccccccctttttttttggggggggttttcccgggggntttttttcgggggctttttncccccnttttttttttttnccccttttaaaaantttttnggggggggatataaaaaaaacccttggggggggggggggggggnaaaaaaaanttttttttnttttttgaangngaagaaccccnttttttaaaaanataaacncccttnttttgggnccccccccccaaaaaanaggnggggggggggg

SEQ ID NO: 60268 - DNA, 128 bp, Homo sapiens
acttttttttttttttttttttttaaagggggaaaacccggaaaaatttaagggggttgggacccctttctttaaattacccctgggggaaggggaaaaaattttttcaaaaaaaggttttaaattgg

SEQ ID NO: 60269 - DNA, 172 bp, Homo sapiens
tccaccgcggtggcggccgacgtgcctggctccgtcctacaccgacgtatctttgggcttctatggaaaccgcgatgatgtggctttggaaggcgtgagcctagttcttgcgcgatgggccgatggagaacgctagggctacaagcgtctgctagaatatgcgaaccagcgc

SEQ ID NO: 60270 - DNA, 171 bp, Homo sapiens
ggaactccccgcggtggcggccgaggtacttttttttttttttttttttttttttaaaattttttttttaaaggggaaatttgttggaattccctttttaggccccttatttttggggaaaattgggggggttttttttttcccaccctcctttttttttttcccctttta

SEQ ID NO: 60271 - DNA, 353 bp, Homo sapiens
ttttttttttttaagaggggggggggtgaacctaaaaaccctttttaaatgggggggtgttttaggccctctttggggggaaaaatttttaccccccttaaaagggtttttttctaagggccaaaaaagttttcctttttggaacaaacattaaatttaccagggggttttggggaattttggggccaaattaaaagtgaaaaaaaaattttttttggaaaaaccatttttaaccgggccgggggggttggcccccttcccctaaaaatttccccactttttggcaaaaaaaagggggggcctttttaaccttttttaaggaacccccctgggttcggggggtttaactttgg

SEQ ID NO: 60272 - DNA, 289 bp, Homo sapiens
acctggtcacccacaatatctccaaagtatacctgtgttatacattctgcattcattttctattgctgccataacaaattaccacatacatagcagcttagaataacacccatttgttatttcactgctctttatttcagaagttcagatgggctgagctgaatattctgctaagggtctcacaaagctgtattcaaaatgtcagtcaatttgtagtcttcattgaaggctttgtgggagaatcactaccaggtttattcaggtttttggaagaattcaatttcattct

SEQ ID NO: 60273 - DNA, 415 bp, Homo sapiens
cggaccaggtactttttttttttttttttttttaggggccaaaattttacccttgctttttgggatatggggagaatgggttttttttttgggttaaggagggatatttttgggccaaggccccttcttggttttttgggggcggatcgaaaatttgtttgggcaattggaaaaaatttttcggccttaatggggggagggttttttaaggggtgggcaagggtttttttttagggccccccaaaaaggcctgggaaaaatatttttattgcctttagggaaaaagggaaaaaatttaacccggggccgccttcatttttttattaggggtgaagggggattttcccgaaaggggggggaatccttagggggtgttttaaccccttcccgggcaaaaaccggagggggatttttt

SEQ ID NO: 60274 - DNA, 386 bp, Homo sapiens
acttttttttttttttttaaaccatttctttttgaatttttccttttaaaagggcaaaaggcttccccttttccaaattgtaaactaaattttgcgggatccccccccttgtttttttttttttccccaaaagggaaaattttttaaaacccaattgattttatttgttttggccccccctgggtttttcggggtaaaaatttcccattggaattatttgttaaaaaaaagtctttgaacccttggtttaacggggagggttccttaatttaaattttttgcacccaaagcaccccccaggctttttttaccaccggaaaaatgatggtttttgattccctgggtgccaaaaattgaggcccctttttttttaaaaccttcccccc

SEQ ID NO: 60275 - DNA, 258 bp, Homo sapiens
  misc_feature 1: n = A,T,C or G
nctccaccgcggtggcggccgagtaccagttagtgttgtaaacactctacatgtgaactaacctattcagtcctcccagcaaccctttcagctaactattatcttcattttatatacgaagaaattgagacgcaggttaataattcgcctgtagttaccagttactgaatgactcagctgcgacctgaactcaggcagtctggctgcagagtgcatacttctaacagttaccttacagtgacttctcaaacatagagt

SEQ ID NO: 60276 - DNA, 414 bp, Homo sapiens
actttttttttttttttttccccaatttgggggaaaacccaattaattttgttccccaattggaaacattttcaccaattttgaaaccattttgttttttaattgggggaaaaaaatttttccatttttgaaaaaaaaaaacctgtttttcctccccccccctaaatcctttttgaaaatgaaaagttgggatgttaacctgaggcgggggaaattttccatttttttttttggggggggggggggcaaaaattttttcaagtttttttcccctaaggtctgccaaaaacccaaagggcaattacctcagggggtaacaaaaaacaaaaaatcccattttcgggatattcaaccccccccgggtttccattttataaaaccaaaaccatttctccctttggggtttgggaaaaa

SEQ ID NO: 60277 - DNA, 356 bp, Homo sapiens
caccgcggtggcggccgaggtacttttttttttttttttttcttttttttttttttttttttcggggcggggggggaaaccccaaaaatgggccgcgggtccacaacccctttttacctaaaaccccgggggagggggcacaaaattttttcataaaaaagggtgtaaactgcccccccccaaaaaggggggttcccctcccaaattaaaaaaaccgggggggtaaaaaagggggcctgggaaaaaaaattttttttaaaaaaccaagggaaaaaccccctttttttttccccaaaaaaaaattgagggggggggggtttaataaaaaaaaaggggggtcccccccccaaaaaaaa

SEQ ID NO: 60278 - DNA, 390 bp, Homo sapiens
  misc_feature 1, 6, 54, 64, 72, 85, 128, 179, 213, 250, 265, 277, 281,319, 331, 336, 348, 359, 364, 366, 368, 378, 379, 383: n = A,T,C or G
ncccgncggggttggggccggggcccgccccccacgccttggggttttttttgnccttcctttncaggaaanaaacggcttcgtnagccccttcgcgccttttcttccttcggcccagttttcgcggnaaaaagtgggcttcacgccctttcccagaaacccacattcattcggcggtncgaaaataagaaagccccaaaaaaaaaaggttangttgttaaggaaaggcccttgccaaggttacccttcngggcccgcttcttanaaaacttaagtngggnattcccccccccgggggccctttggccaaggggaaaanttttccgaattntttcnaaagcccttttnttccgaataancccgntncnaaaccctttnnaaanggggggg

SEQ ID NO: 60279 - DNA, 168 bp, Homo sapiens
aaaaacttaacccttaacaaatttttaaaacccctttggctttttttttaaaagggggggtaaaaaccttttttttaaaaaaaaaaaaaaattttttgggggtttctaaaaccccccccgcccccttaaaaaaaacccccgggggggggggctaaaaggcccccccgg

SEQ ID NO: 60280 - DNA, 253 bp, Homo sapiens
accactgcactccagcctgggcgacagagcaagaccctgtctcttaagagacaataagaaataaataaaaattccatcaaagaatttctcttagggtataaagccagagacaaagatgaaaaatgggagaaatgtccagtggttctcaaccatgtctgactgcacattaggatcatctaacatggtttttgaaaacaccattaccctggccccaccacagaccaattaaatccagactctctgggctggagtc

SEQ ID NO: 60281 - DNA, 277 bp, Homo sapiens
accccagtttccacccaggacctgcctccccaagctgagttccagtcatacagcaggacatgctacgacagtgaagattcagctgtttttcagagtgacggatgaccgggccaagcaatctgaactgtacttagttggaatgatctgttactatggcaaacattattctacattcttttttcaaacaaagattcgcaaatggatgtattttgatgatgctcatgtcaaggaggtaggagtagtcaagtcctttttgaagtgtttggtgactacaaaa

SEQ ID NO: 60282 - DNA, 286 bp, Homo sapiens
actttttttttttttttttttggaaaggggggttcccccttgcccccagggtggaggggaggggccccatttggggttattggaacccccaacccccaattttgggggatttttctggccaaaccccccgagggggggggattaaagggtttcccccctgccccaaaaaaatttttgtttttttaggaaaaaggggttttcccccttgtgcccggggtggtttaaaaccccggacccaaagggaacccccccccctaacctttaaaaggggggggaaaaaaggggg

SEQ ID NO: 60283 - DNA, 292 bp, Homo sapiens
acttttttttttttttttttttttttttttattttacccaaaaacggtgttttgtccctttccccccaacccctactttaaaaaaacctggttcccggaaacccttttggtggttttttcccaaaatccctgaaaccccttttggggaccccccggggccaccggcaaataaggccctcccccgaggtttaaaaaaatttttttacctaaagccccagggaaaaaccttaaggggggaaatccccttgaatttaaaatacctcccgaccaaaaagcccttccatttttaaaa

SEQ ID NO: 60284 - DNA, 153 bp, Homo sapiens
acttttttttttttttttttttttttaaaatatttttatttaaaaggggaaatttgttggaactccctggaaaagcccaatatttttggaaaaaaatggggggtttttttttttccaaactctctttttttttttcccctttttaatttgggg

SEQ ID NO: 60285 - DNA, 549 bp, Homo sapiens
gagctccaccgcggtggcgagccgaggtacaggaacttgataatcattgttgttgtctttatcattaccatcatctccattagcatcatcagcatcacagttgcagtatggggatcacattaagtgatgcggcaagatcaggaaaaccattatcaagacaatgtccagtttggatgtgtaaatattatcctgtgcttcttggcccatttagcaaacactttcttttcagtgataaacctatgacccccatatggggcatgttcatgaagaaaatattcatcacactcatctcttccttgttcataataatggtaggggacttttctatacccttctgtcttgcagtaggtgtcatttatcatcccgtagacgtgaatgccataacaggcgtccatggccagaaggaaggtaaaccaccctgtgctgagatatgagccatactggactctgtccttcccattttccttcttaaaaactccatcacagtaactcatgcgcttctctgtgtcacgtatatttggacattcggatagataccaactgtatttt

SEQ ID NO: 60286 - DNA, 293 bp, Homo sapiens
acattgctttttaccccatctcagggtaaaagttagtccttactctgaactaaaggtcctatgtgatctggccttctaggacccctctgccctcatctctcacttttgtctcccttatgaccttgctcgctatataaccacactggctcccttcctaaccctaaaacataccatgcctgctgcagcctcagtaacctggcttcagctgcttcttctgccagggatgccgcgacagcagatctcctcaaggcgcactccttcacttcctgcagtctctccttaagcattttctg

SEQ ID NO: 60287 - DNA, 310 bp, Homo sapiens
acctgggaggcgaaggttgcactaagtcgagactgtgccactgcactccagcccaggcaacagagtgagactccatctcaaaaaaataaaaataaaaaacaaacaaacaacaacaacaacaaaaaaatgtgtcaaactaaaggaaacatcaaaatgctaccagtagttgtcttcaggtagtagaactaagggctatttattttctctttctactttataataatttttttaattaataaaagatcatgggccagggggcatgttgccaggtggccaacacagcgaaaccccatttctactaaaaatacaa

SEQ ID NO: 60288 - DNA, 291 bp, Homo sapiens
acattgctttttaccccatctcagggtaaaagttagtccttactctgaactaaaggtcctatgtgatctggccttctaggacccctctgccctcatctctcacttttgtctcccttatgaccttgctcgctatataaccacactggctcccttcctaaccctaaaacataccatgcctgctgcagcctcagtaacctggcttcagctgcttcttctgccagggatgccgcgacagcagatctcctcaaggcgcactccttcacttcctgcagtctctccttaaagcatttt

SEQ ID NO: 60289 - DNA, 527 bp, Homo sapiens
tccaccgcggtggccgagcggccgcccgggcaggtacttttttttttttttttttttttcctttttttttttttttttcccccctttaattaaaaggggaccccccccaaggggcccaaatttaacaaaattttcggggcaggggacctttgaaccttatccccctttaaaaaaaaaagaggggccccccccccccctttttttaaaaattggggggagcttttcccccaaaactgcaaaaaaaataaaaaaaaattggaagggttttggggaagttagggggcccccccccacccaaaggggattttagggcccccttggacccccaaaaaacccccaaaaccctttttgggggaaccaaaaaaaaattcccccccaacctcccatttttttaaaaaagaaaaaaacccagaaccccccgttcccttgggccttttaaaaaatggggtccccccgggctcggggattttaatttaaactttttttatcccccccacccggaggggggcccccgccccccatttttt

SEQ ID NO: 60290 - DNA, 166 bp, Homo sapiens
actttttttttttttttttttaaaaaaaaccttggaaacttttttttgaacccccttttttaaaaaaccccaacctttcaaaaacctttcccaggggttgggtcccctttcccaaaaaaaaaatttcccccctttaagttttcaaagggcttggttgggggaaaat

SEQ ID NO: 60291 - DNA, 300 bp, Homo sapiens
  misc_feature 196, 197, 198, 199, 200, 201, 202, 203, 204, 205, 206, 207,208, 209, 210, 211, 212, 213, 214, 215, 216, 217, 218: n = A,T,C or G
actgtcacccatggccctgataggaaacagatggcatattcaagctggataatttgaagaggattaaatgaaacaagtattcacaaataggtgggcagagtttagaaaatcaacaagagatattgtagtatcctgggctagcaacagagaggatgggaatattgccccatagacctgaagtgcaaagagaaggagnnnnnnnnnnnnnnnnnnnnnnnacctatagtcccagctacttgggaaactgacatggaaagattgcttgagcccaggggtttgaggctgcagtgagtatgacta

SEQ ID NO: 60292 - DNA, 322 bp, Homo sapiens
acttttttttttttttttttttttttaaaaaagagaggggggtttaattttgtacccggggcttgataaaacccctttttttaaataacccccctgattttgccccccaaaaggggtggtttaaaaatatagccccctacgttcctaaaccatttttgggggtttattttttatcggggaaaaaatggcttaatattgggacagagtttctatttacttgggccattttggggacttttgtttttattaaccgaaaataactcttttcccccgtagatattaaacaggggcatggaaaaaaaaatgtttttttttgaaaatt

SEQ ID NO: 60293 - DNA, 118 bp, Homo sapiens
cccccaaattttcccgggccccaaaaggagggggttaaaaaaaattacggggggggaattttttaaccccccccccttcccaaaaaaaaaacccccccccctttgggggtgttaaaaa

SEQ ID NO: 60294 - DNA, 226 bp, Homo sapiens
actcagaaatcctccaaagactccaatctacaaagccctacaggatctaacacctgtaaaggctctgacctcatcgtctgctctctcctcctttacactgcattccagccacaccaatgtaccgagtggtcttcaaaaatgccaggcactctctggtctcagggactctcaactagaagccccctctactaggaagtaatgtgtatggctcactttttcattccct

SEQ ID NO: 60295 - DNA, 161 bp, Homo sapiens
actttttttttttttttttttttttaaaaggggggggccaaacccggggccttggctttttttgggaaccccttttcccttgggttaaatcccccccccttaaattttttgggctaaaaaatttttctcgggggacccggaaaaatgggtcctttttaaaa

SEQ ID NO: 60296 - DNA, 373 bp, Homo sapiens
ttggttctttttgctgatatttttttttattgtgataaaaattatcagttcttttttttcttttttagtgataagagaaagttggtttgttggggaaagacagatggggagaaaggttggctggttgttaataaaacagtagaggatgagcatgtattataaatgctggtgggaagaaaccttgtggcaaggagggtggtagtgttggagaagaaagagaggatatagttgaaagttaaagaggaactggaagcaggtgggatccaggacataggaaggggaagagccttgggcagaggcgagacatctgccggagggaaggaactgatataatggaaggtgtgcaaatgtgggcaggaggagtttgagtaaa

SEQ ID NO: 60297 - DNA, 152 bp, Homo sapiens
accggttgttatgttaggcctttagaatgcaataggaaaaattttaaggatgtgtcagagttaacctgactaatagaagaaggaagagcatttcaagaagaaataatggtttgtgcaaacattctgtggcaggaagcagacaagcaattttg

SEQ ID NO: 60298 - DNA, 340 bp, Homo sapiens
tgtttccgttgtaaacgaggccgtcaatcatgtctagctgtttcctgttgtaaaacgacggccattaatcatggtgctgaggctgtttcctgttgtaaaactacttacagggggggtggttatagcccctctagggggataaaaattttaacccccttacaagggttttccccttgggtcaaaaaaacttttcctttttgaacaaaagttaaattttccagggggattaaaagggtttcgggccccaattaaaaggtgaacaaaaatttttttgggaaaaccccattttaaccggggggggggggttttcccccctcccaaaaaaattcccccaaatttt

SEQ ID NO: 60299 - DNA, 257 bp, Homo sapiens
actgcttttttgttttttttttttgggctggggcggagggggcatgcggaccctcgggaaaccggggataagtttttttcctctttgaaggatagagaaaatccaactactggaaaaatatatttaataggttactaacatattgcttagcgggaattagggacccccatcccaatcccggaaaattttaagagataatatgaagactgggattactctcatgaggaaggaaaagataaaaggtttctaaaacatga

SEQ ID NO: 60300 - DNA, 212 bp, Homo sapiens
tcgagcggccgcccgggcaggtacagcatgtgcaggattaaaaacacatttccaagggctaactttttgcatacgtgggttacacagggccaactgccaaacttgagtatgcacagacttttgtatatgtggaagtcttgaaatgaatcctttgtgtatcctgagggacaattatattttcctcttctccttgttttgggtttcgcttgctc

SEQ ID NO: 60301 - DNA, 309 bp, Homo sapiens
tttccttttttaaaaaaaaaaaccgccctcctgggcttttcttttttcttttttaaaaaaaaaaaacggctcttttggggctttttgggggcgttaaaattttaaattgactaaaaagggtttttcccaggggccaaaaaacttttcccttttggaacaaatttaaaattccacgggggttttaggggggttttggggccaatttaaagttaaaacaaaaatttttttgggaaaacccgttttcccccagggtgggaaggttagccccctccccttaaaactcccccaactttgtggaaaaaaaaaggg

SEQ ID NO: 60302 - DNA, 198 bp, Homo sapiens
acaggtagaaaaaaattccagggctaagcctgatagcttccgtcagacagcaaggctccagcctcgcactcctaatacccgtattccacacagtagccagagtgacccttctaacgttcaactcagatcatgattttcctatgattaataatgcattccaatttcaacagtaattaaatacatatttattactatggt

SEQ ID NO: 60303 - DNA, 233 bp, Homo sapiens
acatctggctttttactgcattgtttggtttttgggggaaaacgaaaaaccctttttttaccggggctaaattgcggggccacattgggggttaaatgtaacccccttttcccgggttaaaccaattttcctccaaaagcctcccattttgtgggaataaaaggaacaccccaggggcccggggggttttaaaactaaagattccccgggcctgaaaaatttttttttaaacc

SEQ ID NO: 60304 - DNA, 167 bp, Homo sapiens
actttttttttttcaaattttcttttttctcaaccctttgatctctttgtctcatacttcattcaaaatgatttacagagaaaatagaggatttcagatggaactttactcaaactcctcctgccacatttgcacaccttcccttctctcagttccttccctcctgc

SEQ ID NO: 60305 - DNA, 243 bp, Homo sapiens
ctccaccgcggtggcggccgacgtaccttgttctttttcttcttgaacaagcaggcaccccgggggcttactggaaaccctcctatgggggttacaatcccgacgttttcggctaaaattcaataaaccgagtgccttaaagggcgaaatagggggcgggcctccttgaatatacccacgatggggaggagggctatgatcaagatggatattaatattgcaaggacacctcctaccttgtta

SEQ ID NO: 60306 - DNA, 293 bp, Homo sapiens
acttttttttttttttttttttttttccttttttcttttttttttaattttttaaattttttttcaaaaaccggggggcccttgccaaatttttccccgggaaattttggggaaattagagggtgggaaaaaaaaccctttccccccaccaaccttttttatttggaaaaaaaaaatttttaaaaatctctccccctcccccctttgtggaaaataaaatgggggaaaatggggaaaaaaattccgggtgggaaaaaaacagggctttataaaaacccttacctttttaaaaa

SEQ ID NO: 60307 - DNA, 462 bp, Homo sapiens
  misc_feature 442, 443: n = A,T,C or G
ctccccgcggtggcggccgaggtacttgttgctaagataacagggattgatgtctagtttcacccaatgcagtggggagtgctagcgaacccctcttactcagtgttcagacctgagggactgcctccctgaaataggccatatctgagatttggtttccccaaaagcagagcttgagagaaggatttggctgtaaatcgtttatttaggaggtgattgcaggaagcactgtgtgggaatggagaaatgtataagggtgggagaaatgccaataaaaggtgggctgataagtgttttactaccacaggcaactgggacccaatcccactgggaaccctctgagagaccaggacatacctgagaattaacctactgaggagggaggaagctaggggtatttatccatgaaccccatctcacagtagttaagggttgctcctanngtgtttactagctaagctg

SEQ ID NO: 60308 - DNA, 133 bp, Homo sapiens
  misc_feature 1, 4: n = A,T,C or G
nccnaaattttaattgggaacctttctttgggtaaaaattttttgggcttttccaaatattgttctcttcattgtaaaaaaccccggggttttccttttcccccaaggggggttaaacatataattttttctg

SEQ ID NO: 60309 - DNA, 198 bp, Homo sapiens
acttggccagcactttgagaaccctttcttgcccctcccaatcattgttcattcaccttctattctgacttctgatacaatagtttgacctgttttaaactttatatgaatggaatacttaatgtgctcttttgtgctcaacttcttttgcacaatactgtctttaggagattcatctacacagttgtatgtagtgac

SEQ ID NO: 60310 - DNA, 468 bp, Homo sapiens
acgctctatggataaagaggcaactgattctgaaacaaattctgaagtatcagtttcttcttcctatttagaacctctggatctaactcacatacatttcaatcaacataagtctgagggtaattctcttatttgtctaagaaaaaaggactacttgacaggaactggccaagattcttcacatttggtccttgtgacctttaagaaggcagttaccatgacgagaaaagtcactattccaggcattctggttcctgatctgatagcatttaatcttaaagcccacgtagtggcagtggcttccaacacttgtaatataattttgatctactctgtcattccatcttcagtcccaaacatccagcaaattcgattagagaacactgaaagaccaaaagggatatgtttcttgacagaccaactattactaattttggtaggaaaacaaaaactcactgatacaacatt

SEQ ID NO: 60311 - DNA, 575 bp, Homo sapiens
acccttatttgatttaaaagcatgaatatatgagatttactagcagtattaagtatttgatagagctacgtgatttttgggaagaaatttgttatatggtatgtagtgttaatttggatataatttttggtaaagggatggcagaaaacatagtcaattttggttataataaacgtaaccttattcttggcctgctccatgtgaaatagggctcagggaagctggtcttttccttagcgggatgattactcctttgccttgaaacatttattgggcccaccatgtatggatcagcatgtggtggtaagtcatactcccaaatcagtgattcccaagtcttggctttgggaaccagtatgcctcgtattctcttaaagagcaacaagaatttcttgaaacaaaattagttcagaattgatttaaattttttaacttctggaaatacacgaagttatgtctgagtcatgagtgacagtcattgattaaatcatttctctgtctcttttttagcattattgatcacagagtccgttataaaaagtggttgattcctttcaacatttaacaataacttc

SEQ ID NO: 60312 - DNA, 313 bp, Homo sapiens
gcggccgcccgggtcaggtacctccaggagctgactgagcactatgcaaatgtttatttggaaggtgattccaagagccactggtgaagtgaaataaatacctaagaatggtgggagagtttgttgcaatatggattgctacgtcccaccatcagagtttgagtcagtaggtctgagttagctctgaaaatatgcattcctaggaagttcccaggtgatgctgatgctagtaaaagggaccagagtttgagaataactactttaaaacaatctgggcatcaactccttttctgatgccctgtatttctctctg

SEQ ID NO: 60313 - DNA, 496 bp, Homo sapiens
acactagggcccccgggtggcgacagtgcatcagtgtaggttcgtcagttgcaacacgtgcctctggtgggggatggggattgcggaaggggctgtgcctgtgtagggccagggagtataggtgaactgtattgaattgtattttccactccattttgctgtgaccctaaaactgctctaagaaaatcatctatttataaacaaataaatattcttctaagaagccaaagcagaaaacgatcaagtggagtgtgttaatgtcagcaaaggtttttgctgccacgaggttgaggcaaggagagaaacgtgtcccttggttagtgatgtggctatattcatcactttaatgagaataatgtctgctgagtgatggggctggaacctagattggagaaggtttgagcgaatggaaggtaagaaagtgactaaatgagtatagaaaactaccaagaagcttggctgttgctggtgaaagaatattacacaagtagggcca

SEQ ID NO: 60314 - DNA, 565 bp, Homo sapiens
  misc_feature 1: n = A,T,C or G
nacctccaccgcggtggcggccgagtactttgaacctcgacatcacattatcctgaaaccaattcttggtttgtgaaacataaacctcttccatttcgaaggagtccttctgctgtgtcattatatttcttatggatggtattgtcagtggtgcacaaggctctttttcaggtgtggatatatggacacttttcagctcactgctattttccagctcactgtggctggatatgttgaaatcactatctaatttggattctacaataccagattcctcacccagtttactctcatgactttgagtttctttactttgttcattttcagttccttggttaaaattactatttgcttcatcagaaattctatcactatcagcattctccgtaacagctgctgaactaccagagacttcttctttaactgtagccaacatagaagatgactctttcttcttcataattttttgagacttttgatcgtttttattgccactttcttcaatcactgaaacatttagaatctttcctttttcagctgatggagaaggactactactttctcc

SEQ ID NO: 60315 - DNA, 238 bp, Homo sapiens
acatagtgattcagtattagagaaagtgcattgtttctgtcatatttccaatctgtgttggtgctcatttgagaaaataaaagttttcaaatatcaaaaaaaaaaaaaaaaaaaaaaaagtcccctcccccgggcgggccctttttaaaaaatgggggacccccccgggccggggggaaattttaattaacacccttttaaaacccccgcccccctcggggggggggccccgcccccc

SEQ ID NO: 60316 - DNA, 410 bp, Homo sapiens
acctcagttggaaatgcagaaatcacccatcttctacatcgatcttgctgggagctgcagaccagagctgttcctatttggctatcttggaagcaacctcaggtatttctttattagcagtgtgagaacagactaatacagattactaaatccagaatccagagaacacaagattataagttccttgcgcttgagcatgttcagtgagagcgctgcagggagaaggatgatgcattctgagagccaacagggctggactggaaactggaggaagagaaagagccaaattctttgagttcctttatctccatcctggtctgtgatttttaaataaagagatgaaggaagaatgaaaataagcatggttagcaggatgtaactcctacgactccaaaaatatccttcatgga

SEQ ID NO: 60317 - DNA, 628 bp, Homo sapiens
  misc_feature 540: n = A,T,C or G
accacccattgccagtctggaacttgaggggtggtctgttcataattctcaaagtctgtgtatgtttgtttgggtcagatgtatgcatgtgccactcgagggtgagtccaggagttcataaaacaactttgaggtgttgctctcccatgttccttgtctgtgatctcccagtaatttctaattctgcatggctccccttttctgatcagaaagtggatctttatccctctttaatgttcactccctgcagctgtgcccatattcagggccaagtggcaggaggacagagagagaagcaaaagggattcaccacatcctcttgggaccacagcttctgtgatcagagaggtagattccctctctcagagttttagttcttagtaacctccattgccactgctgccacagctgtgatgggtggctgggcttgagagagtgaagagagaaaaaaacggggggatttgcacacttccttgtgagtcctaagagacccctttccctctctcaagccagaggtagagggcttctcctgaagctttncatttgggctgtattatgttcagtctggatgaaagcagaggtggaaataaatggtaaaacctgtgggttgcttcagtggtacctcggc

SEQ ID NO: 60318 - DNA, 373 bp, Homo sapiens
  misc_feature 19, 21, 22, 56: n = A,T,C or G
cgcgggtggcggccgagtncnntgaaagtttcacatacggatcactggctccaaanagtcctttttggcgagatcaattccagaaacaacttttactctgagaatacgggactctcccgagtgttacttgctcaaatgcgagacgtctcatttaggagaatacaatattaaaggtttagtgcattaaaggaaagctggaaaactcaagggcagagcaagttctgaagagtatgcggaagtcgtggctgcagccaagggtaactttccactgccgggtgacaaggtcacaggagagaagttttaacttgactcccaggaaagcagtctacacggttgttcctctctggaaatggcttcctctgtgtccccgcgt

SEQ ID NO: 60319 - DNA, 615 bp, Homo sapiens
  misc_feature 596: n = A,T,C or G
gtggcggccgagagccctgctcactagacggatgttcttgagggcgcactttgaaaggtcagggcctggggaattctgctgagaaatcattccatgttaataccatctctaggagctacattaagtgttgttagtgaacccatacaaggctccacgattgctggttacctctgtagttactcataaactatttaatagctctttccattttagtttactgtattcattgttgtctattcatgcagaaatcatttttttaagttttctagatttttagatttgtatcatattagtttacctgtacattagaactaaaatgattttattattacatggaaataattacagaattataatttgaggccacaccctcaggttttattgaaagttgatatgagaaatgaccatatgaagaatgaacctccattttccctaaaattattattaaatacactgtccattctggtgttcaaaggcccttatatatagatgcatgtgataaattcccctaaaattttagtatgaaaaataaagtttgcccactttgataagcatgacttaaaaaaaaaaaaatgctggattattcctgtataacncatcatgttcccccttttg

SEQ ID NO: 60320 - DNA, 556 bp, Homo sapiens
acaaaatctgacaattaagacacccacaagagacacagaattatctcccaataaaattgtctcataaaaacctggctcccacaaatatggaaagggagaaaactagaataaaccctgtggtgtcgaattggagatatcagtgtgaactcgtgtatttcagtctatagagatagatgtaaatatgtttttgtatgtatagtcctttgcactgatgtgagagcaatgacactccaatagtaatgaccacacccagcacccaggtccaccaaaagacaaagtgctatggactgaattatatccccctaaaattcatatgttgaagccctaacccccaatgtgatgatatttggaaatgggacatttgggagataattaagtttagatggccaggtgtggtgggctcacgcctgtaatcccagcactttgggaggccgaggcgggcggatcacaaggtcaggagatcgagaccatcctggctaacacggtgaaaccctgtctcttctaaaaatacaaaaattagctgggtgtggtggcacgcacctgtagtcccagctac

SEQ ID NO: 60321 - DNA, 537 bp, Homo sapiens
accattatgattccaatctactgctccactatttgaaagccaaccacctccagaattactatggttgtgaaaccaagtcgaggagcctcctgcaacacccttatgccacccggaacgtcctcttggtccaccaccattcctcaaagaatgtggaaagctgtttttcctagtattattaaagccatctttttcccatttccaatcccgctgtggaggtccacgatgatgccatgcaggctgactgtaactctctctgtcttggtaaggaattcggtcttctcgtctccattggggtcgtctgtcatcagagtttatttcttggttgctattggaaggttcatcttgtcgactttgttctttcctttgttttattaactgaatgagttccttgtcaaaataatcttcttcctcttcctctccttttccatcatcttctctttcctgggcatcaacgttatctttgtgcaactggccagaaatgtgctttgcatatgcagaaagacccacttctgtgaccccgcacactcggcactcatg

SEQ ID NO: 60322 - DNA, 511 bp, Homo sapiens
  misc_feature 2: n = A,T,C or G
anctccaccgcggtggcggccgagtactggtgccccatagcctgacgtcctgaagcaattcatgaaatacaggtggggaaagatgaagactgtctttctcttattaactgcctcagttctttaatggtagctgaagcagggaaattaccttggtgcttgaaagctgcacttttattttatatttttaaacttttgtaagaagtcttggtgggggtctttcttgcatgtattttggacgcttgatccttgatcattgtattattaccttgaccctcctaaagaatgacattgattatgtcattctcattgttcaaagtccttcagtggctcccttctacttgaagaagatagtctcaggccttcactccagcacagttttcctcataatctaatcctaggatagtgttgtggtgatgagcattgattctgggttaaatacctgattctgcctcttgtgaccttgaacaaattgcttaacctttctaagcttcctgtttcctcatgtataaaa

SEQ ID NO: 60323 - DNA, 377 bp, Homo sapiens
  misc_feature 16, 18, 26, 29, 30, 32, 33, 35, 36, 48, 55, 56, 62, 68, 79,84, 91, 97, 110, 122, 156, 161, 174, 180, 184, 193, 205,223, 228, 262, 278, 294: n = A,T,C or G
ctaagctgtttcctgntntgtaaaanganngnncnncactcctggtgnatggccnnctttgnctcgtnttacaaaaacngcaancaatggncccggnactgcggaatgcnctccttattggnaaaggaagtccaatggcaagggcaatcgaatggnaatgnaaatagtaatggnaatggnaatncgcaaaggnaatagaaatggnaatggtatccgttatggnaaagnacatccgaatgggatggaattgcactcgaatggnaatggactggaatggnaccggactcgaatggnaatggactggaatggaatggattgaacggaatggactggagaggaatggactcgaatggaaaggaaacgagtggaatggaatg

SEQ ID NO: 60324 - DNA, 384 bp, Homo sapiens
acagctttagcatgtaatttctaatgctgagaaactaaaaaattttaaaacaagtttttttccagatgcgttagcaaatattattaaatatttcaatgaggaaacgttttcataaaatgcacaggcaaactgccccccccataaaaaaaattataaaactcagtcccccaaaccaggacttattccaggttatcagagtatgttgtgacatcttgacccacctttaactccaaagacagccaaaaatatcccttttgaactttagaaaacattatgtatatcctctaagcctttttctttttaggtaaatcatgaattgcactgtcttctaaatcactattttcaaattctaattgcctcatgaattctgttcacttcagcagt

SEQ ID NO: 60325 - DNA, 468 bp, Homo sapiens
  misc_feature 396: n = A,T,C or G
actctgcttcagccctgtcaaaccgcttccgagcgtatgaatagtctaagctggcctgatcaatccggttcctgagaattccaatgtcagctgacaccatgtcatctaaagcctgcaactccttctggatccgctttagtttcatggtctctgcctgagttcttttggatctttctgcaatagctttagccaaaagagcttttttacgtttatttttctcttccattagccgttgttcttgttggaggacttcccaacgagatttttcttgctaacaattccactttctttttctccaatttgcaatctggctttggaggtagaatctcaacattgttgtgaccatcatgggaattctcaagtcccagttcctttggctgactttcaatgccctgnggttgtccatcaccaacgggggagggtgagagtgaaatgactcggaagagtagggggaagaaaaaagggggt

SEQ ID NO: 60326 - DNA, 319 bp, Homo sapiens
acaatgtgaagatgaggtgatacaaagctgtgaatattgggaggtatggaatattgggcaccatcttgaaagctgattaacctatgagttgaattagatctttttaatattgcaaagcttaaaagtccaatttaaatattctgtaatatgaggatatataaaaggtatttttctaatttttaaagtaaaaaagactttgaatatgatctagttatcatcagattcagagggaaaataagaataaaataggggggcagagtaagatgctgaataaaagcctacactgtttatcgccctggctggaacaccaaattttaac

SEQ ID NO: 60327 - DNA, 542 bp, Homo sapiens
  misc_feature 6, 37, 39, 53, 59, 78, 84, 104, 106, 122, 123, 126, 129,131, 141, 145, 160, 161, 164, 167, 168, 170, 174, 179, 181,313, 314, 324, 333, 337, 339, 341, 344, 347, 352, 354, 359,366, 378, 380, 381, 388, 395, 400, 403, 405, 412, 414: n = A,T,C or G
  misc_feature 419, 429, 433, 444, 453, 456, 465, 474, 482, 495, 503, 511,518: n = A,T,C or G
tggaanctccaccgcggtggcggccgctgctacaaantnttggatcccccggnctgccnggaatcactattatgcaancttatnaataccgacccacctgcaangnggggcccggcacccannttntgntncctttaacgngggntaattgctctctagnnganatnntngtcntagcngnattcctgaccacctgctccccttgtagaatgatttctgcagaagggccaatttgcatttcacagggacctcgagagaaggcttgtcaacaggttgtctcagcttggaattccacagcaaaaaaaaaaaaatnntttttttaanctacaattnattntntnaanttnggggnantttgnaaaaatntttaaaaaacantnncagtttnaaatccnttagnatntntaaaatntnaaccncaggctgttncggntttttgccaancggaatttncanttgagtttnggtctcatntaaagctntggaaactgattnaaatccantaatactntttcccntcccccaaaaaaaaaaaaaaaaaa

SEQ ID NO: 60328 - DNA, 509 bp, Homo sapiens
acgagtaactttacttctctcaaatggtttcggccataactccgggattcttctggatatgtatcctcctttcgatgagtatctcgaccttcacggtccctgtagtcatgggcatcacgagtggaccgagaatctctgggatcacggctctctttggtatctctgctataatctctcatctcccttgagtcccgcatgtctctggagtctcttagttcccttcggtccctagtatctctggcatctctccgatcccgaccatctcgaggttctctgtcatctctgtggtctctagaagagctctgatcctgttcatattctcgttcttctcttgagtccttttctctgtctcgtttgcccctagtatcttccctcctttcgtggcgtcgatcatgagactgtgaagttcgttcatgatcatgtctccctttctctcgcattggagagcgatgtcttggaggactctgctttctctggggaggcgacaaagaatgtgaaggataaggaga

SEQ ID NO: 60329 - DNA, 598 bp, Homo sapiens
ccccgcggtggcggccgaggtacgcggggagattcacaaggccaacagacaacccaaagtcattaagccatgagagtggaatgaatctatgaaaactcaatgaagacagaacaagagaaaaatcttttcagccacgatgaattaggagaacaagatgtcaaattacactgatgttgagtcaagcttctcaaagcaagagataatcaggctgacctattgctgaggactatgagaaaaaagttattacagaatgagtcatatggaaaacacttgcaaacagaagaatattgagaacataagttgccatggagaaaattccagtgtcagcattcttgctccttgtggccctctcctacactctggccagagataccacagtcaaacctggagccaaaaaggacacaaaggactctcgacccaaactgccccagaccctctccagaggttggggtgaccaactcatctggactcagacatatgaagaagctctatataaatccaagacaagcaacaaacccttgatgattattcatcacttggatgagtgcccacacagtcaagctttaaagaaagtgtttgctgaaaataaagaaatcca

SEQ ID NO: 60330 - DNA, 601 bp, Homo sapiens
  misc_feature 64, 573: n = A,T,C or G
aactccccgcggtggcggccgagtacagcttcaatgatcaacatgtcagcaggataacacaagnaggacattaagaaaacacatggtggatcttcaggaagcagaggatattattctagtgctttcgcaagttccacaaatgcatatatgctgatctatagactgaaggatccagccagaaatgcaaaatttctagaagtggatgaatacccagaacatattaaaaacttggtgcagaaagagagagagttggaagaacaagaaaagagacaacgagaaattgagcgcaatacatgcaagataaaattattctgtttgcatcctacaaaacaagtaatgatggaaaataaattggaggttcataaggataagacattaaaggaagcagtagaaatggcttataagatgatggatttagaagaggtaatacccctggattgctgtcgccttgttaaatatgatgagtttcatgattatctagaacggtcatatgaaggagaagaagatacaccaatggggcttctactaggtggcgtcaagtcaacatatatgtttgatctgctgttggagacnagaaagcctgatcaggttttccaatctt

SEQ ID NO: 60331 - DNA, 795 bp, Homo sapiens
  misc_feature 269, 278, 295, 434, 486, 487, 492, 510, 515, 554, 569, 584,607, 610, 621, 629, 657, 704, 707, 708, 734, 737, 739, 773,779, 785: n = A,T,C or G
accctgtttacttggcgctgggccaagccctccatctcctgagatggcctcatgtgggagaaggcggagggaaggtcggcttgggaatatcctatatgtctgtccgaaggctgtggcggggctcctgctccagggatgctgggacgtggcggtgcctgctaagtgctcagctgtgtgcgtctcgcagggaaagaggacccagcccaagcatccctggtcatctcctcaattcaggcccaggggtgtcatcccgagacccctcaggcggnaagttgcangggggggaaggaaaagnaacctaggaaataaataaaagttcccccagtggccctgccatggggcacaagcaggggaggcccacttcttgtttctttcaaggtattctttgggcccgaatgggggcctccaagggccccttgttcgaagggctcaanatggggggatccccccaacagtgtttcaccctggggtcctttgaagtcccanncaggnctgtaggccaaattgccnctttntgggtgggcccgggccagcccgccaccccaaattccttntttggaatgttccgntccgtttgggttcantcttgccaccccacccttttttnggnattgggccagnttgttaanccccggcccggcttctttagaaaacctnagttgggaattcccccccccgggggccttgccaagggaaattttccnatnnttccaaaagccctttattcgaattanccngntcggaaccctttccgaaggggggggggggccccnggttanccccanccttttttgg

SEQ ID NO: 60332 - DNA, 561 bp, Homo sapiens
ggttccagcgtatcactagcacacagtgcactgagggttatacagtgatgaattaggcaaaccagatagcctttggaaactccagctgagattagctaaaatgctatttcagatatgtatcttaatgaactggcaagagagtcaggattctaagtggaagtgggaacctggagagacaaacagaacactaatgccagatttttgcagtgagaacgtttgccaaactaattgaacttaagcattgatttttcactccctcgaggggctttaggataggagacaaaacccagggctctaaacaacatggggagtctgataactggggacaccccctctgtggggggaaaccttagtataagggtaaacaaacatataaacctgccaccttcatctcaactccagctgcttcagggaactaccagaaaagtctctctcttgaactttggcactaagcggaaaagtaaaaaagttaaacatttttctagagaattcatcaacataacaattgactctaatatctgtttgcaatgtgtattcatactacttgggatgttctgaaaa

SEQ ID NO: 60333 - DNA, 576 bp, Homo sapiens
  misc_feature 3, 38, 46, 47, 50, 53, 54, 55, 74, 76, 79, 83, 86, 87, 97,112, 120, 122, 123, 130, 132, 133, 134, 138, 141, 142, 143,145, 147, 148, 150, 162, 163, 167, 184, 190, 191, 256, 269,371, 386, 555: n = A,T,C or G
gcngattggagctccccgcggtggcggccgatgtacanctaatggnntcnccnnnctgcaagaatatctgattntngcnttanttnnaccccacacntctataggggggccncggtcccnannaccaagntnnntttnacnnngnannanagctctctaagnnagangcactggtacctaactntttccnnttttcttcctccaaagagttgaatcctctttcctcaatagatttggctagttaatcaaaaagaanaaaccatctgaanagggaaatctatgacctcttcgtcaaggaaagtcagattattcaatgccaagaaaggctatttttactttcatctgatagtctgtgggatttttttaaaggncaacaccatggaagnaaaagaagcaacatttaagaggagctcccataaatctccctcctcttaacagcctcaaggttgaccctgtgttattggtggccagttggcttgggtagttggaactttgttatataacaaggacaaggggagtagctctatccctggggatgtcacttaaagtagcttnaacatgttttagagccacttc

SEQ ID NO: 60334 - DNA, 542 bp, Homo sapiens
  misc_feature 1, 25, 351, 353, 395, 405, 410, 428, 429, 441, 468, 475,488, 489, 494, 513, 516, 517, 519, 520, 521, 522, 523, 524,530, 531: n = A,T,C or G
nactccaccgcggtggcggccgggnatttgacaaatatttgttcagcaaacaaatggatgatgaattaataaatgatacttaataatcaggacttgtatggaggacagttccaaaagtatatttccaagtaacttgtgtaccctcttattggaaaatgtcgactattccataggctatgaagttggattttgttttgaatctgcagtgattcaaataaggtaattcacaatgaaaggtctttctgcctccgtcccctcgagagtaacatcagtgtgtctttcctagctgggagatcaggccaccaagagagacagtcattttgaatgtgccaatgttttcacaatggttcnanattttttctcagtacccagctttaatctaccaaacctgctanccgccccaantttcngggtccttttttgggggnnaaaaaagtttgntaatccaaaaaaaaaaaaaaaaaaaanccccccncccccttaaaaannggggncccccccgggggggggaanttnntnnnnnntttttnnccccccccccc

SEQ ID NO: 60335 - DNA, 441 bp, Homo sapiens
  misc_feature 35: n = A,T,C or G
acctatggtggtctggcagccggatgaccacagcntcaaaggatataagatgcatagccaactgaggaacctgagcaattaaagagatccacagttaagtcacacttaactggcacttgtggaagccccgcaaggcctgaaggagagctgacataggcaccccagagagccagaatctggatcccatcttaataaggccatgaacaccagtggagaagaggcagaaacaccaatggataaggaacattcacatctttcttcccatgtgcctctaagtgccagtgcaggccccacaggccaagctacagggagaaaggagatgacgcaaaggaacctaactggactttaatcactagaagtgagaagagaaatctattggaacctcccaagataatgccaagggtcaaagggtgcgcagatacataaggtaagcccttcggc

SEQ ID NO: 60336 - DNA, 593 bp, Homo sapiens
  misc_feature 52, 63, 593: n = A,T,C or G
ctccccgcggtggcggccgagtacagcttcaatgatcaacatgtcagcaggnataacacaagnaggacattaagaaaacacatggtggatcttcaggaagcagaggatattattctagtgctttcgcaagttccacaaatgcatatatgctgatctatagactgaaggatccagccagaaatgcaaaatttctagaagtggatgaatacccagaacatattaaaaacttggtgcagaaagagagagagttggaagaacaagaaaagagacaacgagaaattgagcgcaatacatgcaagataaaattattctgtttgcatcctacaaaacaagtaatgatggaaaataaattggaggttcataaggataagacattaaaggaagcagtagaaatggcttataagatgatggatttagaagaggtaatacccctggattgctgtcgccttgttaaatatgatgagtttcatgattatctagaacggtcatatgaaggagaagaagatacaccaatggggcttctactaggtggcgtcaagtcaacatatatgtttgatctgctgttggagacgagaaagcctgatcaggttttn

SEQ ID NO: 60337 - DNA, 294 bp, Homo sapiens
  misc_feature 7, 140, 141, 145, 151, 173, 174, 178, 179, 182, 183, 184,219: n = A,T,C or G
accatgnaaatacatatatttcataaggttcagttacaaaatggattgtttcaaatggcaatttcttacactaacctgattatgaaaaaaagaagtctgtatcatctgcttccaagtctgttatgtcccaaaacgaattnnattnattttntttaaatttattggccattttnnattnncannngcttcagccgctccctccactaccagttctacgtntggtatttccacacactgccctacctcctgtgggccatgcctgcacgctggctcacacacctgctcaggttgttg

SEQ ID NO: 60338 - DNA, 644 bp, Homo sapiens
  misc_feature 4, 11, 17, 19, 26, 27, 31, 34, 37, 39, 43, 48, 51, 52, 53,54, 55, 57, 62, 63, 68, 71, 73, 74, 75, 78, 80, 81, 82,84, 90, 99, 101, 104, 120, 142, 144, 148, 179, 185, 200,211, 221, 225, 226, 234, 236, 238, 239, 241, 246, 248, 253: n = A,T,C or G
  misc_feature 254, 256, 263, 272, 292, 293, 297, 397, 409, 410, 414, 415,446, 454, 619, 634: n = A,T,C or G
actntttcttnaatgancngggaaannaacnacnatnanaatnaatcnatnnnnngnttganncctgnggntnnnctntnnnanctgatnaattcactntnaanaatgcaagagctggantctctatggcacattgggaatntnctcntcttttacaatacatactctactaacacttnatgctnaaattattgaatcanattaaatgatncccattgccnttgnntgatctcncnanntnttacntnccttnntngttaacngcaataccnttactgtggcccttattccnntttnccaatacgctagggaagtaagcaggtttatagttctgttatttcaactaaaatgcatttcttatacccttaagagaggagtggagtagatagcaattcanctgcatagaaanntggnngactgggctcatgttggttaacgagactggnggaagtancaatcctggaatgattagtggctcttaatgacatccgggcaccctggcttttacttcaagtattttagaagtgtccctgttgcactcccttcccaggtggctgatgaattaatgattatttactgacatctactatgtgcctgactcattggtaagtacctcggnccctctagactaggnggatcccccc

SEQ ID NO: 60339 - DNA, 252 bp, Homo sapiens
acgcgggaagaggtggtaacaacgcagagtacgcggggccgggacgtggggttttatatccggattcttagcgcggactcagaacccagctcttccctacgcggtcggcacatgcgcggcagctcttttccttcttcctccacttccccctaccctccaccgtccgggagccgccgccaccgccgccgaggagtcaggaaagttcaagatggccgccgcggagacccagtcgctacgggagcagccagagat

SEQ ID NO: 60340 - DNA, 279 bp, Homo sapiens
actgcaagaagtcacttaggctatttttgaaagctgaagttttgcaatttttgaatcactaccttctgtccaaagagcatatcattcttgcctcaaaatgtccttcttctaattgaatgcatggtaaaatgcaaaatataataataataaataaataaataagaggtaactgtatctcattatgtagaattcaagaaggtcagcatatgtattccatatcaagataattgaagtattggtgtcttctcttctgtcatggagcaaagggattcatttaca

SEQ ID NO: 60341 - DNA, 564 bp, Homo sapiens
  misc_feature 44, 52, 72: n = A,T,C or G
gaaactccaccgcggtggcggccgagtacttctgcagttcaggnagccaggnaacccactaaaggtccaagnacaccccactgcattaacgacagcatcctcatcgtctgggtcattctcttcatcactgtctctggccttactatgtcgtccagaaactgaggtgggtttaactgtggctgggaacggtgtaatgttgtaggtgtatttttccctcaactctgccaattgtgggaaagggaacggagccatggaataaacagtctgtaaaacaaaagcaaaaatgccaagtctgaaacagtagccttcacaactcttatcaatcctggaaagacattaaagttttatgaagtcgagtgtgaagaggcagatactgctccttacacagcaggtggagagattccacttcaacatccgctttcaagacagacaaaagaagatgattaaacccgacccagtgggctctcaaatcaacccagctgcagctgggcattccaactggtaaacaagggtgggcaatcacgggcagtctgatttcctcctgttgttcaataaatggattaa

SEQ ID NO: 60342 - DNA, 527 bp, Homo sapiens
  misc_feature 517: n = A,T,C or G
actgttttccccctttcaactatattacattatgcctgaatttgagagggaaggaaggtcctaaagtaaggcaaaggattcatttaggacaacgttctggcctttattttagggcagagtgccactgtttccctttggacgcaggtttcaggctaatctatttgtgcacacaccatcctctaaatgggatgcctccaacccccaaaacgttagttgccagaaagaaagaactaaatcttggtagggtgcttaaaatggtaactaatggaataatcaaagcatcctgcctgcttatatcagtctctcactgaaggataaaataccctacggggccatgcctagcgatgggaataaataaaacaatgggccacaatcaactgtttgataaaacttccatcctgttttcttaaacattaaatataatcttgctcccaaaaaagtaagaaaggcactcgaattaacacagtctctacagttattttttaaaagacactatgtgacaataaggatttcttanggttgatttt

SEQ ID NO: 60343 - DNA, 381 bp, Homo sapiens
  misc_feature 19, 275: n = A,T,C or G
aatgctaaacttacctggnaagggtatagggccggggccattagaaaaaagatcatgcagtaaatggactttgagcatggccctaaaggatgagtagagtttaaaagctgtggagtgcacactgcagatgagcaaagcctatgggtataggcaaacatggtgtgtgtaggaggctcagtgagagtgaaggctttgctttggtatgtagtgaagaataagattgactacactggctggagctagcttttgaagagtcaaatccaggcagcatttanatcaggggttatagcccagcagcccatgggccacatctggtctgcagatgtatatagtttggcccacagaatgactaaaaacttgggctccaaatcaggagattgt

SEQ ID NO: 60344 - DNA, 615 bp, Homo sapiens
  misc_feature 53, 54, 55, 58, 59, 60, 67, 69, 71, 72, 76, 78, 80, 84, 85,95, 96, 97, 98, 99, 100, 101, 107, 109, 110, 116, 117, 126,129, 130, 132, 135, 138, 139, 152, 157, 168, 173, 174, 178,179, 185, 186, 188, 192, 194, 195, 196, 199, 200, 206: n = A,T,C or G
  misc_feature 209, 211, 215, 216, 228, 232, 234, 243, 251, 260, 268, 269,272, 278, 281, 288, 289, 291, 292, 293, 300, 309, 312, 314,315, 319, 324, 325, 326, 329, 333, 335, 343, 344, 346, 354,361, 362, 366, 368, 369, 370, 374, 377, 379, 386, 387: n = A,T,C or G
  misc_feature 390, 391, 397, 398, 405, 408, 422, 428, 429, 431, 432, 439,455, 460, 463, 523, 529, 536, 538, 544, 552, 559, 565, 566,578, 595, 610: n = A,T,C or G
aaactcccaccgcggtggcggccgaggtacttttttttttttttttttttttnnnaannnccccccngngnnggangngnaaanntacccccccnnnnnnntttttngnngggggnnccctttttnaanncnccnttnncaaaaaaaaaccnttttnccccccacccnggggnnaaanngggggnncngganannnccnnaaaaanttnangggnnaaactttaaaangggncnccccccccngggggggntcaaaattnccccaaannttnaaaaangcnaaaaaanncnnngaccccncccccaggncanannaaanaaagnnnccnccancnatatgaannancacacaanatctttnntatncnnngatnctnanagggggnnccnncaccannatattangcncttttttaaaggtntaaaanncnncagattnaaaaaaaaaccaacantttanggngggaacaaggaaggaaagatgtgaataggctgatgggcaaaaaaccaatttacccatcanttccanccttctntnaagganaggcaaanaaagganatacannggaaacatctgnaaagttttctccactgnaaaactgctactatntgttt

SEQ ID NO: 60345 - DNA, 156 bp, Homo sapiens
cggccgccgggcaggtacttgttgggtcctggaatgttattgctgccgtgtttgagggcgacgacaagctggagtcctgctgggattttccgtgatgatggtctaagcaaagacccttcgtcctgttaaagataaattaaaaaaaaaaaaaaaaac

SEQ ID NO: 60346 - DNA, 421 bp, Homo sapiens
  misc_feature 2: n = A,T,C or G
gnactccaccgcggtggcggccgagtacattgcctctacaaaggcatcttgttttaatgctgccaaaatcaatttgtttagattgtcttcgcagttttaccgacttagaagaacttgatgagacagagttatatatgtgccataaatgcaaaaagaaacaaaagtccgcaaaaaagttttggattcaaaaactacccaaggtgagtgttgaattttgagttatgaagcaatttcaatgggaaagtgcttgactgctaagaccatgtctataactttacactatgtgaactgttctgtatttttctctaggattttcagtaaaagctaaaccccttacagaatgaatgcataaggtatgcatggaagaatgattgatagggcagctaaaatgttatttactgaactgatagtagtatcaaac

SEQ ID NO: 60347 - DNA, 557 bp, Homo sapiens
acgcggggaacctcttctactcagtccctgaagtccaaatcctattattctctattcccttttcagaggtaggcaacatttattggaggactaatggctttcttgacactaagtaaacatcacatttaccttatctgttctctaggctcttcttgtatagggttccttccaatagttattgattttgaaagataattgttaccccataatgtgtgtgtgtatgtgtgtgtgttcacatgcatgtgagaccccaagcccaagaagacaagtcagagctgttcaggtttaggagacataccttgggttcaaattctgtaaacctcactttacttgtctgtaaaatggggattcagtgaggtaatatatgttaaaaagtgcttggcatatagtaagagctcagtaacaattaggtataattatttttactgctgtcaccataaatattaaaaagagatactaaaaaaattttaatgggcaaaggatttgaatattttcccaaagaagatataaaacagccaataagcacgtgaaaagatgctcaacatcactagtcatta

SEQ ID NO: 60348 - DNA, 369 bp, Homo sapiens
tccaccgcggtggcggccgccacgctggttttgcatcttcaggagacgctcgtagccctcgcgcttctcctcggccagttcgcggaagaagtggctcacgccttccagagccacatcatcgcggtcgaaatagaagcccagagagaggtaggtgtaggaggcctgcaggtacctcggccgaggtacgcgggggcagttgttgttggttgggggccttttggccggtgacggagactgcccaggtgtggtcaccatgttcctctccgcggtcttctttgccaagagcaagtcaaatgaaacaaagagtcctcttcgtggaaaagaaaaaaatacgctccctttaaacggtggattgaaaatgactttgat

SEQ ID NO: 60349 - DNA, 395 bp, Homo sapiens
  misc_feature 34: n = A,T,C or G
acgcgggtatgagaagatgctaaacttacctggnaagggatagggccggggccattagaaaaaagatcatgcagtaaatggactttgagcatggccctaaaggatgagtagagtttaaaagctgtggagtgcacactgcagatgagcaaagcctatgggtataggcaaacatggtgtgtgtaggaggctcagtgagagtgaaggctttgctttggtatgtagtgaagaataagattgactacactggctggagctagcttttgaagagtcaaatccaggcagcatttagatcaggggttatagcccagcagcccatgggccacatctggtctgcagatgtatatagtttggcccacagaatgactaaaaacttgggctccaaatcaggagattgt

SEQ ID NO: 60350 - DNA, 610 bp, Homo sapiens
  misc_feature 15, 16, 22, 24, 56, 94, 98, 114, 115, 116, 117, 118, 123,128, 131, 135, 141, 145, 154, 163, 178, 180, 186, 196, 197,202, 203, 208, 214, 240, 244, 245, 253, 255, 257, 258, 264,267, 268, 278, 279, 280, 281, 284, 286, 287, 289, 290: n = A,T,C or G
  misc_feature 292, 293, 298, 302, 308, 321, 322, 333, 336, 345, 348, 353,354, 355, 356, 360, 373: n = A,T,C or G
tcactctgagggccnnattggnanctccaccgcggtggcggccgagtacctgatanacctcacttacactctacctatggtcctggtacttctntttntaccgcatataacatnnnnntgganggctnganccanttcttngganatctgtccnatgattaancacgagggctactancnttttcngaaaatgctnnaccannggtgncggccntgataccaactaattggatcccccgngctnnaagaattntntnntaagcnganngataccagcnnnnctnanngnngnnccccnatcncgacantatgcacactttnntgacgtgtaantgnacgctgggnctnataannnnaatntctgtttttctgnagtgacagcaaacgaaggctcacgatttctgctccatggtagtccataacattttgttctgatgtgttgtaataaaacctaagcttcacatcatgccagaagtgctgtggtccccattcatcttgaggtggtcctagaaaaggattctgagaattaagaagtccaaagaaccaatgacagaattcttctcctaggcgacgaaaatcaactttttcagcttttttatcttctttcacc

SEQ ID NO: 60351 - DNA, 629 bp, Homo sapiens
acttagtcttaaaatctttctttatacttggttattgatggatcttctgcagctcttatgtagccaatgagacagatgagggctgtcagcttttaagtgacatcttaagctaataagaaattggaatcctcaagtcatttcatgaggctgttaccctttaagacaaataatactttcctcaaatagttcagaaaatttttaaaaggatcacttagagcataagtgtaaaattcttgcttctagtatataatagtgatgttaccatgtcaagtattttggtgaaatatcccctaaaaatgtgtagactacggcacagattgagtatgcaagccttagcttgaatgagactgctgagaagtaaatgacagggatctgaatacttagcaggcttaactttttgcagggaaggaaaggctatgtatgcaaaagaataggttgtaactactgaagagctactttatgctcagaaaccttttattccactttgtatccaagatttcattaaaacattgttccttagagcatactttaaaaactatttggtaaggaatccactgttgaacttcaggtcttaatagcactggcttttggtgctaaactgagttgaattccagcctgttggcccttcc

SEQ ID NO: 60352 - DNA, 585 bp, Homo sapiens
  misc_feature 28, 349, 500: n = A,T,C or G
actatttcatttgaaggatccactaagnattttaaagcaattcattaaaaatagtgtgcatttttacctacgtagttatggtaaaatttcagaattcaaaggataaagagaacatattaaaaaaaataagagagcaaattaacaatgagctgtcaaagactggacactttcacaactctaaaatctaattcaaaacacagcaaataggaatatgcttaataaaggaaaggataactgaatttcagtaagacagcactgtgacatttttgataaccatcttataacccccattcttcagcatggtgccagtggctatgaatatgatggcctacatttttgatgtggctancttgagacaagaggttaataataaagaacttgttcttaaaatactgtgctcatgtgttttgacctgtctggtggttccctgaggaatcacacagagactcacatttgttttgccctaatctcagggctcgaataaatttccaggttgcagntggtatctgtcaaaatattttaaaacattcatttccataactaccagagaagtgggtgacagatggggcaaacagataacaaatc

SEQ ID NO: 60353 - DNA, 335 bp, Homo sapiens
  misc_feature 3: n = A,T,C or G
ggntggcggccgcccggctggtacatattatatattttattatttggaaaaagtaggtgagcaataaaaatgtttaaatggtgcttatttgcaattcaacctttatttctgaaatattcttttttaatttttaattttttcctgaacactatcctaatttctgagttttctaattctgacattttttttcaagtattgtgtcattttgttacatttcttattgtgtatccaaatagtggattacagtttcatctgtttagaataacatgtttgtatagtatttgagattatcttttctgtgtgtaaaattattttgagttattgggagaaggtag

SEQ ID NO: 60354 - DNA, 854 bp, Homo sapiens
  misc_feature 283, 353, 381, 385, 391, 410, 417, 437, 445, 451, 457, 459,465, 468, 496, 517, 524, 545, 559, 627, 635, 643, 660, 682,683, 695, 698, 703, 708, 710, 711, 714, 715, 725, 729, 745,756, 767, 771, 775, 788, 789, 793, 801, 827, 831: n = A,T,C or G
actacactgaattcacccccactgaaaaagatgagtatgcctgccgtgtgaaccatgtgactttgtcacagcccaagatagttaagtgggatcgagacatgtaagcagcatcatgggggtttgaagatgccgcatttggattggatgaattccaaattctgcttgcttgctttttaatattgatatgcttatacacttacactttatgcacaaaatgtagggttataataatgttaacattggacatgatcttctttataattctactttggagtgctgtctnccatggtttgatgtattctgaaccagggttgctcccaccaaggtagcttcttagggaggggctggccaancttaaaaaggggggggggaaccaaaaanaaantttttntttatttcccaaccattcnaacaatnttttgggtccagaattttgnaacccttnttttcnaattcntntttggnccncttcaaaaagcctttgggttaaaagaanaaagtttaaagccggtggccnttaaagnttaaacctttcccaattttancataacctcttggnttttaaaaaatttttgggggggggaaaaaattttaaaaaaaattttttaatttgggcccgggaatttntttggggnaaattttngttttttaattggaaantgaaaacctttttttggccaannaaaaaaaatccnaanttttnccttncnnttnnacccattttngganaaaaaaataaaagggnctgggggtggngggggtaaaancccngggngttatttttttgnntccncccaaggnttaaataaaattcattaaaaacttgnatanaaaaaaaaaaaaaaaaaaaaaaa

SEQ ID NO: 60355 - DNA, 529 bp, Homo sapiens
  misc_feature 492, 504: n = A,T,C or G
aactccaccgcggtggcggccgtcacgtccccattaccgtatctctgggtcgcacggactggccctggcatggaagtcaagcgtgctgacccggaaggagagttccacaggaaccttctaacagcagctgaggttgggccacagtgatccctggttagtgcccttggaacccaagcaacacacggacactctgaatcaggtatgggagtttcctggagcaagctggcagagaactgggaaagagatcatatacaataatacctaaggaggaagctaacaggcttgggtctccaggaaaaacttttgcgggttaagttccttctctacggtggagatgatcttatgatgcttaccgctgcaagctgagacactgaacattacaagtaacagcaattcaatgagctgacacaggaggtgtggcacttggagaacctggatcatgaagcagagcaagaccaggagagggccttctgaggtcttccttctgcttangggctcccatanggagtgcggctgcttccttccctct

SEQ ID NO: 60356 - DNA, 377 bp, Homo sapiens
  misc_feature 9: n = A,T,C or G
acagccggnatttaagcactgtgctcttaatctttaggttaccctacagcaagtagctatttgtgattcactgaatgaataacacaagtcagcagctagaggaaccaagatttgaacttaagtcttctacaacattttgtcaatcaagaaatcctctgttctatatccctgaggttttggcattcaattttagcttgaaggaaaatgcaattatttcatcagtgttgtccaacagaacgttctacaatgatgggaatgtcttacatctgcacgtcctatattttagctagaagccctatgggggcctttgagcatttgaaatgtagctaatgccactgaagaaatgaagttctaattttatttttattttaatttaa

SEQ ID NO: 60357 - DNA, 637 bp, Homo sapiens
  misc_feature 30, 32, 48, 436, 450, 457, 480, 486, 537, 579, 582, 617: n = A,T,C or G
ccaccgcggtggcggccgaggtacaaaatntnacaattaagacacccncaagagacacagaattatctcccaataaaattgtctcataaaaacctggctcccacaaatatggaaagggagaaaactagaataaaccctgtggtgtcgaattggagatatcagtgtgaactcgtgtatttcagtctatagagatagatgtaaatatgtttttgtatgtatagtcctttgcactgatgtgagagcaatgacactccaatagtaatgaccacacccagcacccaggtccaccaaaagacaaagtgctatggactgaattatatccccctaaaattcatatgttgaagccctaacccccaatgtgatgatatttggaaatgggacatttgggagataattaagtttagatggccaggtatggtggctcacgcctgtaatncccagcacttttgngaggccnaggcgggccggattcacaaaggncagganatggagacccatttcctggctaaccacgggtgaaaaccccccgtctttttntaaaaaaataccaaaaattaacctttggggtgtgggtgggcnccncccccttgttattcccccaagcttacctttggggnaggcttggaaggccaaaaaa

SEQ ID NO: 60358 - DNA, 504 bp, Homo sapiens
aggtaccttcttagtgcaagaaaacatcattatttctgtctgcctgcctttttgtttttaaaaatgaagactatcattgaaacaagtttgtcttcagtatgaggacatgttgacggagaggaaaggtaggaaagggttagggatagaagccaggttattttatgccaacaaagtctgctctaaaaagccttattgtttcactacctattaatatgagaactctggattcattttcccttatctcatgtttatagtgttttaagcttactttgtatatgtttactgggttaatgagtcacagcttttcaggatgaactcctattctactagagagatactcaattgaaacacacttttagattgtgttcttgcaagcccactctcagctgtcaaagttaacacccaataaaaatactctacaaagcaaagaaatacacttgcaaataactgagtgctgactgtaaagcccaatccaacttttccatttttcaaaattaaccatag

SEQ ID NO: 60359 - DNA, 565 bp, Homo sapiens
  misc_feature 23, 34, 78, 157, 165, 302, 381, 400, 411, 417, 429, 431,465, 493, 495, 514, 521, 525, 548: n = A,T,C or G
actccaccgcggtggcggccgangtacgcgggantaaacttgtggccatctcatctatgcctgcaggcaactgaaaancagtgatttggacctttttcgagtttggatgggagtgtggacagggcggttagggggctgggcccaggtcatgtttcantttctaanccaggggttttactgtggagtaggactgtttactcgttttcttaagctgctgggtgctttgctgctcctggctctggccctctttttgggctttctacagttgggatggcggattctggtgggactaggtgaccggntaggctggagggataaggctacctggctcttctcttggctggattctccggccttgcagcgttgcttgactctgctganagatagcaagccatggcancggctggtaanaatagntcagtggggctngntggagttgccttgggtcaagcagaatattaatangcaggggaatgcacctgtagctagtggncnctactgccagcctgaagangaagtgnctcnactcttgaccatggctggggttnctgaggatgagctaaac

SEQ ID NO: 60360 - DNA, 347 bp, Homo sapiens
  misc_feature 41, 101, 200, 226, 247, 250, 251, 263, 264, 266, 276, 306,327: n = A,T,C or G
gggcgaggtacctggagagcaacgtgacatctgtttgagcngatgaatatgccattgggaaagtcaaggactgtcggagaggaggacatggcagaccttanctaaagtgagggggacagtagagcactaaaagttctaggaaaggagatgaactgcttattccatcagatgaaaatatagtcagaacagatgagtagtanaacttaaacatgcccggagttgccangaatttgcaaaagccttgatntanntcctgttgctgnnanaaagactttntacagtcactaatatatcaagttatgttcnctagaaaaaaaggttacttantttatagaaatgggctgaaa

SEQ ID NO: 60361 - DNA, 576 bp, Homo sapiens
  misc_feature 3, 536, 544: n = A,T,C or G
aanctccaccgcggtggcggccgagtacctgcaggcctcctacacctacctctctctgggcttctatttcgaccgcgatgatgtggctctggaaggcgtgagccacttcttccgcgaactggccgaggagaagcgcgagggctacgagcgtctcctgaagatgcaaaaccagcgtggcggccgcccgggcaggtactgtgtctcaccatttgtctttctatctctcttagtgaggagaaagaaaaactcacactctactgatgagttaaattattttttgaggcaaaggtaataacaattttttttcaattattttcacagatgttaatattttatctccattaagaaagttgatgcacaggatttgctgattactaatcagcaatatctctttttttgtccataatttatcacatttacaaaattctcctcaccctgtaagatcaagaattcctagtgtttgacagagtttatgcgatatgtgtgtgtgtgtgtctacgtgtgtgtgtgtgtgtaaatgatggatcacagttcanatattcanaatgaaacatcatcaatatatgaagttattta

SEQ ID NO: 60362 - DNA, 424 bp, Homo sapiens
  misc_feature 24: n = A,T,C or G
tccccgcggtggcggccgggattngacaaatatttgttcagcaaacaaatggatgatgaattaataaatgatacttaataatcaggacttgtatggaggacagttccaaaagtatatttccaagtaacttgtgtaccctcttattggaaaatgtcgactattccataggctatgaagttggattttgttttgaatctgcagtgattcaaataaggtaattcacaatgaaagatctttctgcctccgtcccctcgagagtaacatcagtgtgtctttcctagctgggagatcaggccaccaagagagacagtcattttgaaatgtgcgaatgttttcacaattgttcgagattatttctcagtaacacagctttagtctacagagcttgctaacctgcctcagtattctgtgttcttttattgtg

SEQ ID NO: 60363 - DNA, 315 bp, Homo sapiens
  misc_feature 1, 3: n = A,T,C or G
nanctccaccgcggtggcggccgagtactacatgcattggtgtgctgataaactgtctgtttcaatgatcacaaaaacagtgacaacaacaaaagcccagacttgtagcatttgcctgtttttaaggtgtaaataattccatcatacctgagataagctgtaattcttaaatatttaacaatcagctcttgcagaaaggaactcctgcactccacagtagacattctattatgctcatcctagttacagatttcttgatgaccactctggtgaggctatgtatgcccgtctgctatcaaaaactttttgcctcca

SEQ ID NO: 60364 - DNA, 249 bp, Homo sapiens
actgttttccccctttcaactatattacattatgcctgaatttgagagggaaggaaggtcctaaagtaaggcaaaggattcatttaggacaacgttctggcctttattttagggcagagtgccactgtttccctttggacgcaggtttcaggctaatctatttgtgcacacaccatcctctaaatgggatgcctccaacccccaaaacgttagttgccagaaagaaagaactaaatcttggtagggtgc

SEQ ID NO: 60365 - DNA, 303 bp, Homo sapiens
acagggaagcagctttaaaaaactgctggcagaactaagaagtcagactgtccttgacccctagatcaaatgtttttgagcctgagtttccttaaatcttcttcagttgagaataaacattttgacaaaatagaagatttattctgttaatttttggtcttcataaacctaactaaatttgctaaaacaacaaaaactttctaatttttactagttttgttttttaaaaagtttgtttccttttaagtgcataacactttaaaatgagctcagctgtattagcagataaacatgttgattcat

SEQ ID NO: 60366 - DNA, 545 bp, Homo sapiens
  misc_feature 452, 489, 527, 537: n = A,T,C or G
ccccgcggtggcggccgcccgggcttgtactttgaacgatagcaacccttctttgtgtaactctgaagctgaaaatattgagccttcagttatgaagatttcttcaaatagctttatgaatgtgcatttggaatcaaaaccagttatatgtgatagtagaaatttgacagatcactcaaaatttgcatgtgaagaatataagcagagcatcggtagcactagttcagcttctgttaatcattttgatgatttatatcaacctattgggagttcgggtattgcttcatctcttcagagtcttccaccaggaataaaggtggacagtctaactctcttgaaatgcggagagaacacatctccagttctggatgcagtgctaaagagtaaaaaaagttcagagtttttaaagcatgcagggaaagaaacaatagtagaagtaggtagtgaccttnctgattcaggaaagggatttgcttccagggagaacanggcgtaataatggggttatctgggaaaaggtttgccanaagccccaanaaaaaagg

SEQ ID NO: 60367 - DNA, 554 bp, Homo sapiens
  misc_feature 33: n = A,T,C or G
aactccaccgcggtggcggccgtggtggtgaanctgtagcctcgctcagtgaggatcttcatgaggtagtcggtcaggtcccggccagccaggtccagacgcaggatggcgtgggggagggcgtagccctcgtagatgggcaccgtgtgggtgaccccgtctccagagtccatgacaatgccagtggtgcgcccagaggcgtagagggacagcacggcctggatggccacgtacctcggccgcccgggcaggtacagtatataatatatatttgggcaactttaatatatcatgtacgcgggaacccctttgagctgactaatcatgctgttctgcttgtgggctatggcactgactcagcctctgggatggattactggattgttaaaaacagctggggcaccggctggggtgagaatggctacttccggatccgcagaggaactgatgagtgtgcaattgagagcatagcagtggcagccacaccaattcctaaattgtagggtatgccttccagtatttcataatgatctgcatcagttgtaaaggggaat

SEQ ID NO: 60368 - DNA, 952 bp, Homo sapiens
  misc_feature 15, 19, 28, 47, 123, 139, 180, 246, 290, 301, 391, 448, 539,579, 608, 621, 690, 777, 828, 865, 900: n = A,T,C or G
gaatttgggggaagncttnccaccccgncgggggttggggcccgggnccccgaagggttaacccccataatttccccaaggttttttttaaaaaaggaaaaaccttggggccaaggaaaaatngttggaatggggaatnaaaccaaggaagggaaaaggaagccttcaaaatttttaatngtttttaattggggaaaagaaacaattttttaactttaaaaaatggaattttggaaagggggggtngggggaaagggggaaagttggaaaacttaccttggaggtttttngcccaagaagntggaaaaaaaattcccattccttggaaaaaaaaacttcaagccttacccctttttaagtttttttttaagttcccttcaatttttttttngggttcctttgggtccttccttgcccggggaccttgggtggaaaaagaaaattccanccaaaatgggcctccttattaattggcccccttggggaccttgttggttggggccaaaaaaattggcccaaggggttttggccaagcccgntgggtggttgggttttaacccaattggaaggggaatttcnttttcccccaccaaaattttttccaaggnaaaattgggccanccgcccccaagaaagccccttggaaaaaggggggggggggaaaaaacctttttggggttaaaccttttnggcccccccaattttaatttttcctttctttggccttttttttttaaaagccccccaaggaaaaggtttttaaaaaaaacccaaggnaaacccttggggaatttggggggggggtttccttttggggggtttaaaggnccccccaaaaaacccaaaaacccttttttgggggccnaaaaacccttttttccccccaacccttttcccccnttttttcctttccaaacccccctttccggggttggggaaagggaaaattttt

SEQ ID NO: 60369 - DNA, 358 bp, Homo sapiens
  misc_feature 15, 20, 21, 24, 117, 120, 122, 128, 131, 132, 136, 142, 144,196, 207, 211, 212, 220, 224, 225, 226, 228, 231, 235, 236,241, 250, 252, 254, 256, 262, 263, 268, 274, 285, 286, 287,288, 291, 292, 293, 301, 304, 305, 307, 310, 312: n = A,T,C or G
  misc_feature 317, 318, 319, 320, 322, 323, 336, 337, 339: n = A,T,C or G
acttctgtctttcantggcnnacnactggaaataccctcactgccaagtggagactggggcgtgtgccacattgccagccaccaggaaagcttttctttttcttttttttttttttnaancnccaaanccnntttnctgcgngntggatttcaaggtcttttaatcaccttcggtttaatctctttttaaaagatngccttcagatnaaannaaattccnttcnnngntgngaannaaagnccttttttntnananttttannacctngggggnccccccggggnnnnggnnnaaattttnganntnagngnttttnnnnannccccccccccccnncnggggggggggggccccccc

SEQ ID NO: 60370 - DNA, 346 bp, Homo sapiens
acgcgggaacaagcaaaggctgaattaataggctttcattatataactctgctttaaggcaaatgtagacaacatgccacattgcctcacacagttcagttcaatagaaataatatattaatctattttctcagaaaaatacatactatacaactgctacacacctgacattgttaggtgcttgacttttttgttgttcactgatatcacgggaaacaggtacatcttggcttctggcccaaaccccaagcagaaaagaaaatggaataatggagcattgtttttccacattagtattagggcatcagattcttggtgaaacactataattaagtagttataatta

SEQ ID NO: 60371 - DNA, 250 bp, Homo sapiens
  misc_feature 7, 29, 44, 64, 77, 84, 90, 135, 203, 207, 220, 223: n = A,T,C or G
tcccacncgcggtggtcggccgcccgggncaggtacactgaaangctacagcattgcaccactnaagtgaatgtttnccagaanaacttncactatgttaacccctgaaatctgttttttacaaaaaaccaaggncattttttaaatttcagtttttcaaaaatggtctaatgcattctcctttttgtttcacaccaacagcnttgngataattattatnatntaattcaatatgatgctttcaaggtaa

SEQ ID NO: 60372 - DNA, 561 bp, Homo sapiens
acccacatacggtattctaagttttaggctagatttaatgaaccgtaaaaaacaacaaacctctgaaacaggtattatgcccattttacagatgaaaaaactaagcctcagagaggttaagtaacttgtatcaatatcctgaaaagagcagagctgccattccaacccaggtctatctcacccgagagcaatgcttctgcataaaagtaacttgataagggaaacacagttaacatagttactcagaagtcccaacagatttttcttatttctttacctcttcaaccattttagcactattcctaatggaaaacatcttagcaattctgacaaaagatttgagaaagcatggactgaatgaggcctgagtgagattcttggctaccaaccatctgggattatctcaaaacttcacctgccagtgctcttttctcacttgcaactataatcatgagttggacatacttaaatctgtgaaaaaacaacaaactctatttttcaccttctcacatacatgtaaaacatattttggtaaataaattccttacttttgtagcacat

SEQ ID NO: 60373 - DNA, 408 bp, Homo sapiens
acttggaacctagattataatctagctcctaatcaaactagattctgctccagttcagtttactaaggcattccctctaagctgcctcagtgaaaccagtgagagccactggattacaattctaagtgcagctgtgcctaagaaggagagagtcccacaggagaggagaccggagggcataaggcaggggatgatacaaaatcctggacagtcatcacatcagtaacacagcttcagaaagtggtgggcttggaggaggggagagaaagaaacaaaatgtcccaataatttaatggcagagctagaagagagcatttacagctattttgggactctccaacagaacacttttcctggatgcacagacattcataatactggtaactctcatcaacagctctggcatgt

SEQ ID NO: 60374 - DNA, 525 bp, Homo sapiens
acctagtcacttctaaagcagaagggagcaattggctgggaaacctaagaatggaattcataggttttttcctggtcattgtgtctgctagctcacagggaaacacactgtataggtgaccatgagaatggccttcagactaaccatcagtaggtatttctaattgtaactactgatgggagagttccagttgaacatcgcagaaagaaaccctcacttgacatgcacatctttcaagtatcaaaacacctgttcagatccctattgaaagggagacaggatgactactcattttgtgtctgcaggtgtttcccacatgtctccaaggctcacccaattaatccattttgtcaaaatcctcagaggaagtatgaggtagaggaatgagcttgcaattggcagcctgaacaactctattctctaagctggactctgggtcttggctttgtgagtaatcttgggcaaagtgttccctcctctagttctcagtgttcttttcttcaaagtggcatcaacagtctcttc

SEQ ID NO: 60375 - DNA, 317 bp, Homo sapiens
ctccaccgcggtggcggccgagtacgcgggtaggaacaatgtgatctgtcattggaatcttataagatttgcaaattttgctattgtatttaagtaaattatactaagaactatgtttgaaagataaaatttatatattgcaatggaataatatgtaacatttgcaagcctcatgtaggacagtggttctcaaaatgcaggcttgacccagcaacatcagcatcaccgcttgttaggaaatgtaaatttcgggccctaccaacacctacagaatcacaaaatctggaaatgtgtccatgcaatctgtgttttaatga

SEQ ID NO: 60376 - DNA, 645 bp, Homo sapiens
  misc_feature 532, 533, 534, 535, 536, 537, 538, 539, 540, 541, 542, 543,544, 545, 546, 547, 548, 549, 550, 551, 552, 553, 554, 555,556, 557, 558, 559, 560, 561, 562, 563, 564, 565, 566, 567,568, 569, 570, 571, 572, 573, 574, 575, 576, 577, 578: n = A,T,C or G
  misc_feature 579, 580, 619: n = A,T,C or G
accatgtagaaattattggattattaaatataaaacatttattcattctacaaatagttattgatcatctaatgttagtgaggagctactctacacattcgaacaaaagagacatttaaatacatttaaattcaaatgggaaaagaataccatagacaatcaaagatgttaattttagtctataaaatacatagaaatactgacatatatgatccattggtatggttgtcaggcaaaatctaagaaaaactatttaagctaaattccaaattataaaaagcataccttgagaaaaggagtgttactttattagaaactatagaaagttcaattgaaaaagaactctgtttaagtcacataaattacgcttatatggctgaggtgtattgaggtgtggaggaacagtggaagagatgaggctggaggtggtgggaagccaaatctcagagggctataagaatgttttaagaaggcatattttatttttatatttataaagctcctctggctgctgtgaggagaattaatagtnnnnnnnnnnnnnnnnnnnnnnnnnnnnnnnnnnnnnnnnnnnnnnnnngaattcgatatccaagcttatcgataccgtcgcctcganggggggcccggtacccacttttgttc

SEQ ID NO: 60377 - DNA, 586 bp, Homo sapiens
acctccaccgcggtggcggccgagtacctgatcattcataacgatcatggtgcgggtgaagagtatcatgatgagtaattatgccagtaaaccactgggtggcagagtcttgtctatatactctcactctgtatccatttaaggaataaggacctggtagggctgaaaggcactatcttcagttaaaaaatccagttgcttatctacaaggaattctactgcagtgactgaactgggtatatttctttcaaccagaggtttgaaagttttgttcttgagaattttaaagtatctttaaatctcagaaatccacaacaaggctttaaaggtcagtaagtatttgctgaaatttctattttgttctggaagagtatctagtgtaaatacttctttagtcttcaaaaatcacaggcaaatggctctcaaaccaagcatttctgagctcacttgcagcggcgtcattgtataggaagaaaagccaagaccacagaacgaagcaggagctgtaacctaacaagtctccaacgagcaaatgacgattttctgtctgctctggctcagccctggcagtgatgaggattacaac

SEQ ID NO: 60378 - DNA, 567 bp, Homo sapiens
acagtttttagctttgcaattttataaacgttttccctcttccacttcaaagtattttgatcttgagaaatagacaaatctttttactagaatgtgactttacacatttattatgaaactgggtcgggtaagagaatagatttacaattgtcatttacactgggccttcaattttcatgattaaatctactcaaacaccataatacagatcagaaaactttctggtgagcatacatttaagaaagcagactttctaattctattgttttttctaataatagagctgtgtaagtatttggatagacagagtccactaccaaaaataactaaaatgttggattaaacaattactaaatactacatgacaaatgctatggtttaaatgtatctctcaaagtttatgcattggaaatttaatccacagtgtgacagcactgagaagttggacctttaaggttgattaggtgacgagggttctgctctcacgaatggattaataccattactgctgaagtggtttagttatctggagggcagattcctcctgaaggatgagttcaatccctt

SEQ ID NO: 60379 - DNA, 418 bp, Homo sapiens
  misc_feature 157, 191, 213, 214, 216, 218, 227, 231, 239, 251, 252, 263,268, 292, 307, 325, 326, 328, 332, 333, 334, 335, 345, 346,357, 358, 365, 367, 380, 383, 384, 386, 387, 398, 400, 402,410: n = A,T,C or G
acgtgggagaacatactttggccattacccccagctttgaggaaaatgggctttggatgattattttatgttttagggacccccaacctcaggcaattcctacctcttcacctgaccctgcccccacttgccataaaaacttaacctaagtttttgnttttgtttttcaaccgttaatgtaaaaggggcancattgcccaaaattttattcannananaaagcttangtcnaaagttcnaaaaatttcccnngaaaccttttntaacngggccccccaaggaattttttttnttttttttaaggggnttttttgaaaattttttnncntttnnnnaacagggaannaaaaaaaaaannggggggngnttttttttaaaanggnngnnaagggggggcncncntttttttnaaaaaaaa

SEQ ID NO: 60380 - DNA, 264 bp, Homo sapiens
acgatatgttcttatatcttttattttcctggaatgcattttgactcactgcaccttgaaatcatgtctttaaacaggttaacatgatctgtatttctgcaggtcaccattgaaccttctgaagagcctttatttcctgctgatgaattgtatggaatagttggtgctaaccttaagaggagctttgatgtccgagaggtatgtgaaagtggaactgtgagctttatgaccagctgtgagtctctttgtttgtgtatctatttg

SEQ ID NO: 60381 - DNA, 575 bp, Homo sapiens
acagagatcagaaccttcttatattaattctattgcccaactctcccctactcctgccttactgctcttccacgcccaaggatttggtatctggaagctaccaggagaaccactctgttgtcaacccagaacaggggagataaataagcacatatttatttttctggagtgacaacaaaacaccatcttttatatgagagatttctcattttcttctcaaggcaaaagaattgcactataaattgtttctgaaacagaatacattaagcgagagagactttccccttgatgcagagcccaagttgctcaaataacaaagccatgcatagtatacctcagacccatctgcattgaagtggtccagtgcctgttttcggatttctcccttgatggaaccatccagacgctgtaaaaataaaccacaagaaaactgtaagataggaagatcagctacactcagaatagaacagcagacttggaacctttatcacctgaacacccactgagtaaaaataactgcaaagcactggcaaagcgctatgaagaagctgtgcttaagaagcacaccctaccct

SEQ ID NO: 60382 - DNA, 286 bp, Homo sapiens
actgtgttgtaagagatgcaggttagcagaaaccctccacatgagatctgctttaagactgacccaagcctgaaacgctctctccctaagtgatccatgtccctgcagtaataccataaccactaagctaacacactcactgtaaaagtgttgcttctccatgaagcaccaagacttgatgaccatttgcagttctcattaactccactaagaccctaaaggctaaatgacaaccaagcctctgtcactctgcctgagtggatttaccacaaatatcaaatctgtt

SEQ ID NO: 60383 - DNA, 299 bp, Homo sapiens
acattacttacagaagccccttctactgttgccgcaattcttcaggagtaagcatggcccttccccaagagcagctgaaggcccacagacagacgctgaagaggaacaaatagtgctccagggtttttcttttcagtttcactagctggaccattcctgctcctgacatgctctttcctaagtccttcagcaataagaaactgtgcccagaacaaaagttatgttttattttatgccacaaaattaggagtggaaaagaaatgtgaatatcttatgagaaaaaaatgcaagttaaactt

SEQ ID NO: 60384 - DNA, 295 bp, Homo sapiens
actagtctaaagctaccgatgatcatttgtagaaatcattatgtaatttctaagacctggataaccctgaaaaccataaagataacctcaaacagccattctcaattcccattccttctcgttggaactacttcatcttttcttatatttactttcaatattaaagtcagtagtttcaatattaaaaacagtagttctcaaaattggctggacattgaaattagtagagaatttcacttttttttttctttttaatttacaaattccttagtctcatccaaaagttcttggttgc

SEQ ID NO: 60385 - DNA, 569 bp, Homo sapiens
  misc_feature 548: n = A,T,C or G
tccaccgcggtggcggccgagtacatgatcagctgaaatgaaagatgagctctgcttgcagagatccacacactacaggaaacagttggctttggaaatccatctttctgatacccctccagctgaacaattttctgcatgggactctgagttcctttccttcccagagagttttaccgtatgaagcctggagctggagaacgaaagaatcttcactataaacagagacccattcatttatttccattggctgtgttactggatgttttactggttgacgagaaactgggtcacaataaaaaaatggagatatgaaactcaaaattcatcagcatggttctggagttaacgtatactgagttacatgtaggtatttagttatataaataactatagtgtaattgctataataattatatggcatatatatacatacaataaaattaaggtatagtggggtcattattagggtttctgatgaaagcttattggatcactcctggaggaagtcaggtgctaaggtttctggacaggttcagttaactganatacaggaattaaggcatcat

SEQ ID NO: 60386 - DNA, 238 bp, Homo sapiens
tccaccgcggtggccggccgcccgggcaggtacactgtgtctggtgaagtaagttgatggtgtgcactaacccttttggaatagtttatcaaggatttaatgtttgtatcttttaattccacatacatatatatcttaaggaaataactagaaatgcaaacaagaatttgtattcagaaatgttcactatagcatcacatagggtaatcaaaaaattaaaaataacctacatgctctc

SEQ ID NO: 60387 - DNA, 262 bp, Homo sapiens
tggcggccgaggtacctttttttttttttttttttttttttgggcccttgggaggggggggggggggatctttttttaaaaatttttttccgggggaaaaaaaaaatggcaaggggtctgggggggatttatgaggccccccctactgacatttgctggggactaattctatgaagaggggggatcttgttatctgaattcaatcaaagagcctgtgtgtatgcacgatgctagcctcccttatggggcaaaaccaggtccc

SEQ ID NO: 60388 - DNA, 504 bp, Homo sapiens
tccaccgcggtggcggccgagtaccgggggagatgcctatttcgctcataaaactcaccaaattcccttagacgaaaaaggtggggagtgccctttcttgaaggaatcccttaagtgcacgtctcccgttttcttttcacatcaatgcagagtccctctgtgaatttacaacacccaacacccatgagttcagtccttaagaaggaaaattgagcaagtatttaattggttggacattgcataaaagaggtccatatccaggctaactctagaaattttattctcaaacttagttggcctcttttttttctgtcagaggaccattcttagtggcactggggaaatcttggcacccagaagaattcaactgcgctcactgcaaaaatacaatggcctacattggatttgtagaggagaaaggagccctgtattgtgagctgtgctatgagaaattctttgcccctgaatgtggtcgatgccaaaggagaatccttggagaagtca

SEQ ID NO: 60389 - DNA, 520 bp, Homo sapiens
  misc_feature 11, 12: n = A,T,C or G
ctccaccgcgnngtggcggccgcaggtactcctgtgaaaggtaggtgggaccattaagtacaatgcccttctcgaacaaaaaaaatacatcctcgttaatctactttcatgcattataacaactgctcatcctccactggactatctaaggctgatcatgcactacatatttcatctttaatatgaaattattggttcacattttgaggtcaatcaaatattcaaagcaagatgttaaaaattaaatttttaatggaaatgaatgggcttaatattctacaacggtcatttattcaacagaattgtattgagcagctattatgtacttgagagttatcatctcccctaaggttttgtttaccaagctgaaaatcaaacggctcttttacagtgttctcattggaatatgcattcaagcttcctgcatcacctccaggccattttagacagcacgtcctctttgttgataattttcttaaactacaactgtcaaactgagggccaagtccctactatggtc

SEQ ID NO: 60390 - DNA, 531 bp, Homo sapiens
acaatggcacgatctaggctcactgcaacctccgcctcctgggttcaagcaattctcctgcctcagcctaaaacttactatcttaacccagctaaattttaaaggcacttttatatttctaaaaattaataaaatgggtggaaaaaacatagatacatctaaaaaataaagttcatcttgctgaacatcctgggtataaaaatatgtaatcacttgcagaagtaattaggtataaaactcttttctccaaattaactgttacaatgaatgaatatatcataataaatttttagccagctttaagtaacaactcagtcaatattgtttatccatatgacacaagataagaaatgttattaggctacagcagtatttacccaacaaattaataattccttcattgtatgctgcaaacagtctaatggcatctttgaacaggagcatgaaggcagcatttattaccccatttgtaagttcattgctattaacattaaaatcaagaagtgcatccatctgattctgaataattgt

SEQ ID NO: 60391 - DNA, 189 bp, Homo sapiens
actctcgcctgggcatcatagtgagacccatctcaaaacaaaagagaacaaaacccaccacatgatcagtctgaggagaggctcacaaattgacatcttgtaaccatttccgtggtgatgctgatgcccgtgatctggagacacattttgagaaccacgaacctaaatgaagccaagcgcaaaaactac

SEQ ID NO: 60392 - DNA, 528 bp, Homo sapiens
  misc_feature 448: n = A,T,C or G
actaattactgaatgaagggatgcatagatgaataaatgaatgaaaagtaggagtgacctgtcttctctctttcttcacgatggggactagtgtgtgtatataaggggataatttttgtgtcacataaaatataaccttacttagaaggcaagacttccagaatggtggaatgagaaccacccccccgcccccataaatccgccctttcatgaaagcagtgaaaacgctagcaaacgttgtgaaaattaacttttccagaactctggaaaggaaacagaggcttccaacaatctgagaagaatgtattcaagaaaaacttcggtaagctctctgatcacagtggaaataataaacaattagtaatagaaggatagttgggaaattaccatttgtgggatataaacagtggatcaaagaagaaatcataagggaaatgagaaaatactntgagattaatgaaaatgaaaatacattgttccaaaacttacaggatacagccaagctaaaagcagtaccctcgccgctct

SEQ ID NO: 60393 - DNA, 302 bp, Homo sapiens
  misc_feature 30: n = A,T,C or G
acattttgtttatagcctttttaataacantctgaaacacataataacactgctaattacctactttcagtaatggtagcaaattgcataatatcactgacttgttcagaatgtttaaaatgcaaaggaagtcacctactggtaagatgtcctcggcaaacagctagcacagaaagaaagggatggttatcacacccatgtaaggagttacttcgcaacaaaattaaagaatcatatattttgctcttcagctttgctccttcagatgtgtcagcacaatgtgataaacacaattgaggact

SEQ ID NO: 60394 - DNA, 299 bp, Homo sapiens
actgtgtttgtccgaagctcccaaaagtctcagcatttggaggcaccagatactaaggaagataggggtcagaaatggagctgaaaacaggggagctggtcggaaaatctgtgtacactgacaggtggacccctacgattttctccctatgtgcccttgtggatgggtgagtcccttcactaccaactccctggcctcaggagaacaaggtttattctttgcaaaattaatgaagagctgtctggactttgaaaccaggggccgtggattgttgcttggtttaaaacaaggagatcggc

SEQ ID NO: 60395 - DNA, 276 bp, Homo sapiens
tccaccgcggtggcgcccgtctagaactaacgacattcctcaggctgtaggaaatgctcaattaagcttatccctgccgaacatctcctggggtagccaactacccaaattttgctccctctattgagggtatgtatgcagcatcattgacgtaatacattgggcatctctctaatcctggctaatttagacttgggccttaggttgaaaatagtggtgcagcgctgtcgcttagttctggagtgcagcagtgatgtgaatttcgtgtttcttttg

SEQ ID NO: 60396 - DNA, 542 bp, Homo sapiens
acccggctgacaattcttaaggttaaaattaaatgacagcctagcttggttacaaacatgcctatgaaaaacaggaggtctaattcaataattaccagcttccaacccaaagtcgggcactacaggctggagaatgaagtggtaaccgataaataaaaccttccacagcacaggcaggagccacccactcttcttcacttactgtcccgtgtcagaagggactgaggtcagagctggacttcgagggtgcagatgcctacattccccatcaggattgcaggcacttctctgaagcaggggaggcaaggtcagctggcctggaagtgagggcaacctccaaaggcaaccacagcatcagtgacagcggcttctcccccggcttcctgggctgagccacactgtcctgatgccaccaggtcaccacattcgggtacgcggtggctcacgcctgtaatcccagcactttgggaggccaagacgggcggatcacgaggtcaggagattgagactatcctggctaacacggtgaaaccccatctctt

SEQ ID NO: 60397 - DNA, 231 bp, Homo sapiens
agggaccccagtttgcaaagtctctgtggaggaaatggaatctgacctggttgttgaagaatgtataagatttgaagacttggaatgtgacacattctaggcaaggaaaagaacaagaacaaagacatctaagttatagtgatcctggctgctttcacttgagtaaggcttgcagatcccacagagaaatagattctgtttctggcgtctgcatacgcaagtccccaactc

SEQ ID NO: 60398 - DNA, 293 bp, Homo sapiens
acaatttataattttacatcatccaacttcaaatttattttgctgttattttcccaggagaaaatttaccaaaataatgtgtcaaaaagcttttaaaccataggtgatagttgcataggatttcattatactattctttctacttttgtgtatgcttgcaaattaacttttaaatttagaaaaacatagtttatgaaaagcttgcatttagttgtaaagtaatattacatttgttactgattttatatattaataacttacattttattatttcagagaacaacatttgtgaa

SEQ ID NO: 60399 - DNA, 525 bp, Homo sapiens
acctgaacaaatcccatcaaggacagattctcagtcttgaagaggcagcacagtaaaggggaaagatcatgagttttggggccaggttcccttggatattgtggggtccccacacttctggatgatgttggataactctttgagacttaggcttcacatctgtaaaatggaaatacttatttttcagagttgtcataaacactaaatgatttgacttatatcaacctaattcctactggctcattgaactcagctcagctgtcccctctgttcggatgccttccccagtggggcttagttaggtatccctgctggataccctgccaagctcttacacattccctctgccataacactcattctttgttactgaattataatttcatgttcatttgtttatctctcatactaggctgtgagttccctgatgacagagaatgtcttgttggttttggaattcccagtgcccaacttaattcctggcacagctgagtaagcaaatgaatgaacgccatctagttgagt

SEQ ID NO: 60400 - DNA, 302 bp, Homo sapiens
actgtgttgtaagagatgcaggttagcagaaaccctccacatgagatctgctttaagactgacccaagcctgaaacgctctctccctaagtgatccatgtccctgcagtaataccataaccactaagctaacacactcactgtaaaagtgttgcttctccatgaagcaccaagacttgatgaccatttgcagttctcattaactccactaagaccctaaaggctaaatgacaaccaagcctctgtcactctgcctgagtggatttaccacaaatatcaaatctgttcaatctattataagag

SEQ ID NO: 60401 - DNA, 221 bp, Homo sapiens
  misc_feature 198, 202: n = A,T,C or G
actccaccgcaggtggcggcgctactacaactagtggtttcccccgggcctgcatggaattacgatatcaacgcttattcgataccgtacgacctcgtagggggggctccggtacccaagcttttgttaccctttagctgagggtctaatttgcgcgcttggccgtaatcatggtacatacgctgtttcctgtcatanaccntcctatgtctggctgactt

SEQ ID NO: 60402 - DNA, 324 bp, Homo sapiens
acctaactgggacctatgggagactggtccctgacccagagtttcaggtgaccttacttccgttcctttcagtgagatcatctccctgcaacaagggtttgggttgtggacctcagactaggaaaagttcttcctgcttaaattcagtgagcctcaaacttttaagttagtggagtcctagtgagacttagggaaaagccaaaaactactcctgcagggccagtgatcaaggacagttgtgagaattggttgcaaagctccattacagagaaaataatagctatatctggcttagtaaataaaggtagcagtgcgttctggctt

SEQ ID NO: 60403 - DNA, 540 bp, Homo sapiens
acctgggaccacaagtgtgcacgaccatactcagctaattattttgttgtagagacagggatctcactttgttgcccaggctggtcttgaactcctgggctcaagcaatcctcctgcctcatcgccccaaagtgctggcattacatgcatgagccaccgtgcccagcctaaattcccagtttcttctctgttcatagttcctccaatgagacttctcatatccctgaagaaaattcctctaccccttgcttccatgactgcctttttcctccagccctattctcctcctctcttaggattttattagatagcttgacttagcttctttcccagcaattaggaatcttttctctttggaagaggacagaaatcaggggctctgtaatcaaagattctctttagagagataggggagagggagaagtgaacacccacacagaaatcagcattgccatcacttagacatttttcagaataggcatagcttcattattttcttcttagtcattatcccctagaaacatattttcagttgttctt

SEQ ID NO: 60404 - DNA, 340 bp, Homo sapiens
  misc_feature 288: n = A,T,C or G
ggtacttggtctagacctatctttggccgaatggactccccgcggtggcggccgcccgggcttgtaccaaatttctcaccactttgggacacattttgtagagataacgatgagtggagaatatcttgacactttctattgcgcattacaaatcagatcacactgagctgtgtataggaacttctaaatccctcactgatttatgtcctatagaatgtaaacatggatccaccagtcatgcgttacttgacagggaaacattctgagaaatgcatcgttaggcgattntgtccttatgcagacatcatagagtatacttacatgcacctagatgatatac

SEQ ID NO: 60405 - DNA, 288 bp, Homo sapiens
acaaatttgtaaaacccactaccctccactcatattgccccttctcagaaacctgcaaaccccaacagagtgatgagcagactgcatacagggaaggcagtgtcatgcaatgtagtatagtgagaagaacagtgaatgagtagttaccatcccttttagtctagtgagagagatagacattaaacaaacatacaaataaatcatatttacaagttgtgataaatgttacaacagggtttctcagcctcagcacaattgacattatgggtcaggtaatcctttgatgtg

SEQ ID NO: 60406 - DNA, 118 bp, Homo sapiens
acattacttacagaagcgccttctactgttagccgcaattcttcaggagtaatcatggcccttgccctagagcaagtgaaggcccacagacagacgctgaagaggaacaaatagtgct

SEQ ID NO: 60407 - DNA, 490 bp, Homo sapiens
acaaaataaatttgctcattgggttagagtatggttattgattagggggctaagcatttagttactgcatggggcagccaataataaaatcacagccctgtgtatttacctccacagtgtgtgctgataagtgcaaaaggtttgtgcaaattcttttgaagttatattgtaaccatggtatatgtattgaaaacttggccattttaccccattcctatgaatgaaaactatttggtgaatcagaggatagtctgaattgggatatgaaggccagtataagtgtcagttagcaaagtcagctctagtttagtttttttttttttttttttaaggcgtaccattactaaaagtttagctttggaaaccttgtaccattttaaaaacttttaaagggttgacagcttttggtaaattgcctaatccaaaaaactaaactttggttcatgttttcaatgtctaaatgaaaaaggggaaaataaaaaacctaaaa

SEQ ID NO: 60408 - DNA, 408 bp, Homo sapiens
acagttttatcagatctgctacaccccaaagttgttctaggcttctgggacatatagtgagaaaaacagacaaacttccctgccctcccgcaacttatattctattaggagagaaacacaaaagtcattgataaagacaagtaaatgtcaagtatgttaaaaggtagtagggacgaagtaaagagtagagcagggtaaaaggattgggagtgcggggtggtggggggagctacaaacttaggggagtcaacttgctctaaattgagaatatagatttaccaaattgagatcctactgttttattggcttttttcccacttattatataatgaggatatccccaagccattaaatattcttttgcaatataacttttaatgactgcagagaattccatctcatgaatgt

SEQ ID NO: 60409 - DNA, 334 bp, Homo sapiens
acttaacagtaaggaaacgtgtcccatgaactctctagtagactccccaatatcttgctggagagacttaggtcatataaatacctctctaaaccagtctttaagcaggaggatggtcttattgtgaatggctccagctagtagtttcaaccttcactacacattagaatcacttggaggaggacttaagctcccttgatgcttacaatgtgcagccacagttagcctacatcagggtttctcaacctcagcactattgatattttggctcagatcattgttttaggggctgtcttgcacattgtggaatgtttagcagcatccttggcctcta

SEQ ID NO: 60410 - DNA, 303 bp, Homo sapiens
actcttaaaaatctgttaagagagtggatctcattttaagggttcttaccacaataaaattaaatttttgaaataaatcagtcatatttgagtgaaatgaaacctttccgagtagtttcagacaattgataatacctagtttacagttcctgtagtcattttggagggtgaggacttgatgtgtttagtaaagttgagaaataaatacatgaaagaatgtgtggggaagagaaattgtggggaagagaaattgtctcagaggaccattcttagtggcactggggaaatcttggcacccagaag

SEQ ID NO: 60411 - DNA, 510 bp, Homo sapiens
acttctaggggcattttcttcactgaagaattgagtagaatgagaacctcattattgcttttatcttttttatatatgggactcttttgaaatttttatttgaggaaaagtcttctagtgctaaagcatatttaaaaacaattttgcggatacagaaaatgagacctagagcttttacatgaattgcccaaaatcacactgctagttagtgactgagatgcaataagaacccacatttaccctacttcagggccagtgttgaagaaagcaatgcctgtaaaaagattccaacagttcaaagtgaagcactctcaaggcattcctaggagtagaggcaacagctggttagcaatactatgtggcaggtaatatgtacacaaggtaatcacaactgacattagtccctaccctcctggtgcttatatgcagagaaagaacttttcatatctaaacaaaaataatatgttgttatgaatcagggcacacacttatcccctttttacctgttca

SEQ ID NO: 60412 - DNA, 343 bp, Homo sapiens
acactgataatatgaaggcttttacaaatctgactggctatttttcttggttttatttatgaaatctgagtggtgatcccatttggatacttccagtcaacgcttccccgtagttcaaacaaaaagagtttaggtcagcatgaaacagtttatcctgtggatggactccactgctcctctccactagttcaaatgaaagggaaagagtttctccagcagtgtatgtatggagggaaaagcatttattttttttatcatcttgcagagattagtgtttaaaaaacaatgcagctatagttagccctctgtatcctctgggattcaaccaactgtggatcgaaaa

SEQ ID NO: 60413 - DNA, 597 bp, Homo sapiens
  misc_feature 474, 475, 476: n = A,T,C or G
ttttcgcgtactgcgtacttcacctgttggcctaattgggagctccgaccgcggtggcggcgcgcccgggcaggtacctttgttgttcgatatgggtgtgcatttgctgttgacactcttgagttagaagtgagcatctagatttgagggaataaatacatctccatgtgaaggaacaaagggagaaccaatgaaagaaaagggaagtattgggcggtgggggcgcggggagaaaaagcgaagatgaggtagtaactgatgtcaaacattgatgaacatcgtgttggggacaacaaagtccacagttcgcaggtcactagtgaccttggaaaattttttacctcagataatttaaaatcaccttaggtcactggagtttaagtagggagtttgtgaaggagtcaaagtattgacagaattgctgtttgctaatactggtgatgattatagtaaaaaaaaaaaaaaaaaaaaaannngtcccccggcccctttaaaaaatagggaacccccgggccgggggaatttaattttaacttttttaaaccccccaaccctgggggggggcccgggcccccactttttttccctttagggggg

SEQ ID NO: 60414 - DNA, 277 bp, Homo sapiens
actgtgttgtaagagatgcaggttagcagaaccctccacatgagatctgctttaagactgacccaagcctgaaacgctctctccctaagtgatccatgtccctgcagtaataccataaccactaagctaacacactcactgtaaaagtgttgcttctccatgaagcaccaagacttgatgaccatttgcagttctcattaactccactaagaccctaaaggctaaatgacaaccaagcctctgtcactctgcctgagtggatttaccacaaatatca

SEQ ID NO: 60415 - DNA, 376 bp, Homo sapiens
acagagcacttgctgcatgtcaggtttgagacttgagtatgcattagggccatggacacccccatcttatctttaagtagatttcaaagtaaatatttgatgaatatgtaaaatatttagtttggtcagtcatagggctgagaacatggtggcagttacctcctagtattctgcaagcaaaaaaaagttttttcttcctatagcaattgccatctcagccacttttgcagcatttctttttgctacactttgcattaaccatttgtgcacttgtcttaccctcaaacaggccatgaaagctccttgaggataggggctatgtctttttcatctttatatatgcatcatttagcagagctgtcccttttatatgtac

SEQ ID NO: 60416 - DNA, 495 bp, Homo sapiens
acaaggaagactggctgaagaagaagctgagaacaaagcaggtctacagaggaagaagcagtgactagcctggtccctgaacgggtgaaatgggaaagtagctctggctccccactgccaaaaggcctcagtgatcttgctgtttggggttattagagcaccttttacccttttcaacaaagcccaattttacttaatctagttagaatttctactccttgaaaccaagagagacaaagcaaaatcaactataatttaaccattcctcctactttgagagcatgtaggttatttttaattttttgattaccctatgtgatgctatagtgaacatttctgaatacaaattcttgtttgcatttctagttatttccttaagatatatatgtatgtggaattaaaagatacaaacattaaatccttgataaactattccaaaagggtagtgcacaccatcaacttacttcaccagacacagtgtacctcggccgctct

SEQ ID NO: 60417 - DNA, 299 bp, Homo sapiens
acgcgggtaaaacccaatgttcttaatatgtagtcttaatatagactctataaatagcccctttgttaatctatcttgaattactcacttttaggtttcagctccctactgagaccccaactggctttaccttctgttccctcctggttctgcttatcttccattgaccctgtggacctgctttctgtcattgccttccctgccctcagtctcaggagcctgagactggcttctagatgggtttggacaatggatagcactggcaggaggagagtagagttgctgtgtttattttcctg

SEQ ID NO: 60418 - DNA, 567 bp, Homo sapiens
acaatatattttctcccttttatagaaatatagagggcaccatgtgtcaagagcctcagccacagcccagcttaactggatcgtaaacattacaaagttttctgtaaacagccatggtctcaggatatctttaacctggtttcagttgtatgcactattaaaattctttcaaaaccaggctgaaaggaaaggaaataagagatactagtataccctgggctacagaaacagaacattggatggatatataagacagatcccatctgggtattcaacgcataggctcaggaatttctgtctgttttgtttgatgctgtaatgccaacatctatcatggtaactagcataatagataaagatgcgccgagtgactgatttgcatttgagaagggggcaactaaaacttgaaggacattttttaaaagcaggattcaatattgcctgagtttgatattccagttacaatgcattcgttattcaaaaacattcttaaatcttaaatacaagcaaacagaaactgatatttcaattttctttttacagtttttattttcattttccatttta

SEQ ID NO: 60419 - DNA, 286 bp, Homo sapiens
actgtggtaactgtctgaattaataaaagaaagtaactgaggttctggaagaataagactgaacaaataatattcaaattttacatatcatttaattacgaaattccaatttcaatgctgacttttcttttgatgttttacatattttcttcaggtcataacatacgttaatagctgacaggagggagacgtttaaaaacaatatagtaatttattttaaaggccgagtcacgagcagatccatttctgtagtttctgtaggggatggaaacatgcaaagggcaat

SEQ ID NO: 60420 - DNA, 452 bp, Homo sapiens
gcttgaatcctgggagtcacaacccttgcccctaggtgaggctactgctggagtttccaagaggtgaaggataggcccagagaagaaagggggacttaaagatcatagacactcacacaccccacctttcatgcagtaatcagcccagtccaatttctagaagacaagactctaaatagcacccgcctgtctatctaggccaacacactgctttttcagtcaagttccctttaacatttctattccacatgaatcaaactccctgaatctgcaccatcaaagtgctagggtaggtattaggaaaccagaaacaaagatcgggctgtagccctacatcagccccatagggagctgggacctgccatctttcatctttgtagcagaatgagaactatgaatctctggccacagaccttgtcatccagttgtctgtagagactggagatctcctc

SEQ ID NO: 60421 - DNA, 219 bp, Homo sapiens
acagacattgagttccttgtgcgaattctgtcttagtgatttcactaaagttgttcctgctgcttttgctagtgctgatctaggccttgaccttttgaaacttagagaaacttttgcagtggggatccgccatcttgtctagccaccatccaggacacagacatggcttccgttcgtgagtctctattaaatgtttctttctagaaactggatttgtca

SEQ ID NO: 60422 - DNA, 288 bp, Homo sapiens
acaacaccgccagcttaaggacaacacctgtgtggtggaattccagttcatgctgcccacatctcatccaaacaggtgagtttgaggtggtatgtgcacccgagccagccagaggtataccatgagaatcaaggggagtaatgtgtatgacaattccatgtttttttagttagaaatgtagggcaaaaaatgaacaatatgaaccaaaagagaagagccttttggtgcccacttctttgatctaaagagaaaaattatggtctaagtaagatgaaagtttaggattac

SEQ ID NO: 60423 - DNA, 519 bp, Homo sapiens
acccagccaagtctttttaataaagaaaaaaatatattgttatgcttctctactttaaaaataagatgaataaacaaaactaatgaacataataaacagtaatataaaaataaacgttaaggtttaattctcattccttatgaagagccactaagagatatatagaagaggaggaaaaaggtaggtagaaggaagaaaaaggagacatcagattgtggggtggggaggaaaagtcagaagttacgacagaatcagaccaaagagctaaatacagtttaacttacagtttttgaacttcaggccacaaagtattctgcagaagatgatcctcagtgggaggctctagaataaattgaagctatttttttctatgtaaaagtgaattctatagcacttatttaggtcagcagcaatagataacatactggtgtgttctagcgatttattaaattgtctttgtcacatcttaccagtaagtatggagggctgaaaggccacctgctgatactcaaaaccagt

SEQ ID NO: 60424 - DNA, 440 bp, Homo sapiens
  misc_feature 418: n = A,T,C or G
acccttacaaagaagacaccataccttatgcgttattaggtggaataatcattccattcagtattatcgttgtaagttaaatccacttttccaagtttataacttttgggcacttggcttaattttctgttactcttttaatgcttaaatgtgtaatcctccaaaaacaatgtatgctttttaaacctttaattgatgctttatttgatcaagagaatctcagctattttaagtggagtcaaaaaataacaatgtgtaattgtaagagccaggcatggtgacatgcctgtagtcccagctactcgagaggctgaggctagaggatcgcttgagtctcggagttggatactataatatgtgatgatcacatctgtgaatagccattatactccagcccagacaacactgcaacatcccnaaaaaaaaaaaaaaaaaaaaaa

SEQ ID NO: 60425 - DNA, 508 bp, Homo sapiens
  misc_feature 485: n = A,T,C or G
acttgggatatattggtgaacaaaacagaaatgtctgtgccttcttggatcatgtgttttagaattatgagaattaaatgaaaataaatattcaatatggtgccagacacatagaggtgcccacagtgtcttatctcactttcttcctgcttgccatatcttttccatcagggccaaagagaatgggaagtgggaagaaataaacttcatatttcatttgtatagctgtggagagtagcaggccctgggtccctttggggaggtcatgcgaactgggcatggccttctgtcaagaattattagaccaggcatggtggctcatgcctgtaatcctagcactttgggaggctgaggcaggaggattgcttgaggccaggagtttgagaccagcatagccaacatggtgaaaccctgtctctaataaaattaaaaattagccggcatggtggcacatgcctgaaatctcaggtctccaggaggctgangcatgagaattgcttgaacctgg

SEQ ID NO: 60426 - DNA, 272 bp, Homo sapiens
acaagaagaagaagtcatcctttaagcgcttcctggcactgacgtttaagaagaagacggagaacaaattgcatgtggatgtgaacgtgtcttcctctaggtcctcttcagagtccagctaccacgggccttccaggattctggaagttggccggagaagcctcagcaactcccctcagcttaagtctcggactgggaagctccgggcttctgaatccccctcctccctcatcttttatagagatggcaagaggaaaggtgtccccttcagc

SEQ ID NO: 60427 - DNA, 242 bp, Homo sapiens
acacaaccacccactagttctcttctccagccaagaggaataaagttttgcttccattctcaaaaaaaaaaaaaaaaaaaggcccccgggcccccgggggttataagggtgggaaaaaaaggggttttttttttttttttcccccccttttttccacccaaaaaaagggggttttttttgggaggggatccccttttgggggggggggttttcccccccccccttaaaaaatttttgccccg

SEQ ID NO: 60428 - DNA, 306 bp, Homo sapiens
actgtgttgtaagagatgcaggttagcagaaaccctccacatgagatctgctttaagactgacccaagcctgaaacgctctctccctaagtgattcatgtccctgcagtaataccataaccactaagctaacacactcactgtaaaagtgttgcttctccatgaagcaccaagacttgatgaccatttgcagttctcattaactccactaagaccctaaaggctaaatgacaaccaagcctctgtcactctgcctgagtggatttaccacaaatatcaaatctgttcaatctattataagagctaa

SEQ ID NO: 60429 - DNA, 383 bp, Homo sapiens
gcgcgaacatggtacatacctgttggcctgattggagctccccgcggtggcggccgaggtaccaagtcaaatctgctctttaactgaaatgattttatagatcatttccaaattaagcaatgcaatttgaaataacagggttgtaaaaaatgttggtcttcaaaaatttacctcttgctttcccccaggtcaaagttgaacagcaactcgggggcagggaggacgtcaaggcctggtaggacaagcgactctccatggtttctctcaggttctgagactctaggcaggctggcaggcaacaccttagggtaagttgtggccagttgaaggcaccatcttacagatggtctgtatcatcttcctgtgagtgctctcagtctgaa

SEQ ID NO: 60430 - DNA, 514 bp, Homo sapiens
actgtgttgtaagagatgcaggttagcagaaaccctccacatgagatctgctttaagactgacccaagcctgaaacgctctctccctaagtgatccatgtccctgcagtaataccataaccactaagctaacacactcactgtaaaagtgttgcttctccatgaagcaccaagacttgatgaccatttgcagttctcattaactccactaagaccctaaaggctaaatgacaaccaagcctctgtcactctgcctgagtggatttaccacaaatatcaaatctgttcaatctattataagagctaaaaaggagaagcacatgaaatcacatttcattcttagctcttttatcttcccatttttcatttagacattgaatacatgaaccaaagtttagttctctgtattagtcaatttgccaatagctgtcaaccctttaaaagtctttaagatgctacaaggttcccaaagctatacttctagtaatgctacgccaaaaaaaaaaaaaaaaaaa

SEQ ID NO: 60431 - DNA, 261 bp, Homo sapiens
acgcgggtcattagcccataaaatccagactattagattaaagggaaacattttaaaatgttagctgttttgaatggaaatctttctaaaatatactatgcaattctaggcctgatagtgaacaaaacatacattttctttaagactcaggatctttttttttttttttaaaaaacgaattttttttttgccccccgggttggggcagaaaatttctttaaccccaggaggggatttttccaggaacaaaaaatacccctt

SEQ ID NO: 60432 - DNA, 340 bp, Homo sapiens
acctttatgctatggaacagctggaggatagaaagaatggtaaatcagcccttcagtgaatgcccaaaccacaatcctccctgtaaagcagctctgttagaggaagagggtaatgggggtaggggtgggggacaaagttctaaaaatgtaatctgctaagcaggtatatttagtcttccactcagaaatactatgtatctcccagttatatcttacaggtttggtttggtgtctgtttttttttttttttttggggggtggtggtttttggccgggtttgttttattttggccctttttttaaaaagggtttttacggggggggctggggggttcatcct

SEQ ID NO: 60433 - DNA, 537 bp, Homo sapiens
tcggttcgctcgcgggcaggtactgggattacaggtgtgagccactgtgcccggccctctgacttattcttgagagatttatcagtttgtgaatggatcaaaagcatacaactgaaaattaaagaacagaaaaatagatgtagtttgacttactacatcttaaaaatgcattcatgatctcccttagtgatcttttttcttaagagtttttggactcttgccctcccccacaaatagggtagaataagagaataagctgagtatttaaactagggtaacagataaaaagaaaaaaaaaattccctctccaaaaagagatgatcccttaaaaaacaaacaaacaaaaaagataattgtggttaataaaattattaaaaaaaaaaaaaaaaaaaaaaaaaggcccccggcccctttaaaaaatgggggtcccccggggcgggggaattttattttaactttttttaaccccccccccctgggggggggcccgggcccccattttttttcccttttagggggggtaattggccccctggg

SEQ ID NO: 60434 - DNA, 289 bp, Homo sapiens
tacacaaaagagattaattcagaaatagcgttgcttaggagttctctccccttacagaggattatcattaaagtttggggcaaattcttggtcaatttgctatgacagagcttcccatatccctacccaatctcaaattagacaactattatctaggctgaaaacaacaaaaaagagacctttatcagtctttgtctgttgtcactgatatacttgtttctcctaggaatgctttggaagggtttgataaagcagatgggactctggattctcaagtgatgagccttcc

SEQ ID NO: 60435 - DNA, 427 bp, Homo sapiens
acttcccttccttctgctcatcttcccttcagtcttcttgctgtttaggtttaatgtgcaaatggtttaggtaggttgcctttttactcaactgaaactagtctaaaattgggggccaggcatggtggctcatgcctgtaatcccagcactttgggggactgaggcgggaggatctcttgagccccagagttcaagaccagcctgggcaacatcgtgagaccccatttctatttttttaaacaaacaaaaattataaaattgggaatgacttgttccttataagctatgaaaaactagtctatgtattttctttaaaatgttaggcagcatagtctagtgatggactgtggattcaaattttagctcctccattgaactctgtgaccttgggaaagttttctctttgtgcctgtattctttagctat

SEQ ID NO: 60436 - DNA, 307 bp, Homo sapiens
actgtgttgtaagagatgcaggttagcagaaaccctccacatgagatctgctttaagactgacccaagcctgaaacgctctctccctaagtgatccatgtccctgcagtaataccataaccactaagctaacacactcactgtaaaagtgttgcttctccatgaagcaccaagacttgatgaccatttgcagttctcattaactccactaagaccctaaaggctaaatgacaaccaagcctctgtcactctgcctgagtggatttaccacaaatatcaaatctgttcaatctattataagagctaaa

SEQ ID NO: 60437 - DNA, 162 bp, Homo sapiens
  misc_feature 128, 155: n = A,T,C or G
acgcggggtctactgctccctcttctatcctttagtcattcttacagggttgtttcaaagatcagatgagatagtatataacgtgcttactacattgctgtaggtgctcaagttttaccacccacccnctcagacatttacttaaaatatattcntgggggc

SEQ ID NO: 60438 - DNA, 442 bp, Homo sapiens
acttgggatatattggtgaacaaacagaatgtctgtgccttcttggatcatgtgttttagaattatgagaattaaatgaaaataaatattcaatatggtgccagacacatagaggtgcccacagtgtcttatctcactttcttcctgcttgccatatcttttccatcagggccaaagagaatgggaagtgggaagaaataaacttcatatttcatttgtatagctgtggagagtagcaggccctgggtccctttggggaggtcatgcgaactgggcatggccttctgtcaagaattattagaccaggcatggtggctcatgcctgtaatcctagcactttgggaggctgaggcgggaggattgcttgaggccaggagtttgagaccagcatagccaacatggcgaaaccctgtctctaacaaaaaaaaaaaaaaaaaaaaag

SEQ ID NO: 60439 - DNA, 436 bp, Homo sapiens
acagagaatattgatacttgtggactgcttctgtaactcttttaaaataaattttctaagtaaatgctgacgtagacttttctgttagtggaaggctgagctcctcccgccaaacaatgcgctgcccaaatcatctttacaattcccgacagtctgtcgtctccgaagctcgggttcattggtttttattctgtgaaggtcaggaagcgttttggaaaaataaattttcctttttaatttcttaaattaaatgtgtcttcccaaggatgcccagaaataggaaagttacataaatgctaattaaaaacatgcctgacaagctgtgcccactagtcccgttgatcattctttaattcacatttcacagcaatttctaagaacatcaccacgtccttcattaactacatatcaattaaaatacctctgagaggcaggt

SEQ ID NO: 60440 - DNA, 511 bp, Homo sapiens
acccagccaagtctttttaataaagaaaaaattatattgttatgcttctctactttaaaaataagatgaataaacaaaactaatgaacataataaacagtaatataaaaataaacgttaaggtttaattctcattccttatgaagagccactaagagatatatagaagaggaggaaaaaggtaggtagaaggaagaaaaaggagacatcagattgtggggtggggaggaaaagtcagaagttacgacagaatcagaccaaagagctaaatacagtttaacttacagtttttgaacttcaggccacaaagtattctgcagaagatgatcctcagtgggaggctctagaataaattgaagctatttttttctatgtaaaagtgaattctatagcacttatttaggtcagcagcaatagataacatactgtgtgttctagcgatttattaaattgtctttgtcacatcttaccagtaagtatggagggctgaaaggccacctgctgatactcaa

SEQ ID NO: 60441 - DNA, 542 bp, Homo sapiens
  misc_feature 531, 537: n = A,T,C or G
tccaccgcggctggcggaccgaggtactgtgttgtaagagatgcaggttagcagaaaccctcccatgagatctgctttaagactgacccaagcctgaaacgctctctccctaagtgatccatgtccctgcagtaataccataaccactaagctaacacactcactgtaaaagtgttgcttctccatgaagcaccaagacttggtgaccatttgcagttctcattaactccactaagaccctaaaggctaaatgacaaccaagcctctgtcactctgcctgagtggatttaccacaaatatcaaatctgttcaatctattataagagctaaaaaggagaagcacatgaaatcacatttcattcttagctcttttatcttcccatttttcatttagacattgaatacatgaaccaaagtttagttctctgtattagtcaatttgccaatagctgtcaaccctttaaaagtctttaagatgctacaaggttcccaaagctatacttctaataatgctacgccttaaaaaaaaanaaaaanaaaaa

SEQ ID NO: 60442 - DNA, 602 bp, Homo sapiens
ctccaccgggtggcggccgccgggcaggtactcaggcaaaccagcaattgcccatcgagactgaaaagtaaaaacattctggtgaagaaaaatggaacttgctgtattgctgacctgggcctggctgttaaatttattaggttagtatcaaagtgaacaaatacatgttttatgactcttttctgttactttttattttgtagcgcagtgcttctaggatatttagtagaagaggaatatcattaattttgacatttgacggggagaaccaccaaacattttattagcaacacagcatatttgggtctgttctattgtttctatgctcatcagagatattgtttagagactgttcacattaggtttgcagctgtcattaagttatatagaaaagaagtagctaattcctgggaatacgtagtcagaattctgcataacatttgcaagtaggaaaaagttttggggaaaatttacagattatatatggataaagacaatttttatatggtataggaaagataacttgcatagatgttttgggagaaatgttagaaactaataaacaaaacccagctgttattcagtacctcggccgctctaaa

SEQ ID NO: 60443 - DNA, 580 bp, Homo sapiens
acacactttcaacaaccaagtcttctgagaagtctatcacgagaactgcaagggggacatcccgcccccatgatgcaatcacattccaccaggcccctcctctaacactggggattacaattcaacatgagatttgggtggggacatagagccaaaccgtatcagaattttctcaaggatcaaataattccctcttctggccctcacggaaaatgaatgaatgctagagcaaaggaaagcactgctttctcaataccaacaggtgttgatggtaattcctgtttcatgcattaaagcaaaatgtggccagagggagaaaagggtccccctaacccccacatcctgccaacctccctgccccagaacacaggtcacgatattcccagtgaaacttaatatcgtgactgccagaatgttactattcagccatttcatgcacagtgccctaggggttgcaatggcattcctagacaactgcaatgcctttctaacattgttgctgaggaatgtgaagccacatcgttgttacctgtaaactgcagaacacaagccttctgtctacaggaggagggtacctgcc

SEQ ID NO: 60444 - DNA, 291 bp, Homo sapiens
actgtgttgtaagagatgcaggttagcagaaaccctccacatgagatctgctttaagactgacccaagcctgaaacgctctctccctaagtgatccatgtccctgcagtaataccataaccactaagctaacacactcactgtaaaagtgttgcttctccatgaagcaccaagacttgatgaccatttgcagttctcattaactccactaagaccctaaaggctaaatgacaaccaagcctctgtcactctgcctgagtggatttaccacaaatatcaaatctgttcaatc

SEQ ID NO: 60445 - DNA, 509 bp, Homo sapiens
actgtgttgtaagagatgcaggttagcagaaaccctccacatgagatctgctttaagactgacccaagcctgaaacgctctctccctaagtgatccatgtccctgcagtaataccataaccactaagctaacacactcactgtaaaagtgttgcttctccatgaagcaccaagacttgatgaccatttgcagttctcattaactccactaagaccctaaaggctaaatgacaaccaagcctctgtcactctgcctgagtggatttaccacaaatatcaaatctgttcaatctattataagagctaaaaaggagaagcacatgaaatcacatttcattcttagctcttttatcttcccatttttcatttagacattgaatacatgaaccaaagtttagttctctgtattagtcaatttgccaatagctgtcaaccctttaaaagtctttaagatgctacaaggttcccaaagctatacttctagtaatgctacgccttaaaagaaaaaaa

SEQ ID NO: 60446 - DNA, 436 bp, Homo sapiens
acagagaatattgatacttgtggactgcttctgtaactcttttaaaataaattttctaagtaaatgctgacgtagacttttctgttagtggaaggctgagctcctcccgccaaacaatgcgctgcccaaatcatctttacaattcccgacagtctgtcgtctccgaagctcgggttcattggtttttattctgtgaaggtcaggaagcgttttggaaaaataaattttcctttttaatttcttaaattaaatgtgtcttcccaaggatgcccagaaataggaaagttacataaatgctaattaaaaacatgcctgacaagctgtgcccactagtcccgttgatcattctttaattcacatttcacagcaatttctaagaacatcaccacgtccttcattaactacacatcaattaaaatacctctgagaggcaggt

SEQ ID NO: 60447 - DNA, 505 bp, Homo sapiens
  misc_feature 481, 491: n = A,T,C or G
acattctcctttgagtctggatccttgatcctggcctgtgattccatctcaggagttagaagcctgtggtgcctggcctgagtcagctcattagcttcattgacaacattggttcgttcaacaaatattgcctgagaagaagacatttaagcaaagacctgcaggaaggaagggagttaactaagtggatatgtggggcaagaacttcccagaatgaagaaacacccgcattaattgcttgaggtatgagaggtgaggtcaggggcaccagtttgtatagggctttctaaaacattatttggagtcagatgacaagctatagaggatgctgagtcaaggtggaaacaacaaaatcctacttaggttttaacaaaattactgtggttgttgtgttgagaatagtgagatggtggcaaggatggaagcggggagatcaattagggggctgtttaaatgatccaaacaaaagataatgaggtanattggatcanggtgaatagcagta

SEQ ID NO: 60448 - DNA, 416 bp, Homo sapiens
acaaagaggaattactaaatagtcattcttttcttggtatttcttccttggaaaaatcacgtttctaaaatcaatctgtagctagttcacaaatgtgtcattaaaaataagagacgtggccgggcgcagtggctcatggctttaatcccagcactttgggaggccagggtgggtggatcacgaggtcaggagatcgagaccattctggctaacacggtgaaaccccgtctctactaaagaaaaaaaaaaaaaaaaagatttttccttcccgggggggccgttataaaacttggggacccccgggcctgaggaatttaaatttaaatttttttttccccgcccccctgggggggggccccggccccccctttttttccctttaagggggggtaattccccccctggggaaaaaaagg

SEQ ID NO: 60449 - DNA, 387 bp, Homo sapiens
acaaaataaatttgctcattgggttagagtatggttattgattagggggctaagcatttagttactgcatggggcagccaataataaaatcacagccctgtgtatttacctccacagtgtgtgctgataagtgcaaaaggtttgtgcaaattcttttgaagttatattgtaaccatggtatatgtattgaaaacttggccattttaccccattcctatgaatgaaaactatttggtgaatcagaggatagtctgaattgggatatgaaggccagtataagtgtcagttagcaaagtcagctctagtttagttttttttttttttttttttaaggcgtacctttactaaaagtttaccttgggaaaccttgtaccatttaaaaaactt

SEQ ID NO: 60450 - DNA, 292 bp, Homo sapiens
acgatatgttcttatatcttttattttcctgaaatgcttttgactcactgcaccttgaaatcatgtctttaaacaggttaacatgatctgtatttctgcaggtcaccattgaaccttctgaagagcctttatttcctgctgatgaattgtatggaatagttggtgctaaccttaagaggagctttgatgtccgagaggtatgtgaaagtggaactgtgagctttatgaccagctgtgagtctctttgtatgtgtatctatttgcaaagctaaagtttgttaagatatgttca

SEQ ID NO: 60451 - DNA, 367 bp, Homo sapiens
  misc_feature 292: n = A,T,C or G
tctaatacgagtatacctataggcctagacggccgcgaccgaggacccaactacgctatcaggaactttaacgagacgataattgctctcttttgcctaattatggtgctacctgttaggaggcctgtcctgtggctgtgtccaaacaccccacaggactcactgtcccaacaatcctaattgcctaaaaatatctttctcttacctgttatttatcaatttttcccagtatttttatacggaaaaaattgtattgaagacactttgtatgcagttgataagaggaattcantataattatggttggtgactatttttatatgtacctgcccgggcggccgctcgagccctatagtgagtcgtatta

SEQ ID NO: 60452 - DNA, 565 bp, Homo sapiens
acacagagacacgatccacagttgtgtaggaataacttcctaaacatctttaggatctacctctttttcctgttcccactgttatttctttgtttcaggcccttaacatctctaatatacactagtatttctgtcttcacactgttttttttctttacacagctcttttcatagcccctccattagcacacagattggaattgtgtctccttgttacccacagaataaaacccaatgttcttaatatgtagtcttaatatagactctataaatagcccctttgttaatctatcttgaattactcacttttaggtttcagctccctactgagaccccaactggctttaccttctgttccctcctggttctgcttatcttccctgtggacctgctttctgtcattgccttccctgccctcagtctcaggagcctgagactggcttctagatgggtttggacaatggatagcactggcaggaggagagtagagttgctgtgtttattttcctggtttcctcctgcaagatcatgtcatgttgggctctcccagaaggcatggctcata

SEQ ID NO: 60453 - DNA, 486 bp, Homo sapiens
  misc_feature 456, 467: n = A,T,C or G
acttgtgaaatagtatctttcaaattgcagtttgcccatattggaacaaaaactaaatcattttgacctgcagcctcacatttctcttatgttttgtaatattataactttcttctcaacatgcatagtttttcagaaattaatctttttgctcttgtgcaagttgctgtgtccctagattttcgctgcccccaacaaacaatccatcagtttttctatagtcagatgagcaaagtttcaagggattatatgtaactatcataatctctttgaagaaattaaaacttatttttgtcagtttattttattggctaaaacattaccatgataaatgaccgtttcagctagaccagaggtagtgagttatctcaatagattgttcacagtcagttacagattgaactcctcgttctactcattgctgtcttctcactgctgcacttgactagtcttaanaaatatgatangtttctctactaaaagtct

SEQ ID NO: 60454 - DNA, 302 bp, Homo sapiens
cgcggtggctggccgaggtacagacagcattttgccatgttgcccaggctggtcccaaacttctagcctcaagcaaccctcctgcctcagcctctcaaagtgctaggattgcagtcctgagctactgccccctaccctctttgcgtcttaggagtcatttagattttttttgatccttttgtttagtgcctctggagctgcttacaccaaggcaatcgagcggccgcccgggcaggtacaggccggctatgtgttaaatgcttagtgaatgatagtgtattactttttattatgctgataac

SEQ ID NO: 60455 - DNA, 272 bp, Homo sapiens
caccgcggtggcggccgaggtactttgttgtaagagatgcaggttagcacaaccctccacatgagatctgctttaagactgacccaagcctgaaacgctctctccctaagtgatccatgtccctgcagtaataccataaccactaggctaacacactcactgtaaaagtgttgcttctccatgaagcaccaagacttgatgaccatttgcagttctcattaactccactaaggcccctaaaggctaaatgacaaccaagcctctgtcactct

SEQ ID NO: 60456 - DNA, 311 bp, Homo sapiens
actgtgttgtaagagatgcaggttagcagaaaccctccacatgagatctgctttaagactgacccaagcctgaaacgctctctccctaagtgatccatgtccctgcagtaataccataaccactaagctaacacactcactgtaaaagtgttgcttctccatgaagcaccaagacttgatgaccatttgcagttctcattaactccactaagaccctaaaggctaaatgacaaccaagcctctgtcactctgcctgagtggatttaccacaaatatcaaatctgttcaatctattataagagctaaaaagg

SEQ ID NO: 60457 - DNA, 513 bp, Homo sapiens
accactgatgagacaaggaagcttaaactactggctcatcaggcatcagtgacagcatctgttctttggatatgacattttataataaggagtggagcaggtgctggaggattagtatacaataaatacatcttctctaagaactttaaagacgggaagtttttctccgcctagagaataatctgaaatcagaagagatggatttctgagaaagatttctcctagccctgttcctatctggagaaaaccagctggtgggtctaagagtaagaggagcaaccatgccagggagcaccctgactctggggcaaatgtgagcattagaggtaggcacatcctggctcataatcaccctgtcagacacagagtgccctccactcaaaacactcaagcagagagtagccatccagggtgtttcaaaaggaagttcctttatcctgggaggctgagccggattacatctcttccaactctaagattgtcttccctcgcccagaacaaacaggatgaagt

SEQ ID NO: 60458 - DNA, 362 bp, Homo sapiens
acaggatgaaggagatcatttaagcaagttaccaagatgttcccacatattgctatcattttcgttttctttttatcaagataagatttataattgtcccacatgtgggtcttgtaacagttagggcttaattggtgcaaacggaatccattctagctagttcaatgaggaaaagattgattacgggacattaaatgacatggaaaatcattaggagcataagagcaggaagaagggaagtgctaaattagtaaactctgagtagatttggtatcaacctggtccagctcccttctgcccaaacacactaaatcaatcactgtgacacatgttttgcaaaagagagtttattcacaaggcag

SEQ ID NO: 60459 - DNA, 366 bp, Homo sapiens
acggagattgacgcggtgtcaaaggacccgtgaccttgagacatgcccatagaatcatacacctgccctagccacatcggggatttgtaatacaggctgctcagagactgacgtggtgtgcaaaggacccgtgaccttgagacatgtccatagaaactttccaaactgaagagcaaagaggaaaaaagagtgaagaaacagaacagaactgtggacaactacaataggtgaagcaggccaggcacggtggtcacgcctgtaatcctggcgctttgggaggctaaggtgggcagatcacctgaggtcaggagtttgagacaagactggccaacatggtgaaaccccatctctactaaaaaaaaaagt

SEQ ID NO: 60460 - DNA, 427 bp, Homo sapiens
acttttttggaatcttgttgcgttgaatacatttagagggtaacaactgtaaagaacctgtgaatagaatttctggatttctttttaaagaaactgatctgaaatggataagaagcttaaccttggtaaatgatttcgcctgaaatcattggcatagtctgaccacgttcaacactgtagtagatactgtcaatatttagggaagctttgtcatatttactaaatttcataatttcagaaaactgtgtaaaacaaagagcaattgatggataaatcaggaatagattctcttgaccatgtgacatctgatgctgtggaacttgcaaatcgaagtgataactcttctgatagcagcttatttaaaactcagtgtatcccttactcacctaaaggggagaaaagaaaccccattcgaaaatttgttcgt

SEQ ID NO: 60461 - DNA, 279 bp, Homo sapiens
actctttcaacattgcagaaatctatttttacctctaggtggactgacctagataacccctccccccttagtgaaaatgtaagtaatgaattctgtgattgttgctaagctgacaagtcaggatcattcacattttaaaacttcatctttgtaaaactcagaaatggtgcttgttaacttgatgcacatatctctctactttagaagaaagagcatccataattagactcctacttttttttcatgccctagatagttaaagcctatcatctttttaag

SEQ ID NO: 60462 - DNA, 307 bp, Homo sapiens
acagagaagttaagataattgcttaagattgctcagctagtttgtagccaacctagaactagagattcagtgtcctagttcctaacccaatgtatttaagaactcaggctccagaaatagattgagtccaacatctaataattatataacctggataattttcttaccctctctatacatcagatcgctaatttgcgaaactgaattcataatagtgccaacttcatagaattgttatgaaggtgaatccatgtaaaatccttaggacaatgcttagaaacatggcaaaagatttcaagaaactcct

SEQ ID NO: 60463 - DNA, 293 bp, Homo sapiens
acgatatgttcttatatcttttattttcctgaatgcattttgactcactgcaccttgaaatcatgtctttaaacaggttaacatgatctatatttctgcaggtcaccattgaaccttctgaagagcctttatttcctgctgatgaattgtatggaatagttggtgctaaccttaagaggagctttgatgtccgagaggtatgtgaaagtggaactgtgagctttatgaccagctgtgagtctctttgtatgtgtatctatttgcaaagctaaagtttgttaagatatgttcat

SEQ ID NO: 60464 - DNA, 535 bp, Homo sapiens
acacctgggtcttcacttcccctgccccatgaggatccattgtcttaatacctgctatggacctccctatgatacctcagctaaaagtttgaagcagaacccatctcctctagcaccagctagtgtctgttctgagtggccgatgctggtacaagtatgggttattaaatatttttaatttcaccctgtttattatatgtatgattttaattaagttacttgtcctttctgagccactcccagatctttaaaatggggataataatacctgttttgcaggatgactgttcattcatcaaatatttgttgaaggcctgccttgttctaggcaatgacttaagtacttgggatatattggtgaacaaaacagaaatgtctgtgccttcttggatcatgtgttttagaattatgagaattaaatgaaaataaatattcaatatggtgccagacacatagaggtgcccacagtgtcttatctcactttcttcctgcttgccatatcttttccatcagggccaaagagaatgggaagtgg

SEQ ID NO: 60465 - DNA, 311 bp, Homo sapiens
acaagaagaagaagtcatcctttaagcgcttcctggcactgacgtttaagaagaagacggagaacaaattgcatgtggatgtgaacgtgtcttcctctaggtcctcttcagagtccagctaccacgggccttccaggattctggaagttggccggagaagcctcagcaactcccctcagcttaagtctcggactgggaagctccgggcttctgaatccccctcctccctcatcttttatagagatggcaagaggaaaggtgtccccttcagcaggacggtgtccagagtggagtcctttgaagaccgctcc

SEQ ID NO: 60466 - DNA, 534 bp, Homo sapiens
acgcgggttggggaagatgcattaagttctgcttgtttaagctaatgttctttgacactgcccaagatttctgacaaaagaatgacaagagagggaagttaaactggacttcctaatgctcctcggttttgatgaggaagtccaaatttctaatcactgaaaggggaaaatacatcaggcagtaaggtgtctaaattagataacttagtggcttgatgtaatttattagtatatagcatttaattacatgataaagtatattccttagttttattaatgtatttttataactgtcaaaacataagttgttaaagtatacttcttgtgaagccatttaaactgatactcgatgcatgtgggtgggagagaaggtgaaattgtttatgacatttaaatttgaaaagtgtaaggattatcttggataattaaataaaactttattactcaatagtttagattctactttagcaaaaaaggaaaaaaccacattgaatacctactctatgttcgataatgctgcagggtgttaagagt

SEQ ID NO: 60467 - DNA, 489 bp, Homo sapiens
accactgcactccaggccaggctacagagcaagaccctgtcttaattttttaaaaataacaaatagactagctagctgtgtatgcccttaaattcatcctaacggtaaatataaacccttgtatcctgaagtagatgtcatccaaggtcatgttttcataatccaggtaatctaaagtagtagttctcaagctgtggtgccaagatcaagagcagcatctgaaacttgttagaagaaatacaaattctcaagccccatgctaaatcttctcaatcaggcacttgaggttgtggcccagcaaatctgtgttttaataaaccctccagataactctaatgaaccattaaaatttaagggccatggatctaaagagaatcttggcctgggaagggagctacagatgtgaactacctgggctcattagctttttttttccccagaaaatcttagaggaatggtattctcattggcattaataatggcagtcct

SEQ ID NO: 60468 - DNA, 399 bp, Homo sapiens
acaacttgcctcaggtatggatataggcctgtgattctctgttgaacaagacagtttttttagagcttatggtctagtggttttgggtgggtcggtgcctagtcatgataaatgtcatgaagaaaacgagcagggtagaaagttcagggtgaggaagttgtgttgggtgctggttgggttgaggctattgtgggataatcagggaagccttctgagatgacattagagcagagacctgaatgatgattaggaataagcctgtaaagaatattctaagcagaaggaaaagtaagagaaggatcctgaggcagggaagagcctggagtggtcaagaagcaacaacaaggccagtgtagcaggagtaggatgtagggatgggagaagaattggagagggagc

SEQ ID NO: 60469 - DNA, 437 bp, Homo sapiens
actttttttttttttttttttgggccgggggggggggggccttttttttgtttacctggtttcccccttcctcattttttggttttcttccccttggggtaaaaaagcccctttttggaccctccaaaaaataaaacctaattccttccttggggccccttttttttttaaaacccaacttttaaccccaaaatttcccttttaaaaccgccctaaccttttcccccaaacctttgaacccttggggaatttttccttcccctcaaaaaaattcccccccttcccttgggagtttttttttaccccccggggcctttaaaaccttttttattttcaaaatttccaaattccccaaatttggccctaaattggttccaaaattacccttcccggggggtaaaaaaaaatcccccggggcctccacccttttaaatttt

SEQ ID NO: 60470 - DNA, 295 bp, Homo sapiens
acaatggattaggaagatgctgacctctctgtatcccatgaagaccctctcggagagttgtgagattggtgtctatcacttctttctgaactgtcacaatattcagggtttgctgtaggttgttgagagctggactgacttctaaaataaaataaagcatcaggaggcaattactttgtgcattttgatcctccattggtatttgtggcccctgaagtagccagtgtctgcacagcattgagtagacttgcttcttaggggtcacctcagagatgcccactgcatgtgcccagac

SEQ ID NO: 60471 - DNA, 516 bp, Homo sapiens
acctcaggccctgtggttccctctcttctggggaaaaagccaatttctgatgggccactaagctctggtctttttctgccagaatcccaggaccctctgctaatccggttcctattgcacagatgattgcataataccacaggaattcaaatggggaacatcaatatcataggagtgagcacttactgggaacttacaagatactcttatatactttatttgggtgactgtatgtgctgcttgcaataacccataaggtagatacaattattatctctgttttatagtaagaaaattaaagcttatgggggtatgtaatttgcccatcttcctacaattgaaagtgatagggacaggatattaccctaggagcctgacttcagagcctgtgaccctaatgaccaacatgcagggagagaagctgttgtttgagcacccactgtgtgccaggcactgggctgaacactgtgcatggattaacttagtgactcctgccaactagcctctgaagtatgt

SEQ ID NO: 60472 - DNA, 291 bp, Homo sapiens
actttaatttttttttttttttttaaatagagaacggggtttacccttttagggaaggcaaccctttaactccggcccttgtgatttccccccttggagcccctaaggggtgggaattacaggcttgacccactgcccccacttgttataatttttttttaaccatttcctttaaatcaaactttgttggaatggtcttttatccctttacctctttattaaacccccagtgtccctattccaacctggggtttacaaataagaaacctggggtccagggaggtttttttt

SEQ ID NO: 60473 - DNA, 486 bp, Homo sapiens
acccttacaaagaagacaccataccttatgcgttattaggtggaataatcattccattcagtattatcgttgtaagttaaatccacttttccaagtttataacttttgggcacttggcttaattttctgttactcttttaatgcttaaatgtgtaatcctccaaaaacaatgtatgctttttaaacctttaattgatgctttatttgatcaagagaatctcagctattttaagtggagtcaaaaaataacaatgtgtaattgtaagagccaggcatggtgacatgcctgtagtcccagctactcgagaggctgaggctggaggattgcttgagtctcggagttggatactataatatgtgatgatcacatctgtgaatagccattatactccagcccagacaacactgcaacatcccaaaaaaaaaaaaaaaaaaaaaaaaaagttcctcccggggggggccctttaaaaatttggggaccccccg

SEQ ID NO: 60474 - DNA, 612 bp, Homo sapiens
tagcgcgtactggtacttcactttgaggcctaattgggagctccaccgcggtggcggcgcgagtactctagtttagtttttttttttttttttaaggcgtagctttactaaaagttagctttgggaaccttgtaccattttaaaaacttttaagagggttgacagctatgggcaaattgactaatacagaaaactaacctttggttcatgttttcaatgtctaaatgaaaaatgggaaaataaaaaagctaaaaatgaaatgggattccatgtgcttctccttttaacctcttataataaattgaacaaatttgatttttggggtaaatccactcaggcaaagtgacaaaggcttggttgtcatttaccctttagggtcttagtggagttaatgaaaactgcaaatggccatcaagtcttggggcttcatggaaaaccaacacttttacagggagtgtgttaccttaggggttatggtattactgcagggacatggatcacttagggaaagagcgtttcaggcttgggtcagtcttaaagcaaatctcatgtgggagggtttctgctaacctgcatcttttacaacacagaacctgcccgggcggccgttct

SEQ ID NO: 60475 - DNA, 414 bp, Homo sapiens
  misc_feature 7: n = A,T,C or G
actttgngacctccactgaaaaaaattagaagaggccaagagagtaggatgaagggccttccagacagggggaatagactgaaaaaaaaaaaaaaaaaaaaccccccctttgtttccaaaaaatttttttttttcctctttaaattttcccccttccttggaaattccaaacctaatttcccaaaatttttttttttaaaattccattttggccccttttttttaaaatatttttaagggtgggttccctgaaaaaaaaaaaaattggggggaaattgggggaaaaaaaaaacctcccggggcccgaaacccccggggggaaaaatggccccccaaaattaccaaacccccctttttaattaaagaaccaccgggggggggtttttttttttcccggcccaaaaggattccccc

SEQ ID NO: 60476 - DNA, 568 bp, Homo sapiens
acctccttgccttactggtgtttctcctaaaccctgactgcctggttgtcatcaagtcccaagtaattaattagccgccaggccagaaatctagatggtgcttttcaaactttaattttcagaatcacccgaggagcttattaacacagaatgctgggccctacacccagaattcctcattgaataggtctacggtgaagcctggaaatgtgcagtggttgcaaagctgctggtctgagaacgtaactatgagaactgctgatctagagcagggctgactagctttctctgtaaaaggacagatggtgaatactgtaaagtttgagggccatatattctctgttgcaacaacttaattatgctgtggtagcatgaaaacagttacagacaacatgtaaacaaatggatgtagctgtgttccagtaaagctttatttacaaataggcagtgggtggatttagcccttgaactggagtttgcaactcctgatgtagaatgcttgtgagcatcccatctttgcacctggccccatcttgtctgatcaccgtagacatccccatgtccaact

SEQ ID NO: 60477 - DNA, 366 bp, Homo sapiens
  misc_feature 272, 279: n = A,T,C or G
actgtgttgtaagagatgcaggttagcagaaaccctccacatgagatctgctttaagactgacccaagcctgaaacgctctctccctaagtgatccatgtccctgcagtaataccataaccactaagctaacacactcactgtaaaagtgttgcttctccatgaagcaccaagacttgatgaccatttgcagttctcattaactccactaagaccctaaaggctaaatgacaaccaagcctctgtcactctgcctgagtggatttaccacanatatcanatctgttcaatctattataagagctaaaaaggagaagcacatgaaatcacatttcattcttagctcttttatcttcccatttttcat

SEQ ID NO: 60478 - DNA, 298 bp, Homo sapiens
accggctttggcatcttttattggttgttcttatatattagatatttaatcgtttttaatattattttaaatggtgtttaaaaatgttcaagtcctaattctttttttgtatgtaagacaatgaatttttgttggacattaacctatctattaacagcttagctagttaaacaacctaggagcaacccttaactactgtgagatggggttcatggataaatacccctagcttcctccctcctcactaggttaattctcatgtatgtcctggtctctcacagggttcccagtgggattg

SEQ ID NO: 60479 - DNA, 279 bp, Homo sapiens
acatctctagatgatcacgaatgtcaaatatcacactacactgtgatatggggattccccttgggggttttcatgtgtatagggtgcctgcagctacactaaacatcttaaagctaccacaatgttcacttcatatttttgctttttataggctttcttggtctcctcctatgttcccatcattttcttgctttgaatctgtaagaatcgagttgaatcttctccattttaaattttccataggctgagaaactgtttagccaagtttggataaaattg

SEQ ID NO: 60480 - DNA, 334 bp, Homo sapiens
actttttattagtttcttgtctttcaacattctgccatcaaaatatattcattttattaacttaccgattattgggaacctgcaaaaaaaaaaaaaaccccccttgcttgttggcacccctggttgggtttttttggatggttaaaaaaatttttaattcaggtggttctgtctcctaaagccaaaatttttgggctaaagggggccttttaaatttggggggccctgcccttttttaaaaaaaaccccaattccttgggttaaagtggttggtttgacttccccttccgcccgtttggtaccaaattccaaattaaattagagtttttttttt

SEQ ID NO: 60481 - DNA, 511 bp, Homo sapiens
tccaccgcggtcggcggcgcgcccggcaggtacattgtatttcccatatattatctcatgttattaattaaatgtttttggttatgaatccccatgttgcatggccacaacataaaaatgagtcttaattttactcttttggctactttaaatatcacaacttcagaccatctaaattaggacggcaagccaagaaactggtgaaaaaaaaactgctatatcacaaccttacagaatttgaagaagctgttagccatgggaatgatcaagggacaaattcaccccccgcctctgtgcctgactcacagattctaaactagctgaggacacttgaaaaagtctgcttggtgagaaagttctttttctccttcttatgtgtgcacgtgcacacatacagacacactcacgttgcttcaagttcacaagcctgcagcagaatgggcctggagaagggagatgatctctaaaaggctatatataaaagtttgtcaaaaaaaaaaaaaaaaaaaaa

SEQ ID NO: 60482 - DNA, 318 bp, Homo sapiens
tccaccgcggtggcggcgcgagtactgtgttgtaagagatgcaggttagcagaaaccctccacatgagatctgctttaagactgacccaagcctgaaacgctctctccctaagtgatccatgtccctgcagtaataccataaccactaagctaacacactcactgtaaaagtgttgcttctccatgaagcaccaagactcgatgaccatttgcagttctcattaactccactaagaccctaaaggctaaatgacaaccaagcctctgtcactctgcctgagtggatttaccacaaatatcaaatctgttcaatctatt

SEQ ID NO: 60483 - DNA, 461 bp, Homo sapiens
accagtcaggtatttaataggatgtcccacgatatggttttagctgatgttttctcatgattaaactaggaatatcaatgaattaaacaccttcacttaaatctgaagacgaaaaagacctaaagaatatagtattaagaaatactcaaaaaggaaaaactatttttaaagtatggaatgacaattcacaatataattaagttcagtgcttaaggaaaactgagaaattaaggagatgcacaaaggaggtatcaacaatattgctaatgatttttttttaagcttgggagtgacattaacaacaacaacaacaacaaaaaaacaagttttaaagaatggttttccaaggctgggcatagtggctcacatctataatcccagcactttaggagactaaggcgggcagatcacctgaggtcagggagtcctagagcaacatggcaaaactctgtctttagtaa

SEQ ID NO: 60484 - DNA, 282 bp, Homo sapiens
acgcgggtgttatgtgaaagtttagtttaacccccatttgatacctttccctggagctgctgttaatagtttgtatttcctttcagtcattttgctatgtatttttatattgaatgtgaaattgtatagtttgtgtggattaaataagtaacatttaaaatatgtcttggagacacagcttgtatcagttcacatagagctattcattttagttaatatgttgtacaatcagttctccatatctgtggattcaactaactgtggattgaaaatacttgtgaa

SEQ ID NO: 60485 - DNA, 417 bp, Homo sapiens
accaacacaacttgtcttgaaattccttgatatttgattgggaggtaggtgatgaaaagcggttagttctggttcatccttacctctcagctgtagatatatggagcccaagcctaattaggcaagaatatctcataagactttacatgtccacatgttgggtgggctctgcatcttaatttctgtccacctcaccccataagactgatgaacagaaacctaaatttcttgatattggcaaacatattgaaagcaaaagtggcttcagttcgccagatagtctgttaacttcctgctttaggctttcttccagaatttggcttaacagattcccttttcttcccagttcttcaaagctactaaggtaatgttctatatattttatccaacattttcaattgtcttcaaaaagaagac

SEQ ID NO: 60486 - DNA, 411 bp, Homo sapiens
  misc_feature 370, 383, 384: n = A,T,C or G
ctccacccggtggcggccgaggtactgtgttgtaagagatgcaggttagcagaaaccctccacatgagatctgctttaagactgacccaagcctgaaacgctctctccctaagtgatccatgtccctgcagtaataccataaccactaagctaacacactcactgtaaaagtgttgcttctccatgaagcaccaagacttgatgaccatttgcagttctcattaactccactaagaccctaaaggctaaatgacaaccaagcctctgtcactctgcctgagtggatttaccacaaatatcaaatctgttcaatctattataagagctaaaaaggagaagcacatgaaatcacatttcattcttagctctnttatcttcccatnnttcatttagacattgaatacatgaacc

SEQ ID NO: 60487 - DNA, 510 bp, Homo sapiens
actgtgttgtaagagatgcaggttagcagaaaccctccacatgagatctgctttaagactgacccaagcctgaaacgctctctccctaagtgatccatgtccctgcagtaataccataaccactaagctaacacactcactgtaaaagtgttgcttctccatgaagcaccaagacttgatgaccatttgcagttctcattaactccactaagaccctaaaggctaaatgacaaccaagcctctgtcactctgcctgagtggatttaccacaaatatcaaatctgttcaatctattataagagctaaaaaggagaagcacatgaaatcacatttcattcttagctcttttatcttcccatttttcatttagacattgaatacatgaaccaaagtttagttctctgtattagtcaatttgccaatagctgtcaaccctttaaaagtctttaagatgctacaaggttcccaaagctatacttctagtaatgctacgccttaaaagaaaaaaaa

SEQ ID NO: 60488 - DNA, 281 bp, Homo sapiens
acgcgggtatacatatgtatcaaacctgcactttgtgcacatgtaccctagaacttaaagtatatatatataaaaaaaatttcttctctttataaattacccagactcaagtcgtcctttatagcaatacaaaatggagtaagacatcacagtatttctcacacctagaacaacatgtagcatgtagtagagcatcagtaatatttggtgaatgaattatggatacttaggaaaagctcagcaagacaaaatctatcagccatgtgccactgtccaactca

SEQ ID NO: 60489 - DNA, 581 bp, Homo sapiens
acttcaattagggcagccaaggaagccttcaccaaagtggtgacattttagtttagagctaaatgaggtgaggggtggggcaatataaatatctaggggaagagaattgcaggaagagagaaaagccactaatactggaaacatggtttgattttacaaagggagatttgagaatggtggtatttgaaagatagatttttgtcttaggagcagtttttcaggaatgtttcattcatatacacacacacacacacacacacacacgcacacacacatatatagtagtatatgtataatagaatatatattctaaaatgtagaatgggatgaaaactgacctgtcaaaattttgtaatcagagtcccagaacctgaagaaaaaataaatatttaaaaagtggtaggtatctggagttttattatcactatttttaggctttctttgaaatgtcccccctgattataaaagtaatacatttaatacaattaagattattctatttctgaaaatgatgtcccaaaatagtaaactataatgagtatagtcgcaaaaattatttctcaaaatagtaataaatatat

SEQ ID NO: 60490 - DNA, 264 bp, Homo sapiens
  misc_feature 245: n = A,T,C or G
acgcgggtaatagcctgactctgtgttcacaagcacggtaggacgttgcctctgaaaaggcctcactattccaaaagacatgtcatgataacattcttaagtgattaaatactgtcacattacatgacagggatcagcaaactttttctgtaaaggaccagatgttaaatattttagacttcgtgagacatgtggcctctgtcacaactgctcaactctgccatcttctcatgaataatacgtanacgaatgggcatgactgtg

SEQ ID NO: 60491 - DNA, 495 bp, Homo sapiens
actgtgttgtaagagatgcaggttagcagaaaccctccacatgagatctgctttaagactgacccaagcctgaaacgctctctccctaagtgatccatgtccctgcagtaataccataaccactaagctaacacactcactgtaaaagtgttgcttctccatgaagcaccaagacttgatgaccatttgcagttctcattaactccactaagaccctaaaggctaaatgacaaccaagcctctgtcactctgcctgagtggatttaccacaaatatcaaatctgttcaatctattataagagctaaaaaggagaagcacatgaaatcacatttcattcttagctcttttatcttcccatttttcatttagacattgaatacatgaaccaaagtttagttctctgtattagtcaatttgccaatagctgtcaaccctttaaaagtctttaagatgctacaaggttcccaaagctatacttctagtaatgctacgcc

SEQ ID NO: 60492 - DNA, 588 bp, Homo sapiens
  misc_feature 36: n = A,T,C or G
cccgcgtactggtacttacttgttggcctaattggnagctccaccgcggtggcggccgaggtactgatgctactcttcctatgatggtgaacgggtagcttactgtttgtcctccgtattcaggtagcaatgaggacggctgccgcttagagtcaagctactgattggatcaatgggccgacacatattatcctttgactgtcaggatatatggaggatggggtatacttgctaagctgacgaccgatcgggttctggccctgacctcctagctattatggtgagcacagcttgtataatactgagtgcggatatgaaatgacatgctgcctcttatgccaggaggggtgtaacctgtgaacctagccagatcacttgtctccatgggaggccgtatattccctaactctggaagagatagcttgtgctggaatcctggttccaccacttactagtttcagcaatgttcctcatttctctaagcttcaacaacgttatatgaaaaaagcaggtagtgataatacctacttcacagaggtgaggtaaggattgagttaatctatgtggcctaattcccagcatgtgcaa

SEQ ID NO: 60493 - DNA, 305 bp, Homo sapiens
gcggtggcggccgaggtactgtgttgtaagagatgcaggttagcagaaccctccacatgagatctgctttaagactgacccaagcctgaaacgctctctccctaagtgatccatgtccctgcagtaataccataaccactaagctaacacactcactgtaaaagtgttgcttctccatgaagcaccaagacttgatgaccatttgcagttctcattaactccactaagaccctaaaggctaaatgacaaccaagcctctgtcactctgcctgagtggatttaccacaaatatcaaatctgttcac

SEQ ID NO: 60494 - DNA, 331 bp, Homo sapiens
acgcgggcacttggtggtgatgagtaattttacacaaggccattttctctggacatagactgaggcagtgatgggatggtgaagcatcacggatagtaatcagggggaccacagataatggcagggagccagggtgtctaccctggctctgcactgactggcttggtgatttgtagagttcttagggactgactcatgtgcctgcaaaattcataggctgaaaccctaatcctcaatgtgactgtatttggagggcgggccttgaaggagataattaaggttaaatgaggtcataagggtggggccctaatccagtataactggtgtcatt

SEQ ID NO: 60495 - DNA, 334 bp, Homo sapiens
  misc_feature 325: n = A,T,C or G
aggacacccattacttctcgctgtttctgtgtgatctccatttcacatttctaaagggtggatcttttggggtcactcgctattttctaatacagaatgctcccgtcaagctcccttattgataactgatatctcttatgtcctgccagcagtgcacgattggctttgagactgcctgatccactcactcgtaaccagccaagtactatgacccaaactatagcagaatttggcacaaacaggtccctggtagctactttcctcaggaaggcctatggatttggaaaacacaggtgtctcataaggacatactcataaattgttntcatgtaca

SEQ ID NO: 60496 - DNA, 501 bp, Homo sapiens
actacaataatcctcaagatactgaaagtaatgccaagtgaaagaccagggggtgggtggagggctaatgggctggacgaaatagccacttgattgctagttcatacaagatgtggcagcaactccttttctggctggagatcttggatgtcacatcttagaatcaggtggcaaagcatctgtgaagggcaatgtggcatcccagacagtgggtggtgagatcaggaagaaaaaatggaaatcaacagatggtggatcctacagctgagaactgattcttcaatttgacatggttggcataaacattttaaatggagcttggtaaagatcaggttattttaccattgaccaagctcttggcttctaaaaggtcctaaatttttgtttcctttgctttcacgagtgtttatttgctttccaggaacttcagggaaaaaggttaagtaatggagggaggaaagagggagggggttggcagatcaaacacaggacttaaaagtc

SEQ ID NO: 60497 - DNA, 304 bp, Homo sapiens
actcccagctgaagttcatgactccacttaaggcaacaaactctccttatctctcactctctgtggtaagaagaataatggcccctcaaagatatccaccatcctactccccagaatttgtgaacatattactgtctaaagtcaattttcactgctataaaagaatacccgaggctggatgtattagtccattttcatgctgctgatgaagacatactcaagacttggcaatttacaaatgaaagaggtttaacggacttacagttccatgtggctggggaggcctcacaatcatgatggaagg

SEQ ID NO: 60498 - DNA, 270 bp, Homo sapiens
actgtgttgtaagagatgcaggttagcagaaaccctccacatgagatctgctttaagactgacccaagcctgaaacgctctctccctaagtgatccatgtccctgcagtaataccataaccactaagctaacacactcactgtaaaagtgttgcttctccatgaagcaccaagacttgatgaccatttgcagttctcattaactccactaagaccctaaaggctaaatgacaaccaagcctctgtcactctgcctgagtggatttaccac

SEQ ID NO: 60499 - DNA, 278 bp, Homo sapiens
actgtgttgtaagagatgcaggttagcagaaccctcccatgagatctgctttaagactgacccaagcctgaaacgctctctccctaagtgatccatgtccctgcagtaataccataaccactaagctaacacactcactgtaaaagtgttgcttctccatgaagcaccaagacttgatgaccatttgcagttctcattaactccactaagaccctaaaggctaaatgacaaccaagcctctgtcactctgcctgagtggatttaccacaaatatcaaa

SEQ ID NO: 60500 - DNA, 328 bp, Homo sapiens
ccaccgcggtggctggccgaggtacgcgggtatattatctatgtgtatattttatagtgaaacaatttaatggataaaaaggaatgcactttttaaaagcagcattttaatcattcatcctttgttgcttctgagaaaggcagggcaaatacatatggtattcatcctgaacaacaggaaaagacaaggactggggtagagatacttgatgtgggtctgtggatcatagaatccagcatcttcatgactgagccaaatgggatggccatagggttgttttatggcacattctgccataaaacagaaggtggtggaatggagattgact

SEQ ID NO: 60501 - DNA, 301 bp, Homo sapiens
acgcgggtaaggggtttgaggagcagtggttactgaacagatgagtcacatccctgtctcacgttcagcaaggggtgtcagggaattctcccatttcaatttctcagtgttttctcctacgcagtctgttgtggtggtggtcattagtgccatccagcaaatattttggcatgagctccctgctgtggagtaagagggcatttcatcactttcttgaaggtagacatagacagtgaaatacgagaagaagtgatacagcattacctccagtaaaagctgtgagagctattgaattatttgc

SEQ ID NO: 60502 - DNA, 319 bp, Homo sapiens
tccccgcggtggcggccgatgtacatcacttggtatgcgcacgggctgcaggagataccattcacaccttatacttaccgccatacctcaacggggagcgcccttgctcccagctattatgtactccttaagtgagggtgaatcgctcgctagaccctatatgggcatatgatgtggagctgggacagatgatcataccctcatcagagtcatggtttccaggagtgagattgatctgtttaacatcaggaaggagtttaggaagaattttgccacctctctttattccatgattaagggagatacatctggggactat

SEQ ID NO: 60503 - DNA, 320 bp, Homo sapiens
acatcgctgacactagctacatgggtcatgccatagtggttgaggttggaggagaaggacattctaaatggtaattcaatcacgttcattagacaaggagggtaggagcaaggactgggaaagtaacagtagggaaaaggaactaggagaaaactctgaagtagggtcaggttgcagagcagatttggtttttttacccactatggataaggttgttttgctggattcatgttaaccctttcttttgaatttccctaaataaactatattttcatcactccaaaatttcttcaaataaaaagctaagaactgttaggaat

SEQ ID NO: 60504 - DNA, 347 bp, Homo sapiens
acagtataatttgtttaaattataatttatctagaacatttagtttttctttttcagaaataaataactgtaattatattactctagttagctacacattataagtagtattataaagagataactgtgtatttgtgtttcttaatagtgatacatgttcatcaagaaaaatgactttcaaagaccgacagcagtgtgtgtatttgtaaatgtgtgtgtgcatgcgtgtgtctttgctttttcaatatccttcttgaaaatctcacagttttcagtgctatcatatttgtccatgtgctagtaagtccttgagacctacactcacattggtttttggtttgctgcac

SEQ ID NO: 60505 - DNA, 308 bp, Homo sapiens
actgtggtaactgtctgaattaataaaagaagtaactgaggttctggaagaataagactgaacaaataatattcaaattttacatatcatttaattacgaaattccaatttcaatgctgacttttcttttgatgttttacatattttcttcaggtcataacatacgttaatagctgacaggagggagacgtttaaaaacaatatagtaatttattttaaaggccgagtcacgagcagatccatttctgtagtttctgtaggggatggaaacatgcaaagggcaatattccatacgatcataataactt

SEQ ID NO: 60506 - DNA, 417 bp, Homo sapiens
acaggcatgagctactgtgtgcctggcccccttctacttttgaacactatgattccatgtcagtaagatgaataaggtgaatatgtaggaaatgttacccatgaattctgaaggtggctcctatgggccagatgagtctctgtcttgggtaacctgggcattttttgatgacaaataactgatcagatggtttgtgagattctctctgctctcttgggttaaatgagtaagcccagatttccccggagaatctctgaaaggtaaacacttctggaatgttggtcattgctgcagtttctcaaagaccattagaatctaaagacaaagaattatggctctaccactcacgagctgggtgaccttggacacattatttaacctctctgagccttagctttcttctctgtaacctggagt

SEQ ID NO: 60507 - DNA, 363 bp, Homo sapiens
actgtgttgtaagagatgcaggttagcagaaaccctccacatgagatctgctttaagactgacccaagcctgaaacgctctctccctaagtgatccatgtccctgcagtaataccataaccactaagctaacacactcactgtaaaagtgttgcttctccatgaagcaccaagacttgatgaccatttgcagttctcattaactccactaagaccctaaaggctaaatgacaaccaagcctctgtcactctgcctgagtggatttaccacaaatatcaaatctgttcaatctattataagagctaaaaaggagaagcacatgaaatcacatttcattcttagctcttttatcttcccattttt

SEQ ID NO: 60508 - DNA, 437 bp, Homo sapiens
actttttttttttttttttttttttttcgggggggggggaccaaacccggggcctttgcctttctagggaagcccctcccccgggggcaaaacccccacccccggtttttttaaaaattggggaaaacccccccctttttttaaaaaaactttggggtcggaaaacccgggggaattctttttttccttaaaaatgggggcccaagggggtgcctggggggtttctttctcttggggggggcattttttttttccaaaacttgggcctgcttcttcctgggaaaaggttaaaaatttcccaaaagggcccaaaaacctttttacccactacttttttttcccccccccttttcgcgggaaaggggaacccacttttccaaccgtttttaaaccgctttacttttggccccccccccttgaaggtgggggtttttttt

SEQ ID NO: 60509 - DNA, 289 bp, Homo sapiens
acacatttacacatttaattttcatcactgataattagagcttattacggaggagaaaaccatgactgagaaaagagaattaaattgcataaagtctgtgtcagggcttgcattagtctgcttagactgttgtcaccaataccacagaccgaatggcttaaataacagacatttcatcaccgttctggaggttagaccccaagatcaagatatcaacaggctttgttgcttctgaacctctccccttggctcccctctccatgtgtcttcatgtaattcttccctttcc

SEQ ID NO: 60510 - DNA, 561 bp, Homo sapiens
acgcgggacatctagaatctgggaacctagtcaagaaagccacatgccaattttgaagctacttaaactaatcaattgtgatcaccaatttggatattatatctgtatagcttcaaagaaagtatatgttttgtaatcaccgaatttaaaaagtataaataggcattgaagtaactttatcagtggttatcgattattgctgcacttagtatcttgaaaacaacactgatgccctggccctaagcccacagattgtgatttaattggtgtggcatgggtcacaccaggtgattctattgggcatcattgatatacatgaatcaaatttatttaacaattgcctacgctctatatccttctgcaagtcacggacagagattaaccctagaagtaaaacgaagcagagaattttaagaatactttagtctcaactacatgcatattttagggaaagtgaaatattaatctagcatttcttcttaactatctcaattctctatttcatgttgctagggtatacttgatcttgtcaaaatttttccagcatctaataacacatag

SEQ ID NO: 60511 - DNA, 276 bp, Homo sapiens
actgacgatcctgttgaggcagccgtgaagccaaccaactttatggtgataatgtttcccataaaaggagtgagctgactggacatagcattgttgccttctatgttacaggtgtatatagattttgacacaagcttgaacttgtataatgaaagttccatgtgtgagaatttcatcagaataaaagcaacacagttttctttgttgtttaaaaactcagtcttctgtgtctatctatctttgtccagtaggggtcactgagggttaggctctcaa

SEQ ID NO: 60512 - DNA, 290 bp, Homo sapiens
acagtggggtatctttcttcacttccaggatgacattttagaaaactagaaccatcatctagtcaataaataaaacaaagaatacattaatcccagttctgtattatggtcatttagctgggagtgggagaggggtaagggaatagtgaagagggctaccaagaattcaggaagtttaagagacagggagcctcctgtataagttagaggagaacaggaaaggcagggctttgaggagtccttaggccatagacaggtagggattgagagggttccgtgtgagaggtggc

SEQ ID NO: 60513 - DNA, 439 bp, Homo sapiens
actttcattatatagctaaagaatacaggcacaaagagaaaactttcccaaggtcacagagttcaatggaggagctaaaatttgaatccacagtccatcactagactatgctgcctaacattttaaagaaaatacatagactagtttttcatagcttataaggaacaagtcattcccaattttataatttttgtttgtttaaaaaaatagaaatggggtctcacgatgttgcccaggctggtcttgaactctggggctcaagagatcctcccgcctcagtcccccaaagtgctgggattacaggcatgagccaccatgcctggcccccaattttagactagtttcagttgagtaaaaaggcaacctacctaaaccatttgcacattaaacctaaacagcaagaagactgaagggaagatgagcagaaggaaggggaagt

SEQ ID NO: 60514 - DNA, 221 bp, Homo sapiens
actctagtttagttttttttttttttttttaaggcgtacctttactaaaatttacctttggaaaccttgtaccatcttaaaaacttttaaagggttgacagcttttggcaaattgactaatacaaaaaactaacctttggttcatgttttcaatgtctaaatgaaaaatgggaaaataaaaaacctaaaaatgaaatgtgattccatgtgcttctcctttt

SEQ ID NO: 60515 - DNA, 506 bp, Homo sapiens
  misc_feature 506: n = A,T,C or G
acactaaacgaatgccaataacttccttgctccggaattcctgttaaaagaaaaagcctgtgatgagtttgcatcactgttgtgggagactctctcactctcagctgattgcaattcctaactgatcagattataactaaataagttcagcctttattttgggcactgtgatgtgccatccagatcctgtatgtggaagaatttgttgccttagtcttcggcagtattctcagcagacaatcttcagctgttagtcctttcagggattacctcagctccagagagcctccttacccaaagtcatgcaccttcctggagtggcctacaagcaataaatgatgtgtgagcctgtaaaggcctggccatattggcccaacttgggacaatgccaaaggtctatttacagctccccatagaagtgtcagtggcttgtcactgggcctacatcacagcttaacttttccctctgcccactcctgatttctattcttcccatccacaggtan

SEQ ID NO: 60516 - DNA, 491 bp, Homo sapiens
actgtgttgtaagagatgcaggttagcagaaccctccacatgagatctgctttaagactgacccaagcctgaaacgctctctccctaagtgatccatgtccctgcagtaataccataaccactaagctaacacactcactgtaaaagtgttgcttctccatgaagcaccaagacttgatgaccatttgcagttctcattaactccactaagaccctaaaggctaaatgacaaccaagcctctgtcactctgcctgagtggatttaccacaaatatcaaatctgttcaatctattataagagctaaaaaggagaagcacatgaaatcacatttcattcttagctcttttatcttcccatttttcatttagacttggaatacatgaaccaaaggttaatttctctgtattagtcaatttgccaatagctgtcaaccctttaaaagtctttaagatgctacaaggttcccaaagctatacttctagtaatgcta

SEQ ID NO: 60517 - DNA, 310 bp, Homo sapiens
actactcgtatcaaccatgagtaggcctggtggcagacactgaatgcccaagcctgctggtagggtacccccaagaatactcagtctcacctgtcacactaagaaccgtccatgtaacgccatggcatcgctgatccataatggacaatccccttgcacaaatgatcaggctcacagaaaggtgaatgctctaacttctgggttgctctgcagattgaacatgcctttccatttatactgagtttggatcttaccactaccttgttccgaatctagagaggacgaagagggaagagactggatgaggcac

SEQ ID NO: 60518 - DNA, 366 bp, Homo sapiens
  misc_feature 34: n = A,T,C or G
gcgaacatggtacatacctgttggcctagatggnagctccaccgcggtggcggccgcccgggcaggtacttctgtgagcctgcatgccaaaagaatattaattctcttcaagtattgtcatacttttcaaccccaagattaaactcttgtccacataatcctgagtatatgggagaagggatgctgtttctccctcaaaagaatcttccccaactgctgctgtctgagggtctgcagtgaagcctactgtcaacagaaatacactttgaagtgcaggttgagcatcactaatccaaaattccaaaatccaaaatgtttcaaaacccaagacttcttgagcacctgcatgatgccgcaagtggaaaa

SEQ ID NO: 60519 - DNA, 596 bp, Homo sapiens
acaagacagcatttagattgagaagagacaagtaaggtttgttagaactctatcctggatcctggatgtgtgagcagaaagaattgtaaaataagattgagttgcttgaagtctgcagagagcctttcatgggaggtggtcactggcatcataaaggaagccgacttctcttggtgtaagaagcttggcagtgatggcagaaggagactgggtggtagcgtttacagagaagaaaccaatgtattgggagaaatgccttgtgctgggactagggtagagaaaatagatgatgagcctggagcatcctgtagtaacagaaaggaaagggtgctcgaaacacaaaaggatggggcatgtcaaaggggcaaggagccaacctgaaggggctcccagtggccaaggctggaacaatttgataacaaaatcaatcatgtagtggcttatgacacaaagttcaaaggaaatacctgtgagagcatgctcatataaataaataattgaatgagtaaataaatggagaagaggcaaatctttcttagagaagaatttcaaatatgtatagctattaccaccccttttcctgtgtctgcttcatt

SEQ ID NO: 60520 - DNA, 529 bp, Homo sapiens
  misc_feature 514: n = A,T,C or G
accaaggcagttttcctgcagtcctttcaggttgaggggtaagagaggcaaatttaggtctggtttatccttaatttgcatgtgtattaatttgggaagaatacccagtaagactctccagtttctgtgggccgcacttgactagtatccatttggcccatagtgactacagcagtattgacagatacttctaaggattttgatcattcagtagtcttcttactattttggtagcaggattttatccaaatgttgacctggaagttcttaattgtgttttcaaatatttgattattttaaggtagtggtgtttgtttaaatatatgttatcagtatttttgttgttgttttcagcaagagtgttgacctgaataacctagcctgctattgccagaaaccagaagcctctgagggagtttataattgagtcttaataaaagcattttaaagatgaaagacaataatagcggtaagttattctgatttagagtagatgaaagaggtcaaggcttanttgggcaggaactgc

SEQ ID NO: 60521 - DNA, 553 bp, Homo sapiens
tccaccgcggtggcggccggcatgaccagcgaggtggttgaagacagcactatcacaatgatagaccgcccccctcctccacccccacacattcgtgtgaatgaaaaggatgtgctaattagcaagtcttccatcaactttactgtcaactgcagctggttcagcgacaccaatggagctgtgaaatacttcacagtggtggtgggagaggctgatggcagtgatgagctgaagccagaacagcagcaccctctcccttcctacctggagtacatctgttaatgattatctgtttcccattattccttagcatgtgtgggaacaacgtgtggctcccttagcagcactgtctgtctcaaggtttgattcaattttaatgggcaagttattaagcacagcatcttgcaaggggctctgagaaaccatatgaaactgacgactgatttagaatgaaattgagttttcagagatattgaaaactttggtctgaaagaaaaaaatgtctacaataaagataggtatacttataagccacacatccttagtacctgcc

SEQ ID NO: 60522 - DNA, 304 bp, Homo sapiens
accatttctcaagaaaggaagttagttagaaactgctgtcacctggccactcaaaagagtgatgcttggcccagcagcattggtgtcagtggtgagcttgaaagaaatgcagaatctcaggctccgccttagaccttcagaatcagaacttgcattttaacaaggtgcccacatgatttgcgtgcacattaaagtttaagaaggctgctctagaggaatattttaaaagtcaagcagttgcaatttttacactttccaagtttgagatatattttactttcttgatacttgctacatgccacaa

SEQ ID NO: 60523 - DNA, 246 bp, Homo sapiens
ttggagctccaccgcggtggccgagcggccgcccgggcaggtactgtgagctgccggacaggctacgtgctccagatcggcgggatgatgagctgatcaagagccaggtatgtgcaggtgctgagctcagagcctctctgcagcccagggaaggcttactgggtgttaaccatgttctctgctaaatacccagcagcacttaaaatagtgccgccacatagtacgtgctcaataaatatttattga

SEQ ID NO: 60524 - DNA, 303 bp, Homo sapiens
  misc_feature 7: n = A,T,C or G
acgcggngaacttctaaccttcaggtttcttatttgttaaatagagttaataacagtattaagctaatgtgtttattatgatggttaaataatgttttaaaagtatttagcccagtgcctgggacatacaaccactcagtaaatgttggccgatttttaatgttctcaataggcacctttagagattcacacagctatgcttgccttggaccagtttcaggagaaatacagtcgcaagccaaatgttgggtaatgttttaagtttaaaaataagtattttcctttttataaaagtagtagttc

SEQ ID NO: 60525 - DNA, 459 bp, Homo sapiens
  misc_feature 390: n = A,T,C or G
acgatatgttcttatatcttttattttcctgaaatgcattttgactcactgcaccttgaaatcatgtctttaaacaggttaacatgatctgtatttctgcaggtcaccattgaaccttctgaagagcctttatttcctgacgatgaattgtatggaatagttggtgctaaccttaagaggagctttgatgtccgagaggtatgtgaaagtggaactgtgagctttatgaccagctgtgagtctctttgtatgtgtatctatttgcaaagctaaagtttgttaagatgtgttcatgcctagaaatagatgtggatctcagtaaggagtgacatatgtggcaatgatacctttccatactgtggatatcattggcacagagtaaatactaanagaggggagtgggggacctcaatgattggaaagttttcattgcgcaaaaagtgtgatttggtcataagt

SEQ ID NO: 60526 - DNA, 295 bp, Homo sapiens
acttaacgttcatactttagctattttgtatttcctgtgatattggaagttccttaaaggtagggacttggtctttatcatttctgagtcttcacagtcttttttacataaaaagcacacaatacttgctgaattgaaatgaaattttaaagtttttcctttgcgaatagacttaataatgggcaagatttagtgattaccttcagaaacctgactaaggccatgtaaacttatagagagctgagagtagccagaatcttcataaaatattccactatcagttcttgattgccga

SEQ ID NO: 60527 - DNA, 564 bp, Homo sapiens
  misc_feature 517: n = A,T,C or G
acgcgggtatgggggaaatgcagctaactttgtgcttttattttgaagctaaacagttaacagaaacacaattttgtaaacagataatatctgtggtctgttgagttgctaggatttgtctttagatcaattggctttgagaagtcagcttaattccattttacggcccaattttgcctttttccccccctacaggctggccacttgaatacatgtcaaataatcgaaatatgaagaattcatttttattagaaaaggccttaagggtggaatttaagctcctattaacattcattcagtagaacttaggttactgatcagctcttcactgtgtaaagttgatactgattttggaagcagaatattgagtgacacagagccagaagttgtaaaactgcactgcaggtttcctgcccttttgctctgtaagcagtaactccaaatgtcacttcataacagttcttgtcaaccttaggcagggatgtatcaatgcatgtcagatgggggtagataactntggggcaggttatcacaacctaagagttggtggagaaaacatgggaa

SEQ ID NO: 60528 - DNA, 308 bp, Homo sapiens
  misc_feature 26, 41, 51, 63: n = A,T,C or G
tccccgcggtggcggccgaggtacangatagccttcagggnaacagtttgngagacacagggnaaagatagaagactttaacagtagagccagaattccagagtgttcagtggaggagtaggaacagaggggatgaacaaatggcttgggtggaggagaggaagcctattgaaaatgagactgaaatttaaaacaaattataaagaagaacaaatagctgggtaaaaacataccatgtaaaacaaaatctgatacaagcttatccaacctgtggcccacatgtggcccaggatggctttgaatgcggc

SEQ ID NO: 60529 - DNA, 367 bp, Homo sapiens
tacatggccctaaactgtttactgtggtgcaaaagagactccacccggtggcggccgaggtactcttcagttttgactgagggctaagctacgcctacacggagttgtgagtccatgaggccaggaaagaccactactagggaaaggagaaagatcagggagctgtaaaatgaataataaccagggctcacaaaggactggaaggcattcaaattctgactaattagggtggaaagacctcattgaacaccctggactgtcagtagaggccccacagggccactggtagtagtgctaaactggctctagagcaggggctggcaaactgtggccaatgggctaagtcctagcccatctagcctgccac

SEQ ID NO: 60530 - DNA, 285 bp, Homo sapiens
  misc_feature 268: n = A,T,C or G
acgtaaaggtattcagatccagcagtgcattctcccaccagacttttgaagaatcaggacatttgaggaacattaagttctgacctttaatagcagccactggcttaattcttcatattttccaaaaaccacacccgcctgctggaatagatagcacagggaagttggatggactccctgtgccttgggagttcttactcccagagtgtctcctagtgtttccttttgctgtgctgtgtcccgtatatcctgtcatttccatttattntatcctcaaattataaa

SEQ ID NO: 60531 - DNA, 241 bp, Homo sapiens
acagatatgttcattttctttcagaataatgtttcactgttataaaaattaaaattttactttgattatttttttctttatagatttggttgaaacagaaataaaggaattaattcttgatattaaataccctgcaaccaaaaaacaagtaagtgtatataatacacgaactttcctgctagtagctataatacatccttcttaagaaaatctttattttcctatttcccccaaacatgag

SEQ ID NO: 60532 - DNA, 301 bp, Homo sapiens
actgtgttgtaagagatgcaggttagcagaaaccctccacatgagatctgctttaagactgacccaagcctgaaacgctctctccctaagtgatccatgtccctgcagtaataccataaccactaagctaacacactcactgtaaaagtgttgcttctccatgaagcaccaagacttgatggccatttgcagttctcattaactccactaagaccctaaaggctaaatgacaaccaagcctctgtcactctgcctgagtggatttaccacaaatatcaaatctgttcaatctattataaga

SEQ ID NO: 60533 - DNA, 294 bp, Homo sapiens
tcttgcacacactaaggaattatttctcatttggtaatccaaactctgactctgtgtgtgtgcatatgtgtgtatgtgtatgtgtgtatgtgtgtgtgtgtgactttagacaactgaagacttagcggtaagaattatctggagactcatcattatctgctatcatattgagatgtcttgttgaataataaatgtaaatgcagtagaatttgttagaaatgtatttaacataaatataatacaacagctaaataacaagagcctcataaatattacttgggcactaagaaaagt

SEQ ID NO: 60534 - DNA, 549 bp, Homo sapiens
accatatgtagtccatcacaactgctcagctctgccattgtagcatgaatgtgtccagtgataaataagtggctatgcttcattaaactttatggccaccaaaatttgagtttcatataatttttatatgtcacagaggattcttttgttttgcttttttgcaatcatttaaaaaatgtaaaaaattattcttaggcccctagccatgcaaacactggcattgggctagatttgaccccttggccttagtttgctgaatactggtgtagtttttctgcctttcctaatgtaaacatgattgtagaaagataaccttactggaagtcaggaaaccttggtgctcccaccaaagttgtgtgactgattaagtcaggtgaaataaattgggattaggagccatggtgtctagtccttgacaagtcattcctcaatttttttaatgtaatcacctgaatttctagtgtatgcataatcacattttgtgtgcctctcggcagccattccattgttgaagaagcagccaacacagaaaattgttgagggggtttt

SEQ ID NO: 60535 - DNA, 289 bp, Homo sapiens
  misc_feature 4: n = A,T,C or G
acangcctacaacagggatcactccctcctccaaacctccaaactgagctactcaactgcaacttaacaaatattatttttattatcctatatagacataattcaattatgtctcccaattcaataaattcttagacgtaagtcttatattttcagagcttcttatatacccaacacttactggataatacatattcaataaatagctaatgatcttccagcttccaaggcttaccagtgttaacaaaaaaatgagtgactgagggaagtgtctcaatcagtagatgtt

SEQ ID NO: 60536 - DNA, 547 bp, Homo sapiens
actcttgggtcttggggactcctaatcttgcaattggtatcagaggtgagagtgaacttggggactcctgaactctgtatatacactgaagtatttagagaaaaacggccatggtatattaacttaccctcaagtcgttcagaaaaagatattatgactatatatattttttcatatacatacataagtatgtatggagagggaaagaacatgaacataaatgatagagcaaatagggtaaaatgttattagaggtgaatccaggtagaatcttggcgaatctatatgggtgttcttgtccttttgtaagttttctgtgagtttaaagttatttacaaatataatgttttttaaaaaaacccctctaaaaagtcaagttcatcaacagttactggtgccctgaaaaataaacttactaacctggaacaacttactaaactgtttgatggcaaatcaatgaagcaggaccatatttactattccaaggatagactggacaaaaccatcagaaacatcttgtctgtgttgcacggggattattaggact

SEQ ID NO: 60537 - DNA, 295 bp, Homo sapiens
actgtgttgtaagagatgcaggttagcagaaaccctccacatgagatctgctttaagactgacccaagcctgaaacgctctctccccaagtgatccatgtccctgcagtaataccataaccactaagctaacacactcactgtaaaagtgttgcttctccatgaagcaccaagacttgatgaccatttgcagttctcattaactccactaagaccctaaaggctaaatgacaaccaagcctctgtcactctgcctgagtggatttaccacaaatatcaaatctgttcaatctatt

SEQ ID NO: 60538 - DNA, 526 bp, Homo sapiens
actttctttttttttttttggcccctcccttgtccccactttaaaaatttttttttttaaaaaaaaaaaagggcctccctgtttttcttcccctgtgccttccggtggaaattttcgaaaatcccatttttgtgccctggggcccttttttaaattttaaccatttgggggggcagcccccctttatttttttttagggcaaccttagtttttacccctaaaaccggattgtgggccggggcctggggctcttccctgtattcccaccctttgggggggccagggcggggggacctttcaatttttgggggggccagggcggggggaccccattttttcccaaccccccggggcaccccagggaaattttttttttaaaaaaatgggattgtaacccaaatgcccttttgccaaaaaatttttaaaaaaaccggtttttggggccaaaataaaacttcttgggttctagggttttttccaacctccttttaaaacccttaaacctttattatttttttcccccctt

SEQ ID NO: 60539 - DNA, 348 bp, Homo sapiens
acgcgggaatgggtttgatttaaatggctagtttagaaggctgaatttaggccacttgattgagaaaggccattttgggtaattataaaccaccaacattgtgttttgaatgttaaagcttatatttgtcttccagttaccagaatgtaagcttcttgaggagggagagaggagttttcttaatctctgaacctgcacctttcttctgtgcctagcccagtgcctggcaccaaacaggtgctcaatcaatgttgattctatgctaccaacaaaaatgagtccatgatgtttactattcaacaaatgaatacaattttagagtaaatttttactgcttacactacatgt

SEQ ID NO: 60540 - DNA, 308 bp, Homo sapiens
acttataattatagtaatacattgaaatatatatttgctttatcacatttatgctttctcagatagaagaaacacatattaaaatcagaaataacatattttcacaaatcttggggaacctagcctttttttttttttgggggggggagggcttggttttaaaaggctttggagccgttggcattttttttttttttggcccggaaaggacaaaaaatctggtttttaggcttttaaaacaaatttgtctttcgggggggccccgggaactcaggggggttggggggtttggaccctaaaaggggacc

SEQ ID NO: 60541 - DNA, 540 bp, Homo sapiens
actactttactaataacaatcagtaggaataatagctactgatttcagaaaaacacattagtaaaaataacccaaagaataaggaaaaaaataacagcttgagagtctcaactcacttagaaaatttggctaaggaataatcaggaactgatattctgtatttaggatacccaacagaaaccacgccccttaagattaggagtcttgatggctattgccttaattataccgtcacatgggaaagacttttaatctgttaaataaagctcactgtttttttacatgtttaccacacctgttgccagcagtcttgggatagtgctgaggtgcacccctacttcctcctccgcccgaagaagcactatttaaaagaaaaaaattgtttactgtatcccaactatgtctcactcaaaaagaataaagcatctattttgtgttttgctttgcttgtagagatgggggtctcgctattttgcccagactggagccaggcctgtattttagtgcttgtatattatgctacaaatgaagactgaactc

SEQ ID NO: 60542 - DNA, 288 bp, Homo sapiens
acaatttataattttacatcatccaacttcaaatttattttgctgttattttcccaggagaaaatttaccaaaataatgtgtcaaaaagcttttaaaccataggtgatagttgcataggatttcattatactattctttctacttttgtgtatgcttgcaaattaacttttaaatttagaaaaacatagtttatgaaaagcttgcatttagttgtaaagtaatattacatttgttactgattttatatattaataacttacattttattatttcagagaacaacattt

SEQ ID NO: 60543 - DNA, 324 bp, Homo sapiens
ggctgcgacggccgcccgggcaggtactgtgttgtaagagatgcaggttagcagaaaccctccaatgagatctgctttaagactgacccaagcctgaaacgctctctccctaagtgatccatgtccctgcagtaataccataaccactaagctaacacactcactgtaaaagtgttgcttctccatgaagcaccaagacttgatgaccatttgcagttctcattaactccactaagaccctaaaggctaaatgacaaccaagcctctgtcactctgcctgagtggatttaccacaaatatcaaatctgttcaatctattataag

SEQ ID NO: 60544 - DNA, 513 bp, Homo sapiens
actgtgtttttttatattcttgttatcagaaaccctgcacgatgagatctgctttaagactgacccaagcctgaaacgctctctccctaagtgatccatgtccctgcagtaataccataaccactaagctaacacacccactgtaaaagtgttgcttctccatgaagcaccaagacttgatgaccatttgcagttctcattaactccactaagaccctaaaggctaaatgacaaccaagcctctgtcactctgcctgagtggatttaccacaaatatcaaatctgttcaatctattataagagctaaaaaggagaagcacatgaaatcacatttcattcttagctcttttatcttcccatttttcatttagacattgaatacatgaaccaaagtttagttctctgtattagtcaatttgccaatagctgtcaaccctttaaaagtctttaagatgctacaaggttcccaaagctatacttctagtaatgctacgcctttaaagaaaaaaaaaa

SEQ ID NO: 60545 - DNA, 279 bp, Homo sapiens
actgcacacactaaggaattatttctcatttggtaatccaaactctgactctgtgtgtgtgcatatgtgtgtatgtgtatgtgtgtatgtgtgtgtgtgtgactttagacaactgaagacttagcggtaagaattatctggagactcatcattatctgctatcatattgtgatgtcttgttgaataataaatgtaaatgcagtagaatttgttagaaatgtatttaacataaatataatacaacagctaaataacaagagcctcataaatattacttgg

SEQ ID NO: 60546 - DNA, 494 bp, Homo sapiens
  misc_feature 437: n = A,T,C or G
acgatatgttcttatatcttttattttcctgaaatgcattttgactcactgcaccttgaaatcatgtctttaaacaggttaacatgatctgtatttctgcaggtcaccattgaaccttctgaagagcctttatttcctgctgatgaattgtatggaatagttggtgctaaccttaagaggagctttgatgtccgagaggtatgtgaaagtggaactgtgagctttatgaccagctgtgagtctctttgtatgtgtatctatttgcaaagctaaagtttgttaagatatgttcatgcctagaaatagatgtggatctcagtaaggagtgacatatgtggcaatgatacctttccatactgtggatatcattggcacagagtaaatactaaaagaggggagtgggggacctcaatgattggaaagttttcattgcgcanaaagtgtgatttggtcataagtaagactccatgtcctgtgcacattatgaatgatgt

SEQ ID NO: 60547 - DNA, 300 bp, Homo sapiens
acgtcaggaacaccccaggcttgataaccgaggtgctaccaagatactagctgattggtgggctgttcttgatccaaaggaaaagcagaaatacacagacatggccaaggaggtaggttacaatgacaaggtattctgatagctaaaagcaaccagtcctgaaactcccagtcaacaaatatgaagcacctgttgaaggtctagcaatgagaaggtgaatcataaatgagatgttaagtaaaaacataaccgctttctttgtatgacttgttcctgttcctgtgttccaagtccatgtag

SEQ ID NO: 60548 - DNA, 530 bp, Homo sapiens
tccaccgcggtggcggccgacgggccaggtactgtgttgtaagagatgcacgttagcagaaaccctccacatgagatctgctttaagactgacccaagcctgaaacgctctctccctaagtgatccatgtccctgcagtaataccataaccactaagctaacacactcactgtaaaagtgttgcttctccatgaagcaccaagacttgatgaccatttgcagttctcattaactccactaagaccctaaaggctaaatgacaaccaagcctctgtcactctgcctgagtggatttaccacaaatatcaaatctgttcaatctattataagagctaaaaaggagaagcacatgaaatcacatttcattcttagctcttttatcttcccatttttcatttagacattgaatacatgaaccaaagtttagttctctgtattagtcaatttgccaatagctgtcaaccctttaaaagtctttaagatgctacaaggttcccaaagctatacttctagtaatgctacgccttaaa

SEQ ID NO: 60549 - DNA, 579 bp, Homo sapiens; identical to SEQ ID NO: 40184
  misc_feature 16, 523: n = A,T,C or G

SEQ ID NO: 60550 - DNA, 312 bp, Homo sapiens
acccttacaaagaagacaccataccttatgcgttattaggtggaataatcattccattcagtattatcgttgtaagttaaatccacttttccaagtttataacttttgggcacttggcttaattttctgttactcttttaatgcttaaatgtgtaatcctccaaaaacaatgtatgctttttaaacctttaattgatgctttatttgatcaagagaatctcagctattttaagtggagtcaaaaaataacaatgtgtaattgtaagagccaggcatggtgacatgcctgtagtcccagctactcgagaggct

SEQ ID NO: 60551 - DNA, 282 bp, Homo sapiens
actgtgttgtaagagatgcaggttagcagaaccctccacatgagatctgctttaagactgacccaagcctgaaacgctctctccctaagtgatccatgtccctgcagtaataccataaccactaagctaacacactcactgtaaaagtgttgcttctccatgaagcaccaagacttgatgaccatttgcagttctcattaactccactaagaccctaaaggctaaatgacaaccaagcctctgtcactctgcctgagtggatttaccacaaatatcaaatct

SEQ ID NO: 60552 - DNA, 317 bp, Homo sapiens
tccaccgcggtggcggccgacgtgccatgggcgctgcatggcatctcagggacatatgctatgctttgatgacaactttaaaacagctcaggtttggaccacatgtaataagtttaagttaattccacatccatgtatacttgttactaggacaattatagggtatgggcaaatattgtgccttaaaagtcagtggcactgttacaggattggcataggcggggtgggatgagctatagtttgggtgctccagtatcttatgttttctggtcattgttcacttttagagttaaattttttaaactctagaaatattc

SEQ ID NO: 60553 - DNA, 261 bp, Homo sapiens
  misc_feature 237: n = A,T,C or G
acaatggaaagtttcacatacggatcactggctccaaagagtcctttttggcgagatcaattccagaaacaacttttactctgagaatacgggactctccctgctcaaatgcgagacgtctcatttaggagaatacaatattaaaggtttagtgcattaaaggaaagctggaaaactcaagggcagagcaagttctgaagagtatgcggaagtcgtggctgcagccaagggtaactntccactgccgggtgacaaggtcac

SEQ ID NO: 60554 - DNA, 497 bp, Homo sapiens
aacaaagggaaggcctcctaacatctctccagaatcaagttaaccaggtaaagtatagtataatattaagacaggcaaatatctttctaacggcattcatttatttgcctttcaaatactgagattaaattaataagggccaggtgtggtggctcatgcctgtaatcccagcactttgggaggcggaggctggtggatcacctgaggccaggagttcgagaccagcctggccaacatggtgaaaccccgtctctactaaaaatacaaaaattagccgggcatgatggtgtgcgcctatgatcccagctactcgggaggccaaggcaggagaattgcttgaacctgggaggcagaggctgcagtgagctgagatcgcgccattgcacaccagcctgggaaacaatagtgaaactctgtctcaaaaaaaaaaaaaaaaaaaagatcctgcccgggggggcgagggttttttttttttttttttttttgggggggggggg

SEQ ID NO: 60555 - DNA, 435 bp, Homo sapiens
tccaccgcggtggcggcgcgcccgggcaggtactgtgttgtaagagatgcacgttagcagaaaccctccacatgagatctgctttaagactgacccaagcctgaaacgctctctccctaagtgatccatgtccctgcagtaataccataaccactaagctaacacactcactggaaaagtgttgcttctccatgaagcaccaagacttgatgaccatttgcagttctcattaactccactaagaccctaaaggctaaatgacaaccaagcctctgtcactctgcctgagtggatttaccacaaatatcaaatctgttcaatctattataagagctaaaaaggagaagcacatgaaatcacatttcattcttagctcttttatcttcccatttttcatttagacattgaatacatgaaccaaaggttaggtctctg

SEQ ID NO: 60556 - DNA, 301 bp, Homo sapiens
acctggcccaatccctgtcctctgtcctcttggttaagaccataagaccacagagtattcactcatacacaacacaaggggggttagcatttcaccgtgtttcactaggaactgaatttcatagatgaaacagccaagtggggcctggaatctgtcttgggactctgaaatggaggggggtgattgatgaaactagccctctgtttctcccctctcttttccagtcaaatgtcgctgcctccaatgccaagctggctttgttttatgactggctgttctttagtccagacaaggatagcat

SEQ ID NO: 60557 - DNA, 318 bp, Homo sapiens
tccaccgcggtggccgtggtcgcggccgaggtacactgtgtctggtgaagtaagttgatggtgtgcactaacccttttggaatagtttatcaaggatttaatgtttgtatcttttaattccacatacatatatatcttaaggaaataactagaaatgcaaacaagaatttgtattcagaaatgttcactatagcatcacatagggtaatcaaaaaattaaaaataacctacatgctctcaaagtaggaggaatggttaaattatagttgattttgctttgcctctcttggtttcaaggagtagaaattctaactagat

SEQ ID NO: 60558 - DNA, 365 bp, Homo sapiens
tccaccgcggtggcggccggcctccagccgggctgggcaaaaggttcaccctcaggcacacaggagcctaccgaacccagcgacatctgaagagcccggctctgcctaagcctctccctccagccactaggcagcttttttaaaccaactctagagccctctcccaagccttagaccaaatggaaataaagctttttacagcaaaaaaaaaaaaaaggcccctgggccgtttaaaaactagggaacccccggggcggcgggatttcaatttaagccttatcaatcccgccaccctggggggggggccgggcccccatttttggtcccttttagggggggtaaatggcccgctgggcgaaatcagg

SEQ ID NO: 60559 - DNA, 290 bp, Homo sapiens
accttgaaaacttcttgctcattccctttgtgctcttgttgatgcaattctcatgcttccctgcctccctctaccactaaatggtctccctgtgctcctccctattgcttgtgttttacctgtcatttcaccttcaactcagttgcctcttctttaatagtcttttctaactcctccagtctgtattgacctctgaattcctataggtccttctatgccattttagtaattatattcctatttttatggcatatttctgccttttatggtatttcttcttaacttacatg

SEQ ID NO: 60560 - DNA, 302 bp, Homo sapiens
acgcgggttatgagaattaaatgaaaataaatattcaatatggtgccagacacatagaggtgcccacagtgtcttatctcactttcttcctgcttgccatatcttttccatcagggccaaagagaatgggaagtgggaagaaataaacttcatatttcatttgtatagctgtggagagtagcaggccctgggtccctttggggaggtcatgcgaactgggcatggccttctgtcaagaattattagaccaggcatggtggctcatgcctgtggtcctagcactttgggaggttgaggcagga

SEQ ID NO: 60561 - DNA, 560 bp, Homo sapiens
  misc_feature 436: n = A,T,C or G
acgatatgttcttatatcttttattttcctgaatgcattttgactcactgcaccttgaaatcatgtctttaaacaggttaacatgatctgtatttctgcaggtcaccattgaaccttctgaagagcctttatttcctgctgatgaattgtatggaatagttggtgctaaccttaagaggagctttgatgtccgagaggtatgtgaaagtggaactgtgagctttatgaccagctgtgagtctctttgtatgtgtatctatttgcaaagctaaagtttgttaagatgtgttcatgcctagaaatagatgtggatctcagtaaggagtgacatatgtggcaatgatacctttccatactgtggatatcattggcacagagtaaatactaaaagaggggagtgggggacctcaatgattggaaagttttcattgcgcanaaagtgtgatttggtcataagtaagactccatgtcctgtgcacattatgaatgatgtaaggcaacttaacaattgtcagctatttcttttcattgttcttattttgggaaatgggtgaaatgtc

SEQ ID NO: 60562 - DNA, 453 bp, Homo sapiens
actgtctgatgccaaatgtagttgagcactatcttgcaaagttggacactgatgtgcctgagaaccccacaattccaccattgaggcatatgccctagagtagggcagtgattctcaaaatatggtccttggactagcagcatcaatatgacttaggaacttgttaggaatacaaattctccagacccaccctaaacctacttaatcagaaatccggggcaggagctgggggcagcaatctgtgttttaacaagttctctaggcaattccgatgtagacgaaagcccgagactcccagctttaaagaagttcttgtttatttactttgatacaagaatgagcagcactgtttgcccatgcttgcgtgcactctctctctctctctctctctctcacacacacacacacacacacacacacacacacagagaaatgtcctctgtgagaatatat

SEQ ID NO: 60563 - DNA, 318 bp, Homo sapiens
tccaccgccggtggcggcgcgaggtaccattctttacaactatgtttatattatgattccccatagaatactcatctttttgaacaaatatgtcatttatgtaactatgcatggctttatcgtgttaaaaatatatatatgcatttcaacatttctcagttttgatttctagtatagtgaatatcaatatatatggcccatttaaacaaaagaactttagaatccttggtaactgttcaaggtttaattaagtcctgacagcaaaaggattggtttcaacaatctgtatcttaagtgttgagtttagaccattcaatg

SEQ ID NO: 60564 - DNA, 532 bp, Homo sapiens
acccattcattggcttaggcaacctagaatgttaagattcatatatcttaatcaaatacgaaggtcttcctgacctcactaccataagcagaagtttttctgaaaactttgatcagagagcaagtaggaagaagggccagattccagtttcattaaaccacaggcatatgaatacttcacagtttctgtgcttgacaaaaattacatttaattctgaaataacccaatgcctttgtatttcttttcttacactatttctccaggaaagaagcatgatatggaaagagtttgaaatcaagttgagccacttgcttttgaatcctgctttaacactgtgtgatttggggacagttactacttaaccttgttgtcttcatctaccttagggctaatgatttatttttaacagagtttttctaaagaatggaggtaatctacattatttagcacactatactaccttctgtgttggagggtaatttattacttattttgacattttactggatttaattcttatatactattttgg

SEQ ID NO: 60565 - DNA, 436 bp, Homo sapiens
acagagaatattgatacttgtggactgcttctgtaactcttttaaaataaattttctaagtaaatgctgacgtagacttttctgttagtggaaggctgagctcctcccgccaaacaatgcgctgcccaaatcatctttacaattcccgacagtctgtcgtctccgaagctcgggttcattggtttttattctgtgaaggtcaggaagcgttttggaaaaataaattttcctttttaatttcttaaattaaatgtgtcttcccaaggatgcccagaaataggaaagttacataaatgctaattaaaaacatgcctgacgagctgtgcccactagtcccgttgatcattctttaattcacatttcacagcaatttctaagaacatcaccacgtccttcattaactacatatcaattaaaatacctctgagaggcaggt

SEQ ID NO: 60566 - DNA, 554 bp, Homo sapiens
acagtcctgttttgtctacacttgtctatctgaaatcctatgttattaggctgtctgttagaagaggcaacttggcagtgtggaaagagcattagaactggaatcaggggacagtgagtaaaaagtgagaggactgatcactagataatctgcagcttcaaagaaaaagttaatacattaatttctataaaatatcatatctacctacctcatagaaccttcataagcattgaatgcaagtgaaaaatcgtaaaagcataaggcattattatatagcccttactgtaataaaagatgcctaaaacatgctttttaaatgacaaaagatataatgacatacactactaattggtaaagaacataaggctggataatagaatctgcaaacccagatataggctgttttatttagtagggatgtagtcttcaataaatgttaaatgaacatatgtgctccagaaaggttattcaaaaccttcatttgggggtatttaaaagacagtaactctcagatatttagtgcttggaagtccacatagatgttctggagcatc

SEQ ID NO: 60567 - DNA, 442 bp, Homo sapiens
actggggatattggagagtttgaacccgatggatgcttaaagattattgatcgtaaaaaggaccttgtaaaactacaggcaggggaatatgtttctcttgggaaagtagaggcagctttgaagaatcttccactagtagataacatttgtgcatatgcaaacaggtaagaacgtggaattcatactacttttacttaaaatatttgatgcccatagacatttcctacctgtatggaccttctttgtaaaaatgttccgagaactcttcctatctgttacttgtgggaatggcctccttctcattgcagccattagctgactcttttccttgtaaggcttcccctgatctttctctctgtccctgttttctgctttacgtctcactgcagtgtcccatggagggaggtgaagaaaataaaaccttccttcctgctgccttggt

SEQ ID NO: 60568 - DNA, 311 bp, Homo sapiens
acaatccttagcacacaagcttctgtcccatgaattgaagtgcaccactcttcctgcacatgaatatgtttttcaccttcctggaagcccccacgtgtttggccatctgcaggctcatccaaactctatgcattttgggctactatgaaggcttcattatataggcatgattgattaaatcattggccattagtgatcgacatacccttgtttaccctaacaaaacaaatcctagttctatggaatgataaaaaatctaaattctaggttacaaagctcctaggcaaagagtgtggaaaataatcccttca

SEQ ID NO: 60569 - DNA, 302 bp, Homo sapiens
acttgatggactcatcattacagaatactcctcgttggaagggggtatgccttgaagtaagaattgcaaaaggcaatccagctagcaaaagggaataaatgaaaatatcattaaaaaagaaatatcaaaactaattaatggcaataattatcccacagactctgtctaaaaatgcatttgccgtgaaaataaatgagagcacatgtaaaaaaggaaatgcagcaatgcatgcaacagaagttagaaagattacagttttaagataaagatgttttgtctacagcaaacaaagtgttcaaatc

SEQ ID NO: 60570 - DNA, 407 bp, Homo sapiens
acctttcatttcaagcagatgtgggaaaatctgaagttctgagctgctttcttctttcgggaactctaagggtttctgcataaagtttaagtgatattatgccttgtggaatgaaaacataaagaaggtattatttggtgctaattatgcacaatggttttatttatgtttcaatcacagggaaacacgaaaacagcaaggtgctagagacagccaaacctagacccctcccaggtctctaattttcatccctgatgctctctgaaatggaaacaatcacatgtcaaggagagaagggtaagagtcattgtgactattcctctgtgatctcccctgaaaagcaattgctttatcatcgccaagaatttctgaatccaagttagaaaaaaaaaaaaaaaaaaaaaaaa

SEQ ID NO: 60571 - DNA, 342 bp, Homo sapiens
actctagtttagttttttttttttttttttaaggcgtaccattactaaaagtttacctttgggaaccttgtaccatcttaaaaactttaaaggggttgacagcttttggcaaattgcctaatccagaaaactaaccttgggttcatgttttcaatgtctaaatgaaaaatgggaaaataaaaaacctaaaaatgaaatgggattccatgtccttctccttttaacctcttataataaatggaacagatttgatttttggggtaaatccactcaggcaaagtgacaaaggcttggttgccattaaccctttagggtcttaggggagtaaatgaaaactgcaaa

SEQ ID NO: 60572 - DNA, 391 bp, Homo sapiens
  misc_feature 153, 154, 371: n = A,T,C or G
ccgcggtggcggccgcccgtcatgggcgatatgtttttataaaactattttcctgaaagcattttgactcactgttccttgaaatcatgtctttaaacaggttaacatgatctgtatttctgcaggtcaccattgaaccttctgaagagcctnnatttctttttgatgttttttatggaatagttggtgcttaccttaagaggagctttgatgtccgagaggtatgtgaaagtggaactgtgagctttatgaccagctgtgagtctctttgtatgtgtatctatttgcaaagctaaagtttgttaagatatgttcatgcctagaaatagatgtggatctcagtaaggagtgacatatgtggcaatgatacncttccatactgtggatatca

SEQ ID NO: 60573 - DNA, 514 bp, Homo sapiens
actgtgttgtaagagatgcaggttagcagaaaccctccacatgagatctgctttaagactgacccaagcctgaaacgctctctccctaagtgatccatgtccctgcagtaataccataaccactaagctaacacactcactgtaaaagtgttgcttctccatgaaacaccaagacttgatgaccatttgcagttctcattaactccactaagaccctaaaggctaaatgacaaccaagcctctgtcactctgcctgagtggatttaccacaaatatcaaatctgttcaatctattataagagctaaaaaggagaagcacatgaaatcacatttcattcttagctcttttatcttcccatttttcatttagacattgaatacatgaaccaaagtttagttctctgtattagtcaatttgccaatagctgtcaaccctttaaaagtctttaagatgctacaaggttcccaaagctatacttctagtaatgctacgccaaaaaaaaaaaaaaaaaaa

SEQ ID NO: 60574 - DNA, 480 bp, Homo sapiens
  misc_feature 429: n = A,T,C or G
acgagttctttactggctaagtggcaagattttatcggggtggagccagatgacttgaaaacttgtctgaaaacggcaatcgttgtttaaaaccatggtttggggctttcctcatcagatctgtaattcataatgaaacagcggttatttatcaaatcctttaagtcaggcagagccggtggggaggtttttgaatgtaaattccagtgaacagcttctgctttagagtgacgtgacttgtaaggctgattttactttagaagcagtgttttgttgttgttgttggaatctcaatatttattgaatgaagacatgaatgttttatctcttctaacggctcacttctttgcattcttaagtatttgctttgtgatctttgattttttccgttatgctctttgagcttatggtgaaatggtgtaaaggctntgattgtttcatggcaactttctggtaaatattcttcatttgatgagggat

SEQ ID NO: 60575 - DNA, 609 bp, Homo sapiens
ctccccgcggtggcggccgaggtacgcgggccttcccatttgtataatttgatccttcataatgagtatgtagtatgtgtcagttattcaaatcaaagaaagcctattagactcatgtatatagtcatttattttgtggccaattttttggtgtgcttttccttagaaaatatagatatctttttttaagtcctagaaaatatcttaggctttaaaaaagatattcagggaaattaaataccacacgtcttcaatactaagacattgattttaagatacatcattaatttaataatagcttttcagaaaaatccaggacatacaattttatacatcacattgaatgtttaaaatgattataagatgcatttcaacttcatgaatgttttttagacaaaatgataattacagtagtatcacattttgcagagaagtgtaggtaagtaagattggaggcttgattctccccctttcataaatgaataagtatgcgcttgcaaattgtgaaggatcagattcacgtgcctctggcaggaatatttacagaagaaaagacaatcacgggtaaagcccactgcccactagaaatgcctgcatgagtgaaacata

SEQ ID NO: 60576 - DNA, 299 bp, Homo sapiens
actgtgttgtaagagatgcaggttagcagaaaccctccacatgagatctgctttaagactgacccaagcctgaaacgctctctccctaagtgatccatgtccctgcagtaataccataaccactaagctaacacactcactgtaaaagtgttgcttctccatgaagcaccaagacttgatgaccatttgcagttctcattaactccactaagaccctaaaggctaaatgacaaccaagcctctgtcactctgcctgagtggatttaccacaaatatcaaatctgttcaatctattataa

SEQ ID NO: 60577 - DNA, 303 bp, Homo sapiens
acaagaagaagaagtcatcctttaagcgcttcctggcactgacgtttaagaagaagacggagaacaaattgcatgtggatgtgaacgtgtcttcctctaggtcctcttcagagtccagctaccacgggccttccaggattctggaagttggccggagaagcctcagcaactcccctcagcttaagtctcggactgggaagctccgggcttctgaatccccctcctccctcatcttttatagagatggcaagaggaaaggtgtccccttcagcaggacggtgtccagagtggagtcctttgaag

SEQ ID NO: 60578 - DNA, 442 bp, Homo sapiens
acctggagagagagtgtcttgctggtcactggggagtgataggatccggatgcccgccttcctcttcaagtttttccttctgattgggtttcctgaccctgattgctggtatgggtaagaatgactctgaattcctgagaaaagggaagagggttaggacagaggaaatggaatcatttagtcaggtaaagggagcaaagccaccgaaggcagtggttggaggtgtagatgtgaggaagttgggttgagaccattcaccatcaaggcttgaagatgagtgtctgtttgtgtgtgtcatgttggctgtgagttgcagaagagagtatctggcctctagttgaggagcacttccggcttctgagctgaacatggtgtagaagagaggatactcaatccaaaaccctggctatctatgcagagggctgaccagttctacccatgt

SEQ ID NO: 60579 - DNA, 310 bp, Homo sapiens
actggagccccttctctgcatacttctcacccatactctgccctgaaaatcccagctatcttagcagccctgaacactgttctttgacccctcagcaaatagaccatcgttctctgctgggccctccctctctgccataattctaaaactgtctccaggcagaaagccaggacaattgcggagtttacctcatgtgtttcccttctcgtagggattgcaatcctgtatatcctatttccattttctggaaatagttgcttcctattttttgcccagtcttttgtagttgtttatggtgaaaggtccagtc

SEQ ID NO: 60580 - DNA, 520 bp, Homo sapiens
tccaccgccggtggcggcgcgaggtacgcgggtggattgaatgggggtcttgaggatcatgaacagaaatacaaaggtgactagattttctaaaatggcaaataactcccattaaattccaaataaagcaaaatacaggttctctttgtcagataagctttatttgctggaaattacaatgtgtgttaaactgtgcagaaaagactttgtgtttatatgtaaaacagagttaagttctagcctcagataattataaaaaggttttgaaccaaagacaattttgtcctccacgcccaatgggcatttgacagtgtctagacacaacttcagttgtcacaactcaggggtaaagcagatgctgctggcatctagtgggtagaagccagggatgaggctgaatatctacaatgcatagatgggcggcccccaccaaaaggaagtatctatctggctgaaaatattaacagggccaagttagaaaaaactggcttgcagagatattttcaaaaatggtacctgc

SEQ ID NO: 60581 - DNA, 582 bp, Homo sapiens
actggtcctaggagcagaaggtttgactttttgaattctggctttgcaaaactagctgtaaaacttagacaagtcacttattctttctgggccttcactttctcatctataaaacataaagatgtatttgtgttaccaaagcactttgggcattcctctgtcataacatcggtcacactgtatagtaattctgtgaccgtgcctggctccccactagactaagagcttcagggtcttttgtatatactagtgccggtgcagggatggacacatggtgggggcttaataacaagttgttgaataattaatacataaaagtttattgcaaactggaaagacattgtataaatataaaatattgctgtcagcaatatgtttactatttgagtggtatatgtttacatttttccatttcctcatcttaaagattaggaaatcaaaagaactaggtaaattcttttgagcattaacatacaaaattttaagttgtttgcttcctttgttggaaaaacatgaattagtaatcagaagttgtttgtttgctacacttcctcccatttatgtaataaaagtacctgcccg

SEQ ID NO: 60582 - DNA, 558 bp, Homo sapiens
acctcctttctaataggtcatttgccaccagcattcttattgctctattatttcctatcaatgaaaacctaaaataaacaaaacctcatatccttctcttaatcccacacatatccctcctattatatccctctatttctttgctctccttcacaggaaaatttaagagttatctgcagttattgcctcctcactacttcacagttattgctacctcacagttattgcctcctcactaccccatactatctcctcattcaaatagggtgtgtctgctcaccacaccattaagattacttccaaattcacatttccagaactagattcttagaatcccacacacattcacataaacaactacctataggccatcactacatggttatcaatcagatattaaaaacttaacatgactaaaacagaaggccatcctctgtcatcttgttactttttgtcttccccaacccagtaaatggcacctccatcacttatttgcatagaaattatgcataagttcagcagcatagacttccacttaccaaggccaatctggcgatg

SEQ ID NO: 60583 - DNA, 473 bp, Homo sapiens
actaattactgaatgaagggatgcatacatgaataaatgaatgaaaagtaggagtgacctgtcttctctctttcttcacgatggggactagtgtgtgtatataaggggataatttttgtgtcacataaaatataaccttacttagaaggcaagacttccagaatggtggaatgagaaccacccccccgcccccataaatccgccctttcatgaaagcagtgaaaacgctagcaaacgttgtgaaaattaacttttccagaactctggaaaggaaacagaggcttccaacaatctgagaagaatgtattcaagaaaaacttcggtaagctctctgatcacagtggaaataataaacaattagtaatagaaggatagttgggaaattcaccatttgtgggatataaacagtggatcaaagaagaaatcataagggaaatgagaaaatactttgagattaatgaaaatgaaaatac

SEQ ID NO: 60584 - DNA, 302 bp, Homo sapiens
accagccatccttcatctcccacctcagggactatatgccctttctctgctgtgaacactgtttgaattccaggattcttttcgccctccatgcctctgtttaaatattacctccttagaaaggttttcttcctgaccacttcatttaactatggtcctcagccccctgaatcacctccattattttcttttacaacacctctgcccccgatttctttcataacacttttcaaaaatctgtgattatttatctaatttattcactttttaattagctgtctttctctgggctaaaatcttct

SEQ ID NO: 60585 - DNA, 281 bp, Homo sapiens
actgtgttgtaagagatgcaggttagtagaaaccctccacatgagatctgctttaagactgacccaagcctgaaacgctctctccctaagtgatccatgtccctgcagtaataccataaccactaagctaacacactcactgtaaaagtgttgcttctccatgaagcaccaagacttgatgaccatttgcagttctcattaactccactaagaccctaaaggctaaatgacaaccaagcctctgtcactctgcctgagtggatttaccacaaatatcaaat

SEQ ID NO: 60586 - DNA, 515 bp, Homo sapiens
  misc_feature 499: n = A,T,C or G
actgtgttgtaagagatgcaggttagcagaaaccctccacatgagatctgctttaagactgacccaagcctgaaacgctctctccctaagtgatccatgtccctgcagtaataccataaccactaagctaacacactcactgtaaaagtgttgcttctccatgaagcaccaagacttgatgaccatttgcagttctcattaactccactaagaccctaaaggctaaatgacaaccaagcctctgtcactctgcctgagtggatttaccacaaatatcaaatctgttcaatctattataagagctaaaaaggagaagcacatgaaatcacatttcattcttagctcttttatcttcccatttttcatttagacattgaatacatgaaccaaagtttagttctctgtattagtcaatttgccaatagctgtcaaccctttaaaagtctttaagatgctacaaggttcccaaagctatacttctagtaatgctacgccttanaagaaaaaaaaaaaaa

SEQ ID NO: 60587 - DNA, 555 bp, Homo sapiens
tccaccgcggtggccgagcggccgcccgggcaggtacattggtaattcagttgattaaataaacattgaactgctatatggaaaatatgggaaaagagatgagtaagacacatccacaagataagactacagttgaggggagggtggagagatttaagctataataaaaagtagaatattcgtttattaacaagtttaaatgagtgtatgtggaggggttgagagtgagggtaagtcttaggaggaatggggcacatatggctggggaattgggaaaggcctcttgaaggtaaatgacattttacctggcctgtgaagaattacgagaatttatcaggcatgggcttggggaagtggcataaaggatggaggttggagtcactccatgtgtttttgatgaacataggcgattgtaattcgtggggataaagttttactgggaaatggaaaacttcatttgatttctgtgcaacaagctggtaagcataagctggaatgttaatgttgggctgagcagttcgttcttaatacactaggcattttaggaaacattta

SEQ ID NO: 60588 - DNA, 297 bp, Homo sapiens
acagcctgacatgatgacattctactttcatgtcggtcttgctgcagggaaaattctgtgagtgtcctaataggctggaatcacttgctaaggtgaaccccatctttggtgctcacttttctgttatcttataattagctttattctaagcaaatccatgtctattttatttatctgtttattaacttatttttatgtatggaaaaacacatttttttatttgcttatttatttagagacagggtctccctctgtcatccaagctggaatacagtggtagattggagtgatcatggc

SEQ ID NO: 60589 - DNA, 513 bp, Homo sapiens
acaactcttccctttctctagtcgcatcatccttggtagcttgagattgatcatagtgagcgtatttataccaatgaaattggcaaaggctattaatgggagtctttccctctctcagagagctgagtctcttgttagcacatcactgccatactttcccaccttaagtccacattcttagctgtctcagacccactgcagcccatagcaattagtgtcaagttaatgaaagctagtatattggctgttactacctcagaagtgcgttgagctgaagacttcttgcgtctccatctcagctgctctctgaggtatcaacaaatcaaaagttctctttccaacactgccttcactgaagttgtcttatttaacttcctataaatttgcatccctcatctgtgggtttggtgctcctcaactgttcttacaaaaacagtcactcataatacattgaattatcccttatcatgctgtatcatttgctatactgtctatatgttcccattagacttt

SEQ ID NO: 60590 - DNA, 517 bp, Homo sapiens
  misc_feature 499: n = A,T,C or G
actgtgttgtaagagatgcaggttagcagaaaccctccacatgagatctgctttaagactgacccaagcctgaaacgctctctccctaagtgatccatgtccctgcagtaataccataaccactaagctaacacactcactgtaaaagtgttgcttctccatgaagcaccaagacttgatgaccatttgcagttctcattaactccactaagaccctaaaggctaaatgacaaccaagcctctgtcactctgcctgagtggatttaccacaaatatcaaatctgttcaatctattataagagctaaaaaggagaagcacatgaaatcacatttcattcttagctcttttatcttcccatttttcatttagacattgaatacatgaaccaaagtttagttctctgtattagtcaatttgccaatagctgtcaaccctttaaaagtctttaagatgctacaaggttcccaaagctatacttctagtaatgctacgccaaanaaaaaaaaaaaaaaaaaa

SEQ ID NO: 60591 - DNA, 492 bp, Homo sapiens
acgcgggatagtaacttgttatagcaagcaatgggaaacatacatcaattattcctctggatattagttgcttcagctctaaaatggggacacaaaatgttttctgcctgaaggctgagaactggaccatgtgacttttggcattccttcaagttctagatttcatgagagagaaaatcgacctgaaaatgcattaaatgtttaaaaacatagggaagaaagaaatatacaattatttaatgtctgtgtatgtcatttaattcttacaaccacctgagagagattttataattattattttcttttagtcattcaagtatttgagtgcctatatgtgccagatggtgttctaggtgttagaaataaagcagtgaacaagaccaataaaaatctcctgtctttttgaagcttatctttagggagacagatgagaaaccataagcataattgctaagtgaatcatcagctaggttggcaattgatagctgggat

SEQ ID NO: 60592 - DNA, 556 bp, Homo sapiens
acttcaaatgggtcactgaatatcttcaaattgtatgtaaattttggaggggaagtggtatatgcagatttttttttctggaaagaagaccaatcacttttgccaaattctcaaacaggcccatatttctctcacacacatgcgtgcgcatgcgcacacgcgcgcgcgcacacacacacacacgttaagatgcgaagaatcactgtcataaaatgtcatatttctaatttctgtaaatggggagaattcctcaagcttatataaaagtgatgtaaataattcagttacaattataaaagaaatggtatcacagcaaatccctttggcaccccactgaaaatttctctctgatgtttaaaacaccatttctatgcttactcttacagctgtattaataatcagataaggggtttatttcttgtctattttgcttagcatattaccaaatctggttcatatgaactcatgggtaaaatctaaaaatgttcatgaattattcttcatgaatttttcacaaagcattaatgtatgaaaaagtgaacaatataacatcagc

SEQ ID NO: 60593 - DNA, 283 bp, Homo sapiens
  misc_feature 76: n = A,T,C or G
acacgaaccactttcttgttatatatttatctctacatatatctgcatacccaatttaattaacatatttacaatnggaaaaatatgtgtccatgtggaaatttatatcaattattttttaagtagaaatgatgtgtcccaaacttcactgaaaacttatatattggtagttcaagtagtttccagtctattttgaaataagccctttcaaaagtcactggactatggtaaggcatatatcacctaacaatccaccaaataaaataaaaacaaatattccatt

SEQ ID NO: 60594 - DNA, 393 bp, Homo sapiens
acgccggggagaagtgattggaaaggaaagtttgtgtgagcagtggtgagacattttggttcttcctctgggtgagatgggaaggcagtggagggttttgagcagacaggaaactgactttgctgacccctctggctgccatgtggtgaaggaaccatggagtcgataagaagctgggagaccagtaaggaggctgttaggacaatacaggcaagaaatgatactggcttgcaccaaataatagcagtggaggtggtgggaaatggtgggactctagataaatttggaatacagattcatcaggatatattgacagatgagtgttaaaggggatttaaggatgagaaagatgcagaaagaacaggtttagggaataaattgagaattttcagt

SEQ ID NO: 60595 - DNA, 611 bp, Homo sapiens
gggatatcgtcgttcatggtacacactctgtggcctgaatgggagctccaccgcggtggcggccgcccgggcaggtactatgaaattcaaaacaatgatattcgaatggaaatggcatttcatgaggcctccaaacagcttcaggcacggatgcttcaggcacaagtaacaaagcaaaagagcactggtgtagaagacactgaggaaagaggaagagagaatctagtttaggcccttggggaatcacaaatggttctgcaacagcaatcaaggtggaagccccagcagtatgtgcacagagtgcttgcacatgagctgttatgccctcaaggaggccccagctgtgaatattacttggtgctggcccaaacacacattcttaagaagaactttgccaaggcagaggaataccttcaacaagcagcccagatggactacctgaaccccaatgtctggggcctgaagggccatctctattttctgagtggaaatcattctgaggccaaggcatgctatgaacgaaccactagctttgtagtggatgcttctgagatgcacttcatcttcctgagactggggctcatctatctggaagagaaagagctggagga

SEQ ID NO: 60596 - DNA, 286 bp, Homo sapiens
acattttgtttatagcctttttataacatctgaaacacataataacactgctaattacctactttcagtaatggtagcaaattgcataatatcactgacttgttcagaatgtttaaaatgcaaaggaagtcacctactggtaagatgtcctcggcaaacagctagcacagaaagaaagggatggttatcacacccatgtaaggagttacttcgcaacaaaattaaagaatcatatattttgctcttcagctttgctccttcagatgtgtcagcacaatgtgataaa

SEQ ID NO: 60597 - DNA, 534 bp, Homo sapiens
actttgaagcccaacaaaattgagttgtttgagctataaaagcaagagcaggcagaaatgcagaatctccacaggaaatgttttgccttcagggtcctgtcattcaaactagagattgaaaataccaatattctagctaatgtctaaggctgcttatttctatggctgaaggcacagggccaattagaggccaaagcagtgggtcctatcaccaggtaagccatttagttttactctcttttgtggcctcagctttcgctcttggtcttacctcatcatactacctgcttttgagcagagagaaagtgtagaaaagtggcagaaaatactttctcaaaattctttagtaatgatgggtcaggagcatcatcttctagaaggactgtgcatcctagtcagtctccagagagaagagagaaatgcaaactgtccagtaactgtgagccatgctaagctgaatagacaggcaaaaaggaggctcactactgtgccttgggagggaaattgtattatcagggagaatggtatgtattg

SEQ ID NO: 60598 - DNA, 403 bp, Homo sapiens
acttgcagaaaatctctcttctgtgatgctctgaatgactcacagttccagatggccttgtcagcctttatccgcattccactcttggcaccattaacctggtctagtgtggttgcaacaaataacttttcttgttatgaggaccagtgttttgaaaaatttaaaatgttataaaattaaaatgtttatatttggaaattatttccaaatataaaaggagcctgtcttcattatagattatttggaaaaaatgcagaggggtgcaaaagaaaaatggaaacaagccatcttttttttacccataattctaccactcagagacaactactgtgaacattttgatgtatttatctccagtctttctagaaggtagatcactgtaagagatttctgaagcagaagt

SEQ ID NO: 60599 - DNA, 368 bp, Homo sapiens
  misc_feature 354: n = A,T,C or G
gcgttatcgtacttcactctgttggccgaattgggagctccaccgcggtggcggcgcgagtactgttcttttacctaggactcagcacaagcctatatacatagtgagatgctcaataaaattttcttgaatgagtaagaatggtagacctgtgtttaagtcctgaccctgccactttctactagtgtgactttcatcaagttccttctgtccatacagcctcagtttcctcatttataaaaagagaaattttgttgagatgctaaggagttcttttcaaacatgaacatattgggattctaatgcaactcattagctgtcccagcaccataaatcaacaatcatatcttgcanagtaccatgtagca

SEQ ID NO: 60600 - DNA, 283 bp, Homo sapiens
acttcaaaaaagaggaattgaggccacttaaagctctcacagtggcagcgttctcacagctgtttggtctgcttatccaacacgcttcatttcctcgtaagacgtgccgactgcccattgcactgaccgttggaagaccgtaggcattctctagaatgtcagtcacttgggctcacaccagttgaactgtatgcctaccaagagtcagtttttctacacctgtaaggattattataaaatgtaattcaattaaatattttttcttttttcttttttttttttt

SEQ ID NO: 60601 - DNA, 295 bp, Homo sapiens
actgtgttgaagagatgcagttacagaaccctccacatgagatctgctttaagactgacccaagcctgaaacgctctctccctaagtgatccatgtccctgcagtaataccataaccactaagctaacacactcactgtaaaagtgttgcttctccatgaagcaccaagacttgatgaccatttgcagttctcattaactccactaagaccctaaaggctaaatgacaaccaagcctctgtcactctgcctgagtggatttaccacaaatatcaaatctgttcaatctattataa

SEQ ID NO: 60602 - DNA, 314 bp, Homo sapiens
acatggataagatagcttaagttgtgcttcaggagagtgcttgcttccagttttctgctttgttaatggatctatctaggtcagctctttccaataaaattttctgcaatgacacaaatctgtaatttgctgtccagtggttttgccactagcgacctgcagctgttgagttccagcagtatgtaaacttgaatttgaaaatccacttgtagctagtgtctacttaattggacaatgaagacccttgctacttaggtatacattctgaatgttggcaaacattaaaaatgcagactcgtgggaactccactctc

SEQ ID NO: 60603 - DNA, 289 bp, Homo sapiens
actttgttatacacctgttttgaatttgcaataactagtattggaactgctgggttgaatcatacatttttaaagaaaggaatactgaacccagtgatttctacagttggtcaatattagtaacctggttttgtgtcgtttgtttgatttaaagagacggtctctcactgctgtgttcaggtaggtgtgcacaggttattgacatactcaatcttactgcccttcaggtttcacctggtgggctcaaccaagcctcctgactcagcctaccaagtaggtgggactacat

SEQ ID NO: 60604 - DNA, 324 bp, Homo sapiens
tccccgcggtggcggccgaggtactgtgttgtaagagatgcaggttagcagaaaccctccacatgagatctgctttaagaccgacccaagcctgaaacgctctctccctaagtgatccatgtccctgcagtaataccataaccactaagctaacacactcactgtaaaagtgttgcttctccatgaagcaccaagacttgatgaccatttgcagttctcattaactccactaagaccctaaaggctaaatgacaaccaagcctctgtcactctgcctgagtggatttaccacaaatatcaaatctgttcaatctattataagac

SEQ ID NO: 60605 - DNA, 288 bp, Homo sapiens
acccttacaaagaagacaccataccttatgcgttattaggtggaataatcattccattcagtattatcgttgtaagttaaatccacttttccaagtttataacttttgggcacttggcttaattttctgttactcttttaatgcttaaatgtgtaatcctccaaaaacaatgtatgctttttaaacctttaattgatgctttatttgatcaagagaatctcagctattttaagtggagtcaaaaaataacaatgtgtaattgtaagagccaggcatggtgacatgcct

SEQ ID NO: 60606 - DNA, 303 bp, Homo sapiens
  misc_feature 289: n = A,T,C or G
acagatacttcttatgatgtttaaagggtcacatgtcccattcatgcctcatggcctcattatacacctgcttctgatgaaactgtctttttatgatttctgtctcataaatgttcaatccttcaaatggagagaggtagcagtctatctctgtagtttaaaagagaacatttgagtagaattgggcatctgtgtctttcattttagccatgtagaaaagacaaaacaagaagaagtcaggagatatggatagctggcactttgcctattgtgaagattacgggaaccncagcagcttcctct

SEQ ID NO: 60607 - DNA, 556 bp, Homo sapiens
accggaatcattgttgccactccctgtggatgaccaacaagatgctttaggcagcgagctgccagagagtttgcagcaaacagttgtgctgcaggatcccaaaagccagataagagcctttagagaccctctacaggatgacactggattatatgttactgaggaagtcacctcctctgaagataaacgaaagacttattctttggcctttaagcaggaattaaaagatgtgatcctctgtatctccccagtaatcacattccgagaaccctttcttttaactgaaaaggggatgagatgctctacccgagattattttgcagagcaggtttactggtctcctctcctcaataaagaattcaaagaaatggagaacaggaggaagaaacagctgctcagggatctctctggacttcagggcatgaatggaagtattcaggccaagtctattcaagtcttaccctcacatgagctagtgagcactagaattgctgagcatctgggcgatagccagagcttgggtagaatgctggccgattttcgagccagaggagga

SEQ ID NO: 60608 - DNA, 317 bp, Homo sapiens
  misc_feature 93: n = A,T,C or G
tccccgcggtggcggccgaggtaccaattgctggctatgatgaggaataacagaaactgtcattcgttgctggttggaatgcaaaatagtaanctacactggaaaataaatgattctagatacaaatattatatgaaattaacttaaaatacatcataaaactaattataaaatgcaaaactgtgaaactgacagattctaacaatactaaacattgtttcattattagtttactgtggcttttaaaacaaattattataaacttaatggcttaaaaacataaatttattattttacaattctgaaagaagtcagtt

SEQ ID NO: 60609 - DNA, 313 bp, Homo sapiens
acatactcatttgcctatatgaaccaatttctacatctttatgttgaagaaaacaatacccattttaatctcctttgactttcaaacttatatcttcccgtcaagcactttcgtttgaactatagacttatatatctgtctgtctgcttgacatctccactcattaattctttcgacaaatatttaccaagcatctactatatgtcagacactgctccaggcacaacagatgcagcagtgatcaggacaagccatgctcctgtcttggaactttcagtatagtaaagggaaaaaaaaaaaaaaaaaaaaaaaa

SEQ ID NO: 60610 - DNA, 480 bp, Homo sapiens
  misc_feature 451, 452: n = A,T,C or G
tccaccgcggtggccggccgcccgggcaggtacccttacaaagaagacaccataccttatgcgttattaggtggaataatcattccattcgtattatcgttgtaagttaaatccacttttccaagtttataacttttgggcacttggcttaattttctgttactcttttaatgcttaaatgtgtaatcctccaaaaacaatgtatgctttttaaacctttaattgatgctttatttgatcaagagaatctcagctattttaagtggagtcaaaaaataacaatgtgtaattgtaagagccaggcatggtgacatgcctgtagtcccagctactcgagaggctgaggctagaggattgcttgagtctcggagttggatactataatatgtgatgatcacatctgtgaatagccattatactccagcccagacaacactgcaacatcccatannaaaaaaaaaaaaaaaaaaaaaaaaaaaa

SEQ ID NO: 60611 - DNA, 616 bp, Homo sapiens
  misc_feature 36, 517: n = A,T,C or G
cgcgattctgcgtacttactctgaggccgaattggnagctccaccgcggtgggcggcgcgaggtacaacaagcggcattgtggaacactgtggcaaggacaatgaattcttctaggagagttggggtaggagtaatccaaagatttttctagaataaagaaaacttcaacctgggcaacataacaagaccccacctctacagaagatttaaaaattagccaggtgcagtgtggttcgcctgtagtccaagctatttgggaagctgaggcaggagaattacttgagcccaggggtttgaggctgcagtgagctctgatcacaccactgcactccagcctggaagacagagtgagactgtctcaagaaaaaaaaaaaaggaaaaaaaggggggaaagggaacctttttttgcccaggcttgggaggatggggaggaaattcaaaacggggcaccagctttgaccaagggccctggggtataaaagtaattttaatacctaaaaattttaagaaaaattntgaaaacttaaaagagtcccttgaggaaggaaaaaataaagggtttctaaaacataacggaggttgaaataaacctttttctgggagtaaaaaaaaaaa

SEQ ID NO: 60612 - DNA, 529 bp, Homo sapiens
tccaccgcggtggcggccgccgggcaggtacccaatatgtagtcttttatccctcatcaaatgaagaatatttaccagaaagttgccatgaaacaatcaaagcctttacaccatttcaccataagctcaaagagcataacggcaaaaaatcaaagatcacaaagcaaatacttaagaatgcaaagaagtgagccgttagaagagataaaacattcatgtcttcattcaataaatattgagattccaacaacaacaacaaaacactgcttctaaagtaaaatcagccttacaagtcacgtcactctaaagcagaagctgttcactggaatttacattcaaaaacctccccaccggctctgcctgacttaaaggatttgataaataaccgctgtttcattatgaattacagatctgatgaggaaagccccaaaccatggttttaaacaacgattgccgttttcagacaagttttcaagtcatctggctccaccccgataaaatcttgccacttagccagtaaagaactcgt

SEQ ID NO: 60613 - DNA, 504 bp, Homo sapiens
actgtgttgtaagagatgcaggttagcagaaaccctccacatgagatctgctttaagactgacccaagcctgaaacgctctctccctaagtgatccatgtccctgcagtaataccataaccactaagctaacacactcactgtaaaagtgttgcttctccatgaagcaccaagacttgatgaccatttgcagttctcattaactccactaagaccctaaaggctaaatgacaaccaagcctctgtcactctgcctgagtggatttaccacaaatatcaaatctgttcaatctattataggagctaaaaaggagaagcacatgaaatcacatttcattcttaactcttttatcttcccatttttcatttagacattgaatacatgaaccaaagtttaattctctgtattagtcaatttgccaatagctgtcaaccctttaaaagtctttaagatgctacaaggttcccaaagctatacttctagtaatgctacgcccttaaagaa

SEQ ID NO: 60614 - DNA, 574 bp, Homo sapiens
actgttatattgttatttttctctaaatatttttgatccatagttggttgaatccacggatgtttggatccagcccctggatacggagggctgactttaatcttcccccatccttaagtatcctgtgaagttataaatgatgtgtgccatgtcttacaccagcaactgtgcccccttggcctgggcacatgtggcaactgtccatgcaccatgttgtttaggtgagcttgctgtttctgtccctactgctgttggcccaacatggaaatatgaactaggtaaataattttcaaaaatccagacattaacttatttgcccctgtaggagtcttttttccagagctgatgataagaagacagtttcctttgcagcttctttcacctggcatctatttcacagaggagggaggtaagttttattttcaatggcactaaagattgttttcctggattgttttcacaaactgcacatgaacagtgtttcaaaagtatttcctgaattaggtgatgtctgcagggagccatgaatcatgctgaaacaggattgttcaaaactttgccaggaagtctctgg

SEQ ID NO: 60615 - DNA, 295 bp, Homo sapiens
acattctcctttgagtctggatccttgatcctggcctgtgattccatctcaggagttagaagcctgtggtgcctggcctgagtcagctcattagcttcattgacaacattggttcgttcaacaaatattgcctgagaagaagacatttaagcaaagacctgcaggaaggaagggagttaactaagtggatatgtggggcaagaacttcccagaatgaagaaacacccgcattaattgcttgaggtatgagaggtgaggtcaggggcaccagtttgtataggggctttctaaaaca

SEQ ID NO: 60616 - DNA, 237 bp, Homo sapiens
tccaccgcggtggccggccgcccgggcaggtacatcgctgacactagctacatgggtcatgccatagtggttgaggttggaggagaaggacattctaaatggtaattcaatcacgttcattagacaaggagggtaggagcaaggactgggaaagtaacagtggggaaaaggaactaggagaaaactctgaagtagggtcaggttgcagagcagatttggtttttttacccactatgg

SEQ ID NO: 60617 - DNA, 308 bp, Homo sapiens
actgtgttgtaagagatgcaggttagcagaaaccctccacatgagatctgctttaagactgacccaagcctgaaacgctctctccctaagtgatccatgtccctgcagtaataccataaccactaagctaacacactcactgtaaaagtgttgcttctccatgaagcaccaagacttgatgaccatttgcagttctcattaactccactaagaccctaaaggctaaatgacaaccaagcctctgtcactctgcctgagtggatttaccacaaatatcaaatctgttcaatctattataagagctaaaa

SEQ ID NO: 60618 - DNA, 288 bp, Homo sapiens
actgatgagacctctttagtatgacactggcaactgacggcactgcggatatgtttggaataaggttcaaaagaagaggctgttctaagaaagactaccgagtaatcaatcacctcctcagagaaagtctgctcaggtagagttttacgtttaccacctaaacgatggaacatttttgtggaatcttttatagccaaatcagagaatgaggcgttgagggtgaggggggcttgagggcaaaagaaagggtcatgggggagaagatgggtcctagaaaaatggtcttgt

SEQ ID NO: 60619 - DNA, 524 bp, Homo sapiens
acacgggttgatggacatgcaaactttcgaaacagagcctcccgagaagcctctgccttcgagcctgccattgaaatgcaaaagtctgtgccaaataaagccttggaattgaagaatgaacaaatacgagcggccgcccgggcaggttctctgttggagtcacaggaaacaaaatgtgcccttctgctgatgaaactttgctgtctgaggaggtattttagcctgctgcctggataattacctgtgttactcacattagcaatacagagtgactggaggcggatgcacccagcaaggccacatgggaccccgtatggatgtgatggccccttgccatcatgggtcactgaagggcaactgcaataaccctcatccagatctgccctctcaataatctatggcactgcctgtgttttctcttattcaagtgagggcaagcaccttctagtccacatgggttgggcacagactgagacactatgtcatgtgccttagaaaggtctacgttggttcataggcctctt

SEQ ID NO: 60620 - DNA, 517 bp, Homo sapiens
  misc_feature 393: n = A,T,C or G
acccagaccctaacttttcaaattttacaatggagagaaaagggaactattttaccaaattcaggtagctaaaattgatagaactatctttcctatggagaatgccctacaaagatacaacactatagcttactgttattacttgctccacaagcaatgttctttaatgaagcatggtgccacttcaaggaagtgataatccacatttttgaaagattctataaagaagtggtatcaagatctaaatgggagtctctcaatacaccttacaaattccctgatgtagttttgttgagtctaaaactaattgattggaaaatgtgatacaccatgttcagatctccagcaattacacccaggcaattctttactatagtaacaataatataccanctgtgtttaagaaaataatgacattattaaacataatgttattagttaacaaattgattacctgggctttaaaatgttaggagcttcagataaaaaaaggaattcagatggaaaaaaaccttat

SEQ ID NO: 60621 - DNA, 288 bp, Homo sapiens
acactgctttcactggtaacagtatgggttcgtgctccaaccccagctctgccacttacagaacactggggacctgggccaagttattcaacttctctttacctcagtgttctctgtaaaatgggaataacaatagaacttctggtattaggctgttatgaggattaaaaaaaattcatatttacaaattgcttagaagagtgcctggcatataataagtggctctgaaggtgtttgttggataaaaaacaacttttgtggtaattttgggctggaggaaggacaaac

SEQ ID NO: 60622 - DNA, 281 bp, Homo sapiens
acaggaagcagctttaaaaaactgctggcagaactaagaagtcagactgtccttgacccctagatcaaatgtttttgagcctgagtttccttaaatcttcttcagttgagaataaacattttgacaaaatagaagatttattctgttaatttttggtcttcataaacctaactaaatttgctaaaacaacaaaaactttctaatttttactagttttgttttttaaaaagtttgtttccttttaagtgcataacactttaaaatgagctcagctgtattac

SEQ ID NO: 60623 - DNA, 463 bp, Homo sapiens
acccccaccccattttcatactaagatcctggtattatataaaactgaaggattaaaaactgtatagctcctacctcatttcttggtgaacttcaataaaattctaagcatttaataaaattagacttctcgttttgacgtgttctccatgttgattctttgttttagtttatccttatgtgggccgatggcagcttatgtgaatcctcatggatatgtgcatgagacacttactgtgtataaggcttgcaacttgaatctgataggccggccttctacagaacacagctggtttcctgggtaatattatggtggtggttgcttttttttttcttttttaccttaattgggcaaaaaaatccaaagtcctaagcaaagttgccacaatctttataataaaaagtagacagacaaatgagtaatttgctacaaaaattacccgggtatgggggcaggggtctgt

SEQ ID NO: 60624 - DNA, 320 bp, Homo sapiens
tccaccgcggtggcggaccgaggtactgctttagcttggctgtatcctgtaggttttggaacaatgtattttcattcccattaatctcaagggtggcctcattccccttatgagttcttctttgatccactgtttatatcccacaaatggtgaatggcccaactatccttctattactaattgtttattatttccactgtgatcagagagcttaccgaagtttttcttgaatacattcttctcagattgttggaagcctctgtttcctttccagagttctggaaaagttaattttcacaacgtttgctagcgttttcact

SEQ ID NO: 60625 - DNA, 331 bp, Homo sapiens
tccaccgcggtggcggccgccgggcaggtacagaggtctaggttggtgctgttttcttccagcaactgaaatgtcactttgttgtcttctggttccattgctcctgctgagaagtcagctgtcagtcttggacatttgaaagtgagttcttttctctatcttttaagattctattctctgtcttttgtttttggcaatttgctatgatattctagtaaggcttctttgtatttaaatctgtggatcacacactttgagtctgtgaaataatgtctttcataattcttaggaaataaattctgagccattacctctttcaaccttgctcctg

SEQ ID NO: 60626 - DNA, 497 bp, Homo sapiens
tccaccgcggtggcggccgacgggccaggttctcggggtctactgctccctcttctatcctttagtcattcttacagggttgtttcaaagatcagatgagatagtatataacgtgcttactacattgctgtaggtgctcaagttttaccacccaccccctcagacatttacttaaaatatattctgggggctgggcgcggtggctcacgcctgtaatcccagcactttgggaggccaaggtgggcggatcacagggtcaggagatcgagaccatcctggctaacacggtgaagcccgtttctactaaaaaaaaaaaaaaaaaatttccccgggggggggggagggcacctggggccccacctcttggggaggctggggcttgaaaatgggggaaacccggaaggcaaaacttccccgacctgaaatggcccccttgcattccacccggggggatggaccaagactttgtttaaaaaaaaaaaaaaaaaaaaaacccc

SEQ ID NO: 60627 - DNA, 212 bp, Homo sapiens
  misc_feature 189: n = A,T,C or G
accaataatgcatcatcccaactgtgatgctctgttaccacgcttaaggcagatattgcaattatttggctcccctgctttactgcaagctccttgacatcagggcagtatctcagtcattactgaatgtctgacatttagttgatacttgatgagtttttgaatgaataaatgtttaaacaggtaagntttattttgcttatcaatttttt

SEQ ID NO: 60628 - DNA, 540 bp, Homo sapiens
tccaccgcggtggccggccgcccggcaggtactctagtttagttttttttttttcttttaaggcgtaccattactaaaagtatagctttgggaaccttgtaccatcttaaaaacttttaaagggttgacagctattggcaaattgactaatacagaaaactaaactttggttcatgtattcaatgtctaaatgaaaaatgggaaaataaaaaagctaaaaatgaaatgggatttcatgtgcttctcctttttagctcttataataaattgaacaaatttgatatttggggtaaatccactcaggcaaagtgacaaaggcttggttgtcatttaccctttagggtcttagtggagttaatgaaaactgcaaatggtcatcaagccttggtgcttcatggaaaaccaacacttttacagggagtgtgttaccttaagggttatggtattactgcagggacatggatcacttagggaaaaagcgtttcaggcttgggtcagtcttaaagcaaatctcatgtggagggtttctgctaacctgca

SEQ ID NO: 60629 - DNA, 310 bp, Homo sapiens
actcttcagttttggctgagggctaagctacgcctacacggagttgtgagtccatgaggccaggaaagaccactactagggaaaagagaaagatcagggagctgtaaaatgaataataaccagggctcacaaaggactggaaggcattcaaattctgactaattagggtggaaagacctcattgaacaccctggactgtcagtagagaccccacagggccactggtagtagtgctaaactggctctagagcaggggctggcaaactgtggccaatgggctaagtcctagcccatctagcctgccacctat

SEQ ID NO: 60630 - DNA, 505 bp, Homo sapiens
acagtttgtggacctgtgaatatagtgtaaattggagccagttcaagttatgtaaatacaccttgcccttaagagtcaggaggcccgggttcttgttttgccctaattctgcctctgatgaaatgtgcagtcatggaaaaaaattatttaacctctctggatctcggtttccttatttgtagaatggggaggggagagtattcagatgcccaggaaactcagaacattagggaccttgcctatttgttcactactgtatccctaacaccaagcatgtggtaggcatgttataaatttttgtcacataaggtttctgctatgatatgataatgcataattagtgcatttccttaattttccaacattattatttcttttaataaactgtatacttggtaatgaaagaagtaagattaaaaggaagctttgttttcatcactgcatcttgaaactgagagtgcagtgtgtgataaagttactggagtagtttatttgtgaaaatagt

SEQ ID NO: 60631 - DNA, 291 bp, Homo sapiens
acgcgggtagtttatcaaggatttaatgtttgtatcttttaattccacatacatatatatcttaaggaaataactagaaatgcaaacaagaatttgtattcagaaatgttcactatagcatcacatagggtaatcaaaaaattaaaaataacctacatgctctcaaagtaggaggaatggttaaattatagttgattttgctttgtctctcttggtttcaaggagtagaaattctaactagattaagtaaaattgggctttgttgaaaagggtaaaaggtgctctaataac

SEQ ID NO: 60632 - DNA, 317 bp, Homo sapiens
tccaccgcggtggctgtgttattttcctgtagtactgatttccctcttttattagaggttctgtggtggctgggcatggtggtttatatgtgtaatcccagcactttgggaggccgaggcgggaggattgcttgagtccaggagtttgagaccagcctgggaaacatagtgagactctgtccctacctaaaaaaaaaaaaaaaaaaaaaagggcccctgggccccttttaaaattaggggtcccccggggcgggggaatttcattttaaactttttgaatcccgccaccctggggggggggccgggcccccattttt

SEQ ID NO: 60633 - DNA, 243 bp, Homo sapiens
acttggatggactcatcattacagaatactgctggatggacagggggtatgccctgaagtaagagttgcggaaggcaataccagctattcgaatggagagtaagtgaaaatctcatcaaaaaagtaaatatcaaaactaattaatggctgtaattatgccacagactctgtctaaaaatggattctgccgttgaaaataaatgataacacatgtgaaaaaggaaatgcagcgatgcatgcaac

SEQ ID NO: 60634 - DNA, 303 bp, Homo sapiens
actgtgttgtaagagatgcaggttagcagaaaccctccactgagatctgctttaagactgacccaagcctgaaacgctctctccctaagtgatccatgtccctgcagtaataccataaccactaagctaacacactcactgtaaaagtgttgcttctccatgaagcaccaagacttgatgaccatttgcagttctcattaactccactaagaccctaaaggctaaatgacaaccaagcctctgtcactctgcctgagtggatttaccacaaatatcaaatctgttcaatctattataagagct

SEQ ID NO: 60635 - DNA, 291 bp, Homo sapiens; identical to SEQ ID NO: 60444

SEQ ID NO: 60636 - DNA, 523 bp, Homo sapiens
tccaccgcggctggcggcgcgaggtacaatttctttactggctaagtggcaagattttaccggggtggagccagatgacttgaaaacttgtctgaaaacggcaatcgttgtttaaaaccatggtttggggctttcctcatcagatctgtaattcataatgaaacagcggttatttatcaaatcctttaagtcaggcagagccggtggggaggtttttgaatgtaaattccagtgaacagcttctgctttagagtgacgtgacttgtaaggctgattttactttagaagcagtgttttgttgttgttgttggaatctcaatatttattgaatgaagacatgaatgttttatctcttctaacggctcactcctttgcattcttaagtatttgctttgtgatctttgattttttccgttatgctctttgagcttatggtgaaatggtgtaaaggctttgattgtttcatggcaactttctggtaaatattcttcatttgatgagggataaaagactacatattggg

SEQ ID NO: 60637 - DNA, 276 bp, Homo sapiens
actgtgttgtaagagatgcaggttagcagaaaccctccacatgagatctgctttaagactgacccaagcctgaaacgctctctccctaagtgatccatgtccctgcagtaataccataaccactaagctaacacactcactgtaaaagtgttgcttctccatgaagcaccaagacttgatgaccatttgcagttctcattaactccactaagaccctaaaggctaaatgacaaccaagcctctgtcactctgcctgagtggatttaccacaaatat

SEQ ID NO: 60638 - DNA, 277 bp, Homo sapiens
acttagttatgataaagtgtctagtgaagcaagtgcctttggggaaaaaagtggctactgcccctgaccattgtgtcagtaatgatgactacaaaggacactatcctggggtggattcttctgggtattttagagaaagcaaatggcaagcttagatattaaaattctcagctctagtaatagagaacaagagaactgtctctctctccccacaaacacacacacatacacatgcacacatgctcacacacacacacacagacttgtgactgggggg

SEQ ID NO: 60639 - DNA, 238 bp, Homo sapiens
  misc_feature 94, 95, 96, 97, 98, 99, 100, 101, 102, 103, 104, 105, 106,107, 108, 109, 110, 111, 112, 113, 114, 115, 116, 117, 118,119, 120, 121, 122, 123, 124, 125, 126, 127, 128, 129, 130,131, 132, 133, 134, 135, 136, 137, 138, 139, 140, 141: n = A,T,C or G
  misc_feature 142, 143, 144, 145, 146, 147, 148, 149, 150, 151, 152, 153,154, 155, 156, 157, 158, 159, 160, 161, 162, 163, 164, 165,166, 167, 168, 169, 170, 171: n = A,T,C or G
cgcggtggcggcgcgcccgggcaggtactttcttgatttttaatttctgcttccctttggattcactattttttatttctgtcttctacctttnnnnnnnnnnnnnnnnnnnnnnnnnnnnnnnnnnnnnnnnnnnnnnnnnnnnnnnnnnnnnnnnnnnnnnnnnnnnnngaatctattccgcggggcccccccccgcgcggggcgccgccccccccgccgcccccccccccccccc

SEQ ID NO: 60640 - DNA, 289 bp, Homo sapiens
acgcgggtatagtcattatatcatttaatcaccacaaatttataaagttgatgctgttattatctacattttctagatgcgaaatttcctcaaggtcatacaggtaacatgcggcagagccagagtccaaacaactgtgggaaccacgtctgtgctcttaactgctattatatgcaacaattcagtgttcagatgtttgtgctgacttctcaaggttaaaaaatgggcaacatagcaagatcccatctctgcaaaaacattgtaattttttaaattacaaaatttatga

SEQ ID NO: 60641 - DNA, 300 bp, Homo sapiens
acttgatggactcatcattacagaatactcctcgttggaagggggtatgccttgaagtaagaattgcaaaaggcaatccagctagcaaaagggaataaatgaaaatatcattaaaaaagaaatatcaaaactaattaatggcaataattatcccacagactctaaaaaaatgcatttgccatgaaaataaatgagagtacatgtaaaaaaggaaatgcagcaatgcatgcaacggaagttagaaagattacagttttaagataaagatgttttgtctacagcaaacaaagtgttcaaatc

SEQ ID NO: 60642 - DNA, 544 bp, Homo sapiens
  misc_feature 518: n = A,T,C or G
acgcgggtagccaggtgacagactgttacctgaggtttgttatataaatgtgggacttaataaactgctatgagctttattattcaaaaaaatcaaaattacttttttgactctgaattctaggccctcactatgtgctttttgtcttgattttcttgtagctttggagataggcttaagtgtcattttagaatttttagtctgattttaaataatggtgttggacattgcacttttagaaatattaccttttcctgaaaaaatgaaacattgcatttaatatttccatgcatttaagaattacagtccaaataatgatggtttggggaaaataatatttttgtcccatgtgtcctaaaataaaactcagtaacacatgacacttatttgattgacagatgtctaggaggtgacactttaaggtgggctgtatatatgtgttggattgactataaatgtgttgtaactgtgttgtgaaagtcaaggatggaagtaaagtttcaaaaagtgggtcatgntaacttttagtgcagggagggaagat

SEQ ID NO: 60643 - DNA, 305 bp, Homo sapiens
acactgataaactgatcttccgaagagactgtttatgattttggcagtgcctcattttttaggtctttgtctttaaggaacccacgtgtggttggggaaagcacctcaatctctgcagttcatatgtagaaactcttataagccttgtgagaggtctgtgttcccttcctgactgtcctacacctactatcttgaacatcagaaacactgatgttcaagaactttgattaccctcatttatctgggagctgtgtgacatctgaggcacagttctaagtagaagtatcattcagaaccaggagcaa

SEQ ID NO: 60644 - DNA, 554 bp, Homo sapiens
  misc_feature 499: n = A,T,C or G
actgtgttgtaagagatgcaggttagcagaaaccctccacatgagatctgctttaagactgacccaagcctgaaacgctctctccctaagtgatccatgtccctgcagtaataccataaccactaagctaacacactcactgtaaaagtgttgcttctccatgaagcaccaagacttgatgaccatttgcagttctcattaactccactaagaccctaaaggctaaatgacaaccaagcctctgtcactctgcctgagtggatttaccacaaatatcaaatctgttcaatctattataagagctaaaaaggagaagcacatgaaatcacatttcattcttaactcttttatcttcccatttttcatttagacattgaatacatgaaccaaagtttagttctctgtattagtcaatttgccaatagctgtcaaccctttaaaagtctttaagatgctacaaggttcccaaagctatacttctagtaatgctacgccttanaagaaaaaaaaaaaactaaactagagctgactttgctaactgacacttatactgg

SEQ ID NO: 60645 - DNA, 291 bp, Homo sapiens
  misc_feature 15, 31: n = A,T,C or G
acattttgtttatangcctttttaataacantctgaaacacataataacactgctaattacctactttcagtaatggtagcaaattgcataatatcactgacttgttcagaatgtttaaaatgcaaaggaagtcacctactggtaagatgtcctcggcaaacagctagcacagaaagaaagggatggttatcacacccatgtatggagttacttcgcaacaaaattaaagaatcatatattttgctcttcagctttgctccttcagatgtgtcagcacaatgtgataaaca

SEQ ID NO: 60646 - DNA, 306 bp, Homo sapiens
tccaccgcggtggcggcgcgaggtacactgtgtctggtgaagtaagttgatggggtgcactaacccttttggaatagtttatcaaggatttaatgtttgtatcttttaattccacatacatatatatcttaaggaaataactagaaatgcaaacaagaatttgtattcagaaatgttcactatagcatcacatagggtaatcaaaaaattaaaaataacctacatgctctcaaagtaggaggaatggttaaattatagttgattttgctttgtctctcttggtttcaaggagtagaaattctaact

SEQ ID NO: 60647 - DNA, 417 bp, Homo sapiens
tccaccgcggtggccgggccgcccgggcaggtactgtgttgtaagagatgcaggttagcagaaaccctccacatgagatctgctttaagactgacccaagcctgaaacgctctctccctaagtgatccatgtccctgcagtaataccataaccactaagctaacacactcactgtaaaagtgttgcttctccatgaagcaccaagacttgatgaccatttgcagttctcattaactccactaagaccctaaaggctaaatgacaaccaagcctctgtcactctgcctgagtggatttaccacaaatatcaaatctgttcaatctattataagagctaaaaaggagaagcacatgaaatcacatttcattcttagctcttttatcttcccatttttcatttagacattgaatacatga

SEQ ID NO: 60648 - DNA, 551 bp, Homo sapiens
acctctctctggctttgcctttctctccttcctgccctgacttcacactctagccacacttcattcattcattctacaccactgtgtgctagctactgtcctagtcacttgggatgtctcagggaaaaaaagctaagatctttgcccttgtggagcttatgttatgggaaggatcacatcagtaaacaataaacataagtaagcacaattgataggacgagggagggtaattctagataggttggtcagggttggctttattgaaaaggtgacttttgagcaaagatgcaaaagatgagacagtgagctatgtgaagaaaccaggggaaaaatatctacactgaggggacagcccgtgcatatccctgaggtaggagcgtgcttagcatacccaggagaggcaaaaagagagcagggagaatgacaagagatgagggcagagagacaacaggggagtgtgcctttggacaggccctcattagccattgtattaagttggagactttgtatttaatgggaagccaactgcttgtgggtggttcacactctcc

SEQ ID NO: 60649 - DNA, 238 bp, Homo sapiens
acttcaccactctgggcttcagtttccccatctgtaaagggaagatgtaacaagggttaatatgaggctttaattagttaatacatgaaagtgcttagcagtgtggtagtaaggcactaggatcagctcacagtagatgttagctgatactgcatgggccttgtttatcctacctcttagcctttgtgtaggctgcattccccacctggatcttctcctctccactcccctctaatct

SEQ ID NO: 60650 - DNA, 476 bp, Homo sapiens
  misc_feature 422: n = A,T,C or G
accgcggtggcggcgcgaggtactagttctagctcagcacatggtttcttaagaaaaagatactaacaagtctccctagctaagtgtctaacttcagatcaacaccaagtatttagcttcagcaccttccaggatcttcctaaagacacaggaagaggattccctttggcttttcttcttcctcccttcttacatcctgttcctgggccttgagaactagatggccacatcttatgtaagctacacagttcttcacagcatactggctggtgtgtaagcacaagcatcccatgagaacaggaagcggaagctggcagtttcccaaggcctgggctggaaactggcacagcatcacttctaagtagtctacgggtcaagccttcacagagcacagaatcaagaaaaggggacaatgatccttnccctcactgctcaaagagaaaaatggcaaaggatttggggttcatgttttaaac

SEQ ID NO: 60651 - DNA, 492 bp, Homo sapiens
acgcgggtagggtcaagttcaggttactttctcaggaaacctaacaattccagctgtaatgtattaaatgagtgacttctgtaaacaggagggttatctgtagccaccctggatagcaatgattttgatcttagtttacccaagagtagagtcttcatttgaacagttatgagatttaaggtgtctacatgaccaaaggggtccaggtgggaagttacatgagtttggaaaaaaaatttcagggggtttgggttctggctcttccttccggtagcaaattgcataagttctcagagcctcagtttccttatctgtgaaatgttacagctgattttttttccctaaaactattaggttggtgcaaaagtaattatggtttttgccataataactgattttcttcgttcgataaataaaacatattcattgcacaaaatttagaaatacagataactcccattccgccccccaaaaaaaaaaaaaaaaaaaaaa

SEQ ID NO: 60652 - DNA, 320 bp, Homo sapiens
  misc_feature 272, 279: n = A,T,C or G
actgtgttgtaagagatgcaggttagcagaaaccctccacatgagatctgctttaagactgacccaagcctgaaacgctctctccctaagtgatccatgtccctgcagtaataccataaccactaagctaacacactcactgtaaaagtgttgcttctccatgaagcaccaagacttgatgaccatttgcagttctcattaactccactaagaccctaaaggctaaatgacaaccaagcctctgtcactctgcctgagtggatttaccacanatatcanatctgttcaatctattataagagctaaaaggagagcacatg

SEQ ID NO: 60653 - DNA, 150 bp, Homo sapiens
ctccacgcggtggcggccgagtactctgtttttttttttttttttttttacaaagactcttgttatagcacctgtgcatttattcgaatcctttctgtgcccagtaaccttatcttaaagctcctttaagggtaccacttggtcccatcc

SEQ ID NO: 60654 - DNA, 380 bp, Homo sapiens
tccaccgcggtggcggcgcgaggtactggcagtaaaagagttctcgagccttgtatcaaacaagtacacactaagctataactttaaagctgaaagctataaaacagctgcctcaaataaatataggcagggaaaaacacatacacttatatacatacacaccccatgggccatgctagctgcttccaatcaaagaaaaatagattcccctgccaacctaatatactaaacagacacttaataagcacaatgctatttaatacattataaccctcacactccattcatgcttagaaacaccagaattagagtttagccaagccctaagcaatagcactccatctacttggaggctaactttgtgtctgcccttatctagt

SEQ ID NO: 60655 - DNA, 301 bp, Homo sapiens
actccagggaagccaaaagatggacactgctgcatctaaactctttttcaaacattgtgacatatgttaaactcaaattgtttttaaagttgtgtgagcacaatgttgttttaaagtatttgacattgcatcattttttatttatttattaagcacacattatttgctgtaatacaatgctaggagctgcaaataccagtgcaaaaaagatcagctctccataccagtgtatataagacaattacagatgtttgtaaaagctatgacagaattaaagcaagattataagaaagttagactt

SEQ ID NO: 60656 - DNA, 298 bp, Homo sapiens
acagagaatattgatacttgtggactgcttctgtaactcttttaaaataaattttctaagtaaatgctgacgtagacttttctgttagtggaaggctgagctcctcccgccaaacaatgcgctgcccaaatcatctttacaattcccgacagtctgtcgtctccgaagctcgggttcattggtttttattctgtgaaggtcaggaagcgttttggaaaaataaattttcctttttaatttcttaaattaaatgtgtcttcccaaggatgcccagaaataggaaagttacataaatgct

SEQ ID NO: 60657 - DNA, 495 bp, Homo sapiens
acgagttctttactggctaagtggcaagattttatcggggtggagccagatgacttgaaaacttgtctgaaaacggcaatcgttgtttaaaaccatggtttggggctttcctcatcagatctgtaattcataatgaaacagcggttatttatcaaatcctttaagtcaggcagagccggtggggaggtttttgaatgtaaattccagtgaacagcttctgctttagagtgacgtgacttgtaaggctgattttactttagaagcagtgttttgttgttgttgttggaatctcaatatttattgaatgaagacatgaatgttttatctcttctaacggctcacttctttgcattcttaagtatttgctttgtgatctttgattttttccgttatgctctttgagcttatggtgaaatggtgtaaaggctttgattgtttcatggcaactttctggtaaatattcttcatttgatgagggataaaagactacatatt

SEQ ID NO: 60658 - DNA, 497 bp, Homo sapiens
actgtgttgtaagagatgcaggttagcagaaaccctccacatgagatctgctttaagactgacccaagcctgaaacgctctctccctaagtgatccatgtccctgcagtaataccataaccactaagctaacacactcactgtaaaagtgttgcttctccatgaagcaccaagacttgatgaccatttgcagttctcattaactccactaaggccctaaaggctaaatgacagccaagcctctgtcactctgcctgagtgtatttaccacaaatatcaaatctgttcaatctattataagagctaaaaaggagaagcacatgaaatcacatttcattcttagctcttttatcttcccatttttcatttagacattgaatacatgaaccaaagtttagttctctgtattagtcaatttgccaatagctgtcaaccctttaaaagtctttaagatgctacaaggttcccaaagctatacttctagtaatgctacgcctt

SEQ ID NO: 60659 - DNA, 166 bp, Homo sapiens
accagccatccttcatctcccacctcagggactatatgctctttctctgctgtgaacactgtttgaattccaggattcttttcgccctccatgcctctgtttaaatattacctccttagaaaggttttcttcctgaccacttcatttaactatggtcctcagcccc

SEQ ID NO: 60660 - DNA, 256 bp, Homo sapiens
  misc_feature 233: n = A,T,C or G
actggaaggtggttgggaagtgtatatatatatatttccaaactctttagattttcaaactttgttctcctgaggactttgccacttccagaactgtttcaggagctgctgtgggagaaggaggtcagtgcacgtccactgatgtggtttgaatgtgttctccaaagtttgtgtgttagaaacttaatccctggtgcaatagtgttgggagttggggcctattaggtgattcnggtcttgacgggtctgcccctgt

SEQ ID NO: 60661 - DNA, 287 bp, Homo sapiens
tatgacaaatattactattattatcattagttttctcaaagagacttatggcacccatacaattaaagaaacaacaccttatggtttgatatgtattttgctttggaagttatttaaggtaacagatgattgattcaaagtgtattaaatccctctgagaatgctaaggagtgtgtgtatgtgaggtagtgggtgaaaatgaaagctggcctaggacattgagaaggtaaaggaggtggtatgagatttgtgctgcaacttctatcaaaacgtccctgctctggaga

SEQ ID NO: 60662 - DNA, 237 bp, Homo sapiens
tccaccgcggtggcggaccgaggtactccagcctgggtgacaaagtaagtctcaaaacaaaaaaaaatacactggttcttggccccccttttaaaaggggaaacaatttttttttaaaacccttaaagggggcaaaaacccccttccctttcggctggggggcttttaaaaacccttttttaaaaaaatttttttttcccacctttgaaaaattttaaaacccttttttttttaaaa

SEQ ID NO: 60663 - DNA, 290 bp, Homo sapiens
acaacatttaggtgcccattttagtatatttaaagagtggaaagctgaataatttttacaagtataggaaaaaaaacatgagcttgttactctcctgcttcaagtccttcactagaacaaactgttgagcaaagagtaaacacactcttcctaagccccaacagctccagaaccatcacttgccaacaaactacttgatatagtttggatgggcatcccctctaaatctcatgttgaaatgtgatccccaatgttggaggtggggcctagcgggaggtattggatcactg

SEQ ID NO: 60664 - DNA, 285 bp, Homo sapiens
acaactttccttgtgctagcccttccagagcctgctcttggatctctcatattctctttctactttcttctcctgggggggttaggaggagggtctttacttcctcaggctaaatattaattgtagtcagcttattctcaaatgtgttattctccagtccagtctcctaaatttccagtcctaattttacctgtctattctaggtaaaattctaccacactattctagagtggacaatctagaactataactgaaaacttgaaactcagtatgtctaaaataaaa

SEQ ID NO: 60665 - DNA, 474 bp, Homo sapiens
  misc_feature 324: n = A,T,C or G
acagtggagtggattttctggtaacttgaggattatgtgtgtgacagagggactgaattcatgtgaacaaagacatgggccctggaaaggaaaatagaaagggagagaagaagagcttagtgatgggaggactgtgtgtgtgtaagcatgggggaagacagggaaataaatgataatgatgatggtggtgatgatttttacaagctatcttgaatggtgggtgagaagggggaaaagatggcctagaaaggtatttgagaagccttctgtttacttcattgtataaaacacttgcatcctaacaaaaaaaaaaaaaaaaaaaanggcccccgggcccttttaaaaattggggaccccccgggcggggggaatttaatttaaacttttttaaacccccccccccggggggggggcccggccccccatttttttcccttttaaggggggtaaattgccccctggggaaaaaaaggg

SEQ ID NO: 60666 - DNA, 437 bp, Homo sapiens
  misc_feature 30: n = A,T,C or G
acattttgtttatagcctttttaataacantctgaaacacataataacactgctaattacctactttcagtaatggtagcaaattgcataatatcactgacttgttcagaatgtttaaaatgcaaaggaagtcacctactggtaagatgtcctcggcaaacagctagcacagaaagaaagggatggttatcacacccatgtaaggagttacttcgcaacaaaattaaagaatcatatattttgctcttcagctttgctccttcagatgtgtcagcacaatgtgataaacacaattgaggactccacaggattcagcataacatacaaaagaatctgttactgacatcccagaccccagcatccaagttttagaataaaaacgctcacctctgctaggaagtccactccacatcctggcagggctctcaccagcttca

SEQ ID NO: 60667 - DNA, 306 bp, Homo sapiens
actgaacagaaaggccatcgatgcccttacagagcttacattctactgggaaagacagacaataatcaaaaagctatataagataatgccaggtggccatgatgtgctaagaaaagcaaagcaaggtcaaggaagaaagccagaggtgttattttacgtagagagttcctggagagcctccctactatcctccaaaccagtgtgacaacaaagcagtttcagatgtgagaattcttgtctcttgtcctttttgaagtctgagcaatcttacccacttccacaggttcagttctgacctgtctagag

SEQ ID NO: 60668 - DNA, 325 bp, Homo sapiens
ctccccgcggtggcgagcggccgcccgggcaggtactggacaaccaacagtaattaatttctaacgactgtgtgccgaatgagaatgggaggaaattaacagtatttcttcatgaagtgtgttcttattagctgagatgctttaaatgtagcagattgtatcatttaaatataaataaaatacctgtgctcacctggagaggttaaattactagatcatcatgcttggaaaggtttgatgtagccttgtaagtatatggtatttgaaagccaactagataagggcagacacaaagttagcctccaagtagattggagtgctattg

SEQ ID NO: 60669 - DNA, 348 bp, Homo sapiens
  misc_feature 307, 336: n = A,T,C or G
acactgtatggtaatggctggatctctttggctttgaatgaaaaagctaatatttgttgagaacctactgtatactatatcagatccccccagaaccctgtggaagagtcaatataatttaattttacaaaaacaaagtttgggaggcatcaagttatttgtccaaaatacaacaaatagtccagccatattcagaatatggtagatctgaatacattctttcatccaaaacttccggcttagtcaattgtctgctgctataatagataccacagactgggaaatttatgaagaaaagaaatttatntggcttatggttctggaggatggacagtncaagtcatgaca

SEQ ID NO: 60670 - DNA, 482 bp, Homo sapiens
acacactttcaacaaccaagtcttctgagaagtctatcacgagaactgcaagggggacatcccgcccccatgatgcaatcacattccaccaggcccctcctctaacactggggattacaattcaacatgagatttgggtggggacatagagccaaaccgtatcagaattttctcaaggatcaaataattccctcttctggccctcacggaaaatgaatgaatgctagagcaaaggaaagcactgctttctcaataccaacaggtgttgatggtaattcctgtttcatgcattaaagcaaaatgtggccagagggagaaaagggtccccctaacccccacatcctgccaacctccctgccccagaacacaggtcacgatattcccagtgaaacttaatatcgtgactgccagaatgttactattcagccatttcatgcacagtgccctaggggttgcaatggcatttctaagacactgcaatg

SEQ ID NO: 60671 - DNA, 395 bp, Homo sapiens
acacactttcaacaaccaagtcttctgagaagtctatcatcgagaactgcaagggggacatcgccgcccccatgatgcaatcacattccaccaggcccctcctctaacactggggattacaattcaacatgagatttgggtggggacatacagccaaaccgtatcagaattttctcaaggatcaaataattgcctcttctggccctcacggaaaatgaatgaatgctagagcaaaggaaagcactgctttctcaataccaacaggtgttgatggtaattcctgtttcatgcattaaagcaaaatgtggccagagggagaaaagggtcccgctaacccccacatcctgccaacctccctgccccagtacacaggacacgatgttcccagtgaaact

SEQ ID NO: 60672 - DNA, 200 bp, Homo sapiens
acctgttaaataccaaccaagagtgaccaaaggagtctttgctcttatggcacttacattctagtggtgaaagatagcaggcaaacaggcatgtggtgagatatcaaagaatgatgtgaaagaagaaaacaggaagaggaactgatttaaattgggtggtcaggccacaggagttgtagctcacacctgtgatcccagca

SEQ ID NO: 60673 - DNA, 551 bp, Homo sapiens
actgtgttgtaagagatgcaggttagcagaaccctccacatgagatctgctttaagactgacccaagcctgaaacgctctctccctaagtgatccatgtccctgcagtaataccataaccactaagctaacacactcactgtaaaagtgttgcttctccatgaagcaccaagacttgatgaccatttgcagttctcattaactccactaagaccctaaaggctaaatgacaaccaagcctctgtcactctgcctgagtggatttaccacaaatatcaaatctgttcaatctattataagagctaaaaaggagaagcacatgaaatcacatttcattcttagctcttttatcttcccattttccatttagacattgaatacatgaaccaaagtttagttctctgtattagtcaatttgccaatagctgtcaaccctttaaaagtctttaagatgctacaaggttcccaaagctatacttctagtaatgctacgccttaaaagaaaaaaaaaaaaacctaacctaaagtccctgcccgggcggccgttttaaa

SEQ ID NO: 60674 - DNA, 385 bp, Homo sapiens
actttttttttttttttttttaattttttggcgggcttccctttattttaacccttgaaccttccaaaaatggaatgggtgcctggaaaataattttaaccccaattttttttttggtttttacggggtttctttgaaaaaattaaagggggaaaaatttcccgtttgttcaccccttgatttagggatttccgggggggaaaatttcctttcagcccaataaaattcctaccaaagtttaatttttttccaccctgtttaccttaaacccctttaccctattttgcaaaaataaaattttttaacccccctttgttttttcaaagtttcaaaaatcccttttttttaattttcctaaaattaaaaaataaaatgggggtttttt

SEQ ID NO: 60675 - DNA, 461 bp, Homo sapiens
acatctctaaaagatcacaaatgtcaaatatcacactacactgtgatatggggattccccttgggggttgccatgtgtataaggcgcctgcacctacactaaacatcataaagctaccacactgttcacttcatatttcagctatctataagctctcttgggctcctcctatgttcccatcaatggatagctttgaatctgtaaaaatcgagtcgaatcttctacattttaaatattccatatgctgataaactgatcatccaaatctggataaaattgcatccaaagttatattatacaagctatgggcaaggccaaaatcaagctgctcacaggaccatgtttactctaaccgttctacgatataaaccctcatttccttccagcttctgggaggctgatggcattcctgggccgatggctgcatccctgcaatgtctgcctacatattcacatgacct

SEQ ID NO: 60676 - DNA, 562 bp, Homo sapiens
  misc_feature 466, 530: n = A,T,C or G
acccttcttcattcctgcttgctggaatgctcatttcatggctcaaactcaagttcatatcttgaagcaagtgctagaagtcacatgttaaggctggtgaaataatggtatagaaggagcttgagtctttcagaattgtggagttgccttaacagacctgtctgttatctgtggattttgtttagaatgagagcgagccaaacttttgtttagcactgcttttttaggttttcagttactcatggtggaacataccagtgactgatccactgtccctccccagctgtatctggttcaggagtcagtaaatgatggtctgcaggccaaatctagcccaccacctattatatatacaggaagttttattgaaattcagccaccctcatttgtttatgtgttgtctaggacaatggccgtttttctgctacagcgaagagttgagtagctttatcagagaccacatggnccggcaaaacccgattctttatagaaaatgtttgctgatctctgaggtagtctattcactgatntcatttgtctttctttgaaaatgtctctttta

SEQ ID NO: 60677 - DNA, 250 bp, Homo sapiens
actatgatcattttcagataaatcatcatgcatgttccaaaatgattggccaagttttatttttaagaaacattaatcgtgagtggaaagaaacatgctatggccttttgggagacagtagtgtcttattacagtggaaaagtggtagcgtgggcatcagaaaaacatggggaaggttcagctcacccatgtagctttgtaactttagatcttagttatacataaaataaggggattaagttagaggatc

SEQ ID NO: 60678 - DNA, 297 bp, Homo sapiens
acttgggatggggaccttagcatctcttgttgaacagagcgctttatacacaacagaccaacacgtttggttggatgaatggccatattcaacctcttcagatgccactattcatggcaattgaccattgtccacagcctcatatcagagaatctcaaggttaaaaggtgcttaaaaataatgtagcccaagcatcccttaatgcttcaatctccttcacaaccctgcaccaaacacttatccagcccatgttccaaaacctccaaggcagaacccttcaccctttgcctaccaaaa

SEQ ID NO: 60679 - DNA, 303 bp, Homo sapiens
acttatgccactgaatgtataataaaatggttaaaactgtaaattttgtgttatgcatattctaccacaataaaaaaagtgagtcaataatgatattaagaaaaattccattggtcatctctctgtggaggtgttaaggcaccaagctattgttctgaaaactgctgggggtggggggggggtgaaatcaagcatttatcctgcttttcctgtttatatagtttttttttgaatactccatttaggaaagtgcttaatcaaagaaaattacccaataaataaagaaaaaatgctaggaaaact

SEQ ID NO: 60680 - DNA, 327 bp, Homo sapiens
tccaccgcggtggcgagcggccgcccgggcaggtacccttacaaaaaagacaccataccttatgcgttattaggtggaataatcattccattcagtattatcgttgtaagttaaatccacttttccaagtttataacttttgggcacttggcttaattttctgttactcttttaatgcttaaatgtgtaatcctccaaaaacaatgtatgctttttaaacctttaattgatgctttatttgatcaagagaatctcagctattttaagtggagtcaaaaaataacaatgtgtaattgtaagagccaggcatggtgacatgcctgtagt

SEQ ID NO: 60681 - DNA, 385 bp, Homo sapiens
cgcggtggcggccgaggtacttttttttttttttttttttttttttgtttttttaaaaaaaaaggggttacccctttttacccggggtttttaaaaacctcgggccaaaaagaacccccccctttgggttttaaaaaggcccgggttttaggggggaaccctttggcccggccccttttttaaattttggaaaaaggtttttttgccccaaaccttttttttaaaaaacggggcccttaataaaaaaaaaaaacttttttttaaaaaaaaaccttttttgggttttttccaaaattttttaaaaaaaccttaaaagggttgggggagtttgttttccccttttcggggggaaacagcccccctgggtttaacccgtttaaaaaaa

SEQ ID NO: 60682 - DNA, 383 bp, Homo sapiens
acttttttttttttttttttaaatttttatggacctttctggggggtttcccaaaaagggggatggggcggggccttaggatatttggggaaaaaaggcccccaaataacctttttggccttttttaaaactttggccccaaaaaggccgggtttccaaaaaatggggttaaaattgtcttcccttcctttaaaaaaaaaatttgtttttggggataaaaaaaccaccttgaacccccttccaaaatctcatttttaaacccccgggtgggctgacctaaaaacaggggggccaaaggatttccaaacaaaaaaagggcccccccccccctttttttccgggggaggaacccattttgtccctccccgggcggccgttttaaa

SEQ ID NO: 60683 - DNA, 310 bp, Homo sapiens
actggcttagcagactgaggcaggactgactcaggggaagctgaatgcctgcagtcagataccagagagcctctggacaagaaggggacaagcaagaacacagagtcaggaaggggaaaggaatctgcagggcagtatagcagcgttgagtaaaagcctgtgttaatggagccccaaacacctaggtttgaatcctggttctgctacttactgtgtaatcttgcatatattacttaatctctctgaacctcatactcctcattgataaaatgaagagttacttcatggggctgctgggagaaatgaaatg

SEQ ID NO: 60684 - DNA, 461 bp, Homo sapiens
acgcgggtgttgaattgagcctggaactcctagatgataaacatttttttataccaaccttcaactttttcattaaaattagattgggtagatactataaatagtgtcccaagcactagtggaaagattctaccatgtcttacactggttactatgagtttggagtcagaggtataaggcttgaagaaaaaagcacaatgaaatacaattttatccaccaatctgacatttttaagttttaggaaaattgtgtcttaattcaagctgctataacaacaacaaaaacaacatacactgactggtttaaacaatagaaatttacttctcggagttctggaggctgagagtccaagataaaggtgccagtcaatggttacaggtaaaacctccattccttgtcatgtcctcataaagagacagagagagagaccagacagagagagaaaaaaaaaaaaaaaaaa

SEQ ID NO: 60685 - DNA, 440 bp, Homo sapiens
acccttacaaagaagacaccataccttatgcgttattaggtggaataatcattccattcagtattatcgttgtaagttaaatccacttttccaagtttataacttttgggcacttggcttaattttctgttactcttttaatgcttaaatgtgtaatcctccaaaaacaatgtatgctttttaaacctttaattgatgctttatttgatcaagagaatctcagctattttaagtggagtcaaaaaataacaatgtgtaattgtaagagccaggcatggtgacatgcctgtagtcccagctactcgagaggctgaggctagaggattgcttgagtctcggagttggatactataatatgtgatgatcacatctgtgaatagccattatactccagcccagacaacactgcaacatcccatctcaaaaaaaaaaaaaaaaaa

SEQ ID NO: 60686 - DNA, 328 bp, Homo sapiens
tccaccgcggtggcggccgagtaccgggaacaaaacagaatgtctgtgccttcttggatcatgtgttttagaattatgagaattaaatgaaaataaatattcaatatggtgccagacacatagaggtgcccacagtgtcttatctcactttcttcctgcttgccatatcttttccatcagggccaaagagaatgggaagcgggaagaaataaacttcatatttcatttgtatagctgtggagagtagcaggccctgggtccctttggggaggtcatgcgaactgggcatggccttctgtcaagaattattagaccaggcatggtggct

SEQ ID NO: 60687 - DNA, 266 bp, Homo sapiens
  misc_feature 219: n = A,T,C or G
actgtgttgtaagagatgcaggttagcagaaaccctccacatgagatctgctttaagactgacccaagcctgaaacgctctctccctaagtgatccatgtccctgcagtaataccataaccactaagctaacacactcactgtaaaagtgttgcttctccatgaagcaccaagacttgatgaccatttgcagttctcattaactccactaagaccctanaggctaaatgacaaccaagcctctgtcactctgcctgagtgggatta

SEQ ID NO: 60688 - DNA, 297 bp, Homo sapiens
acgcgggtaaaacccaatgttcttaatatgtagtcttaatatagactctataaatagcccctttgttaatctatcttgaattactcacttttaggtttcagctccctactgagaccccaactggctttaccttctgttccctcctggttctgcttatcttccattgaccctgtggacctgctttctgtcattgccttccctgccctcagtctcaggagcctgagactggcttctagatgggtttggacaatggatagcactggcaggaggagagtagagttgctgtgtttattttcc

SEQ ID NO: 60689 - DNA, 220 bp, Homo sapiens
tccaccgcggtggcggccgagtacccttagcagcattacacgctaccttatgcgtggttaggtggaataatgcttgcattccttattatcgccgtaaattaaatccactttctcaagtatataacttttgggcacctgcctaaattatctgttactctgttaatgcttaaatgtgtaatcctccaaaaacaaagtatgctttttaaacctttaattgatg

SEQ ID NO: 60690 - DNA, 289 bp, Homo sapiens
  misc_feature 13, 45: n = A,T,C or G
tccaccgcggtgngcggccgagtactgtgttgtaagaaaagcagnatagcagaaaccctccacatgagatctgctttaagactgacccagcctgaaacgctctctccctaagtgatccatgtccctgcagtaataccataaccactaagctaacacactcactgtaaaagtgttgcttctccatgaagcaccaagacttgatgaccatttgcagttctcattaactccactaagaccctaaaggctaaatgacaaccaagcctctgtcactctgcctgagtggatttac

SEQ ID NO: 60691 - DNA, 433 bp, Homo sapiens
acccttacaaagaagacaccataccttatgcgttattaggtggaataatcattccattcagtattatcgttgtaagttaaatccacttttccaagtttataacttttgggcacttggcttaattttctgttactcttttaatgcttaaatgtgtaatcctccaaaaacaatgtatgctttttaaacctttaattgatgctttatttgatcaagagaatctcagctattttaagtggagtcaaaaaataacaatgtgtaattgtaagagccaggcatggtgacatgcctgtagtcccagctactcgagaggctgaggctagaggattgcttgagtctcggagttggatactataatatgtgatgatcacatctgtgaatagccattatactccagcccagacaacactgcaacatcccatcttaaaaaaaaaaa

SEQ ID NO: 60692 - DNA, 391 bp, Homo sapiens
  misc_feature 16, 17, 30, 31, 43: n = A,T,C or G
gcggtggggcggccgnncccgggcagggtnnacccagcctggnaaataaactttgatggcagcagataaaagagtttttctgatacaaaagaagctaaattgcaatgagttacaacatattttaatctgtaggaagctttattacacatcaagcaaacagttaaagtattaatacaaaatgcagatataatggtttcttttccattttcaatttacttcaacctgactacaaaatgttcttgttccttatgtaaagtagaactgtaaattctaattagtttcacaggcagaatcatcattccatggagctcaagtagaagaaaggtttcctaaccaagtcttcccaaagcgaactacacttaaacatatcttgatgtttcattaacacatt

SEQ ID NO: 60693 - DNA, 394 bp, Homo sapiens
tccaccgcggtggcggccgacgtgcacaaccactccttggcacacatgtgctactaaaagatggggcagcaatgcatgaagcgtagaactactacgctactgccactcccagcccatctctcagtacaaccgcggacccgtatagtgtaggagtattagatccaacacaagaaaggctccttacccccattcacggcaaacattgccctggctagatgagccctggccggctataacatgactgttgcatcactggttctcctaaaccatcccccctggtacttgaactcccacattgatgtccttttctcttatccgaacctttgggcactctttcatgctgtgtcccttgctaaagacctgggggaaacaaaaagatccttgcaaataatat

SEQ ID NO: 60694 - DNA, 237 bp, Homo sapiens
acttttttttttttttttttttttttcgggggaaaaaaattttttaaattttttaagggggaaaaaggggggtttttggaaaacccaacaggagggtttttgggggattccccggaccctgggggcaaggggttaaggctttgggaaagttttaaagggggtaaacaaaaaaagaaaaaatggcccctggggaaaaaaaaatgggggggggggggggggggaaaactttaatagggg

SEQ ID NO: 60695 - DNA, 549 bp, Homo sapiens
  misc_feature 138: n = A,T,C or G
actttgtttttagcataaatgttgtgcattttatcttagtgtttggatgaaaacatttgtgttgtttagctttcatttgctttgtatatttaataatgtactaatgccacactgagcacagagcctttcaatcagggnaagaattcccaggtctttcagccagagagagaagactagaaaaaataactaatcctttggtgcaaagacatagatgcacatccataagaaaaaaatagtaaacaggcaaccatgatctccccaaacaaaacaagaaaccaataactgacccgaacaagacaatatgtgagtgctctaatcaacaattcaaaatagtaattttaaggaaactcaatgatcttcaagataacacagaaaagcaattcagaaatttatcatggaagtttagcaaagagatggagataataaacaaaatcaaacagacatcttagaactcagaaatacatttgctgaagtgaaaaattcattagtgcctctcaagaagagtatgaatcaaccagagaaaagaatcactgacctcaaggacagtct

SEQ ID NO: 60696 - DNA, 296 bp, Homo sapiens
  misc_feature 283: n = A,T,C or G
accagtccatggcctgttaggaactgggccacatagctggaggggagtaggcatttccacctgagcctccacctcctgtcgtgtcagcagcaccattagatcctcagaggagcatgaaccctactgtgaactgtgcatgagaagaatctaggttgtgtgttccttacaaatctgatgcctggtgatctgagatggaacagtttcatgcccaaaccatctcccaacctccattcgtggaaaaaactgtcttccacaaaacaggtctctgatgccaaaaaagttngggattgctgctt

SEQ ID NO: 60697 - DNA, 268 bp, Homo sapiens
cgcggtggcggccgagtacttttttttttttttttttttttttgaaaaattttttttttaaagaggggaatattgttggaattccccttttagcccccatttttttggggaaaaatgggggggttttttttttcccccccccccttttttttttcccctttttaattttggggattttttttttttggggggatttttttcccccttattaaaatttaactttaagggggggttttgggccttttatgggggggaaaaaaggggattt

SEQ ID NO: 60698 - DNA, 261 bp, Homo sapiens
aactgttttttttaaaattttaaaggggaaaattttggaataaaattggggaaaaccaacaaaatttcccccaaagggggtttttcccctttccaaaaattttaaaaaaatggggatttgggattccccggaaaaaagccccccctttaaaaaaatttttttggctttccaaaaggttaaaaacaaaaaaggggcccaggggccttaaaaatagggggtgccaaaaaaaaaaaaaaaaaaggcccccaaaaaatttccccc

SEQ ID NO: 60699 - DNA, 460 bp, Homo sapiens
  misc_feature 169, 170, 171, 172, 173, 174, 175, 176, 177, 178, 179, 180,181, 182, 183, 184, 185, 186, 187, 188, 189, 190, 191, 192,193, 194, 195, 196, 197, 198, 199, 200, 201, 202, 203, 204,205, 206, 207, 208, 209, 210, 211, 212, 213, 214, 215: n = A,T,C or G
  misc_feature 216, 217, 218, 219, 220, 221, 222, 223, 224, 225, 226, 227,228, 229, 230, 231, 232, 233, 234, 235, 236, 237, 238, 239,240, 241, 242, 243, 244, 245, 246, 247, 248, 249, 250, 251,252, 253, 254, 255, 256, 257, 258, 259, 260, 261, 262: n = A,T,C or G
  misc_feature 263, 264, 265, 266, 267, 268, 269, 270, 271, 272, 273, 274,275, 276, 277, 278, 279, 280, 281, 282, 283, 284, 285, 286,287, 288, 289, 290, 291, 292, 293, 294, 295, 296, 297, 298,299, 300, 301, 302, 303, 304, 305, 306, 307, 308, 309: n = A,T,C or G
  misc_feature 310, 311, 312, 313, 314, 315, 316, 317: n = A,T,C or G
cgtgctggttatcgctatttaggaggacgcttggtacctcttgagcttttctcttgctctgagccagtatataaacggatcaggctttctcttatccacatcatggttgtctaaatataagccaatgtagaggtaggtgttggaggcctggaggttctcttagctctannnnnnnnnnnnnnnnnnnnnnnnnnnnnnnnnnnnnnnnnnnnnnnnnnnnnnnnnnnnnnnnnnnnnnnnnnnnnnnnnnnnnnnnnnnnnnnnnnnnnnnnnnnnnnnnnnnnnnnnnnnnnnnnnnnnnnnnnnnnnnnnnnnnnaactgaattgagggtggaattcttagaaccaaagttattcttaataaaaatcaccacatgcttggaccatgaaaaaaaaaaaaataaaaaaaaaaaaaaaaaaaaaaaaataaaaaaaactcacaacaaaaaaaaaaaaaaaa

SEQ ID NO: 60700 - DNA, 527 bp, Homo sapiens
acgcgggtagactgggtggcttaaacaacaaacatttatttctcactgtcttagaggctgggaagtccaagatcaaggtgccagctgactgagttcctgataagggcccactccctgacttccaggtagttgtcattgtgtcttcacgtggtgaacagagagagagagagagagagatcttcctcttcatataaggccactaatcctataagccccactcttgagacctcattaactttaattacctcctaaaagctgtatttccaaagtcagtcatgttggaagttagggcttcaacatgtgaatttttgggaaacacaattcagtctatagcacatacatataatttttttgttttactatgaaaggctaaacttttatgtctccagctgttagtgtctagcattttaatgtgacagaatgtgtttagagaataagaggataaaataaggggggaaggaacaaagacacacacaacaaaatttatttaacgatgtctaattatagtaagaaaaactttcctcctt

SEQ ID NO: 60701 - DNA, 380 bp, Homo sapiens
  misc_feature 262: n = A,T,C or G
acgggaatgagcctctttgatctcttccggggctttttcggctttcctggacctcggagccacagagatcccttttttggagggatgactcgagatgaagatgatgatgaggaagaagaagaagggggctcatggggccgtggaacccaaggttccatagccctcagcacccccctgaggaatttggcttcggcttcagcttcagcccaggaggagggatacgtttccacgataacttcggctttgatgacctagtactttnttttttttttttttttttttccaatttaaattttttttttaaaaaaaccaaatgggggggccccccaaaaaccttttttttgggggggcccataaaaccaaatttaaccccccatttt

SEQ ID NO: 60702 - DNA, 400 bp, Homo sapiens
acccatgatattaacctatttaactactgttcattgcgtaaagtatgttgtcccaattttcagctgttttaaggaattataaaacattgagatctactaggaagagggaaagcctacttctaagtgatgccactagtacacatctctctcagccgcagaaatgaagacatctttcaccagccgcatggctctgtccaaggacagcggaacatgctccacattctgcatgttcttaaaaccaacctggttgtcaagcaggggctgtagcatggcacttgctgagcctccagccttgaaggagtctctctggtaagactctactggatcaaagctgtatacagccccctttccttcttcatcaagtccaccgatgatgttgtaaacatagtatggaaagaac

SEQ ID NO: 60703 - DNA, 590 bp, Homo sapiens
accgcaaaaggtcttacaataaaaacaaaaataaatttcctgaaccggtataaaacaacatataagccatcccagagcaacttgtgttttccaaaaaaagaaagaaagaaacaacatcaaactagattcctttcatctatgattgacacattaaatgtttacgcatgaagagaatctggaattttacccttcattagaagttattgttaaatgttgaaaggaatcaaccactttttataacggactctgtgatcaataatgctaaaaaagagacagagaaatgatttaatcaatgactgtcactcatgactcagacataacttcgtgtatttccagaagttaaaaaatttaaatcaattctgaactaattttgtttcaagaaattcttgttgctctttaagagaatacgaggcatactggttcccaaagccaagacttgggaatcactgatttgggagtatgacttaccaccacatgctgatccatacatggtgggcccaataaatgtttcaaggcaaaggagtaatcatcccgctaaggaaaagaccagcttccctgagccctatttcacatggagcaggccaagaata

SEQ ID NO: 60704 - DNA, 521 bp, Homo sapiens
acttttttttttttttttttttttttttttatattttttttttttttttttttttttttttttttttttttcccaaaaaaaaattttttttccctttcccccccgggttttggaaaaaaaaaaaaaaccccccctttgggggggggggggggtttcccccccccccctttttttttgggggggccccccaaaaaaccccggggcaaaaaaagtttttttcccccccgaaaaaaccccccctaaaaaaaaatcccccccccccccccccccccccccccccctttggggggggggggggggcccccccccccctttttaaaaccccccccccccccccaaaaaaaaggccccccccaaaaacccaaaaaggggggggccccgggcccaaccccccggggaaaaaaaacaaagggggcgcgtttttttttttttcccccccccccggggttttttgggggggggggggggcccccccccccttttaaaagggttttttttttccccaaaaaaaaacccccccc

SEQ ID NO: 60705 - DNA, 563 bp, Homo sapiens
  misc_feature 313, 314, 315, 316, 317, 318, 319, 320, 321, 322, 323, 324,325, 326, 327, 328, 329, 330, 331, 332, 333, 334, 335, 336,337, 338, 339, 340, 341, 342, 343, 344, 345, 346, 347, 348,349, 350, 351, 352, 353, 354, 355, 356, 357, 358, 359: n = A,T,C or G
  misc_feature 360, 361, 362, 363, 364, 365, 366, 367, 368, 369, 370, 371,372, 373, 374, 375, 376, 377, 378, 379, 380, 381, 382, 383,384, 385, 386, 387, 388, 389, 390, 391, 392, 393, 394, 395,396, 397, 398, 399, 400, 401, 402, 403, 404, 405, 406: n = A,T,C or G
  misc_feature 407, 408, 409, 410, 411, 412, 413, 414, 415, 416, 417, 418,419, 420, 421, 422, 423, 424, 425, 426, 427, 428, 429, 430,431, 432, 433, 434, 435, 436, 437, 438, 439, 440, 441, 442,443, 444, 445, 446, 447, 448, 449, 450, 451, 452, 453: n = A,T,C or G
  misc_feature 454, 455, 456, 457, 458, 459, 460, 470, 472: n = A,T,C or G
tccaccgcggtggcggccgctacctcaccgtgcgcttgctgtgctgtccgatggtgcggtattgtaccatagaaaagtaggcttcgcatgtatgcatcatgctctaacgtagcagtaacaagaaacagcattctacttttgtggcaatgagatccccaacaatgtcaagacagccgtatgtgacatcccacctcggggcctcaagatggcagtcaccttcattggcaatatcacagtcatccaggagctcttcaagcgcatctcggagcagttcactgccatgttccgccggaaggcgcttcctccactggtnnnnnnnnnnnnnnnnnnnnnnnnnnnnnnnnnnnnnnnnnnnnnnnnnnnnnnnnnnnnnnnnnnnnnnnnnnnnnnnnnnnnnnnnnnnnnnnnnnnnnnnnnnnnnnnnnnnnnnnnnnnnnnnnnnnnnnnnnnnnnnnnnnnnactacttttnanccctggaccccacaatctagggtgggaacaaggaaggaaagatgtgaataggctgatgggcaaaaaccaatttacccatcagttccagcct

SEQ ID NO: 60706 - DNA, 290 bp, Homo sapiens
accaactaatacatccacaaatgcacaaacttcatcaactagtagaaatgatttaaatatttgaatctaattcaatcttatagagtctgagaatttataagaagattttttttaattttgtgttttcatttctgataactaaaaataaattctgctgggtgcagtggctcatacctgtaatcccagcactttggtttcttatgtgtaggagaggataagtttctttctcagagtgtgctgcagccagacataatatttctccttggcagaaactctgctgttccaatcat

SEQ ID NO: 60707 - DNA, 504 bp, Homo sapiens
acctgttataaaatttgaatttgatggtattgaaattgatctagtctttgcaagactggcaatacaaaccatatcagataatttagatctaagagacgactctcgcctgagaagccttgatataaggtgtattcgcagcttaaatggttgtagagttactgatgaaattttgcatttagtgccaaataaagaaacttttagactcaccctaagagctgtcaaattatgggcaaaacgacgtggtatttattccaacatgctaggattccttggtggtgtctcctgggcaatgctagttgcaagaacttgccaattgtatccaaatgcagcagcatctactttagttcataagttctttttagttttttccaagtgggaatggccaaatcctgtgctgctgaagcaaccagaagaaagcaatttgaatttgcctgtctgggatcctcgggtaaatccatcagataggtatcatctcatgcccataatcacccctgcctacccaca

SEQ ID NO: 60708 - DNA, 345 bp, Homo sapiens
actttttttttttttttttttttttttttttttttttttttttttaaaacccccccttatttggggggaacctccaaaaattttcaaccccctttttaaaaatcccctttttgggggggggttttaaaacaaaaaaattttttggattaaaaaaaaaatttttttgggggggaaaaaccaatttggggaaaatgtgcccccatttttccctaaaaccccggaaaaactttggttccccctttctctgggcgtttttaaaaagaggatccccccggccccggaaaatttattttaaattttttttaccccccccccccgggggggggccccccccccccttttttt

SEQ ID NO: 60709 - DNA, 406 bp, Homo sapiens
gttctgtcatgagttgcctcatgaattaggtgactttgctgttctactaaaggctggcatgaccgttaagcaggctgtcctttataatgcattgtcagccatgctggcgtatcttggaatggcaacaggaattttcattggtcattatgctgaaaatgtttctatgtggatatttgcacttactgctggcttattcatgtatgttgctctggttgatatggtactcgggttgattccattccattccattccaatccatgccattccactcgtgttgattccattctttccattccattcaagttgtatccattccattgcattccattccattcgattccattcgattgcactcgggttgattccatggcattgcattccattccattccattccattcctttcc

SEQ ID NO: 60710 - DNA, 340 bp, Homo sapiens
  misc_feature 67, 68, 69, 70, 71, 72, 73, 74, 75, 76, 77, 78, 79, 80, 81,82, 83, 84, 85, 86, 87, 88, 89, 90, 91, 92, 93, 94, 95,96, 97, 98, 99, 100, 101, 102, 103, 104, 105, 106, 107,108, 109, 110, 111, 112, 113, 114, 115, 116, 117, 118, 119: n = A,T,C or G
  misc_feature 120, 121, 122, 123, 124, 125, 126, 127: n = A,T,C or G
aacttattttttttttttttttatttttataaaaaacttatctatacaaaaaacctctttggggccnnnnnnnnnnnnnnnnnnnnnnnnnnnnnnnnnnnnnnnnnnnnnnnnnnnnnnnnnnnnngggtggcttttttctggaaaactaacctccccccccctttttttcccaactggggggcggttttttggggaaaatttaccccccccaagggcccaatttttcctttttggggccaaaatgaaaaaaaaaccccccccccaaaaaaatttttcccccattttaaattgggggggggaaaaaaaaaacccccccccttctttggggggggccccc

SEQ ID NO: 60711 - DNA, 605 bp, Homo sapiens
  misc_feature 1, 511: n = A,T,C or G
ncctccaccgcggtggcggccgagtacgatgtttcactttggtctgaataacaccatctttttcaaactgtatcatatcattaagtgggtcccatggtcgggtatctgcaaacttgtaatgccattctcctgtgagtggatcaagtagaaataatttgcaagaccactcttcattttttgttttccgatccctggcagcttgtctttgagcttcttccaaaacatacttctcttgggtagcttcagtttggtctttggcatttatggctcgagttacccgttgccagagtttctctgattcaaaatctccctgttcttcaaattttacagtgtgccttattaatctccattgcttaatgtcaggtgttggattccagaaaacctctgaattatcagtctttttatcagtaataaaaacttcactatcccaatgaccttccaaagtagctaggacttcttttcccagtttaagtttccctgatatttgattaacacagtcactactccctangaatggctaatggcaggttatacattttaaagaatctctttccacttagtcaaataagatagaaattgaaatgtaaaccttactgatttctgtg

SEQ ID NO: 60712 - DNA, 642 bp, Homo sapiens
  misc_feature 497, 498, 499, 500, 501, 502, 503, 504, 505, 506, 507, 508,509, 510, 511, 512, 513, 514, 515, 516, 517, 518, 519, 520,521, 522, 523, 524, 525, 526, 527, 528, 529, 530, 531, 532,542, 543, 564, 571, 575, 584, 585, 588, 610, 611, 612: n = A,T,C or G
  misc_feature 613, 614, 615, 616, 618, 619, 620, 621, 622, 628, 629, 632: n = A,T,C or G
gggccggagaggggctgaccgggttggttttgatctgataaatgcacgcatcccccccgcgaagggggtcagcgcccgtcggcatgtattagctctagaattaccacagttatccaagtaggagcccgcgtacctcggccgcccgggcaggtacaatgtagaactctgtccaacactaatttattttgtcttgagttttactacaagatgagactatggatcccgcatgcctgaattcactaaagccaagggtctgtaagccatgctgctcttccgagacttccattcctttctgattgacacacgtgcagctcatgacaatctgtaggataacaatcagtgtggatttccactcttttcagtccttcatgttaaagatttagacaccacatacaactggtaaaggacgttttcttgagagttttaactatatgtaaacattgtataatgatatggaataaaatgcacattttaggacattttctaaaaaaaaaaannnnnnnnnnnnnnnnnnnnnnnnnnnnnnnnnnnnaagggggggnnaaaaaaaaaaaaaaaaaaaanccccccncccnaaaaaaaannggncccccccgggggggggggggannnnnnnannnnntttttnnccncccccccccc

SEQ ID NO: 60713 - DNA, 195 bp, Homo sapiens
  misc_feature 1, 25, 41, 130, 141, 182: n = A,T,C or G
naactccaccgcggtggcggccgangtactgctatcagtcnaggcttttggttacatgcaggagaaaccaactctggctatcttaaggagaaaaagaatttagttggaggttgaagaatccacaggacantggagaataantcttggaaaatggacaaagacctaagggaactaggtgatangaaggactagccg

SEQ ID NO: 60714 - DNA, 224 bp, Homo sapiens
  misc_feature 14, 20, 26, 32, 38, 50, 56, 67, 78, 84, 112, 137, 138, 139,153, 169, 174, 195, 196, 200: n = A,T,C or G
tcaggtacaatggnaatggnaatggnaatggnaatggnaatgggaatggnaatggnaatgatacggnaatagaatggnaatggnaacgaaatgggaatgggaatggaatggnaatggaatggaatggaatggaatcnnntcctaatgggaatnggaacggaatggtatncgaanggaatggaatggaatggcatnnaccngaatggaatggaatggaatggaat

SEQ ID NO: 60715 - DNA, 540 bp, Homo sapiens
acaatgctagaagctagaacttacagaacaataccttcaaaattgtatagaaaaatcatttgcaacatataactttatatccagccaaacagtcaatcaaatatgaggcatgacatgtaagttctccctccaaattaaccatcaatgcattctttcgggaaactactggatgatgaattccactataacagataaaaaccaagaaaggagatgctgtgcatcccaagaaacgagagatctaatacagcagagaggagcaacagctttccaggatagcaacaactcaaagccagaggatgtcagctctgcagaaatccaatgcatgctggagcaaaatgacagacagtaatttgagagaggaaaacagttcctcctgaggatttcagagaagagctggacttcctggctgactctcacattctcttcttctgaactgcttcttctggtagctccctgtcactttggacaagctcgcactgccctccttggctgttctggaactgtgtgatggacttcatcctactaggacacagttgcttc

SEQ ID NO: 60716 - DNA, 249 bp, Homo sapiens
  misc_feature 25, 30, 31, 36, 46, 57, 70, 86, 87, 136, 137, 144, 172, 177,204, 217, 225, 240: n = A,T,C or G
actccgcccggggttggggtcccgngggcnncggcnccccgggggntcccggggttnaccccccaatttnaaaaaaaaaccccagnnaattggcaccccccttttgggccccaggggggacgccccattccaaaannattttgnaaccttttttggtgggaattcccccttnaaaanaaaaaccttttccccctttttgggggnggaaccaaaaggnattaccgnaaaaattccccaaangggtgggaa

SEQ ID NO: 60717 - DNA, 297 bp, Homo sapiens
  misc_feature 79, 113, 122: n = A,T,C or G
acctaaaatattccaaagtagctgagaaatgttgcagataagaatgaagaaccctcaagcaatcatattccacatgggnaaagaacaaatcaaaagaggtggtgatgcagggnatgcctggnaatagaagagaatgacctagcaaaagttgatgatcttccccctgctttaaggaagcctcctatttcagtttctcaacatgaaagtcatcaagcaatctcccatcttccaactggacaacctctctccccaaatatgcctccagattcacacataaaccacaatggaaaccccggt

SEQ ID NO: 60718 - DNA, 292 bp, Homo sapiens
acagaacttggtcataatatcttgcattttatagatttattaaagattagtttcaagttcacattcgctattcagttgtaaaccgaatggatgggaggggagaaaatacaagctctccacacaggtatgctcctctcttttctgagagagaaggcatgggattttcagcataaattccatgttatgtgagtgctgtttgagttctgaagttcctatcaatatctgttcctgcaagtgatctctgtaagaccaccttacatgctggtcttagttattgttaaaattgcaaggt

SEQ ID NO: 60719 - DNA, 483 bp, Homo sapiens
acttttttttttttttttttttttttaaggggggggggggggaccctaaacccctttttaaaggggggggggttttaggcccccctgggggggaaaaatttttcccccttttacaagggtttttcctaagggccaaaaaaacggtcccttttgggccaaacggtaaatttcccagggggtttaagggggttttggggccaatttaaaggggaaccaaaatttttttttggaaaacccctttttccccgggccgggggggttggcccccccccccaaaaaaccccccccttttttgcccaaaaaaggggggggcctttttaaccttttttaaggaccccccctgggttgggggggttaaactttggccccccctgaaaaagttttttcgggtaaatccttttcccaaagggttggggggaaacccccgccaaattaagccggggaaaaaattttaaattttccccggggggaccctcccggggg

SEQ ID NO: 60720 - DNA, 265 bp, Homo sapiens
  misc_feature 14, 32, 50, 56, 74, 80, 91, 97, 103, 113, 131, 137, 175, 202: n = A,T,C or G
gcaatggaaatggnaatgccaatggcaatggnaatcatcccgttaatggnaatggnaaaggaaatggaaatggnaatggnaatggaatggnaatggnaatggnaattcaactncgattgcagtcgaaaggnaatggnaatggaattaacccgaatagaatggaatggaatggtantggtaacgggaacggaacggtaatggnaatggaatggtaatggaaatggaacggaatggaatggaatggaatggaatggaatggaatgga

SEQ ID NO: 60721 - DNA, 601 bp, Homo sapiens
  misc_feature 511, 541, 557: n = A,T,C or G
acaattaagaaaacaagagtagtgttttcaattgataatctatactcacaacaaatactctgataggtgaatactgctgaacagtttatgtagtgacttttgttgtaggggtgggtttagagttctttttatgtaggtttttaaatgattttattttgaactgaatctccatttgcacagcacagcagacacacaagaactacagcgcattaaaaacagcatgtgtgctggcgggggcctggctttctcattagaaaaaaatatgtttgacaggttatgaagggtaaaacaaaaataattgcaagaactaccgtgcccttctgaccccatgggggccttccctatcccatgattccattttggggagtagaggtaggggagggggcagcagttacaagtgctttgagctgtcaactcacattttactttggcctggttgggcaagaaaggagagacaaacttccctagtcaggtatctaggaagaagcctcactactggtttctgtttaangtctctgggggtaggctcttggagcccacnagaagaaataagatgnggggtaggaataggggaatccttggcccctatccccttttggaa

SEQ ID NO: 60722 - DNA, 422 bp, Homo sapiens
acaggaaagggttaaatcagcaagttatgttggttcaaaccttacatattcccagaaaatgctagtattcaggattggcacttgactggctcctgggaggtgaactttgagctctgggaatattctgcctgataagaagtgtgggactatgtagttccagtttgatcagatagtttatgctgacgtgcattttatggtgaacacatgtttttgctgtggaagactggagtctgagtagctgcagttaggtagaaactgcatacctggatgcatgactcccaataagaaccctggacatccacgtttgaatgagctttcctagctgacagaacattgcctgtgttgccaccacatcactgctgggagaattaagcatgttcatatagctcttggaatttacccttgtgtcttttttttttttt

SEQ ID NO: 60723 - DNA, 532 bp, Homo sapiens
  misc_feature 491, 506: n = A,T,C or G
tcaggtaccagccactgcgaaatcatgccaaaatgtaaagaccatggagactaggaagaaactgcatcaactgacgagcaaaatcaccagctaacatcatagtgacaggatcaaattcacacatagcaatattaactttaaatgtaaatggactaaatgctccaattaaaagacacagactggcaaattggataaagagtcaagacccatcagtgtgctgtattcaggaaacccatctcacgtgcagagacacacataggctcaaaataaaaggatggaggaagatctaccaagcaaatggaaaacacaaaaaggcaggggttgcaatcctagtctctgataaaacatgtctttctttacatggtggcagcaaggagaatagtgagcaaaaggggagaaaggccctcataaaaccatcagatctcattagaactcactcactaccacgagaacagcatggaggtaactgccccattgattcaattaccctnccaccaggtcccctnccatgacacatggggacaatggggaa

SEQ ID NO: 60724 - DNA, 460 bp, Homo sapiens
actttttttttttttttttttttttttttttagtttaaaaaaaaaaccttttattttttcccccccttaaaaggggggggcccgggtttggtttaaaaaaattggggggggggggtaaaaaaaagggggggggaaccccggggggtttttttgggcaaaaaaaaatattaagggttcttttttaaaaaaacagggcccccctttaagggggggggggggaaaaaatttttttgggggaaatttaaaaaacccgtggggggggggaaaaaaccgggttgtaaaaaaaaacttggggggggggaaaaaaccccggttccttgggccttttaaaaaaaagggaacccccgggcgggggaaattttatttaaaatttttttaacccccccaccctgggggggggccccgacccccattttttttccctttaaaggggggaaaatgcccccctgggaaaaaaaag

SEQ ID NO: 60725 - DNA, 493 bp, Homo sapiens
tccaccgcggtggcggccgttcatcatcagaattagccttttcctcctcagatagctgttgtctctcatcatcggaaagctgaggcctctcctcatcatctgtgttctgcattttctcatcatcgtcagaattctgcagcttatcttcatcagatccttgtgccctctcctcatcatcagaattttgtatcttttcatcatctgactggtcacttttatcttctctgccccatttttcatcatctgaatgtgctttttcagaaccttctgcttctgaatgatggctccctccatccgatctatgaccttcgtcttcatcatcattaggggcttctgatccactgtgctgatctacatctgaggggtcattgtcctcatggtcagaacgctcagaagcttctgatctattgtctgatctttcagagtgattatcactaccactatgatgtgaagctccctcgtcctcactgtcatctccaaacagttcccgcgt

SEQ ID NO: 60726 - DNA, 524 bp, Homo sapiens
acttttttttttttttttttttttttttttttttttttttttttttttttttttttttttttttaaaaaaaaaaaaaaaataaaatgggggggaaaaaaaaaaaacaaaaaaaccccccccccccccttttttttaaaaaaaaaaaaaaaaaaaaaaaaaattttaaaaaaaaaagggttttttttttaaaaaaaaaaaccaaaaaccccgggaaaatttttttaaaaaacccccccccaatttaaaaaaaaatttttaaagggggaaattttttcccccccccaaaattttaaaaaaacttttggggggaaaaaaaaaaaaaaccccccccccccccaaggggggggggggaaaaaaaaaatttttcccccccccccttaaaagcccccccccctaaaaaatatttggggggaaaccccccaaaaaaaataaaagagggggggccccccccaaaaaaaaaaaaaaaaaaaaaaaaggcggcgggaaaaaaaaaaaaccccccccttttgggggagaggggggg

SEQ ID NO: 60727 - DNA, 701 bp, Homo sapiens
  misc_feature 275, 317, 529, 538, 551, 597, 598, 600, 605, 612, 638, 646,662, 666, 686: n = A,T,C or G
acgcgggagaaattgggaaagtaattactttgggatgcccctccaggatctggttacagctgagaagcccataccactatttgttgagaaatgtgtggaatttattgaagatacaggcaacctaatgaggcctctcttgaattatggtattgcttgtatgtctatgggctttctggttgaagaaagtgaaccagtagtttggagaggccttatggtaatgtcggccattgagaaattgttgaggcaggtagattggggtcaactggactacttanttgtagacatgccaccaggaactggagatgcgcagttatcantctcacagactattcctataacaggtgctgtgattgtctccacgccccaggacatcgcattgatggatgcacacaagggtgctgagatgtttcgcaagagtccacgtgcccgtccttggccttgtccaaaacatgagtgttttccagtgtccaaaatgtaaacacaaaaactcatatttttggtgctgatggtgcaagggaaactagcacangaccccttnggtcttgaagttntagggagacatttcccttacaccttaatataaagggggaagccttnnanatacngggccancccaattgtggtttttcacaaccctngaaaattngaatgaaggcccaaancttncctttgagggaattgctttngtggaaaattggtta

SEQ ID NO: 60728 - DNA, 339 bp, Homo sapiens
  misc_feature 34: n = A,T,C or G
ctccccgcggtggcggccgaggtacgcgggtagnacaacccaagtcattaagccatgagagtggaatgaatctatgaaaactcaatgaagacagaacaagagaaaaatcttttcagccacgatgaattaggagaacaagatgtcaaattacactgatgttgagtcaagcttctcaaagcaagagataatcaggctgacctattgctgaggactatgagaaaaaagttattacagaatgagtcatatggaaaacacttgcaaacagaagaatattgagaacataagttgccatggagaaaattccagtgtcagcattcttgctccttgtggccctctcct

SEQ ID NO: 60729 - DNA, 408 bp, Homo sapiens
tccaccgcggtggcggccgatgaacatgtgtcactgggcatgcggtgcctcctttactgctgatgctacaaggtgatgtttttggtctactggcggaggcaaaatttgcctaggtcctttaacttcctttgaccttgacttatgagcatgcctgtgttgcgtctaccgtaacggtgatggttacctgtgagagaagactgaattttgggcttataatcgtggcttcaaactattactcaggcacacgcttgtacagctgacaatgtcactatgtgcctaaaactcacgttagatttcttctacggagatttaccggtcctacggcgtgcgaggacctaaataaccactgatggatccaacaacctatagcatgtgggcactgactctatgcataacattggctagatg

SEQ ID NO: 60730 - DNA, 255 bp, Homo sapiens
tccaccgcggtggcggccgccgcggccaagtcccgatacgccctcatttccaccttttggggagcaacagccaggtattgcaatgctcttcttctgatattggcaggtcaatgcctgcagcatgtagatatccgacgcccatcggaaggaatccctgggttagatagcccttccatccaaggcctgagcactctccagttgagaacccagaacaactatcgggacggcacagcaaaaaatacctcaaagaatggc

SEQ ID NO: 60731 - DNA, 193 bp, Homo sapiens
ataatttaataacatcgtccttccatttggccgcgactgctctggaaaattggttcagtagtaaacagaattctagcaggtggaacaagaacaggcgaggcatcctgggcctggtctctcctggaggtctgggtgttgcagcctttcaggactgcggctgctgtggcctacacacctgggcctgtccccgcgt

SEQ ID NO: 60732 - DNA, 443 bp, Homo sapiens
  misc_feature 220, 223, 226, 227, 231, 232, 233, 234, 237, 243, 244, 249,253, 254, 258, 259, 270, 272, 280, 283, 288, 289, 291, 293,294, 295, 296, 297, 298, 301, 307, 311, 312, 319, 321, 322,323, 324, 325, 329, 335, 336, 337, 351, 359, 364, 373: n = A,T,C or G
  misc_feature 374, 375, 376, 380, 381, 382, 383, 386, 392, 393, 395, 398,399, 400, 401, 413, 414, 415, 416, 427, 428, 430, 436: n = A,T,C or G
acaaaagaaggtttccaaactgctcaatgaaaacaaaggttcaacactgtgagaataatactcatatcacagagaagattttcagaaagcttctgtttagtttttaagtgaaaatatttcctttttcaccataggcctcaaagcactccaaatatccttttgcaaaccctacaaaaagagagtttccaaactgttcaaaaaaaaaaaaaaaaaaaaaaanggnccnngggnnnnaantttttnnggggncccnngggnnttttttttttnangggttttnaanttttnntngnnnnnnaanaaaaangggnnttttttnannnnngggngggggnnnattttaaaaaaaancccccccnttttngggggggannnngggnnnnaantttttnntnggnnnnggggaaaaaaannnntttcccccttnntncccccnttttttt

SEQ ID NO: 60733 - DNA, 352 bp, Homo sapiens
  misc_feature 173: n = A,T,C or G
acatgggcaatgctggacgtaaagaaagaagtgatgcactcaattctgcaatagataaaatgaccaagaagaccaggaacttgcgtagacagctccgcaaagctgtcatggaccacgtttcagattctttcctggaaaccaatgttccacttttggtattgattgaagctgcnaaaaaaaaaaaaaaaaaaaaaaattttccccccggggggggcttttaaaaaatgggggccccccggggcgggggaaatttattttaactttttttaaccccccccccctggggggggggcccggccccccttttttttcccttttagggggggttaatgcccccctggggaaaaaaggg

SEQ ID NO: 60734 - DNA, 194 bp, Homo sapiens
acttttttttttttttttttttttttttaaattttttttttttttttttttttttttttaaaaaaaaaatggggcccccgggggttttttaaaaaccccttgggggggggaaaaccccccttttttttaaaaaaaataaaaaaaaccgggtttccaaaaaaggggggggggggggggccccactaaaacccccc

SEQ ID NO: 60735 - DNA, 407 bp, Homo sapiens
ccaccgcggtggcggccgagtacttttttttttttttttttttttttttttttttttttttttttttttttttttttttttttttttaaaaaaaaagggaaaaaaaagggaaaaaacgaaaaggggggggggccccccccacccccaaaaggccccaaggccggccttttccccccccccccccacaggggaaaggccctttaccccccacccctggaaatgggcgggggcccccccaaaaaaaataaaaaaaaccccggggcaggaaaaaaaaaaaaaacccccggaaaccaaaaaaaaacaaaaagggggccccccccccccctctctggggggggggaggggggaaaaaatccccccccgcaaaaaaaaaaaaaaaaaccgccccccggaaaaaaaaaaaaaaa

SEQ ID NO: 60736 - DNA, 297 bp, Homo sapiens
  misc_feature 5, 19, 27, 52, 87, 92, 99, 102, 140: n = A,T,C or G
ggggnagaattcacaaggnccaacagnacaacccaaagtcattaagccatgnagaagtggaatgaatctatgaaaactcaatgaagnacagnaacaagnagnaaaaatcttttcagccacgatgaattaggagaacaagnatgtcaaattacactgatgctgagtcaagcttctcaaagcaagagataatcaggctgacctattgctgaggactatgagaaaaaagttattacagaatgagtcatatggaaaacacttgcaaacagaagaatattgagaacataagttgccatggag

SEQ ID NO: 60737 - DNA, 732 bp, Homo sapiens
  misc_feature 12, 54, 628, 653, 665, 677: n = A,T,C or G
ctccaccgcggnggcggccgaggtacatactgtaaacaagactgcattaatatngttttcttatgatttgtttcaatgactctagattttaaaaaatacattcacaaactaccttatgtttaaacacaatgattcccttttatttcttaactgtacccaaaatcccacaataaaaaaatcatttaaagctgtgtgtttcaaacttatcacttagaaataaaaacaaaacaaaacataaaaacaaagatcagtttgcaacataatttaaagaagcttctggtttaaaataccacagcagcaatataaagagctggtggcaatcacattcgggagtgaaatcgaaatcaatatattttgtccacatcagcatccaattacagtagttgttaaattcaatccaaaaagttattgctgaatttgtggcatggaatttgagaagatagtattgttcagcagcacaaccacaggcagtaaaaatgagaacaggaggatttcattgcttttgagagctaaagggaccatgaggaggatatcttgctgattgcctgaagataatcctcagttacattccctggcatattaccctgctttaaataaatgccaaatgacaaccccccttttcaagganggggcataattaatggtaatcccanaaacctagaaangttttccccttntttttttccccatcttggcccaaaaccccttagaattggaaaatgggctcccttt

SEQ ID NO: 60738 - DNA, 610 bp, Homo sapiens
actctaatggaatcatcgaatggactcgaatggaatcatcgttgaatggaatataatggaatcatcgaatgcaatcgaatggaatcatcgaatggactcgaatggaatcatcatagaatggaattgaaaggaatcatcaaatggacttgaatgaaatcattgaatggactcaaaaggaatcatcatcgaatggtattgaatggaatcgctgagtttactctaaggggataatcattgaatggaattgaatgcaatcattgaatggaatagaacggaatcatcattgaatggaatcaaatggaatcctcaatgaatggaatcgaatggaatcatcatcgaatggaattgaacggaaacatcagcgaatggaatcgaaaggaatcatcatggaatagattcgaatggaatcattgaatggaatggaatggaatcatcaaagaaaggaatcgaagggaatcatcgaatggaatcaaacggaatcatcgaatggaatggagtggaatcatcatcgaatggactcaaatggaataatcttcgaaaggaatcgaatggaatcgaatggaacaatcaaatggactcccatggaatcatctaatggaatcgagtggac

SEQ ID NO: 60739 - DNA, 380 bp, Homo sapiens
acctgcaggcctcctacacctacctctctctgggcttctatttcgaccgcgatgatgtggctctggaaggcgtgagccacctcttccgcgaattggccgaggagaagcgcgagggctacgagcgtctcctgaagatgcaaaaccagcgtggcggccgaggacgcggggcggcggaggaggaggaggtggactctgccgacaccggagagaggtcaggatggctaactggttggctccccacatggtgccctacgtctatatcacaccttaaagaagctgaagagaagatgttaaaatgtgtgccttgcacatacaaaaaagaacctgttcgtatatctaatggaaataaaatatggacactgaagttctctcataatatt

SEQ ID NO: 60740 - DNA, 486 bp, Homo sapiens
actttttttttttttttttttttttttttttaacaaaacccgaaattttttttgggcttaagggttttccgggaaagggaacagggggggccttttaaagggaaaccaaggaaaaaaggccccaaaaaagggaaatccccctttttagcccccccaaagggccttaatttttttttgggggaaacctttccaaagaaaaaccttttttggggaaaggaaaaagaccaaactttaaggggccacaatttcacccccccccgggagttttttccccataaaggaaaaaaaaaccctaaaatggtttttgggggcccccggaattaaaaatttccccaaaccccttttttgtaaaaatttttgccccccttaacaattttaaaaaggcccccctggccccgggggttttgcccaaaccccaaaatttttttaagaaggacggcccccaaaataatcccaattagccccacccccgggcccggggcaaaa

SEQ ID NO: 60741 - DNA, 504 bp, Homo sapiens
actttttttttttttttttttttttttttgggcccaaaccaagggtttttttttccccgctttcccccaaaaaaaaatttttggctttaaaaaaaaacccccccccttttccccaaaaaaaccttcccaaattttctttttgggggggggaccttttttttgcccccccaaaaattttttttttaaccccccccccaattttttttttccctttaccggaaaaaaaaaaaaaaaaagggtgggggaaattttccccccccaaaaaaccccaaaaaattttttttttttaaaaaaccggcccatttttttaaaaaaaaaaaaaaaccccaaattttttttttttttccccaaaaaaaaaccctttttctaaaaaaacccttttttaaaaaactttttttccccccccccccaaatttttaaaaaaaaaaccccttttttttccccaaaaaaaaaaaatttttttaaaaaaaaaaatttttttcccccgggggaaaaaaaaaattt

SEQ ID NO: 60742 - DNA, 280 bp, Homo sapiens
acttttttttttttttttttttttttttaacgggtttaaaacccccaaaacccgggttttttacccccgggggggttcccccaaaaagggggggccccttaggggctttcaaaaaagggaaccggggtttggtttttttttttaaaaaacaaacatttttttcccccaaaaaattggaagggcccaaaaaatttgccccaaggggggggggtttttactaaaaccaaaaacttcctttttaaaaaaaaaaaacccttccccaaaccaaaaattttttttt

SEQ ID NO: 60743 - DNA, 292 bp, Homo sapiens
  misc_feature 8: n = A,T,C or G
acgcgggnatacttttcttactatagtctcttgtttgtcttattaggataatacataaatgataatgtgggttatcctcctctccatgcacagtggaaagtcctgaactcctggctttccaggagacatatataggggaacatcaccctatatataatttgagtgtatatatatttatatatatgatgtggacatatgtatacttatcttgctccattgtcatgagtccatgagtctaagtatagccactgatggtgacaggtgtgagtctggctggaacactttcagtttc

SEQ ID NO: 60744 - DNA, 524 bp, Homo sapiens
actttttgttttgctgtggattcttttttttttttttttttaaaggggggtctaattttttgccccaggtgggttttaacccccgaacctaaaggaacccccctccctaattccccaaaagggggggaataaagggcttaaccccccggcccgggttttgtggggaattttttggggggttttttgtttccccccccaatttataaagaataaggggcggaaaaaaaaataaaaaaaggggttaacctccttttaaaacaagggttttggggaaaaaatatttttgttggaggggttttaaaagaaatttttgttggggggaattaattgaacctttctttggaaacggccaaaaaaactttactttgtttttgaccatttaaaaaaaaaaaaaaaaaaaaaatttttccctccccggggggccctttaaaaaattgggatccccccgggggggaaaaatttaaattaaacttttttaaccccccacccccgggggggggccccggcccccctttttttttcct

SEQ ID NO: 60745 - DNA, 260 bp, Homo sapiens
actttttttttttttttttttttttaaaaaaacatggggcccctggggttgctttaaaacccctttggggggggccaaaccccccctttttttccaaaaattaaataaacccggtttttaaaattgggggggggggggggggcccccaatttcccccccccggtttaaggggggtttttttaaaaaaaaaaattttcccttaaaaacaaaggctttcaaaattttaaaaatttttaattttcccgccttaaaaaaaaaaa

SEQ ID NO: 60746 - DNA, 520 bp, Homo sapiens
acttttttttttttttttttttttttttttttttttttttttatttcccccccccccttttttttttcttccccccaaaaatttttttttttttccggggggtttttaaaaaaaaaaatttttttttttttttaaaaaactttttgggaaaaaaccaacccccccctttttttttttaaaaaaaactttttttttttttccccccccccaaaaaaaaaggggttttggggggaaaaaaattttaaaaaaaattattttttacccccaatttttaaaaaggggccccttttttggaaaaagggggggaaatttttaaaatttttttccctttccccccccagggggggtgggggggggttaaaaaatttttggaaaaaaccccttttagaagggcccccccccccccaaaaaaactttttttttttttttcccccccaaaaaaggggccggggaaatttttaaaaaggttttttggaaccctttttttttttttttttggggggggggccccaaatttttt

SEQ ID NO: 60747 - DNA, 281 bp, Homo sapiens
  misc_feature 11, 29, 31: n = A,T,C or G
acgcggggagnaagaaactgagttcaagnanagagaaacattgctaacaggaattagattcacaaggccaacagacaacccaaagtcattaagccatgagagtggaatgaatctatgaaaactcaatgaagacagaacaagagaaaaatcttttcagccacgatgaattaggagaacaagatgtcaaattacactgatgttgagtcaagcttctcaaagcaagagataatcaggctgacctattgctgaggactatgagaaaaaagttattacagaatgag

SEQ ID NO: 60748 - DNA, 308 bp, Homo sapiens
ccgggcttttaaaaaaaaggttaccaaggttaacgggaaatttttggggggggggatcccttggtaaaaaaattggggggggcccaaaaaatttaaaaaaaacccccaaaattccaaaaaacttttttttccgggaatttttttttttgggggaaaaaaaaaaaaccccttttaattttttttggggggaaaaaaggttttaaaaccccctaaaaaaaaacttcaaggggaaaaaacttttttttggccaaggcttttttttttaatttaacgggggaaactttttttttttaaaaaacaaaaaaaag

SEQ ID NO: 60749 - DNA, 423 bp, Homo sapiens
acgcgggatgacataaagatctggtcaccattagaagagtcaaggatttttaaccgaaaacttgctgatgaagttataactcgaaacgaactcatgctggaagaaactagaaacaccattacagttccagcctctttcatgttgaggatgttggcttcacttaatcatatccgagctgataacaataatgaaaagctgagccccaaaccagggacaggtgaaccagttttaagtttgcactacagcacagaaggaacaactacaagcacaataaaactgaactttacagatgaatggagcagtatagcatcaagttctagaggaattgggagccattgcaaatctgagggtcaggaggaatctttcgtcccacagagctcagtgcaaccaccagaaggagacagtgaaacaaaagctcctgaa

SEQ ID NO: 60750 - DNA, 235 bp, Homo sapiens
acttttttttttttttttttttttttttttttttcccccccaccccttttttttttttaaaaaaaatttttcccccccactttttgtttttaaaaaggggttttgggggggggaaaaaaaaaaaaaaatgggctttttttttgggggaggagggcccaattttttaaagttttttttttaaaacctttttttttaaaaagaaaaaaaaagggggggggggggtccccccccgggg

SEQ ID NO: 60751 - DNA, 549 bp, Homo sapiens
  misc_feature 408, 415, 470, 479, 482, 484, 487, 504, 507, 516, 517, 521,527, 528, 529, 530, 532, 533, 535, 536, 537, 538, 539, 540: n = A,T,C or G
acttgttattatcacaaatcttaaatgttttaccaagtgctgtcttgatgactgctgattttctggaatggaaaattaagttgtttagtgtttatggctttgtgagataaaactctccttttccttaccataccactttgacacgcttcaaggatatactgcagctttactgccttcctccttatcctacagtacttttatttctactacaacactgaaaggattcaataatcactgctgtgcactttaaaatacagtctgggactatctctatttcaatacatagaaattttgctcattttttcttacagctgagtgatatgtcattgtgtgaatataccacatatacaagcagttccttaactaaaggtatttgagttgtttcctgtcttctgctttgtaaactgngacacanaacatgaccttgttcatataatgctttcatatttacagaatataccatctgggtngattcctanaangnggntttcttggttaaaaggnttnctggggggnngttngggtgnnnngnngnnnnnnaaaaaaaaa

SEQ ID NO: 60752 - DNA, 566 bp, Homo sapiens
  misc_feature 19, 20, 26, 32, 37, 41, 44, 53, 54, 56, 58, 59, 60, 61, 71,72, 73, 82, 87, 88, 96, 105, 106, 107, 108, 109, 120, 123,132, 135, 147, 153, 185, 186, 188, 208, 216, 289, 290, 300,301, 302, 303, 304, 305, 306, 307, 308, 309, 310, 311: n = A,T,C or G
  misc_feature 312, 313, 314, 315, 316, 317, 318, 319, 320, 328, 329, 349,355, 360, 366, 399, 419, 423, 447, 448, 465, 468, 476, 490,496, 503, 511, 546: n = A,T,C or G
caacttccctttttggggnncctttncaaacnttggnttanaanccccccttnncngnnnnaacccctttnnnccccggggnggggnncctttccnaaaaaagannnnnttttggggganaantaacccccnttnccccctttgggncccccnttttttaaaaaaccccccccccccacccaaanngnttttaggtttgggggggggnaaactttnatttaaaggggggcccaaccaaacccaaacccccaaacccccctttttgggcccccccccccatttccttttnnaaaaaaaagnnnnnnnnnnnnnnnnnnnnnttgggggnnaaattttttttttaattggnttaaanaaaanaaaacnaaaagggggttttttttccaaaccccccatttngtttttgggcccccccaaangggncctttgggaatttcctttttgggnnaccccctttcccctttnggnaaaacctnttttcaaaaagggngggggnaattttnttttgggncccccccccaacccccttttttggggggggaaatnttttccccccccaaaaaaaa

SEQ ID NO: 60753 - DNA, 435 bp, Homo sapiens
actttttttttttttttttttttttttcgcaaaaaaaaaagcttttttttttttgaaaaaaaaaaaccccggggaaaccccccttccccatttggggtctttagggggggaaaaaaaccccggggggggttcttttaaccccttttttttttaaaaaaaacctttttttttgggagcccccccccccccttttttttgttttttttgccccaaaggggggaaaacccccccccctttttttgaaaaagggaaaccccccccttttttttttttttttccccaaggggggaaaaccagggtttttttttttttccccttttaggggggaaaattacccccctttggggccccccccggggggaaaaattaaaccctttttcccccaaaaacctttgggggccttaaccgggaaaccccttttgggggggggaaaaa

SEQ ID NO: 60754 - DNA, 507 bp, Homo sapiens
tgattggagctccccgcggtggcggccgaggtacactagggcccccgggtggcgacagtgcatcagtgtaggttcgtcagttgcaacacgtgcctctggtgggggatggggattgcggaaggggctgtgcctgtgtagggccagggagtataggtgaactgtattgaattgtattttccactccattttgctgtgaccctaaaactgctctaagaaaatcatctatttataaacaaataaatattcttctaagaagccaaagcagaaaacgatcaagtggagtgtgttaatgtcagcaaaggtttttgctgccacgaggttgaggcaaggagagaaacgtgtcccttggttagtgatgtggctatattcatcactttaatgagaataatgtctgctgagtgatggggctggaacctaaattggagaaggtttgagccaatggaaggtaagaaagtgactaaatgagtatagaaaactaccaagaagcttggctgttgctggtgaaag

SEQ ID NO: 60755 - DNA, 588 bp, Homo sapiens
  misc_feature 4, 12, 13, 19, 20, 25, 26, 43, 45, 49, 50, 57, 60, 62, 77,89, 91, 93, 98, 112, 114, 115, 116, 118, 122, 124, 129,133, 136, 137, 142, 147, 148, 149, 158, 159, 166, 171, 177,180, 181, 183, 184, 185, 186, 188, 190, 191, 199, 204, 206: n = A,T,C or G
  misc_feature 208, 210, 230, 245, 246, 255, 256, 257, 258, 259, 260, 261,262, 263, 264, 265, 266, 267, 268, 269, 270, 271, 272, 273,274, 275, 276, 277, 278, 279, 280, 281, 282, 283, 284, 285,286, 287, 288, 289, 290, 291, 292, 299, 585: n = A,T,C or G
cgtncctggttnncttctnnacctnnctatctttgggctactntnatcnncgtagantanangaatcctggaaggcntgagccgaatantntnaaaanctgaacgaagatangnnnangggntncgagngaantcnnaagantcaannncaacttggnngacggtntaaanctaatnganncnnnngncnncctgaatnccatntnantnttatccaattccccacgacntatagggggggcccnntgcccatcnnnnnnnnnnnnnnnnnnnnnnnnnnnnnnnnnnnnnnatgctancatggccatacgatgtttccttgactagatctgggaatagatgaaataatgttgaaaacaaaactttagaggtgccttctggtatcagatgctgcaaggccttgagcatcagagtgtgttaagtcccatctactgtatcaaggccagagtgtggctccatgctcttaggaagggtttcccaaccacggggccagagcccaaaaggtttccccttccctaatatgctaatgaacgaaacatgtaaatctgttttcccctgttaggctagtcttactgtgatgagaantgt

SEQ ID NO: 60756 - DNA, 325 bp, Homo sapiens
  misc_feature 2, 34, 40, 55, 78, 85: n = A,T,C or G
gnctccaccgcggtggcggccgagtacgcggggnagaaanaaactgagttcaagnagagagaaacattgctaacaggnaattagnattcacaaggcgcaacagacaacccaaagtcattaagccatgagagtggaatgaatctatgaaaactcaatgaagacagaacaagagaaaaatcttttcagccacgatgaattaggagaacaagatgtcaaattacactgatgctgagtcaagcttctcaaagcaagagataatcaggctgacctattgctgaggactatgagaaaaagttattacaggaatgagtcatatggaaaacac

SEQ ID NO: 60757 - DNA, 271 bp, Homo sapiens
  misc_feature 69, 81, 87, 93, 129, 143, 165, 176, 223, 252, 253: n = A,T,C or G
cctaggggtaatggcaatggcaatggcaatgcaatgggaatggcaatgcatcccgtcaatggaaatggnaaaggaaatggnaatggnaatggnaatggaaatggaatcaactccgaattgcaaccgcantggaatggaatggnaattaacccgcaatagaatggnaatggaatggnaatggaaagggcaacggcaacggcaatggaaatggttttggcaatgncaatggtaatggaatgggaatggaaacgnnaaaggaatggaatggaaa

SEQ ID NO: 60758 - DNA, 261 bp, Homo sapiens
  misc_feature 6, 22, 23, 24, 56, 59, 77, 79, 81: n = A,T,C or G
ctcagntgtttgcctgattggnnnctccaccgcggtggcggccgagtacgcggggnagnaagaaactgagttcaagnananagaaacattgctaacaggaattagattcacaaggccaacagacaacccaaagtcattaagccatgagagtggaatgaatctatgaaaactcaatgaagacagaacaagagaaaaatcttttcagccacgatgaattaggagaacaagatgtcaaattacactgatgttgagtcaagcttc

SEQ ID NO: 60759 - DNA, 427 bp, Homo sapiens
caccgcggtggcggccgccgggtctggtacttttttttttttttttttttttttgggaaaacggggggggaaaaaatccccaattccctttaattttttaaaaccttccctaaaaaaccccccttgggggggtaaaccgggggggaaaaaaaacccgggggggaaattaaaattttttggcggaaaaaggccaacccggggtttaaatccccccccggtttttggggaaaaaaatgtttcaagggaaataaaaaaaaaaaaatttttttaaagggggaaaaaaaggccccaatgggggggggggagcccaatttttttgggggaatttttaaggggggggggtgaaacccaaaaccctttttaaaaggggggcgggtttaaggccccctagggggggaaaattttttcccccctccaaaagggtttt

SEQ ID NO: 60760 - DNA, 190 bp, Homo sapiens
acttttttttttttttttttttttttttcccccgggggggaatttaaaataaaaaaaacccccccgggtttccccgggggaaaaccaaaaaccggggggattttaatggggaaaaaaaaaaccctttaaaaggggggcccccctgggggtgcccggacccaaactggggggggaaacccctttggggggt

SEQ ID NO: 60761 - DNA, 129 bp, Homo sapiens
actttttttttttttttttttttgaaatttttttggctttttccggaaaaccccccccctttttttcccttccaaaaaaaccttttttggggcgttaaaaaaaaagggtttcccggccttttttttttt

SEQ ID NO: 60762 - DNA, 375 bp, Homo sapiens
acactagaagatgttgtccaattgtcttcaaagaagtaacctgttatgtgtgaaagggccattgtaatccaagtgaggctgctggtgaaagtagcacctgaccaatagccagcaagaaaaatgggaccactgttccagaactataaggaactgaattctgccagtaacctgcatgatcttggaggagaactccatgcctcagatgagattgcatctctggctgacatggtgattttagctgtgttagatctagagcaggaacccagataacctgtgcccagactcctgatacacagaaatttgagttaataaatttgcattgttttaagccactaagtttgtggtgctacataatgcaacaatacaaaacactct

SEQ ID NO: 60763 - DNA, 228 bp, Homo sapiens
  misc_feature 1, 8, 44, 146, 156, 175, 198: n = A,T,C or G
nagaactncccacccgcggtgggcggcccgttaaaacatgtgtncactgggccagggcggtgcctctaaatactggtgatggcttagaaggtgatgtttttggttaaacagggcggggttaagaatttgcccgaagtttccttttnactttttttnaacccttttcctttatgangcatgccctgtgtttggggttgnacagtgaagggttaaattaaatgaactttg

SEQ ID NO: 60764 - DNA, 653 bp, Homo sapiens
  misc_feature 606: n = A,T,C or G
acacttaggcactgctggtagcaagtaattcatttgccttgaaaggtttttgtaaagtctctctacatagcagctcctatgtcttaaaagagttccaagttagattaaaaatggggaagctctttgcattagtccttcagggagtgaccagacaggtccaaacaattaaccataagtctttgaaaacaagatcagctctgctccctccaaaagctgtcattttccagattaccaagctgggagagagagtaataggacaagggtaagttaaagcaccacaaatttttactaccaagtttcagtttcccttttcttgattgtatttgcttggttgctataaaccattgactgctttccaaagttctgataaaattgattctaacactttttgccagtttttcagtgcttttgtgaagggacaggctcttgaagttcccttctttgctgtttttcctgctatttctcagacatgttttaagaaatagaaacatggtggacttaatataacagttattaaaagttgtgaagctagtataataacataagtgtgggtttgttttacagttagtcaagctgatgaatagacaagaaagagaaagccccacngatggggcttcaaatggatattatgttcctcttttttttaagtttgg

SEQ ID NO: 60765 - DNA, 511 bp, Homo sapiens
  misc_feature 13, 31, 489: n = A,T,C or G
tccaccgcggtgngcggcccgaggtactttntttttttttttttttttttttttttttaaagggtggggaataagccccccccccccaaaaatttttttgttttaaaaaagaggggggggcccaatttcccaaaatttctggggggggtgggtttccccccttttaccttttttaaacccctttttcctttaaggggaaaaggccccccttttttttggtttttttttgggggggggccccattttttaaaaaaaaggggggaaccccccccaccctttttttaaaatttggatttgggggctttttttttccgggggggggaacccctttaaaaaaaaaattccccccccccctttttccctttagggggaaagggcccaaaacgggggggggccctttttggggggggggtttattttttttttttcccggggggcccggggtttttttttttcaaatttggggggggggtttttggggtaaaaaanttttttaattttttttgggggg

SEQ ID NO: 60766 - DNA, 261 bp, Homo sapiens
  misc_feature 7: n = A,T,C or G
acacagnaaaggtcggaaaaggttagagtaatatttctagtttatatgacttgccttggggaagaggaattctattttttatggcctgccttggggaagaaaggggagcaggagaaagaagctcagaaggacagaaggatttccaaccaagtatggtggcatgcacctgttgtcccagctactcaggaggatgaggtgggaggatcatttgaacctaggagtttgagaatgcaatgagccatgattgccattgcactgtgt

SEQ ID NO: 60767 - DNA, 347 bp, Homo sapiens
  misc_feature 22, 99, 118, 171, 179: n = A,T,C or G
ctccaccgcggtggcggccgangtacgcggggctaacaggaattagattcacaaggtccaacagcacaactccaaagtcattaagccatgagagtggantgaatctatgaaaactcantgaagacagaacaagagaaaaatcttttcagccacgatgaattaggagaacangtatgtcnaattacactgatgctgagtcaagcttctcaaagcaagagataatcaggctgacctattgctgaggactatgagaaaaaagttattacagaatgagtcatatggaaaacacttgcaaacagaagaatattgagaacataagttgccatggagaaaattccagtgtcagc

SEQ ID NO: 60768 - DNA, 304 bp, Homo sapiens
actttttttttttttttttttttttttttttttttttttgaccccaaaaaattttttaagggggggggggggcccccccccccaatttttttttaaaaataaaaacccccctaaaattggaaaagggggaaaaccaaaaaaacctggggcctttttttcaaaaggggtttaaaaaccaaaaacctttttttctttttaacctgaaaagggggggggggaaaatttttccaaaaattgcctggggccttttttttaaaaaaaaaaacccccccattttaaaaataatccggggggtttttttttt

SEQ ID NO: 60769 - DNA, 500 bp, Homo sapiens
  misc_feature 28, 182, 194, 229, 299, 359, 369, 401, 414, 447, 477, 480,500: n = A,T,C or G
acccaggaagccaggggagccctgccgnagacaaggaagcgcttcacaaccctggacttggccaatgccttccagcaggaagccccagacctcagggaaggaacgccttcttctgagtgcagcgggttccagctgggcagacctatgtggatgctggatacgaggtgggacaaaatcgcccnagaaccttgganttttgtcaaccttatgggccctacgaactttcccntggcttctttggggaagaaaggtcacggggaacattaacagcccccctcttacaagaaggcaagaaaganaagtgggtggcagcagcccagccctcaaacgtgggtcttgcttcttggaaagggggcccnccaaacaganaattccaggatcaaaaaggtgcccctacattnttcccgggacaanccagtggggtggggcttttgatgaatgtggaanagctttcaaaaaccaaggtcagcttttttnaancaaaagggactgggccgggn

SEQ ID NO: 60770 - DNA, 563 bp, Homo sapiens
  misc_feature 331, 343, 371, 372, 375, 403, 407, 424, 431, 435, 436, 442,446, 447, 452, 464, 465, 466, 477, 483, 491, 497, 503, 508,517, 532, 535, 541: n = A,T,C or G
actttattatctatccctgtttgccagataaggaagctgagacttcatacagtgacttacaagttcggacagcctccagcaaacacaggaaacagggattcgaacccatgcagtctgcctcagagccaaagcccttggccatttttctatcctgccttccacagatcatttctgcctacagcagaggtcagaaactgacaaccagctggccttacctagccttaggtaacagtaatggctattgaacacttactatgtgtcaggattattttacacacattcatggtggtgccttatttaaatctttaaagccacctcccttaaggtgggnggcgggtattanttccccttttacaaattgaaaaaaactnnganccagaaggagtaaccctttcccaatttntccnaaacttaattccaaatnccgaatnggtnntttccnaaannccctnctctttcccttnnngtaaaaaaacncagtgngttggccncatganaaaaancggangttttcccncaaaaaaaaagggtnttncttttntttaaaaaaaaaaaaaaaaaag

SEQ ID NO: 60771 - DNA, 421 bp, Homo sapiens
  misc_feature 28, 40, 49, 51, 102, 109, 128, 140, 141, 168, 169, 170, 171,172, 173, 174, 175, 178, 192, 193, 194, 241, 252, 289, 290,304, 318, 319, 320, 321, 322, 323, 324, 333, 334, 335, 336,337, 352, 353, 354, 372, 379, 390, 399, 405, 419: n = A,T,C or G
ggttttggggggggcccccggggggggnccccccccgggnccccccccnanaaaaaaaggggcccctttgggggggttttttttttttttgggggccccatnataaatnttttttttttccccaaaangggggggggggnnaaaaaaaaaaaaaaaaaaaaaaagggnnnnnnnnctnttttccgggttggnnnaaaaccccccccccccccgggggggggggcctttttttttttttttnccccctttttngggggggggggcccccccccaaaaaaaattttttttnncccccccccccccngggggggggggggnnnnnnnaaaaaaaannnnnaaaaaaaaaaaaaannnggggggggggtttttttnaaaaaanggccccccccnttttttttncccccnaaaaaaaaaaaaanac

SEQ ID NO: 60772 - DNA, 373 bp, Homo sapiens
  misc_feature 228: n = A,T,C or G
acatgggagtgcccattcttacttgtccctccctggaacagctacagtgcagtgtccgtaaatccccagtagttaggctctcaaagtggcacccagctgaggctgctctaggctcacatgactgtcagattctgtgtggttttctttttggagcgaagtccctgtgcaatcttgaggcaggctatatgtcaggcctgaggccctagcgagtcaaagttttctcctgtngccaagattgtaaaagcccatttggatgtgaagccctaacagtaagagtttcctaaaagtaagaatttctcttattatttccctgaatccagagacttttcccatttttcattcagttcttggctgggcaggatgctgtgaatgc

SEQ ID NO: 60773 - DNA, 344 bp, Homo sapiens
  misc_feature 250, 252, 257, 258, 259, 260, 262, 264, 265, 270, 273, 276,284, 286, 291, 293, 302, 307, 317, 319, 324, 331, 333: n = A,T,C or G
accgcggtggcggccggggggcgggcgccggcggctttggtgactctagataacctcgggccgatcgcacgccccccgtggcggcgacgacccattcgaacgtaaattatggctgaatcatccgctaccttcacgccaatggcgcctcaatattctttatctgcctcttcctacacatcgggcgaggcctatattacggatcatttctctactcagaaacctgaaacatcggctaaaaaaaaaaaaaaananaaaannnngngnnccccnggnccnttaaaaananggggnanccccggggnggggnaaaatttttnantaaanttttttntnacccccccccc

SEQ ID NO: 60774 - DNA, 506 bp, Homo sapiens
  misc_feature 14, 26, 44, 50, 66, 72, 78, 84, 90, 106, 112, 118, 124, 130,136, 142, 163, 186, 192, 259, 260, 265, 272, 283, 308, 323,324, 326, 339, 359, 376, 399, 424, 440, 446, 505: n = A,T,C or G
acaatggaaatggnaatggaaatggnaatggaaatggaaatggnaatggnaatgccttcaaaccgnaatggnaatggnaaaggnaatggnaatcaacacgaatggnaatggnaatggnaatggnaatggnaatggnaatggnaatggaatgatatggcaatanaatggaatggtaacggaaatggnaatggnaatggaatggtattggaacggaaatggaaatggtaatggtaatggcagtggaatggaatggaaatgnnaatcnttccgantggaatagganggaatctattcgagtggaatggaanggaatggaatcaacnngnactggaatggaanggaatggaatggaatggaanctaatagaatggaatcnacccgaatggaatggaatggaangggactggaatgggaatggaacggnaatggaattggaatcnacctcnaattgtaatgggaattgggaatgggaatgggaatggaattggaaatggaaatgggaatng

SEQ ID NO: 60775 - DNA, 555 bp, Homo sapiens
ggaactccccgcggtggcggccgaggtacttttttttttttttttttttttttttcctttttcctatttggggaaaaaaacctttttaacccggggtttttaaaaacccccggggaaattaaaaatttttgggcccttccccggggaaacctcccggcctaaaaaattctttaaacccccgttttaaaaaaaaagttttttttttacccaaaaacggggcacaattcccccccaaaatacaaacgggaaccataaaccttggggaaaaaaaaagggtttttttcccgggcctttccttttttatttaaaaattccctttttcccccccccccaaaaattcaaaaaccttccaaaaaaccgggttccccggtttttttaaaaaaaaatttttacccccccaaacctttttttaaaaaaaacccgggggggggttccccctcccaaaactttaaaacccccgttttaaaccttcctaaaaaacctaggggacccggggaaaattttaaaaaccctccccttaaataaagggggattttcttcccaaaaaaaaaaaaa

SEQ ID NO: 60776 - DNA, 246 bp, Homo sapiens
ggaactccacccggtggcggccgagtacttttttttttttttttttttttttttggggccccttttttgctgaggggaatcagggggggaaaaccaaattgggcctttttccccccttttttaaaaaaaaaccccaaaagggggggaaggtttttattaaccttaaaaagaggttttttttggggggcccaaaaaatgggagggggaaaaaaattctcccagggggaaaaaaaaacccttttcccc

SEQ ID NO: 60777 - DNA, 526 bp, Homo sapiens
actttttttttttttttttttttttccctccccccagggggttttttaaaagggacccatttaaaccaaactttggggaaaacccccaatgttttatttaaatttcttttcttaagggcggataaatttttccgaaaccaaacaaattttttgcccaaaaaaaaatgccccccttaaccccccccggggttcgggtttcaagtggcccttcaaaaaaggcaaaaagtttttttttaacccccctttttttttccctcccggcccccccaaaaaaaattcctttggggggggggttcccaaaaaacccctccgggggcctgaatggtttcccctttgaaactttgacttaaaaccggccttttcccttttaaaacctttggaaccttttaaccctggggaaaaacccccaaagggctcccaaaaaaaggggtgtattaaaacggccaaattttttttaagggcttttttactttttggaaaaacccaaaacccttttttttaacccattttgccttccccattgggg

SEQ ID NO: 60778 - DNA, 705 bp, Homo sapiens
  misc_feature 7, 9, 21, 22, 24, 26, 27, 28, 32, 34, 37, 38, 39, 40, 41,42, 43, 44, 45, 46, 48, 56, 57, 64, 67, 68, 69, 70, 71,72, 73, 74, 75, 76, 77, 78, 79, 80, 81, 82, 83, 84, 85,86, 87, 88, 89, 90, 91, 100, 101, 102, 103, 104, 105, 106,107: n = A,T,C or G
  misc_feature 111, 112, 114, 116, 121, 123, 124, 125, 127, 128, 129, 130,131, 132, 133, 134, 137, 138, 139, 140, 141, 142, 143, 144,145, 146, 147, 148, 149, 150, 151, 152, 153, 154, 155, 156,157, 158, 159, 160, 162, 164, 165, 166, 167, 168, 170: n = A,T,C or G
  misc_feature 171, 172, 173, 174, 175, 176, 177, 178, 179, 180, 181, 182,183, 196, 199, 200, 201, 202, 203, 213, 221, 229, 231, 232,233, 234, 235, 236, 240, 241, 242, 243, 244, 245, 246, 247,248, 249, 250, 251, 252, 253, 254, 255, 256, 257, 258: n = A,T,C or G
  misc_feature 259, 260, 261, 262, 263, 264, 265, 266, 267, 268, 269, 270,271, 272, 273, 274, 275, 276, 277, 278, 279, 280, 281, 283,284, 285, 286, 287, 293, 294, 298, 299, 300, 301, 310, 329,330, 331, 332, 333, 334, 335, 336, 337, 338, 339, 379: n = A,T,C or G
  misc_feature 382, 384, 392, 412, 446, 451, 498, 500, 506, 527, 532, 552,555, 607, 617, 623, 637, 638, 641, 647, 658, 685, 687, 697,704: n = A,T,C or G
gggtcgngncccgctctccgnngngnnnggcntnttnnnnnnnnnncncccgcggnnggggggnggnnnnnnnnnnnnnnnnnnnnnnnnnagggggggnnnnnnnnaggnntntnttttntnnntnnnnnnnnttnnnnnnnnnnnnnnnnnnnnnnnnantnnnnnannnnnnnnnnnnnnccccctttggggnatnnnnnataacccgtnactggggncccctttntnnnnnntttnnnnnnnnnnnnnnnnnnnnnnnnnnnnnnnnnnnnnnnnnngnnnnnaggttnntttnnnnccctagggncttcccccccacccctttnnnnnnnnnnnccccaacccaaaaaaaaaaacttcccatttttcctttttnaantnggggggtngggcccaacccaattttttncctttaaagatttttaaaggcccttgggaaattnagggnaaccgggggccttttttcccaaaaaaaaaaaaccccccctttggggnantttttnaaaaacccagggaaaactttnggganggccccccaggaaaaaaganaanaccccaaggccccaaaaaaatttttccccctttggggggtttttgggttttngggaaaaaanaaaaanttcttttttttccnnaanggaaanttttttttaancccaggggcccccctctttgggggggntngggggggggnaaaaaant

SEQ ID NO: 60779 - DNA, 225 bp, Homo sapiens
actttttttttttttttttttttttggccaaaaaacaaattaaacctttcctttttaaaaaaaagggcctttaaaaacccttcccccaatttttaaaaaaaaaggggccccaaatttggggcccccttaaaaacccttaaaaaaatgtttcaaacccgggggccccctttttttaaaaaaaggccccccctttccctttttttttttttaaaagaaaaaaaaaaa

SEQ ID NO: 60780 - DNA, 148 bp, Homo sapiens
actttttttttttttttttttttttcaaaaaaacaggggggcccccgggtcccttgaaaaataatttccttggccttaaattcaaaggtggaaaatctttgggccattttaaaccccttggcaaggttttttgtggccccttgggaaa

SEQ ID NO: 60781 - DNA, 188 bp, Homo sapiens
acttttttttttttttttttttttttttttaaccttttaaaatccgggggtttttaaaatttggggggaaaaaaatcctaaaaaacccccccggggtttttggtttttttaaaacccccccccccggggggaaaaaaacccccggggggaaggccccccccggggggggggccaaattttggggaaaa

SEQ ID NO: 60782 - DNA, 582 bp, Homo sapiens
  misc_feature 14, 501: n = A,T,C or G
ggcggccgcccggntcaggtaccatgaagaacagtgcttcattgaaaagccttttccacattcactacatgtatataatttctctcctgtatgagtttgctgatgtgtgataagactgttcttcaaggtgaagcctttcccacatttattgcatataaagggtttctcaccagtatgagttcgatgatgtgcaataagacgcctcttctcaatgaagccttttccacattcactacatatataaggtttttctcctgtatgagttttctgatgtgtagtgagactgaactttgtagagaaggccttcccacatacactgcatccatggggtttctctcctgtatgagttcgttgatgataaatgagccgacacttcttgatgaaggctttcccacattggctacatgtgtaaggtttccctcccatatgagttttctgatgtatattgagctgtgatttcttgaggaaggttttgtcacattcagtgcattcataatgttncagttctgtatgagttctctgatggtccattagtctggatttttctggaaaaagctttcccacacatactgcatacatgag

SEQ ID NO: 60783 - DNA, 698 bp, Homo sapiens
  misc_feature 17, 25, 30, 36, 41, 55, 56, 61, 68, 74, 78, 81, 86, 91, 128,134, 171, 175, 177, 178, 179, 180, 181, 193, 225, 257, 265,270, 274, 275, 276, 277, 288, 306, 307, 341, 347, 371, 375,379, 382, 385, 392, 393, 394, 395, 402, 404, 406: n = A,T,C or G
  misc_feature 408, 415, 418, 420, 423, 425, 438, 440, 446, 450, 454, 459,460, 466, 469, 501, 521, 524, 532, 541, 542, 545, 546, 559,570, 574, 590, 591, 610, 622, 631, 641, 647, 658, 688: n = A,T,C or G
taaacttcactcttgtntgtgcccnagaanatgggnaaacnctccccccacccgnncgggnttggggnccgggncccncgnccccnacggnccttggggttttttttttgggcccttttccttttttncccaanggggaaaaaaaaaaaaaggccccttttccgggttttnaaanannnnnccccccttttgngggcgggccctttttttttttccccttttcgngggggccccccaagtttttttttccccgcccngggggggnaaaanaaannnnaaaaaaaaaanttttttgggggggggggnnttttttttttttttttaaaaaaaaaaggggggcncccccnctttttttttttttttttcccccncaanaaanaanaanacacccnnnnccccccnanananttttttnttntnttncngggggggggggtncncccccnaaanattnttttnnaaaaanacncccccccccccccaaaaaaaaaaaaaaaaaanttttttttttttttttttanaanagggcccnccctaaagnnaanntctttttcccccnggggggggggncccnttttttttaaaaaaannaggggggggcccccccccngggggggggggngaaaaaaantttttttttnaaaccnctttttttttnttaccccccccccccccccccccccccccngggggggggg

SEQ ID NO: 60784 - DNA, 538 bp, Homo sapiens
  misc_feature 13: n = A,T,C or G
acatggcttgtanaccactgtgagggttttgataatagtgtaagtagaataggtagtcactgaaaagttttaagcagaaaagtgacatgaactgacttataggcaggctgctcaagctgctgtgttgagcacagactgaggtgagctgaacgcatgagcaggaagaccaggaaacagatgaccattgaaataatccagtgagagaaagtgattgtgtagaaaaagcaaaagccatgaagattctgagaagaggtcccattatgaatactttgaaattgtaaataacaggatttactgctgaatcaaagcaagtgtgtgaggggagagatcttaaggacggcttcaagattgttggcctgagcaacaataataatggataaggaagactgcaggagggtctggtttgctgagaaaatatcaagaaaagagtctgaagtgctaattttgagatatcccttagtgactgagagagaaacatctggaaatcaggaaagaaggacaagttggagatattaattgggaatcctaagatgatggt

SEQ ID NO: 60785 - DNA, 569 bp, Homo sapiens
  misc_feature 28: n = A,T,C or G
acagtattttgctagtgcatttcaaggnaatggaatcttctccagtatgaaattaccagatataaaataatgtaatgatgctgaggatataagcttttagaaggtaatttgatggtatttctttctcgaatgaaaagctgctggtttaccctcaaccctattcattagcattaccatgagtgaatttatatctaattatttccacttgccctgttctcttcacaccaaggaagctccagatccagtatcttgtttggcctcaaaacagaagcagcttcttttgtctcccagcagtagtgagccactcagtctcttccacaggaagtttggagcctacattccttgagtcaggagcttattacagaaaaaccccgtttccctgaacttttggctaacagaaattaatttaactgacatgcatattgattctgaaatttttttcctaagtttttttcatttttttgaatgagttttttaaattttttagatgaccaaaacttgcagggcaggggatgcccagaagagtggtgagatagtaaaacacttattccctcatcctttcaggtttt

SEQ ID NO: 60786 - DNA, 497 bp, Homo sapiens
  misc_feature 46, 63, 75, 94, 95, 101, 102, 103, 105, 106, 110, 111, 112,114, 117, 118, 119, 120, 121, 122, 123, 124, 125, 126, 127,128, 129, 130, 131, 132, 133, 134, 135, 136, 137, 138, 139,140, 141, 142, 143, 144, 145, 146, 147, 148, 149, 150: n = A,T,C or G
  misc_feature 151, 152, 153, 154, 155, 156, 157, 158, 159, 160, 161, 162,163, 164, 165, 166, 167, 168, 169, 170, 171, 172, 173, 174,175, 176, 177, 178, 184, 185, 186, 187, 188, 189, 196, 204,212, 218, 235, 266, 279, 289, 314, 335, 347, 354, 364: n = A,T,C or G
  misc_feature 370, 385, 386, 428, 432, 435, 444, 445, 446, 447, 448, 449,450, 451, 457, 458, 459, 460, 461, 462, 463, 464, 465, 466,468, 474, 475, 476, 482, 488, 489, 493: n = A,T,C or G
ggagctccccgcggtggcggccgaggtacaattttattttaacagnatttcaagaagttcccnattttttttttnttaaaaaaaaaaaaaaatnngggggnnngnnaagnnnangcnnnnnnnnnnnnnnnnnnnnnnnnnnnnnnnnnnnnnnnnnnnnnnnnnnnnnnnnnnnnnncccccnnnnnnaatattnaaaaaggnaaaccctncttatncagtggaggactttctncatttttattagcaaatacattttttgcagncttaaaatttttncttggaattncatatacgccttcctggtcattttnaaaccaaaccttcccagaagnaaaaactggggnctcttantattattttnaaagtnaaccaaaattttggnnccaaaaattccccttttttttttttccccctttttttttttngggnatnccccccccnnnnnnnntttttnnnnnnnnnntntttttnnnaaaaantttttnngggnaaaa

SEQ ID NO: 60787 - DNA, 482 bp, Homo sapiens
acagaatcacttttgtgtaattgaatgaagcagtttcctctgcatgattgcataatgaaagccttttatatatctatatttttcaatacttagattttacactattaagctgctctagtcatgctatatttgtttttttaatagagtttataaatatttatgctcaaaatacagatcaactgaatatttttggtcttgtttacaagataaatcatactttaaaatgatacaggcccctcaagtgtcttaggaaaaagtcattggtgctataaaacctttcagtatcatttttgaacccattgttcagactttgctaggttttaatctgattccttgtgatttattataatgtagcagcatacttataaaagtggtctgtgctgagtcagatagagagcccagcccattagaaacacatcataatttaagaatatgatgcagaatgcccttacacttatttgtgcccagcttcccaaaaagaa

SEQ ID NO: 60788 - DNA, 475 bp, Homo sapiens
gctccccgcggtggcggccgaggtacttgaaatttaactattaaaaaagttggaggaactcaaactttgaagttagggctccctttctccagataaagcacattgcctggtttattgtaaggcacttagaacatgtaaccaaaaacactcaatttaggaataggaatgattgttttacagctaagtgcgctctcagagtcttttgttttacacccctctcaagtttacctttagatatttttcttgttgtttaatattttgtgacaaatttggcaacttttaaaaagttgtttgaattgaatagtgcataaaattaatagatgtttttcagaaaatccattattaagagtagaggaatgaggagaaatattcgttctaaagagaatcaaaaccacaatgagagattgtcttacccccgttagaatgacagttaccaaaagacagtaacaaatgctgacgagaatgcagaggcaaa

SEQ ID NO: 60789 - DNA, 476 bp, Homo sapiens
ctccccgcggtggcggccgaggtactttagctgccctctcttctttgctaattggcaatttgctaaggatgaacaagacacaggatgccttttatcagcaggaaatttcacctacccttttcaggaactgcctcaaataaggtttcaaccaatttagcactgccctcaaagaagcctgatttctgggagatctgaggtttttggacacaccaacaaatacaaaaggagagaaatggtctccagtcacagaaccccgccttcgttcaagatcaagtctgggctggcaaactgaatggttggaacctcaggccaaagcttttatcacaacagaactttgttcttaccatgtctagcctaattcctcggagactctgtttccacagaccaggaaaacagcacttggttttggggcttttcttttagaaatgaaataatacagaatcagaacaaaacttcagatgacacataatggtgta

SEQ ID NO: 60790 - DNA, 476 bp, Homo sapiens
  misc_feature 327, 441, 443, 454, 464: n = A,T,C or G
acgcggggttcaaggttgaggatattttgatcttaatttagtaacttgcagttgattatcctggaatgacattctctttctctgcagatgtcctggcgggctttagaaacttctggaagaagtggacagagaattcttatggttcacatataaacaatatgaatcttttggaagaaaaattcatttagggaccaaaagcccctttatatctgatttttttttccctctcaccaaattttcacaaattttcctttccaaaatgcctttgagcaaatctgtttgatatcaccccatccacttctcctgtctgaattctttattactaanaatccttcagcattccatctctcactcgtctttgtcaaaagcatttctcagtgtctttattccttctcgtctcgtatttggactcatctctcaaactgaaaaaggagatggctntnggtttctccanaagcttgganaacttcctttgc

SEQ ID NO: 60791 - DNA, 465 bp, Homo sapiens
  misc_feature 38, 49, 53, 74, 75, 122, 135, 136, 141, 154, 167, 186, 189,229, 258, 289, 418, 429, 452: n = A,T,C or G
ctccactcgcggtggcggccgcccggctcgggtacgtnttgtgacaagnaatnaaattttaagcaattcttaanntctaagggacttgctcctgaatcttcctgaacatctctaccatttanttaagaaagcagnngctgntccaaagcatctngagaggaacaaanaggataaggatgctaaatnccntctgattctaataatagagccggattcaccgtttggctcnatattataagaccaagcgagtcctccctnccaattggaaatatgaatcatctacagcctntgccctggtcgcataaatttgtctgtgtacttcgactcttggggccagggaaccctggtcaccgtctcctcagcctccaccaagggcccatcggtcttccccctggcaccctcctccaagaagcacctntgggggcacancggccctgggctgcctggtcaangactacttccccg

SEQ ID NO: 60792 - DNA, 497 bp, Homo sapiens
acagtaaattcaaataaggagatacaatttcatttggattaacttacaaatgctggccagtatgaaatcatggacctgtaataacttagcagaagattatttgccagattttaaacatctgttttctagagtggctacaattcatgtattttacccaaagatatttactttctacataatattaagaagaaaaattaagcatctattttttccacaatattttccccatatttgaattctccccacttattttctatttttttggctgtcagcacctgctcatctggaaaagaggaagagctaaggcagctacagtggagcaaggctcactggcaatggccaagccttccctgcagagtgcacccctggctgctcatacaagcttctataataggaggcaagtgacgcattttcttttaaccaaaagagatctaccaagaagggagaaaaaaattaaatacagtctactgtgtctattatagaaagctctttacaac

SEQ ID NO: 60793 - DNA, 501 bp, Homo sapiens
ttttatatttattttttttatcctttttttttttccctcaaaccctttttccccccctcccaacccccaaaatatttcctttaccttttaattttttcccttttttttttaaaaaacccaaattttgggggcccctaaaaccttgggcccaaaccccctggggaaaaacgggggccctttacccctttttgggcccccccaaccccaaaaaaaggggccaaaccattttttaaaaattttccaaactggggagggggggtttccaaaatttgcccccccgggcccgggggggaaaaaaaaaacccaaaacccccctttaaaaaaatttttgcccccccaggaaaaaaaaaccggggtttttaacccctcccgggtttgggaaaaaaccgaaacggggaaaaattccttttttttttttttccccccggaaaaaaaaaaggggccccccccaaaccccggggttcaatggcgggatccccaaatggaaaaaaaagggggggg

SEQ ID NO: 60794 - DNA, 136 bp, Homo sapiens
cactttcttatgcacctggttgtggaaggaaaagctcattcacataggactacaaatatctctcacagtaggagggcacaaaagacaatatcttcctccatttttttgggtccatcttgaaaaacaaaaaagcact

SEQ ID NO: 60795 - DNA, 587 bp, Homo sapiens
  misc_feature 556: n = A,T,C or G
tccaccgcggtggcggccctctagaactatacaatcccccatgctgtacgagttctatatcacccttatgcgatacctgtcgaccttgaggggagggccctgctcccagctttcgctccttttaataagggctaatcccgcccttgacatatgtcatagtcataactggtaccatgttgactgccaacttgcggaggtcagcattgagctggccagggaaacggaggcaggtggtgacaccactcatggtggctgagacaaggtggttcagatccccgtaggttggtgtggtcagcttcagagtgcggaagcagatatcatagagggcctcgttgtcaatgcaataggtctcatcagtattctctaccaactgatggacggagagggtggcattgtagggctcgaccacggtgtcagacactttgggtgaaggcaccacactgaaggtattcatgatgcgatcagggtattcttctcggatcttgctgataaggagagtgcccattccagagcctgtgcccccgcccagtgagtgggtcagctggaagccctgcangcagtcacagctctctgccttccttcgtacc

SEQ ID NO: 60796 - DNA, 537 bp, Homo sapiens
acaagctccactggaataaaaaagatgtgtggaagtgaaggggctcctgcccacaagtgtgtcaccccgtgtgtccctgcactgcggtaagagtggtggaggagacgggtgcttcctcagatgtcactctggcattcacctctcttcaggactgcaaggggcctactctgtcacctgtggctcttcctctcctctcaggaacaaacaacaaaaatcaaatgactctgcttttggggatgtcaccaccatcaggacaagtgtaacctttaagctaaatgaaggcaagtgtagtttgaaaaatgctgagctgtttcccgagggtctgcgaccagcactaccagagaagcacagctcagtaaaagagagcttccgctacgtaaaccttacatgcagctctggcaagcaagtcccaggagcccctggccgaccaagcacccctaaggaaatgtttatcactgttgagtttgagcttgaaactaaccaaaaggaggtgacagcttcttgtgacctgagctgcatcgtaaagcgaaccgagaa

SEQ ID NO: 60797 - DNA, 632 bp, Homo sapiens
  misc_feature 618: n = A,T,C or G
acacagccatgaactgattaagactctgttttaaatccaacagaaattgatttaaccatagaatgcttctttcatccacagtaaactgtagtgcattcagctggctatagaggttgggagatggaattggaaaatcctttccatctggatagtaatattctgtgaattctatatagacagctgacatttcttgtggaagatatagggattttttattgcagcaaatcatgcttttgggggaagaacggcattgttccgctgtagagacctggtatatattgaaatctgcaagtctaaccacaacagaactagacattagcttagcttttgattgttgagataatactgaagatgttctgcatgtccctttcagagggtagtccttctctgtttgtgtgtgctggggagaggcatgtgttggggatttaggaggtgaacctacattatgatccttcacagcctgtttaagcatttcaaccgttgcactcaaattcatgcaataactcattggcccatccattttttgttttggttgcatcactaaaatacatccaatgattacaactatctcctgctttatgataaggataataatctatagttagctgtgtaaaaganagttgcatttgccc

SEQ ID NO: 60798 - DNA, 489 bp, Homo sapiens
actttttttttttttttttttttttggggggaaaccctgaaaatatccaaggggcttggaagaaccttcccataaaccaaccctgggggaatgggaaaaaatttttttccaacagcaggggtttaaactggccctaccaaaatcgggggtttccctttaaaatttaaaaaaacaggggggttaaaaatggggttttggaaaaaaaatttttttgtaaaaatccagggaaaaagccccttttttttttccccaaaaaaaatttagggggggggggttttaataaaaaaaaggtggggtttcccccttaaaaaaaaagggcaaagggcccccccccttttttaattttaaaccccaaaaatatttcgaccccccctttaaaaaggcaaaagggggtcccggtggccccttcttgggggaaaaaaaattattttttgccccagggtcaaaaaggcaaaaaaaacaaaaggttttttttttttttaaaaaggg

SEQ ID NO: 60799 - DNA, 295 bp, Homo sapiens
acctccaccgcggtggcggccggcgaaggagctggtgcctgtgcaagttgttgaggtatcctgaagcagtttatgttgtttataccggcgatgttaatgtcaacggtcaacagatactagaaggtgctttcagaagatttaacatcagattaattcacccagtgcagtttgtttttttaaggaaacgctatcttgtggaagattcactgtatcctcacttcacactgctgggccaaagtctaggatccatttttcttggctgggaagctctaatgcagtgtgttcctgatgttta

SEQ ID NO: 60800 - DNA, 188 bp, Homo sapiens
acttttttttttttttttttttttttacccttttttttttttgggggggggggaacaaaagggggaaaaaaaaccctgggggggaaaagaaaaattggggcctaaaattgcccccccaggttttaaaaccaacccagttttttcccccccttttttttttttttttttttttttggggggagcccccc

SEQ ID NO: 60801 - DNA, 950 bp, Homo sapiens
  misc_feature 51, 58, 83, 311, 474, 499, 521, 525, 582, 596, 664, 691,699, 712, 720, 793, 827, 936: n = A,T,C or G
ggatgggggcggggcccgaagggttaccaagttaagttggccacttctttngggcttnaactggtaagcccctccgaaccctnccgggggggccttcaaaggtggaatcccctcccctggccctttaagccccccaacaaaggttaggtggggggaacttattaggggcaacaacaccccaacccattgcccccattcttaaaaggttttttttggtattttttaatggtaagaaagaacaaaggggtttttcaacccattggttttggccccaagggccttggattcttttgaacccttcccttggaagncttccaaaaggttggaattccttggcccccaacccttcgggggaccttcccccaaaaaaaattggccttggggggaatttaattaaggggccggttaaaaaaccccaaccccaattggccccttggggccccttttaaaaaattcaaaaaccttttttaaggnaaggttccaaaaccaattcctttcnttttaattccaacccttggggnaagnccttttccttgggggaaggaaaaaaacctttccccatttccaaccggtttgggggtnggcccttccttccntttttttccccttggaaatgggtttggtttttgggttgggccccccaaaaaaatttaaggcccttttngggttttccctttccaatttccaaggnaaattggnaaccctttttaantttttttnggccctttaatttgggaaattaatttaatttaatttaacccttttttccaaaaagggaaaggcccttgggccntttaatttaatttgggtttaatttttaaaccaanttaaacccaatttcccaaaaaaaaattcccttttttttcctttgggtttaaaaaaagggttttttttggggaatttttttttttttggggtttttttcccttttttttnaaaaaaaaaaaggg

SEQ ID NO: 60802 - DNA, 560 bp, Homo sapiens
actgtttcatgtttttggtttgacagtggaagggttaccatgactcaatatgaaatcataaattcagaaatgttttatctaaatacctgtgcctaatatatttatataaaatactgtggatgcatcttgttattcaaattcaagttgtgttttactagttttctatttaagtaattgtaattatgatccacatttgaaatagaggttacgaaaagcagatattgacatgagtgggtaactgcttttttaccttgaatcagaaacttttggtacagagagatccccgaggggaatgagaaagccctgaagagggcagtggcccgagtgggacctgtccctgtggccattgatgcaagcctgacctccttccagttttacagcaaaggtgtgtattatgatgaaagctgcaatagcgataatctgaaccatgcggttttggcagtgggatatggaatccagaagggaaacaagcactggataattaaaaacagctggggagaaaactggggaaacaaaggatatatcctcatggctcgaaataagaacaacgcctgtggcat

SEQ ID NO: 60803 - DNA, 595 bp, Homo sapiens
  misc_feature 591: n = A,T,C or G
acatgcaaaaaccctttacaattattcgtggacaggcaggtcagtatataggagtaggttatttcacaaatgtgttgtgcactaagtcacatagttgtatatatttaactgggaatttcacaaaagacttccagcctgtgcaccttgtgtggcaacgtggaatggtgataacaagaaattccgatcaagagagccagtatccctttgaattaaaatatctagacaagatataatggaataaaaagtttaaaacatctgctacatagttcacagttaaatagtcttggtttcagtctttctaaatagcattattatataaggatgctactttttacaaagtattttctgtgcatttatagatcacaatgtttgactttttataatttctacttagtgttacaaaatacaaaccaactgcagtctaaatttagaacccaaactccatgaaaaatgcatgttcaaccaggagacacatctgccgggcttaaactcccatacccagcaaacattgctgagaaattgtttattaagcagatgtagtttcttaagacaaatccagttactgaaaaatagaaaagcatttttcccttncctt

SEQ ID NO: 60804 - DNA, 238 bp, Homo sapiens
actttttttttttttttttttttaaacccccccctttgggggttccccgggggggaaaaaaacccttggggggtaattgaaaaattggggccttaaattgcccctccaggttttaaattcccccccgctttttccgggaaaaaaattttccattttccctaacccaacattagttttttttagggggaaaaaatggcccccatggggggggggggacccaatttttttttggggattt

SEQ ID NO: 60805 - DNA, 190 bp, Homo sapiens
cactgtttcctgtacaatcaaccaacaagtcattattaccctcactgtcaacccaacacaggcatgctcataaggaaaggttaaaaaagtaaaaggaactcggcaaatcttaccccgcctgtttaccaaaaacatcacctctagcatcaccagtattagaggcaccgcctgcccagtgacacatgtttaa

SEQ ID NO: 60806 - DNA, 554 bp, Homo sapiens
  misc_feature 10, 13, 18, 34, 247, 273, 304, 306, 334, 377, 384, 400, 406,421, 439, 466, 481, 485, 493, 498, 514, 516: n = A,T,C or G
acctttattngangtgtnatcattttaaattatnattatttcaactggggcagttatcattggtttaaacaggaactttagtggcttcaatttgttttagaaacatattaagttttgagggaaaaatttcccatgaaatatttggaacgtaagagtagtattgattagagaaaattaaataagaaccatagttatggtagccaaatttttaaaaaaatcttgaacttttctgtaggtcagttttaanaactgcttgatgaaaagtgaaagggntcgccctggtgggagaattaaaaattaggangnttggttttcaataaccttgaccagcatngggtgaatccattttggaggtcaaaaagcggaaagaaattttncctccantccaagggtggacttntaccanttttgtttttttggnggtggcctccaaaaaaangaaaaataacttcaaaaaccaccaagnacctggattatttanaccncaggcccnagggnttaaaattttggaaancngaccaaaattggttgggccaatttaaagggtatttttg

SEQ ID NO: 60807 - DNA, 339 bp, Homo sapiens
  misc_feature 29, 32: n = A,T,C or G
ccaccgcggtggcggccgggtacgcgggnagnacaacccaaagtcattaagccatgagagtggaatgaatctatgaaaactcaatgaagacagaacaagagaaaaatcttttcagccacgatgaattaggagaacaagatgtcaaattacactgatgttgagtcaagcttctcaaagcaagagataatcaggctgacctattgctgaggactatgagaaaaaagttattacagaatgagtcatatggaaaacacttgcaaacagaagaatattgagaacataagttgccatggagaaaattccagtgtcagcattcttgctccttgtggccctctccta

SEQ ID NO: 60808 - DNA, 280 bp, Homo sapiens
ccaccgcggtggcggccgaggtacttttttttttttttttttttttttttttaaaaaaaggggttttttttttaaacaaaaaagggggccccggggattatttttttttaataaaaaaaaaaaccccgggccccaaatttggggggaaaaatttttttttaatggaacccccccccttgggggtaaaaaaatttttcccccccccccccccaaaggggttaaaaataggggccccggcccccaaactgggaaattttttttttttttaaaaaaaaaaaag

SEQ ID NO: 60809 - DNA, 266 bp, Homo sapiens
gtggcgagccgagtacttttttttttttttttttttttttaaatatttttttttttttttttttttttttttttttttttttttaaaaaaatttttttggggccccccccccccccaaaggggggaccccccccccccccccggggggggaaaaaaaaaaaaaacccccccctgggaaacccccccccgggccccaaaaaaaaaaaaataaattttccccctttttttaaaaaagggtaaaaaaaacccccccctttttttaaaaa

SEQ ID NO: 60810 - DNA, 455 bp, Homo sapiens
acttttttttttttttttttttttttttttccctttttttttttttttttttttttttttttttttttttttttttttttttttggggggggggggaaaaaaaaaacccccccccccccttttaaaaaaggggaaaaaaaaaacccccccggggggccaaaaaaaaaaacccccccccggggggaaaaaaaaaaaaaaaaaccccttttaaaaaaaaaaaaaaaaaaccccccccccccccggggggggggggaaaaaaaaaaatttaaaaaaccatttggggggcaaaaaaacccccccccccccccgggggaaaaaaaaaaaaaaaccccccccccccaaaaaaaaaaaaaaaaaattttttctcccccccccccccgggggggggcccccccccccccttttttttcccataaaaagaaaagaaacacccccccccaaaaaaaaaaaaaaaa

SEQ ID NO: 60811 - DNA, 705 bp, Homo sapiens
  misc_feature 1, 222, 253, 360, 368, 429, 466, 530, 542, 557, 619, 621,636, 679, 688, 693: n = A,T,C or G
ngattggagctccccgcggtggcggccgaggtacttttgtattttgatatgggcagtttattcatttgcatacagttattgactttttcccagctgattaaaagatagtcaagaaattctgcaatatagctgccaaaatagacagctacatttttatgatattgtcatcttttctgtttttttttcttttttttctttagctattttacttaagcataatanccacaataggacatataaaagattataaatncagagctttattatcctgacgtcttgggtcttttaagtatatacttttctgaaaggtatccattttgtaggcttgggttcttcatgagcatacgattgtttattttngctgctgntctcaacatcatcattgcctgctgatgtgccacgatgctgctccaataagacagcaataanattgtctctaatttgagcagtaacatgattgcaaganacccaagtttcacagcttggtaaaagttctgtatttgggattcttgcttatttttcccgcctgnggtttttctganaactttattcctgangacaattgggaatcccagaaggttttttctatgccatttggggggggggaataaagccaccngnaagaaaccttttcantagggggaaaaaattggaaaggggaaaactttgaattcaaatncctcatttnggttnaaaaaggggaaa

SEQ ID NO: 60812 - DNA, 582 bp, Homo sapiens
  misc_feature 14, 273, 304, 309, 321, 329, 338, 341, 349, 354, 355, 377,380, 381, 385, 386, 387, 395, 399, 402, 416, 434, 461, 475,484, 491, 492, 501, 503, 506, 508, 511, 514, 515, 516, 520,522, 523, 530, 531, 532, 545, 559, 560: n = A,T,C or G
aagccagcccatgnacattttcctgctcctctctcagctgagcccttagcagagaatcaaagccatgcctggccgaaggggtacttccaggtcaggggaaatttcagtcccccatctccatcatgaacatggcagccccaaagctgagcaaggccaaagacagggttttccaacccccagcctctttgactggtgaccaccacccctttttgtcactgtctcccacccaccccatcttttgctggggattcccattcaacttttaaaaactgnggtgggggtttcctgggggccttgggggaanccctnaactttacaaanaaccctancttgtcagntcntggttttnggggnnggagggatcccctgcccttganaanngagnnnttttgacncccnatnccaaaattaaaatncaagtttttttgaaattncccaaaaaaaaaaaaaaaaaaaaaaancccccccccccttnttaaaaaanaaggggnncccccccgngnggngnaanttnnnttanannttttttnnnccccccccccccngggggggggggccnngccccccccttttttttttttt

SEQ ID NO: 60813 - DNA, 276 bp, Homo sapiens
tccaccgcggtggcagcggccgcccgggcaggtactttttttttttttttttttttttttttttaaaaaaggggggaaaaaatttttttttttttttttttttcctaaaagggaaaaaaagggggtcccaaaaaaaaaaaaaaatttttttttggggaaaagaaattttttcccccaattttgcccttttcccctttttcccccccccctttttttttttccccccccccctttttttttttaaaattttttttaaaaaaaaaccccccccccctt

SEQ ID NO: 60814 - DNA, 406 bp, Homo sapiens
tggcggccgagtactttttttttttttttttttttttggaaaaattttaaacctttttttaccccattccaaaaatttttggggggggaaccccccgggacaaaaacaaaaccaggggaaaacaatttcccccctttaaaaagggtttccccccccttatttttttttttaaaacccatttttgggaaaatttttttttaacccccaattttttggttttaagggttggttttattttttttccccaaaagaaaaatttttttggaattttaatgggtttccccccccccgcaaaaattttatattaaaaaagcggggcaaaaaaattgggggggaaaaaaaccccctcgcccgataaaaaaattcccaaacctgggggggaaaaaaaaataaccccccccccggg

SEQ ID NO: 60815 - DNA, 513 bp, Homo sapiens
  misc_feature 5, 10, 15, 16, 23, 24, 30, 32, 38, 40, 49, 52, 54, 55, 58,59, 60, 73, 76, 95, 96, 100, 102, 104, 105, 127, 130, 135,136, 137, 145: n = A,T,C or G
taacnaacgnatccnncgggctnnaggaanantacatntnaaccttatncanannctnnncctgtaagggggnccnaggatacctcaagccttcnngctncntnnactgagggcttacattgcatcnctnggtgnnntcatgggncatatgtgttatgctggaacccaccttcatgaatagcactgtgttccatgtgcctgatgtggctgacatggactgctggcctgtgagccctgagtttggccaccgttgtgcccttgggggtcaggggcttgaggtttacaactggtatgactgaggtatcctgcggtggctggcgtgctgggcatggggcctgctcacagacagcatggagcagggaagggctgtctgtgcccatgctcagcatgccttgaggggaggaggtggtggccgtgggttcctgatgtcggtgcaggagctgaaggtgagtggagtgctgccaagaatatgcccgactccccatgacaagacagaactttgtaacaaacagt

SEQ ID NO: 60816 - DNA, 299 bp, Homo sapiens
ctccccgcggtggcggccgaggtacgatcctcaaaaatcctacagtggaacaaagctttcaatccacctgagaacaacatgcctataagcaccacaagattttttttttaatgaagcaaaggaaaagaagaactagcttcctataactaagcatctgcaaagaagatggaacattcaatggttacagatcttcagccctcaagccaaacagatcctaacattagtattacatagcctcctcaaatgagtccacatctataatcacaagttggttcttccacatagatgatagtcctgat

SEQ ID NO: 60817 - DNA, 457 bp, Homo sapiens
actttttttttttttttttttttttttcccaaacacccccccggggggggagggggaaatttccccccccggcccctttcttgggagggggaaccgtttttaagggccccttttcgaaaaaaaacccttattcccccccccccgggggccccatgggggggccgggaaaccccctctaaaagtttaaggggcaaaactttaaagggggtcccccccccccggggggggggcaaaccgccccgggttttttaaaataaaaaaaacccgggggcccccccccccggggggggccaaaaaggggctaacccggttggtttttaattaaaaaaaccccccccccccccccaaaagagggggcaaccccccgcgggtttttttacctttaaaaatacccaaattttccaaagggggaccccggttcttgggcctttaaaaaataagggaacccccggggcgg

SEQ ID NO: 60818 - DNA, 482 bp, Homo sapiens
  misc_feature 6, 15, 24, 55, 72, 90, 122, 147, 162, 163, 202, 204, 205,207, 216, 238, 248, 251, 264, 283, 289, 299, 309, 318, 321,327, 339, 344, 354, 357, 363, 373, 398, 404, 414, 426, 434,436, 454, 456, 457, 458, 468, 470, 472: n = A,T,C or G
acccgncggttgggncgggcccgnaggttacaatttcccgttcaagtggccaagnaagcattagggggaggnaagggagtcccgtttgtnaaaacattcttagccgccccattcttggttanggcccactttcacaagttagtttgntccatggccgcccannaaaattaaccattggaattaaaggtttttttttttgttnanncntttgggttnttcttggaaatttggcttcttnttttcattgntgnaatttggaagggnattttttcatttttgggancccaanggggaaacancccccccccnttttggganaancccccnaaaaaaaatttnccccntttttttttnccngggccntttggggggnaaaaattttcccccccttttaaaangggggncccccggggnggggggaaaaantttttttntnaaaaatttttttttttanannntttaaaaaanananggggggggcc

SEQ ID NO: 60819 - DNA, 176 bp, Homo sapiens
acttttttttttttttttttttttttttaaggaaaaaaagggtttacccttttgcccaaggttatttttaccctccgaaccaaaaggaattcccccccctggaaccccaaaaaggggggatttttgggggaaaaccaccagccggggcttaaaaaaaatttaaaagcaaacttttt

SEQ ID NO: 60820 - DNA, 197 bp, Homo sapiens
acttttttttttttttttttttttttaaaaaaaactttttttttttttaaaacccttggaaaaacctttttaaaaacaattaaaaaaaacccccgggaagaagggttttttgccaaaaactttccccccttattttttttggggggccctaaaaaacttttgcccccttggaaaaaaaaaaattaaaaccccccccc

SEQ ID NO: 60821 - DNA, 503 bp, Homo sapiens
acttttttttttttttttttttttttttcccaattttttttaaaggggggccttttcccccttattttttgggtccccaccggggtttttttttttgggccccccctttggggggtaaaaattatttttttttttaaaaaaggggggttttatttttaaatcccccctttttttttttttttttttccccccccccgacctttgggttcccagtttcccccttaaaactttttttttcccaaaaggggtccccccccccccccccaaaaaatcttccctttttccccggggttaaaaaaaggcctaaaccggggttaaaaagacccaattcccccgggggaggggattaaaggggttttaaaaccccccggggtaaatcctttttaaaaaaaacccccccaaattttttaaaccccccccccctttaaaacaaaactttaagggggtaaaaccccccttttttaaaaaaaaaaacccgccccctttttggggaaaaaaggggg

SEQ ID NO: 60822 - DNA, 320 bp, Homo sapiens
acaatgttctcagtgaactggagaagacatttaacctgtcagttttggaagcactgttcagcgaggtcaacatgcaggaataccccgatttaattcacatttataaaagcttcaaaaatgcaatccaagacaaattgtctttccaagaaagtgatcgaaaagaaagggaagagaggcctgacatcaaactaagtcttaaacaaggagaagtgccagaaagcccggaagcaaggaaggaaagtgaccaagcatgtggcaaaatggatactgtggatattgcaaacaactctactttgggaaaacccaagaggaaaaaaaaa

SEQ ID NO: 60823 - DNA, 191 bp, Homo sapiens
acttttttttttttttttttttttggaaaaacttttttttttttgggaaaggggtttttaaaaaaaaaaaaaaaggggaattttggccccaatccctttttgggaaaccccccccctttttcccaagaaaaattttggggggcccctttaaaaaaaaaacccaaaagggccatcccccccccggggggggg

SEQ ID NO: 60824 - DNA, 518 bp, Homo sapiens
actttttttttttttttttttttgaaaagcttttttttttttttgggggggggggggtaaaaaaccacccccttttttggggccttttttggggggctttttttttccctttggtttagggaaacctttggggaaaaaaaattttttggaaaaaaccccgggttttttttttttttttttgggggggggaaaggggaaaaaggaaaggggaaggcccccttaaccccccctttttccccaaaattttttccgggaccccggggggggaaaaaccccccttttttttcccttttttggggattgggccccccccctttttttttaaaacccccccccaaaaaaaggcaccccccccccccgttttctttccggggggggccttttaaaatttggggtccccccgggccgggggatttcattttaaacttttttaacccccgcccccttgggggggggcccggccccccttttttttcccttttagggggggttaattccccccctggggaaaatagggg

SEQ ID NO: 60825 - DNA, 500 bp, Homo sapiens
  misc_feature 21: n = A,T,C or G
acttgaaataggcaatacagngaaatgaagacagtttaggttgaggggatgggagaaggaggggtaaaaagatttggtttaatttgaggtggtgagtcctacatgaaatttatgaaaaatctggaattcagaaaagtggtctagtctagaaatacagaatggcatattttgtgtcagtttgagctgggggagaggattagcatagaatcacctaattttgaacacctactatggtatgataaaagaggtcttctgacagaaatttagtgaatgtcaatgcatttaaggtctgagtagagctgctgcaaacagttagtgaagctgcactgcaccgtgccaaggagggcctatcacatagactacatatgatatgaatgatgcctcctagagctgtgcacaatttgcaaaactaaatgtggcaaccctaaagaggaaccgagctagacagacaaaggactggtcagagaggcaaagtccttggcataaaaggtcgtatcatg

SEQ ID NO: 60826 - DNA, 159 bp, Homo sapiens
actttttttttttttttttttggggggaaaactttttaattttaaaaaccaaaagggggcccccggcttttttttttttaaaccccccccccgggttaacccccaaaatgggccaaagaaaagaacccccggtggtttccaaaacccccattttggggg

SEQ ID NO: 60827 - DNA, 247 bp, Homo sapiens
  misc_feature 21, 28, 29, 30, 33, 35, 42, 56, 61, 71, 95, 100, 115, 116,117, 119, 120, 124, 161, 162, 163, 164, 165, 166, 171, 172,173, 174, 175, 176, 177, 178, 179, 180, 181, 222: n = A,T,C or G
actttttattgtaggtccgtncttgttnnnttntnccttagnccaaaaaaaccaanggggntttggggggncccaaggccaggcccccccttttnaattnccaaaccaaaccttnnncnnaacncaaaccaaggttttttgggaaaaaccctctttttttnnnnnnccctnnnnnnnnnnnggccgaaggggaagttcccttgttttttgccacaaggtggnatttctggcttcccccggagttggc

SEQ ID NO: 60828 - DNA, 286 bp, Homo sapiens
actttttattttttttttttttttttttgggccccccccggtggggggtaacagggggggaaaaaaaacctttgggggtaattaaaaatttggggctttaaattgcccatccaggtttttaattcccccccgctttttcggggaaaaaatttttttattttccttaaacaaaaaatatttttttttagggggaaaaaatggccccaatgggggggggggggtcaaattttttttgggggattttttagggggggggggggaacccaaaccccttttttaatggggg

SEQ ID NO: 60829 - DNA, 542 bp, Homo sapiens
  misc_feature 23: n = A,T,C or G
aactccaccgcggtggcggccgngtacacacatcacaaacaagtttcacacaatgcttctttctagcttgtaggggaagatattccctttatcaccatgggcctcaaactgtctgaaacgtccacttccatatactacaaaaagagcatttcaaacctgctctatgaaaggcaatgttcaactctgtgacttgaatgcagacatcacagagcagtttctgagaatgcttctgtctagattttataggaagatattcccgtttccaacgaaatcttcgcagctatccaaatatccacttgcagattctacaaaaagagtgtatcagaactgctctgtcaaaaggaaggctcttctctgttaggtgagtgcatacgtcataaaggagtttctgagaatgtttctgtctagtggttatgggaagatatttgctttttccccgtaggcctcagggcgctccaaatgtccacttgcacatgctacaaaaagagtgcttcaaagctgctctctgaaaggggaatgttcaactctatgagtttgaatgc

SEQ ID NO: 60830 - DNA, 186 bp, Homo sapiens
  misc_feature 2, 4, 10, 16, 18, 21, 22, 24, 25, 26, 31, 34, 39, 40, 44,54, 60, 64, 66, 69, 70, 75, 76, 80, 85, 86, 87, 91, 94,97, 105, 106, 107, 108, 112, 114, 115, 131, 133, 135, 142: n = A,T,C or G
gngncgaacnggggcntnccnngnnntgttnganttgannattncactcatccntcccgncaangnggnnggggnncccnggccnnnattntcnttncatttacnnnnggtntnnagctcgcataggatcnancnaccaatngaaccataactggatttaatgagtcattcgcagtttcactgtac

SEQ ID NO: 60831 - DNA, 170 bp, Homo sapiens
  misc_feature 4, 15, 18, 20, 116, 119, 122: n = A,T,C or G
aagntgtgatctcanttnangatctttccagccgtaacattcccttaaaccaaggcctaatccacaacaaggcccttaatctcttcaattctatgaaggctaagagaagtgagggnggnggngggaagtaaaaactggaaagctagcaaaggttgattcatgatgtttaa

SEQ ID NO: 60832 - DNA, 393 bp, Homo sapiens
actttttttttttttttttttttttgggaatttaaagggaaggggggtttttttcccccctttttgggcaaaaaaaaaaggggaactttttaaaccttttaccccggggcttttgccctttcccctcaaaaaaaaaaaacccctttttaaaggcccccctttttgcccaaaaacccccaatttttatttttcttcccccttttttttttaaaaacccccccccttttttttaggccttttttttaccctcccattccgggggaattttaccccccttttaaaacctgggtaaaaagggggggttttaaaaataaaggtgggggtttgggggaatccccccccccccaatgaacccccaaagggggggggggcgccccccttttttttgggggg

SEQ ID NO: 60833 - DNA, 568 bp, Homo sapiens
  misc_feature 21, 39: n = A,T,C or G
ctccaccgcggtggcggccgngtacacctaatctagaanaaaatatttcccatgtgggaggtcctgtctgcattcagtccacccttttctgcctgcttcttcctccaagtgcctcaacctctacatgctcactctcctccccttccctcagcccatcttggtctaagcagctttcacaatccaaaccaaacatcaccagccacccgctgataagtcaccagcatttactttcctgagttactttttctccattcattgagactatggattcatcccaactccttctaaatccctcaaccatccagctatattttggctaacctttgccctagacactctaccagatgttaatgcagtatcaagtgtaaattgtgtcaccctattctgttctacccttttccctgctgccgaaatatcttgctctcctctacctcatccccaaagagcctataaattcagagtatccaaccttttcatggattcactcactgttgttcagtaatacaacttccatattttaaataaatcataaaagatttttgccttctatcaaagtaggaaactttat

SEQ ID NO: 60834 - DNA, 468 bp, Homo sapiens
actttttttttttttttttttttttttgggggggggcccggggtttttttttcccctccaaaacccggggaatggcttttttaaataacccccccccccccctaaaaaaaattttggaaaaaaaaatttttttttcaaattttttttttcgggggggaaaaaaaaagtcccccccccgccccccaaaggggaaaaaaaaaggggaaaccccccccccccccttttggaaaaaaaaaaaaaagggggggggaaaacccgggtccctggggaaacgggggccaaaggggcccaagggggggggtttttcccccccccccaaattttggcgaagggggccccaacccctttgggggccctttaaaaaaaaaaaccccaagggcttttaaaccccaaagggggggggggaaaaaaactctggttttaccccccccaaaaaaaaggtttttagggtttttcaggggggaaaaa

SEQ ID NO: 60835 - DNA, 513 bp, Homo sapiens
  misc_feature 2, 23, 126, 127, 128, 129, 140, 199, 206, 268, 273, 278,300, 314, 321, 350, 351, 352, 354, 384, 390, 393, 398, 399,402, 403, 411, 418, 430, 435, 443, 445, 449, 472, 491, 493,495, 499, 510, 511: n = A,T,C or G
anctccaccgcggtggcggccgngtacgaattctccgcaaacagaaaacgttgtctgcttttatcattgctgtattcccagggacctaaaacagtgtccctgggggtggttaggggaaccttgggnnnngtattccaaanttaaaattatttttggttaaaatgggaaattggaaatgggaaattttaaatttgggccncacgttncttgggatagaaatctctctattcattttctaattattcctcaaaaataaagttcctatganttaanttggnggagggggtagggaaataaccncttttcaaaaattntttttancccatttttggggcttaaaatttcccctnnnanaaaagggctggcccttggggctttaccccnttcctnctnggggnnttnntaaaaaanagccaanttttcccttggnctttnttcccccngntttngggaaaaggcccccccaaaaaanttttttccccccggggttncncngggnaaaaaaagggnncc

SEQ ID NO: 60836 - DNA, 214 bp, Homo sapiens
acttttttttttttttttttttttttgaaaaaacccccccttttttttccgggtttgggggtaaggaaaaaaaggggggttttgtttttccccctgggggtttctccccggggcaaaacgggtcccttttttatttgggggggggtttgacccccccttttggtgggataaattttgatcctaatataacggggtctcctcctttcttaaaacc

SEQ ID NO: 60837 - DNA, 519 bp, Homo sapiens
acaaatgtaaggtttgtgacaaggctttccggagggattcacacctggcacaacatcagagagttcatactggagagaaaccttacaagtgtaatgagtgtggcaagaccttccgtcagacatcatcgcttataatccatcgtaggcttcgagctggagagaaaccttacaagtgtaatgagtgtggcaagaccttcagtcagatgtcatccctcgtataccatcataggcttcatagtggagagaaaccttacaagtgtaatgaatgtggcaaggtttttaatcaacaagcacaccttgcacagcatcagagagttcatactggagagaaaccttacaagtgtaatgagtgtggcaagaccttcagtcagatgtcaaaccttgtataccatcatagacttcatagtggagagaaaccttaaaagtgtaatgagtgtggagagaccttcagtcagatgtcaaagcttgtataccatcatagacttcatagtggagagaaaccttaaaagtgtaatgagt

SEQ ID NO: 60838 - DNA, 294 bp, Homo sapiens
actttttttttttttttttttttggataaatggggggagggggattttttcttggaaaaaggaggattaaaaaagggcaaggcccccttttttttttttagggaccgattgaaaaatttttttggcaaaaaaaaaatttttttccgccttaattgggggagggggtttaaaaggggtggccagggaaaaaattgcggggccccctaagaagttttggaaaaaatttgtaattttttttagggaaaaaagaaaaaaattcccccccgggccttttttttttttttaaaagggggg

SEQ ID NO: 60839 - DNA, 655 bp, Homo sapiens
  misc_feature 8, 19, 23, 31, 32, 36, 42, 48, 53, 54, 57, 61, 65, 77, 115,116, 122, 131, 135, 147, 162, 190, 192, 269, 306, 319, 328,350, 353, 359, 400, 401, 409, 413, 418, 420, 426, 427, 432,442, 443, 444, 454, 461, 462, 470, 471, 483, 491, 493: n = A,T,C or G
  misc_feature 518, 526, 537, 538, 556, 560, 561, 563, 565, 576, 580, 584,590, 591, 592, 593, 597, 598, 599, 600, 601, 606, 607, 608,609, 610, 611, 612, 613, 614, 615, 616, 617, 618, 619, 620,621, 622, 623, 624, 625, 626, 627, 628, 629, 630, 631: n = A,T,C or G
  misc_feature 632, 633, 634, 635, 636, 637, 638, 639, 640, 643: n = A,T,C or G
cccccggncggggttgggnccgnggccccgnngagnttcacnaggggnaggtnnggnaaanaaanaaaacggggttnaaaaatttttccaaaggggggtttttaaaatttccagnnaaaaanttttaaaanccanccccaaaacccnttgggaaaccttttnggggttgggaattggaaagtttgggaangnaaattgtttggaaaaaaacccgtttgggaaggaaaaaaaaaaaccattccaattgggattggaaaaatttccaaagncttttcttggaactttggccaacccaggtgggagttnttaccccaaaagnaaacctttnccagggcctttggggaaaaaantgnaaattnaaaggtttgggggggaagcccttttcctggttttttttttnnatggaagngggnccccntngggganncaaanaaaggggggnnnaaaaaaaatnggggccnncgtttttnnaaaaaaaatttncccctttngncccccccggggggggggggcccgcntttttttnaaaaagatttnnggggggtttcccccccgngggnntngngggggaggatnaatntttntttttnnnngggnnnnnttttnnnnnnnnnnnnnnnnnnnnnnnnnnnnnnnnnnnggngggggggggggg

SEQ ID NO: 60840 - DNA, 312 bp, Homo sapiens
acctttttttttttttttttttttttcccctttttttttttttttttttttttttttttttttttttttttttttttttgggggggaaaaaaaaaatttttttttttttttggggggaaaaaaaaattaaaaaaaaacccgggggggaaacccccccccccccctccccccacccccccaccccccccccccccccgggggggggggcccccccctttaaaaaaaaaaaaagcccccccccccccctgggggggggggggggcaaccccaaaaaaggggggggggggggggaaaaaaaaggggccccccccc

SEQ ID NO: 60841 - DNA, 159 bp, Homo sapiens
acttttttttttttttttttttttttttaaaaaaaggggccattttcccggggggcaaaccccccccaaaaaaattttttattttgggggcccccccccccttaaaattcggaaacctgggtttttttggcccctgggggtaaaaacaaaaagcttttt

SEQ ID NO: 60842 - DNA, 123 bp, Homo sapiens
acttttttttttttccctttaatcatcggaggagaaactaaaggttccctttggtttaaagggaatactaagcccctttgggatttttgaaccaagcttttcctaggcctgagttttattttg

SEQ ID NO: 60843 - DNA, 493 bp, Homo sapiens
  misc_feature 24, 26: n = A,T,C or G
acagatgaagctcaggttccccangnaaatattgaccaggttgctgttgtggccatcaatgttctgttttttgtgactctatttatctttgccctttttgaaaccatcattactccattaacaatggatatgtatgcctggactcaagaacaagctgtgttatataatggcataatacttgctgctcttggggttgaagccgttgttattttcttaggagttaagttgctttccaaaaagattggcgagcgtgctattctactgggaggactcatcgttgtatgggctggcttctttatcttgttaccttggggaaatcaatttcccaaaatacagtgggaagatttgcacaataattcaatccctaataccacatttggggaaattattattggtctttggaagtctccaatggaagatgacaatgaaagaccaactggttgctcgattgaacaagcctggtgcctctacaccccggtgattcatctggccc

SEQ ID NO: 60844 - DNA, 513 bp, Homo sapiens
  misc_feature 472: n = A,T,C or G
acaactttgctatttattagctggtccttgacatgaccaggttagcaaggtagaaagattacaaaggttggcatgaagaaggtaggcttgtatgagtgatggtggatgataacaaatctggggaaatgaaatgaactacagacaggacacatgcgatgtgcttcagagtgtgcagcttttccaatcaaggaaagcttcgtgcaggaggccaaacagaacctgaacgctgcagtatgacctcagggactcacatcactttctgaaatatctaacaaaaatcgcatttctgctgttgcactctgaattcctagaacttgtgcgtgaaccatttcactgcattcattttccccatgttattctttaaccagccttctttcttgatcacattcctagatctgagatgttttcctttcagtcttttcggcataagacctaattacatagctagttgtccagtaatgtctgggaaganaaaaaccttaagtttgtcatctctcagtaggacaccccggc

SEQ ID NO: 60845 - DNA, 345 bp, Homo sapiens
actttttttttttttttttttttttttgggggaaaaacccccttttttttaaaaaaattaaatcccccatttaaggttttcccccccccgggggggggaaaaattttaaagggtttaaaaatttttttttaagggcccccctttggggggccctaaaaaacccccttgggattttttaaaaaacccggaaaacccttttttgttcccaaaaccccccaaaaagtttttttcgggaacccctttaaaaacaagggttttaaatccccttggccctttttttccaaaaaaaacccccccgttgggccccttaaaaaataaaccgccggggggtttttttttttaaaa

SEQ ID NO: 60846 - DNA, 359 bp, Homo sapiens
acttttttttttttttttttttgggcccaaaaaatttttaattaaaaaggggaaattggtgggaatccccgggaaaggcccaaaaattggggaaaaaaagggggggtttttttttttccaaaccgccttttttttttccccttttaaaaattggggaaaaggggaattgggggggaataaattacccctaaaaaaaaataaaggttaaggggggggaggggcccctttaagggggggaaaaaaaacccttttttttttggaaattcttcaaaaaggccccctttggccaaaaaccccttttccggggcccccccccccagggaaaaggggggggggggaataaaggggtttaacccttt

SEQ ID NO: 60847 - DNA, 127 bp, Homo sapiens
acttttttttttttttttttttttggaacccccccctgtttgggttcaccggggggggaaaaaaaacttggggggtaattgaaaaattggggccttaaattggcaatccaggttttaaatccccccc

SEQ ID NO: 60848 - DNA, 274 bp, Homo sapiens
acttttttttttttttttttttccaagggaccccggcccttccggggcttttttttaaccccctttttttttaattccaaccccccaaaaaaaaaatccatccccttttgggggggggccaggggaaaaattgttttttttttttgggaccccccccttcccccccaaggggggggcttggcttaaaattcccggcccggcggggaaaaatgcccccaaaattaacattttttgcttaacttccaaaaggggaggccccacatttttatttggg

SEQ ID NO: 60849 - DNA, 563 bp, Homo sapiens
acatggctgcattgtgttaatatgaggagaaattcagcaggccactcgatggagcctcaggcctcaaaatggaggcccatggtcatactttggctggcattcatagccaatatttaaacgtatgggattttacataaagtcaatttttccagcttctttggaaaattgggaaaaaatgtcaacacagggctcccattccctcatggcagcaatagtctggagtggacagtagctactcccttaagatggggcatgagctctttaattagatacagttcttacctattcccttttttttcattcctaagcaattttttaaaaaattactgtgcttacttacagactagtgcttttcaaacttttatctgtagatgaagcacctgaggaatcctattaaaatgccaactctgatccagtagatctgggtgggtcctgaaattctgcattcctgaccacatcaaaggtgcccatggctgctggtccaaggaccacattttaaatagcaaggcagtatataattttcagttttcaacctttccaagttttaaaggacttgactttct

SEQ ID NO: 60850 - DNA, 601 bp, Homo sapiens
  misc_feature 328, 334, 414, 416, 428, 459, 493, 496, 502, 512, 529, 566,571: n = A,T,C or G
tacataggcatcttattcactgcaccctgtcacacccagcaccccccgccccgcacattatttgaaagactgggaatttaatggttagggacagtaaatctacttctttttccagggacgactgtcccctctaaagttaaagtcaatacaagaaaactgtctatttttagcctaaagtaaaggctgtgaagaaaattcattttacattgggtagacagtaaaaaacaagtaaaataacttgacatgagcacctttagatcccttcccctccatggggctttgggccacagaatgaaccttttgaggcctgtaaggggattggaatttncctatnagctgtaatagtgggaggtttggggggttcatttgaattaacccttccaaaaatccatttccaataaccctgggaaaatntnttaaattttcanaaaattaacacctggctgaaatttgattcanaaggcctgcccttttcatatgtttggcccaaatnccncttggngatcctaaanaccagggaatgacattnggccttttttaacaaactttaattttttaaaaagggnggacnatgggggggtaaaaaaaaaaaaaaaaaaaa

SEQ ID NO: 60851 - DNA, 548 bp, Homo sapiens
tcaggtacgcgggttcaagaaagacatttagacagtatggaaaagttctgattccagtgcatctaataacttctggtgtttggtttggaacattttattatgcagccttgaaaggagtgaatgtcgttccttttctagaactcattgggttacctgacagtgtggtaagcatcctgaaaaactcccagagtggaaatgccctcacagcatatgccttgtttaagattgcaacacctgctcggtataccgtgactttgggaggaacatctgtcactgtgaagtatctgcgcagtcatggctacatgcccacgccgccacccgtcaaggagtatctgcaggacaggatggaagagacaaaggagcttatcacagagaaaatggaagaaacaaaagatagactcactgaaaagttacaagaaaccaaagaaaaagtttcctttaagaaaaaagtggaataaggtgccttatatagcagtatagaaaattcctgcactttaaccctttggaaactatggggcaaagatacatgtgtctgattatttttttgg

SEQ ID NO: 60852 - DNA, 299 bp, Homo sapiens
tccaccgcggtggcggccgagtactttttttttttttttttttttttggggaagggggtccctttttttccccgggggggaaaaaaaaaagccccttttggttaaatggaccccaaaccccgggggcaaaaaaaaacccccccccttaccccccaaaggggggggatttttgggcccccccccccccccccttaaaattttttttttttaaaaaaaaaaaaggtttcccctttttccccagggttattttacccccctgaaccaaaagaaatcccccccctgggaccccaaaaaggggg

SEQ ID NO: 60853 - DNA, 278 bp, Homo sapiens
  misc_feature 7, 38, 55, 109, 246, 265: n = A,T,C or G
ccaccgncggtggtcggcacgcccgggtcaggtacagnaaccaggacggctgtgnatgataggaaatagggacaaacctgttgaaccaaacagcgggagcaaacgcggnaagttaactggatgtgggaagcccaagtattaaatcagaccacgaggacttggaacttcagctcttgggaacactccctctcgacaaacaaattggaaaaacagattttggaccaggaccactgaaataaacaaatngcaagataaggaacagttngcctagaaaagaa

SEQ ID NO: 60854 - DNA, 331 bp, Homo sapiens
acgtaataatcgtggcttttgaattaacaactttgcgttaaaatgctatggcatgtatttatcccttaaaaataatccattttctctggaaaagctacaaaaggaagtggcaccagttgttacctctacagagaggaactgggtatctagggtgggggtggggtgagtaggagacattcttttcaatgtataccctttcatttattttgatttttgaattatgtgctggtaactttaattgaaaaaatgttgtattaagtaaaacacatagaaaagcatacacatatattgcttaatgaattattataaaataaatacccttctaatatgt

SEQ ID NO: 60855 - DNA, 361 bp, Homo sapiens
  misc_feature 146, 148, 153, 154, 166, 176, 186, 191, 195, 200, 213, 296,348: n = A,T,C or G
actcccgcctggcagtaacagggtgtcatcacttcattctcttgctggagtgatgtcagagaaagccggctaaagcaggttgaggtaaaattcagagtctcataacagaatactcaaaatgtttgtgcttcagttaaaaatcactncnacttnnattggcccaagnaacccagggnaattatcctncaatncttnaatgnaaaaataaaaagncaattcagtaagatgcccaatttccaaggataacagagatatttaggaatagtctggacaggatttttaaagcagcccattgnataaaaaaatgcttcatcaagggaattacaaaacacccctcaaaaattaaantgggaaaaaaaat

SEQ ID NO: 60856 - DNA, 425 bp, Homo sapiens
actttttttttttttttttttttcccccaaattaaatgttttttaaaaaaccccccccccttttttaaaaaaaaaaattttttccccaaaattttgggccttggggaacaaaaaaatttttttttccctcccccaatttttaaaattaaatttttgggggcaaaaaaataatttttcccaagagggaacttttcgaaaaaaaaaattttttcccggggttattttcccctttttttgggacgggccccaacctttttttcaaaaattttttccccgggccctttttttttttttttttttttttttaaaaaaaaatttttttttttttttttttttgggggggggaaaaaaaaaaattttttttttttggggggggggggggggttttcccccccaaaaaaattttgaaatttttttttggggcc

SEQ ID NO: 60857 - DNA, 889 bp, Homo sapiens
  misc_feature 25, 130, 168, 192, 211, 259, 263, 293, 308, 366, 467, 493,503, 531, 550, 552, 555, 561, 563, 568, 572, 574, 576, 580,584, 586, 588, 590, 592, 593, 594, 596, 602, 619, 635, 646,647, 649, 660, 671, 683, 710, 712, 732, 733, 743, 747: n = A,T,C or G
  misc_feature 748, 749, 750, 763, 766, 768, 769, 775, 808, 815, 819, 821,822, 823, 831, 838, 839, 840, 851, 853, 855, 873: n = A,T,C or G
cttccccaaccccgtccgggatggnggccggggccccgggggggggggcccggggggccggccccggggccgggtcttttttggggttgggaacttcttaaagaattaaaaccccttccggggggccccngaattccgccaaccggccccccccccccggttggggcnggggcggaaaccgaaccccccaanttttccgaaaacccgttcnttggcccccttaattcaaaaccttttttccggaattgggttaaggttncggnccccgttgccccttaacccattgggttggnaccccaaccgggggnttggaaccggggggggaaaattcaaaggggggttttccggaattttccccggggaagnaaggggggaaagcccccttggaagaaaaaaaccggggctttaaccccaaccattccccaaaagggggaaaaagggggccaaggcccaaggggccggcccgnccaaaaaaattttaaaccccccaacnttcccccggnaacccccccgggggggggaaggggttanggtttggaacccgtaaaananaanaaatananaaaanatanananatanatananananannngngggtgntctccctttgtgggggncccgtttttttttttnaaaaaaaacanntntgggggggggnatttccccccnccccgcgtgttnttttttgaaaaaagaaaaaatttttcntntattttttttttaaaaacanntttttttttntttnnnnatacccccccccnggnannaaaaanccttttttgagggggggggggggggggggggcnccccccngggnannncccccccnaaaaaannnttttttgtggngngncccccccctctttttttnaagggggggggggggg

SEQ ID NO: 60858 - DNA, 637 bp, Homo sapiens
  misc_feature 28, 35, 37, 41, 43, 48, 49, 50, 52, 63, 65, 67, 68, 69, 70,76, 77, 80, 83, 91, 92, 93, 94, 95, 96, 103, 110, 135, 136,137, 138, 145, 146, 148, 157, 166, 167, 168, 169, 171, 173,176, 181, 183, 189, 192, 193, 200, 208, 218, 222, 223: n = A,T,C or G
  misc_feature 225, 241, 257, 259, 266, 273, 286, 338, 360: n = A,T,C or G
ggacctccaccgcggtggcggccgacgngcctggngncacnantacgnnnanctactctctgngntnnnntcatcnnccngcntgatgtgnnnnnngcacgcnctaagcnactcatggcacgtaaaacgtaggtnnnnggaatanncnccatggcantccaaccgnnnncngnagntgcananccaaantannccgcacnctttaaanatagtggatncccnngntctagcactgactagngtgcacatcttaccanangcttggnccctgtnggggggccctggngcccagcatgatggtgccttgaatgagggattcattgcgcgctgtgaacatnatcatggtaatctggactacantggctttatgcatacagttacatggaaagctgaaagtatcccgcctcttcttgcagttaacctgggttaggctctaatcaatagtagcttctctccttactctcgggacacagtgtttctatcctactagttacctaagactttataagtgaaacataaaaaataatgaaaagaagccttgctaagttgcttttatcagtttcacaacatggctgaagctgcctgcagtataatccctctccccatctctaaaatgacatttaacctataaaaaatt

SEQ ID NO: 60859 - DNA, 406 bp, Homo sapiens
actttttttttttttttttttttttttttttttttttttttttttttttttttttttttttttaaaaaaaaaattttttttttttttttgggaaaaaaaggggttttttttccggggggggggaacccccctttttttttgggggaaacccccgggggcccccttttttttgttttgggggggggcccccaaaaacccccccccccccttttttgggggaaaaaaaaaaacccccccccccccccccccgggggttaaaaaaaaaaggggccccccccggggggggaaaatttaaaaaaactttttccccccccccccccggggggggggggccccccccccctttttttccctttaaggggggggaaaacccccccccggaaaaaaaaaggaaaaatttttcccc

SEQ ID NO: 60860 - DNA, 219 bp, Homo sapiens
caccgcggtggcggccgaggtacttttttttttttttttttttttttttttttttttttttttttttttttttttttttttttttaaaaaaaaccccccccctttttttttgggggtgggggggaaaaaaaaaagggggggtttttttttcccccccggggggtttttcctcggggagggggggtttttttttttttggggggggggggcccccccccc

SEQ ID NO: 60861 - DNA, 381 bp, Homo sapiens
acgcggggtagtcttttatccctcaccctcttcccaccctctctttctgagttcccaaagtccgttgtgtcattcttatttctttatatcttcatagcttagctcccactcaggagtgagaacaatgtttcgttttccattcctgagttatttcacattgctaagaaatgccaacaatcatctgagccttcagcaagtcataatctttttgctgggagagggccttgccttgatgtggaggtctactgacttatcagagtggtggttactaaaggttgtggtggtggtggcaatttcttaaaataacacaacattgaagtgtgcaatattgaatgacttcctttcacaaaaggtcctctataacatgcaatgctgtgtgat

SEQ ID NO: 60862 - DNA, 394 bp, Homo sapiens
acttttttttttttttttttttttttttccccctttcccttgaatttttttttccaaaaaaaaccccaaaagagatatgggggaaaaccaaaaccccccccccttggcatttttggggggtttaaatttgggcttcccggccaaaaaccttttatgcaaaaaaccctttttcccacccctttaaaaaaatttaccggcttttttacctttttaaaattggggggcctggaaaccccaaaatttttttcccaaaatggattccccttggtttaactttcccttggcttttttgggaaaggcaattttttttttgggttcctttttcaccaaaggataaaatctggaaatttttttcttccccgggggttaaactttgggctttaaggcccccggt

SEQ ID NO: 60863 - DNA, 462 bp, Homo sapiens
acttttttttttttttttttttttccccttttaagaatttttaaacggggggaaaaaaaataaccccatttaccccccccccggcctttttttttaaaagggttaaaaaggaaatttgattttttttggaaaaaggggttctttttttaaaaaaaattcccaaaaacccgggaaatttttttttaaaatttccccccaatttttaaacaaaatttggaaatgggaagttaattttggcccccttaatttttttaaaaagttttgggggccaaaaaatgaaaagttcaaattcgccccaaattttggggggggaaaaaaaaattttttgccccccccctttaagtggccccccctggtaaaacccccgggggggccaccgggttaaaacccttaaaaggggggaccgcccctaaggggaaattttaaaaaaaattttgcccccgttaacatttttaaaccccc

SEQ ID NO: 60864 - DNA, 500 bp, Homo sapiens
gattggaacctccaccgcggtggcggccgagtacgaatcgtctcctggcactgtgcaggcccacagctgacggcgatgacctccttcaccagcttcttctccttgagccgcacagcctcctccaccgcgatctcacagaaggggttcatggagtgcttcacaccatccgtgaccacaccggtcctgtcaggcttcactcggatcttcacggcgtagtcgatgaccctcttgacagctacgagcacgcgcagctccgccatcttcccgccgcagccacttacagggtcagcccgcaccctcagcggctcagtccagaagccccgcgtacctgcccgggcggccgaggtacaggtaagccctggctgcctccacccactcccagggagaccaaaagccttcatacatctcaagttgggggacaaaaaagggggaagggggggcacgaaggctcatcattcaaaataaaacaaaataaaaaagttttaaggcgaagattaaaa

SEQ ID NO: 60865 - DNA, 307 bp, Homo sapiens
acttttttttttttttttttttttttttttttggggacaaaaatttttaagggggaaaacccctttttttggggggatttttacccccaaaaatttttttaagaaaaaacaggccttacccccccctttgaaaatttcaaaaaaaaattccttttataattaccctttttaaggccaaaaaaacctttttaaaaaccccccccttattttccccctgataaaaaaaaaaccaaattttccctttttcccaaaaaggggccaaaaaaaaaaaaaagggccctaaaaaaaaaaccccttgggggccaaa

SEQ ID NO: 60866 - DNA, 268 bp, Homo sapiens
acttttttttttttttttttttgggagggggccatttggggccttcccaagggggacggattaaattttttccaaaagggagggcccccccctttggtttacccccctttcccaaaaaaaaaaaagggggttttttaaatcccaaaagaaaaaatggcccccccgggggggttgggaacttaaaaaattttaaaaaggggccccctccccaaaaaaaaggggaaaaaaattttgggaaaattttttaaaacccaatttttggggggaa

SEQ ID NO: 60867 - DNA, 533 bp, Homo sapiens
  misc_feature 7, 15: n = A,T,C or G
actcagnattccagnaagcctatggagtgaaaaaggctctacacctcgattcctgacagtgaagttggagaatctcaaagacagagaatctctctgtttgtttaaaaagcaaaattttttgtctttttaaaaaaagcttacaaaattgagaaacctcctttgtcataagtgattttaaaaaagagaggagggaatcataaacaatattgagaattaaaattggaatgctaatatagatgctttggcatataaaagaataacaaggggtcatcatgaacaatttatggccatatatttcaaatgttagataacatgaccaaaataccagaatgaaaaactccaatagccctgtagccaaggaagaacttgagttaatagttaaaagtcttcccacaaagaaaatatcaggcccacatattttataagcaagttattccatacatccaaacacatgcactcatacacaaaacatcccagactacacagctcatgaggttagcataaacttgataccaaaactcagtaattacagt

SEQ ID NO: 60868 - DNA, 435 bp, Homo sapiens
ccaccgcggtggcggccgaggtactttttttttttttttttttttttgggggggggggaaaaaaggggggggaaatttggcccctaaaaattttttaaggaaaaacctttttcaacccgggtaggccaaaaaaaaagggggcccggttttgcccccaaaaaagccccaaaagggggattggcccggggggaaccccggggaaaaaccccattttttggaaaaaaaaaaagggcccaaggggggattttttttaaaatttgggggttagggaatgagggcccagggcctttaaaacccccaaaaaaagcccccccggggcctgaatttttaagaaaagggggatttttttttaaaagggggaccccgggaaaatttttttaaaaaaaaaaaaccccccaaaaagcccccccgccccctaaaaactaggggaccccc

SEQ ID NO: 60869 - DNA, 232 bp, Homo sapiens
actttttttttttttttttttggggtggggggaaaaaggggggggaaatttgggccctgaaaaatttttttaggaaacacttttttcctaaaggcaggctccaaaagaaaaagggcccgttttggcccccaaaaacgcccaaattggggacttgtccctggtctactcccacgcaaaacccccattttttcaaaaaataaaaagagccaatgggggaatttttttcaagatt

SEQ ID NO: 60870 - DNA, 507 bp, Homo sapiens
acattgcctctacaaaggcatcttgttttaatgctgccaaaatcaatttgtttagattgtcttcgcagttttaccgacttagaagaacttgatgagacagagttatatatgtgccataaatgcaaaaagaaacaaaagtccgcaaaaaagttttggattcaaaaactacccaaggtgagtgttgaattttgagttatgaagcaatttcaatgggaaagtgcttgactgctaagaccatgtctataactttacactatgtgaactgttctgtatttttctctaggattttcagtaaaagctaaaccccttacagaatgaatgcataaggtatgcatggaagaatgattgatagggcagctaaaatgttatttactgaactgatagtagtatcaaactttgactgaaaggtaaattaggtgttcacaatctttgaccgcatctctgtcctccaggtgctatgcttacattttgaaaagatttcattgggacagcatatttaagaaataa

SEQ ID NO: 60871 - DNA, 520 bp, Homo sapiens
acttttttttttttttttttttttttttgtttccccccccccccaaaggaaaatttttttaaagggggcttttaaaaaaacccaaagggggtttttttttttttagggggatccccttggggggggttggaaccgcccccctttaaattaaaaaaaaaaatttttgggttttttaaaaggcctccggggttttggggggaaaaaatttggggacccaaccttttcccaagggggggggggggtgaaatttttaaaaaaaaattttccttttaaaaaaaacccctttgttccccccccttggcccccgaaaacccttttttccccaaaaaaaaaaaaataggcccccccccccccaaaaaaaaaaaaccccttccccccaaaaatttccaaccaaaattggggacccccttttcccgggggggggaaaaaaaaacaaatttggggaaaaaaaattggttttaaaaattttaaaacccccttaaaaccctttttaaaaacccccaaattaaacctggggggg

SEQ ID NO: 60872 - DNA, 127 bp, Homo sapiens
actttttttttttttttttttttttgggaaacccccgggggggggaaacaaggggggaaaaaaaaccttggggggaaaaggaaaaattggggctttaaattgcccctccaggttttaaatccccccc

SEQ ID NO: 60873 - DNA, 261 bp, Homo sapiens
ctccaccgcggtggcggccgagtactttttttttttttttttttttttaaaagggggggtttttttgttaacccaaggtgggggggaaggggtaaaataaaaattttgttcccaaaaacccggggtttaaaaaattttccccccctacccccccaaattttttaaaattaagggccaaaccccccccccttacaaattttttttttttttttaaaaaaaaagttttttttccccaaaccggttttttaaatttttatcccc

SEQ ID NO: 60874 - DNA, 297 bp, Homo sapiens
  misc_feature 17: n = A,T,C or G
tccaccgcggtggcggnccgagtacttttttttttttttttttttttggccccccggttccttttttggagagggggaaccctttttaaagcccccttttggaaaaaaaaccctttttccccctcccccgggggccccatgggggggccgggaaacccccttaaaaagtttaaggggcaaaactttaaagggggccccccccccacgggggggcttaaaatccccccgggttttttaaaattaaaaaaacccgggggccccccccccggggcgtttaaaaaataagggaacccccgg

SEQ ID NO: 60875 - DNA, 223 bp, Homo sapiens
actttttttttttttttttttttttggaaaaaaaaaaggttaattgccccaatttttggggggcttaaccggctttttttttgggaaaggcccaaaaaaacttaactttttgggggaagggaaaggggaacccgccccttttttcttttgcccccgggaaaaaaaaacccaggggggggggtcccccccttttcaaaccacccatttttaaaaaacccttttt

SEQ ID NO: 60876 - DNA, 352 bp, Homo sapiens
actttttttttttggttttttttttggtttttttttttttttttttttttttttttttttttttttttttttttttttttttttttttaaaaaaaaaaaaaaaaatttggggcccccccccccggggggggaccccccccccccccggggggggggggggcccttttttaaggggggggaaaaaaaaaaaacccccggggggggaaaaaaaaaaaggggccccctttaaaaaaaaccccggggggggggccccctttttcggggggaaaaaaaaaacggggggggggggccccccccccggggaaaaaaaaaaaagggggcccccccccccccccccaaaaaaaaaaaaaaa

SEQ ID NO: 60877 - DNA, 136 bp, Homo sapiens
acctcagcatgttatggtgcatacaggacttaaaatgacccatgtcgtccctccaccttcgcaagaacctgagaatggcagttcatatgactgaaacaaggacgtgcctgttgcttattacaacacgcgtagtatc

SEQ ID NO: 60878 - DNA, 282 bp, Homo sapiens
acttttttttttttttttttttttttttttaaaaccaacccccagagagaaggggttaaaacggggggaagggcccaaaaaaaaaaattttccaaatttcggggggggaaaaaagggaatttttaaacccctttcccaaattccccccaattttataaaaagggattaaggggggcctttggggattgggtaaaaaaaaaacccccctttgaaggttttttttttttcccccaacccccttttgtttttttggcccccttgggttaaaaaaaaccttttggg

SEQ ID NO: 60879 - DNA, 663 bp, Homo sapiens
  misc_feature 19, 553: n = A,T,C or G
gcgggggcggccgcccggncgggtacagctggcaaggttcatagaatataatggctatccccctctgccaaataagactatccacaacccagctcagacacagtggttatatgattttgtgtccatacaggagaggccttggtgtcttcacatacattctctgagccaacatctatccagcagccctgacctcctgctataatttaagtctatttccttttaatctaataagagttgatagtaaaaaggcaggtgatggaaatcagtgtataaatcacaatggagtatattggcaactccacagcttatagtttgataaaggcaaatacatgaaaaataaaaatgctactaatgccccaaggtgtctatcaaaatgatgtagggggtatcttaaactgtccaaggcaatcatgcattgaactttattcctatgcagagccaaaacgaatagtgttgataaaatagctaaactttctaaactggagaggaggctacagtgccagagagttattgtctcttttgctttaaatggtaatcttaaaagttgcattgngctcttcctttgttttgggatagatatatatagagagagatctataaggaagtttatttcttaggaagtgcactgaataatgtatttcttttacagtgtaatatgggggg

SEQ ID NO: 60880 - DNA, 558 bp, Homo sapiens
ccgcggtggcggccgagtactctgtctacaccagaaggtgctttaactgcaaaatatttgagaaacaattcagtctctcaaacattttggcacagttcatcactccagtttgttactttcttgagaatagtccattttttgtttttgttattataccgtatgttctggtcattggaaacagaacagctcatagttgggtgatgtaatataataacagtaatataacctagtagtcattttgcttcaagtaatttaattagatagcaaaatcactgcggtttgtttattacacttgtagggctttttgtcttactcagtgaccatcactacgaatgtcttacattgaagcacagactgcagagcacttgttaacttagtcctcctgcataatgcactcgtgaaaagtagtgcttgctaggtgtttgaagattttatgatccgtgtgcttgggctcgttgagttatttgtaaaataaacatttagtttgagttgatgcagtaagttttttggactagtagtatccaggtccctactctactgaaaatataatcttcacta

SEQ ID NO: 60881 - DNA, 207 bp, Homo sapiens
acttttttttttttttttttttttttttttttagccccacccccaaagccttttttgggattttttaaaactttttacaaaaaaacccccccaaattttaaaaggggcccccaaattttaaagtttttcccctttttttaaacaaaatttatttcccccaaaaaggaaaagctttttttttaaaaactttttcaaaaaaaaaaaaaa

SEQ ID NO: 60882 - DNA, 331 bp, Homo sapiens
tccaccgcggtggcggccgacgcgcctggttctttgtctcattttatttaaataaggaattttttattattaaaatcccagcgttctgagttattgaaaggctttcttccattttgagagctttaggtctttttgggatgagaacattttagttgcctagtttgtttcttaaccagtgctcctcctttgtaaacacagataaatggaaaccattcttttcactgcctatgaaatctacatatcccctactgggaccgggtgtctgtattacgattggatgttcaattaaacgggtgtggcacgttataatgatccttacgtgtaaagaaat

SEQ ID NO: 60883 - DNA, 361 bp, Homo sapiens
acttttttttttttttttttttttttcccctaaaatccccaaactttttttttttcccaacttttaaaaaaaaccccccccttttccaaattttttttaaaaacaaaattaattttcccccccttaattggggggaaaattaaaaaaaaaaaagggggggggggaaaatttttaaaaattaattagggttcccccctttttttttttaaaaaaaaaaaccctttttccctaattcccctgaagggtttaaaccggccaaaggaaaaaacccccccctttttccctttttacccggtttgggaaaataaaccccccttgggctttttaaaaagggcttttttaaaccttgaaaaaaaaaaaa

SEQ ID NO: 60884 - DNA, 252 bp, Homo sapiens
  misc_feature 151, 157, 162, 174, 175, 193, 222, 223, 224: n = A,T,C or G
acagttattttcagaccttggaagattcagatagctacaaaaggcaggctgcgcctgggtaatttctgctttgacagattatttggaagctcggaagtgaaattctattttatcatcccaaaagccaacatggagagtttcaatacttttngctaanccggnatgaaaaatatnntggcgtcatgaattattntaaagaaatctccttacaacatgcattannnaccttctgcatcatggaatggcttaaag

SEQ ID NO: 60885 - DNA, 417 bp, Homo sapiens
actttttttttttttttttttttttaaaacaaaaaaaaatttttttttttagggaaaatccaaattcctagggccctttataaattcccccattttaatttttggatttagggaaaaaaggaaccttttattaaaattggaccacaaaaaacctttttttaggaattttgggggccgggggttttcccccccccccccccctttttttaaaggccccccgccctggggggggaaattttttcccaaaagggggggccaaaaaaaaaaacaaacttttgcccaagaacctaaatttttaaaaaacccagggccatttggaaaaagggaatttatttaggggggaaaagggccccttgggggttccccgggaaccccggcccttcttaaggggcccgaacctttttttggcaaaaacct

SEQ ID NO: 60886 - DNA, 414 bp, Homo sapiens
acttttttttttttttttttttttgggggggccttttttttttccaaagtttattttttgggggggggatttttaaagttttttttccctcccccctaaatccccctggggttaaaaatcccaaaaaaaataaaaagggcccaaaaaaccggggaaaaaaaaaaaagtgaaagcccccaattttttaaatccccgttgggcttttttgggtttttcccctttgggggggggggaaaaaaaaactttaattttaatttcccaaaaacccccggggttttaacccttttcccccctttttaaaaaaattccccaaaatgggttttttttaaaaggaaaagggtttaattgcccccttttccccaaggggggggggggccctaaaaaatttaaatttttgggaaaaaggaaaaaaaa

SEQ ID NO: 60887 - DNA, 501 bp, Homo sapiens
  misc_feature 2, 58: n = A,T,C or G
gnggccgcccgggtcaggttacatgggaagtgcccattcttacttgtccctccctggnaacagctacagtgcagtgtccgtaaatccccagtagttaggctctcaaagtggcacccagctgaggctgctctaggctcacatgactgtcagattctgtgtggttttctttttggagcgaagtccctgtgcaatcttgaggcaggctatatgtcaggcctgaggccctagcgagtcaaagttttctcctgtagccaagattgtaaaagcccatttggatgtgaagccctaacagtaagagtttcctaaaagtaagaatttctcttattatttccctgaatccagagacttttcccatttttcattcagttcttggctgggcaggatgctgtgaatgctgtccttacttacttctggtgcttcctgtctcttctctggtgaatcctactgtattctcctagacaagctctttgaaatgtaagcacctacttactattctggttc

SEQ ID NO: 60888 - DNA, 426 bp, Homo sapiens
  misc_feature 1, 45, 113, 140, 199, 212, 237, 240, 254, 268, 300, 315,318, 319, 326, 329, 351, 357, 362, 378, 379, 381, 389, 402,410, 411, 412, 414, 417, 418: n = A,T,C or G
nctccaccgcggtggcggccgcgctctcttgccaggacatcaagnaatccagctgcaagaatgagtggggtaaaaccccagaacgccatgcaaagctgccatggccctggagnaaaaagctgaaaccaggcccttttggnatcttcatgcccctgggttctgcccgcacgggacccccatctctgtgacttcctggganactcactttctanatgaaggaagtgaaaccttatcaanaanatggggtggacccnctgacccacctccnaggctgggtggcccgaggctggctgggcaaanttttttttaaagggnccnnttaaacnccnattaaaaacctttttgaccccncggaanttttnaaaggggccccctttnnanaaaaaaanaaatagggggggntttttttnnncnccnnaaaaaaaa

SEQ ID NO: 60889 - DNA, 226 bp, Homo sapiens
acgcgggggactactgcctaagtaatttacaccagccagccctgtatttgtaaacctagccatggccatccccttatgagcggacgcagcgataatatgctcttcgcatctaaaataaaaatgccctagcccacttcttacaaaaaggcacacctacaccacttatgcccttactagttattatcgaaaccatcaggctactcattcaaccaataggcttggctgt

SEQ ID NO: 60890 - DNA, 430 bp, Homo sapiens
cccgcggtggcggccgaggtactttttttttttttttttttttttttttttttttttttttttttttttttttttttttttttttttttttttttttttttttttttttttttgggggggggaaaaaaaaaaaaaaaaaaaaaaaaacccccccacaaaaaacccccccaccagggggtgggggaaaaaaaaaaaaaaaaaaaaaaaaaaaaaaaaaaaaaaaaaaccccccccccaaaaaaagggcccccccccccccccccaaaaaaaaacccccccccccccccccaaaaaaaaaaaggccccccccccccccaaaaaaaaaaaaaccccccccccccccccccccccccgggggggggggcccccccccccctttttttttccggagaggggggaaacccccccccccccaaaaaaaaaaaaaaaa

SEQ ID NO: 60891 - DNA, 558 bp, Homo sapiens
  misc_feature 515: n = A,T,C or G
acccactgtaaagccactaagagagacagaggggaaagggagagggtcggcgtgctctgttcccttcttgacttgcagacttcggagagcaggacccatgtgcctgggttcccaggttatcctgtgcctaatgcagcatcctggcctctcccacagcgtctttctccccacaatcctggaaggcttatttttccagttccccatgtcctctcttctttagtccctgctggtctctgcagtgcagagcccatcccccagcctcctgctctcctccctccatctccgtctgctgcctaatgaggctgaaaatgagtctgacatcgtccttcatcttcctgctccagccgagaaggatgacagcatcaccccctccctgccctgagcccatctcacatccaggcaaaaccgggactagatgatcaaatctctcttccctgtgcctgcccccttgaacctgggaataaaagggaaggcagaaggggacaatctgatacctgaaacccccacctctatangttcccttccctaagggttacccagggaagtcagggaaaaagg

SEQ ID NO: 60892 - DNA, 337 bp, Homo sapiens
actttttttttttggtttttttttgggttttttttttttttttttttttttttttttttttttttttttttttttttttttttttttaaaaaaaaaaaaaaaattttggggcccccccccccgggggggggcccccccccccccggggggggggggggggctttttttgggggggggaaaaaaaaaaaaaccccccgggggggaaaaaaaaaaaggccccccttttgttaaaccccccggggggggggccccttttttttgggggaaaaaaaaaaagggggggggggcccccccccccaggaaaaaaaaaaaaaagggggccccccccccccccccc

SEQ ID NO: 60893 - DNA, 535 bp, Homo sapiens
acttttttttttttttttttttttgaaaaaaaaacccttttttccttttggcccaaggtttttaaaaaaaaaaaaaaaaccccccttttggtgggggggaaaggtttaggcaaaacccctttttttttggggggggcccttaaaaaacccgggggccaaaaaggtttttaaccccccttaaaaaggaccctttaaaaaaaatttttccccaccccacccttggggccccccaactttggggggttggccagggggccccccctttttttaaaaaccttcctttccctatttaaaaaggggtttccccaaaaacccaaaaaaggggggccccggcgggcaaaacccggggtttaaaaaaccaaaggggcctggttaatttttttttccggggcccgggcattttttatgggtttgggggttttccccccctttttttaagggggttttttaattcccaaaaaaaaaaccccccccttttaaaactaggggaccccccggcccgggaaaatttaatttaaacttttttaatcccccc

SEQ ID NO: 60894 - DNA, 233 bp, Homo sapiens
agctgtttcctgagtaaaacacggccagtcaatcactgggcatagctgtttcctggtgtaaaacgacgggcctggctgccggtctgacctgtgagcttgtgtaagagagcccggctgccactctgccctctgagaagtgtaagaaggccacagagcatgggggtgttggcgatgaggagcggtaaagcagtgctagtgatctaatagccaaatacattaacacggacactgga

SEQ ID NO: 60895 - DNA, 248 bp, Homo sapiens
ttttttctttttttttttttattctttttttttttttttttttttttttttttttttttttttttttttttttttttttttttttaaaaaaaaggggggttcccccccaaaaaaaaaggggggggggggcccccccccccccccccggggggggggtttccccccccggggggggcccccaaaaattttttccccccccccccaaaaattttttgcccccccccccaaaaaaacccgggaaaaacccc

SEQ ID NO: 60896 - DNA, 303 bp, Homo sapiens
  misc_feature 31, 33, 40: n = A,T,C or G
acaaaatctgacaattaagacacccacaagnanacacagnaattatctcccaataaaattgtctcataaaaacctggctcccacaaatatggaaagggagaaaactagaataaaccctgtggtgtcgaattggagatatcagtgtgaactcgtgtatttcagtctatagagatagatgtaaatatgtttttgtatgtatagtcctttgcactgatgtgagagcaatgacactccaatagtaatgaccacacccagcacccaggtccaccaaaagacaaagtgctatggactgaattatatccc

SEQ ID NO: 60897 - DNA, 563 bp, Homo sapiens
tccaccgcggtggcggccgccgggcaggtacatgactatttaaagccaggggattatctttctataaatgtataactggcaacctgtatcttccctctttgttgcccatatagccggagccctttttctcatttgagaatctcttccctactaagtgttaagcttagagtgaagggcacctcctactggaccaaaggagaggggattggagaattgttttaagttttatacattaggtcagtattccatcttcccacccccagccttatgaggacagctctctacccatcctgattaaactgcagctatagctgaaaaaaattattgtaagaaaaatacacagcaaaacagagctggaaggtggtaagtgtaaaagatatggaaagatgtaatcaccaaagaagctgcccaaatggcttcctgctatggaggagagtgatttggcccttacctcacctgccttcctgattcaaagaaacttgccactagcaggactgggcccaggagccccatttgccaatctcttctcttcttgggagtctgggaaagggtgtatagttctc

SEQ ID NO: 60898 - DNA, 194 bp, Homo sapiens
acttttttttttttttttttttcaaaaaaccccccagggaaccttttttttaaattttttggggtccctgccgggtgaaaattgggaaaaaaggccggccttaaaaccttcccttttatttaacccggccccagggggaaccctttttaaacttttttttttttgccccttttttttgggaagggttttggggg

SEQ ID NO: 60899 - DNA, 585 bp, Homo sapiens
  misc_feature 17, 536, 546: n = A,T,C or G
agggactccaccgcggnggcggccgagtactttggcgggggagattttggtattttattatatttaaaaaggtaaaatatacaagacctagaaacaaacttctaggtctctttaatacaggaagctgaatagatccagaggggtaagagcaggtttgaaaatttacattttggtgtgttctttgattttatttatttatttttctggattaagctaacatatttctgttttcagagcccaaatcaaaagttggttttttggcatgttgcatgtgggttgggaaagaaatttgcccgtgtcggaacccagttataccgatggttcttcatatgtttaaaactttttttttcttttatcattggatttgtggaagtggaaagttgcagggagctttgcagtgtaaatggtattgtttttcccccagaagagtttgaacggcccgtatcggttttcagccctgctgttcctgggggggatccctcttacttttccaggtgcgggtggggggggaccctcattctcctgctagatgtagncctcccttcnttggccttataaaagaaaacaaatggaaccatgttaact

SEQ ID NO: 60900 - DNA, 550 bp, Homo sapiens
  misc_feature 323, 356, 397, 402, 409, 435, 437, 459, 476, 480, 488, 490,500, 524, 534, 537: n = A,T,C or G
gaacctccaccgcggtggcggccgagtactactgttcgaggggcatacggaaatcgatggcaacacgtcgcctaaccctcaggaggcagaggggtgaggcggactaccactaccacaatctggacgtgtggggccaagggaccacggtcagcgtctcctcagcctccaccaagggcccatcggtcttccccctggcaccctcctccaagagcacctctgggggcacagcggccctgggctgcctggtcaaggactacttccccgaaccggtgacggtgtcgtggaactcaagcgccctgaccagcggcgtgcacacctttccnggtgtcctacagtcctcaagactttacttcctnaacagcgtgggtgaaccgtgcccttcaacagctttgggcancccanacctgcnttttgcaaagtgaattacaagccccncnacaccaaagggggaaaaaaaanttgagccccaaattttntganaaaaaatnanacattccccnccgggcccaaaacctgaaattctngggggaaccntantttttctttttcc

SEQ ID NO: 60901 - DNA, 373 bp, Homo sapiens
aaaaaaaaaaactcccattttcccaaaaaaaaaaccaaacgggggggttaaaattttgggcaaaaaaattttttaaagggtttcttttcaaaaaaatttttccccacccctttggggcccttttaaaaaaccccccaaacgggggggtttttttttgttttttttaaaattttttttttcattttttgggcactttaaaagtttgggaaaatttttctttccaatttcaaaaaacctttttaaaaaaaccctttgccaaattttttttaaaggggttcccccaaggttttaaaattttaaaaaaaattttttttggaaaaattttttccttttgcccttttttttcccatgggggcctttttgggattttttc

SEQ ID NO: 60902 - DNA, 371 bp, Homo sapiens
actttttttttttttttttttttaccaaaggaaaaattttttttaacaacggttttaaacaaaaaaccaaataattccccttaaaaacttggacagttttccccccaacacaaggcggggaaaggggggcaggaggggaacccctggggtttcccttaaaaagggcccgggttccttttttccattgggggcccccaaaacggcctttttagggaaatcccaggatggcctttaagggccccggttttaccccccaaaccccagcctttgggaataaacggggcccaaaatggaccctttttaggttgttttccccagggggccttatgggcctaagatttttccaaatagaacttccccccggcaaaaat

SEQ ID NO: 60903 - DNA, 555 bp, Homo sapiens
  misc_feature 3, 402, 459, 532, 535, 540, 544: n = A,T,C or G
aanctccaccgcggtggcggccgagtacctgcaggcctcctacacctacctctctctgggcttctatttcgaccgcgatgatgtggctctggaaggcgtgagccacttcttccgcgaactggccgaggagaagcgcgagggctacgagcgtctcctgaagatgcaaaaccagcgtggcggccgaggtacgcgggggtttttctcaggttttgcgtgggaggcggtcccgggatttcaagggtctacgcgcttttctatggcgaatgcaacccgacgagggagtgggctgtatcttcagagttgtctccgtctttccaagaacagaacaaaatgaacaaggtagaacagaagtcccaggagtcagtatcatttaaagatgtgactgtgggcttcacccaggangagtggcagcacctggaccctagtcagagggctctgtatagagatgtgatgctgganaactacagcaaccttgtctcagtggggtattgggttcacaaaccaaaagtgatcttcaggctgcaacaagganaanaaccntggnaacagggggaa

SEQ ID NO: 60904 - DNA, 508 bp, Homo sapiens
tccaccgctggtggcgagccgaggtacttttttttttttttttttttacattttttttttggaaaaaacaccttttttccaaattttaatttgccaaaaggggttaaaaaattccccccccacttaaaaaaattgggcttaggggccttttaccctaaagggcatttttttttttttttaaaagcccctttttttttaaaatttaaataaacccccccctccttatttttcccacctttttaactttttaaaattttggttaaaatttttttgttaaaattcaacttttttcaaggcaaggggtttggttcctccttaaaacccccaaaaaacccgggaacccccaagcccgggttccccccttttaaaaaccttggaaccttttttggtttcaaccccgggggggaatttaaaagggccccttttttttcccttttcaaaaacgggggaattcccccttttttggcttttttggaaaattaaaaaagggttgggaatttttccccct

SEQ ID NO: 60905 - DNA, 112 bp, Homo sapiens
  misc_feature 35, 88, 100, 101, 105: n = A,T,C or G
acgcgggcatatcagaatgttgatgatatcaaggnagacaatctacagagtttttgcctctgtggatggaaataagggtttttttttnggtttttttttnncttnagttccc

SEQ ID NO: 60906 - DNA, 794 bp, Homo sapiens
  misc_feature 5, 7, 262, 267, 325, 343, 345, 346, 352, 390, 412, 416, 451,455, 466, 477, 482, 494, 502, 504, 519, 541, 543, 558, 580,635, 636, 637, 644, 649, 683, 684, 688, 703, 706, 712, 713,714, 721, 729, 730, 742, 747, 750, 753, 759, 769: n = A,T,C or G
  misc_feature 771, 774, 775, 776, 780, 793: n = A,T,C or G
acgcngngaaggtcagcctttaaagctacctgacactaagaggacactgttgtttacatttaatgtgcctggctcaggtaacacttacccaaaggatatggaggcactgctacccctgatgaacatggtgatttattctattgataaagccaaaaagttccgactcaacagagaaggcaaacaaaaagcagattagaaccgtgcccgagttgaagagaacttcttgaaactgacacatgtgcaaagacaggaagcagcacantctcngcgggaggagaaaaaaagagcagagaaggagcgaatcatgaatgaggaagatcctganaaacagcgcaggctggangnnggctgnattgaggcgtggagcaaaagaagtttggaaaagaagcnaattgaaaattgaaacaaaatnaaantgaaagccatgtttaagccatcccaggagatttgngttntgatgcccctntaagctcttgnattcncaggaaaacatngaaaaaangnccaggtccatttttntttaaccctttaaaattttcanancagttttttggggcnaaccttgaagaaaattcccttnttttcattcattcttaactcttggttttgggggggttttggggggttttttccannnagaattngaaanaatacccttggaaaagggggcttttgttttcaannaaantttttttttttttcnaanttaaannnaaattantttttggnntttttttttttnaaaanggnaantgatcnttatggaaantnttnnngttngggtttttaaaant

SEQ ID NO: 60907 - DNA, 618 bp, Homo sapiens
  misc_feature 1, 19, 21, 24, 39, 81, 90, 109, 112, 122, 128, 132, 143,168, 185, 186, 211, 213, 219, 225, 226, 228, 230, 281, 414,587, 600: n = A,T,C or G
ncatgtgcacattgtgcangntanttaaatatgtatacntgtgccatgctggtgcgctgcacccactaactcatcatctancattaggtntatcctttaacactataanccncaaagcactncaaatntcanctggcagattntacaaaaagagtgtttcaaaactgntcaatcaaaagaaaggnncaagtctgtgatatgaatgcacacntnacaaanaagttnntnanaatcattctatgtagtatttatgatgaagatattggccttttccaccatangcctcaaagcactccaaatatccatttgcagagactatgaaaagtgtctttcaacaatgctcaatcaaaagaaggcttcaactctgtgagatgcatgcacacatgacaaagaagtttgtcagaatgcttctgnctagtttttatgtgaagatattctttttccaccataggcctcaaagcgctacaaatatccatttgcagatactgcaaaaagactgtttcaaaactgctctatcaaaagaaaagttcaacttccgtgaagttgaatgcccagatcacaaagaagtttctggagaatgcttctgnctagtttatatgnggaaaaaattttcctttt

SEQ ID NO: 60908 - DNA, 661 bp, Homo sapiens
  misc_feature 2, 181, 198, 203, 248, 249, 300, 305, 314, 328, 329, 340,344, 386, 452, 455, 456, 468, 470, 472, 474, 491, 499, 505,507, 516, 532, 540, 546, 548, 550, 574, 581, 594, 596, 605,607, 616, 622, 629, 642, 647, 650, 658: n = A,T,C or G
tnctgattttaaaaactaataacttaaaactgccacacgcaaaaaagaaaaccaaagtggtccacaaaacattctcctttccttctgaaggttttacagatgcattgttatcattaaccagtcttttactactaaacttaaatgggccaattgaaacaaacagtttctgagaccgttcttncacccactgattaaganttggnggttggctaggtattaaggggataatattccattttaagccttcnngaagcttttctaggggccaagacctttgggttgtacccttggcccaagctncaagnaggcccttnttttttcccacctnnctttggattgnacanaccacccggcaaacttgttctggtgcatcaattatcaacggnaaccaaggcaaaagccgtacccccaaaaagggctggggaataaggtactttgaaaaaaaagcctanttnnaaaaccaacaancnantnggggccttttgccccanggggaaancccaantnattccaaancaaaattgtggccaanggccaatnccaacncnanggaacctttttcaaaaaaaaaatntttaagngggggcccaattncnttttcccangnccttttttntttaancccaaanaaaaccgggggcngaaanccnaaaattcnttt

SEQ ID NO: 60909 - DNA, 183 bp, Homo sapiens
acttttttttttttttttttttttcccccaaagaccattttttttggggaatggtggcgggaaactttttccaaaaaaaacacaaatgggaaatttttttaaacaaaaaacccctgggaaacttttgggttaatcccaaattccccccggggaaaggccccgcctttggggaaactgggaagg

SEQ ID NO: 60910 - DNA, 464 bp, Homo sapiens
  misc_feature 40, 42, 213, 230, 237, 251, 255, 258, 259, 260, 261, 263,268, 275, 278, 281, 284, 287, 289, 298, 301, 302, 306, 307,318, 319, 322, 332, 333, 349, 350, 352, 362, 368, 369, 370,372, 380, 381, 389, 391, 393, 397, 398, 405, 407, 409: n = A,T,C or G
  misc_feature 417, 420, 421, 422, 423, 424, 431, 435, 439, 442, 446, 450,463: n = A,T,C or G
ccacaacctatgactggtagcagaataagtctaaaggcananccccagcctcagcagacaaataggcttcatcatggcaaacttctgagcaggaacattgagtttgagaatcctgaaattgagcctatgagaaagagactcatttcttaagaatgttttccaagtgacattctcagtgataatggaggtttcactgtgaagcatcaccagcanacccttgttttgaccanattaaanaattaaaaagattntgtnccnnnncnggggngggattnaanaanggnggncnccccgggtntgnnatgnntcatatttcannttntacccccccnnccccgggggggggggnncnggcccccatntttttnnncntttggggnngggaaaantncncccnngggttanancnttctctanggnnnnnggcaganaaangganatncagngganacttctggaaagnt

SEQ ID NO: 60911 - DNA, 218 bp, Homo sapiens
  misc_feature 20, 38, 69, 144, 191, 194, 196: n = A,T,C or G
tccaccgcggtggcggccgngtacaaaaaacacaaggnaatacaacccaatagaaaaatagtcctgggnaatgtggtcagaaagcaaaggcctgagtgtctttctcaaccgtgcaaaagccgtgttcttcccgggaaaccaggnaaaaggatccgctactccaaaaaaaaacccccaaagaaaatttaaanggnangttttcttaaaatttcgaaccc

SEQ ID NO: 60912 - DNA, 245 bp, Homo sapiens
  misc_feature 7: n = A,T,C or G
acatggnatacccgacattttggtaagttgaatatattattttaattcatttcttgtttttcctcaggaaggctatggtggtggaggtggtggcagcagaggtagttatggaggaggtgatggtggatataatggatttggaggtgatggtggcaactatggcggtggtcctggttatagtagtagagggggctatggtggtggtgggccaggatatggaaaccaaggtggtggatatggtggag

SEQ ID NO: 60913 - DNA, 538 bp, Homo sapiens
  misc_feature 23, 34, 77, 91, 96, 98, 99, 120, 121, 150, 152, 158, 160,214, 215, 216, 219, 220, 264, 311, 320, 323, 343, 348, 356,377, 379, 380, 395, 422, 436, 437, 445, 457, 458, 508, 510,512: n = A,T,C or G
ggctaggcccaccgctgcttcgnaggcggcaaanactatctatggcaagtaggcacaatattggctaaggagggagngggtgttgagggtnggganannagctataatgaacagcgatannattattccttctaggcatagtagggaggntntgaggngngagcgatctactactattcctaggaagcgacatggtaaatgctagtataatatnnntgnnaatgaggggcacccgcgtaccgtcctgacgttttgaggcaatancagatgccttcccctgtagcagggcttcagcctcctctaccctacangatctggancancagctgggaaatatcattanttcanctcttccnagatgttatcaataaattacncnngggggctccccaaanaaatggaaattgatgggaaattatttntcaagaaaatctannattcaagngagaggtaaatnnagtgttgaacatcagctggggaattgaagccaacaaaccttccttcttancngngctactgtgtcaccttttgccattga

SEQ ID NO: 60914 - DNA, 300 bp, Homo sapiens
  misc_feature 50: n = A,T,C or G
caccgcggtggcggccgggtactgtggtaactgtctgaattaataaaagnaagtaactgaggttctggaagaataagactggacaaataatattcaaattttacatatcatttaattacgaaattccaatttcaatgctgacttttcttttgatgttttacatattttcttcaggtcataacatacgttaatagctgacaggagggagacgtttaaaaacaatatagtaatttattttaaaggccgagtcacgagcagatccatttctgtagtttctgtaggggatggaaacatgcaaag

SEQ ID NO: 60915 - DNA, 449 bp, Homo sapiens
  misc_feature 12, 160, 305, 380, 405, 432, 447: n = A,T,C or G
acagacaccagnatagggaaaaggggatgggagaagggaggggaagggcaggcagaggcagcagggttatgtcattgatctaaacaaagttttctaaaccagattgtgccatcaatcaaaatggtcaaaccgatttagactttcaacatctccagtaggnaagtgagcccataattatatacattactctgcaaaatgctattggatttttctttgctccatcccaaacttctatgtaatcaggtgcacctcaggctatagtttaaggattatgggaccaaaatcttcattatgttcaacgattnctgagtacctgcccggggcggcccgctcttagaactaggtggattcccccgggcctgcaaggaaattcgaatatncaagcctttatcgattacccgtcgnaccttcgagggggggggccccgggtanccccagcctttttgntt

SEQ ID NO: 60916 - DNA, 558 bp, Homo sapiens
  misc_feature 533: n = A,T,C or G
acagggctctgaacatgcactacaataaagccaatgattttgaggttccagagagattcctggaagttgctcagatcacattacgggagtttttcaatgccattatcgcaggcaaagatgttgatccttcctggaagaaggccatatacaaggtcatctgcaagctggatagtgaagtccctgagattttcaaatccccgaactgcctacaagagctgcttcatgagtagaaatttcaacaactctttttgaatgtatgaagagtagcagtcccctttggatgtccaagttatatgtgtctagattttgatttcatatatatgtgtatgggaggcatggatatgttatgaaatcagctggtaattcctcctcatcacgtttctctcattttcttttgttttccattgcaaggggatggttgttttctttctgcctttagtttgcttttgcccaaagcccttaacatttggacacttaaaatagggttaattttcagggaaaaagaatgttggcatgtgtaaagtctctattancaatgaagggaatttgttaacgatg

SEQ ID NO: 60917 - DNA, 321 bp, Homo sapiens
actttttttttttttttttttttttggaaaacccccccggggggggtccccggggggggaaaaaaccccttgggggggggtgggaaatttgggccctaaaatccgccaaaaaagggtttaaaccccccccctttttttgcggggaaaaaggtttccaggttccttaaccaaaccttggttttttttggggggaaaaaaaggcccccttggggggggaggggttcaatttttttttggggaattttaaggagggggggtggaaccctaacccctttataaagggggggctttttttaccccccccgggggggaaaaattttt

SEQ ID NO: 60918 - DNA, 577 bp, Homo sapiens
acaaaaatacaacaaataataaaggacacatattttcataaaatagcaattaaacaatgtctatttttatttcaaccaagagtagagcaataagttgtatccaaaatgagagaaattatttccatattatgttgaataatacacatatcagagcaaagaccataggtaagacagacaaggagaaaacataaggagctattataagtagtgattgtgagaaaacatatgcaatatactagataaaaggagaatatctctaatagctgagagacagctccctggatcatttgtgtttctgcacatcttataaataaggcattaactgtcctttgttctggactatgtcttcaagaatgtatggatagcaaacaacattggaagttatagacagtgtctatctctggagcaaaaggcaggaatgctgactgtccattataaaaactttgggtttcttccccttaacacaacttactgaatgtgcagatgtcatctagccccatcggcaacatccgtgtgggacttgtaggtgaagagaactgacccaaacatactgatgctcatgatgcttcctgtgtcc

SEQ ID NO: 60919 - DNA, 271 bp, Homo sapiens
  misc_feature 1, 174, 180, 182, 188, 191, 193, 213, 221, 224, 231, 249,269, 270: n = A,T,C or G
nactccaccgcggtggcggccgagtacctgcatcagcattagtaatcaacctgttaatccaaggtctttagaaaaaacttgaaattattcctgcaagccaattttgtccacgtgttgagatcattgctacaatgaaaaagaagggtgagaagagatgtctgaatccagaatcgnaaaggncncccaanttncnaaagaaaattttacttgggnaaaaaagnccnaggtttnaggcccaaaaaggggggnaaaaaaagggggttcccttnna

SEQ ID NO: 60920 - DNA, 323 bp, Homo sapiens
ctccccgcggggcggccgccctggcagacagattcccacgtgaggaaaaaagggaagcaatggtgcactgatcatgccgtggaccacactaactcaaccctccaccctacagagaagctgaatagcatcgccacaacctggtttgccagtacatcttttgcacgtctattaaaatcttcaatagttgttattctgtagtttcactctcatgagtgcaactgtggcttagctaatattgcaatgtggcttgaatgtaggtagcatcctttgatgcttctttgaaacttgtatgaatttgggtatgaacagattgcctgctttcc

SEQ ID NO: 60921 - DNA, 519 bp, Homo sapiens
cgcggtggcggccgcccgggtcaggtacatccagaaacaatgttttaccagctatgtggacatcacttggctcactcaagttgaccataaaattaacctttccaagtccaacccttgtcaacttggcacctatgtgcaactcttaaaccacacttaatctccaaataaagacaatgacagggtcataattctacccaacatgatacgactgaaaatgcactaatctcttccccagaagaggaggtaaactgcttgagtggtgtatactcttctcctgataccccataacttcattactatgatgtaaaattaacaatagttaaatactgatataaaatcaatacattttatgtctcatgataaaaggaaaagggagaaaacagatatttgcttaatatgagtatatatatgcacaagtgtgttcataaaaaataaaggaaaagatactgattgacaatgatagtccttgtttctggagctggtgatgtggttgtatccagtatttataactacctacac

SEQ ID NO: 60922 - DNA, 408 bp, Homo sapiens
  misc_feature 5, 372: n = A,T,C or G
acagnaaggaaaaggtgtatcatccaacacatcttggttcggccactctttcttcttcactttctccagctgatactttagatatttttgctgacctgcaaagagcaatgaagggctttgttttagagaatgatcttcatattctctatctggttacacctatgtttgaggattggactactattgattggtatcgatttttctgtttatgggagaagttgccaacttcaatgaaaagggtggcagagctagtgggggttgaagaggggttcttggcccgttgtgtgaaaggaaaagtagtagccagaactgagagacagcatcgacaaatggccatccataaaaggtttttcaccagtcttgtgctattanatttaatcagtgaagttccctttagggaaataaatc

SEQ ID NO: 60923 - DNA, 622 bp, Homo sapiens
  misc_feature 2, 4: n = A,T,C or G
gnanctccaccgcggtggccgatcggccgcccgggcaggtacacccagctaatttttgcgttttttgtgcagatagtgtttcaccatgttgcccaggctgatttcaaactcctgggttcaaacaatcccctacctcagctccccattgtgctaggattacaggagtgagccactgcacccaacctatatttgtatatacattaaattgtatatgttaggctgggcacggaggctcacgcctgcaattccagcattttgggaggccaaggtgggcggatcacttgaggtcaggagcctgagagcagcctggccaacatggtgaaaacccatctccaccaaaaaagcaaagttagttggacatggtggcagatgcctgtattcccagctactcaggaggctgaggcaggagaattacttgaaccaagcagcggaagttgcggtcagccgagatcatgccaccgcactccagcctggatgagagagcaaaactccatctcaaaaaacaaaacaaaaaagttgtatatgttattgtatgttgtgtatatattaagttgcatatacacatattaaatatatacacatatattacactttatacacatacacttgtttcctcatgcaa

SEQ ID NO: 60924 - DNA, 254 bp, Homo sapiens
ctccaccgcggtggccggccgcccgggcaggtacttttttttttttttttttttttggggaagggggttgggaaaaaatttcccccatggggccccttttgcctttttttagggggaagtcccccaaaaaaaaccttgaaaaattggggcccccctttggtaaactcttgaaaaaattaaaacccccttgaacccaaaaatttttacctttaactttaaaataaaaatagggggggggggggccccaaaacaaa

SEQ ID NO: 60925 - DNA, 337 bp, Homo sapiens
actttttttttttttttttttttctttttttttttttttttttttttttttttttttttttttttggggggggggggggaacccccaaaattttttggggggggaccaccctttaaaaaaaaaaccccgggggggggggggaaaatttttttttaaaaaggggtttttaattggccccccaaaaaaggggggttttcttttttttttttaaaaaaacggggggttaaaaagggggttctgggaaaaaaaaattttttgaaaaaacaaggggaaaaccccctttttttttttcccaaaaaaaatttgggggggggggggttttaaaaaaaaaaggggg

SEQ ID NO: 60926 - DNA, 575 bp, Homo sapiens
  misc_feature 389: n = A,T,C or G
acggtgtggcagtgcccacctaagccccagctactgaggagactgagacagaaggattgcttgaactcagaaggctgaacctgcagtgagctgtgatcatggcactgcactccagcctgggcggtaaaagtgagatcctgtctcaaaaaaaataaattacaaaggactcatatatattaattttgtataattcctctaaaggaattattcaaagatctcaaaatatttcactgatatttaagtcctgtaagtttccatttcatacggtgatataagaccatgggtagaaaatatcagtgaataaaggaagacatgccaaatgtctcatctgaatattttgaccactccatgatcttttgtcctcgcactgctgcatagttaggtttcanaggctggtcttcgaattaggtcaccaaaatatgcagtgattgtcttcaatttgttgttaaggaagttctgttctatttccacttgccctccagacccagctaaggatgccacctggtcaatatcagcatttcttggaaaaaaataaacaatattattagtgatcttcttaaaaagtctgaaaattt

SEQ ID NO: 60927 - DNA, 159 bp, Homo sapiens
actttttttttttttttttttttttttaaaaaaaaaaaaaattttttttttattacccccaaaaaaaaaaaatttttccctacccccttttttaagggggcccaaaaaaatttttcccccccccaattttttaaaaaggggggcccccccctttttttt

SEQ ID NO: 60928 - DNA, 349 bp, Homo sapiens
actttttttttttttttttttttttctttaaaaactttttaagggggaaaaaattttttttttttttttaaattttttcacccttccgggcctttttttggaaaacttaaaaaatccctttaaaaaaaccccaaaccccccaaaaaattatttttttaaacccggcgcattttttgggaccattgggggggtttttttccgggcccccccccccccaaaaagtccttggaaccttccccttttaaaggagggggaatgggttttttcaaacccttttttttagggggtttttttttttttccaaaaccttgggggttttttctttgcaatccccaaaaggaaaaaaagg

SEQ ID NO: 60929 - DNA, 489 bp, Homo sapiens
  misc_feature 324: n = A,T,C or G
tccaccgcggtggcggccgctactccgccctgttcctcggtgtggcctacggagccacgcgctacaattacctaaaacctcgggcagaagaggagaggaggatagcagcagaagagaagaagaagcaggatgaactgaaacggattgccagagaattggcagaagatgacagcatattaaagtgagtgaccctgcgacccactctttggaccagcagcggatgaataaagcttcctgtgttgtgtgaaaaaaaaaaaaaaaaaaaaaaaaaaaaaaaaaaaaaaaaaaaaaaaaaaaaaaaaaaaaaaaaaaaaaaaaaaaaanccccccccccccccctaaaaaaaaaaaggccccccccccgggggggaaaattttttttttttttttttccccccccccccggggggggggggggccccccccctttttttttttttttgggggggggaaaccccccccccggaaaaaaaaaagaatttttttttt

SEQ ID NO: 60930 - DNA, 357 bp, Homo sapiens
accccagcaacaaggtgggagtgaaattcaaacttctagagaagggctgggcctgcctagagaattctcacaaacgtgctacagagactgtgacaactctgcttctatgcaacctctggattatatggtaggacattacagctggagataatttaagtgccatattctgcaagaatgaccttattctaacaacccaagttgcccatctgctaggcctatttattcttctagcaatggcaatagattgcatgaagcctattttgtttagcagtattatttgtcactaatagtgcaaggtgcatgtgttaactgtatagtgatatatgtgtaatatacatgtgtgaatatatattcagc

SEQ ID NO: 60931 - DNA, 525 bp, Homo sapiens
actttttttttttttttttttttttttttgtcaatcttttcaaaaccccccgggtttttggggggcccatttacccaccttaaaaacccttttttgagggttaattgtgcacaaaaaataatcatgaaaataactcgcccccttttccaaaggggttgggtccccatttccttttttttttttaaccccccaatttttacccccccttttttttcccccaaaaaaggggggttttttttttggttttttttttttttggggggggttaaaaaaaaggcaaaaaattttttttttttttttcccccaaggggaaaaaaagggggcctttccccttaggggaattttaaagggggggggggttttttttaaaaaattaaggcccttttttttttaatttccccccctggggggttccccccccctcccctaaattaggggtttttttaaacccttttaaccccccccctggaaaaacccctttggaaaccctgggacccccccaaaaaagtttttggggggtttccc

SEQ ID NO: 60932 - DNA, 298 bp, Homo sapiens
ccccgcggtggcggccgccgggcaggtactttttttttttttttttttttttttttcccctttaaaaattggggaattttttaattaagggggaataaattcccccttaaaaaaaaaaaaggttaaaggggggtatggggccttttaaggggggaaaaaaaaaccctttttttttttaaaattctctaaaaaacccccctttggccaaaaaccccttttccgggggcccccccccttaaaaaaaaaagggggaacaaaataaggggtttaacctcttttccttttttccagccccaaa

SEQ ID NO: 60933 - DNA, 281 bp, Homo sapiens
  misc_feature 25, 28, 35, 44, 53, 66, 80, 84, 90, 109, 114, 138, 139, 151,152, 156, 174, 175, 182, 195, 197, 204, 221, 224, 227, 228,232, 236, 237, 240, 248, 250, 251, 252, 253, 254, 257, 264,266, 269, 270, 272: n = A,T,C or G
accctaaagtagtaggagagaaaangtnctttttnggggggggncaaaacctncttcccccctttnaaccccttggcctncttngggggncccccaaaaaaaaaaaaanccctntttttttttttttttttttttttnncccccccccccnntttnttttataaaaaaaaaaannctccttngggggggggggtntnttttttnggggggggggggggggnttnttnngaanaaannacnccctatgnannnnnctnttttttntnttnnanaaaaaaaaa

SEQ ID NO: 60934 - DNA, 529 bp, Homo sapiens
actttttttttttttttttttttttttaaaagggcctttttttttaccttctttggcggtcccaaaaaaaaaaaaaaggggaccccctttaaagccccttttttggggaccttttaaaataaaaagggggtttcccttttttcccatttttttttttgggcccttaaaaaaaaccgggggggttttttatgggaacccaaaattctccccaccttttttttttaaggaaaaaaaagcgggtttcctaaccccccccctttttgtttaaccccaggggggggggccttccccccttccctggggggccttacccctgtttcccaaaaaaaggcccccggggggtttttaattaaggggaaccgggggccctggggaaaaaaaccccccctcctttgccaattttaaatttctgaattggaaaaaaccctttttcaaattttacaaaatttaacctttccaaaaactggggtggggaaaaaacggggcttttcctaaaagtctttttttcccccccttttgggccccccac

SEQ ID NO: 60935 - DNA, 340 bp, Homo sapiens
acttttttttttttttttttttttttttcccccccccggggggggccccccgggggggaaaaaaaaccttgggggggggtttaaaaaaccgccccctttttttcccaaaaagggatcccattaaaaaaattttttttgaaaaaaaaaatcccctttttaaaccaaccaaaaattttttttttttggggggaaaaaaaaaaaccccctggggggggggggaaaaacccaaattttggaaatttttaaaccccggggtttaaaaaccccccccaaatttttttgggggcctttttgccccccccctgggggggccccccgggcaggccctttctggtttttt

SEQ ID NO: 60936 - DNA, 275 bp, Homo sapiens
  misc_feature 4, 5, 20, 21, 34, 51, 54, 81, 93, 95, 119, 143, 157, 159,163, 208, 210, 222, 235, 252, 261: n = A,T,C or G
ccgnncggggtgggggccgnnccccgccttctanaaaaactaagtgggggntancccccccccgggggccctggccagggnaaattttccggnantaattccaaagcccttttttaatncgggaataaaccccggttcccggnaaccccccttcccngnaganaggggggggggggggggggccccccccgggggttaaccccccaanancccttttttttntttggggtttttncccccctttttttttanattgggaangggggggtttttta

SEQ ID NO: 60937 - DNA, 290 bp, Homo sapiens
  misc_feature 9: n = A,T,C or G
acgcggggnagcacacccgtctatgtagcaaaatagtgggaagatttataggtagaggcgacaaacctaccgagcctggtgatagctggttgtccaagatagaatcttagttcaactttaaatttgcccaccccctcctcaggaactcaagagctcagcatttataatgagcagttggtaatgagttgccctatgtgcttgtcgcaagcagtcacagagatgagccctattacttgatattcaggaacaaaggtacctgaacattctgataattatctcagcatacttga

SEQ ID NO: 60938 - DNA, 686 bp, Homo sapiens
  misc_feature 175, 200, 208, 378, 390, 401, 403, 406, 415, 427, 469, 485,490, 497, 505, 538, 551, 625, 638, 647, 659, 669: n = A,T,C or G
cgcccgggcaggtactggggagccgttatcaggtccagggtcctgatgattctccttcaaggggacagtcctgctgcctcctctcatgctccctgggagactctccctcctcggtctctctggacctggcctgccgtgggcagctcatccatgcagggtagagctgggaatgcanatggggtggttaaagcaggagaaangagtgtgngcaaggccagccatggggtggcttgctccagggcccctgaagcataagccctccttcttgcatcttggggttcaggccttcaagcgctgggtgaaggctggtgggggtcttccagggcttccagggcctggctcactggggctattggccccttttaaggggttcttgtnaaccgcttcagntccttctttgnangcncttttgggnagccctttttcncttttctttggcccagtttcctttggggagggcccccccccntggtcccttttccctngccangcccccntggggccntgggtttttcttgttggggggggaaatgggttngttccttttgttnccaaggaatttccttgccaattcaagaccttgccttggccaccccccaaaaaagccttccctttttggggggtncttggccaacaantaagacctntcttgcccttgnaaaaagccgncctttgccggggggcca

SEQ ID NO: 60939 - DNA, 396 bp, Homo sapiens
actgctggtggtcttactcatacctctctcaactcttataataccacccagactatctttggtgaaagaagcatgaaccattacctcttaaaacagaaccagaacatgtgccacaggttacaaccttgtcctatagatgcctttgctcatggaacagcacacctataaatgctgctaaaaacagattggggctgctcccatcattgatattggtgccatcggcctactatgaaggcctgggaaagggaatagtctcccaaatcaacctgtgatcaataacgccctattcttcatcataggagctgatgagtaacattaagagtgttgggggggcctgtgtcctggtggcttgaagccacatggagggagtttcattaaatgctaactacttttaaa

SEQ ID NO: 60940 - DNA, 506 bp, Homo sapiens
  misc_feature 26, 102, 117, 119, 120, 124, 125, 144, 146, 158, 159, 167,168, 192, 194, 195, 196, 197, 209, 217, 218, 239, 240, 241,242, 243, 245, 246, 247, 248, 249, 250, 251, 254, 255, 256,257, 261, 274, 283, 293, 295, 298, 301, 307, 308, 322: n = A,T,C or G
  misc_feature 325, 326, 330, 334, 373, 374, 379, 380, 397, 400, 402, 418,433, 438, 439, 441, 483, 487, 488: n = A,T,C or G
actttttttttttttttttttttttncccttttttttttttttttttttttttttttttttttttttttttttttttttttttttttttttttttttttttnaaaaaaaaaaaaccngnngggnnaaaaaaaaaaaaaaaaaanancccccccccccnntttttttnnaaaaaaaaaaaaaaaaaaaaaaanannnnaaaaaaaaaaanttttttannaaaaaaaaaaaaaaaaaaccnnnnntnnnnnnnaannnnaaanccccccccccccncactaaaangaaaaaaagnanggnaanaataanncccccccccacatnatnnaaangagngggggaaaaaaaaaaaaaaaaaaaacccccccccccccnnggggnnggggaaaaaaaaaaaanttntncccccccccccaaaanaaaccccccccccanaaaanngngggggggaaccccccctttttaataaaaaaaaaagcggcccncccnnaaaaaaaaaaaaaaaaaa

SEQ ID NO: 60941 - DNA, 481 bp, Homo sapiens
actttttttttttttttggaaaaaaaccaaaatttacttttatttaaccttcaccattacccctgtgaaacaccccaggaaaaaggtagggggggaaaagggccagctttcttttccttaacccagaaaacccccaccacctaaaaaccccctaccctaccctttaatgggaggggaagggaccgggaattggaaattcaaggcctaaaaaataaaaaagggctgtggccacccctgggaaaagccctgaaaccaaggaagggcctggggcctttaaggatccccctaccccaggttttgggaagaaaacttccccttgcccctccccaggagggatccctgggcggcttattatgggtcccctttggggggaatccccagaacaccgggaatgacctgttgggggccttccaggccttcccaccccttttttgaaatttcctgtttaaaaagaataaccccattgcctccccgtttaaaa

SEQ ID NO: 60942 - DNA, 255 bp, Homo sapiens
actattatctatgacttgtacactcactaatccggatgtcaaagacgcctcactccgaaagacaaaaatctcactgtaatggttttcattgaattaatgcttatgacaaagatagtatggccctgtttgctacttacgtgataaataagactttgagcattaatcactgcacatactgtaaagggtggggttatgctgcgattttaattttcctcactaatgtttttgtcttgcactgtgacaagtaacaacatt

SEQ ID NO: 60943 - DNA, 328 bp, Homo sapiens
cgcggtggcggccgaggtactttttttttttttttttttttttaaaaactattatgggtttttttaaaccagggggaaggccccttttttgctttaaaaaatttttgaaaaaatttttcccaaaggggggaaaaacccaaacttggaaaaagttccccaaatttcccaataaaattttcttttaaaattgggggcccttttttttgaaaaaaaggggacccctaaaaaaaaattttttttttttttaaaaaaaaaaccaaacccccttttttttttttccccaaaaccccttttaaaggggctgggggaaaaatcccttttaaaaaaa

SEQ ID NO: 60944 - DNA, 275 bp, Homo sapiens
acttttttttttttttttttttttttagccacaaccccccccggggaggggaggggaattttggccccccggggccttccctggatgggggcacccttttttaagcctctttttgggaaaaaaacctgtattcccccggccccggggtccccctgggggggccggggaacctcccttaaaaaggtgtatggggcaacctttaaatgggcccacccccccacggggggcgtaaaccaccccccgtgtttttaaaaaaacaaaaaagccgggggccc

SEQ ID NO: 60945 - DNA, 423 bp, Homo sapiens
  misc_feature 3, 32, 41, 78, 83, 94, 100, 114, 133, 157, 159, 179, 185,214, 231, 234, 241, 246, 288, 293, 311, 313, 342, 360, 364,376, 387, 389, 392, 405, 408, 411: n = A,T,C or G
ggnagcctcccaccggcgggtggcggcccggnctacactgncgcggttcgtgggggcccgggcccacccggcgttacntttgnaagtaacgcangatagnaggggagtgcaggngaacaagcaacttacaggnatgtcaggtaagaaccccttcctngnagggagtagaaagaagttgnacatgnccacccggcaagggatacctatttggctncttgcacgcaggttacnctngtataanacctnttgggaagacacccctacccaaaagaaataaggttatggatnaacanttttaataaagaatgggngnccgttttctcccccaaatggaaaataacngccagaggtgaaaatcanttcncaaacattttgnttctttttagngnagntgaatttttgacnacnctntggccaaaaaat

SEQ ID NO: 60946 - DNA, 471 bp, Homo sapiens
  misc_feature 165, 212, 213, 224, 225, 230, 232, 235, 258, 261, 279, 284,302, 314, 316, 324, 328, 330, 332, 333, 354, 364, 371, 374,378, 382, 387, 398, 400, 403, 404, 408, 419, 425, 426, 427,431, 438, 439, 447, 448, 460, 471: n = A,T,C or G
cgggtggccgggcccgccccgggccaggtacgcgggggaatttcatttcattacaccactggctcacacatctactctctctctctatctctctcagaatgacaattctaggcacaacttttggcgtggtttttttctttacttcaagtcgtttctggaaaaagnggctttgctcaaaatggaaacttgggaaaagccaaactgggaagacnncccattcccanngcttnanccngttgggaaatgaatgggatcccnacnctttccttggcctttggnttttnggggccccccattttccncccccccccatntnggaatttnaaanantnnggggggcccccccgggggggnaaaggccccnttttttnggnaaancccnaaaanaaatttttttntnccnnaaanaaaaaattttntttttnnngggnaaaaaannattttttnngggggggggggnaaaaaaaaaan

SEQ ID NO: 60947 - DNA, 386 bp, Homo sapiens
actatgttttttttttttttttttttttatgggccctgaaatttaaaaaaattcttcattgcccccctctctaagctgtgtttggcaaggaggccccctgcaaaataaagaactattttcaaaaaacatattctgcctcagtgaaccacctagaactaactgcccctggtaaacacccccttggatcacttctggcttcccatgagggggggaatactgcggacaacacccatagggggtaagaatgtactaaggcggaaacctttgtcttttttagggccagaaaaccctgggcctggccttctttaaaaatataggaccccccgggtttgggaaaatctaactatactgttaattaccccggcaaccgcgggggggacccctac

SEQ ID NO: 60948 - DNA, 235 bp, Homo sapiens
actttttttttttttttttttttttttttttttttttttttttttttttttttttttttaaaaaaaaaaacccctttaaaggggggcccccccccccccccccggggggaaaaaaaaaattcccccgggggaaaaaaaaaaaaaaaaaagggtttgaaaaaaaaaccttttaaaaaaaatttgaaaccccccttttttttccccccccaaaattttttttttttttttgaaaaaa

SEQ ID NO: 60949 - DNA, 448 bp, Homo sapiens
acttttttttttttttttttggacaaaaaaaccttttttttttccccttttttaaaattttaactttaaaaaaatttttggccggggggtttaatacccacaactttttaaattttaaccccctttttctccccaggggtttttcaaaaactaccgcctttcccaaaaaaccccataaactttcccaaataaaaatggggctttttaaaaatttttttttttttaaacaaaaacttttgggaaagaaaaataaattggaaaccctttttttttttttttcaaatgcctgggggaaaaaattttttgaccctttttttaaaattttttttttccccccttgggggaaaaaattccaatatttttttcccaatttgggggaccttttgggcccaaacaaaaaaaggcttccctttttaaatggggcctttttttggaaaacccaccccaa

SEQ ID NO: 60950 - DNA, 255 bp, Homo sapiens
acttttttttttttttttttttttttttggggccccaaaattaaaaaaaatggccttttttccccctccccaattgggttttacacagggccccaaaaaaaaaaaaaaaaagtttttaaaaaatccccccttttttttggaaaaaccccaaacaaaaaaaatttccccaaacccccttttggggcaaccaaaatttccttttaggggggaaaggcccccccacaaccctttccggggaaaaaacccccccccccc

SEQ ID NO: 60951 - DNA, 426 bp, Homo sapiens
actttttttttttttttttttttaaaaaaaaaggtcccaaattttttttaaaaggggggaaacgggcccaaaaaaagggctaaacccttttttcccaaaccccccgggccaaaaggcccaccggggcgccgaaaaaaaaccccaaagggcggggaattagaaaaaagggacccccccccccggaccttttatggacctggggggttcaaaaaaaaaaccggggcccccttccccccaaaaacccttaaaaaaggggaccggggggggaccaaccttaaacccaaaccttgggggcggggggggccttttttggagggagggcaactttgggccggaaaaaacccacacgccccctttggtttaaaccctttccgggggggaaagccccaggggccataaaaacttaccaaccttttttggaggggg

SEQ ID NO: 60952 - DNA, 413 bp, Homo sapiens
  misc_feature 1, 36, 410: n = A,T,C or G
nactccaccgcggtggcggccgagtacctagggagnactagggtcagatagcaaagaccttttgggtggacaatactcacacggcttgcataggagatctgcctggactgctgtcactctcgttgctgttggtatgctccattgccccgttcagctcttcccgtattgcgctggctaagttgcccagagtgggatttcccatggaagcggtagtgtatagaggtatactattctcagccattgaagcctgtcatcaaccaagagaaaatttatgaagacacagggttccatctctggagatagatcgctggagatacatctctgcaaatatcggctgtggttgaagacctaacggcatgaggtttgtgcaagtaatatggcaacctccacttctgggcgacgggggttgnctc

SEQ ID NO: 60953 - DNA, 245 bp, Homo sapiens
acggccagggctattggttgaatgagtaggctgatggtttcgataataactagtatggggatcccgcgtacttttttttttttttttttttggggaaaaaggtttttttttggaggctttgggggcccaaaaattttagggggttgccaaattaaacaagtcagccctttcaacccttttttaaggggggctttagggggcccgggggggggaaaaaaaaaggcgccccccggcaaaattttttt

SEQ ID NO: 60954 - DNA, 340 bp, Homo sapiens
acttttttttttttttttttttttttttttttttttttttttttttttttttttttttttttttttttttttccaccaaaaagggggtttaagggggggggcccccccctttttaaaaaaaaagggttttgggggccccccccccaaaaaaaaaaactttttggaggcccttttttttcccccggggggggggaaaaaaaaagggaccccccccaaaaaaaaaatttttttgggggggggaaaaaaaacggggggaatataaaaaagggggggggatttaaaaaaaaaaaaaaaaagaggggggcccccccccgcctttttttttgggggcccccccccc

SEQ ID NO: 60955 - DNA, 277 bp, Homo sapiens
  misc_feature 255: n = A,T,C or G
ccgcggtggcggccgcccgggtcaggtacacgagacatttaaattttcaagaattatgataatatggattttgaggaccaaaatacagaagaattccttttaaatgacactttcaattttctcttccctaatgaatcatcactttccatattttctgagatatttcagagactttatagatcagatgttttcaagggtgaaaactatcaaaaggaactaaatcagtgtctgtccttagaagaaattaactcaatnatgactttcataaaggaacttg

SEQ ID NO: 60956 - DNA, 535 bp, Homo sapiens
actttggccaactaatgggttaatactgtcaagggaaattagccctgactaaacattgccgctggctcatgaatgcactaggcttggggcagtataaaaactcagagaaatcagtgtgtaggagacacagaaatcagtgtcactcagtgacagaagcaacaataattgtgaaaaatacttcagcagttatggactcatctgtcattcaaaggaaaaaagtagctgtcattggtggtggcttggttggctcattacaagcatgctttcttgcaaagaggaatttccagattgatgtatatgaagctagggaagatactcgagtggctaccttcacacgtggaagaagcattaacttagccctttctcatagaggacgacaagccttgaaagctgttggcctggaagatcagattgtatcccaaggtattcccatgagagcaagaatgatccactctctttcaggaaaaaagtctgcaattccctatgggacaaagtctcagtatattctttctgtaagcagagaaaatctaaacaa

SEQ ID NO: 60957 - DNA, 422 bp, Homo sapiens
actttttttttttttttttttgacttaaaaccaaaaccctttttttaaagggaccttttattttccggggggggccaaaaaaaaagggcccaattgggaaaaacctttccctttggccaagggggcaaccccccctttcaaaaccccgggggcccccaaccttaacccccccccggggttttttctttttaccccaaaggggggaacccctccccctccccccgggggccttttaatttggggaaaaaggaacggcctggggcccccaaaaattcccccgttcccttcccgggggggccttttaaaacttggggaccccccgggccgggggaattcaattttaacctttttaaaccccccccccctgggggggggcccggccccccctttttttcccctttaaggggggttaattgcccccc

SEQ ID NO: 60958 - DNA, 164 bp, Homo sapiens
actttttttttttttattttttttttcccctttcaaatttttttttcccttttcaaaaaaatttttttcttttttcccaaaaaaaaaaaccaaaaggggggtttaaaagcacacaaggcctaatgaaaggtttataaaaaaaccgggccccccccccccccccc

SEQ ID NO: 60959 - DNA, 614 bp, Homo sapiens
  misc_feature 578: n = A,T,C or G
acaccagcgaattcatacaggtgagaaaccttatatatgcaatgaatgtggaaaaggcttcattcagaagacgtgtctcatagcacatcagagatttcacacaggaaagacgccctttgtgtgcagcgaatgtggaaaatcctgttctcagaaatcaggtctcattaaacatcaaagaattcacacaggagagaaaccctttgaatgtagtgaatgtgggaaagcctttagcaccaagcaaaagctcattgtccatcaaaggactcatacaggagagagaccctatggctgtaacgagtgtgggaaagcgtttgcgtatatgtcgtgtctggttaagcataagagaatacacacaagggagaaacaagaggcagccaaggtggaaaatcctcctgcagagaggcacagctcattacacaccagtgatgtcatgcaggagaaaaactctgctaacggggcgactacacaagtgccttctgtggcccctcagacaccattaaacatcagcggcctcctcgcaaacaggaacgtagtccttgtgggacagccagtggtcagatgtgcagcctcaggagatnacagaggatttgcacaggacagaaaccttgtgaatg

SEQ ID NO: 60960 - DNA, 626 bp, Homo sapiens
  misc_feature 48, 49, 50, 117, 135, 136, 137, 166, 168, 189, 194, 197,227, 251, 253, 277, 278, 279, 281, 291, 323, 324, 327, 328,329, 331, 336, 337, 338, 339, 371, 372, 376, 377, 379, 381,382, 394, 403, 404, 405, 406, 408, 413, 429, 431, 437: n = A,T,C or G
  misc_feature 447, 451, 453, 455, 456, 461, 469, 484, 487, 493, 499, 509,515, 529, 538, 540, 541, 542, 545, 558, 559, 561, 564, 565,581, 582, 584, 585, 589, 592, 598, 599, 601, 606, 609, 617,618: n = A,T,C or G
ccgcggtggcggccgaggtacttttttttttttttttttttttttttnnntttttttttttttttttttttttttttttttttttttttttttttttttttttttttttttttttcntttttttttttttttttnnnaaaaaaaaaaaaaaaaaaaaaaaaaaaananttttaaaaaaaaaaaaaaaanaaaanttnaaaaaaaaaaaaaaaaaaaaaaaaaaaaanaaaaaaaaaaaaaaaaaaataaananaaaaaaaaaaaaaaaaaaaatttnnngngggggggggngaaaaaaaaaaaaaaaaaaaaaaaaaaaaggnnggnnnanagatnnnntaataaaaaaaaaaaaaaaaaaaaaaaaaaannaacnnanannataaaaaaaaanaaaaagacnnnncngcgcntaaaaaaaataaaaananaaaaanaaaaaaaaanaaananannggganagggaaanaaaaaaaaataaatnttnaaaaanaaaaanaaaaaaacancaaaangaaaaaaaaaaaanaaaaaaaanannnaanaagaaaaagaaannanaanngagaaaaaaaaaaaannannaaanaanaaaaannanaaaanganaaaaaaannaaaaaaaa

SEQ ID NO: 60961 - DNA, 416 bp, Homo sapiens
acttttttttttttttttttttttttttttcccaagggccaaaaagacctttcccttttgggcccaaccataaaattcccagggggttttaaggggttttggggccaaattaaaagggaaaaaaaaattttttttgggacaaccctttttcccccggcccgggggggtgccccccccccccaaaaaacccccccccttttttcccaaaaaaagggggggcccttttaaccttttttaaaaaacccccccgggtttggggggttaaaacttgggcccccctgaaaaagttttttctgggaaacccctttcccaaaagggttggggggaacccccccctaattaaccccggggaaaaaatttaaattttcccctgggggcccccccccggggggccctttaaaaacaagggaaccccc

SEQ ID NO: 60962 - DNA, 343 bp, Homo sapiens
acttttttttttttttttttttttccccccttttttttttttttttttttttttttttttttttttttttttttttttttttttaaaaaaaaggggggaaaaaaaccccccccgggggggggtaaaaatttttgggggggggcccccccccccccaaaaaaaattccaaaaaatttttttccccgggggggggaaaggggccccccaaaaaaaaaaagagcccccccccgggggggaaaaaaaaaaaaaattttttaccccccccccccccgggggggggggcccccccccccattttttcccttttaaaaagaggaaaaccccccccccgaaaaaaaaaaaa

SEQ ID NO: 60963 - DNA, 602 bp, Homo sapiens
  misc_feature 5, 234, 248, 253, 259, 273, 276, 281, 290, 296, 323, 324,329, 335, 340, 349, 354, 381, 383, 384, 397, 401, 402, 413,414, 418, 438, 439, 440, 487, 488, 493, 497, 499, 500, 504,506, 533, 549, 560, 584, 593: n = A,T,C or G
ttggnactccaccgcggtggcggccgagtacaaacatggtgagcaaagttcaactcaggtaatagtgattaaaaacaaaacatgtagtgggtcacaaccagactggttttcactgtgcaactttcctcagggaataatacccattcacagaaagaaaggaatatgcatccaagcctttgttcataaagaaaatgcccttcaaacaaattcatcataaggctaaaaaaaaaaaangaaggaaaaagggntgaancagttnggcccaaaaaaaanctnaaatntaaggggtntacatncttatagatatgtggccatttaacccnnggttntagacntttgncaattaaangaatnggctcagtaaagggaaaaagggttttntnnaaatatgtagttnttgnngatatgctacnnattntgctttgccatgggaactgnnntaactcaaaatttaaagctgcccttttgcccgggttaccccctgcannaggcnttcntnnggananatgccctccaatcctggaaaaaaagcnaaacccccttctttanaaaaaaaaggntttgccctggcccttaatttttgnttttttttnaaaaaaaaa

SEQ ID NO: 60964 - DNA, 591 bp, Homo sapiens
  misc_feature 582: n = A,T,C or G
acggatcctcaattattagcaaattcttatatttaattagctttcattagtttatgctgtagtgacaacaacaaagatgtatttcctggtgggggatgtcagctgttgattggctgtgacactgctttgtgtcatcttcttaccatgatcaaaggcaaaggaagggatctcttttgggacattgtgattgttttagcagagagagaaagagatgaaatacacttcggttttctcttaaaagatgcatgtatcatacgtgctttaagcaagtcatgtggccaagcctagcatcatggagccagaaagtatagccttgctgtctgtctacatcatgatgtataaattgatatatctacatgaattatagaaacttagaagtgatctttattcagtcttataatttttacatgaagaatcttaggcctaggaggagaaaatgattttctttctattacctaactagattggggcatatttctgataaagacccacctctagtgagattcatcttttttgtttgtgtgactatattccatagagaagaaagatgggatagctcaacttcattatataccaaagcanaacacatgc

SEQ ID NO: 60965 - DNA, 223 bp, Homo sapiens
accgcaagggaaagatgaaaaattataaccaagcataatatagcaaggactaacccctataccttctgcataatgaattaactagaaataactttgcaaggagagccaaagctaaacctagccccaaacccactccaccttactaccagacaaccttagccaaaccatttacccaaataaagtataggcgatagaaattgaaacctggcgcaatagatatagt

SEQ ID NO: 60966 - DNA, 561 bp, Homo sapiens
  misc_feature 365, 394, 410, 423, 442, 466, 486, 488, 496, 497, 498, 508,511, 516, 517, 529, 532, 533: n = A,T,C or G
acccttatttcctcgacacgcaactggctcaaggacaatgttattttccttccctttcttgaggaacaaaaagaaagccgggcatgacggctcatgcctgtaatcccagcactttgggaggctgaggcaggtggatcactggaggtcaggagtttgagaccagcctggccaacatggtgaaaccctgtctctactaaaaatacaattagccaggtgtggcggcgtaatcccagctggcctgtaatcccagctacttgggaggctgaggcagaactgcttgaacccaggaggtggaggttgcagtgagccgtcatcgcgccactgagccaagatcgcgccactgcactccagcctgggcgacaganccagactgtctcaaataaataaatatganataatgcagtccgganaaaggagggaganaattttattaaatgtgacnaactggcccccccccccccccagnggggaaccccaaaatttttncnaatttttnnnggggtttttnttnttccnnccggaataaaanccnnaatttttttaaaaaaaaaaaaaaaaaaa

SEQ ID NO: 60967 - DNA, 532 bp, Homo sapiens
  misc_feature 1, 3, 124: n = A,T,C or G
nanctccaccgcggtggcggccgagtacccagaaatccagttacttccacagcatttaggttttccaattcagtgagcgtgattcccattataaggcatgcctacagacaagagtgaccacagnaactcttcaaggatgctagggttcccctcacaaatatattttccacagtcatgatgaagggtatgtcttctggctgcttccagtgagggtgaatatatcttgaatcacaaattcactctaacattcccatcttcctaagccattcaaccctctctcctacattaaaccaaggcagatccagcatttccaaattgctgtataccatttgtgaatcccattttgaccaatgtttcagccaaccaaccaaattgttagagttcttcctatctcttcaagctgccacattaaattcaggatctctgcttagagagcctatatcaataaattcagccagacctaacttcatagtccttccaccactatcccacattttcactatccattcccacacatattcactatttatgt

SEQ ID NO: 60968 - DNA, 379 bp, Homo sapiens
  misc_feature 313: n = A,T,C or G
accgcggtggcggccgaggcactattctttgttcatggtaggatgtgcaaaatgcaataatttttctcttattttggagaggatgattcagcatacacctgtccactgggcctttaaaagttgtatggatgtgttgggctcttcactctctgtagaattatttccaacccctctggagtatgtgtattttattgagatctttagcattgtcttgctcacttggtctgatgaacgtaatgccattgacataatggactaatgtaatgttctgtcagatatctagatgatccaaatctctttagactatgctatnttatatacacacacacacacacacacacacacacatatatatatataaaaagagagtgtgtgtgtg

SEQ ID NO: 60969 - DNA, 579 bp, Homo sapiens
  misc_feature 451: n = A,T,C or G
actcttcactcacataagccaccgcttgctgaggttttaaaagactacatcaagccagatggggaatatttggagttgtttgctcgaaatttacagccaggttggactagttggggcaatgaagttctcaaatttcagcatgtggattattttattgctctggagtctggaagctgactatgatcttgattaaagtagtggtttcttcattgtttcctcaccacttttcccttaattctaagtcatttttttattttgttaccaacccatattcttagaatataaacaggacttgtttttttcagtaagggaccagaagtgactagccttcatgtaattttaagatgaattttacttgagttgcactaacattctatgttattctagactatacaaattaagtggtaagcagttataaagacggcaagaccatgctattgaaaaagttcanaaaacatacaccgtggaccagaggtcttaatcctatctatggatgtgttttgtgtgacccatacagtgttgtaaaaaacacttagaaccattattctaaaaaatggggctatttcacattaaagtcca

SEQ ID NO: 60970 - DNA, 587 bp, Homo sapiens
  misc_feature 570: n = A,T,C or G
accttcttagtgcaagaaaacatcattatttctgtctgcctgcctttttgtttttaaaaatgaagactatcattgaaacaagtttgtcttcagtatgaggacatgttgacggagaggaaaggtaggaaagggttagggatagaagccaggttattttatgccaacaaagtctgctctaaaaagccttattgtttcactacctattaatatgagaactctggattcattttcccttatctcatgtttatagtgttttaagcttactttgtatatgtttactgggttaatgagtcacagcttttcaggatgaactcctattctactagagagatactcaattgaaacacacttttagattgtgttcttgcaagcccactctcagctgtcaaagttaacacccaataaaaatactctacaaagcaaagaaatacacttgcaaataactgagtgctgactgtaagcccaatccaacttttccatttttcaaaattaaccatagttgatggcttgctgggtctctctatcttgaacgttgtgggggagatctttcaaaatcatgaagtcaatgangaacaagctccaaaaat

SEQ ID NO: 60971 - DNA, 290 bp, Homo sapiens
tccaccgcggtggctcgagcggccgcccgggcaggtacttttttttttttttttttttttttttttaaaaaaaaaaattttttaaattttgggcccttaaaaaaaaaacccctttttccaaaatttaataaaaattttttttttaaaaaaaaccctgggggggggattcaaaaaaaatccctttggggttttcaaaccccagggcccttttttcacttttttttttaaggggacaagggggttgacccccacctttcccctttaaaaaggaattttttgccctttttaaa

SEQ ID NO: 60972 - DNA, 273 bp, Homo sapiens
  misc_feature 21, 27, 44, 50, 69, 72, 79, 85, 97, 112, 122, 128, 134, 154,181, 210, 235, 238, 245, 270: n = A,T,C or G
ggcaatggcaatggtactggnaatggnaatggaaatcattcagnaatggnaataggaggggaatgtatntcncagtggnaatggnaaagggaatggnaattcaacacagcantggcaatggnaagggnaatggnaatggaatgagaaactaatnagaaatgggaatgcaaccccgaatggnaatggaaatggaaaagggactgggaatgngaatggaatgggaatggcaatcagnctncgattgntaattggaattggaaatgggaatgngaa

SEQ ID NO: 60973 - DNA, 413 bp, Homo sapiens
acttttttttttttttttttttttttgggggggcttttaaaactaaaaggggggggaaaaccctcctttgaatttccccaacctggggtaaaaaaacctggcaaaatttcccaaagccaagggcctaaccataatacctgcttttggggggggctaaaaaaaaaatttttaactttttgaaattgcgggctttaaaacctttcccaaaaaggccccccgggaaaatccctttttccaatttgaaaaggagggccctttaaaaggataaaaacccttggccctcctttcagggtaatatttccaaagttcctgtttggggtccccccccctggggcccttataaaaaaaaaataatttttttcattttgcaaaaccaggattttatttttttctttgggggaaggggcggaaaa

SEQ ID NO: 60974 - DNA, 472 bp, Homo sapiens
tcactgggcaggcggagcctctacatactgctgatgctaaaggtgatgtattgaggaaacaggcggggtaagcacctgccgagtgccttttacgttttttttaacctttccttataagcatgcctgagttgggtaggacagcagagggtaataatcactagtaggctgtatctgggacttcgggctgctaatgtgccaatacattgttaaactctgacccagcttatgcggaggacattgtatgtatgtctcttatgctagcgcctcttcttctttcgggaggattcattgggccaatagggcgagaggagaacagctttttccagggaattaaaaatgaagggagacatctatcttcaaacgctcatcctaattccggggatgttatctaggtctactatggctggtcatgattatcctaagagggaatgctaggcacatagtgaactaatatctgttgctgatgctacta

SEQ ID NO: 60975 - DNA, 494 bp, Homo sapiens
gcttttttttttttttttttttccccaaaaaaaaaggggggtaaacccttaaacaaaaaaaccccccctttgggccttgaaaaggaattttttttttggcaaaccaaggccgggtaaaaaaaacccaatctaaaggaccctcccccaaaccaaattgtacaaaggggcccatttcctttaaaaatacccaccggaaaactttccccccccaacaaaaaatccgacccccctaaaaaaaaggggccccacccccccaagggtttttcaaggaattgcccctaaaaaaaggggaaaaacccttaaaaaaaaacccccgggggttccaaaaccccccctgccccaaaaaaaaagggcccctcccttcgggccaaaaaaaaaccccaattccccccagaaaacccccctaaaaaccaggggcccccccgggccggagaaattcaatttaaacctttataaaccccgccccccggggggggggccccgccccccccttt

SEQ ID NO: 60976 - DNA, 426 bp, Homo sapiens
acttttttttttttttttttttttttggaaacaacccccccggggggggggggggaaatttggccccccggtgccttttttgggggggggaaccgtttttaaaggcccctttcggaaaaaaaaccctttttcccccccccccgggggccccttgggggggccgggaaatccccttaaaagtttttgggggaaacttttaaaggggttctccccccccggggggggggggaaatggccccgggttttttaaaataaaaaaaacccgggggcccccccgggtacctggggcgttttaaaaataggggaacccccggggggggaaaatttaatttaaagttttttaaaccccccaaccctgggggggggcccgggccccaattttttttccctttaagggggggtaaatgcccccttgggaaaaaaaag

SEQ ID NO: 60977 - DNA, 471 bp, Homo sapiens
  misc_feature 5, 30, 39, 40, 42, 54, 76, 77, 120, 136, 140, 150, 157, 164,181, 188, 196, 198, 217, 223, 224, 251, 255, 261, 262, 263,264, 284, 290, 291, 301, 302, 303, 304, 306, 323, 324, 341,345, 377, 378, 380, 381, 389, 391, 394, 404, 407: n = A,T,C or G
  misc_feature 410, 419, 420, 421, 443, 467: n = A,T,C or G
ggggnttgggggccccgggggcccccggcngagggtttnnancccaaattgggnaaaatttttaaccttgggcccnntttttttaaaaattaattttccccaaaaaaacccacctttttnaaaaagggggccccanccanttttttttcntttcccnacccaangttttttttaaacccanttgggtnggggaaananaaaaaatttttttaaaaancccccnnttggggaattccccccaaaaaaacctntccnaaaaannnntttttccccccctttttttnttctcnnccggcggggnnnntnttctttttttttttcannaaaaaaagagggggggncctngggggggggggggcccccgggcgcgccccccnncnnaaaaaaancnacncccccccccnctngtnggggggggnnntttttttttttttttttttttngggaaaaaaaaaaaaaaaaaaaanaccc

SEQ ID NO: 60978 - DNA, 567 bp, Homo sapiens
  misc_feature 502: n = A,T,C or G
acaagataaaaatcatatacattatagtaaagaacatatgagtatattcttgtttcagagaagaaaattgccttaaggaagctgggttataccgtttttggatgtgattttcgtatttatactgaatcatccgaacagctcttggttagaaaataaatctcattgataggacacacaacctttcacagctttcactttacaatgttccaatttaaagtcagccagtgtgctccctgaatttgcatgagtcatcgtatttcatcccaggactagatgaaacacctataaattgtctgacaatagttatacacgtttaagaactgtatttcttagtaatatatcacagaatagaaccattttcttaagattttatgtgactctttattgatttttttctccaagctatttttccaaatgatgtattatttttggtattaagcctagagttttgacttaaactcgaaggatgctcttagattggtaactactctgagatactaanagtgtttccactctcctcccagttagagtggggggtttcctcctcagtgctgcccctgcatggct

SEQ ID NO: 60979 - DNA, 529 bp, Homo sapiens
ctccaccgcggtggcggccgccgggcaggtacttttttttttttttttttttttttttttaaaccgggggggaaaaaaaaaaaatttttttttttttttttggccccccccctggccccttttttctggaaaatttttccctaatttttaaaaaaaatgggggaaacccccaaacccccctggttttaaaaagggggtttttttttttaaaaataaaaccctttttaaaaaaatacccccggggggggaaaccaatattcccttaaaaggggttttttttcttttaaaaggaaaaatttcaaaaaaacggggccccccccggggggcttaaaggaaaaaaacccaaacggggaaggggtcccccccaaaaagggggggaacccttaaaatttttttggttggaaaaaaccccttttaaacccttttcccaaagggggggttggttttaaaaatgggaaaaggggccaaggatcaaaaggcaaaaaaattttttttttttctttttttgggggggagggggggaagaaaa

SEQ ID NO: 60980 - DNA, 562 bp, Homo sapiens
  misc_feature 14, 501: n = A,T,C or G
acacagaaaagggnaggtgtcgacaaaagaaagataagcccatacagtgcacacctcagaaagccaagccaatgcgggcagctgctgacctggggagggagaagatcctcaggccaccagtagaaaaatggaagagacaggataacaaagacttaagagaaaaacgttgttttatttgtggaagagaagggcacattaaaaaggaatgcccacagtttaaaggctcttcaggtagcctttccagtaaatatatgactcagggaaaagcctcagcgaagaggacccagcaggaatcatgagggaaggaaaatgcagcactctaaatggccactcaggcgttcctattcactcggaaaattaggttcatttcacaggacacagcagtgtagatcaggcttcaacttaacatttaagggaaatgtcagatttttttttaatttaatgaaattgttaatggggaaaaatttttaatatagtcttatctaccacacatcgccatanatttaaggattttaatagaaagacatgatgtatgtatttaagccacgttaaaagaaaaaat

SEQ ID NO: 60981 - DNA, 557 bp, Homo sapiens
actgtatgagtattttcagtagggggaataaactcaaaattatatttgttttgcagaaacctagtcatttgaaatgagccatcctattaagccctcttttgtctccattatgttccagaggcagtatatgcagtgcaataattttttcattccacttatgttttgaaagccagcggcatcagatgtgtgagttgagctattcctcctggcagaattgtccaatctaaaaatcagcgtttaccagcccatgctaataaaattaagatttcatacaagtttctgtaaaactattcttcatgattagctctccctgtgggctgcagcagtcagaaagagataacagccacacctctgcattccccggtcatcaggaataaaaggaaatgttccagattgtaagtggttttaaaaactcagttctcatcgtttgcaatctaagttgaaagaactattaaatataaaatcaaaggtgggcaatgtggccaagtcaatggaagaggctttactcagaataacttacaaattctagaaacaaggtagaactcactcagtttacc

SEQ ID NO: 60982 - DNA, 540 bp, Homo sapiens
  misc_feature 349, 356: n = A,T,C or G
actttttttttttttttttttttttttttttttttttttttagggggggcccccccgggggggcccccccaaaaggggaaaaccccggccctggtttagggccccccccttttttggggatgcccgaaaaaaaaaaattggaaaaaaaaaaaggggggggggggggggagggggtttttttggggggggggcccccccccccccccttgggggggggccccctttttaagcccccccccccgaaaaaaaccccttttccccccccccccggggccccccgggggggccccgcccccccccccaaagggttggggggcccccccttaaggggggccccccccccccgggnggggcgntaaaattccccaattttttttaaaaaaacaaaaacccggggccccccccccccggggtttttaaaaaaaggggccccccccgcccgggggaatttttttttcactttttacccccccccccccccggggggggccccccccccccctttttgtcccctttaagagggggaaaacccccccccca

SEQ ID NO: 60983 - DNA, 592 bp, Homo sapiens
  misc_feature 90, 233, 246, 259, 261, 268, 269, 270, 271, 272, 273, 274,275, 276, 277, 278, 279, 280, 281, 282, 283, 284, 285, 286,287, 288, 289, 290, 291, 292, 293, 294, 295, 296, 297, 298,299, 300, 301, 302, 303, 304, 305, 306, 307, 308, 309: n = A,T,C or G
  misc_feature 310, 311, 312, 313, 314, 315, 316, 317, 318, 319, 323, 327,385, 400, 402, 420, 425, 439, 451, 454, 469, 475, 476, 483,486, 490, 491, 495, 512, 528, 531, 533, 544: n = A,T,C or G
actgcattcaaaccacaacagaaatccgtcacttaactgacctctctgaattaaactgaggtatgaatcaatttgaggtatgaacagggnaaggcaaaatgcaataccagattatgaaaataaccaaaatggaaaaaatttgatgtagaagatatgtggcttgggattgctccacatctttgggtttaaaaacatttttaaagaaaaagcccttttaattaaccattctggtnagtcctggaaagnccttttttttaancnagaaccnnnnnnnnnnnnnnnnnnnnnnnnnnnnnnnnnnnnnnnnnnnnnnnnnnnncccnagtnttttcccagcaatttttttcaaaaaaaattttgtaggggggcagggaaaatttaaccnccctttaaaaggtgnanccaacctttccccgggcnaaatnggggcccccaattnggaaaaacccanttnaaaatttttttcccncctttnnttttaanggncaanncaanccccctttttttttttngggggggggttttcanaangnggggctttttnttttttttttttttttaaaaaaaaaaaaaattttttttttttaaaaaa

SEQ ID NO: 60984 - DNA, 193 bp, Homo sapiens
  misc_feature 1, 3, 42, 68: n = A,T,C or G
nanctccaccgcggtggcggccgacacgaggtgcttcttganaaaggtggacttcccggccccagggnaatcccactgcgacaaccacctccgggctggcgctcaggagggccctggactcggggaggcagagaggccctgagcgggagacagtcccccgcgtactctgcgttgttaccactgcttcccgcgt

SEQ ID NO: 60985 - DNA, 277 bp, Homo sapiens
acacactcacaactcccctacccccatctacattcagcttctttggtctacatatctttgatatacagtgttctaactccttgattatcaaaaagtggttcacagacaggcggcaattgtatcatctgggaacttttacacatgtaaaatctgagccccaaccccaaacttcctgaatgagaatctgtcttttaaaaagatacctaggatagtcacatgtgcattaaaagtttgaggactaccctagctgatgaccaccatcttgactacagtggct

SEQ ID NO: 60986 - DNA, 195 bp, Homo sapiens
acttttttttttttttttttttttttttaaaaaaaaaaattttttttttaaaaaaaaattttggcccccccctgggaccaaaaaaaaatggggaaaaaaggggttgggaaaaaaaaaaaaccttcctaagggggcttttttttggggaacctaacctaaccccacccggtttttccaacctggggccgggttttt

SEQ ID NO: 60987 - DNA, 297 bp, Homo sapiens
actttttttttttttttttttttttttccggggaatttttaaaatttttttttttccccctttcaaaaaagggttttttccccccccccccttgattttttttgggggtttttcccccccccggggaaaaaaaaaattttttttggggggaaagggtttttaaaaatttttttgaaaccgggaaaaatttttttttttttaatttaaagggtggggattaaaacgggggaaaaaaccccctcggggggaaaacccccacaaatcccgggggaaaccccttttttcccccatattttt

SEQ ID NO: 60988 - DNA, 422 bp, Homo sapiens
acttttttttttttttttttttttttccaacaattttatttaaaacaaccccggccttgtttttttgttttttttcggtttggggcccccccccctgggaaaaattgtccccccctaatttggaaaattttccccccccccgtttttaaaggttttttttttttttttttttttggggcccaatcccaaaagggccccccctttggggttggcccctaattcccgggaattcccctttggttttttccccccccccccctttttttttttttaccttcaagggggggaaattttttttaccctttttttggcccttgggtttttcccaaaggggggaaaaattcccgggccccaacataaaggggttttttaaatttttttccccccgctcccttaaagttggggtcccaaaagcccccccc

SEQ ID NO: 60989 - DNA, 536 bp, Homo sapiens
tccaccgcggtggcggccgagtaccagggggaaatatacatgtgtggtgccaaaacagagtatggcattttctgaaagttagaaatttatacaagagtataaagttcaagagatggataagtagctaggaggtaaggccagaaaggtaggcaagttctagggcctttgaggccatggaagaaaacgtgggcttcaccctacgatggtcgtgttggagctcgtggcacatttacagagcttaactactcctttatgtattttttctagaagatgtagactcttatccatcatttcagaaagccacattttacttttttgaatcacagaaggatgcaagaaaaaataccaaggtaaataaatacaagcagggtcaccatcctttgaaaaatctcccaatatggatgttactgattgtgggtcagcaattacgtctttgtatgtatcgagaatagcaattctatttaaaacatctgtagaccatggactgtaggtcgtattatgggagataccaagaaaatctggcatgtctgtctctc

SEQ ID NO: 60990 - DNA, 612 bp, Homo sapiens
  misc_feature 29, 54, 56, 58, 62, 68, 69, 71, 73, 76, 80, 88, 93, 94, 101,103, 112, 115, 130, 134, 143, 146, 148, 151, 157, 163, 181,182, 202, 213, 215, 234, 240, 246, 249, 255, 256, 257, 267,291, 296, 306, 311, 342, 347, 352, 417, 418, 422: n = A,T,C or G
  misc_feature 433, 437, 447, 453, 458, 463, 601, 607: n = A,T,C or G
aacctccaccgcggtggcggccgcacgcngcgcgggtacaatggaatggtaccnancngtanatgganngncnatncaantccgcacngaaanngcaattntncctggtggnatnagaaaggtatgcatnccantgtttatgncanangtnatgganatattncaaaagtttactggaacnnctatggttatgcatatgttngtttctaacancnaatattacaatgacggaanctgaantgatcngantgtaannntatttgtgcnaaactgcattaattgttcttaccntctantaggggtaanacttnagaaacacgcgatgacaataatgaagaaaanctacnttaanagtaattctacttttgatatcaaacaacatggattatactattactaaacattgaaaaaaaaacnnggcnccatgagagcngcangagcaacaantgattnggcanttccngctaaagaaagctgacactggaatatgccaaagttaatctccacagtaggcatccatctgaaaagactggaaacaactgtagggcttcaaacttacttcagtgtctttattcttgatttgcaggccataaatgaaatntttaanaaagt

SEQ ID NO: 60991 - DNA, 167 bp, Homo sapiens
actttttttttttttttttttttttgggccccctttgaattttttttttccaaaaagggaaaatttgggttttaaaaataagattgggggaaaatttaacccgggtccctttttcccaaagggggaaaagggggccccttcgggttccccccccattcaggtaaaaa

SEQ ID NO: 60992 - DNA, 448 bp, Homo sapiens
  misc_feature 11, 16, 19, 23, 26, 27, 30, 38, 47, 55, 56, 59, 60, 61, 64,65, 68, 70, 71, 73, 84, 91, 92, 114, 123, 129, 131, 145,149, 176, 180, 188, 202, 215, 236, 272, 273, 277, 305, 328,338, 349, 377, 397, 419, 428, 432: n = A,T,C or G
agcaccaaaanattcnctntctnaanntcngcaacccngtcgaaacncacgaacnngannncanncancnnanccatttacatnaaattgnntttcccaggataactctagaantaatgaaantaattntntgcactaattccanattnaaaggcttgaaacttttgaaatttaangggntggctggnactgtaactatttntttgcacataaangatgcattcatgacaatgctntgggcgataatacatggcacatatactacatatctnnaatnttctctcatttaaaatccacacagaaanaaaaccagagatttccacaagangctccttcantatgacatgantgcaaaacgtgggtaccttgcccgggcngcccggggggcgggcgcccngccggctttggtgaacttctanaataacctngggnccgattcgcacccccc

SEQ ID NO: 60993 - DNA, 429 bp, Homo sapiens
cgcggtggcggccgaggtactttttttttttttttttttttttttttttttttttttttaaaaaatttttttttaaaagggggaaattgggggaatcccccttgggggccccaaaatttggggaaaaaatggggggtttttttttttcccccccccccttttttttttccccttttaaaatttggggaattttttttttgggggggaaaaatttcccccttggaaaaaaaaaagtttaagggggggtttggccccttttttggggggaaaaaccccccatcccccccccgggccccctttttaaaatttttttccccccccccccccaaaattttttttcccccctttttcacccccccccccctgggggggccccccccccccccttttttccccctttagggggggtaatttccccccccggcccaa

SEQ ID NO: 60994 - DNA, 365 bp, Homo sapiens
  misc_feature 346: n = A,T,C or G
accatctgagagaagatcagaactttatggccaccagctttaagctttggaagcaacttgtcaataagaaccagtttgccggctgaacgaaccatggcctgcaggtgaaagtcatgaggtataatatggcaagcttcacggaattctgttaggattttttcttcagcaccattgatgagatatgggtggttgcagcacttgcgcaactccatcattgtgttaagtagattaggcatgttggtatgacctgcccctttggaagggaaggagaaattcttctccaaaatagcccgatagtatttcttctggatattagtcagctctactttcataattgtttcctgtntggggtgccaagttttttt

SEQ ID NO: 60995 - DNA, 542 bp, Homo sapiens
  misc_feature 19: n = A,T,C or G
tccaccgcggtggcggccngagtacatgcaatatagcaaatgttccacaaaattttggatattcttttggagaatcaaaattacgaagcctttcaaatatacttttgatggtaggtggttcataacacaagaaataggaagtttttgaaatatgataaccatatttttcataaaccttaaccagttgctgtttcaatgttatattcatggtttccaggtaagatgccatctcagcaaccacaacagctgcactcaccccatctttatccaaaactgaagttccacagagaaaaccaatagactcttcaaatgcaaaaaggacttctttcccattttccaggaggtctattatcctacttccaatccatttaaaacctggtaacgtttcttcaaaatgaaatccttctttaagtgcaattgccttcagaattttagaagagactgtggtggctaacatataaacgttcttcacatcagcattttcttgattttatttttcttccagcaagtcaaacatccaccatccaaacaaagctgccaac

SEQ ID NO: 60996 - DNA, 361 bp, Homo sapiens
  misc_feature 2: n = A,T,C or G
gnaactccaccgcggtggccggccgcccgggcaggtacgcgggtagaaaggtgattgtatgaaaaattcaatcaacattaaaaaagggaagtggggagggaatacaaacttgaacaaaatattcttaaatgaagttgcatctctttttaaaattaagatatcattcatgcaccatacggtttatcctattaaggtgtaaacttcaatgtttttaatcatattcactaagttgtgcaacatcaccactccctaacttcagaacactttcatcacctccaaaagaaaccccataccatttgcaatcactcctcctcctccttcccccagcatccggcaaccactaaatctacttttctgtccc

SEQ ID NO: 60997 - DNA, 329 bp, Homo sapiens
ccgcggtggcgaccgcccgggctggttcccggggtggccgagcagatggctatgtgctagagggcaaagagttggagttctatcttaggaaaatcaaggcccgcaaaggcaaataaatccttgttttgtcttcacccatgtaataaaggtgtttattgttttgttcccacagaaaaaaaaaaaaaaaaaaaaaagccccttggccccttttaaaaataagggaacccccccggccgggggaatttaaatttaagctttttgaacccccccaccctgggggggggccccggcccccattttttttccctttaaggaaggttaattccccc

SEQ ID NO: 60998 - DNA, 563 bp, Homo sapiens
acagtaaaacagttttgcccatggtttccagaacaaaggagtatgaagttagatgaacgggagagaattggaagagatttttaaaaggcatataaagatggagcaaaaattccagtttctgtatggtcagtgtgggcactaataaaggcagactttgagccatttcaaagagatgatgaggcagagtcagatgaggaagaggaggatgagtgtaaaaaactaacttcaaattctgagtgtgaagaacagctaccggaggagattaaagaaaaagactttaaaaagtatgttttactagcccatttgctccacctgctgaattaagtgaatggccacctcctctctctcccctaaatgggtgagaaaataaattagctgaaaaacttactggtcctgtagttgcaacattaaaacctggagcaattggtggtgctagacaaaattctattcaaaaagctaaagccaagggagaccttgaagcatggcaatttcccgttactataatccacaagtaggacagaatatagctaattaggctgttttttcttttaagttctaaagaa

SEQ ID NO: 60999 - DNA, 214 bp, Homo sapiens
  misc_feature 5, 35, 39, 45, 46, 61, 76, 100, 102, 104, 106, 139, 145,151, 154, 155, 156, 157, 158, 164, 166, 170, 173, 176: n = A,T,C or G
ggaanctccaccgcggtggcggccgatgtactaantggnggtagnngggtcctccagcccncagggaaggggctgntagtggattggggaaatctatgcntngngngagcaccaactacaacccgtcccctcaagagtngtagtnaccatntcnnnnngacaantncaanaancanttcttccctgaagctgagttctgtgaccgccgcggaca

SEQ ID NO: 61000 - DNA, 360 bp, Homo sapiens
  misc_feature 330: n = A,T,C or G
acttttttttttttttttttttttttttttttttttttttttttttttttttttttttttttttttttttttttttttttgggccccccccaaaaatggggcccccccccccccggggggggtccccccgcaaaaaaaaaaaaaccccttttggggggcccaaaccccccccaaaaaaagggccccccccccaaattttttttaaaaaaaaaagggggggtcccccttttttcaaagggggggggggggggggggaaaaaaaaaaaacctttttttccccaaaaaaatttcccccccccccaaaaaaaaaaagggggggggcggcggggnttttttaaaaaaaaggggattttttttttt

SEQ ID NO: 61001 - DNA, 540 bp, Homo sapiens
  misc_feature 83, 84, 99, 100, 101, 102, 103, 104, 105, 107, 108, 109,114, 125, 126, 130, 133, 141, 142, 150, 151, 153, 159, 160,169, 188, 204, 207, 240, 246, 247, 253, 254, 255, 269, 270,277, 299, 300, 303, 320, 330, 331, 334, 336, 338, 341: n = A,T,C or G
  misc_feature 359, 360, 362, 364, 366, 371, 403, 428, 458, 471, 481, 492,508: n = A,T,C or G
acttttttttttttttttttttttttttttttttttttttttttttttttttttttttttttttttttttttttttttttttnnaaaaaaaaaaaaaannnnnnncnnnttttnaaaaaaaaaanncccnttngggggggnntttttttnncncccccnnaaaaaaaanaaaaaaaaacccccccccnttttttaaaaaaaaanttnaaaaaaaaaaaaaaggggggggggggccccctntttttnncccccnnnaaaaaaaaaaaccnnaaaaaanggggggggcccccccccccctnnggnccccccccccccccccngggggggggnnttncncnccnaaaaaaaaaaaaaaaagnntncncnttttnaaaaaaaaaaaaaaaaaccccccccccccccnaaaaaaaaaaaaaaacacccccccncgggaaaaaaaaaaaaaaaaaatttttttnccccccccccccngggggggggnccccccccccnactttttttttttttnaaaaaaaaaaaaaaacaccccccccaaaaaaa

SEQ ID NO: 61002 - DNA, 374 bp, Homo sapiens
acgcggggagaaagacaattactggatacaagaaaatatttcattttattaaactgtgttttttaaaaaaggatttttacatgtaagagatctatcttacatagtttctttacctgtctatttctttttctttttttttttttggccaaccccacctttttggggaatggggtccctttcccaggcaaatttggctttcttattatgggatgggtccccccctttcaaaattccatttgacaattggccaagggtttcaggttgcccttcaaaaacccgggattttttaaaattccaaaaatcctttacccctgattggttaagcccctccgccggtgttttaaaaaaccaaaacccagaccacaaaaattttt

SEQ ID NO: 61003 - DNA, 205 bp, Homo sapiens
  misc_feature 193: n = A,T,C or G
tccaccgcggtggcggccgagggtactgaaaaaaatcccttcagctctaagaaacactgaaaaatccaccgattttttgggtaagcttcttggcaataccctgtggatctgaaacagctaaaaaaatgaatttgaattgcgccagataggtcaataccaagcttctgattcctcctcacatatgaaaagtganagttgtgagttg

SEQ ID NO: 61004 - DNA, 293 bp, Homo sapiens
  misc_feature 18, 57, 67, 74, 83, 99, 104, 112, 121, 129, 142: n = A,T,C or G
ctgaaaggcccaccatgnagcaaggagcagcagttcgtaaaacgcaagcaagaaggnaacaaatggnaaactgnagcagcagnaataaagtatgaaggnaaagnaagccagnaagttaagnaaagtggnagaagaagcgagnaaacatcaatggattctcgacttcaaaggatacatgctgagattaaaaattcactcaaaattgataatcttgatgtgaacagatgcattgaggccttggatgaacttgcttcacttcaggtcacaatgcaacaagctcagaaacacacaga

SEQ ID NO: 61005 - DNA, 416 bp, Homo sapiens
  misc_feature 17, 29: n = A,T,C or G
ctccaccgcggtggcgngccgaggtactntttttttttttttttttttttttggggagagagaggaattttttttttccccccaggggggaaggaaggggggaaatttgggttaaataaaacccccccccccgggtataaaaaaaattttcccccccaaccccccaaaaaagggggaaaaaacgcccccggtaaaattttttttttttaaaaaaaaagggggtttaaattttggggcaaaaagggtttaaaacccccaacccaggggaatcccccccccccaccccccaaaaggggggaaaaaaagggggaaacccccccgccccggccaaaaaactttaaaaagttttcctttggggggggaaattttggggggggaaaaaaatttccaaacaaaccgtgttttaaaaaattttt

SEQ ID NO: 61006 - DNA, 510 bp, Homo sapiens
  misc_feature 396, 451, 487: n = A,T,C or G
acactagggcccccgggtggcgacagtgcatcagtgtaggttcgtcagttgcaacacgtgcctctggtgggggatggggattgcggaaggggctgtgcctgtgtagggccagggagtataggtgaactgtattgaattgtattttccactccattttgctgtgaccctaaaactgctctaagaaaatcatctatttataaacaaataaatattcttctaagaagccaaagcagaaaacgatcaagtggagtgtgttaatgtcagcaaaggtttttgctgccacgaggttgaggcaaggagagaaacgtgtcccttggttagtgatgtggctatattcatcactttaatgagaataatgtctgctgagtgatggggctggaacctaaattggagaangtttgagcgaatggaaggtaagaaagtgactaaatgagtatagaaaactaccaanaagcttggctgttgctggtgaaagaatattacacangttgggccaggattactgtcttg

SEQ ID NO: 61007 - DNA, 425 bp, Homo sapiens
  misc_feature 274, 277, 319, 320, 321, 322, 323, 324, 327, 331, 332, 335,336, 337, 338, 339, 340, 353, 369, 370, 373, 384, 386, 394,397, 399, 400, 401, 404, 405, 406, 413, 414, 425: n = A,T,C or G
acgcggggaccgtttgggaaaggctactttggctgggggtggctgggaaaggcccctctgggaaagagacagttttactgagtcagatggtggaaagacagatgtctctatactttcttaacaagccactctgtcccataacatgcacttggaatctctcctaagttccagaggccccactgttccagtttcaagccttcattttggagtctgtttgggaacttttaagacttcaaagcaaagttagctaccagcaatttctgtaaaccaaganaanattgtcacaaagattcactacttttcaactgaatctatgccnnnnnnaanaaannaannnnnnaaaaaccccccgncctttttaaaaaaaannaanccccccccccngnggggaaanttnannnaannnttttttnnccccccccccn

SEQ ID NO: 61008 - DNA, 529 bp, Homo sapiens
acttttatttttttttttttttttaaagggaatttcccatttttttaaactttaaacttttttaaaaacttggccaattgggaatttttcgggggaaaaaaccccccccaaaattttttgggggggcttaaaaaaaggggcccattcaaccttaacccttattaaaatcttttttgaaaaaaaaccaaccccaaaaaaaggcctttaaaggctttttaaaaaaattttaaaggcctttttttttggggttatggaaaaccccattaagggcaattttccttttaaaaaaaatggggggttttttaacccccctttttttttttttccccccagtttttttttaaaaggaaaaaaaactttttttccccctttttttacaaaattggaaaaaaattttttaaaaaaaaaaatttttcaaaccccttttttttttccccccccaaaagttttattttaaaaaagaaaaaacccaatatttttcctaaaaaaacctaaaaaaaaacgtcttttttttaaaaaaatttttttt

SEQ ID NO: 61009 - DNA, 459 bp, Homo sapiens
acttttttttttttttttttttttttttttttttttttttttttttttttttttttttccccaaaaaaaattttttttttttttcccccaaaaaaacccggggggggggggcccccccccccccccaaaggggggggaaccccccccccggggggggcccccctttttttttggccccccccccccaaattttttaaacccccccccaaaaaaaccccgaaaaaaaccccaaagggggggggaggggtctcgggggcccccccccctttgggaaaaaaaaaaaaggggggggtttttttttttaaaaaaggggcccccctttgggggcccaaacccccaaccccccccccttttttttaaaaaaaaaaatgggaaaacccccctttggggtttttccaaaaaaccccccccccggggggggaaattccacccccccccccaaggggggggggccccccc

SEQ ID NO: 61010 - DNA, 304 bp, Homo sapiens
  misc_feature 262, 268: n = A,T,C or G
cgcggtggcggccgagtactttttttttttttttttttttttgggggggggggaattggggttaaaaaattttttaaaattttttggggggaaaaaggggtttttttgaattccccccccccaggccttttgaggaattccccaggccctgggggccaggggttaagcctttggaaaggttttaaagggggtaaaaaaaaaaagaaaaaattggccccaggaaaaaaaaattaaagggggggggagaaagaaaaacaaacanaaaaantacaacaaaaaaaaaaataaaaaaaaaaaatagaaa

SEQ ID NO: 61011 - DNA, 325 bp, Homo sapiens
cctacctcgtggtattattgtgaggattaagtgaattaatatgagcacggtcctcataagaatgcctgacacatggtaagccctattattatttttgttacattatgcatatttaaatgatcttataaagcagttgcaagggcatggatggaatttggagtatattttatttctttaatagatgtatcaaggaggacagattttacatagtaaaacttgtccaaaaatatggataggggtggggtgacccaagttattcctttttaaaaaaataagaatgagaggcataaagcagactgactaatcagttgagttcataccaact

SEQ ID NO: 61012 - DNA, 305 bp, Homo sapiens
  misc_feature 236, 250, 271: n = A,T,C or G
acgcggggtacttacaattacgagatttatatttgcattagtctctttggctggtgggtaggggtgagaggctcttcctggatcccttattttctacaggagaggaggaaaacacctgggatgctccagtgctcttacgcagataatgatcattaacatcagcctctctgatcaaaggctctatttatgaaatgtttggaaatgaatgctgtttttcaacaggagaagtgattaanattactggtctcanagttaagaagatcatagctgnaatttgtgagcagattgaaagtttgtgagtctct

SEQ ID NO: 61013 - DNA, 600 bp, Homo sapiens
  misc_feature 579, 597: n = A,T,C or G
ctccaccgcggtggcggccgagtacaaaggtagacccactggcaggaaagagaaagggttaagccctttgttttaaagataatttttggaagttgcatataccacttcttatattctatgatattagccagaatttagcttcaggtgaaactagaaattagatcctattctaggtaatcaagtatatagctaaggatttagaacaggaatcagcaaacttttatgtataaaacatctaggatagtagatattttgggctttgcaggccatatggtctctgtcgcatgtatttaagtatttgtgctgttatagttcaaaagcagccatacacaatatgtaaatgaatgagcatggctatgttccagtaaaactttattcagaaaaacaggtggtaggctaaatgtaactcagtggccacaatttgaactcctgttctgaaagataacaggtattgggagacagccagtggcctctgacactatgctattgccaagtgcagtatggaagcacaatgaaaaatagctttttgccaagtcaattactttcacttgaaaacactcttctggtagctgaccttanggtgactaaaaactgggnttt

SEQ ID NO: 61014 - DNA, 512 bp, Homo sapiens
  misc_feature 25, 344, 391, 409, 419, 431, 451, 460, 461, 466, 488: n = A,T,C or G
acacatgtatgtaaaggctagcagnataagaaccagtggaaaaactaaagttccctttgcacaccggcacctcatcacaacaccctcttggtgtggatgccatggggccatgctgtagtcaaaagttaaatgaaaaaccacaagtttagtttgactccgtctcctagggtggatttcattcagatatttgttccatattataggagggtggatccccgcgtacgcgggagaaataactttgcaaggagagccaaagctaagacccccgaaaccagacgagctacctaagaacagctaaaagagcacacccgtctatgtagcaaaaatagtgggaagatttatangtagaggcgacaaacctaccgagcctggtgatagctggttgtcccanataaaatttaattcaacntttaatttgnccacaaaacctnttaaatcccttggaaatttnactggtaannccaanaagaaaagctttttgacccttnggaaaaaaaaaaaaaaaaaaaaaa

SEQ ID NO: 61015 - DNA, 323 bp, Homo sapiens
  misc_feature 17, 18: n = A,T,C or G
ctccaccgcggtggcgnngccgaggtaccctttttttttttttttttttttttttttttttttttttttttttttttttttttttttttttttttttttttttttttttttttttttttttttttaaaaaaaaaccccccaaaaaaaaaaaaaaattttttcccccccccaaaaaaaaaatttttttttaaaaaaaaaaaaaaaaaaccccccggggggggggggggaaaaaaaaaaaaccccctttttttggaaggggggaaaaacccaaacaaaacccccgaaaaacaagaaaaaaaaaaaaaccccccccccaaaaaaaa

SEQ ID NO: 61016 - DNA, 197 bp, Homo sapiens
actcagtttggtcttctttcaggtgtaggataacttttgttccacgacccataggttcacctgtgtctgtcctcactgtgaatgatccccctgctgaggactcccaagcgtacgcggggctttttcgtctgagctgccaacatgccatccagactgaggaagacccggaaacttaggggccacgtgagccacggcca

SEQ ID NO: 61017 - DNA, 506 bp, Homo sapiens
actttttttttttttttttttttttttaaggggggggggggaaacctaaacccctttttaaagggggggcgtttttaagccccccagggggggaaaaatttttaccccttttaaaagggtttttcccaagggccaaaaaacctttcctttttggaccaaacattaaatttccaagggggtttaaaggggttttggggccaatttaaaggggaaaaaaaaattttttttggaaaacccctttttacccgggccgggggggttgccccccccccccaaaaaattcccccattttttgccaaaaaaaagggggggcccttttaaccttttttaaaaaaccccccggggttgggggggtttaactttggccccccctggaaaagttttttttggtaaatccttttcccaaaaggttgggggggaacccccgccatataaacccggggaaaaaattttaaatttcccccggggggaaatatatttttggccccgggttaaaattttttccc

SEQ ID NO: 61018 - DNA, 340 bp, Homo sapiens
  misc_feature 9, 21, 49, 55, 61, 67, 73, 79, 85, 96, 109, 118, 134, 145,161, 167, 179, 285: n = A,T,C or G
ggtaatgtnaatggaaacggnaatgcaatgggaatggtaatcatcaggnaatggnaatggnaatggnaatggnaatggnaatggnaatggaatggnaatcaccccgaantgcaatggnaatggagtggaatggnaatggaatggnaatggcaacaacccgnaatggnaatgggaatgtnaatggaaagtaagggagttgaaaagaatcaattccgaatgtaatgggaatgggaatggatcgggaatggaatggaatggaatggaatggaatgggaatggaatggnaatggaatgcaatggaatggaattcaacccgaattcaatggaacggtaatggaat

SEQ ID NO: 61019 - DNA, 495 bp, Homo sapiens
acagctaggagtccaaacccaggtctgactagttcttgaggctatattcttgtcactgcatacacctacaaagttcaattcctgaattagtttttctttaacagtaaaaagtaaaacaaaaattctaccttagtgaaacttctaggggtccagtgatctatctataaaatgtcaagataccccttccagggtaaaagataaagtgctgcatctaaccctcctaccactaaaatagaggcacaatgcccaggggatcctctttagattttagatgtaaaatacaccttattggggtggctattctgacccgtttgccagatgatgcaaagagctggcagtgtagaatatggcccagacaaaagaaggctcttcaatacgttcatgttgccatacaaactgctctgtcaattgggtcacataatctagcagatccaatggtgcttaaagtatcagtgatagatgaggttgatatttggcgcctttggcaagcttcat
